United States Patent Application Publication US 2025/0333808 A1 - sequence listing, part 5

SEQ ID NO: 65615 - DNA, 80 bp, synthetic construct
  source 1..80: mol_type = other DNA
gggacgccgccagtcgtggtgttgccccgcaaaatgcttataaactggcccttaaagacgagcttcgtccaatagaaaag

SEQ ID NO: 65616 - DNA, 80 bp, synthetic construct
  source 1..80: mol_type = other DNA
aaccagcaaggtaagcgtcggctgctgtggggatgtgatgctggtgcgactctagtcgcaacagcagctttcaagggaat

SEQ ID NO: 65617 - DNA, 80 bp, synthetic construct
  source 1..80: mol_type = other DNA
tgccacacgtttacaggctgttgcacctatgacacctgttggtgtcggcatcaacatggatagttatcaggtggaggtgc

SEQ ID NO: 65618 - DNA, 80 bp, synthetic construct
  source 1..80: mol_type = other DNA
gctgcgtctttgtcaatcctcgagcgattgtctgaggcaacaccaataacgacgtcagctgttgagttgctttcatcacc

SEQ ID NO: 65619 - DNA, 80 bp, synthetic construct
  source 1..80: mol_type = other DNA
tgcacgtggccatctgaacgacatagtgtttgtcacaaagtcagggcttccctcaggcatgccattcaccagtgttgtca

SEQ ID NO: 65620 - DNA, 80 bp, synthetic construct
  source 1..80: mol_type = other DNA
gtgttccaggtcgagactgtccacacttatggtgatgattgcatatattctctgtgtccagcaactgcctccatctttga

SEQ ID NO: 65621 - DNA, 80 bp, synthetic construct
  source 1..80: mol_type = other DNA
aggcacgaagggcccatgagagggagcgagcagacctctttaaggagctgcctttggttgatccggaggtgacacaacag

SEQ ID NO: 65622 - DNA, 80 bp, synthetic construct
  source 1..80: mol_type = other DNA
acaggctccggtcaagataatcccagtgaagagactaccaaattagtgtttgaaatggagggcaatgctcgccccgaggg

SEQ ID NO: 65623 - DNA, 80 bp, synthetic construct
  source 1..80: mol_type = other DNA
cacagccgctcattaacccttttcaaactggctcgatatccacgtgttggttgagtttcgagacacgccctggtccagac

SEQ ID NO: 65624 - DNA, 80 bp, synthetic construct
  source 1..80: mol_type = other DNA
tttgatttttgtctcctcaaagcacccgagcaggaaatggataatggtgtctctcctgcaaatttgctcccgcggcgcct

SEQ ID NO: 65625 - DNA, 80 bp, synthetic construct
  source 1..80: mol_type = other DNA
catcgtggaagaagaagttctcagaaccagcagagattgtgcgccaacttgtcgtgcacttttgcgaaggcatgcgcacg

SEQ ID NO: 65626 - DNA, 80 bp, synthetic construct
  source 1..80: mol_type = other DNA
taacatccctgccaaccaaatggcagttttcaacgtggaaactgctgggaacacgttccaaattggcatcctgccaaatg

SEQ ID NO: 65627 - DNA, 80 bp, synthetic construct
  source 1..80: mol_type = other DNA
caatttagtacaaatgccaattacatcaacctgtctctcttggctaaattgcgacccactgtcctgacaatgatactcca

SEQ ID NO: 65628 - DNA, 80 bp, synthetic construct
  source 1..80: mol_type = other DNA
tcatcaatccaaattatcaatctgcaccccctcgggttaatttaggtttccggcccccatccactaatgtgtaaatattc

SEQ ID NO: 65629 - DNA, 80 bp, synthetic construct
  source 1..80: mol_type = other DNA
gcaacacaaaaatacctaccgtgggtggttggccaccatcaccgctcttatcgaggtctactcgaatttgtttcaggaca

SEQ ID NO: 65630 - DNA, 80 bp, synthetic construct
  source 1..80: mol_type = other DNA
cccacctcagggtgagtgggagggaggaaatttttgaaacaaaacatgacatgtacgctcatgtctgccagttggttgcc

SEQ ID NO: 65631 - DNA, 80 bp, synthetic construct
  source 1..80: mol_type = other DNA
gcgtgaaactgcagtgtctgcagtatctgcagtcacgctcctctttgaatcattaaaacaattcattgaaggggttatag

SEQ ID NO: 65632 - DNA, 80 bp, synthetic construct
  source 1..80: mol_type = other DNA
acctggtcaaaggcacttttcaagcgcagggtcccactaactgtggatgggctgccattgccgctggtgtcatcttaatt

SEQ ID NO: 65633 - DNA, 80 bp, synthetic construct
  source 1..80: mol_type = other DNA
cttctgaaagtgtctggctgccctaatgccatgggttactggcaacggttgttgaaggtttgtgctggtgtcacaaccat

SEQ ID NO: 65634 - DNA, 80 bp, synthetic construct
  source 1..80: mol_type = other DNA
tgctgctgctgccagggcctttgcttgggtgcgggacattatagtggaggctgaaagaaaggcccgcttaaagaagtaca

SEQ ID NO: 65635 - DNA, 80 bp, synthetic construct
  source 1..80: mol_type = other DNA
tggcgcgcacatctgccctgttggaacttgctgcgtcaagagatgtcacaggaactgaggagctgaaacggttgttggaa

SEQ ID NO: 65636 - DNA, 80 bp, synthetic construct
  source 1..80: mol_type = other DNA
tgtttcacccagctcatagaggaaggtactgagttgatacaggaatttggaacgtcacctatggcggggttaacacgctc

SEQ ID NO: 65637 - DNA, 80 bp, synthetic construct
  source 1..80: mol_type = other DNA
ctgtaattctgactggacctccgggtataggaaaaacacacctcgcacagcacttggcagcaggctttggcaaaacatct

SEQ ID NO: 65638 - DNA, 80 bp, synthetic construct
  source 1..80: mol_type = other DNA
aatttctctgtcacacttgaccatcatgattcctacacgggcaacgatgttgccatttgggatgagtttgatgtggatgc

SEQ ID NO: 65639 - DNA, 80 bp, synthetic construct
  source 1..80: mol_type = other DNA
cggggtgcggcgagcaattcttcgtcgcacccctgtctatcatccttccttttctgaggagggcctgctagatgcctttg

SEQ ID NO: 65640 - DNA, 80 bp, synthetic construct
  source 1..80: mol_type = other DNA
aaggcaaggtattcacatctaattacatcatctgcacaagcaattaccccacctctgtgttgcctgaaaaccctagggca

SEQ ID NO: 65641 - DNA, 80 bp, synthetic construct
  source 1..80: mol_type = other DNA
ggagcattctaccgccgagtcacaaccgtcgacgtgtcatccccagttattgacgattggaagaagaaaaatccagggaa

SEQ ID NO: 65642 - DNA, 80 bp, synthetic construct
  source 1..80: mol_type = other DNA
gaagcctccccaggacctgtacaagaaggatttctcccatttgcgcctgtctgtgcgaccttatcttgggtataaccctg

SEQ ID NO: 65643 - DNA, 80 bp, synthetic construct
  source 1..80: mol_type = other DNA
agggagacacgctcgagggcgttcgggtaaaacctattctgaccagtgtggatggcctctctcgcctcatggaaaccaag

SEQ ID NO: 65644 - DNA, 80 bp, synthetic construct
  source 1..80: mol_type = other DNA
ttcaaggaacaaggcaatgagttgcgcaatctgtggatcacgtgcccacgagacctcgtaacacctgcggcctcgggatt

SEQ ID NO: 65645 - DNA, 80 bp, synthetic construct
  source 1..80: mol_type = other DNA
gaagtcatacatggcagcaaatagagccctggcccaagtcttttcagagccgtcatccaacgaaattgctgaaacctgta

SEQ ID NO: 65646 - DNA, 80 bp, synthetic construct
  source 1..80: mol_type = other DNA
catcgagggtgtttgtttcggccaacaaccctccacccactttcgttggcaggcacgtgaaaattacggccatcaatcca

SEQ ID NO: 65647 - DNA, 80 bp, synthetic construct
  source 1..80: mol_type = other DNA
tgggatgcatcacttgccaattcaatgctctcaatgtttgaaacaaacactcatatacctgcagccattcagagggaaat

SEQ ID NO: 65648 - DNA, 80 bp, synthetic construct
  source 1..80: mol_type = other DNA
ttatgtatcgtgtttggactcccctaattcatatgcaaactcgtgagcccaacacacaaatgctcccctacatcaaccgg

SEQ ID NO: 65649 - DNA, 80 bp, synthetic construct
  source 1..80: mol_type = other DNA
cctccaaaccaccagttgatataaatcctgacaccacgtttcgtgaactgtttggggtggacccgcacgagcagttccca

SEQ ID NO: 65650 - DNA, 80 bp, synthetic construct
  source 1..80: mol_type = other DNA
gtcgttcccgtttcatcatcctttgattttgtgcgtgggctgcgccaccacctcgggttgtgttccatcaaggggatgtg

SEQ ID NO: 65651 - DNA, 80 bp, synthetic construct
  source 1..80: mol_type = other DNA
gaaggcctaccaggggtggcacagctccgcaacaattctagagttcttgtcaaaacacatggaggatgtgacattccctt

SEQ ID NO: 65652 - DNA, 80 bp, synthetic construct
  source 1..80: mol_type = other DNA
acgctgcgtctgcttgtggagacaatcaccgaaagcttagcccactttggtccactgctcttgatggtacacaatgtcac

SEQ ID NO: 65653 - DNA, 80 bp, synthetic construct
  source 1..80: mol_type = other DNA
ttagcccactttggtccactgctcttgatggtacacaatgtcacttacttaacaactcggtcacagcgtgatgaagaggc

SEQ ID NO: 65654 - DNA, 80 bp, synthetic construct
  source 1..80: mol_type = other DNA
ttacttaacaactcggtcacagcgtgatgaagaggctaagggcaaaaccaagcatggcaggggggcaagacatgccagac

SEQ ID NO: 65655 - DNA, 80 bp, synthetic construct
  source 1..80: mol_type = other DNA
gtggtggggtgagcttatctgatgatgaatatgatgagtggcgagaccttgtgcgtgactggagacaagacatgactgtt

SEQ ID NO: 65656 - DNA, 80 bp, synthetic construct
  source 1..80: mol_type = other DNA
ttggggagtttgttgaactgcgtgaacgttacgctctgggtatggactcagaagacgtgcagcgctatcgtgcctggctc

SEQ ID NO: 65657 - DNA, 80 bp, synthetic construct
  source 1..80: mol_type = other DNA
cagttacgagcaatgcgcatgggtgccggggcctaccaacacgcaaccatcataggccgagggcgtgtcgaggacaccat

SEQ ID NO: 65658 - DNA, 80 bp, synthetic construct
  source 1..80: mol_type = other DNA
cattcgcacgcagcccatgcgcgccccccgcgcaccacgctcacccgagtatgatgaagaggcacccacaccaatagtta

SEQ ID NO: 65659 - DNA, 80 bp, synthetic construct
  source 1..80: mol_type = other DNA
ccttcactagcaatggtgaacacgttggttatgggtgtcacgtgggcaacggcgtcgtgattacagtcacccacgtagct

SEQ ID NO: 65660 - DNA, 80 bp, synthetic construct
  source 1..80: mol_type = other DNA
gctgctgcggatgccgttgagggtctggagttctctgtgaggaagactgaaggtgaaacaacttgggttaacacacccct

SEQ ID NO: 65661 - DNA, 80 bp, synthetic construct
  source 1..80: mol_type = other DNA
gtcaattgccacactaccagttgggtgatggagtgcctgtgtactactccacacggttgcaccctgtgacaacaattgcg

SEQ ID NO: 65662 - DNA, 80 bp, synthetic construct
  source 1..80: mol_type = other DNA
gagggcacatacgaaacccccaacatcactgtccatggttaccatctacggatcatcaatggttacccaacaaagcgtgg

SEQ ID NO: 65663 - DNA, 80 bp, synthetic construct
  source 1..80: mol_type = other DNA
agttggcacaaaaagtgagccgagtttcaaaggttgagaatgctttcgcatggaaaggtctccctgtcattcgaggccca

SEQ ID NO: 65664 - DNA, 80 bp, synthetic construct
  source 1..80: mol_type = other DNA
gactgtggaggaatgcccaccgggactaggtatcacaggtctccagcttggcctgagcaacagccaagcgagacacatgc

SEQ ID NO: 65665 - DNA, 80 bp, synthetic construct
  source 1..80: mol_type = other DNA
ccgagcccaccccgggaatcccccccgcacttttacaacgtgctgccacacacacccgaacctaccttgagtcaatagta

SEQ ID NO: 65666 - DNA, 80 bp, synthetic construct
  source 1..80: mol_type = other DNA
ggcactcatcggtcacctaacctgaccttcagtgaggcatgtgctctcctggatcgcggtacatcctgtggtccattcat

SEQ ID NO: 65667 - DNA, 80 bp, synthetic construct
  source 1..80: mol_type = other DNA
tgcaggccaaaaaggggattattgggatgaagatcggcagtgttatactggtgtgttggccgaacatctcaccaaggcat

SEQ ID NO: 65668 - DNA, 80 bp, synthetic construct
  source 1..80: mol_type = other DNA
gggacgccgcaaaccgtggtgtggcgccgcaaaatgcgtacaaattggccctcaaagatgagctacgaccaatagaaaag

SEQ ID NO: 65669 - DNA, 80 bp, synthetic construct
  source 1..80: mol_type = other DNA
aaccaacagggtaagcggcgccttttatggggttgtgatgctggagcaactctcatagcaaccgcggcatttaagggtgt

SEQ ID NO: 65670 - DNA, 80 bp, synthetic construct
  source 1..80: mol_type = other DNA
tcaacgaatctttgaaggggggggtagtgttttgccttgattacagcaaatgggactccacacaacaccctgcagtaaca

SEQ ID NO: 65671 - DNA, 80 bp, synthetic construct
  source 1..80: mol_type = other DNA
tgccttgattacagcaaatgggactccacacaacaccctgcagtaacagcagcctctttgtctatacttgagcgcctgtc

SEQ ID NO: 65672 - DNA, 80 bp, synthetic construct
  source 1..80: mol_type = other DNA
gcagcctctttgtctatacttgagcgcctgtcagaagcaactccaattacaacatcagctgtggaattgctttcatcacc

SEQ ID NO: 65673 - DNA, 80 bp, synthetic construct
  source 1..80: mol_type = other DNA
agcgcgcggccatttgaacgatattattttcatcacaaagtccggcctcccctcaggcatgcccttcactagtgttgtta

SEQ ID NO: 65674 - DNA, 80 bp, synthetic construct
  source 1..80: mol_type = other DNA
actccctcaaccatatgacctactttgcagctgcggtgctaaaggcctatgaacaacatggggcaccatacaccggtaat

SEQ ID NO: 65675 - DNA, 80 bp, synthetic construct
  source 1..80: mol_type = other DNA
gacggtcttggccaatttgagtgcctttggtttgcgacccacggctgcagacaaaacagataaaatagcccctacacaca

SEQ ID NO: 65676 - DNA, 80 bp, synthetic construct
  source 1..80: mol_type = other DNA
aggctcgtcgggcctttgaaagggaacgagcagaccttttcaaagagttgcccttggttgacccggaggtcacccagcag

SEQ ID NO: 65677 - DNA, 80 bp, synthetic construct
  source 1..80: mol_type = other DNA
cacccgtcttcctcaagcgcacgttaacttgcacacctaggggaattcgcgggctgcttgatattacatcaatcaagcga

SEQ ID NO: 65678 - DNA, 80 bp, synthetic construct
  source 1..80: mol_type = other DNA
cagttttattggatcaaggcaaaccgcactactgatgtggcatcccccccagcatatgacagggaagcccggagtgttca

SEQ ID NO: 65679 - DNA, 80 bp, synthetic construct
  source 1..80: mol_type = other DNA
acaggctctagtcatgatggtcccagtgaagaaaccaccaaattagtgtttgaaatggagggcttgggccaaccacccca

SEQ ID NO: 65680 - DNA, 80 bp, synthetic construct
  source 1..80: mol_type = other DNA
aaagggtctcaattcccctgtggaacagaagacacaagtggtgacaccacaagacacaatatcgccaactgaggcattgc

SEQ ID NO: 65681 - DNA, 80 bp, synthetic construct
  source 1..80: mol_type = other DNA
tactccccactcaggtggaaatgccaaatgcaggggctcaacgccttgagatggctgccgccacaggggctatgacatca

SEQ ID NO: 65682 - DNA, 80 bp, synthetic construct
  source 1..80: mol_type = other DNA
aacgtcccaatgtgtgtgcgcgagtgttttgcagctgtaacaaccatcccgtggaacactcgccaggcagcaaacacctt

SEQ ID NO: 65683 - DNA, 80 bp, synthetic construct
  source 1..80: mol_type = other DNA
cttgggtgcagtgcatctgggacctcggctcaacccgtacactgcacatcttagcgcaatgtacgcgggttggcgtggta

SEQ ID NO: 65684 - DNA, 80 bp, synthetic construct
  source 1..80: mol_type = other DNA
gcttccagatccgtgtcaccttgtctggttcgggtatctacgccggccgtgctgtctgcgcagttctaccaccaggagtt

SEQ ID NO: 65685 - DNA, 80 bp, synthetic construct
  source 1..80: mol_type = other DNA
caaaagtcttacttttatgccatgtggcgacaggtggtcaagaaaggcaaggaattctttataccgttggtcaagtgcac

SEQ ID NO: 65686 - DNA, 80 bp, synthetic construct
  source 1..80: mol_type = other DNA
aaccctgcaaatgtccagaaccccggtgttttcccccatgccttcattgatgccagaactgttgaccctgtgctcatcaa

SEQ ID NO: 65687 - DNA, 80 bp, synthetic construct
  source 1..80: mol_type = other DNA
cctcccagacattagggccacagattttcaccgtgtggatggggatgaagccacagccaccgtgggtttgtgggttgcac

SEQ ID NO: 65688 - DNA, 80 bp, synthetic construct
  source 1..80: mol_type = other DNA
aacctttgataaaccctttcaacactggatctgccgtgtccacctgttggctgtcctttgaaactcgtccggggcctgac

SEQ ID NO: 65689 - DNA, 80 bp, synthetic construct
  source 1..80: mol_type = other DNA
tttgacttctgtctcctaaaagcaccagatcaggagatggacaatggtgtgtctcctgccggcttactccctcggcggct

SEQ ID NO: 65690 - DNA, 80 bp, synthetic construct
  source 1..80: mol_type = other DNA
tggccgttctcgaggtaaccggcttgggggccgcatagtcaagttggtggttgtggcagcagcacatcaagtgaaccacc

SEQ ID NO: 65691 - DNA, 80 bp, synthetic construct
  source 1..80: mol_type = other DNA
actttgctgctaatagcaccactttgggctggtcttctatgccacttgaaccagtggcgggtcatgtgacatggtacaca

SEQ ID NO: 65692 - DNA, 80 bp, synthetic construct
  source 1..80: mol_type = other DNA
acaacaacatcagaaaagcgctatggtctgctcagtgctgaaagcaaaggcatcattttccccaacatagtcaaccactg

SEQ ID NO: 65693 - DNA, 80 bp, synthetic construct
  source 1..80: mol_type = other DNA
gcctgacactgccatgtccactgtcacatctatcaactctagcatcccaacaagtgcttttgacaactatgtgggcagtg

SEQ ID NO: 65694 - DNA, 80 bp, synthetic construct
  source 1..80: mol_type = other DNA
ctggtcctgttgtcaccttccaggacaatggtgacgtggatgaagccaacggtcaaaatgggctgtttacagctgcaaat

SEQ ID NO: 65695 - DNA, 80 bp, synthetic construct
  source 1..80: mol_type = other DNA
gtcaacttcaccagcttgtcagactcatttgatgctgctagcacctatatctatctgccctggatgtcaagaaccccaac

SEQ ID NO: 65696 - DNA, 80 bp, synthetic construct
  source 1..80: mol_type = other DNA
tgaccgaaatgtgtacatcaaacccacttggatcaatggctccacctcacgcccaattcgtgaaaagtgcaccaacatgc

SEQ ID NO: 65697 - DNA, 80 bp, synthetic construct
  source 1..80: mol_type = other DNA
gtggcaccaattaccattttggtggcactggcatggcaaacattgtcttgtggcaggagcaggacttcacatcgtggcct

SEQ ID NO: 65698 - DNA, 80 bp, synthetic construct
  source 1..80: mol_type = other DNA
ggggctgctgaggtgtactgttcacaactggagtccactgcagaaatgtttcaaaacaatatagtgaacattccaacaaa

SEQ ID NO: 65699 - DNA, 80 bp, synthetic construct
  source 1..80: mol_type = other DNA
ccacggcacctgttggtactgttgttgaacttgacccagaaactggtttccgatttgtcggacttttcccccaatccact

SEQ ID NO: 65700 - DNA, 80 bp, synthetic construct
  source 1..80: mol_type = other DNA
tctcttcaggggccccatgggaataatggacgggccgtcaggttccttgaataatgtcttggtcccaaggactagcttta

SEQ ID NO: 65701 - DNA, 80 bp, synthetic construct
  source 1..80: mol_type = other DNA
gcagcgggttccatagtggatatggccggtaccatatccggtatagtggcacaacaacgccaagctgccgctatggaaga

SEQ ID NO: 65702 - DNA, 80 bp, synthetic construct
  source 1..80: mol_type = other DNA
agctaaccgcattcaggctgattgggtccgacgacaggaaaaattggcataccgtgctcaggacatctctgctgatttgg

SEQ ID NO: 65703 - DNA, 80 bp, synthetic construct
  source 1..80: mol_type = other DNA
ccgttaatggggtcgctcgcaaggtggactctttggtccaggcagggttcacgccccttgatgctcggagacttgctggg

SEQ ID NO: 65704 - DNA, 80 bp, synthetic construct
  source 1..80: mol_type = other DNA
ggtacggaagttgttcttcatggaaccatagagcggcctgtgctcccccgcactgtactccagggcattgcggacacaca

SEQ ID NO: 65705 - DNA, 80 bp, synthetic construct
  source 1..80: mol_type = other DNA
aatttagcacgaatgcccactacatcaacttgtcactgctggcaaaactcagacccacggtcctaacaatgatattccaa

SEQ ID NO: 65706 - DNA, 80 bp, synthetic construct
  source 1..80: mol_type = other DNA
ccacatgcaaagcaacatcaatgctgtccgtgcttttaattatggcaccccaactggcacaccgccaccaccacctggat

SEQ ID NO: 65707 - DNA, 80 bp, synthetic construct
  source 1..80: mol_type = other DNA
tcaacaacccaaactatcgtggtggccctccaaaagtcaatcttggctatcgcccccctacaacaaatgtctgaaatcag

SEQ ID NO: 65708 - DNA, 80 bp, synthetic construct
  source 1..80: mol_type = other DNA
tgcctttctttgattttctcctttcttttctttctttttcctaacagtttcacacgcgttcgggtgaataatattggtta

SEQ ID NO: 65709 - DNA, 80 bp, synthetic construct
  source 1..80: mol_type = other DNA
tttctttctttttcctaacagtttcacacgcgttcgggtgaataatattggttaagcgaccaatgctgtttgcttctggg

SEQ ID NO: 65710 - DNA, 80 bp, synthetic construct
  source 1..80: mol_type = other DNA
gctcacctcagggtgagagggagagaggaaatttttgaaaccaaacatgatctgcatgttcatgtccaacaggtaatttc

SEQ ID NO: 65711 - DNA, 80 bp, synthetic construct
  source 1..80: mol_type = other DNA
caacataagaacacttatcgtggctggcttgcaaccatgacagctttggttgaggtgtactccaatttgtttcaagatat

SEQ ID NO: 65712 - DNA, 80 bp, synthetic construct
  source 1..80: mol_type = other DNA
gcgagagaccgcggtttctgcggtatccgccatcacactcctctttgagtcactaaagcagtttatagaaggtgtcatag

SEQ ID NO: 65713 - DNA, 80 bp, synthetic construct
  source 1..80: mol_type = other DNA
atttggttaagggcactttccaagctcaggggcctaccaattgtggttgggccgcaattgcagctggtgtcattctcata

SEQ ID NO: 65714 - DNA, 80 bp, synthetic construct
  source 1..80: mol_type = other DNA
cctgattgagttggcagcgagcagggaggtgactggagttaaggagttgaaggagctcctcagttgcttcaccgttctca

SEQ ID NO: 65715 - DNA, 80 bp, synthetic construct
  source 1..80: mol_type = other DNA
tagaggaaggtgccgaacttttgcaaaagtttggcacaagccccctttctggccttatccgcacatatgtgtcagaattg

SEQ ID NO: 65716 - DNA, 80 bp, synthetic construct
  source 1..80: mol_type = other DNA
gaaacccaagcaaacaacatcagatccaccatcatgctagacacacctcgtgatgttccagtggtcattatcttaactgg

SEQ ID NO: 65717 - DNA, 80 bp, synthetic construct
  source 1..80: mol_type = other DNA
gccaccaggtattggtaagacacggttggcccagtttataggagaaaaatttggcaaagtgtccaactttagtgttgcgg

SEQ ID NO: 65718 - DNA, 80 bp, synthetic construct
  source 1..80: mol_type = other DNA
aagcgtgtcactaggaccctccctgggagggagtttgtggaggagggtctccttgacgcgtttaatagcaaaccagtggt

SEQ ID NO: 65719 - DNA, 80 bp, synthetic construct
  source 1..80: mol_type = other DNA
gagacgatgattggcattgccaacacagcaccgtttccacttaattgtgaccgtgtggaaaacaaaggtagggtgtttac

SEQ ID NO: 65720 - DNA, 80 bp, synthetic construct
  source 1..80: mol_type = other DNA
ttcaaattatgtcatttgcacatcaaactaccccacgtctgtcatcccagagaacccacgtgccccggccttttaccgtc

SEQ ID NO: 65721 - DNA, 80 bp, synthetic construct
  source 1..80: mol_type = other DNA
gagttatcatcttggatgtctcatctccagaacttgatgagtggaaaaagaaaaatcctggaaagaagcccccttctgac

SEQ ID NO: 65722 - DNA, 80 bp, synthetic construct
  source 1..80: mol_type = other DNA
ttgtataagcaagacttctcgcacctaaagttgatgctccgcccttaccttgggtacaaccccgaaggggacacacttga

SEQ ID NO: 65723 - DNA, 80 bp, synthetic construct
  source 1..80: mol_type = other DNA
cggcaccagagtcaaacctacccaaatatccatcccaagtttgatctcactcatgcaaaagaggtttaaggaacaatcag

SEQ ID NO: 65724 - DNA, 80 bp, synthetic construct
  source 1..80: mol_type = other DNA
gggaaaaccagaatctatggatgcaagttcctaggggagctgttgatcaagcatctaatatgataaaaacctttgtgtat

SEQ ID NO: 65725 - DNA, 80 bp, synthetic construct
  source 1..80: mol_type = other DNA
gctaatcgtggtgtgtgtgacgtcattccaaaccctgcctcccgtgatatcacagagacatctgtatcaaaaatttttgt

SEQ ID NO: 65726 - DNA, 80 bp, synthetic construct
  source 1..80: mol_type = other DNA
ttcctcaacagccccaccaccagagttcttaggccgccatgtggtcatcactgggtttgaacttggggatgcatccatag

SEQ ID NO: 65727 - DNA, 80 bp, synthetic construct
  source 1..80: mol_type = other DNA
caaactctctgctgtccatgttttccacaagcacacgtctcactgctggtgcacagcgagagtatatgtacagaatttgg

SEQ ID NO: 65728 - DNA, 80 bp, synthetic construct
  source 1..80: mol_type = other DNA
aatcctattatccacatccaagagaggtccattaacacacaaaatcttccatatgttaaccgcgtgatcccagttacatc

SEQ ID NO: 65729 - DNA, 80 bp, synthetic construct
  source 1..80: mol_type = other DNA
tcactgggatttcttacgtggtttgagacaccaccttggtttggtgtccatccctggaatgtggagagcgtttcaggggt

SEQ ID NO: 65730 - DNA, 80 bp, synthetic construct
  source 1..80: mol_type = other DNA
ggcgatcatctcaaggtatcattgactttgttgcaaaccacatgaatgaagtcacattccccagtaacccagaatgcact

SEQ ID NO: 65731 - DNA, 80 bp, synthetic construct
  source 1..80: mol_type = other DNA
gagatacgtgccatgcggttagcaggtggtgcttatacccacgccacagtaattggcaaaggtggtgtgcgagaagagat

SEQ ID NO: 65732 - DNA, 80 bp, synthetic construct
  source 1..80: mol_type = other DNA
agtttacccatgaaggcgaccacatagggtatggagttcaccttggcaacggtagagtggtcactgttacccatgttgca

SEQ ID NO: 65733 - DNA, 80 bp, synthetic construct
  source 1..80: mol_type = other DNA
ttgccaagttacaaggtgaggcggtggatgccttgcgtaatcctgggcatcaactgcgtaggaagtatacaacagaagtc

SEQ ID NO: 65734 - DNA, 80 bp, synthetic construct
  source 1..80: mol_type = other DNA
tcatcatcagacagtgttgagggagctcctttcaaggttcaaaggactgttggtgaaaccacttggattgaaacacagct

SEQ ID NO: 65735 - DNA, 80 bp, synthetic construct
  source 1..80: mol_type = other DNA
cggaaggcacctttgagaccccaaatatcactgttcacggtttccatgttcgcatcacaaatgggtaccaaactaggaag

SEQ ID NO: 65736 - DNA, 80 bp, synthetic construct
  source 1..80: mol_type = other DNA
ggtgattgtggactgccttacttgaacgccaaccgacaggtggtgggattgcatgctggcaccgatgttcaaggagaaac

SEQ ID NO: 65737 - DNA, 80 bp, synthetic construct
  source 1..80: mol_type = other DNA
caaattggcacaaaaagtggttaaggaattgcctgtggagagcgaatttcaatggaagggtctcccagttatcaaatctg

SEQ ID NO: 65738 - DNA, 80 bp, synthetic construct
  source 1..80: mol_type = other DNA
tatgctcccgccccctttggtgctggtgacaagcgctatcacttctcccagactgagatgttggtgaatgccctcaagcc

SEQ ID NO: 65739 - DNA, 80 bp, synthetic construct
  source 1..80: mol_type = other DNA
tcattggcacgcaccgttctcctgtgctcaccttcacccaggcagttgagttacttgaaaaatccacctcatgtggcccg

SEQ ID NO: 65740 - DNA, 80 bp, synthetic construct
  source 1..80: mol_type = other DNA
aaaagaataaagaagggaagaggcggctgctatggggctgtgacgccgcaacgactctgattgcagtagcggcgttcaag

SEQ ID NO: 65741 - DNA, 80 bp, synthetic construct
  source 1..80: mol_type = other DNA
actcaatgtggcgtcaggttgtgaagaaaagcaaggcctacttcatgccacttgtgaagacaaatgggtgggttagtaaa

SEQ ID NO: 65742 - DNA, 80 bp, synthetic construct
  source 1..80: mol_type = other DNA
atcacaaaaattactgaccccatcaaagatttcatcatagctttttgccaggcagtccagcaagagatggggacggatcc

SEQ ID NO: 65743 - DNA, 80 bp, synthetic construct
  source 1..80: mol_type = other DNA
acggtatttacagctagcttggattcagaagctgaaaccaaccgtgctcaccatcattctacaacaacacaaaaacactg

SEQ ID NO: 65744 - DNA, 80 bp, synthetic construct
  source 1..80: mol_type = other DNA
attataaattttcttttcttttgaagtgatgccacacgcgttcgggttggttaaatgtgattaagcgatcacagtcacta

SEQ ID NO: 65745 - DNA, 80 bp, synthetic construct
  source 1..80: mol_type = other DNA
tgtcggggtggttggcaacattaacagctctagtggaagtttactccaacctttttgatgatctgcgcaagtctgccgtt

SEQ ID NO: 65746 - DNA, 80 bp, synthetic construct
  source 1..80: mol_type = other DNA
accatcatatcggcattaagtgctttcttcgatgtgtgtaaggacttcattgccagtgttgttgatttgatcaaaaccac

SEQ ID NO: 65747 - DNA, 80 bp, synthetic construct
  source 1..80: mol_type = other DNA
attcacacctcagggccccactgaccttggatggaccgcagtcatggctggagcagtcatgattttactaaaggcttctg

SEQ ID NO: 65748 - DNA, 80 bp, synthetic construct
  source 1..80: mol_type = other DNA
caattaacccatttgagttcaaccgtaaggttgaaacaacagtcctcttctctgctcacctcagggtgagcgggagagag

SEQ ID NO: 65749 - DNA, 80 bp, synthetic construct
  source 1..80: mol_type = other DNA
aaatttttgaaaccaaacaggacatgtgtgcccatgttcgccaagtggtcgccggggtgcggcgcgagataatgcgtcgc

SEQ ID NO: 65750 - DNA, 80 bp, synthetic construct
  source 1..80: mol_type = other DNA
aatcccccctccttctttcaatcggctttattttcttttctttccaagtggttcctcacgcgttcgggtggacaattgtg

SEQ ID NO: 65751 - DNA, 80 bp, synthetic construct
  source 1..80: mol_type = other DNA
gcgagacactgctgtgtcggcagtgtcagccattacactagtgtttgaaaccatcaaggactttgtggtcaacgtaatag

SEQ ID NO: 65752 - DNA, 80 bp, synthetic construct
  source 1..80: mol_type = other DNA
aaacttctctgtcacgcttgatcatcatgactcctatacaggcaatgatgtggccatctgggacgagtttgatgtggatg

SEQ ID NO: 65753 - DNA, 80 bp, synthetic construct
  source 1..80: mol_type = other DNA
agctggcacagaaggtcagtcgggtttcgaaggtggaaaatgcttttgcctggaagggtttgcctgtcttacggggccct

SEQ ID NO: 65754 - DNA, 80 bp, synthetic construct
  source 1..80: mol_type = other DNA
cctgattgtggtggcatgcccacaggtacaaggtaccatcggtctccagcctggccagaacagctctcgagtgaaaccca

SEQ ID NO: 65755 - DNA, 80 bp, synthetic construct
  source 1..80: mol_type = other DNA
tgccccagccccgtttggtgccggtgacccccgttataatttctcccaagtggaaatgttggtcacaggattgaaacctt

SEQ ID NO: 65756 - DNA, 80 bp, synthetic construct
  source 1..80: mol_type = other DNA
aggcacgaagggcacatgagagggagcgagcggatctatttaaggaactaccgttagttgatcctgaagtgacccagcaa

SEQ ID NO: 65757 - DNA, 80 bp, synthetic construct
  source 1..80: mol_type = other DNA
tcttgctgtcaatggaacggcgcaacgcgtcgactcgctggttaaggcggggtttacccctgttgatgctcgcagattgg

SEQ ID NO: 65758 - DNA, 80 bp, synthetic construct
  source 1..80: mol_type = other DNA
gatgattgggtttcttaaaataatcaaattttcatttattcatgctttcctcacttttcttttcttttcccatggtacca

SEQ ID NO: 65759 - DNA, 80 bp, synthetic construct
  source 1..80: mol_type = other DNA
ccctggtgtgtcgggcatgtggggtaaaatactcaaggtgtgcggtggcatcacaaccataaccgctgccatacggtgta

SEQ ID NO: 65760 - DNA, 80 bp, synthetic construct
  source 1..80: mol_type = other DNA
tcaagtggctcagagaactatatgaagaggctgaaagtaaaaggctcgccaagatgtacatggctagggcagcagcccta

SEQ ID NO: 65761 - DNA, 80 bp, synthetic construct
  source 1..80: mol_type = other DNA
attgagttggcagcaagcagggaagtgactggggttaaggagttgaaggagctcctcagttgctttaccgtcctcataga

SEQ ID NO: 65762 - DNA, 80 bp, synthetic construct
  source 1..80: mol_type = other DNA
ggagggtgctgaacttctacaaaagttcggcacaagccccctttctggccttatacgcacatatgtctcagaattggaaa

SEQ ID NO: 65763 - DNA, 80 bp, synthetic construct
  source 1..80: mol_type = other DNA
cccaagcaaacaacatcagatctaccatcatgctagacacacctcgtgaggttccagtagtcattatcttgactggacca

SEQ ID NO: 65764 - DNA, 80 bp, synthetic construct
  source 1..80: mol_type = other DNA
ccaggtattggtaagacacggttggcccagtttataggggaaaaatttggtaaagtgtccaacttcagtgttgcagtaga

SEQ ID NO: 65765 - DNA, 80 bp, synthetic construct
  source 1..80: mol_type = other DNA
tcaccatgatggttatacaggcaacccagtgtgcatatgggatgagtttgatgtggacgcaaaaggtagttttgtggaaa

SEQ ID NO: 65766 - DNA, 80 bp, synthetic construct
  source 1..80: mol_type = other DNA
gtgtcactaggaccctccccaggagggagtttgtggaggagggtctccttgacgcgtttaacagtaagccagtggttgaa

SEQ ID NO: 65767 - DNA, 80 bp, synthetic construct
  source 1..80: mol_type = other DNA
cctaatgaggacattctctttagagaactctttggggtggacttgcaggaacagttcccaatgtcaattcatgacctcgc

SEQ ID NO: 65768 - DNA, 80 bp, synthetic construct
  source 1..80: mol_type = other DNA
caaattacaaggtgaggcggtggatgccttgcgtaatcctggacatcaattacgtaggaagtatacaacacaaaccctaa

SEQ ID NO: 65769 - DNA, 80 bp, synthetic construct
  source 1..80: mol_type = other DNA
ggctacaactcatgtgcgtgcttaccttgaaacaattataggcacacaccgttctcctgtgctcaccttcacccaagcag

SEQ ID NO: 65770 - DNA, 80 bp, synthetic construct
  source 1..80: mol_type = other DNA
ttgagttgcttgaaaaatccacctcatgtggcccattcatacaaggactaaaaggagactattgggatgatgaaacacaa

SEQ ID NO: 65771 - DNA, 80 bp, synthetic construct
  source 1..80: mol_type = other DNA
agaaactggttaccaaaattacaagggtggtacctgtccaggccaccctacaagacatgcatgagcggcgcgattttgaa

SEQ ID NO: 65772 - DNA, 80 bp, synthetic construct
  source 1..80: mol_type = other DNA
caatacactggggccctacgtgaacatttagacagagcatgggatcatgctgtcaggggcattgcaccagggaactctta

SEQ ID NO: 65773 - DNA, 80 bp, synthetic construct
  source 1..80: mol_type = other DNA
caaattggcacttaaggatgaactccgtcctgaggaaaagaataaagaagggaagaggcggctgctgtggggctgtgacg

SEQ ID NO: 65774 - DNA, 80 bp, synthetic construct
  source 1..80: mol_type = other DNA
ccgcaacaactctaattgcagtggcggcgtttaagccagtggccgcacgcttacaagtggtgacaccaatgactccaatt

SEQ ID NO: 65775 - DNA, 80 bp, synthetic construct
  source 1..80: mol_type = other DNA
agggaacgtgccgacttgttcaaagaactacccctgttagatgaagaggtaacacaaaaacccaagacatatttttattc

SEQ ID NO: 65776 - DNA, 80 bp, synthetic construct
  source 1..80: mol_type = other DNA
aatgtggcgtcaagttgtaaagaaaggtaagacctacttcatgccactcgtaaagacaaatgggtgggttagtaaaatca

SEQ ID NO: 65777 - DNA, 80 bp, synthetic construct
  source 1..80: mol_type = other DNA
caaaaatcactgaccccattaaagatttcattatagctttttgccaggcagtccaacaagagatggggacggatccacgg

SEQ ID NO: 65778 - DNA, 80 bp, synthetic construct
  source 1..80: mol_type = other DNA
agcacctcgggaaacatttgtagaggattttaaagaattagaatattatttcaccacgcgcttgtgcgcgtggttaaagc

SEQ ID NO: 65779 - DNA, 80 bp, synthetic construct
  source 1..80: mol_type = other DNA
agggtggttggcgacactaacggctctagtggaagtttactccaacctttttgatgatttgcgcaagtctgccgttacca

SEQ ID NO: 65780 - DNA, 80 bp, synthetic construct
  source 1..80: mol_type = other DNA
acacctcagggccctactgaccttggatggaccgcagttgcggctggagcagtcatgattctactaaaggcttctggttg

SEQ ID NO: 65781 - DNA, 80 bp, synthetic construct
  source 1..80: mol_type = other DNA
ataggttgacgacacgtgaaattgaacaagttgaattattgaaaaggatacatgatatgttaattattaaaccaattgag

SEQ ID NO: 65782 - DNA, 80 bp, synthetic construct
  source 1..80: mol_type = other DNA
aaaatagatatgtctaaagaattcaatcagaagcaattcaaaacgctagatgaatggacagatggtgaaaatccatataa

SEQ ID NO: 65783 - DNA, 80 bp, synthetic construct
  source 1..80: mol_type = other DNA
agtctcatcggacctgatgatcagttgagaagccacaactgatcatatcgcgtgtggcttaagccttaatcccgtttaac

SEQ ID NO: 65784 - DNA, 80 bp, synthetic construct
  source 1..80: mol_type = other DNA
caagcacctgcatcgcagtttggctgccacccccacatttacagaggagggtttgctggactctttcctctcaaagccac

SEQ ID NO: 65785 - DNA, 80 bp, synthetic construct
  source 1..80: mol_type = other DNA
ctgttgacatcaatcctgatacaacattccgtgagctattcggtattgacccacacgaacaattcccgttgtccatccac

SEQ ID NO: 65786 - DNA, 80 bp, synthetic construct
  source 1..80: mol_type = other DNA
aatgcacagggcaaaaggcgccttctgtggtggtgcgacgcgggtgccactttggtggccaccgcagccttcaagggtgt

SEQ ID NO: 65787 - DNA, 80 bp, synthetic construct
  source 1..80: mol_type = other DNA
ggtagtttcgtggaaacaatgattggtattgccaatacagcaccgttcccacttaattgtgaccgtgtggagaacaaagg

SEQ ID NO: 65788 - DNA, 80 bp, synthetic construct
  source 1..80: mol_type = other DNA
tagggtgtttacttcaaattatgttatttgcacatcaaactaccccacgtctgtcattccagagaacccacgtgccccag

SEQ ID NO: 65789 - DNA, 80 bp, synthetic construct
  source 1..80: mol_type = other DNA
ccttttaccgtcgagtcatcatcttggatgtttcatctccagaacttgatgagtggaagaagaagaaccctggaaagaag

SEQ ID NO: 65790 - DNA, 80 bp, synthetic construct
  source 1..80: mol_type = other DNA
ttagaacagcccctcgccgtgcccccatgagtgcacggcgcgccaattatgaagaggaagcccccactgccattgttgag

SEQ ID NO: 65791 - DNA, 80 bp, synthetic construct
  source 1..80: mol_type = other DNA
ttcacccatgaaggcgaccacatagggtatggagtccatcttggcaatggtagagtggtcaccgtcacccatgtagcatc

SEQ ID NO: 65792 - DNA, 80 bp, synthetic construct
  source 1..80: mol_type = other DNA
atcatcagatagtgttgagggagcaccttttaaggtacaaagaactgttggtgaaaccacttgggttgaaacacagcttc

SEQ ID NO: 65793 - DNA, 80 bp, synthetic construct
  source 1..80: mol_type = other DNA
gccccctttggtgccggtgacaaacgctatcacttcacccagactgagatgttagtgaacgcccttaagccctacactga

SEQ ID NO: 65794 - DNA, 80 bp, synthetic construct
  source 1..80: mol_type = other DNA
atatttttattcaatgtggcgtcaagttgtgaagaaaggtaagacctacttcatgccactcgtaaagacaaatggatggg

SEQ ID NO: 65795 - DNA, 80 bp, synthetic construct
  source 1..80: mol_type = other DNA
ctatcacttatggatggtctactgcaccagtcaacccaatggcagcggcaattcaaacaaatcatgtccacactggaaac

SEQ ID NO: 65796 - DNA, 80 bp, synthetic construct
  source 1..80: mol_type = other DNA
aacaattccaacaaaaggaacgcttggttatcacttagtgcagaaaacaagggtccactgttcccaggcatcccaaacca

SEQ ID NO: 65797 - DNA, 80 bp, synthetic construct
  source 1..80: mol_type = other DNA
cttccccgactcctgtgcttccacggtaatgggcgctatggacacagaccgccacatgccatccacaggaatctgtggcc

SEQ ID NO: 65798 - DNA, 80 bp, synthetic construct
  source 1..80: mol_type = other DNA
cagcaattggcttccaaaacaatggagatgcctatgaaaatgagactcctgcagtcatgtttgccactctaaaccccctg

SEQ ID NO: 65799 - DNA, 80 bp, synthetic construct
  source 1..80: mol_type = other DNA
actggtggtactaatgagaatcctgtagccctctttggttcaatcaatctggcctctttagctgtggttcgcactcaaca

SEQ ID NO: 65800 - DNA, 80 bp, synthetic construct
  source 1..80: mol_type = other DNA
ggatgtggacttcacaaccaccggttttgccaacaacatgaacgtggttgtggaaatgtcctgggaaatgtactcaggat

SEQ ID NO: 65801 - DNA, 80 bp, synthetic construct
  source 1..80: mol_type = other DNA
cacaacagatacaggggcgtgtgacacctatggatggcactaactttgttttcacttcttcaggcgccaacaccctggtg

SEQ ID NO: 65802 - DNA, 80 bp, synthetic construct
  source 1..80: mol_type = other DNA
ctctgggaggagcaattactcagttatgatggaaccccagcaatcttgtactcatctcagttggagcgcactgcggagta

SEQ ID NO: 65803 - DNA, 80 bp, synthetic construct
  source 1..80: mol_type = other DNA
tcctccaaaaattcaaactgggacaccaaccaaaccctcaatcaatcttaatcaccaacctggatcatccagtgcttgat

SEQ ID NO: 65804 - DNA, 80 bp, synthetic construct
  source 1..80: mol_type = other DNA
cggactatggtgcaagtatttgcaccgtagtttggctgctacccccacatttacagaggagggcttgctagactctttcc

SEQ ID NO: 65805 - DNA, 80 bp, synthetic construct
  source 1..80: mol_type = other DNA
gttaacccagccaacgtccaaaaccctggagtctttccacacgcattcattgatgcccgcaccgtggatcccatcctcat

SEQ ID NO: 65806 - DNA, 80 bp, synthetic construct
  source 1..80: mol_type = other DNA
tatggcttctaagccattctacccaattgaattcaaccgtaaggttgaaacaaaagtcctcttctctgctcacctcaggg

SEQ ID NO: 65807 - DNA, 80 bp, synthetic construct
  source 1..80: mol_type = other DNA
tgtttcacccagctcattgaggagggcaccgagctaattcaggagtttgggacatcaccaatggcggggcttgcacgctc

SEQ ID NO: 65808 - DNA, 80 bp, synthetic construct
  source 1..80: mol_type = other DNA
ttatgtcagtgagcttgaaactgccgctaatggtatcagaagtacaatcctcttagacaccccgaggaaagtcccagtag

SEQ ID NO: 65809 - DNA, 80 bp, synthetic construct
  source 1..80: mol_type = other DNA
gcgataatgcgtcgcaccccggtggtcagccccgctttcagtgcggaggggcttctagatgcttttgcatccaaacctcc

SEQ ID NO: 65810 - DNA, 80 bp, synthetic construct
  source 1..80: mol_type = other DNA
gaaatcatacatggctgccaatagggcgctggcacaagtctttgctgagccttcttccaacgaaattgcggaaacgtgca

SEQ ID NO: 65811 - DNA, 80 bp, synthetic construct
  source 1..80: mol_type = other DNA
tgggatgcatcccttgctaactcaatgttgtctatgtttgagacaaacactcacataccagcagtcactcagagggaggt

SEQ ID NO: 65812 - DNA, 80 bp, synthetic construct
  source 1..80: mol_type = other DNA
agtggacatcaatcctgacaccacatttcgtgagctgtttggaatagatccacacgagcaattcccattgtccatcactg

SEQ ID NO: 65813 - DNA, 80 bp, synthetic construct
  source 1..80: mol_type = other DNA
aaagcgtaccaggggtggcacagctccgcgacaatcctggagtttctgtccaagcacatggaggatgtcacattcccctc

SEQ ID NO: 65814 - DNA, 80 bp, synthetic construct
  source 1..80: mol_type = other DNA
gagagtttggcccactttggcccactactgctgatggtgcataacgtggcatacttgacaaccagatcacaacgtgatga

SEQ ID NO: 65815 - DNA, 80 bp, synthetic construct
  source 1..80: mol_type = other DNA
atacttgacaaccagatcacaacgtgatgaggaggccaaaggtaaaactaaacatggcaggggggccagacacgcacgac

SEQ ID NO: 65816 - DNA, 80 bp, synthetic construct
  source 1..80: mol_type = other DNA
cgctgcggacgccgtggacggtctagaattctcggttaggaaaaccgagggtgaaaccacatgggtgaacacccccctta

SEQ ID NO: 65817 - DNA, 80 bp, synthetic construct
  source 1..80: mol_type = other DNA
caactctctcaaccacatgacatactttgctgctgcagtgttgaaggcctatgaacaacatggggcgccttacactggta

SEQ ID NO: 65818 - DNA, 80 bp, synthetic construct
  source 1..80: mol_type = other DNA
gcacagtcagaagggttagtgctcacaaacgtgaactatgaccaggctctcgccacctacgaagcgtggttcataggtgg

SEQ ID NO: 65819 - DNA, 80 bp, synthetic construct
  source 1..80: mol_type = other DNA
cccaggttgagacgccaaatgctagcgctcagcgtgtggaacttgcaatggccacaggggcagtgaccagcaatgtgccc

SEQ ID NO: 65820 - DNA, 80 bp, synthetic construct
  source 1..80: mol_type = other DNA
gttttcaggtgcgggttacaatctcgggttccggactctttgctggtcgggccatcactgccatcctgccaccaggagtc

SEQ ID NO: 65821 - DNA, 80 bp, synthetic construct
  source 1..80: mol_type = other DNA
aacccagctgctgtccagaaccccggtgtcttcccccacgcgttcattgacgctcgcacaaccgaccccatactgatcaa

SEQ ID NO: 65822 - DNA, 80 bp, synthetic construct
  source 1..80: mol_type = other DNA
tttgcccgacatccggcccattgattttcaccgcgtagatggggacgacgcgacagcgtccgtggggttatgggttgcac

SEQ ID NO: 65823 - DNA, 80 bp, synthetic construct
  source 1..80: mol_type = other DNA
agcccttgatcaatccgtttcaaactggctccgtttccacatgttggctcagttttgaaacacggcctggccctgacttt

SEQ ID NO: 65824 - DNA, 80 bp, synthetic construct
  source 1..80: mol_type = other DNA
aataacgaacacaccaagatacgggggctcctgagcgcacaaggaaagggcatcatcttcccaaacattgtcaatcattg

SEQ ID NO: 65825 - DNA, 80 bp, synthetic construct
  source 1..80: mol_type = other DNA
gacagatgtgtcattatccgccaagacctctggtcagactaccatccccatagctgctgataacctcaacaacagccctg

SEQ ID NO: 65826 - DNA, 80 bp, synthetic construct
  source 1..80: mol_type = other DNA
aatgcactaacatggttgggactaatttccaatttggtggtactgggacaaacaacattatgttatggcaggagcaacac

SEQ ID NO: 65827 - DNA, 80 bp, synthetic construct
  source 1..80: mol_type = other DNA
ttcacatcttttccaggtgctgcagaggtgtactgttcacagctggaaagtacagcagaaatgtttcaaaataatgtggt

SEQ ID NO: 65828 - DNA, 80 bp, synthetic construct
  source 1..80: mol_type = other DNA
ccaatgcagcaattggcacaaaccaactccttgattacgagaccagttttagatttgttggacttttcccccaaagcact

SEQ ID NO: 65829 - DNA, 80 bp, synthetic construct
  source 1..80: mol_type = other DNA
tcacttcaggggcccaatgggaacgctggacgggccgtcaggtttttagaataatgtcttggtttactggggcagcctta

SEQ ID NO: 65830 - DNA, 80 bp, synthetic construct
  source 1..80: mol_type = other DNA
aattcaatacaaatgctaactacatcaacttgtcccttctggcgaagttgcgacccacggttttgacaatgatttttcag

SEQ ID NO: 65831 - DNA, 80 bp, synthetic construct
  source 1..80: mol_type = other DNA
cgggtggcacggaaagcgtgcagtacggcctgctggacaggcctatactgcaacgctcagtgctgtcgggcatctcagaa

SEQ ID NO: 65832 - DNA, 80 bp, synthetic construct
  source 1..80: mol_type = other DNA
actcggcacttacaatcagtgcaaggtgccctgagtgctttcaaaaatggatccagttacggagcccctcctgcccccgc

SEQ ID NO: 65833 - DNA, 80 bp, synthetic construct
  source 1..80: mol_type = other DNA
gggcttcgttaacccaaattatcaggcttcaccaccaaagttaacactaggccccagacccccagtgactaatgtgtagt

SEQ ID NO: 65834 - DNA, 80 bp, synthetic construct
  source 1..80: mol_type = other DNA
gatggttaagttccccaagacaatcaagtttccattcatttaattttctttacttttcttttcttttcctatggtaccac

SEQ ID NO: 65835 - DNA, 80 bp, synthetic construct
  source 1..80: mol_type = other DNA
cttttcttttcttttcctatggtaccacacgcgttcgggtggataattgtggttaagcgaccacagccattaccctctgg

SEQ ID NO: 65836 - DNA, 80 bp, synthetic construct
  source 1..80: mol_type = other DNA
tgagcgggagagatgaaatttttgaaaccaaacaagacatgtacgcccatgtttgccaagtggtcgccggggtgcggcac

SEQ ID NO: 65837 - DNA, 80 bp, synthetic construct
  source 1..80: mol_type = other DNA
ttggcaacccaaattataggactggccctcccaaaattaatcttgggttcaatccccctagcactaatgtttaattatcc

SEQ ID NO: 65838 - DNA, 80 bp, synthetic construct
  source 1..80: mol_type = other DNA
ctaatgaagctgtcaggatgctccaacaccacgagctattggcaccgacttctcaaggtgtgtgggggtgtcactaccat

SEQ ID NO: 65839 - DNA, 80 bp, synthetic construct
  source 1..80: mol_type = other DNA
tggctcgcacagcagccctgcttgagctcgcagcatcccgagatgtaaccggcactgacgaactcaagcgcttgttagat

SEQ ID NO: 65840 - DNA, 80 bp, synthetic construct
  source 1..80: mol_type = other DNA
tgttttacacaacttattgaggagggcactgagctgatacaggaatttggtacatcacctcttgctggtctgactagatc

SEQ ID NO: 65841 - DNA, 80 bp, synthetic construct
  source 1..80: mol_type = other DNA
atatgtgagtgaacttgagtccactgcaaacagtattagaagtaccatcctcctggacacaccccggaaggttccggtcg

SEQ ID NO: 65842 - DNA, 80 bp, synthetic construct
  source 1..80: mol_type = other DNA
cgatcatcttgaccggcccccctggaataggcaaaacaaggcttgcacagcatcttgctgcagggtttggtaaagtgtca

SEQ ID NO: 65843 - DNA, 80 bp, synthetic construct
  source 1..80: mol_type = other DNA
aacttttccgtcacgttagaccaccatgactcatataccgggaatgaggtcgcgatttgggatgaatttgatgtggacac

SEQ ID NO: 65844 - DNA, 80 bp, synthetic construct
  source 1..80: mol_type = other DNA
cagtctgtggtgcaagcatctgcatcgcagtttggctgccacccccacattcacagaggagggtttactggactccttcc

SEQ ID NO: 65845 - DNA, 80 bp, synthetic construct
  source 1..80: mol_type = other DNA
acagggcaaatttgtggagacgatgattggcatagtcaacaccgccccctatccactcaattgtgaccgagtggagaaca

SEQ ID NO: 65846 - DNA, 80 bp, synthetic construct
  source 1..80: mol_type = other DNA
aaggcaaagtgtttacatctgaatacatcatatgtaccagcaattacccaacctctgtgttgcctgacaacccacgggcg

SEQ ID NO: 65847 - DNA, 80 bp, synthetic construct
  source 1..80: mol_type = other DNA
ggagcattttatcgccgggtcaccacgatagatgtgtcatccccaactattgaagactggaaaaagaaaaacccagggaa

SEQ ID NO: 65848 - DNA, 80 bp, synthetic construct
  source 1..80: mol_type = other DNA
gaaaccccctcctgatttgtacaagaatgatttcacacaccttcgcctatctgtcaggccattcttggggtacaacccag

SEQ ID NO: 65849 - DNA, 80 bp, synthetic construct
  source 1..80: mol_type = other DNA
agggagacaccttagatggtgtccgggtcaagcctgtgcttaccagtgtggatgggctgtcacgcttgatggagaccaaa

SEQ ID NO: 65850 - DNA, 80 bp, synthetic construct
  source 1..80: mol_type = other DNA
ttcaaggaacaaggcaatgaacaacgaaacttgtggataacatgcccgcgagaccttgtagcccccgctgcgtccggctt

SEQ ID NO: 65851 - DNA, 80 bp, synthetic construct
  source 1..80: mol_type = other DNA
gaaggcatacatggctgccaatcgagcacttgcacaagtgtttcaggaaccatcttctcaggatattggcgaaacttgca

SEQ ID NO: 65852 - DNA, 80 bp, synthetic construct
  source 1..80: mol_type = other DNA
catcccgtgtgtatgtgtcgtgtaacaatccaccccccacgtacagtgggcgggtggtgaagatcacggccatcaatcca

SEQ ID NO: 65853 - DNA, 80 bp, synthetic construct
  source 1..80: mol_type = other DNA
tgggatgcgtcacttgctaattctatgttgtcaatgtttgagaccaccagccacattcctgcttcaatccaacgtgaaat

SEQ ID NO: 65854 - DNA, 80 bp, synthetic construct
  source 1..80: mol_type = other DNA
catgtatagggtttgggacccactagtccacttacagacgcgtgaaccaaacacgcagatgctcccttatatcaacaggg

SEQ ID NO: 65855 - DNA, 80 bp, synthetic construct
  source 1..80: mol_type = other DNA
tttcaaagccacctgttgacatcaatcctgatacaacattccgtgagctattcggcattgacccacacgaacaattcccg

SEQ ID NO: 65856 - DNA, 80 bp, synthetic construct
  source 1..80: mol_type = other DNA
tggtcccagtatcttctgcattcgacttcatccgaggcctcaggcaccatcttggcctttgttcagtcaagggtatgtgg

SEQ ID NO: 65857 - DNA, 80 bp, synthetic construct
  source 1..80: mol_type = other DNA
agagcttaccaaggttggaacagttctagttcaatcttggaatttttgtcaaaacacatggctgatgttgccttcccaca

SEQ ID NO: 65858 - DNA, 80 bp, synthetic construct
  source 1..80: mol_type = other DNA
caaccccgagtgcactgtttttcgagccccagacggtgatgtcatcttttacacatttgggtcatacgcttgctttgtgt

SEQ ID NO: 65859 - DNA, 80 bp, synthetic construct
  source 1..80: mol_type = other DNA
ccccagcccgcgtcccattcgttggggagcccccaaagaatgtgcattcaaacataacacgcaatatgacatgggccgag

SEQ ID NO: 65860 - DNA, 80 bp, synthetic construct
  source 1..80: mol_type = other DNA
acacttcgcctgctggcagagaccataactgaaagcctggtgcactttggccccttcttactcatgatgcacaatgtctc

SEQ ID NO: 65861 - DNA, 80 bp, synthetic construct
  source 1..80: mol_type = other DNA
atatcttgccacccggtctggtcgagaggaggaggccaaagggaaaaccaaacatggccgtggcgccaaacacgccagga

SEQ ID NO: 65862 - DNA, 80 bp, synthetic construct
  source 1..80: mol_type = other DNA
gaggaggtgttagcttgtctgatgatgagtatgatgagtggcgtgatctggtgcgagactggcggcaggacatgactgtt

SEQ ID NO: 65863 - DNA, 80 bp, synthetic construct
  source 1..80: mol_type = other DNA
ttggggagtttgtggaacttcgtgagcgatacgcacttggaatggactctgaggatgtgcaacgttatcgtgcttggcta

SEQ ID NO: 65864 - DNA, 80 bp, synthetic construct
  source 1..80: mol_type = other DNA
atgtgcaacgttatcgtgcttggctagagctacgagcaatgcgcatgggtgcaggtgcctaccaacacgccactattatt

SEQ ID NO: 65865 - DNA, 80 bp, synthetic construct
  source 1..80: mol_type = other DNA
gagctacgagcaattcgcatgggtgcaggtgcctaccaacacgccactattattggtagggggggggtgcaagacaccat

SEQ ID NO: 65866 - DNA, 80 bp, synthetic construct
  source 1..80: mol_type = other DNA
tattcgcacccaaccaatgcgtgctccacgcgcgccccggagtcaaggctatgacgaagaggctcccacacccattgtca

SEQ ID NO: 65867 - DNA, 80 bp, synthetic construct
  source 1..80: mol_type = other DNA
ttgtccatccacgatttggcaagattacaaggtgagcttgtggatgcggcacgtaacccaggccacgtgttgcgtcgcca

SEQ ID NO: 65868 - DNA, 80 bp, synthetic construct
  source 1..80: mol_type = other DNA
catttacatctgggggtgatcacattgggtatggttgtcacatgggtaatggtgtggttgtcacagtcactcatgttgcc

SEQ ID NO: 65869 - DNA, 80 bp, synthetic construct
  source 1..80: mol_type = other DNA
tccgcatccgatcaagtggagggacaggatttcacgattaggaagactgagggtgagaccacatgggtgaataccaacct

SEQ ID NO: 65870 - DNA, 80 bp, synthetic construct
  source 1..80: mol_type = other DNA
tggacacttaccccattaccaggttggtgacggcgctcctgtctactactcggcacgcctacaccctgtgactacgctcg

SEQ ID NO: 65871 - DNA, 80 bp, synthetic construct
  source 1..80: mol_type = other DNA
cggagggcacgtatgaaacacctaacatcacggtccagggataccacctgcgcattttaaatgggtacccaacaaagcgc

SEQ ID NO: 65872 - DNA, 80 bp, synthetic construct
  source 1..80: mol_type = other DNA
ggattgtggcacaccctactttgactcatgccgccgcctggttggtctgcacgctgccacatcaacaaatggggaaacca

SEQ ID NO: 65873 - DNA, 80 bp, synthetic construct
  source 1..80: mol_type = other DNA
aacttgcccaacgtgtgaccaaaacatccaaggtggagaatgcttttgcttggaagggccttgcggttgtccggggtccc

SEQ ID NO: 65874 - DNA, 80 bp, synthetic construct
  source 1..80: mol_type = other DNA
gactgtggtggcatgcccacagggacacgttatcaccgctcacccgcatggcccaaccccgtggaaggagaaacacatgc

SEQ ID NO: 65875 - DNA, 80 bp, synthetic construct
  source 1..80: mol_type = other DNA
ccctgcgccgtttggctccggtgatgaacggtacaagttctcccaagtggagatgctggtcaatggtttgaagccttatt

SEQ ID NO: 65876 - DNA, 80 bp, synthetic construct
  source 1..80: mol_type = other DNA
cagaacccacccctggtatcccccccgccctgttacaacgtgcagccacacacacacgcacgtatctggaaacgataatt

SEQ ID NO: 65877 - DNA, 80 bp, synthetic construct
  source 1..80: mol_type = other DNA
ggcacccatcgatcaccaaacctgtcgttcaatgaggcgtgctcgcttctggaaaaatcaacatcgtgtggtccatttgt

SEQ ID NO: 65878 - DNA, 80 bp, synthetic construct
  source 1..80: mol_type = other DNA
ggctggtcaaaagggtgattattgggatgaggacaagcagtgttacactggtgtgttagcggaacatcttgccaaagctt

SEQ ID NO: 65879 - DNA, 80 bp, synthetic construct
  source 1..80: mol_type = other DNA
gcttgggatgcagccaacaggggcgttgcgccccagaacgcctataaattagctttaaaagatgagttgagaccaattga

SEQ ID NO: 65880 - DNA, 80 bp, synthetic construct
  source 1..80: mol_type = other DNA
aaagaatgcacaaggaaaaaggcgccttctgtgggggtgtgacgcgggtgccactttggtggccaccgcagcctttaagg

SEQ ID NO: 65881 - DNA, 80 bp, synthetic construct
  source 1..80: mol_type = other DNA
gagttgcgacccgccttcaagcggttgccccaatgactccagttggtgttggtataaacatggacagttaccaggttgag

SEQ ID NO: 65882 - DNA, 80 bp, synthetic construct
  source 1..80: mol_type = other DNA
gtgttgaatgaatcactcaaaggtggagtgctttactgtcttgattatagcaagtgggactcaacacaacaccccgccgt

SEQ ID NO: 65883 - DNA, 80 bp, synthetic construct
  source 1..80: mol_type = other DNA
cggccgcctcactcggaattttagaaagactgtctgaagctactcctatcacaacatcagctgttgagttactgtcctcc

SEQ ID NO: 65884 - DNA, 80 bp, synthetic construct
  source 1..80: mol_type = other DNA
cccgcaagaggccatttgaatgacattgtgttcatcactaaatctggtcttccgtctggcatgccattcaccagtgtcat

SEQ ID NO: 65885 - DNA, 80 bp, synthetic construct
  source 1..80: mol_type = other DNA
caactcgctcaaccacatgacctactttgcagctgcagtactgaaggcatatgaacaacatggagcaccatacacgggca

SEQ ID NO: 65886 - DNA, 80 bp, synthetic construct
  source 1..80: mol_type = other DNA
acgtgtttcaggttgagactgttcacacttacggggatgactgcctatactcggtgtgccctgccactgcttccattttc

SEQ ID NO: 65887 - DNA, 80 bp, synthetic construct
  source 1..80: mol_type = other DNA
caaacagttttggccaatttgacttcgtttggccttaagccaactgctgctgacaagagtgagacaatagcccccaccca

SEQ ID NO: 65888 - DNA, 80 bp, synthetic construct
  source 1..80: mol_type = other DNA
aagcacgcagagctttcgagcgagagcgcgcggagctgttcaaggagctgccacatgccgacttagacgtgagtcgccaa

SEQ ID NO: 65889 - DNA, 80 bp, synthetic construct
  source 1..80: mol_type = other DNA
cactcctgtcttcctcaagaggacgctgacctgcacaccacgtggcgtgcgtggcctgttggacatcacatccataaaga

SEQ ID NO: 65890 - DNA, 80 bp, synthetic construct
  source 1..80: mol_type = other DNA
gacaattcttgtggatcaaggccaataggacggttgacatcaattcaccaccggcgtacgatcgcgacgcgcgcagtatt

SEQ ID NO: 65891 - DNA, 80 bp, synthetic construct
  source 1..80: mol_type = other DNA
cagttggaaaatgcccttgcgtatgcgtcacagcatggtcacgcagtttttgaggaggttgctgagttggcacgcaacac

SEQ ID NO: 65892 - DNA, 80 bp, synthetic construct
  source 1..80: mol_type = other DNA
agccaaggctgagggactagtgctgactaatgtcaattatgaccaggctctcgccacctacgaatcttggttcataggcg

SEQ ID NO: 65893 - DNA, 80 bp, synthetic construct
  source 1..80: mol_type = other DNA
ggcctggtgcaaggcagccccagtgaagagaccaccaaattagtgtttgaaatggagggtgtaccccgcccagaaggccc

SEQ ID NO: 65894 - DNA, 80 bp, synthetic construct
  source 1..80: mol_type = other DNA
taaggccaattccaatgaaaatgtgcctcttgcatcaccacaggacacaattggaccaaacgcagcacttctcctgccca

SEQ ID NO: 65895 - DNA, 80 bp, synthetic construct
  source 1..80: mol_type = other DNA
cgcagattgagacacccaacggagctgcgcaaagggtggagatggccgcggcaacaggggccgttagcaacaacgtcccc

SEQ ID NO: 65896 - DNA, 80 bp, synthetic construct
  source 1..80: mol_type = other DNA
atgtgtgtgagggaatgttttgctagtgtgaccacgctcccttggacaacgcgccaagcatccaacacttttcttggtgc

SEQ ID NO: 65897 - DNA, 80 bp, synthetic construct
  source 1..80: mol_type = other DNA
catccatctcggcccacgcatcaacccctacactgcacacttgagtgccatgtttgctggttggggtggtagtttccaaa

SEQ ID NO: 65898 - DNA, 80 bp, synthetic construct
  source 1..80: mol_type = other DNA
tacgagtcaccatatctggctctgggctgtatgcaggccgtgcagtggtcgcagtgctgcctccaggtgtcaatccggcc

SEQ ID NO: 65899 - DNA, 80 bp, synthetic construct
  source 1..80: mol_type = other DNA
cagaagtcgtacttttatgccatgtggcgtcaggtggtcaagaagggcaaggagtttttcatccctttggtcaagtgtac

SEQ ID NO: 65900 - DNA, 80 bp, synthetic construct
  source 1..80: mol_type = other DNA
aatgtccaaaaccctggagtgtttccacatgcattcattgatgcccgcaccgtggaccctatcctcatcaacctccctga

SEQ ID NO: 65901 - DNA, 80 bp, synthetic construct
  source 1..80: mol_type = other DNA
tatccgtgcggtggattaccaccgtgtggacggcgatgagcaaactgcaactgttggactttgggtcgcccaaccgctca

SEQ ID NO: 65902 - DNA, 80 bp, synthetic construct
  source 1..80: mol_type = other DNA
tcaacccgttccaagctggctccatctccacatgttggttgacatttgagaccagacccggacctgattttgacttttgt

SEQ ID NO: 65903 - DNA, 80 bp, synthetic construct
  source 1..80: mol_type = other DNA
gcggtcgcgaggcaataggcttggtggccgggtggtgggcctcgtggtggtggccgttgcagaacaagttaaccatcact

SEQ ID NO: 65904 - DNA, 80 bp, synthetic construct
  source 1..80: mol_type = other DNA
ttgctgccaactccaccacacttggttggtcaacactcccaattgagcctatcgctggtgctatatcctggtatcaaaac

SEQ ID NO: 65905 - DNA, 80 bp, synthetic construct
  source 1..80: mol_type = other DNA
accacgccgggcattagcacgcgcggcctgctcagtgctgaaggtaaaggcatcatcttcccaaacatagttaaccactg

SEQ ID NO: 65906 - DNA, 80 bp, synthetic construct
  source 1..80: mol_type = other DNA
gactgacgttgctctctccagcaagacctccgggaggactactgtaccaactgatcaggctaacctcaaccagtgtcctg

SEQ ID NO: 65907 - DNA, 80 bp, synthetic construct
  source 1..80: mol_type = other DNA
gagcctctggtcccgttgtgatgttccaaaataatggagatgtgaatgagactagtgccaacaactgtgtgttaacagct

SEQ ID NO: 65908 - DNA, 80 bp, synthetic construct
  source 1..80: mol_type = other DNA
gcttcacatgattttgtcaacttgtctagcaactttgacgcggctggcatgtgggtctggctcccctggacaaccaccaa

SEQ ID NO: 65909 - DNA, 80 bp, synthetic construct
  source 1..80: mol_type = other DNA
catcttggcgtaagaaattcacagagcctgcggagattgtcagacaggtgctagttcacttttgtgaagggatgaggtca

SEQ ID NO: 65910 - DNA, 80 bp, synthetic construct
  source 1..80: mol_type = other DNA
gcctgacgccacaataaaccgcaatgtctacatcactccaacctggatcaatggtgacccctctcgaccaatccatggca

SEQ ID NO: 65911 - DNA, 80 bp, synthetic construct
  source 1..80: mol_type = other DNA
agtgtaccaacatggttggaaccaactttcagtttggtggcactggtaccaacaacatcatgctctggcaagagcagcat

SEQ ID NO: 65912 - DNA, 80 bp, synthetic construct
  source 1..80: mol_type = other DNA
ttcacctcctttcctggagcagcagaagtttactgttcacaacttgagagcacggctgagatgttccagaacaatgttgt

SEQ ID NO: 65913 - DNA, 80 bp, synthetic construct
  source 1..80: mol_type = other DNA
caatataccagccaaccagatggctgtgttcaatgtggaaactgcaggcaacacattccaaattgctatcatgccaaatg

SEQ ID NO: 65914 - DNA, 80 bp, synthetic construct
  source 1..80: mol_type = other DNA
ccaacgcagccgttggtacccatcagcttctggattacgagacaagtttcaggtttgttggacttttcccccaaagcact

SEQ ID NO: 65915 - DNA, 80 bp, synthetic construct
  source 1..80: mol_type = other DNA
gcagccgggtcccttgtggacatggcaggcactgtatcatccattgtggcacaacaccgccaaattgacttgatggcgca

SEQ ID NO: 65916 - DNA, 80 bp, synthetic construct
  source 1..80: mol_type = other DNA
agcaaaccaaatccaaagagactgggtcaacaagcaagaagcactcatgaggcgaggtcaggacatctcacgtgaccttg

SEQ ID NO: 65917 - DNA, 80 bp, synthetic construct
  source 1..80: mol_type = other DNA
cggtcaacggcaccgcccaacgggtggagtcgttagtaggtgcgggtttcacccctgttgatgctcgacggctggccggg

SEQ ID NO: 65918 - DNA, 80 bp, synthetic construct
  source 1..80: mol_type = other DNA
agctcagaaacagttcagtatggcctgctggaccgcccaattttgcagcgggaagtcctggcaggcattagtgaaacaca

SEQ ID NO: 65919 - DNA, 80 bp, synthetic construct
  source 1..80: mol_type = other DNA
cagttttccaccaatgcaaattacatcaacttgtcccttatcgccaaacttcgaccaacagtcctcacaatgattcttca

SEQ ID NO: 65920 - DNA, 80 bp, synthetic construct
  source 1..80: mol_type = other DNA
tcaccttcaatccatgcaagcttctctgagtgcatttaagaagggatccagttatggtgccccacctgcccctgttgggt

SEQ ID NO: 65921 - DNA, 80 bp, synthetic construct
  source 1..80: mol_type = other DNA
ttgctaacccaaatttccaaccagctccccccaaggtcaatttaggatttaggcctccatcaactaatgtttaggatatt

SEQ ID NO: 65922 - DNA, 80 bp, synthetic construct
  source 1..80: mol_type = other DNA
gatttccccttcctctttcaatcaactttattttcttttctttccaagtggttcctcacgcgttcgggtggataattgtg

SEQ ID NO: 65923 - DNA, 80 bp, synthetic construct
  source 1..80: mol_type = other DNA
ttctttccaagtggttcctcacgcgttcgggtggataattgtgattaagcgatcacagccacatcttctaggaaaaaaaa

SEQ ID NO: 65924 - DNA, 80 bp, synthetic construct
  source 1..80: mol_type = other DNA
gcccacctcagggtgcgtggtcgtgagcaaatgtttgaaaccattaacgatctcaatgatcatgttaggggtgtggtggc

SEQ ID NO: 65925 - DNA, 80 bp, synthetic construct
  source 1..80: mol_type = other DNA
gcaacacaagaacacctacagggggtggttggcaacagtcacagctcttgttgaggtgtactccaatctgttccaggaca

SEQ ID NO: 65926 - DNA, 80 bp, synthetic construct
  source 1..80: mol_type = other DNA
gcgggacactgcagtgtcagcagtgtcggccatcacactagtgtttgaaaccatcaaggattttgtggtcaatgtgatag

SEQ ID NO: 65927 - DNA, 80 bp, synthetic construct
  source 1..80: mol_type = other DNA
acttagttaagagcacgtttcagccacagggtccaacatcttgcggctgggctgctatcattgctggcgcagtgcttatc

SEQ ID NO: 65928 - DNA, 80 bp, synthetic construct
  source 1..80: mol_type = other DNA
ggtgcggcgcgagataatgcgtcgcaccccggtggtcagccccgtttttagcgcggaggggctcctagatgcctttgcat

SEQ ID NO: 65929 - DNA, 80 bp, synthetic construct
  source 1..80: mol_type = other DNA
acatctagaattttcgtgtctgccaacaatcctccccccacctttgtgggcagacacgtgaaaatcacagccattaaccc

SEQ ID NO: 65930 - DNA, 80 bp, synthetic construct
  source 1..80: mol_type = other DNA
ctgggacgcgtctcttgctaactcaatgttgtcaatgtttgagaccaacacccacataccagcagtcgcacaaagggaga

SEQ ID NO: 65931 - DNA, 80 bp, synthetic construct
  source 1..80: mol_type = other DNA
gtacttgacaactaggtcacaacgtgatgaggaagccaaaggtaagactaaacatggtaggggagccagacacgcacgcc

SEQ ID NO: 65932 - DNA, 80 bp, synthetic construct
  source 1..80: mol_type = other DNA
ctactccaccgattcgctcactaaactaataaacaaaatcactaagtacgtccccgttcaagctaccttaactgagatgc

SEQ ID NO: 65933 - DNA, 80 bp, synthetic construct
  source 1..80: mol_type = other DNA
gtgattggttagtatggcttccaagccattctacccaatagagttcaacccgagtgttgagcttcaagtgcttcgatcgg

SEQ ID NO: 65934 - DNA, 80 bp, synthetic construct
  source 1..80: mol_type = other DNA
gctacgagcgatgcgcatgggtgcaggtgcctaccaacatgccaccattattggtaggggaggagtacaagacaccatca

SEQ ID NO: 65935 - DNA, 80 bp, synthetic construct
  source 1..80: mol_type = other DNA
tgtgatttgtttggatggtttccaagccattctacccaatagagttcaaccctaaagttgagcttcaagtgctccgatcg

SEQ ID NO: 65936 - DNA, 80 bp, synthetic construct
  source 1..80: mol_type = other DNA
cttcttaaggccccagagcaggaaatggataacggcatatcacctgctaacttgctcccccgccgccttgggcggtcacg

SEQ ID NO: 65937 - DNA, 80 bp, synthetic construct
  source 1..80: mol_type = other DNA
aggcaatagacttggtggccgggtggtgggtctcgtggtggtagccgttgcagaacaagttaaccatcactttgctgcca

SEQ ID NO: 65938 - DNA, 80 bp, synthetic construct
  source 1..80: mol_type = other DNA
actccaccacacttggttggtcaacactcccaatcgagcccattgctggtgctatatcctggtatcaaaacaccacgccg

SEQ ID NO: 65939 - DNA, 80 bp, synthetic construct
  source 1..80: mol_type = other DNA
ggtattagcacgcgcggcctgctcagtgctgaaggtaagggcatcatcttcccaaacatagtcaaccactggactgacgt

SEQ ID NO: 65940 - DNA, 80 bp, synthetic construct
  source 1..80: mol_type = other DNA
tgctctctccagcaagacctccgggaggactactgtaccaactgatcaggctaacctcaaccagtgtcctggagcctctg

SEQ ID NO: 65941 - DNA, 80 bp, synthetic construct
  source 1..80: mol_type = other DNA
gtcccgttgtgatgttccaaaacaatggagatgtgaatgagactagtgccaacaactgtgtgttaacagctgcttcacat

SEQ ID NO: 65942 - DNA, 80 bp, synthetic construct
  source 1..80: mol_type = other DNA
gattttgtcaacttgtctagcaactttgatgcggctggcatgtgggtctggctcccctggacaaccaccaagcctgacgc

SEQ ID NO: 65943 - DNA, 80 bp, synthetic construct
  source 1..80: mol_type = other DNA
cacaataaaccgcaatgtctacatcactccaacctggatcaatggtgacccctctcgaccaatccatggcaagtgtacca

SEQ ID NO: 65944 - DNA, 80 bp, synthetic construct
  source 1..80: mol_type = other DNA
acatggttggaaccaactttcagtttggtggcactggtaccaacaacatcatgctctggcaagagcagcatttcacctct

SEQ ID NO: 65945 - DNA, 80 bp, synthetic construct
  source 1..80: mol_type = other DNA
tttcctggagcagcagaagtttactgttcacaacttgagagcacagctgagatgttccagaacaatgttgtcaatatacc

SEQ ID NO: 65946 - DNA, 80 bp, synthetic construct
  source 1..80: mol_type = other DNA
agccaaccagatggctgtgttcaatgtggaaactgcaggcaacacattccaaattgctatcatgccaaatggttactgtg

SEQ ID NO: 65947 - DNA, 80 bp, synthetic construct
  source 1..80: mol_type = other DNA
tcgtatctgctctgcgacgatgaaagtactagctttaagacacagtgtggctcaagtgtatgcagacactcaaggctacg

SEQ ID NO: 65948 - DNA, 80 bp, synthetic construct
  source 1..80: mol_type = other DNA
agaaatattttgcactaagaatgaggatgaaacaagtcgcaatgcaattgatagaagatttatgacaattttctgattac

SEQ ID NO: 65949 - DNA, 80 bp, synthetic construct
  source 1..80: mol_type = other DNA
tcttgtcattaattactaaatattcacttaatgcacggataataaatgttatctaattatattgtatgataattattaca

SEQ ID NO: 65950 - DNA, 80 bp, synthetic construct
  source 1..80: mol_type = other DNA
ttatattgtatgataattattacaatatatactgtgttattgaatttaatgatatcttaataagagaagattgatgcgtc

SEQ ID NO: 65951 - DNA, 80 bp, synthetic construct
  source 1..80: mol_type = other DNA
caccgtctgtcaggatacctagcgcgctgggcctttactcagatgcgatcaccaattaagcaagctgagttcagagctac

SEQ ID NO: 65952 - DNA, 80 bp, synthetic construct
  source 1..80: mol_type = other DNA
tgtagtagtgcctttggctgaggtaaaaggctgtacttggaatgatggtgatgcaatgtacctggggtttgctgctggtg

SEQ ID NO: 65953 - DNA, 80 bp, synthetic construct
  source 1..80: mol_type = other DNA
ctgagatgttcctgcagacgttcactttcttccctttggtgattgagatgcatagggttctcaaggatggcatggatgtc

SEQ ID NO: 65954 - DNA, 80 bp, synthetic construct
  source 1..80: mol_type = other DNA
aactttatgaagaaagtcctccggcaacggtatggccaaaaaactgccgagcaatggatgcgtgaagaaatagttgctgt

SEQ ID NO: 65955 - DNA, 80 bp, synthetic construct
  source 1..80: mol_type = other DNA
aagagcagcttttgaagctgtaggcactctggcctgggccagaactggattctccccagcagcaagagacttcttgcgcc

SEQ ID NO: 65956 - DNA, 80 bp, synthetic construct
  source 1..80: mol_type = other DNA
tggcctgggccagaactggattctccccagcagcaagagacttcttgcgccaattcggaattgacatatagtggagtaca

SEQ ID NO: 65957 - DNA, 80 bp, synthetic construct
  source 1..80: mol_type = other DNA
cattgtccatcactgatttggccaagctacagggtgagctagtggatgcagcgcacaacccaggtcacatcctgcgtcgt

SEQ ID NO: 65958 - DNA, 80 bp, synthetic construct
  source 1..80: mol_type = other DNA
cttttaccagcaacggggaccatgtgggttacggttgccacattggcaacggtgtggtggtgacagtaactcatgtggct

SEQ ID NO: 65959 - DNA, 80 bp, synthetic construct
  source 1..80: mol_type = other DNA
cagaaggtacatatgaaactcctaacatcacagttcatgggttccatcttcgcatcatcaatggttaccccacaaagcgt

SEQ ID NO: 65960 - DNA, 80 bp, synthetic construct
  source 1..80: mol_type = other DNA
gggatgccgccaaccgaggcattgctccacaaaatgcctacaaactggccctcaaagatgagcttcgaccaattgaaaag

SEQ ID NO: 65961 - DNA, 80 bp, synthetic construct
  source 1..80: mol_type = other DNA
actcggcacttacaatctgtacaaggtgccttgagtgctttcaaacatggatccagctacgggagctcctcccgcccccg

SEQ ID NO: 65962 - DNA, 80 bp, synthetic construct
  source 1..80: mol_type = other DNA
gacatttgttcctgaccgcaacagccgtagtcgttaaggcagcaatgtccgcccgtaccaaagagaaaaccaaagacaaa

SEQ ID NO: 65963 - DNA, 80 bp, synthetic construct
  source 1..80: mol_type = other DNA
aatggactaggtacatctgtgcagatggaggatgggccaaatattgagtcgttttttaatcggaagtatcgggaggcagc

SEQ ID NO: 65964 - DNA, 80 bp, synthetic construct
  source 1..80: mol_type = other DNA
gatttgtaatttggattttattacagctgaggcgcatgcaaatgttatggaggagttgcaaaatgagaagatgaatgtca

SEQ ID NO: 65965 - DNA, 80 bp, synthetic construct
  source 1..80: mol_type = other DNA
gtgcttatgttgatcttttgcagtcatgtcaaatgggaatttttgacattgaaggtgatactgatactattaagctgaaa

SEQ ID NO: 65966 - DNA, 80 bp, synthetic construct
  source 1..80: mol_type = other DNA
gtgtatatgcgtgaagtggaggattatgaggcagagttaacgagaatgatgttgtttccgggtgaccagctttacgtcga

SEQ ID NO: 65967 - DNA, 80 bp, synthetic construct
  source 1..80: mol_type = other DNA
ctgtctccgtacagcggcattagtgtctcctaacattcggcaatttattctcagtgtcctgattcaacaagcgacgtcgc

SEQ ID NO: 65968 - DNA, 80 bp, synthetic construct
  source 1..80: mol_type = other DNA
gtgttggtctgattgagttgctccctgttgctgagatgactgcatctctgacttcacgtgataacatttctgtctcccat

SEQ ID NO: 65969 - DNA, 80 bp, synthetic construct
  source 1..80: mol_type = other DNA
aacatggctttgactttggcaatcggtgagtggaaagaattgcttcgtctgacgaatcctcagcagatctgtcagaaaat

SEQ ID NO: 65970 - DNA, 80 bp, synthetic construct
  source 1..80: mol_type = other DNA
acctgaagacaatgcaaaggaaacacttacgaagaaagactcgtcatccaagaaatctgttgatgcattggccgcaatga

SEQ ID NO: 65971 - DNA, 80 bp, synthetic construct
  source 1..80: mol_type = other DNA
tgtgtgtgacattatggcaccattcgttgatgggttgcgaatggaagattctttaggggttccgacacctagcaaactgg

SEQ ID NO: 65972 - DNA, 80 bp, synthetic construct
  source 1..80: mol_type = other DNA
ttttttcgctgcttggtgcaaaggtcgcactgattctgactccaaacctatatgattataacttgcatcttaaggctcat

SEQ ID NO: 65973 - DNA, 80 bp, synthetic construct
  source 1..80: mol_type = other DNA
ttggttactatgattctttcttgcttcttcccggatcagtatggggcattgatagcttcccgtggatatggtcatgatgt

SEQ ID NO: 65974 - DNA, 80 bp, synthetic construct
  source 1..80: mol_type = other DNA
taccggaaaccgaatcgacagcattcgagacggtgagcgaacgaagaagaactgcagatttgcaacttacacagtgctcg

SEQ ID NO: 65975 - DNA, 80 bp, synthetic construct
  source 1..80: mol_type = other DNA
atccgattcctaacggtcctccagataggacgagaagaaagtggttattgatgaagcgagttcaggagtggcttttgcgg

SEQ ID NO: 65976 - DNA, 80 bp, synthetic construct
  source 1..80: mol_type = other DNA
aatgatcttgttaggcgtcgtgagatacgtgacatcatatatcgtccatatgccaatgtgttgcgtttgccgggacaaac

SEQ ID NO: 65977 - DNA, 80 bp, synthetic construct
  source 1..80: mol_type = other DNA
atatttaccgaggcgacaagcggctggagcgcctttaccttgtgaagttttgttgaatgatgctatcgccatactggagg

SEQ ID NO: 65978 - DNA, 80 bp, synthetic construct
  source 1..80: mol_type = other DNA
agtatcggaccgtgttccatcatcccaatgacaggaatcaaggacctcaggaccgtcatgcactgacgactctttctaat

SEQ ID NO: 65979 - DNA, 80 bp, synthetic construct
  source 1..80: mol_type = other DNA
ttgctccgctggtacacacgcgggtttgctgagtggtttcactgggtctattgtcctttgtacttacagattgcattgca

SEQ ID NO: 65980 - DNA, 80 bp, synthetic construct
  source 1..80: mol_type = other DNA
tccaattatcttctggtctcatcgtctcggacagggagtatggaggcaatttccagctgtgcgagaggatcgtgagcggc

SEQ ID NO: 65981 - DNA, 80 bp, synthetic construct
  source 1..80: mol_type = other DNA
ttgagcagaaagttcaaatgtctggaagcgctggtctgggtgagttttttggtcgtatgagacccgaaattactgatgca

SEQ ID NO: 65982 - DNA, 80 bp, synthetic construct
  source 1..80: mol_type = other DNA
ggtttgataaccacttggagggtgtgcctttcgattcacctgttattgctgcgtttgagccagacgttgcgttgaatccg

SEQ ID NO: 65983 - DNA, 80 bp, synthetic construct
  source 1..80: mol_type = other DNA
tttactttacgtcaaggtgcggacttgcttggacgtgtgcatgcgcaggggtctacatttcggggtggagcatatgatag

SEQ ID NO: 65984 - DNA, 80 bp, synthetic construct
  source 1..80: mol_type = other DNA
tgcgtcagtgattctcttgtcagaatatgaggctctttatcgaatgactgactccgaggggatggtggatgaatatatta

SEQ ID NO: 65985 - DNA, 80 bp, synthetic construct
  source 1..80: mol_type = other DNA
agactttgatggcatctcgtcaactccttgagggactgagacttgtagccgaactttcaactggagagttgctgagggat

SEQ ID NO: 65986 - DNA, 80 bp, synthetic construct
  source 1..80: mol_type = other DNA
actcccatactggactatatccggactgctttctgtgagggtcgttttccatcccacatattcttcaagattctcaatct

SEQ ID NO: 65987 - DNA, 80 bp, synthetic construct
  source 1..80: mol_type = other DNA
gttcggggttaaaattaaccatggtgtgctggctcaggttggagagcggtcaattgaacatagactgcgaggtgactacc

SEQ ID NO: 65988 - DNA, 80 bp, synthetic construct
  source 1..80: mol_type = other DNA
gtgtgtattaccctagacctggttttttggaccctgctttggaatttattcctgacagaattgtggtggttgatcctgtt

SEQ ID NO: 65989 - DNA, 80 bp, synthetic construct
  source 1..80: mol_type = other DNA
cgaccgtccgtccgtcggaatgtcaagttgataatggatgctgtatttgatcctgaattcgggatgatcaaaatgaggaa

SEQ ID NO: 65990 - DNA, 80 bp, synthetic construct
  source 1..80: mol_type = other DNA
aggagtaactttctcgttgcggcccacaaatgacctaactttttcatcatttcatgagattcctcctattcaagtcgaga

SEQ ID NO: 65991 - DNA, 80 bp, synthetic construct
  source 1..80: mol_type = other DNA
tgactgggaatgtgaactacgtgtatgattctgaaactgcacgtactcgagcggagtatgatgtccaagtccgttgggaa

SEQ ID NO: 65992 - DNA, 80 bp, synthetic construct
  source 1..80: mol_type = other DNA
ttttttgcggcattagagcgagaggctgatgtgtccaaggtagttccaagctcgctttccaagctagatgatggacaagt

SEQ ID NO: 65993 - DNA, 80 bp, synthetic construct
  source 1..80: mol_type = other DNA
gcacctgggcggattattaccatgaatctcttggttacaagcagttatgagattcttagtagtatggaggatattcttgg

SEQ ID NO: 65994 - DNA, 80 bp, synthetic construct
  source 1..80: mol_type = other DNA
gcgcgaagttcgtgcattttcctttgttgtacaggatgtttcaaagtttagtggcatttactatgatttcatgttgtctg

SEQ ID NO: 65995 - DNA, 80 bp, synthetic construct
  source 1..80: mol_type = other DNA
ctgtgcggaaagaacatgctatcgtttggttcccaaacctgcgaggtatattgcaccatcatgctatttctattgaaaag

SEQ ID NO: 65996 - DNA, 80 bp, synthetic construct
  source 1..80: mol_type = other DNA
gttgagacgtgttttaaagcggcagagttggcgcaattttcttcgttcttaagtttgcgaccaactgctttaattaagct

SEQ ID NO: 65997 - DNA, 80 bp, synthetic construct
  source 1..80: mol_type = other DNA
taatgtggttcaaacaaccaatattcgaggtgggatattgcccccatctgtctcgaagcctattctgccttgtgaggtgg

SEQ ID NO: 65998 - DNA, 80 bp, synthetic construct
  source 1..80: mol_type = other DNA
ttcatccttcttttatcttttgctctgatgtcaatgtggcgacgcatcggattcgcgggactaccatccagataagaaag

SEQ ID NO: 65999 - DNA, 80 bp, synthetic construct
  source 1..80: mol_type = other DNA
ttttttccgcctttggtgaaggatgcaagtggtcgaccacgagtgactgatgaaaatggcgtagtagtgaatgggctgga

SEQ ID NO: 66000 - DNA, 80 bp, synthetic construct
  source 1..80: mol_type = other DNA
gaaccatccctacgggcttagatctcttgtttttgtgtatcattttgatcctaccttccgacctaagatatgctcagtat

SEQ ID NO: 66001 - DNA, 80 bp, synthetic construct
  source 1..80: mol_type = other DNA
tacgttgacacagtctgtcaaagacggctgctggctgtccggtgagactcgggaatgagagttgcagtcgacatttgtca

SEQ ID NO: 66002 - DNA, 80 bp, synthetic construct
  source 1..80: mol_type = other DNA
tggcacagctgttgttcaggaaaacgactcaagacttccgagattgctttggactgaaacacgaaatacttgcatcaatt

SEQ ID NO: 66003 - DNA, 80 bp, synthetic construct
  source 1..80: mol_type = other DNA
ggtggatttactgtctgtaggcgaggagcgtactttaagccaatctttattccagttagaagtagttacatccattcccc

SEQ ID NO: 66004 - DNA, 80 bp, synthetic construct
  source 1..80: mol_type = other DNA
tacaacgaaaaaagcaccttctctagtgaaaacgggtcaatccaaatattggaagaagcagaagttaatgctctaggtga

SEQ ID NO: 66005 - DNA, 80 bp, synthetic construct
  source 1..80: mol_type = other DNA
gttagtaagagatggcacggtcgcaatttcattcggacctgggatttattcacgtatgttttctcatttacgtgatgatt

SEQ ID NO: 66006 - DNA, 80 bp, synthetic construct
  source 1..80: mol_type = other DNA
ctgattatcggtctgcccttactgactgcgtggctcatgggtggaagcaaactcgagatgcgagggatgttcgagagtgg

SEQ ID NO: 66007 - DNA, 80 bp, synthetic construct
  source 1..80: mol_type = other DNA
caacgatctgctgcgattatgtgcgcggagaggtatatgtataaggtgaggcaggcgtataagagggtggttgaaaactt

SEQ ID NO: 66008 - DNA, 80 bp, synthetic construct
  source 1..80: mol_type = other DNA
ggatcatatgtacgcctggcattacttgaccgaagggccctccgagcatgtctttattctgccagctatgtatgaatctg

SEQ ID NO: 66009 - DNA, 80 bp, synthetic construct
  source 1..80: mol_type = other DNA
tacggcatgaaactacttctgaggcgtatggaatgcaatgtggtggtatcatcggaggaaatgtatcattgatgcttcct

SEQ ID NO: 66010 - DNA, 80 bp, synthetic construct
  source 1..80: mol_type = other DNA
agagacgagcaatacacaactttatttaaagcgtggttgatgtctctggcgaaaatgagtttgtctgagcttcgcgagcc

SEQ ID NO: 66011 - DNA, 80 bp, synthetic construct
  source 1..80: mol_type = other DNA
ccattggaacggtgttcgggtgcaactatcgagggatcatagaatcttgtactatggtgatttattgccaagtgatggag

SEQ ID NO: 66012 - DNA, 80 bp, synthetic construct
  source 1..80: mol_type = other DNA
acattacatacctagtgaataaattagagtatcacactatctggtttccagaaggagatttcgagaccatgatgggtgca

SEQ ID NO: 66013 - DNA, 80 bp, synthetic construct
  source 1..80: mol_type = other DNA
atgcttcgagattcgtttccagcaggttgtcatgcacacttaaatattccagtgcctcattatttcgtatttgatactga

SEQ ID NO: 66014 - DNA, 80 bp, synthetic construct
  source 1..80: mol_type = other DNA
acttttaccagctcactgctaaacaaattggagcattgggagcacaaggtggatacctgaaagcttatcatggcgaacaa

SEQ ID NO: 66015 - DNA, 80 bp, synthetic construct
  source 1..80: mol_type = other DNA
tgatgatttgatattgaggtgttggaagggtgtgcgggatacatggattaagttgcggctcggttatgaggagggaggag

SEQ ID NO: 66016 - DNA, 80 bp, synthetic construct
  source 1..80: mol_type = other DNA
tgaacgattctcgtatgagcgaggctttaattgtgaatagagatttacctgctgatttaagtgagtctttattctgttgt

SEQ ID NO: 66017 - DNA, 80 bp, synthetic construct
  source 1..80: mol_type = other DNA
tgtctagctcgaggtgtgtcacgtgatcaagtgcggacgctgaaggatgtacggaatgtagctcaggcgcagattaggca

SEQ ID NO: 66018 - DNA, 80 bp, synthetic construct
  source 1..80: mol_type = other DNA
cgttgtttcagggcagggcgtatggtgggagcatatggtgcggggtcaacctctggcatgttcaatcagacctggtaagg

SEQ ID NO: 66019 - DNA, 80 bp, synthetic construct
  source 1..80: mol_type = other DNA
tggtgctagttgtagattacgaggatggacctcttcacgtgtctattcgtgttaggcttttgaatgtacattatgctaga

SEQ ID NO: 66020 - DNA, 80 bp, synthetic construct
  source 1..80: mol_type = other DNA
gagttgggcatgaaagcgagcgatgttgtagttcggattcccacatcgaatcgtccacggtgggttgagactaaggagta

SEQ ID NO: 66021 - DNA, 80 bp, synthetic construct
  source 1..80: mol_type = other DNA
tgagcgatctttgagattttatgagttccgacctggctcaattactacagagttccaccatgtctttgctttttattgtt

SEQ ID NO: 66022 - DNA, 80 bp, synthetic construct
  source 1..80: mol_type = other DNA
actggggatgtggtcgggtggaaaagcgacgccacctttatcagattcgagaagtgagaaggggaaatctatatagtaga

SEQ ID NO: 66023 - DNA, 80 bp, synthetic construct
  source 1..80: mol_type = other DNA
tctaggtttttaagaaggattgccgaggacggagagaaagtgaaagttcaaggtcgaacacatgtgactgcgacgagggc

SEQ ID NO: 66024 - DNA, 80 bp, synthetic construct
  source 1..80: mol_type = other DNA
tgtccagcatgagaaatgtaatccgaatgaggatatcatctactcaagggaatttgctcgggaactggcgctgacgggaa

SEQ ID NO: 66025 - DNA, 80 bp, synthetic construct
  source 1..80: mol_type = other DNA
gtgtacccgtttattgaccctgtggctaaccagtttgggcgtggatttgatttggcatatgttcgcattaacacgtctgg

SEQ ID NO: 66026 - DNA, 80 bp, synthetic construct
  source 1..80: mol_type = other DNA
aaatcaaggaggctggggcgctagctgtgatttatacttgcatgcaaacgttaggtgtagatatagatcctcctgctggt

SEQ ID NO: 66027 - DNA, 80 bp, synthetic construct
  source 1..80: mol_type = other DNA
tgggtgcgtgaaggtcgaccgaaacagagaaccgctaagctttgtcatcttttgactagaatattgacagcattcttttc

SEQ ID NO: 66028 - DNA, 80 bp, synthetic construct
  source 1..80: mol_type = other DNA
ttaccgtggcgggtcgtcaagtttggtgtgcagtgttatggttgtaattttttccatcatattatattacttgcgtttga

SEQ ID NO: 66029 - DNA, 80 bp, synthetic construct
  source 1..80: mol_type = other DNA
agcatgtggatcaagaggttcgatatgatgagctaacattgatctggtatggggatggcggggttgagctgcagcgtatc

SEQ ID NO: 66030 - DNA, 80 bp, synthetic construct
  source 1..80: mol_type = other DNA
ttgcgtgaagtgtcgatgacgaggtttgttgctgtggccggtgatccagctacgccagagtatatagcgcaggcaaagct

SEQ ID NO: 66031 - DNA, 80 bp, synthetic construct
  source 1..80: mol_type = other DNA
ttgggctaacaagaagagtaatatagtggtgttcaattacgcgcgtccatatgagaggggtccagtttttgagaatctga

SEQ ID NO: 66032 - DNA, 80 bp, synthetic construct
  source 1..80: mol_type = other DNA
ttcgtgatacagtttctcttcgggaagcggcggaggtttttattttgagaacagatgactcttggagtcaatacggaaat

SEQ ID NO: 66033 - DNA, 80 bp, synthetic construct
  source 1..80: mol_type = other DNA
acagtagttgccatgctgggagagggtgatttttgtgatctagtccattttggtgcctcgtgcgatccgatggagcatta

SEQ ID NO: 66034 - DNA, 80 bp, synthetic construct
  source 1..80: mol_type = other DNA
ttttgttcatatttctcaaccccctggtacaaaccctggctatgaaccggcgaatcaggaagagccttttgaggagtggt

SEQ ID NO: 66035 - DNA, 80 bp, synthetic construct
  source 1..80: mol_type = other DNA
tgtatgagacccaggctatggagcgagtaattccgacaacgtgggaatcagaaattgtcgatgcgcgtgggatgctagtg

SEQ ID NO: 66036 - DNA, 80 bp, synthetic construct
  source 1..80: mol_type = other DNA
acaaggtgttgagttgtttattgatccttttgacttcgataaggtttcgtgtaaggtgggtggtgagtcgttgacgggca

SEQ ID NO: 66037 - DNA, 80 bp, synthetic construct
  source 1..80: mol_type = other DNA
tcaatcttaacgtttcattttcgcttcgcggggtggtttgagctggatgtcccggtggatgatattggtcgtggcctgca

SEQ ID NO: 66038 - DNA, 80 bp, synthetic construct
  source 1..80: mol_type = other DNA
gttgatgggaagcattaacaaggttgtgcatgttagctgtttcgtacaaaacggtagacgttattttcggctatcggtcg

SEQ ID NO: 66039 - DNA, 80 bp, synthetic construct
  source 1..80: mol_type = other DNA
atttagatgttgatcgagtcttgaggaatatgagacatgaaggtgatgcattaatggcggcagagttatttgtcaccgac

SEQ ID NO: 66040 - DNA, 80 bp, synthetic construct
  source 1..80: mol_type = other DNA
gcggtgttagtgtgtgaggggcttgtcgtaggtgagatgcatcggttacaacgaacctaccgatcagtaaatgcaatggt

SEQ ID NO: 66041 - DNA, 80 bp, synthetic construct
  source 1..80: mol_type = other DNA
gtatcatcaagggatgactaactttattgtgtatgaatggatgaggcgcgttctcttaactaatttgttagatgagatgt

SEQ ID NO: 66042 - DNA, 80 bp, synthetic construct
  source 1..80: mol_type = other DNA
tagtttttgatattgggggacggaatggcgagttgtcgggatgggtggtgcaggatgtaaaagttcattacttttgtgtc

SEQ ID NO: 66043 - DNA, 80 bp, synthetic construct
  source 1..80: mol_type = other DNA
gatcctgcgagggaagaggccattcctaaaggtcaacgcgttaggctgccgggtgggagagcgatatgggatatagcgga

SEQ ID NO: 66044 - DNA, 80 bp, synthetic construct
  source 1..80: mol_type = other DNA
aaccgttgagcagaatgttgctcgttatctagaagttgtcggaaaaccacagactccagccgaaggcataatactaattt

SEQ ID NO: 66045 - DNA, 80 bp, synthetic construct
  source 1..80: mol_type = other DNA
tctcaaatagcattgtggcggcgtatgaggcggctggtcgcaacaacagaaaccaggtagcgaatttgtatcaacaatta

SEQ ID NO: 66046 - DNA, 80 bp, synthetic construct
  source 1..80: mol_type = other DNA
caggcttggggtggtcgtgttttcattcgtgatcagttggttccgacgcgagcaaaccccggggattattggattcaggc

SEQ ID NO: 66047 - DNA, 80 bp, synthetic construct
  source 1..80: mol_type = other DNA
ttggactctcgaacgctgttggtgttgatgagattacttatgatgacgtgaagacgcctgaacaaatgatggagttcgtc

SEQ ID NO: 66048 - DNA, 80 bp, synthetic construct
  source 1..80: mol_type = other DNA
ggcttttcccggtaatgtttatcctcccggtttatgtgaggatttcaatattgatcctgatgcggggattttgcctctga

SEQ ID NO: 66049 - DNA, 80 bp, synthetic construct
  source 1..80: mol_type = other DNA
gatatcctgatactggtcaaggtgctaccgatgttgttctagctaacggtagattggggcacttaacctcatcgtggttt

SEQ ID NO: 66050 - DNA, 80 bp, synthetic construct
  source 1..80: mol_type = other DNA
cagagtctgtattgtggggccgcaagaggttttatcctgaatgggtttggcagattgatttggccaatctattgtcggca

SEQ ID NO: 66051 - DNA, 80 bp, synthetic construct
  source 1..80: mol_type = other DNA
ttgatttggccaatctattgtcggcatgtcgtagttctggcaaccaggccatgatcgcgtagtctccgcgagttgcagtc

SEQ ID NO: 66052 - DNA, 80 bp, synthetic construct
  source 1..80: mol_type = other DNA
actaaaaatgatgaacaaacagtctctaccgaagctagtgcagccgatcgtaatgatcgagaaaaatcgtcgtcttctga

SEQ ID NO: 66053 - DNA, 80 bp, synthetic construct
  source 1..80: mol_type = other DNA
gtactcctgattgctggagcagcaaagatgggacgttttgttctagtggcgtcgacgccagaaggaggaggaaatttgtt

SEQ ID NO: 66054 - DNA, 80 bp, synthetic construct
  source 1..80: mol_type = other DNA
caaaacttgggtgcgccgtcctgtatcggacaattttcgccacgttcagggttggctgctggaagatgattatgagaact

SEQ ID NO: 66055 - DNA, 80 bp, synthetic construct
  source 1..80: mol_type = other DNA
atccgcacgttcctgaggccctgactgtatttagtgaatatcaatggtttgcacgagaggttgccgataacatgacggat

SEQ ID NO: 66056 - DNA, 80 bp, synthetic construct
  source 1..80: mol_type = other DNA
gtgcgcaatttgggatggcttccaagccactccaagttgagtcttgcgacttcacttttgaagtccacctcctccgacag

SEQ ID NO: 66057 - DNA, 80 bp, synthetic construct
  source 1..80: mol_type = other DNA
tccgggacgaggcttatgaaggaatcatcaatgacaggacccaaaggtacaatacctggctcaacattcgtaacatgagg

SEQ ID NO: 66058 - DNA, 80 bp, synthetic construct
  source 1..80: mol_type = other DNA
gttcaacatagagacagttcacacgtatggtgacgactgtctctacggtttcacaccggcaactgcttccctggcatcag

SEQ ID NO: 66059 - DNA, 80 bp, synthetic construct
  source 1..80: mol_type = other DNA
ttatcaaccccttttcaaacgaagcagtgtccactgcttggatctctattgaaaccaaacccggaggagattttgatttg

SEQ ID NO: 66060 - DNA, 80 bp, synthetic construct
  source 1..80: mol_type = other DNA
aaaatagcattgaagacgtcaaaatgttcatataaagtagtagagtattgtattgtaacgattcttaatacatcattaaa

SEQ ID NO: 66061 - DNA, 80 bp, synthetic construct
  source 1..80: mol_type = other DNA
ataaactaactacacgtgaaattgagcaagttgaattacttaaacgcatctacgataaattaatagtgcgatcgactggt

SEQ ID NO: 66062 - DNA, 80 bp, synthetic construct
  source 1..80: mol_type = other DNA
agtcactctgatgaatgacacattgcattctataattcaggatcctggaatggcgtattttccatatgtggcatctgttc

SEQ ID NO: 66063 - DNA, 80 bp, synthetic construct
  source 1..80: mol_type = other DNA
aatggaggatcctggaatggcgtactttccatatgtcgcttctgtcctaactgtactgtttacgttacataaagcttcaa

SEQ ID NO: 66064 - DNA, 80 bp, synthetic construct
  source 1..80: mol_type = other DNA
attggttggttttaaggaacagattactacaaaggacgaaattgaaaagcaaatggacaggagtgtaaaagaaatgagac

SEQ ID NO: 66065 - DNA, 80 bp, synthetic construct
  source 1..80: mol_type = other DNA
tgatcactttaatgaatgacacattgcattctataattcaagatcctggaatggcgtacttcccatatattgcatctgtt

SEQ ID NO: 66066 - DNA, 80 bp, synthetic construct
  source 1..80: mol_type = other DNA
aatggaagatcctggaatggcgtattttccttatatcgcctctgttttaactgtgctgtttacgctacgcaaagcttcaa

SEQ ID NO: 66067 - DNA, 80 bp, synthetic construct
  source 1..80: mol_type = other DNA
aaaattgctcttaaaacatctaggtgttcgtacaaagtaatcaagtactgtatcgtatcaatttttaatactttgctgaa

SEQ ID NO: 66068 - DNA, 80 bp, synthetic construct
  source 1..80: mol_type = other DNA
attggctggatataaggagcaaataactactaaagatgaaattgaaaaacaaatggacagagttgtaaaagaaatgagac

SEQ ID NO: 66069 - DNA, 80 bp, synthetic construct
  source 1..80: mol_type = other DNA
ataaactaaccactagagaaatagaacaggtagagttacttaaacgaatacatgatatgctaataattaaaccagttgac

SEQ ID NO: 66070 - DNA, 80 bp, synthetic construct
  source 1..80: mol_type = other DNA
aaaattgatatgtcgcaagaatttaatcaaaaacattttaaaacgctgaatgaatgggcggaaggtgagaatccatatga

SEQ ID NO: 66071 - DNA, 80 bp, synthetic construct
  source 1..80: mol_type = other DNA
accgaaggaagtgactgcatctttgtgagaggttgaactgtcgtcgtctgtctacggaagcggcggagctcttaacagta

SEQ ID NO: 66072 - DNA, 80 bp, synthetic construct
  source 1..80: mol_type = other DNA
agtccctttaatgaatgacacattacattctctaattcaggatcctggaatggcgtattttccatatattgcatcttttc

SEQ ID NO: 66073 - DNA, 80 bp, synthetic construct
  source 1..80: mol_type = other DNA
attagaggatccaggaatggcgtattttccttatattgcatctgtcctgacagttttgttcacattacacaaagcatcaa

SEQ ID NO: 66074 - DNA, 80 bp, synthetic construct
  source 1..80: mol_type = other DNA
tataaagaacaggttactactaaggatgagatcgaacagcagatggatagaattgtcaaagaaatgagacgtcaattgga

SEQ ID NO: 66075 - DNA, 80 bp, synthetic construct
  source 1..80: mol_type = other DNA
aatgattgatagattaactactcgtgaaattgaacaggtcgaactacttaaacgtatacatgataaattaatgactagac

SEQ ID NO: 66076 - DNA, 80 bp, synthetic construct
  source 1..80: mol_type = other DNA
aatccatatgaatcatcagaagtgactgcgcctatgtgagaggttgagttgccgtcgtctgtcttcggaagcggcggaac

SEQ ID NO: 66077 - DNA, 80 bp, synthetic construct
  source 1..80: mol_type = other DNA
aatcactttaatgaatgatacattacattctataattcaagaaccaggaatggcgtattttccttatattgcatctgttt

SEQ ID NO: 66078 - DNA, 80 bp, synthetic construct
  source 1..80: mol_type = other DNA
ctccaccaagtccccccccagacggtaagaatccttttactcatataccccagtatcagtagtgtgttttacctctgctt

SEQ ID NO: 66079 - DNA, 80 bp, synthetic construct
  source 1..80: mol_type = other DNA
agagataaattgtttaaaacgttatcagtaagtcatgacagagtagttaacgtggttcggtatgcaaaatttttaaaaaa

SEQ ID NO: 66080 - DNA, 80 bp, synthetic construct
  source 1..80: mol_type = other DNA
ttgtttaaaacgttatcagtaagtcatgacagagtagttaacgtggttcggtatgcaaaatttttaaaaaaaaaaaaaca

SEQ ID NO: 66081 - DNA, 80 bp, synthetic construct
  source 1..80: mol_type = other DNA
ggcttttaaaagttctattccgagagagcgcgtgcggaaagatggataagcttgccgacctcaactacacattgagtgta

SEQ ID NO: 66082 - DNA, 80 bp, synthetic construct
  source 1..80: mol_type = other DNA
attctataattcaagatcctggaatggcgtattttccatacattgcatctgttctaacagttttgttcacattacataaa

SEQ ID NO: 66083 - DNA, 80 bp, synthetic construct
  source 1..80: mol_type = other DNA
aaaatagcattgaaaacatcaaaatgttcatataaagtgattaaatattgtatagtcacaatcattaatactcttttaaa

SEQ ID NO: 66084 - DNA, 80 bp, synthetic construct
  source 1..80: mol_type = other DNA
gatataaagagcaggttactacaaaagacgaaattgagcaacagatggacagaattgttaaagagatgagacgtcagcta

SEQ ID NO: 66085 - DNA, 80 bp, synthetic construct
  source 1..80: mol_type = other DNA
gatatgattgataaactaactactcgtgaaattgaacaggttgaattacttaaacgtatacatgacaacctgatagctaa

SEQ ID NO: 66086 - DNA, 80 bp, synthetic construct
  source 1..80: mol_type = other DNA
accagttgacgttatagatatgtcgaaggaattcaatcagaaaaatatcaaaacgctagatgaatgggagagtggaaaaa

SEQ ID NO: 66087 - DNA, 80 bp, synthetic construct
  source 1..80: mol_type = other DNA
atccatgtgagaggttgagttaccgtcgtctgtcttcggaagcggcggaactcttcaccgcaagccccattagacctgat

SEQ ID NO: 66088 - DNA, 80 bp, synthetic construct
  source 1..80: mol_type = other DNA
ccacagtcaatcatatcgcgtgtggctcagccttaatcccgtttaaccaatccagcgagtgttggacgttaatggaagga

SEQ ID NO: 66089 - DNA, 80 bp, synthetic construct
  source 1..80: mol_type = other DNA
aagattgctcttagaacatcaaggtgctcatataaagtgatcaaatattgtattgtatcaatctttaacaccttactaaa

SEQ ID NO: 66090 - DNA, 80 bp, synthetic construct
  source 1..80: mol_type = other DNA
ataagctaactactagagagattgaacaagttgaactactcaaacgaattcatgatatgttgataattaaaccagttgat

SEQ ID NO: 66091 - DNA, 80 bp, synthetic construct
  source 1..80: mol_type = other DNA
aaaattgatatgtcgcaagaattcaatcagagacaatttagaacgctaaatgagtgggccgaaggtgaaaatccgtatga

SEQ ID NO: 66092 - DNA, 80 bp, synthetic construct
  source 1..80: mol_type = other DNA
accgaaagaggtgactgcatcattgtgagaggttgagctgccgtcgtctgtctacggaagcggcggagttcttagcagtg

SEQ ID NO: 66093 - DNA, 80 bp, synthetic construct
  source 1..80: mol_type = other DNA
aatcacccttatgaatgacacgctacataccataatggaggatcctggaatggcgtactttccatatattgcttctgtcc

SEQ ID NO: 66094 - DNA, 80 bp, synthetic construct
  source 1..80: mol_type = other DNA
tatttattacaagtccccttggaggagatgaatgattgaccacacacccttttttatatcatatggggtgcatcttcttt

SEQ ID NO: 66095 - DNA, 80 bp, synthetic construct
  source 1..80: mol_type = other DNA
atatggggtgcatcttctttttattttcattacaccaacccatgtagtttgtgcgtagaaggaatggtcttaatgtgacc

SEQ ID NO: 66096 - DNA, 80 bp, synthetic construct
  source 1..80: mol_type = other DNA
tctgaagttagctggtcataaagaacaggttactactaaagatgagatcgaacagcagatggatagaattgtcaaagaaa

SEQ ID NO: 66097 - DNA, 80 bp, synthetic construct
  source 1..80: mol_type = other DNA
tgagacgtcaattggagatgattgataaattaactactcgtgaaattgaacaggttgaattacttaaacgtatacatgat

SEQ ID NO: 66098 - DNA, 80 bp, synthetic construct
  source 1..80: mol_type = other DNA
agattgattattagaccagttgacggcatagacatgtcaaaagaatttaaccagaagaatgttagaacgctagatgaatg

SEQ ID NO: 66099 - DNA, 80 bp, synthetic construct
  source 1..80: mol_type = other DNA
ttccaaccatgaagattgctcttaaaacgtcaaagtgttcatataaagtaatcaaatactgcattgtgtcaatttttaac

SEQ ID NO: 66100 - DNA, 80 bp, synthetic construct
  source 1..80: mol_type = other DNA
actctattgaaactggctggatataaagaacaaattactactaaagatgaaattgaaaggcaaatggacagagttgtaaa

SEQ ID NO: 66101 - DNA, 80 bp, synthetic construct
  source 1..80: mol_type = other DNA
aatcactttaatgaatgacacgctgcattctataattcaggaccctggaatggcgtattttccatatattgcatctgttc

SEQ ID NO: 66102 - DNA, 80 bp, synthetic construct
  source 1..80: mol_type = other DNA
aatcacttcaatgaatgacacattacattctataattgaagatcctggaatggcgtattttacatatattgcatctgttc

SEQ ID NO: 66103 - DNA, 80 bp, synthetic construct
  source 1..80: mol_type = other DNA
aggcttatgagggaatcatcaatgacagaacccaaaggtacaatacctggctcaatattcgtaacatgaggcttggggct

SEQ ID NO: 66104 - DNA, 80 bp, synthetic construct
  source 1..80: mol_type = other DNA
ggtgcttaccaacacgctactattattggcaaaggtggggttagaaatgaaattatccgcacacaagtaatgaaggcacc

SEQ ID NO: 66105 - DNA, 80 bp, synthetic construct
  source 1..80: mol_type = other DNA
cctcaccatgatctaccagcaacatcataacaccccgagcgggtggttggcaactctgacagctctttgggaggttttcc

SEQ ID NO: 66106 - DNA, 80 bp, synthetic construct
  source 1..80: mol_type = other DNA
ttaaagaggtggagaaatcatgcgacagacgtatacgcgattatgattggaaaatcgccacactaactgctcatacaaca

SEQ ID NO: 66107 - DNA, 80 bp, synthetic construct
  source 1..80: mol_type = other DNA
agcaattaaaagtccagttatggcggaaagcagtgatatgcaagaattatttgtacaagcgacatacgaagagatactaa

SEQ ID NO: 66108 - DNA, 80 bp, synthetic construct
  source 1..80: mol_type = other DNA
gctgacaactctaatagtgaagaaaaaaggaacaaaatttctaaccacgaaagtgcagtcgaatgttgcgtatttggcgg

SEQ ID NO: 66109 - DNA, 80 bp, synthetic construct
  source 1..80: mol_type = other DNA
aaacaatttgtgatgaagttcttcatcaacgaaaagttattgaaaaactacaatgtttggataagatgtgctcagaaatt

SEQ ID NO: 66110 - DNA, 80 bp, synthetic construct
  source 1..80: mol_type = other DNA
gatatgatatggagcatttccaagggatggacgtgactaaagaattgatacaaatgtgtgaacaaaaaatgattgatata

SEQ ID NO: 66111 - DNA, 80 bp, synthetic construct
  source 1..80: mol_type = other DNA
ttaaagaggtagaaagatcatgtgacagacgcatacgtgattatgattggaaaatcgccacactaaccgctcatccaaca

SEQ ID NO: 66112 - DNA, 80 bp, synthetic construct
  source 1..80: mol_type = other DNA
cagctcacatagatataataaatcagcatatagaagacgatgctgaaactcaaatcatacagcagcacatgaataaacag

SEQ ID NO: 66113 - DNA, 80 bp, synthetic construct
  source 1..80: mol_type = other DNA
aactaaattcgcgtaacagactttagaatctgtgaagcagctaggggacgatctctctgtagttgcttctccccaactga

SEQ ID NO: 66114 - DNA, 80 bp, synthetic construct
  source 1..80: mol_type = other DNA
cgttaatcatgaacagattagagaaaccatatcatcttcatcaccgcagaaaatactaacaggaactatgcttacattgg

SEQ ID NO: 66115 - DNA, 80 bp, synthetic construct
  source 1..80: mol_type = other DNA
ggcttgttgactcgggatttgaaaagtatcaatatgattatgtatatatgcgggatggcatgaccattaatgcacacaca

SEQ ID NO: 66116 - DNA, 80 bp, synthetic construct
  source 1..80: mol_type = other DNA
tatggagagagtattactagtgatttagaagtgtctattaggaatctacaagatcaaataaattcaattatagctgaaat

SEQ ID NO: 66117 - DNA, 80 bp, synthetic construct
  source 1..80: mol_type = other DNA
ggcaattaaaagtccagttatggcggaaagtagtaatatgcaagatctatttgtgcaagcgacatacgaggaaattctaa

SEQ ID NO: 66118 - DNA, 80 bp, synthetic construct
  source 1..80: mol_type = other DNA
aactactttaatagtgaagaaaaaaggaacaaaattcctaactacaaaaatgcagtcgaatattgtatatctagctgaga

SEQ ID NO: 66119 - DNA, 80 bp, synthetic construct
  source 1..80: mol_type = other DNA
gttatgacatagagcatttccaagggatggacgtaactaaagaactgatacaaatgtgtgaacggaaaatgattgacata

SEQ ID NO: 66120 - DNA, 80 bp, synthetic construct
  source 1..80: mol_type = other DNA
cagcccatatagacattataaatcagcacatagaagacgatgctgagactcaaatcatacagcaacatatgaataaacag

SEQ ID NO: 66121 - DNA, 80 bp, synthetic construct
  source 1..80: mol_type = other DNA
cgttaatcatgaacagattagagaaaccatatcatcttcatcaccacaaaagatattgacgggagctatgcttacgttgg

SEQ ID NO: 66122 - DNA, 80 bp, synthetic construct
  source 1..80: mol_type = other DNA
acaaaagaaatcaatcaaaagagcgtgaaaacgctagaagagtgggaaagtggaaaaaatccttatgaaccaaaggaagt

SEQ ID NO: 66123 - DNA, 80 bp, synthetic construct
  source 1..80: mol_type = other DNA
attggaagatccaggaatggcatactttccatatattgcgtctgtcctgacagttttgttcacattgcataaagcgtcaa

SEQ ID NO: 66124 - DNA, 80 bp, synthetic construct
  source 1..80: mol_type = other DNA
aaaattgcgttaaagacgtcaaaatgttcatataaggtggtgaagtattgcattgtcacgattttcaatacgctattgaa

SEQ ID NO: 66125 - DNA, 80 bp, synthetic construct
  source 1..80: mol_type = other DNA
ataagttgactactcgtgagattgaacaagtggaattacttaaacgaatatatgacaaactaatggtacgaacaacagac

SEQ ID NO: 66126 - DNA, 80 bp, synthetic construct
  source 1..80: mol_type = other DNA
ctggaggatccagggatggcgtattttccctatattgcatctgtcctaacggttttgttcacattgcataaagcatcaat

SEQ ID NO: 66127 - DNA, 80 bp, synthetic construct
  source 1..80: mol_type = other DNA
cgtgtggctcaagccttaatcccgtttaaccaatccggtcagcaccggacgttaatgggaaatgattgataaatgtgacc

SEQ ID NO: 66128 - DNA, 80 bp, synthetic construct
  source 1..80: mol_type = other DNA
ccacagtcagccatatcgcgtgtggctcaagccttaatcccgtttaaccaatctggtcagcaccggacgtcaattggaaa

SEQ ID NO: 66129 - DNA, 80 bp, synthetic construct
  source 1..80: mol_type = other DNA
aaaatagcattaaagacatcaaaatgttcgtataaagtagtaaaatattgcactgtgacgattttcaatacgttattgaa

SEQ ID NO: 66130 - DNA, 80 bp, synthetic construct
  source 1..80: mol_type = other DNA
agaaaagaaattaatcaaaagaacgtaaaaacgctggaagagtgggagagtggaagaaatccttatgaaccaaaagaagt

SEQ ID NO: 66131 - DNA, 80 bp, synthetic construct
  source 1..80: mol_type = other DNA
ggcttctaagccattctaccctactttattcaaccgtaaggttgagtattcagtgctcagatcggctcacctcagggtga

SEQ ID NO: 66132 - DNA, 80 bp, synthetic construct
  source 1..80: mol_type = other DNA
ctagaagatccaggaatggcgtattttccttatatagcatctgtgttgacagtactgtttacattgcataaagcttcaat

SEQ ID NO: 66133 - DNA, 80 bp, synthetic construct
  source 1..80: mol_type = other DNA
tataaagaacaaatcactactaaggatgaaatcgaaaaacagatggatagagtagtgaaagaaatgaggcgtcaattgga

SEQ ID NO: 66134 - DNA, 80 bp, synthetic construct
  source 1..80: mol_type = other DNA
gtgcggcccaattgacggtgtagacatgacaaaagaaattaaccagaagaacgttagaacgctagaagagtgggaaaatg

SEQ ID NO: 66135 - DNA, 80 bp, synthetic construct
  source 1..80: mol_type = other DNA
atgtaagaggttgagctgccgtcgactgtcctcggaagcggcggagttcttaacagtaagcctcatcggacctgatggct

SEQ ID NO: 66136 - DNA, 80 bp, synthetic construct
  source 1..80: mol_type = other DNA
cggtcaatgctcaactcaacattgttccttctgtacatcctgaagtgtgtgtgctttatgctgatgaccatcaatctgat

SEQ ID NO: 66137 - DNA, 80 bp, synthetic construct
  source 1..80: mol_type = other DNA
taattcatacacagttgaattatcagatgaaattaatacaattggatcagaaaaaaatcaaaatgtaacaattaatcccg

SEQ ID NO: 66138 - DNA, 80 bp, synthetic construct
  source 1..80: mol_type = other DNA
gcattatcatctagatcagtgacttatcaacgtgctcaggttaatgaggatatcattatatcaaagacatcgttgtggaa

SEQ ID NO: 66139 - DNA, 80 bp, synthetic construct
  source 1..80: mol_type = other DNA
agagactaccaaattatgtgtttgatatgtgagggcttgagccagccacagttcccaaagggaccacacaggatgatcga

SEQ ID NO: 66140 - DNA, 80 bp, synthetic construct
  source 1..80: mol_type = other DNA
acatgctacctagctcagggtgtggaacttgcaatggctcacatgggcgcagggacctacgcatatgtagacccactgca

SEQ ID NO: 66141 - DNA, 80 bp, synthetic construct
  source 1..80: mol_type = other DNA
ttcgaggagcgttcttggtgcatatactacacataccatgtgaccacccatataacacacagaacaacctttctcggtgc

SEQ ID NO: 66142 - DNA, 80 bp, synthetic construct
  source 1..80: mol_type = other DNA
ataccatgtgaccacccatataacacacagaacaacctttctcggtgccatacatctgggcccccgcattaacccctaca

SEQ ID NO: 66143 - DNA, 80 bp, synthetic construct
  source 1..80: mol_type = other DNA
catacatcttggcctccgcattaacacctacactgcacacctgagtgcaatgtttgctggttggggggggggctttcagg

SEQ ID NO: 66144 - DNA, 80 bp, synthetic construct
  source 1..80: mol_type = other DNA
tgcgggtcacaatctcaggttctggactctttgctggtcgggccatcactgctatcctgccaccaggtgtcaacccagct

SEQ ID NO: 66145 - DNA, 80 bp, synthetic construct
  source 1..80: mol_type = other DNA
gctgttcaaaacccgggtgtcttcccccacgcgttcattgacgctcgcacaaccgaccccatactaatcaacttgcccga

SEQ ID NO: 66146 - DNA, 80 bp, synthetic construct
  source 1..80: mol_type = other DNA
catccggcccattgacttccaccgtgtggatgggggacgacgcaacagcgtctgtggtggttggtgggttgcgcagccct

SEQ ID NO: 66147 - DNA, 80 bp, synthetic construct
  source 1..80: mol_type = other DNA
tgatcaacccgtttcaaactggctctgtttccacatggttggcttattttgaaacacggccctggtccggactttggact

SEQ ID NO: 66148 - DNA, 80 bp, synthetic construct
  source 1..80: mol_type = other DNA
catggttggcttattttgaaacacggccctggtccggactttggacttttggtctcctcaaggccccgagcaagaaattg

SEQ ID NO: 66149 - DNA, 80 bp, synthetic construct
  source 1..80: mol_type = other DNA
aacatggtgtgtgaccccccaggacaccattgcgacaaacgagctgcacttctgctgcgccactccagttgagacgacca

SEQ ID NO: 66150 - DNA, 80 bp, synthetic construct
  source 1..80: mol_type = other DNA
acgagaaaatgttgctataattcaagttggtggaccgaacgcactagatatcactgctgatccaacaacagtcccacagg

SEQ ID NO: 66151 - DNA, 80 bp, synthetic construct
  source 1..80: mol_type = other DNA
agtggcaggtcttcaagcggtgctacctcagggtagcgccacgtgcagcattttgtgagaacttgagtgaacttcatcac

SEQ ID NO: 66152 - DNA, 80 bp, synthetic construct
  source 1..80: mol_type = other DNA
tctttgaaacggtcccacacgcgttcgggtgggttttggacaattaagcgattgtcgccgttcccaaaaaaaaaaaaaaa

SEQ ID NO: 66153 - DNA, 80 bp, synthetic construct
  source 1..80: mol_type = other DNA
ccgggtggtctgacacagcacatggtgtgggtgaagtgccactgaagactgatttggagctagatttttctctgccctca

SEQ ID NO: 66154 - DNA, 80 bp, synthetic construct
  source 1..80: mol_type = other DNA
caacagcaggcatgagatgtcctgagcacacaggttccttcagaaaaatttgtgcatttgctacaacacccgtttgtgag

SEQ ID NO: 66155 - DNA, 80 bp, synthetic construct
  source 1..80: mol_type = other DNA
gaactatatattaaaatcactaactagtgcgatggactttataatttatagacttcttttacttattgttattacatcac

SEQ ID NO: 66156 - DNA, 80 bp, synthetic construct
  source 1..80: mol_type = other DNA
aaacatcctacactctcagcttgggatggcttccaagccattccaagttgagtcttgcgacttcacttttgaagtccacg

SEQ ID NO: 66157 - DNA, 80 bp, synthetic construct
  source 1..80: mol_type = other DNA
tagcaccaagagagcgctttcttgatgattgcacattgggtgcagtcataaagtattatttgcaccacacaccccaacat

SEQ ID NO: 66158 - DNA, 80 bp, synthetic construct
  source 1..80: mol_type = other DNA
ccagggtgttcacccattggagcactctactcaagttggccagtggtataacaactgtggttggggcgacacgtgccgtc

SEQ ID NO: 66159 - DNA, 80 bp, synthetic construct
  source 1..80: mol_type = other DNA
gattggataatggggaaaatccgtgatgcacgtcactcgtccatgtgcaaacagtttctcagccgtgtttcagcactact

SEQ ID NO: 66160 - DNA, 80 bp, synthetic construct
  source 1..80: mol_type = other DNA
tgagttgcattattcaaaaactgtcactggtgttgcagagaacactgaattgctcaagtgttttgaccaactgattgatg

SEQ ID NO: 66161 - DNA, 80 bp, synthetic construct
  source 1..80: mol_type = other DNA
agggtgaggagttagtttctgagattggtggtggctctttggctgcaataatacgtagtggtgttgacacactacaacgt

SEQ ID NO: 66162 - DNA, 80 bp, synthetic construct
  source 1..80: mol_type = other DNA
gtttccacggaaatcaaggccacaattcagttggacaatccacgccctgtacctgtgtgtgtcatattttccggcccccc

SEQ ID NO: 66163 - DNA, 80 bp, synthetic construct
  source 1..80: mol_type = other DNA
atgatttcattggtgaacacccaaccctgtgtgctgaactgtgaccgccctgaaaacaaaggcaaactcttcacatccaa

SEQ ID NO: 66164 - DNA, 80 bp, synthetic construct
  source 1..80: mol_type = other DNA
gttcatcttttgtacaactaactacactaccagtgttcttccagataatccacgtgctggtgcattttaccggcgtgtca

SEQ ID NO: 66165 - DNA, 80 bp, synthetic construct
  source 1..80: mol_type = other DNA
tcaccgtggacgtacgctcccctgaaattgaagactggatggcggcgcatcctgggaagtctccacccaaaaccttattc

SEQ ID NO: 66166 - DNA, 80 bp, synthetic construct
  source 1..80: mol_type = other DNA
gttaaaagtggtatgggctgtgggttcgaggcagaggggttgctgtcacggttattcgggacagccggttccccctcgct

SEQ ID NO: 66167 - DNA, 80 bp, synthetic construct
  source 1..80: mol_type = other DNA
aagagtgactgctcccatctgaaactcatggtgagaccgtatatggggtacaatcctgatggggacacgttgtctggcaa

SEQ ID NO: 66168 - DNA, 80 bp, synthetic construct
  source 1..80: mol_type = other DNA
agtctggtgaagtgcgcggactgtggatcacagttccacgcaggagcgtgcaggtggccttggtggctgtgaaaaagttc

SEQ ID NO: 66169 - DNA, 80 bp, synthetic construct
  source 1..80: mol_type = other DNA
tgcactgcacaccaggctttgtgccatgtcacatcaacacccaccccagaagtgttgcagtgcgccaccttttcatgcgt

SEQ ID NO: 66170 - DNA, 80 bp, synthetic construct
  source 1..80: mol_type = other DNA
ggttgtttcagatgctcaccccccacctggtgcacccctactccacataaagaatgctcacctggaagtggatgctactg

SEQ ID NO: 66171 - DNA, 80 bp, synthetic construct
  source 1..80: mol_type = other DNA
gccagtcgttggccagcatcagtgagagtttgcttgggatgttcattacagaacagcgcgtgtcttcacaactgcaaaga

SEQ ID NO: 66172 - DNA, 80 bp, synthetic construct
  source 1..80: mol_type = other DNA
gacatcatgtataaggtctggtcccccttcaccctcatgcagactgaacctttgaatacacagacattacccccaatacg

SEQ ID NO: 66173 - DNA, 80 bp, synthetic construct
  source 1..80: mol_type = other DNA
ccgtatcatctatgcggattcagctatggatttcataggtggccttcggcatcatttggggttcagctcgcttccaggtc

SEQ ID NO: 66174 - DNA, 80 bp, synthetic construct
  source 1..80: mol_type = other DNA
tgtggcgcgccctcaggcaccttcctgacacgacatcaatgatagagtggatcactgaccatttgtctcaggtgaaattc

SEQ ID NO: 66175 - DNA, 80 bp, synthetic construct
  source 1..80: mol_type = other DNA
ccaaacaatccagaatccaccctgttccgcacaggaaatggggatgtcattttctacacatatggttcattctatgcact

SEQ ID NO: 66176 - DNA, 80 bp, synthetic construct
  source 1..80: mol_type = other DNA
gtgatgctttgagcccattgcccaacgtccctctcaaaatgacctggtttgaaaccctgaaggcactctgctcctctgcc

SEQ ID NO: 66177 - DNA, 80 bp, synthetic construct
  source 1..80: mol_type = other DNA
ctacgtctgtttacggctgttgctccgtttgcaattgccgtagcaaatgtgacctacttaacaactcggggtgcccgtga

SEQ ID NO: 66178 - DNA, 80 bp, synthetic construct
  source 1..80: mol_type = other DNA
agagcaagccaaagggaaaaccaagcatggtcgtggagcgcggcacgcgcgtggcagatccacagcattgaatgatgatg

SEQ ID NO: 66179 - DNA, 80 bp, synthetic construct
  source 1..80: mol_type = other DNA
gcatatgagggcatcatcaacgatcgcacgcagcgctataacacttggctcaatctacgcaatatgcgtttgggggcaaa

SEQ ID NO: 66180 - DNA, 80 bp, synthetic construct
  source 1..80: mol_type = other DNA
cgcataccaacatgccaccatcattggaaaggggggtgcgcaatgaaataatacgcacccaagtcttgaaggcgccgcgc

SEQ ID NO: 66181 - DNA, 80 bp, synthetic construct
  source 1..80: mol_type = other DNA
gtgcgcaatgaaataatacgcacccaagtcttgaaggcgccgcgcaaaggcaaatggtcacacattgattcatctggtcc

SEQ ID NO: 66182 - DNA, 80 bp, synthetic construct
  source 1..80: mol_type = other DNA
gaaagtgatggatcccacgtgggatggggagtccatttgggtaatggcagagtgattacggtcactcatgtggcaacatc

SEQ ID NO: 66183 - DNA, 80 bp, synthetic construct
  source 1..80: mol_type = other DNA
ttccaacactgtcaacggagtccccttcaaggttaaggatacagatggggaaacctgtcaggtgtacgccgcacttggca

SEQ ID NO: 66184 - DNA, 80 bp, synthetic construct
  source 1..80: mol_type = other DNA
atttgccccactaccaactcggtgatggtgccccagtttattacacaaccaggtaccaccctgtgttggtgattggagag

SEQ ID NO: 66185 - DNA, 80 bp, synthetic construct
  source 1..80: mol_type = other DNA
ccaccaccgtgcatggttaccatgtcagaattaccaactcttatcccaccaagaaaggggactgtgggcttccatacttc

SEQ ID NO: 66186 - DNA, 80 bp, synthetic construct
  source 1..80: mol_type = other DNA
tggcgcagcgcgtgtcggagaaacccgagaagggagagaccttcatttggaaaggcttgcctgttgtgcgtggtaatgat

SEQ ID NO: 66187 - DNA, 80 bp, synthetic construct
  source 1..80: mol_type = other DNA
ctgcttggcctgaacaaaccaaagatgaaactcattccccagctccatttggatcaggtgacaaaaggtacgagttctca

SEQ ID NO: 66188 - DNA, 80 bp, synthetic construct
  source 1..80: mol_type = other DNA
aagaagttcctgggatcccacctgccctactgaatcgagcagtggttcacacacgcaattacctacaatctatcataggc

SEQ ID NO: 66189 - DNA, 80 bp, synthetic construct
  source 1..80: mol_type = other DNA
aatgagcagagtgagccgctctcttatggcatggccgcggccctccttgagaggggcacgtcatgtggccctcatgttgt

SEQ ID NO: 66190 - DNA, 80 bp, synthetic construct
  source 1..80: mol_type = other DNA
gggattgaagggtgattactgggatgaagaacttgggcagtacaccggcacgcttcgagaacacttagagcaagtctgga

SEQ ID NO: 66191 - DNA, 80 bp, synthetic construct
  source 1..80: mol_type = other DNA
acaaagccatgcttggctcacccccaagtcatgattataagcttgccctgaaagatgaattgaggcctaacgagaaaaat

SEQ ID NO: 66192 - DNA, 80 bp, synthetic construct
  source 1..80: mol_type = other DNA
gaacaaggaaaacgccgcctgttatggggagcagatgcgggtttaacattagtgtgttgtgcagcattgaaaccagccgc

SEQ ID NO: 66193 - DNA, 80 bp, synthetic construct
  source 1..80: mol_type = other DNA
tgcacgtttgcaggctgttgtgcccatgacccctgttgcagttggtattaacatggactctgctcacattgaagtcatga

SEQ ID NO: 66194 - DNA, 80 bp, synthetic construct
  source 1..80: mol_type = other DNA
atgagtctctcaaaggaagagtgctttatgcgcttgattacagtaaatgggatagcacccagtctgcggctgtcactgct

SEQ ID NO: 66195 - DNA, 80 bp, synthetic construct
  source 1..80: mol_type = other DNA
gcttcactagaaatcttggcctcttttgtggaaccctctcctattgtctcatcagcagtggaagccttgaaagcccctgc

SEQ ID NO: 66196 - DNA, 80 bp, synthetic construct
  source 1..80: mol_type = other DNA
ccggggcatggtgaacgatgcaatttttgttgcgcgttcaggcctaccatctggcatgccgttcaccagtgtcatcaact

SEQ ID NO: 66197 - DNA, 80 bp, synthetic construct
  source 1..80: mol_type = other DNA
ccatcaaccacatgctttatatctcagcagcaatcttgcaagcctatgaagcccacaatttgccatacaatgacaatgtt

SEQ ID NO: 66198 - DNA, 80 bp, synthetic construct
  source 1..80: mol_type = other DNA
ttatgccgcaggtcatagagaacttgcgttcctatggtttgaaaccaacagcagcagataagggtgaggtgatagcgcca

SEQ ID NO: 66199 - DNA, 80 bp, synthetic construct
  source 1..80: mol_type = other DNA
gtacaaacaccagttttccttaagagaacctttgctaccactccaagcgggttgcgggctctacttgaccagtcctccat

SEQ ID NO: 66200 - DNA, 80 bp, synthetic construct
  source 1..80: mol_type = other DNA
cctgcgccagtttttctgggtgaaggcccaacgcacttgtgatgtcaactcccctccaactattgacgtcaaatctcgtg

SEQ ID NO: 66201 - DNA, 80 bp, synthetic construct
  source 1..80: mol_type = other DNA
cagcacaaatggaagtggctttggcctacgctagccaacatgggcatgagttcttccagaaagctcgtgacattgcagag

SEQ ID NO: 66202 - DNA, 80 bp, synthetic construct
  source 1..80: mol_type = other DNA
cagcagagggttatgttctggtgaacaccaactacgaacaggcaactgcttgttataacagctggtacataggaggtggt

SEQ ID NO: 66203 - DNA, 80 bp, synthetic construct
  source 1..80: mol_type = other DNA
tgcccactaccaatgaaggctgtgggctgatagtgtttgagatggagggcaatggctcctctggccaaggcaacctgcca

SEQ ID NO: 66204 - DNA, 80 bp, synthetic construct
  source 1..80: mol_type = other DNA
caatcccataattctaatgcttcatctgctcaggcttcaccgcctggcacgactgggcctaatgaagcaccccttgttcc

SEQ ID NO: 66205 - DNA, 80 bp, synthetic construct
  source 1..80: mol_type = other DNA
ggctggggcggcgcaatggacatcagagttacggtctcaggctcgggtatatttgctgggaagcttgtctgtggtatact

SEQ ID NO: 66206 - DNA, 80 bp, synthetic construct
  source 1..80: mol_type = other DNA
ctcttgtcagcgatccgggggttcttccacacgcactagtggatgccagggtggctgagcctgcttgcttcaacgtccct

SEQ ID NO: 66207 - DNA, 80 bp, synthetic construct
  source 1..80: mol_type = other DNA
gcctcatgaaaccgcctgggcaagcaatggaaaatggggcttcaccatcacacctccttccacgcaggctccagagggct

SEQ ID NO: 66208 - DNA, 80 bp, synthetic construct
  source 1..80: mol_type = other DNA
cgtggcaacagagctggtggttatgccgtgggtatggtgattgttggttcggcacaccaggtcaaccgccacttcacggc

SEQ ID NO: 66209 - DNA, 80 bp, synthetic construct
  source 1..80: mol_type = other DNA
cgcttggcacaacttttggctggtccactgctccttatgagccaatgcggtgtgcgtttggtggtgtgcacactggtact

SEQ ID NO: 66210 - DNA, 80 bp, synthetic construct
  source 1..80: mol_type = other DNA
gacacctctcccaaaattggctattattgggaagtcgggtccgaccaacgtgggcccatatttccccatatagtcaatca

SEQ ID NO: 66211 - DNA, 80 bp, synthetic construct
  source 1..80: mol_type = other DNA
ttggccagattttgctgtgaacaacacctactcatggccaggctcggagtttgtccctcaaaacgccattgtcggtacac

SEQ ID NO: 66212 - DNA, 80 bp, synthetic construct
  source 1..80: mol_type = other DNA
ttgtctcctttgctgacaatggtgatgtgtccgagaacgaggtggtacccgcatttgcggttacaatgaacactccttcc

SEQ ID NO: 66213 - DNA, 80 bp, synthetic construct
  source 1..80: mol_type = other DNA
accagcactcgaggcaccgtccgtggctcatttgacccatccaccatgcatttggtgcgtactaacagcactggacaacc

SEQ ID NO: 66214 - DNA, 80 bp, synthetic construct
  source 1..80: mol_type = other DNA
atctgggtggccatctggcccaaacaatgggaatggatatttcacaccaatgtggggacatggtcagggcaatgctatta

SEQ ID NO: 66215 - DNA, 80 bp, synthetic construct
  source 1..80: mol_type = other DNA
atgataaaatcaccaacatggagggtgtgaattacaccttcggaggctctggccaaaacaacattgtcttgtggattgag

SEQ ID NO: 66216 - DNA, 80 bp, synthetic construct
  source 1..80: mol_type = other DNA
aaacaaccctgtactcatctcagctggacagtactgccacaatatttcaatctggtcctgtcaacatccctgagaacatg

SEQ ID NO: 66217 - DNA, 80 bp, synthetic construct
  source 1..80: mol_type = other DNA
atggccgtgtataacgtcaccactaacggagctgacttccaagttggcattcgacgtgatggctatatggtcacttctgg

SEQ ID NO: 66218 - DNA, 80 bp, synthetic construct
  source 1..80: mol_type = other DNA
cttcaggaacagtggatggcccgtaatgaacagctccagagggatgccatgcagcttagtagggacctagccatacaggc

SEQ ID NO: 66219 - DNA, 80 bp, synthetic construct
  source 1..80: mol_type = other DNA
ccctgcgttgagggtgcaggccgccatcaatgcagggtttgatgttgtgagtgcccgacaattggctggttctggtgagc

SEQ ID NO: 66220 - DNA, 80 bp, synthetic construct
  source 1..80: mol_type = other DNA
gcaggatcaatgggtatttggaacaacctgtgcgtaccatagatcaagcaatggcaatacagtctagggggaatttgaca

SEQ ID NO: 66221 - DNA, 80 bp, synthetic construct
  source 1..80: mol_type = other DNA
actctatccaatgccctctcaacatttcaaaacggcacgcagtttggaatgaaagcccctaagaatttctccagacccaa

SEQ ID NO: 66222 - DNA, 80 bp, synthetic construct
  source 1..80: mol_type = other DNA
ttataatcaacaatcaagaccaccttttgttaatcttggtccttcaccaccctcaacaaatgtgtgattttacattttct

SEQ ID NO: 66223 - DNA, 80 bp, synthetic construct
  source 1..80: mol_type = other DNA
ttgtttctttcttacaaattttcttttgtttcagtggtcgcatacgcgttcggatgcgttttggtcaattaagcgattga

SEQ ID NO: 66224 - DNA, 80 bp, synthetic construct
  source 1..80: mol_type = other DNA
gctggcttgcaactctcacagccctttgggaagtcttccaaccctctcttccagccttgggcacactgggtgcgggagtt

SEQ ID NO: 66225 - DNA, 80 bp, synthetic construct
  source 1..80: mol_type = other DNA
gctacaaccttggggctggttgttaacacactctcccggtttttccagaagttgtgtgcctacgtctctgaaactttctt

SEQ ID NO: 66226 - DNA, 80 bp, synthetic construct
  source 1..80: mol_type = other DNA
tcctgagtctcctaccactccagggtgggttgccattgttgctggcatcttgcttttgcttcttaagctttcgtgtatac

SEQ ID NO: 66227 - DNA, 80 bp, synthetic construct
  source 1..80: mol_type = other DNA
gctcagccttaatcccgtttaaccaatccagcgaatgttggacgttaatggaaggaatggttaaacgggattaaggatga

SEQ ID NO: 66228 - DNA, 80 bp, synthetic construct
  source 1..80: mol_type = other DNA
gtgattggttagcatggcttctaagccattctactcaattgagttcaacccacgagttgaacacgcagtcctgtgttctg

SEQ ID NO: 66229 - DNA, 80 bp, synthetic construct
  source 1..80: mol_type = other DNA
cgggcctggcaacaacaccaggcccgcatcccacggcatttggggtttgaatttgaggctgaggggttgttggacgcatt

SEQ ID NO: 66230 - DNA, 80 bp, synthetic construct
  source 1..80: mol_type = other DNA
ttcatccaaaccaccagtcgacatcaatcctgacaccacgtttcgtgaactctttggcgtcgatccacatgaacaatttc

SEQ ID NO: 66231 - DNA, 80 bp, synthetic construct
  source 1..80: mol_type = other DNA
tggagcgcctaccgtgggtggtatgactcaactacaatcattgagtttgttgctaagcacatggctgatgtcacgttccc

SEQ ID NO: 66232 - DNA, 80 bp, synthetic construct
  source 1..80: mol_type = other DNA
cattgtccataacagatttggcacgacttcaaggtgaacttgtagatgcagtgcggaatccgcatcacgcgctgagacgg

SEQ ID NO: 66233 - DNA, 80 bp, synthetic construct
  source 1..80: mol_type = other DNA
cactactctaccgattcgatcaccgccctaattactaagctcaccaaaattgtcccagtccaggccacattggaagatat

SEQ ID NO: 66234 - DNA, 80 bp, synthetic construct
  source 1..80: mol_type = other DNA
aatcagggcaaggtaacccaccacaaggtgtggtgacaccccaggacacaatttcaccaaccgaggcacttttgctccca

SEQ ID NO: 66235 - DNA, 80 bp, synthetic construct
  source 1..80: mol_type = other DNA
acccaggtagaaatgccaaacacgggtgctcaacgcctggagatggcggtcgccactggggcaatcaactccaatgtccc

SEQ ID NO: 66236 - DNA, 80 bp, synthetic construct
  source 1..80: mol_type = other DNA
cctacctcagggtaggtggacgggactcaatttttgaaaaccaccaggacatgttggtccatgtctcccgtctggttgag

SEQ ID NO: 66237 - DNA, 80 bp, synthetic construct
  source 1..80: mol_type = other DNA
catgacgaaatagaacagattggatcggagaaaactcaaaatgtgacggtgaatccaggcccatttgcacagactagata

SEQ ID NO: 66238 - DNA, 80 bp, synthetic construct
  source 1..80: mol_type = other DNA
gctcaccaacttgtttaatcaacagagtacaacgctttcgtggtgcagagcagcaaataaagtttgtttgtcaaagggta

SEQ ID NO: 66239 - DNA, 80 bp, synthetic construct
  source 1..80: mol_type = other DNA
agaaaatctttgaccgtatatgaacctaaacagggctgttacagaacattgtctctgtttaggtataggagccgctgttt

SEQ ID NO: 66240 - DNA, 80 bp, synthetic construct
  source 1..80: mol_type = other DNA
ttttgtgggattaatctggtgtattctcttggttttagaacttatcatatgggctgccagtgccgaacccaaaaaataaa

SEQ ID NO: 66241 - DNA, 80 bp, synthetic construct
  source 1..80: mol_type = other DNA
ctgacgttgtagatggagtcaatcataaattgaacgtgacaacaaacacttgtacgattagaaattgtaaaaaattagga

SEQ ID NO: 66242 - DNA, 80 bp, synthetic construct
  source 1..80: mol_type = other DNA
atttatatactaaaatcaataactcgaattatggactatatactctacagatttttgttgtttattgtaattattacgcc

SEQ ID NO: 66243 - DNA, 80 bp, synthetic construct
  source 1..80: mol_type = other DNA
cagaaccatttctaacatcaacattatgtctttattatccaacagaggctgaaacagagattgctgacagttcatggaaa

SEQ ID NO: 66244 - DNA, 80 bp, synthetic construct
  source 1..80: mol_type = other DNA
gatacgctatcacagttatttttaacaaaagggtggccaactggttctgtttatcttagaagctacacagatatttcaac

SEQ ID NO: 66245 - DNA, 80 bp, synthetic construct
  source 1..80: mol_type = other DNA
tttttcaataaatcctcagttgtattgcgattacaacatagttctaatgaaatataacgccgattcggaactagatatgt

SEQ ID NO: 66246 - DNA, 80 bp, synthetic construct
  source 1..80: mol_type = other DNA
cagagttagcagacttgatactcaatgaatggctatgtaatccaatggatataacgttgtactattatcagcagatggat

SEQ ID NO: 66247 - DNA, 80 bp, synthetic construct
  source 1..80: mol_type = other DNA
ttagaaactgtaaaaaactgggacctagagagaatgttgcagtcatccaagtaggtggttcaaacgttttagatattaca

SEQ ID NO: 66248 - DNA, 80 bp, synthetic construct
  source 1..80: mol_type = other DNA
atttgtaaattcacagaactatggcataaatttaccaattactggatctatggacgcaaactaccagaacgtatcgactt

SEQ ID NO: 66249 - DNA, 80 bp, synthetic construct
  source 1..80: mol_type = other DNA
gtgattggttaggatggcttccaagccatacaggccaatatccctcgaccccactttcgagtgggccgttttccgtcgct

SEQ ID NO: 66250 - DNA, 80 bp, synthetic construct
  source 1..80: mol_type = other DNA
aggcttctggttgccctggtgtatcgggcatgtggggtaaaatactcaaggtgtgcggtggcatcacaaccataaccgct

SEQ ID NO: 66251 - DNA, 80 bp, synthetic construct
  source 1..80: mol_type = other DNA
gccatacggggtatcaaatggctcagagaactgtatgaagaggctgaaagtaagaggcttgctaagatgtacatggctag

SEQ ID NO: 66252 - DNA, 80 bp, synthetic construct
  source 1..80: mol_type = other DNA
agcagcagccctaattgagttggcagcgagcagggaggtgactggagttaaggagttaaaggagctcctcagttgcttca

SEQ ID NO: 66253 - DNA, 80 bp, synthetic construct
  source 1..80: mol_type = other DNA
ccgttctcatagaggaaggtgctgaacttctacaaaagtttggcacaagtcccctttctggccttatccgcacatatgta

SEQ ID NO: 66254 - DNA, 80 bp, synthetic construct
  source 1..80: mol_type = other DNA
tcagaattggaaacccaagcgaacaacatcagatctaccatcatgctagacacacctcgtgaggttccagtggttatcat

SEQ ID NO: 66255 - DNA, 80 bp, synthetic construct
  source 1..80: mol_type = other DNA
cttaactggaccaccaggcattggtaagacgcggttggcccagtttataggggaaaaatttggtaaagtgtccaacttca

SEQ ID NO: 66256 - DNA, 80 bp, synthetic construct
  source 1..80: mol_type = other DNA
gtgttgcagtagatcaccatgatggttatacaggcaacccagtgtgcatatgggatgagtttgatgtggacgcaaaaggc

SEQ ID NO: 66257 - DNA, 80 bp, synthetic construct
  source 1..80: mol_type = other DNA
gcgtggttaaagcgtgtcactaggaccctccctgggagggagtttgtggaggagggtctccttgacgcgtttaacagcaa

SEQ ID NO: 66258 - DNA, 80 bp, synthetic construct
  source 1..80: mol_type = other DNA
aaggcagggtgttcacttcaaattatgtcatttgcacatcaaactaccccacgtctgtcatcccagagaacccacgtgcc

SEQ ID NO: 66259 - DNA, 80 bp, synthetic construct
  source 1..80: mol_type = other DNA
ccggccttttaccgtcgagttatcatcttggatgtctcatctccagaacttgatgagtggaaaaagaagaatcctggaaa

SEQ ID NO: 66260 - DNA, 80 bp, synthetic construct
  source 1..80: mol_type = other DNA
gaagcccccatctgacttgtataagcaagacttctcacacctgaagttgatgctccgcccttaccttgggtacaatcccg

SEQ ID NO: 66261 - DNA, 80 bp, synthetic construct
  source 1..80: mol_type = other DNA
aaggggacacgcttgacggcaccagagtcaaacccacccaaatatccatcccaagtttgatctcactcatgcaaaagagg

SEQ ID NO: 66262 - DNA, 80 bp, synthetic construct
  source 1..80: mol_type = other DNA
tttaaggagcaatcaggggaaaaccagaacctatggatgcaagttcctaggggagctgttgatcaagcatctaatatgat

SEQ ID NO: 66263 - DNA, 80 bp, synthetic construct
  source 1..80: mol_type = other DNA
aaagacctttgtgtacgctaatcgtggtgtgtgtgacgtcattccaaaccccgcctctcgtgacatcacagagacatctg

SEQ ID NO: 66264 - DNA, 80 bp, synthetic construct
  source 1..80: mol_type = other DNA
tatcaaaaatctttgtctcctcaacagccccaccaccagagttcttaggccgccatgtggtcatcactgggtttgaactt

SEQ ID NO: 66265 - DNA, 80 bp, synthetic construct
  source 1..80: mol_type = other DNA
ggggatgcatccatagcaaactctttgctatccatgttttccacaagcacacgtctcactgctggtgcacagcgggagta

SEQ ID NO: 66266 - DNA, 80 bp, synthetic construct
  source 1..80: mol_type = other DNA
tatgtacagaatttggaatcccatcatccacatccaagagaggtccatcaacacacaaaatctaccatatgttaaccgcg

SEQ ID NO: 66267 - DNA, 80 bp, synthetic construct
  source 1..80: mol_type = other DNA
tgatcccagtcacatcacactgggatttcttacgtggtttgagacaccaccttggtttggtgtccatccctggaatgtgg

SEQ ID NO: 66268 - DNA, 80 bp, synthetic construct
  source 1..80: mol_type = other DNA
accagtggttgaacccaatgaggacattctctttagagaactctttggggtagacttgcaggaacagttcccaatgtcaa

SEQ ID NO: 66269 - DNA, 80 bp, synthetic construct
  source 1..80: mol_type = other DNA
agagcgtttcaggggtggcgatcatcccaaggtatcattgactttgttgcaaatcacatgaatgaagtcacattccccag

SEQ ID NO: 66270 - DNA, 80 bp, synthetic construct
  source 1..80: mol_type = other DNA
taacccagaatgcactgtcttccgcactggggatggggacgttgtcttttacacttatgggtcatacgcgtgctttgcgt

SEQ ID NO: 66271 - DNA, 80 bp, synthetic construct
  source 1..80: mol_type = other DNA
cccctgcccgcgtgccctatgttggaaatccaccatccaccatccactccaacgtcccgagatgcatgacgtggggtgaa

SEQ ID NO: 66272 - DNA, 80 bp, synthetic construct
  source 1..80: mol_type = other DNA
accattgggtacctttgtgaagtagtggcagaatttgccctacattttggtccattaattttggcagcagccaacatagc

SEQ ID NO: 66273 - DNA, 80 bp, synthetic construct
  source 1..80: mol_type = other DNA
ttacctgtgctcaagaggcaatcgggaggaggaagccaaagggaagacaaaacatggcaggggagctaaacacgcacatc

SEQ ID NO: 66274 - DNA, 80 bp, synthetic construct
  source 1..80: mol_type = other DNA
gtggcggagtcagcctgtcggatgatgagtatgatgagtggcgagatcttgtccgtgactggcgtaaagacatgacagtc

SEQ ID NO: 66275 - DNA, 80 bp, synthetic construct
  source 1..80: mol_type = other DNA
acttcctcatgctccgggagcgcagtgctctcggtatggatgatgaagatgtggcacgctatagagcatggttggagatc

SEQ ID NO: 66276 - DNA, 80 bp, synthetic construct
  source 1..80: mol_type = other DNA
cgtgccatgcggttagcaggtggtgcttacacccatgccacagtaattggcaaaggtggtgtgcgagaagagatcattag

SEQ ID NO: 66277 - DNA, 80 bp, synthetic construct
  source 1..80: mol_type = other DNA
aacagcccctcgccgtgcccccatgagtgcacgacgcgctaattatgaagaagaagcccccacagccattgttgagttca

SEQ ID NO: 66278 - DNA, 80 bp, synthetic construct
  source 1..80: mol_type = other DNA
cccatgaaggcgaccacatagggtatggagttcaccttggcaatggtagagtggtcactgtcacccatgttgcatcatca

SEQ ID NO: 66279 - DNA, 80 bp, synthetic construct
  source 1..80: mol_type = other DNA
ttcatgaccttgccaagttacaaggtgaggcggtggatgccttgcgtaatcctggacatcaactgcgtaggaagtataca

SEQ ID NO: 66280 - DNA, 80 bp, synthetic construct
  source 1..80: mol_type = other DNA
tcagatagagttgagggagctcctttcaaggtgcaaaggactgttggtgaaaccacttgggttgaaacacagctccccaa

SEQ ID NO: 66281 - DNA, 80 bp, synthetic construct
  source 1..80: mol_type = other DNA
ctacccccacttgcaaattggctcagggaggcccgtgtattacacgatgcgattgcatccagtagtgactatcacggaag

SEQ ID NO: 66282 - DNA, 80 bp, synthetic construct
  source 1..80: mol_type = other DNA
gcacctttgagaccccaaatatcactgttcacggtttccatgttcgcatcacaaatgggtaccaaaccaggaaaggtgat

SEQ ID NO: 66283 - DNA, 80 bp, synthetic construct
  source 1..80: mol_type = other DNA
ggattgccttacttaaatgccaaccggcaggtggtgggattacatgctggtaccgatgttcagggagaaaccaaattggc

SEQ ID NO: 66284 - DNA, 80 bp, synthetic construct
  source 1..80: mol_type = other DNA
acaaaaagtagttaaggaattgcctgtggagagtgaatttcaatggaagggtctcccagttatcaaatctgacctggatg

SEQ ID NO: 66285 - DNA, 80 bp, synthetic construct
  source 1..80: mol_type = other DNA
tgaatttcaatggaagggtctcccagttatcaaatctgacctggatgttggggggatgccaaccggtacacggtaccatc

SEQ ID NO: 66286 - DNA, 80 bp, synthetic construct
  source 1..80: mol_type = other DNA
ttggtgggatgccaaccggtacacggtaccatcgatcacctgcatggccagaacaactccccgaggaaacctatgccccc

SEQ ID NO: 66287 - DNA, 80 bp, synthetic construct
  source 1..80: mol_type = other DNA
gccccctttggcgctggtgacaagcgctatcatttctcccagactgagatgttggtgaatgccctcaagccctacactga

SEQ ID NO: 66288 - DNA, 80 bp, synthetic construct
  source 1..80: mol_type = other DNA
gacaacacctggcattcccccttccttgctatcacgggctacaacccatgtgcgtgcttaccttgaaacaatcattggca

SEQ ID NO: 66289 - DNA, 80 bp, synthetic construct
  source 1..80: mol_type = other DNA
cacaccgctctcctgtgctcaccttcacccaggcagttgaattactggaaaaatccacctcatgtggcccgttcattcaa

SEQ ID NO: 66290 - DNA, 80 bp, synthetic construct
  source 1..80: mol_type = other DNA
acacaaaccctacagaaactggttactaaaatcacaagggtggtacctgtccaggccaccctacaagacatgcatgagcg

SEQ ID NO: 66291 - DNA, 80 bp, synthetic construct
  source 1..80: mol_type = other DNA
ggactaaaaggggattattgggatgatgaaacacaacaatacactggggccctacgtgaacacttagacaaagcatggga

SEQ ID NO: 66292 - DNA, 80 bp, synthetic construct
  source 1..80: mol_type = other DNA
ccatgctgtcaggggcattgcaccagggaactcctacaaattggcacttaaggatgaactccgtcctgaggaaaagaata

SEQ ID NO: 66293 - DNA, 80 bp, synthetic construct
  source 1..80: mol_type = other DNA
aagaagggaagaggcggctactgtggggctgtgacgccgcaacgactctgattgcagtggcggcgtttaagccagtggcc

SEQ ID NO: 66294 - DNA, 80 bp, synthetic construct
  source 1..80: mol_type = other DNA
gcacgcttacaagtagtgacaccaatgactccaatctccgttggtatcaacatggattcaatgcaaatgcaagtgatgaa

SEQ ID NO: 66295 - DNA, 80 bp, synthetic construct
  source 1..80: mol_type = other DNA
tgattctttgaggggtggtgtgctttactgcctagactactccaaatgggattccacacaaaacccagctgttactgcgg

SEQ ID NO: 66296 - DNA, 80 bp, synthetic construct
  source 1..80: mol_type = other DNA
ctagtctctccattttagagagatttatggaaagcagcccattagtgtcctgtgcaatagagtccctctcctcaccagca

SEQ ID NO: 66297 - DNA, 80 bp, synthetic construct
  source 1..80: mol_type = other DNA
attggctacctcaatgacattaaatttgtaactaaaggaggtctcccatcaggaatgccctttacctcagtcatcaactc

SEQ ID NO: 66298 - DNA, 80 bp, synthetic construct
  source 1..80: mol_type = other DNA
ttcagatagagactgtccacacttatggtgatgactgtatctatagtgtttgtcctgccaccgcttctatctttggttct

SEQ ID NO: 66299 - DNA, 80 bp, synthetic construct
  source 1..80: mol_type = other DNA
gttcttgccaacctgtcctccttcggtctcaagcccactgccgctgataaaactgcagaaattaagcccacccaaacacc

SEQ ID NO: 66300 - DNA, 80 bp, synthetic construct
  source 1..80: mol_type = other DNA
gcgcgattttgaaagggaacgtgccgacttgttcaaagaactacccctgttggatgaagagataacacaaaaacccaaga

SEQ ID NO: 66301 - DNA, 80 bp, synthetic construct
  source 1..80: mol_type = other DNA
agtattcctgaaaagaacattcgcacagacgccctatggggtgagggcattattggacatcaattccatcattcggcagt

SEQ ID NO: 66302 - DNA, 80 bp, synthetic construct
  source 1..80: mol_type = other DNA
tctactgggttaaggcgaatcgcaccagtgacccatctagccctcctgcatttgaccgcactgcccgcagtgcccagttg

SEQ ID NO: 66303 - DNA, 80 bp, synthetic construct
  source 1..80: mol_type = other DNA
gaagcagccctggcctatgcatcacaacatgggcctttagtgtttgacaaggtgcgtgatatcgccatcaaaacggctga

SEQ ID NO: 66304 - DNA, 80 bp, synthetic construct
  source 1..80: mol_type = other DNA
aggagagggtgtggtgcttgtgaatacaaattttgatttggccctcgccacctacaatgcctggttcataggtggtacag

SEQ ID NO: 66305 - DNA, 80 bp, synthetic construct
  source 1..80: mol_type = other DNA
gctccagatccagagcgccccactgaaggtgcacccaaattagtgtttgagatggagggcaatggctcccagttgccaac

SEQ ID NO: 66306 - DNA, 80 bp, synthetic construct
  source 1..80: mol_type = other DNA
caatcaaaatggtggtcatgttggccaggacgttgacccgcctggcgcgactggtccgaccacatcccatgttgttgtgt

SEQ ID NO: 66307 - DNA, 80 bp, synthetic construct
  source 1..80: mol_type = other DNA
catatttttactcaatgtggcgtcaggttgtgaagaaaagtaaggcctacttcatgccacttgtgaagacaaatgggtgg

SEQ ID NO: 66308 - DNA, 80 bp, synthetic construct
  source 1..80: mol_type = other DNA
aaacattgattaccacaggatggacatcactgaacccacttgctcccttgggttctgggtctaccaaccactgctaaacc

SEQ ID NO: 66309 - DNA, 80 bp, synthetic construct
  source 1..80: mol_type = other DNA
cattttccaccacagcagttacaacatgctgggtgtccatagaaaccaagcctggtggtgattttgatttttgcctcttg

SEQ ID NO: 66310 - DNA, 80 bp, synthetic construct
  source 1..80: mol_type = other DNA
ggccccctggtcaacagatggagaatggtgtgtcacctgaaggtctccttccacgccgcttgggctacacacggggtaac

SEQ ID NO: 66311 - DNA, 80 bp, synthetic construct
  source 1..80: mol_type = other DNA
cgggttggggggttggtagttggtatggttttggttgctgatcaccgccaggtgaacaggcatttcaatgcacagtctat

SEQ ID NO: 66312 - DNA, 80 bp, synthetic construct
  source 1..80: mol_type = other DNA
tcaccgccaggtgaacaggcatttcaatgcacagtctatcacctatggatggtctactgcaccagtcaatccaatggcag

SEQ ID NO: 66313 - DNA, 80 bp, synthetic construct
  source 1..80: mol_type = other DNA
cacctatggatggtctactgcaccagtcaatccaatggcagcggcaattcaaacaaatcatgactacactggaaacaaca

SEQ ID NO: 66314 - DNA, 80 bp, synthetic construct
  source 1..80: mol_type = other DNA
cttccaacaaaaggaacgcttggttgtcactcagtgcagaaaacaagggtccactattcccaggtatcccaaatcacttc

SEQ ID NO: 66315 - DNA, 80 bp, synthetic construct
  source 1..80: mol_type = other DNA
cccgactcctgtgcttctacggtagtgggcggcatggatacaagccgccacatgccatccacaggagtctgtggtccagc

SEQ ID NO: 66316 - DNA, 80 bp, synthetic construct
  source 1..80: mol_type = other DNA
aattggcttccaaaacaatggagatgtttatgaaaatgaaactcctgcagtcatgtttgccactctaaatcctctgactg

SEQ ID NO: 66317 - DNA, 80 bp, synthetic construct
  source 1..80: mol_type = other DNA
gtggcactaatgacaaccctgtggctctatttggttcaatcaatatggcctctctagctgtggttcgcactcaacaggat

SEQ ID NO: 66318 - DNA, 80 bp, synthetic construct
  source 1..80: mol_type = other DNA
gttagtaaaatcacaaaaatcactgaccccatcaaagatttcatcatagctttttgccaggcagtccagcaagagatggg

SEQ ID NO: 66319 - DNA, 80 bp, synthetic construct
  source 1..80: mol_type = other DNA
gcgaacttcccagccaccggttttgccaacaacatgaatgtggttgtggagatgtcctgggaaatgtacacaggatcaca

SEQ ID NO: 66320 - DNA, 80 bp, synthetic construct
  source 1..80: mol_type = other DNA
acagatacaggggcgtgtaacacccatggatggcaccaactttgttttcacttcttcgggcgccaacaccctggcgctct

SEQ ID NO: 66321 - DNA, 80 bp, synthetic construct
  source 1..80: mol_type = other DNA
gggaggagcgactacttagttatgatggacaccaagcaatcttgtactcgtctcagttggagcgcactgcagagtacttc

SEQ ID NO: 66322 - DNA, 80 bp, synthetic construct
  source 1..80: mol_type = other DNA
caaaatgacaatgtcaacatacccccaggttcaatggctgtctttaatgttgaaacaaattctgcttctttccaaattgg

SEQ ID NO: 66323 - DNA, 80 bp, synthetic construct
  source 1..80: mol_type = other DNA
cattcggcatgatggatatatggtgactggtggtacggttggaactcatgttgccctggatgcggaaacacgatttcaat

SEQ ID NO: 66324 - DNA, 80 bp, synthetic construct
  source 1..80: mol_type = other DNA
ttgttggtattctccccctcacagccacactggctgggcccaatgggaactcaggaagggccaggcgtctgttccaatga

SEQ ID NO: 66325 - DNA, 80 bp, synthetic construct
  source 1..80: mol_type = other DNA
ttggcgccttgcagacaactgggtcactcgttgaccttgcaggaactgtttcagatatagtttacaaacaaaggcaagtg

SEQ ID NO: 66326 - DNA, 80 bp, synthetic construct
  source 1..80: mol_type = other DNA
gcacaactggagaaacaaaaccagctcatggagcaatggatgtacaaacaagaagccttacaaaagtcccaaatggatct

SEQ ID NO: 66327 - DNA, 80 bp, synthetic construct
  source 1..80: mol_type = other DNA
cacacgtgatttggcagtgaacacccctgtgtaccgtgtccaggctgcactggatgctgggtttgatccaatcagcgcgc

SEQ ID NO: 66328 - DNA, 80 bp, synthetic construct
  source 1..80: mol_type = other DNA
gacgcttggctggttccagcgagcgcgtcatctacggcaacctggatagaccaataatgcatgcaggcaccatggaaggg

SEQ ID NO: 66329 - DNA, 80 bp, synthetic construct
  source 1..80: mol_type = other DNA
aacggacccacggtacttacagctagcttggattcaaaagctaaaaccaaccgtgctcaccatcatcctacaacaacaca

SEQ ID NO: 66330 - DNA, 80 bp, synthetic construct
  source 1..80: mol_type = other DNA
attaggcaaactaaccacttgaatgccatcagctcagcaatggctacatttaaaaatggtacacaatttggaaaaccagc

SEQ ID NO: 66331 - DNA, 80 bp, synthetic construct
  source 1..80: mol_type = other DNA
tcccccaagaatccaaactggaacaccagctaaaccttcaatcaatcttaatcaccagcctggatcatctagtgtttgat

SEQ ID NO: 66332 - DNA, 80 bp, synthetic construct
  source 1..80: mol_type = other DNA
ttcaaattttcttttaattataaattttcttttcttttgaagtgatgccacacgcgttcgggtggttaaatgtgattaag

SEQ ID NO: 66333 - DNA, 80 bp, synthetic construct
  source 1..80: mol_type = other DNA
gctacctcagggtagcacctcgggaaacatttgtagaggatttcaaagaactagaatattatttcaccacgcgcttgtgc

SEQ ID NO: 66334 - DNA, 80 bp, synthetic construct
  source 1..80: mol_type = other DNA
aaaacaccgtgtcagggtggttggcaacactaacagctctagtggaagtttactccaacctttttgatgatctgcgcaag

SEQ ID NO: 66335 - DNA, 80 bp, synthetic construct
  source 1..80: mol_type = other DNA
tctgccgttaccatcatatcggcactaagtgctttcttcgatgtgtgtaaggacttcattgctagtgttgttgatttgat

SEQ ID NO: 66336 - DNA, 80 bp, synthetic construct
  source 1..80: mol_type = other DNA
taaaaccacattcacacctcagggccccactgatcttggatggaccgcagtcatggctggagcagtcatgattttactaa

SEQ ID NO: 66337 - DNA, 80 bp, synthetic construct
  source 1..80: mol_type = other DNA
tgcaattgtctctaaaggaatagcagtaacagaaaaagcgaaactaaactcgtatgcaccggtttatttagaaaagcgac

SEQ ID NO: 66338 - DNA, 80 bp, synthetic construct
  source 1..80: mol_type = other DNA
ggattagtttgttctgtaactatccaaaatctgaaatgattaaattatggaagaaaatgtggaacataacagcattacga

SEQ ID NO: 66339 - DNA, 80 bp, synthetic construct
  source 1..80: mol_type = other DNA
actttcttagaccatccatcaataaagcaattctcgaatggaccatatctcgttaaagacacaattaaactcaaacaaga

SEQ ID NO: 66340 - DNA, 80 bp, synthetic construct
  source 1..80: mol_type = other DNA
cgttcctaatttctaatctcactacacacaatatattgtatttaaattatagcattaaaacactacaaatattgaataag

SEQ ID NO: 66341 - DNA, 80 bp, synthetic construct
  source 1..80: mol_type = other DNA
tggctgtaatacaagttggtggcgctaatatattagacataacagcagatcccacaactaatccacaaattgagagaatg

SEQ ID NO: 66342 - DNA, 80 bp, synthetic construct
  source 1..80: mol_type = other DNA
agagcacaagttaatgaagactttacaatttcaaaaacttcattatggaaagaaatgcaatataatagagatattataat

SEQ ID NO: 66343 - DNA, 80 bp, synthetic construct
  source 1..80: mol_type = other DNA
gacgtgactagtcttccttcaatttcttctagtgtttataaaaatgaatcgttttcaacaacgtcaactatttctggaaa

SEQ ID NO: 66344 - DNA, 80 bp, synthetic construct
  source 1..80: mol_type = other DNA
tcttattattaactgtttaatatttacttaatgtacggatgataaatgttgtttaattatattatataatgagattacta

SEQ ID NO: 66345 - DNA, 80 bp, synthetic construct
  source 1..80: mol_type = other DNA
ccaagtcgtcagcatacgacatggagtttgcacaactacctgtcaatatgcgaagcgaagctttcacgtacaccagcgag

SEQ ID NO: 66346 - DNA, 80 bp, synthetic construct
  source 1..80: mol_type = other DNA
gtgcttactcggaaatgtaagcttcccttgcaaccgtccgcctacttgctacacccgcgaaccatccagagcgttagata

SEQ ID NO: 66347 - DNA, 80 bp, synthetic construct
  source 1..80: mol_type = other DNA
tcctggaagagaatgtgaaccatgaggactacgacactttgctcgacgctatactgcgatgcgacttttccggtagaaat

SEQ ID NO: 66348 - DNA, 80 bp, synthetic construct
  source 1..80: mol_type = other DNA
aaaagaagtgttaccgacgactttaccttgaccagcccgtacctaggtacatgtccatactgtcaccataccgagccgtg

SEQ ID NO: 66349 - DNA, 80 bp, synthetic construct
  source 1..80: mol_type = other DNA
gagcgacaagcgtaaataaataccgctacatgtcgttcgatcaggatcatactgtgaaagaaggcaccatggatgacatc

SEQ ID NO: 66350 - DNA, 80 bp, synthetic construct
  source 1..80: mol_type = other DNA
aaggaatggtcttaatgtgacccggcttttaaaagttctgttccgagagagcgcgtgcggaaagatggataagcttgccg

SEQ ID NO: 66351 - DNA, 80 bp, synthetic construct
  source 1..80: mol_type = other DNA
atatgcactgtagtacagcgctgtgcatctaataaacctcatgtgcttgaagatccttgtaaggtacaacactaggggta

SEQ ID NO: 66352 - DNA, 80 bp, synthetic construct
  source 1..80: mol_type = other DNA
gtgatgggagctgaggagagaattgttcaaagcattgttgagacaatagctaagagtatcggaaagttcttcccttctga

SEQ ID NO: 66353 - DNA, 80 bp, synthetic construct
  source 1..80: mol_type = other DNA
tgtggacatgcgcaacatcagatgacgccagaaaatggaatcagggccactatgtgacaaaatttgccctcatgctatgc

SEQ ID NO: 66354 - DNA, 80 bp, synthetic construct
  source 1..80: mol_type = other DNA
aggttcatcatcatctttttgttcgtaaacatggagcaccctctgatgatgattggccaccatctaggatgagtgaattc

SEQ ID NO: 66355 - DNA, 80 bp, synthetic construct
  source 1..80: mol_type = other DNA
caaattcatgaagattctggacacccaccttgaacttgacactcgagatgaattttctcaaaaactctttaaggcttatc

SEQ ID NO: 66356 - DNA, 80 bp, synthetic construct
  source 1..80: mol_type = other DNA
acggtgaggagagcgtcccctgggctgaggctgggaagacatttctgaaaacaacaacagggatgatgcaagggatacta

SEQ ID NO: 66357 - DNA, 80 bp, synthetic construct
  source 1..80: mol_type = other DNA
actttcatattgaaaatcttgaacgtcagtgaacgcacatactcttgatgcagagtgtgtagtaaggatgaagtgaaatg

SEQ ID NO: 66358 - DNA, 80 bp, synthetic construct
  source 1..80: mol_type = other DNA
cggagaagactatgggtccaagatagtatgtgacatgatgcagggctctgacgacagtagcatgctgattagctttccat

SEQ ID NO: 66359 - DNA, 80 bp, synthetic construct
  source 1..80: mol_type = other DNA
ctgagaaccctgaggccttaaagaagctcaaagttgcagcagctctttgcttcaggttaaagaaagagcttggcatatat

SEQ ID NO: 66360 - DNA, 80 bp, synthetic construct
  source 1..80: mol_type = other DNA
gcttcaggttaaagaaagagcttggcatatatataggaatatacccttctgaaaagtgtacttctaacactgactttgta

SEQ ID NO: 66361 - DNA, 80 bp, synthetic construct
  source 1..80: mol_type = other DNA
tacgttgtgtaatccaagcaacaagaccaagataccagaaacacatggctacagagctaggcagcactgtaagtctcagg

SEQ ID NO: 66362 - DNA, 80 bp, synthetic construct
  source 1..80: mol_type = other DNA
atccagagcgccccactgaaggtacacccaaactagtgtttgagatggagggcaatggctcccagttgccaaccaatcaa

SEQ ID NO: 66363 - DNA, 80 bp, synthetic construct
  source 1..80: mol_type = other DNA
aatggtggccatgttggccaggatgttgacccgcctggcgcgactggtccgaccacatcccatgttgttgtgtctaatcc

SEQ ID NO: 66364 - DNA, 80 bp, synthetic construct
  source 1..80: mol_type = other DNA
tgatatcgttcgtttttgtgagttatattctgaaaactataataaagataatggactatattatttatagaataacgttt

SEQ ID NO: 66365 - DNA, 80 bp, synthetic construct
  source 1..80: mol_type = other DNA
tacatgtacaatacggaattgtaataaattaggaccgagagaaaatgtagctataatacaggttggcggttctaatatat

SEQ ID NO: 66366 - DNA, 80 bp, synthetic construct
  source 1..80: mol_type = other DNA
attgatgctacagtggattcttcaatatcaatatctaccacatcaaagaaggagaaatctaaacaagagaacaaaaataa

SEQ ID NO: 66367 - DNA, 80 bp, synthetic construct
  source 1..80: mol_type = other DNA
atataaaaaatgttatccaaaaattgaagcagaatctgattccgatgactacgtattagatgattcagatagtgatgacg

SEQ ID NO: 66368 - DNA, 80 bp, synthetic construct
  source 1..80: mol_type = other DNA
agaaatactttgcacttcgtttaagaatgaaacaagttgcaatgcaattgattaaagatttgtgaaaattttctaattac

SEQ ID NO: 66369 - DNA, 80 bp, synthetic construct
  source 1..80: mol_type = other DNA
tcttatcattaactattaaatattcacttaatatacggatgataaatgttgtttaattatattgcataatagtattatta

SEQ ID NO: 66370 - DNA, 80 bp, synthetic construct
  source 1..80: mol_type = other DNA
ttatatcgtgttattgaatttaataacattataatgagagaagattgatgcgtctaacctaagagatcactagggagctc

SEQ ID NO: 66371 - DNA, 80 bp, synthetic construct
  source 1..80: mol_type = other DNA
cgcttctcgtccttgctgctgcggccaatgctcaactcaacattgttccttctgtacatcctgaagtgtgtgtgctttat

SEQ ID NO: 66372 - DNA, 80 bp, synthetic construct
  source 1..80: mol_type = other DNA
acatgtattacagtttctacttcagataaatttgacgttgacgagtaatcagttgtagcatgtggcgtttcaccatggaa

SEQ ID NO: 66373 - DNA, 80 bp, synthetic construct
  source 1..80: mol_type = other DNA
agtccaaacactattataaaatttcataaaaccagctaatttagtgtctgatgttaaagtgcgcttgtgttgaaattcgg

SEQ ID NO: 66374 - DNA, 80 bp, synthetic construct
  source 1..80: mol_type = other DNA
cactaacactacttctgaacatttcgaagaatttccatttgcttgtgttattttctacagtaatttgtttcgtttctcca

SEQ ID NO: 66375 - DNA, 80 bp, synthetic construct
  source 1..80: mol_type = other DNA
aataatgtgtattgcctactttgattggttacgtttggttcaacaagtaataaagcaacccaaatatcagttttattggt

SEQ ID NO: 66376 - DNA, 80 bp, synthetic construct
  source 1..80: mol_type = other DNA
accttctaatacaacttgttgattagttggattcaataatatccagtaatcgtttggtggcttaaaatttgttggttgat

SEQ ID NO: 66377 - DNA, 80 bp, synthetic construct
  source 1..80: mol_type = other DNA
cgcaagttaatggagacattacaatttcaaaaacttcattatggaaggaaatgcaatataatagagatattataataaga

SEQ ID NO: 66378 - DNA, 80 bp, synthetic construct
  source 1..80: mol_type = other DNA
actatatcgagttattgaatttaataactttctaacgagagaagattaatgcgtctaccctaagagatcactagggagct

SEQ ID NO: 66379 - DNA, 80 bp, synthetic construct
  source 1..80: mol_type = other DNA
tatgatgagccgacgacgactactagcgtgcctttgtaagcacgagaaagtgagtacgaacttatgtactcattcgtttc

SEQ ID NO: 66380 - DNA, 80 bp, synthetic construct
  source 1..80: mol_type = other DNA
atattaaaatcattaactagaatgatggacttcattatttatagatttctttttataatagtcattttgtcaccattatt

SEQ ID NO: 66381 - DNA, 80 bp, synthetic construct
  source 1..80: mol_type = other DNA
accaagagaaaatgtagcagtaattcaagttggaggttctgatgttcttgatataacagctgatcccactacagcaccac

SEQ ID NO: 66382 - DNA, 80 bp, synthetic construct
  source 1..80: mol_type = other DNA
gaaagctcagaattatggaattaatctaccaatcactggttcaatggatactgcatacgctaattctacacaaggagaaa

SEQ ID NO: 66383 - DNA, 80 bp, synthetic construct
  source 1..80: mol_type = other DNA
gatgaaatagggacaattggttcagaaaaaactcaaaatgtaactgtaaatccaggtccatttgctcaaacaagatatgc

SEQ ID NO: 66384 - DNA, 80 bp, synthetic construct
  source 1..80: mol_type = other DNA
gacattacaatttcaaagacctcattatggaaagaaatgcaatataacagagatattttatttggatttaaatttgggaa

SEQ ID NO: 66385 - DNA, 80 bp, synthetic construct
  source 1..80: mol_type = other DNA
caactacaacatgtactattcgaaattgtaagaagttaggtccaagagagaatgtggctgtaatacaagttggtggcgct

SEQ ID NO: 66386 - DNA, 80 bp, synthetic construct
  source 1..80: mol_type = other DNA
tgtactccacaattcaaaacataaaaagaaattccaataatgtcagagttcattttcaacgatgtaccacaacggactac

SEQ ID NO: 66387 - DNA, 80 bp, synthetic construct
  source 1..80: mol_type = other DNA
tcttcttcctcaaccaaaagaaggccaaagatgtcttacgtaagacgtcgcggcccatggttgaccttacttttggtggg

SEQ ID NO: 66388 - DNA, 80 bp, synthetic construct
  source 1..80: mol_type = other DNA
gtccaatttgcaatggttaataaccatttcccacaattccaatcgaatccagtgccggacaacggtcttaccctgcaccg

SEQ ID NO: 66389 - DNA, 80 bp, synthetic construct
  source 1..80: mol_type = other DNA
tctgtcaggatacctagctcgctgggcctttacccagatgcgatcaccaattaagcaagctgagtttagggccactgtgg

SEQ ID NO: 66390 - DNA, 80 bp, synthetic construct
  source 1..80: mol_type = other DNA
tggtgcctttggcagaggtgaagggttgtacttggaatgatggtgacgcaatgtacctggggtttgctgccggtgctgag

SEQ ID NO: 66391 - DNA, 80 bp, synthetic construct
  source 1..80: mol_type = other DNA
atgtttctgcaaacattcactttcttccctttggtgattgagatgcatagggtcctcaaggacggcatggatgtcaattt

SEQ ID NO: 66392 - DNA, 80 bp, synthetic construct
  source 1..80: mol_type = other DNA
catgaagaaagtccttcggcagaggtatggccagaagactgctgaacaatggatgcgtgaagaaatagttgctgtaagag

SEQ ID NO: 66393 - DNA, 80 bp, synthetic construct
  source 1..80: mol_type = other DNA
cagcttttgaggctgtaggcactctggcctgggccaggactgggttctccccagcagcaagagacttcttgcgccaattt

SEQ ID NO: 66394 - DNA, 80 bp, synthetic construct
  source 1..80: mol_type = other DNA
caagagacttcttgcgccaatttggaattgacatatagtgaagtacaataaacaaacaaaatataatataaaatacagaa

SEQ ID NO: 66395 - DNA, 80 bp, synthetic construct
  source 1..80: mol_type = other DNA
atctacatttgatccggaggcagcatatgtggcatttgaagctagatacggacaagtgctcaatgctggtgttgttagag

SEQ ID NO: 66396 - DNA, 80 bp, synthetic construct
  source 1..80: mol_type = other DNA
atgcatctgaattagcggatcttatattgaacgaatggctgtgcaatcccatggatatatcactttactattatcaacaa

SEQ ID NO: 66397 - DNA, 80 bp, synthetic construct
  source 1..80: mol_type = other DNA
aaacttggaccacgagaaaatgttgctataattcaagtcggtggaccgaacgcactagatatctctgctgatccaacaac

SEQ ID NO: 66398 - DNA, 80 bp, synthetic construct
  source 1..80: mol_type = other DNA
atatattaaaatcagtgacccgaataatggactacattatatatagatttttgttaatttttgtagcattatttgcctta

SEQ ID NO: 66399 - DNA, 80 bp, synthetic construct
  source 1..80: mol_type = other DNA
aagagagaatgtggctgtaatacaagttggtggcgctaatatattagacataacagcggatccaacaactaatccgcaaa

SEQ ID NO: 66400 - DNA, 80 bp, synthetic construct
  source 1..80: mol_type = other DNA
ataaaaataaatataaaaaatgttatccaaaaattgaagcagattctgattctgaagattatgttttggatgattcagat

SEQ ID NO: 66401 - DNA, 80 bp, synthetic construct
  source 1..80: mol_type = other DNA
tcttatcattaactgttaaatatttacttgttatacggataataaatgttgtttaattatattatataatagtattatat

SEQ ID NO: 66402 - DNA, 80 bp, synthetic construct
  source 1..80: mol_type = other DNA
atcgcgttattaaattcaataactttttaatgagagaagattaatgcgtttaccctaagaggtcactagggagctcccca

SEQ ID NO: 66403 - DNA, 80 bp, synthetic construct
  source 1..80: mol_type = other DNA
aattaggaccgagagaaaatgtagctataatacaggttggcggttctaatatattagatataacagctgatcccacaact

SEQ ID NO: 66404 - DNA, 80 bp, synthetic construct
  source 1..80: mol_type = other DNA
aattcatattcagtagatttacatgatgaattaggacctattggatcagaaaaaactcaaaatgtaactgtaaatccagg

SEQ ID NO: 66405 - DNA, 80 bp, synthetic construct
  source 1..80: mol_type = other DNA
caagttaatgaagacattatagtttcaaaaacttcattatggaaagaaatgcagtataatagggatattataattagatt

SEQ ID NO: 66406 - DNA, 80 bp, synthetic construct
  source 1..80: mol_type = other DNA
gggcccggagggattaatgattcaactacattggcaccagttttagatggtccttatcacccagctacattcaaaccacc

SEQ ID NO: 66407 - DNA, 80 bp, synthetic construct
  source 1..80: mol_type = other DNA
attgatgctacaatggactctttaatatcaatatccactacatcaaaaaaggataaatctaaacaagagagcaaaaataa

SEQ ID NO: 66408 - DNA, 80 bp, synthetic construct
  source 1..80: mol_type = other DNA
ataaacttgatgtgactacaaatacctgtacaattaggaattgtaagaagttaggaccaagagaaaatgtagcgattata

SEQ ID NO: 66409 - DNA, 80 bp, synthetic construct
  source 1..80: mol_type = other DNA
agatttatatgatgaaatagggcaaattggtccagaaaaaactccaaatgtaactgtaaatccaggtccatttgctcaaa

SEQ ID NO: 66410 - DNA, 80 bp, synthetic construct
  source 1..80: mol_type = other DNA
taatgaagacattacaatttcaaagacttcattatggaaagagatgcaatataacagagacattataattaggtttaaat

SEQ ID NO: 66411 - DNA, 80 bp, synthetic construct
  source 1..80: mol_type = other DNA
ccagtgagagacaccaaattagtgtttgaaatggagaatgtagcccgaccagagggccctaaggccaattccaatgaaaa

SEQ ID NO: 66412 - DNA, 80 bp, synthetic construct
  source 1..80: mol_type = other DNA
gagctgcgcaaagggtggagatggccgcagcaacaggggccgttagcaacaacgctccccatgtgtgtgagggaatgttt

SEQ ID NO: 66413 - DNA, 80 bp, synthetic construct
  source 1..80: mol_type = other DNA
tgcatagtgtgtaccacgctcccctggacaacgcgccaagcatccaacacctttcttggatgccatccatctactgtgtc

SEQ ID NO: 66414 - DNA, 80 bp, synthetic construct
  source 1..80: mol_type = other DNA
ctggtctgagtccttggatggaaaattgcagatagccatgtttgctggctggggtggcagtttccaaatacgagtcacca

SEQ ID NO: 66415 - DNA, 80 bp, synthetic construct
  source 1..80: mol_type = other DNA
tatctggctctgggctgtacgcaggccgtgcagtggtacgcagtgctgcccccaggtgtcaatccggtcaatgtccaaaa

SEQ ID NO: 66416 - DNA, 80 bp, synthetic construct
  source 1..80: mol_type = other DNA
ccctggagtgtttccacatgcattcattgtgcccgcaccgaggatcctatcctcatcaacctccatgaattgcatgtgga

SEQ ID NO: 66417 - DNA, 80 bp, synthetic construct
  source 1..80: mol_type = other DNA
aacattcccggcgtgtggacgggatgagcaaactgcaactgttggactttgggacgcccaaccgctcatcaacccgttcc

SEQ ID NO: 66418 - DNA, 80 bp, synthetic construct
  source 1..80: mol_type = other DNA
gagctggatctgtttactcgtgttggttgacatttgcacaccagacccagacccgattttacttttgccttctcaaggcc

SEQ ID NO: 66419 - DNA, 80 bp, synthetic construct
  source 1..80: mol_type = other DNA
ttgccttctcaaggccccagagcaggaaatgaacaatggcatatcacctgacaattatgtttcgccgcgttgtcagggaa

SEQ ID NO: 66420 - DNA, 80 bp, synthetic construct
  source 1..80: mol_type = other DNA
tgtgcctcttgcatcaccacaggacacaattggaccaaacgcagacacttctcctgcccacgcagattggacacccaacg

SEQ ID NO: 66421 - DNA, 80 bp, synthetic construct
  source 1..80: mol_type = other DNA
actgctccattcatggtttgcactaacccagaaggaacacacataaacacaggtgctgcaggatttggatctggctttga

SEQ ID NO: 66422 - DNA, 80 bp, synthetic construct
  source 1..80: mol_type = other DNA
attcaatatgattacaatgaaatttacactagagttaaaagtaagtttgattatgtgatggatgattctggtgttaaaaa

SEQ ID NO: 66423 - DNA, 80 bp, synthetic construct
  source 1..80: mol_type = other DNA
ttattgaactacatattaaaatcactaactagtgcgatggactttataatttatagatttcttttacttattgttatttt

SEQ ID NO: 66424 - DNA, 80 bp, synthetic construct
  source 1..80: mol_type = other DNA
tcttatcattaattgttaaatattcacttattatacggatgataaatgttggttgattatattatataataataatatta

SEQ ID NO: 66425 - DNA, 80 bp, synthetic construct
  source 1..80: mol_type = other DNA
tctatcatattattgaattacatattaaaaactataactaatacaatggactacataatttttagatttttactactcat

SEQ ID NO: 66426 - DNA, 80 bp, synthetic construct
  source 1..80: mol_type = other DNA
ataaactaggaccacgagagaatgttgctataattcaagttggtggaccgaatgcactagatattactgctgatccaaca

SEQ ID NO: 66427 - DNA, 80 bp, synthetic construct
  source 1..80: mol_type = other DNA
tgctttaatgtcaccattcgtgagaacgcaaaattacggcatgtatttaccaataacgggatcactagacgctgtataca

SEQ ID NO: 66428 - DNA, 80 bp, synthetic construct
  source 1..80: mol_type = other DNA
tcacaaagagtgacttagaaaatttaattaatatgtatgatacattatttcctataaatcaaaaaatagttaatcagttt

SEQ ID NO: 66429 - DNA, 80 bp, synthetic construct
  source 1..80: mol_type = other DNA
aattaataataattctattgtattgactgatttcagaattaaaaatgtttatgatgatgtatttaattttattagggctt

SEQ ID NO: 66430 - DNA, 80 bp, synthetic construct
  source 1..80: mol_type = other DNA
gcaaacataattaaacaacacaaatgtagaaatgagtatttgatacaatggtataatcattttttaatgccaattacatt

SEQ ID NO: 66431 - DNA, 80 bp, synthetic construct
  source 1..80: mol_type = other DNA
agccatggctgagctagcttgcttttgctatccccatttggagaacgatagctatagattttctccttttaataatttgg

SEQ ID NO: 66432 - DNA, 80 bp, synthetic construct
  source 1..80: mol_type = other DNA
gcaaatcacgcagaccgagtttatgctacttttaagagtaataacaaaaacggaggttcactggagtttaatttgcttga

SEQ ID NO: 66433 - DNA, 80 bp, synthetic construct
  source 1..80: mol_type = other DNA
tggactctgtccaaatgcaagtaatgaatgactccttgaaagggggcgttctctactgtctggactattctaaatgggac

SEQ ID NO: 66434 - DNA, 80 bp, synthetic construct
  source 1..80: mol_type = other DNA
atgtttgacactgtgcgccaaattgccataaagactgcccaaggagagggactggtgcttgttaacaccaactatgatca

SEQ ID NO: 66435 - DNA, 80 bp, synthetic construct
  source 1..80: mol_type = other DNA
cgttattgaatttggcaactttctaatgatagaagattaatgcgtctaccctaagagatcactagggagctccccactcc

SEQ ID NO: 66436 - DNA, 80 bp, synthetic construct
  source 1..80: mol_type = other DNA
tcttattattagctgttaaatatttacttattatatggatgatgaatgttgtttaattatattatacaataatattatta

SEQ ID NO: 66437 - DNA, 80 bp, synthetic construct
  source 1..80: mol_type = other DNA
agtgagatgggtgtctgctttggagcaatccctgtggccaatcctgatgatgccgcccagggatccggacacaccaagtc

SEQ ID NO: 66438 - DNA, 80 bp, synthetic construct
  source 1..80: mol_type = other DNA
ttgttgaattatatattaaaatcaataacgagagtaatggactatataatctatagattcttatttacagtagtaatact

SEQ ID NO: 66439 - DNA, 80 bp, synthetic construct
  source 1..80: mol_type = other DNA
cacagagtgaatcattcttaacatcaacattgtgtctgtactatccagttgaagcatcaaatgaaatagctgatactgaa

SEQ ID NO: 66440 - DNA, 80 bp, synthetic construct
  source 1..80: mol_type = other DNA
tggaaaaatacactgtcacagctgtttctgactaaaggatggccaactggatccgtatattttaaggagtatactgacat

SEQ ID NO: 66441 - DNA, 80 bp, synthetic construct
  source 1..80: mol_type = other DNA
gattacaatttagttttaatgaaatatgattcaacactagaattggacatgtctgaactagcggaccttatattgaacga

SEQ ID NO: 66442 - DNA, 80 bp, synthetic construct
  source 1..80: mol_type = other DNA
gcgacaactgaaaaactggtaattactgacgttgtggatggcgtcaatcataaattagatgttacaacaacaacttgtac

SEQ ID NO: 66443 - DNA, 80 bp, synthetic construct
  source 1..80: mol_type = other DNA
caagagaaaatgtggcagttatacaggtgggtggtgcaaatattttagacattactgctgatccgacaactgcaccgcaa

SEQ ID NO: 66444 - DNA, 80 bp, synthetic construct
  source 1..80: mol_type = other DNA
ggccacaataacaaatgcacaaaattacggggttaatttgccaataacagggtcgatggatactacatacgcaaattcta

SEQ ID NO: 66445 - DNA, 80 bp, synthetic construct
  source 1..80: mol_type = other DNA
ggactatattatttatagaataacgtttgtaattgtagtattgtcagtattatcgaatgcacaaaattatggaataaatt

SEQ ID NO: 66446 - DNA, 80 bp, synthetic construct
  source 1..80: mol_type = other DNA
ctatattatccatcagaagctccaactcaaattagtgacactgaatggaaagatacactatctcaactgtttttaaccaa

SEQ ID NO: 66447 - DNA, 80 bp, synthetic construct
  source 1..80: mol_type = other DNA
aggatggccgacaggttcagtttattttaatgaatattcaaacgttttagaattttccatcgaaccaaaactatactgtg

SEQ ID NO: 66448 - DNA, 80 bp, synthetic construct
  source 1..80: mol_type = other DNA
attataatgttgtgctaattaaattcacttctggtgaggaattggacatatctgaattagctgatctaatattgaatgag

SEQ ID NO: 66449 - DNA, 80 bp, synthetic construct
  source 1..80: mol_type = other DNA
ctaatatattagatataacagctgatcccacaacttctccacaaacagaacgaatgatgcgcgtgaactggaaaaaatgg

SEQ ID NO: 66450 - DNA, 80 bp, synthetic construct
  source 1..80: mol_type = other DNA
tgccaatcactggatctatggatacagcatatgctaactcaacacaagacaataataattttttatcttcaactttgtgt

SEQ ID NO: 66451 - DNA, 80 bp, synthetic construct
  source 1..80: mol_type = other DNA
agaaaatgtagcgattatacaagtcggtggctcagatgtgttagatattacagcggatccaactactgcaccacaaactg

SEQ ID NO: 66452 - DNA, 80 bp, synthetic construct
  source 1..80: mol_type = other DNA
gctacagtgatgtctcttagtattgacgtgactagtcttccttcaatttcttctagcgtttataaaaatgaatcgttttc

SEQ ID NO: 66453 - DNA, 80 bp, synthetic construct
  source 1..80: mol_type = other DNA
gttactatcaaactcatacgttacgaatatctctgatgaagttagcgaaattggagctaaaaaagcaactaatgttactg

SEQ ID NO: 66454 - DNA, 80 bp, synthetic construct
  source 1..80: mol_type = other DNA
caaccaactcttgacggtccatatcaacctacttcattcaatctgccgattgattattggatgttgattgcacctactag

SEQ ID NO: 66455 - DNA, 80 bp, synthetic construct
  source 1..80: mol_type = other DNA
ggaaggaaaaattgctgaaggtacgaatacgactgatagatggtttgcttgcgtattagttgaaccaaatgtgcaaagta

SEQ ID NO: 66456 - DNA, 80 bp, synthetic construct
  source 1..80: mol_type = other DNA
cacaaagacagtacgtactagatggacaaaatgttcaattacaggtttcaaatgattcaaatacttcgtggaaattcata

SEQ ID NO: 66457 - DNA, 80 bp, synthetic construct
  source 1..80: mol_type = other DNA
ttatttattaaattgacgcatgacggaacgtatactcaatattcaaccttatcaacaccgcacaaattatgcgcgtggat

SEQ ID NO: 66458 - DNA, 80 bp, synthetic construct
  source 1..80: mol_type = other DNA
aatggtttaccaccaattcagaacacaagaaacattgtaccagtaaatattacatctagacagattaaaaacgtaagagc

SEQ ID NO: 66459 - DNA, 80 bp, synthetic construct
  source 1..80: mol_type = other DNA
cgtaagagcccagatgaatgaagatatagtaatatcaaaaacctcattgtggaaggaaatgcaatataatagagacataa

SEQ ID NO: 66460 - DNA, 80 bp, synthetic construct
  source 1..80: mol_type = other DNA
taaatccaggaccatttgcacaaacgggatatgcgcctgttgactggggacatggtgaactgcctgactcaacactagtg

SEQ ID NO: 66461 - DNA, 80 bp, synthetic construct
  source 1..80: mol_type = other DNA
tcattctactcaactacatattaaaatcagtaaccagaataatggactatattatatatagatttttgctaatttccgta

SEQ ID NO: 66462 - DNA, 80 bp, synthetic construct
  source 1..80: mol_type = other DNA
ccaagagagaatgtagctgtgatacaagttggtggctctaatatattagacataacagcagatccaacgactaatccaca

SEQ ID NO: 66463 - DNA, 80 bp, synthetic construct
  source 1..80: mol_type = other DNA
tcattctactcaactatatattgaaatcagtgactcgaataatggactacattatatatagatttttgttaatttctgta

SEQ ID NO: 66464 - DNA, 80 bp, synthetic construct
  source 1..80: mol_type = other DNA
atattaaaatcagtgactcaaatgatggactaccttatatacagatctttgttaatttctgcagcattatttgctttgac

SEQ ID NO: 66465 - DNA, 80 bp, synthetic construct
  source 1..80: mol_type = other DNA
gtaatacaggttggtggctctaatgtattagatataacagcagatccaacgactaatccacaaactgagagaatgatgag

SEQ ID NO: 66466 - DNA, 80 bp, synthetic construct
  source 1..80: mol_type = other DNA
cctattctattcagtagatttatatgatgaaatagagcaaattggatcagaaaaaactcaaaatgtaactgtaaatccag

SEQ ID NO: 66467 - DNA, 80 bp, synthetic construct
  source 1..80: mol_type = other DNA
gtagatttatatgatgaaatagagcaaatcggatcagaaaaaactcaaaatgtaaccgtaaatccaggtccatttgctca

SEQ ID NO: 66468 - DNA, 80 bp, synthetic construct
  source 1..80: mol_type = other DNA
atggcaagagaatctcaaagaaatggagtatcaccacaatctgaagcgttaagaaagctagcgggaattaaatttaagag

SEQ ID NO: 66469 - DNA, 80 bp, synthetic construct
  source 1..80: mol_type = other DNA
ttattgaatttaataattttctaacgagagaagattaatgcgtctaccctaagagatcactagggagctccccactcccg

SEQ ID NO: 66470 - DNA, 80 bp, synthetic construct
  source 1..80: mol_type = other DNA
ccttatcattaactgttaaatatttaattaatataaggatgataaatgttgcttaattatattatataataagattacta

SEQ ID NO: 66471 - DNA, 80 bp, synthetic construct
  source 1..80: mol_type = other DNA
tatacagttgaattatccgatgaaattaaaacaattggatcagagaaaaatcaaaatgttacaattaatcctggaccgtt

SEQ ID NO: 66472 - DNA, 80 bp, synthetic construct
  source 1..80: mol_type = other DNA
cgaacgattattggatattattaaatccgactaatcaaagaattatattagaaggtactaatggaactgatatctgggtt

SEQ ID NO: 66473 - DNA, 80 bp, synthetic construct
  source 1..80: mol_type = other DNA
gccatattacttatcgaaccaaatacaaccaatcaaagcaaacaatatacattatttggagaaatgaaacaaattactat

SEQ ID NO: 66474 - DNA, 80 bp, synthetic construct
  source 1..80: mol_type = other DNA
acaagaatctaaatgcacagaatatataaatacaggattaccaccaatacagaatacaaggaatatagttccagttgcgt

SEQ ID NO: 66475 - DNA, 80 bp, synthetic construct
  source 1..80: mol_type = other DNA
tatcatcgagatcagtgaactatcaacgtgctcaagttaatgaagatattattatatcaaagacatcattatggaaagaa

SEQ ID NO: 66476 - DNA, 80 bp, synthetic construct
  source 1..80: mol_type = other DNA
attattatatcaaagacatcattatggaaagaaatgcaatataatagagatatcataataagatttaaatttaataatag

SEQ ID NO: 66477 - DNA, 80 bp, synthetic construct
  source 1..80: mol_type = other DNA
cgctcaaacgaattatgcaccagtaacttggagtcatggagaagtgaatgactcaacaacagtagaaccagtcttagatg

SEQ ID NO: 66478 - DNA, 80 bp, synthetic construct
  source 1..80: mol_type = other DNA
tggcagttatacaggttggtggctcaaatatacttgacataacggctgatccaacgacagcaccacaaacagaaagaatg

SEQ ID NO: 66479 - DNA, 80 bp, synthetic construct
  source 1..80: mol_type = other DNA
aatctggtatagctgcaatagaaatacagaagatagacaaactattcacgctaattaggtgtaattttacatatgattat

SEQ ID NO: 66480 - DNA, 80 bp, synthetic construct
  source 1..80: mol_type = other DNA
attgatgatattgtttatttgcatgactattcatattatacgaataatgagatacggactgaccaacactgggtaactaa

SEQ ID NO: 66481 - DNA, 80 bp, synthetic construct
  source 1..80: mol_type = other DNA
gacaaatatagaggattatctattaccagggtggaaactgacatacgtcggatacaatggaagcgatacgagaggacatt

SEQ ID NO: 66482 - DNA, 80 bp, synthetic construct
  source 1..80: mol_type = other DNA
agagataaattgtttaaaacgttatcagtaagtcatgacagagtagttaatgttgggcctagaaatgaatctatgtttac

SEQ ID NO: 66483 - DNA, 80 bp, synthetic construct
  source 1..80: mol_type = other DNA
aaacaagagagatggcttggtaaaagattatcgcagtttgacattggtcagtataaaaatatgttgaatgtgttgacaac

SEQ ID NO: 66484 - DNA, 80 bp, synthetic construct
  source 1..80: mol_type = other DNA
tttttaactaaaggatggcctactggatcagtttattttaaagagtatacagacatcgcttctttctcagttgatccaca

SEQ ID NO: 66485 - DNA, 80 bp, synthetic construct
  source 1..80: mol_type = other DNA
aactctacacaacaagagaattttatgacttccactttatgtttatattatccaagttcagtcacgactgaaataaccga

SEQ ID NO: 66486 - DNA, 80 bp, synthetic construct
  source 1..80: mol_type = other DNA
ccctgattggacgaacacaatgtcacaacttttcctgactaaaggatggccgacgaattccgtctacttcaagagttatg

SEQ ID NO: 66487 - DNA, 80 bp, synthetic construct
  source 1..80: mol_type = other DNA
ttgatatatcgtccttctctgtagatccacagttatattgtgattacaatattgtgttaatacagtaccaaaactcatta

SEQ ID NO: 66488 - DNA, 80 bp, synthetic construct
  source 1..80: mol_type = other DNA
gcgttagatgtttcagaacttgctgatttaattttaaatgaatggttatgtaatccgatggacgtaacgttgtattatta

SEQ ID NO: 66489 - DNA, 80 bp, synthetic construct
  source 1..80: mol_type = other DNA
agggaaaatgtagcgattatacaagtaggtagttctgacgtcatagacataacagcagatccaacaacgatcccacaaac

SEQ ID NO: 66490 - DNA, 80 bp, synthetic construct
  source 1..80: mol_type = other DNA
ttgtcgtgctgccgtttattaaagctcaaaattatggaataaatcttccaataacaggttctatggataccgcatatgca

SEQ ID NO: 66491 - DNA, 80 bp, synthetic construct
  source 1..80: mol_type = other DNA
aggtattaagattgatgctacaatggattcttcaatatcaatatctactacatcaaagaaggagaaatctaaacaagaga

SEQ ID NO: 66492 - DNA, 80 bp, synthetic construct
  source 1..80: mol_type = other DNA
tatcgtgttattgaatttaacaactttctaatgatagaagattaatgcgtctaccctaagagatcactagggagctcccc

SEQ ID NO: 66493 - DNA, 80 bp, synthetic construct
  source 1..80: mol_type = other DNA
ccgattcatattcagtagacttgcatgatgaaatagaacagattggatcagagaaaactcaaaatgtaacgataaatcca

SEQ ID NO: 66494 - DNA, 80 bp, synthetic construct
  source 1..80: mol_type = other DNA
gaagatattacaatttcaaaaacttcattatggaaggaaatgcaatgtaatagagatattataataagatttaaatttgg

SEQ ID NO: 66495 - DNA, 80 bp, synthetic construct
  source 1..80: mol_type = other DNA
tcagataatgaatgggaaaatactctatcgcagttatttttaactaaaggatggccgactggatcagtttattttaaaga

SEQ ID NO: 66496 - DNA, 80 bp, synthetic construct
  source 1..80: mol_type = other DNA
catcgctctgatgtcaccatttgtgaggacgcaaaattatggtatgtatttaccaataacaggatcattagacgctgtat

SEQ ID NO: 66497 - DNA, 80 bp, synthetic construct
  source 1..80: mol_type = other DNA
tagagagaacgttgcagttatccaagtaggtggttcaaatatcttagatattacagctgatccgacgacagcaccacaaa

SEQ ID NO: 66498 - DNA, 80 bp, synthetic construct
  source 1..80: mol_type = other DNA
cgcgttattgagtttaataactttctaatgagagaagattgatgcgtctaccctaagagatcactagggagctccccact

SEQ ID NO: 66499 - DNA, 80 bp, synthetic construct
  source 1..80: mol_type = other DNA
atgagatctgtaatgctaccagttttgctaattaatagcataaatgctacgataactagctataaattcgaatccgtcaa

SEQ ID NO: 66500 - DNA, 80 bp, synthetic construct
  source 1..80: mol_type = other DNA
aacagtctcaaaattatatgaccaaatttctcggtactacggctaatgatgttactaccgtgattagcatgctagattaa

SEQ ID NO: 66501 - DNA, 80 bp, synthetic construct
  source 1..80: mol_type = other DNA
atggagggcaatggctcccagttgggttcccgccagcatcaagaaaaccaggcagcggttgatccgcctggtgcgactgg

SEQ ID NO: 66502 - DNA, 80 bp, synthetic construct
  source 1..80: mol_type = other DNA
tgcgtaacactgactaccaccgtatggatggcaatgaacccacttgctcattgggtttgtgggtgtatcaacccctaatc

SEQ ID NO: 66503 - DNA, 80 bp, synthetic construct
  source 1..80: mol_type = other DNA
gcctactcaaaccccctgggcaaagaatggagaatggtgtgtcacctgaaggcttgttgcctcggcgcctgggttacgcg

SEQ ID NO: 66504 - DNA, 80 bp, synthetic construct
  source 1..80: mol_type = other DNA
cctcggcgcctgggttacgcgcgaggcaatagagttggtggtttggtagtgggcctggtactggtggcagatcaccacca

SEQ ID NO: 66505 - DNA, 80 bp, synthetic construct
  source 1..80: mol_type = other DNA
cccaaccaccccccatgttgttgtttctaatccggaacaacccaatgggcccgcacaacgcctggagatggctgttgcca

SEQ ID NO: 66506 - DNA, 80 bp, synthetic construct
  source 1..80: mol_type = other DNA
tattcagtagatttatatgatgaaatagaacaaattggatcagaaaaaactcaaaatgtaactgtaaatccaggtccatt

SEQ ID NO: 66507 - DNA, 80 bp, synthetic construct
  source 1..80: mol_type = other DNA
attctaacctttctggtatcaatagttttattgaactatatattaaaatcactaactagtgggatggactttataattta

SEQ ID NO: 66508 - DNA, 80 bp, synthetic construct
  source 1..80: mol_type = other DNA
gaagttaggaccaagagaaaatgtagcgattatacaagtcggtggctcagatgtgttagatagtacagcggatccaacta

SEQ ID NO: 66509 - DNA, 80 bp, synthetic construct
  source 1..80: mol_type = other DNA
actgttaaatatttacttaatatacatatagtgaatgttgtttaattatattgtatgacagtattagtaaatcgcgttat

SEQ ID NO: 66510 - DNA, 80 bp, synthetic construct
  source 1..80: mol_type = other DNA
acacagttgaattatcagataaaattaatacgattggatcagaaaaaaatcaaaatgtgacgattaatcccggaccgttt

SEQ ID NO: 66511 - DNA, 80 bp, synthetic construct
  source 1..80: mol_type = other DNA
ttacatgatgaaatagaacaaattggatcagaaaaaactcaaaatgtaactgtaaatccaggtccatttgctcaaacaag

SEQ ID NO: 66512 - DNA, 80 bp, synthetic construct
  source 1..80: mol_type = other DNA
actaattcatattcggtagacttgcatgacgaaataacacagattggattggagaaaactcaaaatgtgacggtaaatcc

SEQ ID NO: 66513 - DNA, 80 bp, synthetic construct
  source 1..80: mol_type = other DNA
aagtgaatgattcgacaacgatagaaccagtactcgatggtccttatcaaccaacaaattttaagccaccaaatgattac

SEQ ID NO: 66514 - DNA, 80 bp, synthetic construct
  source 1..80: mol_type = other DNA
tggatattattgaatccaactaatcatcaagttgtattagagggtaccaataaaactgatgtttgggttgctttactact

SEQ ID NO: 66515 - DNA, 80 bp, synthetic construct
  source 1..80: mol_type = other DNA
tgttgaaccaaacgtaaccaatcaaagtcgccaatacacattatttggagaaacgcaccaaattactgtagaaaataaca

SEQ ID NO: 66516 - DNA, 80 bp, synthetic construct
  source 1..80: mol_type = other DNA
caaacaaatggaaattcttcgaaatgttcagaaataatgttagtgccgaatttcaacataagcgtactttaacatcagac

SEQ ID NO: 66517 - DNA, 80 bp, synthetic construct
  source 1..80: mol_type = other DNA
actaaattagctgggtttatgaaattttataatagtgtttggacttttcacggtgaaacgccgcatgctacaactgatta

SEQ ID NO: 66518 - DNA, 80 bp, synthetic construct
  source 1..80: mol_type = other DNA
ctcgtcaacttcaaatttatctgaagtagaaactgtaatacatgttgagttttatataataccaagatcacaagaatcta

SEQ ID NO: 66519 - DNA, 80 bp, synthetic construct
  source 1..80: mol_type = other DNA
agtgcagcgaatacataaatactgggttaccaccaatgcagaatacaaggaatatagttccagttgcattatcatctaga

SEQ ID NO: 66520 - DNA, 80 bp, synthetic construct
  source 1..80: mol_type = other DNA
tcagtgacttatcaacgtgctcaggttaatgaggatatcatcatatcaaagacatcgttgtggaaagaaaggaaatataa

SEQ ID NO: 66521 - DNA, 80 bp, synthetic construct
  source 1..80: mol_type = other DNA
aggaaaaagtccaaatgtaccaattaatcccgggccggttgctcaaaccctttatgcaccagtgacttggagtcatgggg

SEQ ID NO: 66522 - DNA, 80 bp, synthetic construct
  source 1..80: mol_type = other DNA
attgcttgtattattgaattatatattaaaatcagtaaccaggattatggattatatattgtatagattcttgctatttg

SEQ ID NO: 66523 - DNA, 80 bp, synthetic construct
  source 1..80: mol_type = other DNA
cagaatgtatcaacttcagagccttttttgacatcgacgctgtgtctatattatccagcagaagctgagacagaaattgc

SEQ ID NO: 66524 - DNA, 80 bp, synthetic construct
  source 1..80: mol_type = other DNA
tgatagttcatggaaagacacattgtcacaattatttttgacgaaaggatggccaactggttcaatttacctcaaaagtt

SEQ ID NO: 66525 - DNA, 80 bp, synthetic construct
  source 1..80: mol_type = other DNA
acgtggatatagcgacattctcaataaatcctcagttgtattgtgattataatgtagtattaatgaagtataatactaat

SEQ ID NO: 66526 - DNA, 80 bp, synthetic construct
  source 1..80: mol_type = other DNA
tcagaattggatatgtcggaattggcggacctgatacttaatgaatggttatgcaatccaatggacataacgctgtatta

SEQ ID NO: 66527 - DNA, 80 bp, synthetic construct
  source 1..80: mol_type = other DNA
ttgaagaaattgcaacagctgagaaattggcaataacggatgttgttgatggagtgaactataaggtaaacgtcactact

SEQ ID NO: 66528 - DNA, 80 bp, synthetic construct
  source 1..80: mol_type = other DNA
acaacatgtaccattagaaattgtaaaaagctgggacctagagagaacgttgcaattatccaagtaggtggttcaaatat

SEQ ID NO: 66529 - DNA, 80 bp, synthetic construct
  source 1..80: mol_type = other DNA
acgttgcaattatccaagtaggtggttcaaatatcttagatattacagctgatccgacgacagcaccacaaactgagaga

SEQ ID NO: 66530 - DNA, 80 bp, synthetic construct
  source 1..80: mol_type = other DNA
ttgtaattgtcacaccattcgtaaactcacagaattatggcataaatctaccaattactggatctatggatatgaactat

SEQ ID NO: 66531 - DNA, 80 bp, synthetic construct
  source 1..80: mol_type = other DNA
taaaaagttaggtccaagagagaatgtagctgtaatacaggttggtggttctaatgtattagacataacagcagatccaa

SEQ ID NO: 66532 - DNA, 80 bp, synthetic construct
  source 1..80: mol_type = other DNA
gtatcatctccaatgtcaattttagttgctttagtagatattaatggaacgtttattacgaatgaagagttagaactaga

SEQ ID NO: 66533 - DNA, 80 bp, synthetic construct
  source 1..80: mol_type = other DNA
aatgtagctgtaatacaggttggtggctccaatgtattagacataacagcagatccaacgactaatccacaaattgagag

SEQ ID NO: 66534 - DNA, 80 bp, synthetic construct
  source 1..80: mol_type = other DNA
gacttgcatgacgaaatagaacagattggatcggagaaaactcaaaatgtaacggtaaatccaggtccatttgcacagac

SEQ ID NO: 66535 - DNA, 80 bp, synthetic construct
  source 1..80: mol_type = other DNA
ttatggaaggaaatgcaatataatagagatattataataagatttaaatttggtaatagtgtcataaaattaggaggatt

SEQ ID NO: 66536 - DNA, 80 bp, synthetic construct
  source 1..80: mol_type = other DNA
gctttaacctttttgatatcagttatattgttgaattacgtactcaaatctttaactagaataatggactttattattta

SEQ ID NO: 66537 - DNA, 80 bp, synthetic construct
  source 1..80: mol_type = other DNA
gcagcaacagaaataaatgataattcatggaaggatacactttctcagctatttttaatcaaaggatggccaacaggatc

SEQ ID NO: 66538 - DNA, 80 bp, synthetic construct
  source 1..80: mol_type = other DNA
cagatttcttttaattatagttatattatcaccactccttaatgcacaaaattatggaataaatcttccgattactggct

SEQ ID NO: 66539 - DNA, 80 bp, synthetic construct
  source 1..80: mol_type = other DNA
tcaacgtgctcaggttaatgaagatatcattgtatcaaagacgtcgttgtggaaggaaatgcaatataacagagacatca

SEQ ID NO: 66540 - DNA, 80 bp, synthetic construct
  source 1..80: mol_type = other DNA
ttcaaaaacttcattatggaaagaaatgcaatataatagagatattataataagatttaaatttggtaatagtgtcataa

SEQ ID NO: 66541 - DNA, 80 bp, synthetic construct
  source 1..80: mol_type = other DNA
ataatgggctttacacttcctattatcctgaaggccctttatatgctttcaactcgtggtaggcaaacagtcaaagaaaa

SEQ ID NO: 66542 - DNA, 80 bp, synthetic construct
  source 1..80: mol_type = other DNA
taagacggcctaaacacctctatgtctctatgccaactgctcagtcgaccatgaaagcagaagagctgacaccaggtagg

SEQ ID NO: 66543 - DNA, 80 bp, synthetic construct
  source 1..80: mol_type = other DNA
aagttcgcaacattatgagtccagtcatgggggttattgggttttctttttttgtgaaagattgggctgaaaggatcaaa

SEQ ID NO: 66544 - DNA, 80 bp, synthetic construct
  source 1..80: mol_type = other DNA
ctgcaaaagaaattgagatattaaagagaaataaaatctatttcatgcaccgccaggatgttcttgataaaaaccatgtc

SEQ ID NO: 66545 - DNA, 80 bp, synthetic construct
  source 1..80: mol_type = other DNA
ttaagacgcacacaatcgatgggaatacagcttgatcagaggataatcttactgtatatgttagaatggggtaaagaaat

SEQ ID NO: 66546 - DNA, 80 bp, synthetic construct
  source 1..80: mol_type = other DNA
aatttaataactttctaacgagagaagattaatgcgtctaccctaggagatcactagggagctccccactcccgttttgt

SEQ ID NO: 66547 - DNA, 80 bp, synthetic construct
  source 1..80: mol_type = other DNA
ggtaacaccaccgtctgggcagaacgtgcttgtagagtgtaattgcggctcggcagtatctgaaaccatcagcaccgcaa

SEQ ID NO: 66548 - DNA, 80 bp, synthetic construct
  source 1..80: mol_type = other DNA
acagtatacgagagcacaagttaatgaagacattacaatttcaaagacttcattatggaaagagatgcaatataacagag

SEQ ID NO: 66549 - DNA, 80 bp, synthetic construct
  source 1..80: mol_type = other DNA
catataactcaataacgttgtcatttatgagttattcttcttcatcctatgacgtaattgacataatatctaaatatgat

SEQ ID NO: 66550 - DNA, 80 bp, synthetic construct
  source 1..80: mol_type = other DNA
gtaacatattagccattgatgtatttaacgcttcaatggattttaatgttttccttcagtccactaataattgttcaaaa

SEQ ID NO: 66551 - DNA, 80 bp, synthetic construct
  source 1..80: mol_type = other DNA
ctgattctttaataggaatgtattgtgatactcaactttctgacacatacttcgaaatatccactggtggaacatacgaa

SEQ ID NO: 66552 - DNA, 80 bp, synthetic construct
  source 1..80: mol_type = other DNA
cctgaattcactcaaatgggatacacattccattcaagtgaggagttttatttgtgtcacagaatttccagtgaggcttg

SEQ ID NO: 66553 - DNA, 80 bp, synthetic construct
  source 1..80: mol_type = other DNA
aaactggggaaacgtatggtcaggttttaaaacctttgcccaagttttatataaaatactagatttgttttttaatagta

SEQ ID NO: 66554 - DNA, 80 bp, synthetic construct
  source 1..80: mol_type = other DNA
gagaaacgttgaaccgcgtgcataaagaggactaggcgaaagggagggaaccaaacgattagccgaagctgtaaaaaccc

SEQ ID NO: 66555 - DNA, 80 bp, synthetic construct
  source 1..80: mol_type = other DNA
aagtcggtggctcagatgtgttagatattacagcggatccaactactgcaccacaaactgaacgtatgatgcgagtaaat

SEQ ID NO: 66556 - DNA, 80 bp, synthetic construct
  source 1..80: mol_type = other DNA
aagagttatgctgatatatcgtccttctctgtagatccgcagttgtattgtgattataatattgtgttaatacagtatca

SEQ ID NO: 66557 - DNA, 80 bp, synthetic construct
  source 1..80: mol_type = other DNA
ttttatcattaactgttaaatatttacttaatatatgaatgataaatgttgcttaattatattatgtgatagtattatta

SEQ ID NO: 66558 - DNA, 80 bp, synthetic construct
  source 1..80: mol_type = other DNA
aaactctaacttttttgatattgcttgtattgttgaactatatattaaaatcaataaacagaattatggattatatactc

SEQ ID NO: 66559 - DNA, 80 bp, synthetic construct
  source 1..80: mol_type = other DNA
atcaatggatacgaactatcaaaacgtgtctaatcctgaaccatttctaacatcgacactatgcttgtattatccagcag

SEQ ID NO: 66560 - DNA, 80 bp, synthetic construct
  source 1..80: mol_type = other DNA
aagcagagacagaaatagcagatagttcatggaaggatactttatcgcaattattcctaacaaaaggatggccaactggt

SEQ ID NO: 66561 - DNA, 80 bp, synthetic construct
  source 1..80: mol_type = other DNA
tctgtctatcttaaaagttatacagatattgcaactttttcaataaatccgcaattatactgtgactataacattgtact

SEQ ID NO: 66562 - DNA, 80 bp, synthetic construct
  source 1..80: mol_type = other DNA
aatgaagtataatgctaattcagaattagatatgtcagagttagctgacttgatacttaatgagtggctttgtaatccaa

SEQ ID NO: 66563 - DNA, 80 bp, synthetic construct
  source 1..80: mol_type = other DNA
ttgcaacagctgaaaaattggcaataacagatgttgtagatggagtgaattataaagtaaatgtgacaacgactacatgt

SEQ ID NO: 66564 - DNA, 80 bp, synthetic construct
  source 1..80: mol_type = other DNA
accattagaaattgtaaaaaattggggccacgtgagaatgtcgcagtcattcaagtaggcgggtcaaatattttagatat

SEQ ID NO: 66565 - DNA, 80 bp, synthetic construct
  source 1..80: mol_type = other DNA
gccacgtgagaatgtcgcagtcattcaagtaggcgggtcaaatattttagatattacagcggatccgacaacggcaccac

SEQ ID NO: 66566 - DNA, 80 bp, synthetic construct
  source 1..80: mol_type = other DNA
tatcgttttttgctttttgttgttattgtcacaccatttgtaaattcacaaaattacggcattaatttaccgataacggg

SEQ ID NO: 66567 - DNA, 80 bp, synthetic construct
  source 1..80: mol_type = other DNA
gcgtgtctatggattcatcagcacaatcacgaccatctagcgacattggatacgatcaaatggatttctccttaaacaaa

SEQ ID NO: 66568 - DNA, 80 bp, synthetic construct
  source 1..80: mol_type = other DNA
taataactttttaatgagagaagattaatgcgtctaccctaagagatcgctagggagctccccactcccgttttgtgacc

SEQ ID NO: 66569 - DNA, 80 bp, synthetic construct
  source 1..80: mol_type = other DNA
gaacaaaaataaatataaaaaatgctatccaaaaattgaagcagaatctgattctgatgaatacgtattagatgattcag

SEQ ID NO: 66570 - DNA, 80 bp, synthetic construct
  source 1..80: mol_type = other DNA
tcttattattaactgttaaatatttacttaatatacatatagtgaatgttgtttaattatattgtatgacagtattagta

SEQ ID NO: 66571 - DNA, 80 bp, synthetic construct
  source 1..80: mol_type = other DNA
ttagaaattgtaaaaaattaggaccaagggaaaacgtagcatttatacgggtaggtggcccagatgtgcttgacataaca

SEQ ID NO: 66572 - DNA, 80 bp, synthetic construct
  source 1..80: mol_type = other DNA
tccatggatatgaactatcagaatgcatcaacttcagagccttttctgacatcgacgctgtgtctatattatccaacaga

SEQ ID NO: 66573 - DNA, 80 bp, synthetic construct
  source 1..80: mol_type = other DNA
gtataaaaaatgttacccaaaaatcgaggcagagtctgattccgatgattacatattagatgattcagatagtgatgatg

SEQ ID NO: 66574 - DNA, 80 bp, synthetic construct
  source 1..80: mol_type = other DNA
aatatatactgtgttattgaattaatgatgtcctaataagagaagattgatgcgtctaacctgatcactagggagctccc

SEQ ID NO: 66575 - DNA, 80 bp, synthetic construct
  source 1..80: mol_type = other DNA
gaattaatgatgtcctaataagagaagattgatgcgtctaacctgatcactagggagctccccactcccgttttgtgacc

SEQ ID NO: 66576 - DNA, 80 bp, synthetic construct
  source 1..80: mol_type = other DNA
tgtaattgtctatatgacgatacaccacaaatagttgtgttcaccaattttagaaaatctagtttaaaaacgttgattgg

SEQ ID NO: 66577 - DNA, 80 bp, synthetic construct
  source 1..80: mol_type = other DNA
aaatgtgaattattaccgcagacaacaatctacactccaaccgttgatattgaatcggaatattttatatatggaaatga

SEQ ID NO: 66578 - DNA, 80 bp, synthetic construct
  source 1..80: mol_type = other DNA
tgctatttagacaaaaatttactgggaattggatgtgatgccactgatacaacctcttggcttgatttagacgctggatt

SEQ ID NO: 66579 - DNA, 80 bp, synthetic construct
  source 1..80: mol_type = other DNA
catgcaattgatattcctgaaatcacgagcgatggatttaaactattcgcaaaatacggtgattctttcttatgtcaacg

SEQ ID NO: 66580 - DNA, 80 bp, synthetic construct
  source 1..80: mol_type = other DNA
gagccaaaaaaacaaattcaattttacgcagaagtagacaatgttccatctaacgacgtaatagaaagttcaagatcttg

SEQ ID NO: 66581 - DNA, 80 bp, synthetic construct
  source 1..80: mol_type = other DNA
tggaaagttgttaaaacggtcttgcattttacttaccatatacttgatttattctatggtaacaaacgtgccacagctag

SEQ ID NO: 66582 - DNA, 80 bp, synthetic construct
  source 1..80: mol_type = other DNA
gacttgtgtatcatttatgaaatgactagttttggagctagttttaacaacgcaaatgattcattagttaaactacatag

SEQ ID NO: 66583 - DNA, 80 bp, synthetic construct
  source 1..80: mol_type = other DNA
atacaagtcggtggctcagaagtgttagatattacagcggatccaactaccacaccacaaactgagcgtatgatgcgagt

SEQ ID NO: 66584 - DNA, 80 bp, synthetic construct
  source 1..80: mol_type = other DNA
atgtagcagtaattcaagttggaggttctgatgttcttgatataacagctgatcccactacagcaccacagactgaaaga

SEQ ID NO: 66585 - DNA, 80 bp, synthetic construct
  source 1..80: mol_type = other DNA
gttactatcaaactcatatgttacaaacatttctgacgaagttaatgaaattggaactaaaaaaacaactaacgttactg

SEQ ID NO: 66586 - DNA, 80 bp, synthetic construct
  source 1..80: mol_type = other DNA
caaccaactcttgatggtccataccaacccacctcactcaacttaccagttgattattggatgttaattgcacctgctag

SEQ ID NO: 66587 - DNA, 80 bp, synthetic construct
  source 1..80: mol_type = other DNA
agagggaaaagttgctgaaggtacgaatacgaccgatagatggtttgcttgtgtgctagttgaaccaaatgtgcaaaaca

SEQ ID NO: 66588 - DNA, 80 bp, synthetic construct
  source 1..80: mol_type = other DNA
cacaaagacaatacgtattagatgggcaaaatgtccaattaaatgtctcaaatggttcaagcacttcatggaaatttata

SEQ ID NO: 66589 - DNA, 80 bp, synthetic construct
  source 1..80: mol_type = other DNA
ttattcattaaattgacgcctgatggaacgtacactcaatactcaaccttgtcaacaccgcataagttatgcgcgtggat

SEQ ID NO: 66590 - DNA, 80 bp, synthetic construct
  source 1..80: mol_type = other DNA
gaaaagagataacagagtatactggtatcaaggagcaacaccgaacgcatcagagagctattacttgactataaacaatg

SEQ ID NO: 66591 - DNA, 80 bp, synthetic construct
  source 1..80: mol_type = other DNA
ataacagcaacgtttcaagtgacgctgaattttatttgataccgcaatcgcagactgctatgtgtacacaatatataaac

SEQ ID NO: 66592 - DNA, 80 bp, synthetic construct
  source 1..80: mol_type = other DNA
aatggtttaccaccagttcagaatacaaggaatattgtaccagtgaacattacatctaggcagattaaagacataagagc

SEQ ID NO: 66593 - DNA, 80 bp, synthetic construct
  source 1..80: mol_type = other DNA
ccagatgaatgaagacatagtgatatcaaaaacttcgttatggaaagaaatgcaatataatagagacataatcattagat

SEQ ID NO: 66594 - DNA, 80 bp, synthetic construct
  source 1..80: mol_type = other DNA
tgatatcaaaaacttcgttatggaaagaaatgcaatataatagagacataatcattagatttaaatttgctaattcaata

SEQ ID NO: 66595 - DNA, 80 bp, synthetic construct
  source 1..80: mol_type = other DNA
ttaatccagggccattcgcacaaacgggatatgcgcctgttaattggggacatggtgaattgcctgattctacattagtg

SEQ ID NO: 66596 - DNA, 80 bp, synthetic construct
  source 1..80: mol_type = other DNA
gctagagacaaaattgtcgaaggcacgttatactccaatgtaagtgatctaatccaacaatttaatcaaatgataattac

SEQ ID NO: 66597 - DNA, 80 bp, synthetic construct
  source 1..80: mol_type = other DNA
cgtcgagacagcccgtaataccatcgattattttgtggatttcgtagataatgtatgcatggatgaaatggttagagagt

SEQ ID NO: 66598 - DNA, 80 bp, synthetic construct
  source 1..80: mol_type = other DNA
ggtagagtttctactaaacgggcagataataaatacttaccaagcaagatttggaacaatcatagctagaaactttgata

SEQ ID NO: 66599 - DNA, 80 bp, synthetic construct
  source 1..80: mol_type = other DNA
tattcggtagacttgcatgacgaaataacacagattggatcggagaaaactcaaaatgtgacggtaaatccaggcccatt

SEQ ID NO: 66600 - DNA, 80 bp, synthetic construct
  source 1..80: mol_type = other DNA
atatcgattatattattgaactatatcttgaaatcagtaataagactaatggactttataatatataggtttttattgat

SEQ ID NO: 66601 - DNA, 80 bp, synthetic construct
  source 1..80: mol_type = other DNA
atgcaaattcaactagagaagaaactttcctgacatcaacactatgtttatattatccagtagaagctaagaatgaaata

SEQ ID NO: 66602 - DNA, 80 bp, synthetic construct
  source 1..80: mol_type = other DNA
aatgatggatcttggacggatacactatctcaattatttctaactaaagggtggcctaccggttcagtatactttaaaga

SEQ ID NO: 66603 - DNA, 80 bp, synthetic construct
  source 1..80: mol_type = other DNA
gactataacatagtaataatgaaatatcaatcagatttgcagttagatatgtctgaacttgcggacttagtacttaatga

SEQ ID NO: 66604 - DNA, 80 bp, synthetic construct
  source 1..80: mol_type = other DNA
aattaaagtttgtccattgaatacacaaactcttgggataggatgtttaactactaatacggataccttcgaagagatcg

SEQ ID NO: 66605 - DNA, 80 bp, synthetic construct
  source 1..80: mol_type = other DNA
ctactaatgagaagcttgcaataacggatgttgtggatggagtggatcataaaattaatattaatactgcaacgtgtaca

SEQ ID NO: 66606 - DNA, 80 bp, synthetic construct
  source 1..80: mol_type = other DNA
attcgaaactgcaataaattaggaccaagggagaatgtcgcggtaattcaagttggtggttctgacgtgcttgatataac

SEQ ID NO: 66607 - DNA, 80 bp, synthetic construct
  source 1..80: mol_type = other DNA
attcaagttggtggttctgacgtgcttgatataactgctgatccgacaaatgcaccacaaactgaacgaatgatgcgtat

SEQ ID NO: 66608 - DNA, 80 bp, synthetic construct
  source 1..80: mol_type = other DNA
cattgtgatattgtcaccattacttaaagcgcaaaactatggaattaacttgcctataactggctctatggatactccat

SEQ ID NO: 66609 - DNA, 80 bp, synthetic construct
  source 1..80: mol_type = other DNA
acaaaaataagtataaaaaatgttacccaaaaatcgaagcagagtctgattccgatgattacatattagatgattcagat

SEQ ID NO: 66610 - DNA, 80 bp, synthetic construct
  source 1..80: mol_type = other DNA
atatatactgtgttattgaatttaatgatatcctaatgatagaagattgatgcgtctaacctgagagatcactagggagc

SEQ ID NO: 66611 - DNA, 80 bp, synthetic construct
  source 1..80: mol_type = other DNA
atagaaggcatacttggttgatatgggagatctggttttttatgatgtcgcatccacaggtgcaaatggatttgatccag

SEQ ID NO: 66612 - DNA, 80 bp, synthetic construct
  source 1..80: mol_type = other DNA
atgaaagtttgaataaattttggatttctaaattgacaaattttatataattggttgaaatttaattcttataattggtt

SEQ ID NO: 66613 - DNA, 80 bp, synthetic construct
  source 1..80: mol_type = other DNA
taggtccaagagagaatgtagctgtaatacaggttggtggctctaatgtattagacataacagcagatccaacgactaat

SEQ ID NO: 66614 - DNA, 80 bp, synthetic construct
  source 1..80: mol_type = other DNA
aagttaatgaagacattacaatttcaaagacctcattatggaaagaaatgcaatataacagagatattataattagattt

SEQ ID NO: 66615 - DNA, 80 bp, synthetic construct
  source 1..80: mol_type = other DNA
gtatcaggacatcgcatcattttcggtagacccacaattatattgtgactataacatagtaataatgaaatatcaatcag

SEQ ID NO: 66616 - DNA, 80 bp, synthetic construct
  source 1..80: mol_type = other DNA
atttgcagttagacatgtctgagcttgcagacttagtacttaatgaatggttatgtaatccaatggacattacattgtat

SEQ ID NO: 66617 - DNA, 80 bp, synthetic construct
  source 1..80: mol_type = other DNA
aacctttttgatatcaattattctattgaattatatattaaaatcaataactaatatgatggactttatcatatatcggt

SEQ ID NO: 66618 - DNA, 80 bp, synthetic construct
  source 1..80: mol_type = other DNA
gataccgcatatgtaaactctacacaacaagagaattttatgacttccactttatgcttatattatccaagttcagtcac

SEQ ID NO: 66619 - DNA, 80 bp, synthetic construct
  source 1..80: mol_type = other DNA
gactgaaataactgatcccgactggacgaacacactgtcacaacttttcctgactaaaggatggccgacaaattccgtct

SEQ ID NO: 66620 - DNA, 80 bp, synthetic construct
  source 1..80: mol_type = other DNA
tatcaaaattcattagcgttagatgtctcagaacttgctgatttaattttaaatgaatggttatgtaatccgatggacgt

SEQ ID NO: 66621 - DNA, 80 bp, synthetic construct
  source 1..80: mol_type = other DNA
ttttactaatagttgtcgtcatactgccatttattaaagctcaaaattatggaataaatcttccaataacaggttctatg

SEQ ID NO: 66622 - DNA, 80 bp, synthetic construct
  source 1..80: mol_type = other DNA
ctaagacagctactcactaattcatacacagttgaattatcagatgaaatcaatacaattggatcagaaaaaagtcaaaa

SEQ ID NO: 66623 - DNA, 80 bp, synthetic construct
  source 1..80: mol_type = other DNA
cattgtatcaaagacatcgttgtggaaggaaatgcaatataacagagacatcataataaggtttaaattttataatagta

SEQ ID NO: 66624 - DNA, 80 bp, synthetic construct
  source 1..80: mol_type = other DNA
tatgtgatgctatattaccagatgaagaaacggaaggtgcccttagaagattcattgcagaaatgagacagcgtgtgcaa

SEQ ID NO: 66625 - DNA, 80 bp, synthetic construct
  source 1..80: mol_type = other DNA
tctgatagaaatgttgtcaattatccatcaatattacatccaatagattatgcatttaatgaatactttttacaacatca

SEQ ID NO: 66626 - DNA, 80 bp, synthetic construct
  source 1..80: mol_type = other DNA
gattatgcatttaatgaatactttttacaacatcaattggttgaaccaatgaataatgatataatatttaattatatacc

SEQ ID NO: 66627 - DNA, 80 bp, synthetic construct
  source 1..80: mol_type = other DNA
cttatgaaatcgaatggaaatgttggacattgttcatcacaggaatcagtgtataagtatataccagatttatttttaat

SEQ ID NO: 66628 - DNA, 80 bp, synthetic construct
  source 1..80: mol_type = other DNA
ttacttacatccttcgtggttccaatactcctgaaggccctttatatgctaacaacaaggggaagacagacaaccaagga

SEQ ID NO: 66629 - DNA, 80 bp, synthetic construct
  source 1..80: mol_type = other DNA
aagctagacagatggtcagccctgtcatgagtgtgatcggatttccggccttggctaaggattggggtgatagaattgac

SEQ ID NO: 66630 - DNA, 80 bp, synthetic construct
  source 1..80: mol_type = other DNA
aagtggttgagtgacccctgtaaactccttcctgacacagcagcagttagcctccatggtggtcctgcaactaatagaga

SEQ ID NO: 66631 - DNA, 80 bp, synthetic construct
  source 1..80: mol_type = other DNA
attatctccgacagaggcaggcagctttaggaaacatggagaccaaagaatcaaaggcaattcgtcaacatgcagagaca

SEQ ID NO: 66632 - DNA, 80 bp, synthetic construct
  source 1..80: mol_type = other DNA
gaatacaactggaccaaagaataattgttctcttcatggttgcctgggaaaggaaggcagtggacaatttccaccttgga

SEQ ID NO: 66633 - DNA, 80 bp, synthetic construct
  source 1..80: mol_type = other DNA
atggtattgaatataccacaattctaaccctcctgatatcaatagttttattgaactatatattaaaaactctaactagt

SEQ ID NO: 66634 - DNA, 80 bp, synthetic construct
  source 1..80: mol_type = other DNA
aagtcggtggttcagacgtgcttgatataactgctgatccgacaaatgcaccacaaactgagcgaatgatgcggattaat

SEQ ID NO: 66635 - DNA, 80 bp, synthetic construct
  source 1..80: mol_type = other DNA
atgtagcaattatacaagtaggtagttctgacgtcatagacataacagcagatccaacaacgatcccacaaactgaaaga

SEQ ID NO: 66636 - DNA, 80 bp, synthetic construct
  source 1..80: mol_type = other DNA
gctagggataagattgttgaaggtacattatattctaatgttagcgatctcattcagcaatttaatcaaatgatagtaac

SEQ ID NO: 66637 - DNA, 80 bp, synthetic construct
  source 1..80: mol_type = other DNA
tttttcttagatgggccgattattaatacatatcaagctagattgggcactactatggcacagaaatttgataccattcg

SEQ ID NO: 66638 - DNA, 80 bp, synthetic construct
  source 1..80: mol_type = other DNA
accacaattctaatctttctgatatcaatcattctactcaactatatattaaaatcagtgacccgaataatggactacat

SEQ ID NO: 66639 - DNA, 80 bp, synthetic construct
  source 1..80: mol_type = other DNA
tcagtgacttatcaacgggctcaggttaatggggatatcattttttcaaaaacatcgttggggaaagaaatgcattttta

SEQ ID NO: 66640 - DNA, 80 bp, synthetic construct
  source 1..80: mol_type = other DNA
atggggatatcattttttcaaaaacatcgttggggaaagaaatgcatttttacagagaccttttaatgaggtttaaattt

SEQ ID NO: 66641 - DNA, 80 bp, synthetic construct
  source 1..80: mol_type = other DNA
agaaaaaagtcaaaatgtaacaataaatcccggaccgtttgctcaaacaaattatgcacctttgacttggagtcatgggg

SEQ ID NO: 66642 - DNA, 80 bp, synthetic construct
  source 1..80: mol_type = other DNA
aatcgatgaatagagcaaatcggatccagaaaaaactcaaaactaaccgtaaatccaggttcatccgctcaaacaagata

SEQ ID NO: 66643 - DNA, 80 bp, synthetic construct
  source 1..80: mol_type = other DNA
gaagttaggtccaagagagaatgtggctgtaatacaagttggtggtgctaatatattagacataacagcagatccaacaa

SEQ ID NO: 66644 - DNA, 80 bp, synthetic construct
  source 1..80: mol_type = other DNA
aagacattacaatttcaaagacttcattatggaaagaaatgcagtataacagagatattataattaggtttaaatttggc

SEQ ID NO: 66645 - DNA, 80 bp, synthetic construct
  source 1..80: mol_type = other DNA
gaggttgcccataaatatgaaagagtgtataaatggtattgtaggaacctagttaataggttcgttatactcccttctgg

SEQ ID NO: 66646 - DNA, 80 bp, synthetic construct
  source 1..80: mol_type = other DNA
caagttggaggttctgatgttcttgatataacagctgatcccactacagcaccacagactgaaagaatgatgcgtattaa

SEQ ID NO: 66647 - DNA, 80 bp, synthetic construct
  source 1..80: mol_type = other DNA
ataaaatggcttcgctcatttatagacagctactcactaattcatacacagttgaattatcagatgaacttaatacaatt

SEQ ID NO: 66648 - DNA, 80 bp, synthetic construct
  source 1..80: mol_type = other DNA
tgaggatatcattatatcaaagacatcgttgtggaaagaaatgcaatataacagagacattttaattagggttaaattta

SEQ ID NO: 66649 - DNA, 80 bp, synthetic construct
  source 1..80: mol_type = other DNA
tatggtattgaatataccacaattctgaccattttaatatctatcatattattgaattatatactaaaaactattactta

SEQ ID NO: 66650 - DNA, 80 bp, synthetic construct
  source 1..80: mol_type = other DNA
tgtatttgccaataacgggatcactagacgctgtatacacaaattcaactagtggagaatcatttctaacttcaacgtta

SEQ ID NO: 66651 - DNA, 80 bp, synthetic construct
  source 1..80: mol_type = other DNA
tgtttatatcatccaacagaagctaaaaatgagatttcagattatgaatgggaaaatactctatcacaattatttttaac

SEQ ID NO: 66652 - DNA, 80 bp, synthetic construct
  source 1..80: mol_type = other DNA
taatggatggccaactgggtcagtttattttaaagactacaatgatattactacattttctatgaatccacaactgtatt

SEQ ID NO: 66653 - DNA, 80 bp, synthetic construct
  source 1..80: mol_type = other DNA
gtgattataatgtagtattgatgcgatatgataatacatctgaattagatgcatcggaattagcagatcttatattgaac

SEQ ID NO: 66654 - DNA, 80 bp, synthetic construct
  source 1..80: mol_type = other DNA
gaatggctgtgcaatcctatggatatatcactttactattatcaacaagatagcgaatcatataaatggatatcaatggg

SEQ ID NO: 66655 - DNA, 80 bp, synthetic construct
  source 1..80: mol_type = other DNA
aacagactgcacggtaaaagtttgtccactcaatacacaaactttaggaattggatgcaaaactacggacgtggatacat

SEQ ID NO: 66656 - DNA, 80 bp, synthetic construct
  source 1..80: mol_type = other DNA
ttgagatcgttgcgtcatctgaaaaattggtaattactgatgttgtaaatggtgttaatcataaaataaatatttcaata

SEQ ID NO: 66657 - DNA, 80 bp, synthetic construct
  source 1..80: mol_type = other DNA
aatacgtgcactatacgtaattgtaataaacttggaccacgagaaaatgttgctataattcaagttggtggaccgaacgc

SEQ ID NO: 66658 - DNA, 80 bp, synthetic construct
  source 1..80: mol_type = other DNA
gaccacgagaaaatgttgctataattcaagttggtggaccgaacgcactagatatcactgctgatcccacaactgttccc

SEQ ID NO: 66659 - DNA, 80 bp, synthetic construct
  source 1..80: mol_type = other DNA
tataatggactatataatttttagatttttactactaatcgctctgatgtcaccatttgtgaggacccaaaattatggca

SEQ ID NO: 66660 - DNA, 80 bp, synthetic construct
  source 1..80: mol_type = other DNA
aatcaaaggatggccaacaggatctatttattttaaagattatactgatattgcctcgttttcagtcgatccacaactgt

SEQ ID NO: 66661 - DNA, 80 bp, synthetic construct
  source 1..80: mol_type = other DNA
taggaccaagggaaaacgtagcatttatacaggtaggtggcccagatgtgcttgacataacagctgatccaacgacaatg

SEQ ID NO: 66662 - DNA, 80 bp, synthetic construct
  source 1..80: mol_type = other DNA
tatggaaagaaatgcagtataatagggatattataattagatttaaatttggtaatagtattgtaaagatgggaggacta

SEQ ID NO: 66663 - DNA, 80 bp, synthetic construct
  source 1..80: mol_type = other DNA
gcttctcactaattcatattcagtagatttacatgatgaaatagaacaaattggatcagaaaaaactcaaaatgtaactg

SEQ ID NO: 66664 - DNA, 80 bp, synthetic construct
  source 1..80: mol_type = other DNA
attatagtttcaaaaccctcattgtggaaagaaatgcagtataacagggattttataattagatccaaatttggtaatag

SEQ ID NO: 66665 - DNA, 80 bp, synthetic construct
  source 1..80: mol_type = other DNA
ctgagtattgtgatttacttgacttcatttgtggtgccaattttgttgaaggcactttatatgcttacaacaagagggag

SEQ ID NO: 66666 - DNA, 80 bp, synthetic construct
  source 1..80: mol_type = other DNA
tgggaatacaacttgatcagaggataattatcatgttcatggtggaatggggtaaagaggctgttgatggatttcatctt

SEQ ID NO: 66667 - DNA, 80 bp, synthetic construct
  source 1..80: mol_type = other DNA
atgataatacatctgaattggatgcatcggagttagcagatcttatattgaacgaatggctgtgcaatcctatggacata

SEQ ID NO: 66668 - DNA, 80 bp, synthetic construct
  source 1..80: mol_type = other DNA
tttgtcaaaacacaaaattatgggataaatttaccaattactggctccatggacacagcatatgcaaattcgtcacagca

SEQ ID NO: 66669 - DNA, 80 bp, synthetic construct
  source 1..80: mol_type = other DNA
acaatttcaaagacttcattatggaaagaaatgcaatataacagagatattataattagatttaaatttggtaatagtat

SEQ ID NO: 66670 - DNA, 80 bp, synthetic construct
  source 1..80: mol_type = other DNA
atcatacaagttggtggctcagatgtgttagatattacagcggatccaactactgcaccacaaactgaacgtatgatgcg

SEQ ID NO: 66671 - DNA, 80 bp, synthetic construct
  source 1..80: mol_type = other DNA
caccactccttaatgcacaaaattatggaatagatcttccgattactggatcaatggatacaccatatacgaactcaacg

SEQ ID NO: 66672 - DNA, 80 bp, synthetic construct
  source 1..80: mol_type = other DNA
cgagaggaattattcctaacttcgactttatgtttgtattacccaactgaagcagcaacagaaataaacgataattcatg

SEQ ID NO: 66673 - DNA, 80 bp, synthetic construct
  source 1..80: mol_type = other DNA
gaaggatacactttctcaactatttttaacgaaaggatggccaacagggtctgtttattttaaagattatactgatattg

SEQ ID NO: 66674 - DNA, 80 bp, synthetic construct
  source 1..80: mol_type = other DNA
cctcattctcagtcgatccacaactgtactgtgattataatttggtattaatgaaatacgacgttacactacaactggac

SEQ ID NO: 66675 - DNA, 80 bp, synthetic construct
  source 1..80: mol_type = other DNA
gttgaattacgtactcaaatcattaactagaataatggactttattatttacaaatctctcctaattatagtcatactat

SEQ ID NO: 66676 - DNA, 80 bp, synthetic construct
  source 1..80: mol_type = other DNA
aatttcaaaaacatcattgtggaaagaaatgcagtataacaaggatattataattaggttcaaatttggtaatagtattg

SEQ ID NO: 66677 - DNA, 80 bp, synthetic construct
  source 1..80: mol_type = other DNA
aattctaacttttttgatatcaattattctattaaattatatattaaaatcaataactaatataatggactttatcatat

SEQ ID NO: 66678 - DNA, 80 bp, synthetic construct
  source 1..80: mol_type = other DNA
tctatggataccgcatatgcaaactctacacaacaagagaattttatgacttccactttatgtttatattatccaagttc

SEQ ID NO: 66679 - DNA, 80 bp, synthetic construct
  source 1..80: mol_type = other DNA
agtcacgactgaaataactgatcctgattggacgaacacactgtcacaacttttcctgactaaaggatggccgacaaatt

SEQ ID NO: 66680 - DNA, 80 bp, synthetic construct
  source 1..80: mol_type = other DNA
ccgtttacttcaagagttatgctgatatatcgtccttctctgtagatccacagttatattgtgattacaatattgtgtta

SEQ ID NO: 66681 - DNA, 80 bp, synthetic construct
  source 1..80: mol_type = other DNA
atacagtaccaaaattcattagcgttagatgtttcagaacttgctgatttaattttaaatgaatggttatgtaatccgat

SEQ ID NO: 66682 - DNA, 80 bp, synthetic construct
  source 1..80: mol_type = other DNA
agtaggtagttctgacgtcatagacataacagcagatccaacaacgatcccacaaactgaaagaatgatgcgaataaact

SEQ ID NO: 66683 - DNA, 80 bp, synthetic construct
  source 1..80: mol_type = other DNA
atcggtttttactaatagttgttgtcgtactgccatttattaaagctcaaaattatggaataaatcttccaataacaggt

SEQ ID NO: 66684 - DNA, 80 bp, synthetic construct
  source 1..80: mol_type = other DNA
aattctaatctttctgatatcaattattctactcaactatatattaaaatcagtaactcgaataatggactacattatat

SEQ ID NO: 66685 - DNA, 80 bp, synthetic construct
  source 1..80: mol_type = other DNA
aattctagtcttcttgatatcgattacgttgttaaattacatattaaaatcagtgacaaggataatggactatataattt

SEQ ID NO: 66686 - DNA, 80 bp, synthetic construct
  source 1..80: mol_type = other DNA
tcaatggataccacatatgcgaactcaacgcaaagtgaatcgtttctaacatcaactttatgcttatattatccagttga

SEQ ID NO: 66687 - DNA, 80 bp, synthetic construct
  source 1..80: mol_type = other DNA
agcgtcaaacgaaatagctgatactgaatggaaaaacactttatcgcaattgtttttgactaaaggatggccaactggat

SEQ ID NO: 66688 - DNA, 80 bp, synthetic construct
  source 1..80: mol_type = other DNA
gactataacttagttctaatgaagtatgattcaactctagaattagacatgtcagaactagcggaccttatactaaatga

SEQ ID NO: 66689 - DNA, 80 bp, synthetic construct
  source 1..80: mol_type = other DNA
agtgaaagtgtgtccattaaatacgcaaacgcttggtattggatgtctaacaactgatcctaatacgtttgagacagttg

SEQ ID NO: 66690 - DNA, 80 bp, synthetic construct
  source 1..80: mol_type = other DNA
ctatacgcaactgtaaaaaattgggaccgagagaaaacgtggctgttatacaagtaggcggtgcaaatgttctagacatc

SEQ ID NO: 66691 - DNA, 80 bp, synthetic construct
  source 1..80: mol_type = other DNA
agtaggcggtgcaaatgttctagacatcacagctgatccaacgactgcgccgcaaactgaaaggatgatgcgagtaaatt

SEQ ID NO: 66692 - DNA, 80 bp, synthetic construct
  source 1..80: mol_type = other DNA
atagatttttatttataatagtaatactgaccaccgtgacaaatgcgcagaattatggagtaaatttaccaataacgggg

SEQ ID NO: 66693 - DNA, 80 bp, synthetic construct
  source 1..80: mol_type = other DNA
aactctaatcttcttgatattgcttgtattattgaattatatattaaaatcagtaaccaggattatggattatatactgt

SEQ ID NO: 66694 - DNA, 80 bp, synthetic construct
  source 1..80: mol_type = other DNA
tctatggatatgaattatcaaaatgtatcaaattcagagccttttttgacatcaacgctgtgtctatattatccagcaga

SEQ ID NO: 66695 - DNA, 80 bp, synthetic construct
  source 1..80: mol_type = other DNA
agctgagacagaaattgctgataattcatggaaagacacattgtcacagttatttttgacaaaaggatggccaactggtt

SEQ ID NO: 66696 - DNA, 80 bp, synthetic construct
  source 1..80: mol_type = other DNA
caatttaccttaaaagttacgtggatatagcgacattctcaataaatcctcagttgtattgtgattataatgtagtatta

SEQ ID NO: 66697 - DNA, 80 bp, synthetic construct
  source 1..80: mol_type = other DNA
atgaagtataatactaattcagagttggatatgtcggaattggcagacctgatacttaatgaatggttatgcaatccaat

SEQ ID NO: 66698 - DNA, 80 bp, synthetic construct
  source 1..80: mol_type = other DNA
agtaggtggttcaaatatcttagatattacagctgatccgacgacagcaccacaaactgagagaatgatgagagttaatt

SEQ ID NO: 66699 - DNA, 80 bp, synthetic construct
  source 1..80: mol_type = other DNA
atagattcttgctatttgttgtagttgtcacaccattcgtaaactcacagaattatggcataaatctaccaattactgga

SEQ ID NO: 66700 - DNA, 80 bp, synthetic construct
  source 1..80: mol_type = other DNA
aattctaatcttcttgatatcaattacattgttaaactatattttaaaatcagtaacgaggataatggactacataattt

SEQ ID NO: 66701 - DNA, 80 bp, synthetic construct
  source 1..80: mol_type = other DNA
tcgatggacactgcatatgcaaattctacacaaaacgagccgtttttgacatcgaccctttgcctatattatccaaccga

SEQ ID NO: 66702 - DNA, 80 bp, synthetic construct
  source 1..80: mol_type = other DNA
cagtatattttaaagagtatacggacatagcagcgttttcagtggacccacaactatactgcgattacaatatagttctg

SEQ ID NO: 66703 - DNA, 80 bp, synthetic construct
  source 1..80: mol_type = other DNA
atgaaatataattcagcgctagaattggatatgtcagaactagctgatcttattttgaacgaatggttatgcaatccgat

SEQ ID NO: 66704 - DNA, 80 bp, synthetic construct
  source 1..80: mol_type = other DNA
ggtgggtggcgcgaatgtactagacataacagctgatccaacaactgcaccacagatagaaagaatgatgcgagtaaatt

SEQ ID NO: 66705 - DNA, 80 bp, synthetic construct
  source 1..80: mol_type = other DNA
atagattcttgttcgttgtagtcattatgactatcattgtgaacgcgcaaaattatggaataaatctacccatcacagga

SEQ ID NO: 66706 - DNA, 80 bp, synthetic construct
  source 1..80: mol_type = other DNA
gggaaaacgtagcagttatacaggtaggtggcccagatgtgcttgacataacagctgacccaacgacaatgccacaaaca

SEQ ID NO: 66707 - DNA, 80 bp, synthetic construct
  source 1..80: mol_type = other DNA
ctacaatgatattactacattttctatgaatccacaactatattgtgattataatgtagtattaatgagatatgataata

SEQ ID NO: 66708 - DNA, 80 bp, synthetic construct
  source 1..80: mol_type = other DNA
tcaaagacatcgttgtggaaagaaatgcattttaccggagccattataataagggttaaatttaataatagtttagtaaa

SEQ ID NO: 66709 - DNA, 80 bp, synthetic construct
  source 1..80: mol_type = other DNA
atttatagacaacttctcactaattcatattcggtagacttgcatgacgaaataacacagattggattggagaaaactca

SEQ ID NO: 66710 - DNA, 80 bp, synthetic construct
  source 1..80: mol_type = other DNA
agaaaataacacaaacaaatggaaattcttcgaaatgttcagaaataatgttagcgccgaatttcaacgtaaacgcactt

SEQ ID NO: 66711 - DNA, 80 bp, synthetic construct
  source 1..80: mol_type = other DNA
tcaaagacatcgttgtggaaagaaatgcattataacagagaccttataatagggtttaaatttaataatagtatagtaaa

SEQ ID NO: 66712 - DNA, 80 bp, synthetic construct
  source 1..80: mol_type = other DNA
aaagacctcattatggaaagaaatgcaatataacagagatattataattagatttaaatttggtaatagtattgtaaaaa

SEQ ID NO: 66713 - DNA, 80 bp, synthetic construct
  source 1..80: mol_type = other DNA
cactgaatgggaaatttggttcagcagcaagaaatagaaattggatgactgataccagaactacggccagattggacgaa

SEQ ID NO: 66714 - DNA, 80 bp, synthetic construct
  source 1..80: mol_type = other DNA
caacaaagccaaattgctgacctgcaacactattgtaataagttggaagttgatttacaaaataaaatcagttcacttgt

SEQ ID NO: 66715 - DNA, 80 bp, synthetic construct
  source 1..80: mol_type = other DNA
attatacttgattatgatagaatattcttaatgtttaagggattaatgaggcaatgcaactatgaatacacgtacgaata

SEQ ID NO: 66716 - DNA, 80 bp, synthetic construct
  source 1..80: mol_type = other DNA
accacagttctattttatttgatatcgttcgtttttgtgagttatattctgaaaactataataaagataatggactatat

SEQ ID NO: 66717 - DNA, 80 bp, synthetic construct
  source 1..80: mol_type = other DNA
ctggatctatggatacagcatatgctaactcaacacaagataataataattttttatcttcaactttatgtctatattat

SEQ ID NO: 66718 - DNA, 80 bp, synthetic construct
  source 1..80: mol_type = other DNA
gacaggttcagtttattttaatgaatattcaaacgttttagaattttccatcgaaccaaaactatactgtgattataatg

SEQ ID NO: 66719 - DNA, 80 bp, synthetic construct
  source 1..80: mol_type = other DNA
ttgtgctaattaaattcacttctggtgaggaattggacatatctgaattagctgatctaatattgaatgagtggttatgc

SEQ ID NO: 66720 - DNA, 80 bp, synthetic construct
  source 1..80: mol_type = other DNA
ggttggcggttctaatatattagatataacagctgatcccacaacttctccacaaacagaacgaatgatgcgcgtgaaca

SEQ ID NO: 66721 - DNA, 80 bp, synthetic construct
  source 1..80: mol_type = other DNA
tatttatagaataacgtttgtaattgtagtattgtcagtattatcgaatgcacaaaattatggaataaatttgccaatca

SEQ ID NO: 66722 - DNA, 80 bp, synthetic construct
  source 1..80: mol_type = other DNA
gtcatagacaacacttctaatcatacaccagtcaatttattgacgaaatcaagagattggatagataagtcacaggatgt

SEQ ID NO: 66723 - DNA, 80 bp, synthetic construct
  source 1..80: mol_type = other DNA
aattggggagcaggtgagactaatgactctacaactgtcaacccattattagatggtccataccagccagccactttcaa

SEQ ID NO: 66724 - DNA, 80 bp, synthetic construct
  source 1..80: mol_type = other DNA
tccaccaacgagctattggatactacttgcgccaactgtagagggcgtaattagtcaaggaacaaacaatgtcgatagat

SEQ ID NO: 66725 - DNA, 80 bp, synthetic construct
  source 1..80: mol_type = other DNA
ggttggccactataataattgaaccaaacgtacagactactagcaggatatacaatctttttggtcagcaagtaacttta

SEQ ID NO: 66726 - DNA, 80 bp, synthetic construct
  source 1..80: mol_type = other DNA
tcggtggagaatacgtcacagacacaatggaagttcatagatgtgagtaaaactacgccaacaggaagttatactcagca

SEQ ID NO: 66727 - DNA, 80 bp, synthetic construct
  source 1..80: mol_type = other DNA
cggaccattgttctctacaccgaaattgtacgctgtaatgaaattcagcggtaaaatatatacatataatggaactacac

SEQ ID NO: 66728 - DNA, 80 bp, synthetic construct
  source 1..80: mol_type = other DNA
caagcgcaacgacaggatactattcaactactaattatgacacagtaaatatgacatcattttgtgatttttatattata

SEQ ID NO: 66729 - DNA, 80 bp, synthetic construct
  source 1..80: mol_type = other DNA
ccaaggaatcaagaagaaaaatgcactgagtatatcaatcatggattacctcccatacaaaatacaagaaatgtcgtgcc

SEQ ID NO: 66730 - DNA, 80 bp, synthetic construct
  source 1..80: mol_type = other DNA
agtatccttatcggctagagagatagtgcatacaagagctcaagttaatgaagacattattgtttcaaagacttcactta

SEQ ID NO: 66731 - DNA, 80 bp, synthetic construct
  source 1..80: mol_type = other DNA
ggaaagaaatgcaatacaacagagacattattataagatttaaattgatagatcgaattattaaagctggaggattaggt

SEQ ID NO: 66732 - DNA, 80 bp, synthetic construct
  source 1..80: mol_type = other DNA
atggcttcgctcatttatagacagcttctccctaattcatattcaggagatttatatgctgaaatagagcagattggatc

SEQ ID NO: 66733 - DNA, 80 bp, synthetic construct
  source 1..80: mol_type = other DNA
ctcattggggaaagaaatgcagtataacagggatattataattagatccaaatttggtaatagtattgtaaaactaggag

SEQ ID NO: 66734 - DNA, 80 bp, synthetic construct
  source 1..80: mol_type = other DNA
agatattacagcggatccaactactgcaccacaaactgaacgtatgatgcgagtaaattggaaaaaatggtggcaagtta

SEQ ID NO: 66735 - DNA, 80 bp, synthetic construct
  source 1..80: mol_type = other DNA
gaatataccacaattctaatctttctgatatcaatcattctattcaactatatattaaaatcagtgactcaaatgatgga

SEQ ID NO: 66736 - DNA, 80 bp, synthetic construct
  source 1..80: mol_type = other DNA
aaagagtactcaagtattgttgatttttctgttgacccacagctgtattgtgactataatttagtatttatgaaatatga

SEQ ID NO: 66737 - DNA, 80 bp, synthetic construct
  source 1..80: mol_type = other DNA
ccaaagtcttgaattagatatgtcagagttggctgatttaatattgaatgaatggttatgtaacccaatggatgtaacgt

SEQ ID NO: 66738 - DNA, 80 bp, synthetic construct
  source 1..80: mol_type = other DNA
ttggtggttctaatgtgttagacataacagcagatccaacaactaatccacaaattgagaggatgatgagagtgaattgg

SEQ ID NO: 66739 - DNA, 80 bp, synthetic construct
  source 1..80: mol_type = other DNA
taaatggtgttaatcataaaataaatatttcaataaatacgtgcactatacgtaattgtaataaactaggaccacgagag

SEQ ID NO: 66740 - DNA, 80 bp, synthetic construct
  source 1..80: mol_type = other DNA
atattattgaattatatactaaaaactataactaatacaatggactacataatttttagatttttactactcatcgctct

SEQ ID NO: 66741 - DNA, 80 bp, synthetic construct
  source 1..80: mol_type = other DNA
caactagtggagaatcatttctaacttcaacgttatgtttatattatccaacagaagctaaaaatgagatttcagataat

SEQ ID NO: 66742 - DNA, 80 bp, synthetic construct
  source 1..80: mol_type = other DNA
tattactacattttctgtgaatccacaactgtattgtgattataatgtagtattgatgagatatgataatacatctgaat

SEQ ID NO: 66743 - DNA, 80 bp, synthetic construct
  source 1..80: mol_type = other DNA
tagatgcgtcagagttagcagatcttatattgaatgaatggctgtgcaatcctatggatatatcactctactattatcag

SEQ ID NO: 66744 - DNA, 80 bp, synthetic construct
  source 1..80: mol_type = other DNA
caaagtagcgaatcaaataaatggatatcaatgggaacagactgcacagtaaaagtttgtccacttaatacacaaactct

SEQ ID NO: 66745 - DNA, 80 bp, synthetic construct
  source 1..80: mol_type = other DNA
aggaattgggtgcaaaactacggacgtggatacatttgagattgttgcgtcgtctgaaaaattggcaattactgacgttg

SEQ ID NO: 66746 - DNA, 80 bp, synthetic construct
  source 1..80: mol_type = other DNA
taaatggtgttaatcataagataaatatttcaataagtacgtgtactatacggaattgcaataaactgggaccacgcgaa

SEQ ID NO: 66747 - DNA, 80 bp, synthetic construct
  source 1..80: mol_type = other DNA
caacaacagtcccacaggttcaaagaattatgcgagtaaattggaaaaaatggtggcaagtgttttatacagtagttgat

SEQ ID NO: 66748 - DNA, 80 bp, synthetic construct
  source 1..80: mol_type = other DNA
gatgtcaccatttgtgaggacacaaaactacggcatgtatttaccaataacgggatcactagacgctgtatacacaaatt

SEQ ID NO: 66749 - DNA, 80 bp, synthetic construct
  source 1..80: mol_type = other DNA
aacaacttccctatggaaagaaatgcaatataatagagatcctataataagatttaaatttggtaatagtgtcataaaat

SEQ ID NO: 66750 - DNA, 80 bp, synthetic construct
  source 1..80: mol_type = other DNA
tcgttgtggaaagaaatgcattataacagagacattataataaggtttaaatttaataatagtatagtaaaacttggtgg

SEQ ID NO: 66751 - DNA, 80 bp, synthetic construct
  source 1..80: mol_type = other DNA
ttcattatggaaagaaatgcaatataacagagatattataattaggtttaaatttggtaatagtattattaaattagggg

SEQ ID NO: 66752 - DNA, 80 bp, synthetic construct
  source 1..80: mol_type = other DNA
tttgttccgagagggcgcgtgcggtagaatggataagcttgctgacctcaactatacattgagtgtaatcactttaatga

SEQ ID NO: 66753 - DNA, 80 bp, synthetic construct
  source 1..80: mol_type = other DNA
agttggctggttataaagaacaggttactactaaggatgaaattgaacaacagatggacagaattgttaaagaaatgaga

SEQ ID NO: 66754 - DNA, 80 bp, synthetic construct
  source 1..80: mol_type = other DNA
agaaatgattaataaattaactactcgtgaaattgaacaggtcgaattacttagacgtatatacgataaattagtgacca

SEQ ID NO: 66755 - DNA, 80 bp, synthetic construct
  source 1..80: mol_type = other DNA
gaccaattgacgttatagatatgtcgaaagaatttaatcagaagaatgttagaacgctagatgaatgggagagtggaaaa

SEQ ID NO: 66756 - DNA, 80 bp, synthetic construct
  source 1..80: mol_type = other DNA
tgattgactgagaagccacagtcaatcatatcgcgtgtggctcagccttaatcccgtttaaccaatccagcgaatgttgg

SEQ ID NO: 66757 - DNA, 80 bp, synthetic construct
  source 1..80: mol_type = other DNA
acgatctttaaatgatgtacttttttttaaacgccaacattctggggggagtggtaaccggggattaaggcgtgagacca

SEQ ID NO: 66758 - DNA, 80 bp, synthetic construct
  source 1..80: mol_type = other DNA
gggagtggtaaccggggattaaggcgtgagaccacacgcgatatgaatgaacgtgtggctttctctcattacaattccat

SEQ ID NO: 66759 - DNA, 80 bp, synthetic construct
  source 1..80: mol_type = other DNA
ggattaaggcgtgagaccacacgcgatatgaatgaacgtgtggctttctctcattacaattccatcaggttccagagtga

SEQ ID NO: 66760 - DNA, 80 bp, synthetic construct
  source 1..80: mol_type = other DNA
atgatacattgcattcaataattcaggatccaggcatggcgtattttccctatattgcatctgttttaacagttttgttc

SEQ ID NO: 66761 - DNA, 80 bp, synthetic construct
  source 1..80: mol_type = other DNA
aagttcagtcacgactgaaataactgaccccgattggacgaacacactgtcacaacttttcctgactaaaggatggccga

SEQ ID NO: 66762 - DNA, 80 bp, synthetic construct
  source 1..80: mol_type = other DNA
ttctgacgttatagacataacagcagatccaacaacgatcccacaaactgaaagaatgatgcgaataaactggaaaaaaa

SEQ ID NO: 66763 - DNA, 80 bp, synthetic construct
  source 1..80: mol_type = other DNA
ttatacaagtaggtagttctgacgtcatagacttaacagcagatccaacaacgatcccacaaactgaaagaatgatgcga

SEQ ID NO: 66764 - DNA, 80 bp, synthetic construct
  source 1..80: mol_type = other DNA
atgtatggtattgaatataccacatttctaatctacttaatatcaataatattattcaattacatactgaagagcataac

SEQ ID NO: 66765 - DNA, 80 bp, synthetic construct
  source 1..80: mol_type = other DNA
gcattaatttaccaataactggatcaatggatgtatcatacgtgaatgccgcgaaggacgaaccattcctaacgtcaaca

SEQ ID NO: 66766 - DNA, 80 bp, synthetic construct
  source 1..80: mol_type = other DNA
ctatgtttatactatccaatagaggctagaacagagataaacgacaatgagtggacgagtacattgtcacaactattctt

SEQ ID NO: 66767 - DNA, 80 bp, synthetic construct
  source 1..80: mol_type = other DNA
gacgaaggggtggccaactggatctgtgtactttaaagaatatgataatatagctactttttcggtggatcctcaacttt

SEQ ID NO: 66768 - DNA, 80 bp, synthetic construct
  source 1..80: mol_type = other DNA
attgtgattacaatatagttctaatgcgatataattcaagtttagagcttgacatgtcagaattagcgaacctaatatta

SEQ ID NO: 66769 - DNA, 80 bp, synthetic construct
  source 1..80: mol_type = other DNA
aatgaatggctgtgtaacccgatggacatcacgttatattattatcaacaaacagacgaagcgaataaatggatagcgat

SEQ ID NO: 66770 - DNA, 80 bp, synthetic construct
  source 1..80: mol_type = other DNA
cagtcatgtacgataaaagtgtgtccattgaatactcaaacactaggaataggatgtcagactacaaacaccggaacgtt

SEQ ID NO: 66771 - DNA, 80 bp, synthetic construct
  source 1..80: mol_type = other DNA
cgaggaagtagcaacggctgaaaagttagtgatcactgatgtggttgacggtgtaaatcataagttggacgttactacca

SEQ ID NO: 66772 - DNA, 80 bp, synthetic construct
  source 1..80: mol_type = other DNA
cgacttgtaccattagaaattgtaaaaaactgggaccaagagagaatgtagctgtgatacaagtcggtggtgctgacata

SEQ ID NO: 66773 - DNA, 80 bp, synthetic construct
  source 1..80: mol_type = other DNA
tgatacaagtcggtggtgctgacatacttgacataacatctgatccaacgactgctccacaaacagaacgaatgatgcga

SEQ ID NO: 66774 - DNA, 80 bp, synthetic construct
  source 1..80: mol_type = other DNA
tagagtaatggactatataatttacagatttttacttatagtcacaatcacttcaattgttgttagtgcacagaattatg

SEQ ID NO: 66775 - DNA, 80 bp, synthetic construct
  source 1..80: mol_type = other DNA
attgatattgatgagccaagtgggcagacagctgactggtttgcaattggtcagtacattatagggtttgcacttgcaat

SEQ ID NO: 66776 - DNA, 80 bp, synthetic construct
  source 1..80: mol_type = other DNA
cagatttaaagatgacagctcttttgaggaaattaatgggataaggcgacctaagcacctgtatgtctcaatgccaactg

SEQ ID NO: 66777 - DNA, 80 bp, synthetic construct
  source 1..80: mol_type = other DNA
tgatgcttatttgattggtagggagaaggcactccgggaatcacacctagccgagatcgatgatttgattgaccttgcag

SEQ ID NO: 66778 - DNA, 80 bp, synthetic construct
  source 1..80: mol_type = other DNA
tctacggcggactcaatccatgggaatacaactggatcagaggatcatcttgctgtttatgatggagtggggttctgata

SEQ ID NO: 66779 - DNA, 80 bp, synthetic construct
  source 1..80: mol_type = other DNA
aaactattaaagagaataagggcacacgaaccagatttaaagatgacagctcttttgaggaaattaatgggataaggcga

SEQ ID NO: 66780 - DNA, 80 bp, synthetic construct
  source 1..80: mol_type = other DNA
cctaagcacctgtatgtctcaatgccaactgcacaatctaccatgaaagctgatgagttgacaccaggtagatttaggac

SEQ ID NO: 66781 - DNA, 80 bp, synthetic construct
  source 1..80: mol_type = other DNA
acaagaatctaagtgcagcgaatacattaatactgggttacccccaatgcagaatacaagggatatagtgccagttgcgt

SEQ ID NO: 66782 - DNA, 80 bp, synthetic construct
  source 1..80: mol_type = other DNA
tttcatctagatcagtgacttatcaacgtgctcaggttaatgaggatatcattttttcaaagacatcgttggggaaagaa

SEQ ID NO: 66783 - DNA, 80 bp, synthetic construct
  source 1..80: mol_type = other DNA
tttcaaagacatcgttggggaaagaaatgcaatttaccagagaccttttaataaggtttaaatttaataatagtatagga

SEQ ID NO: 66784 - DNA, 80 bp, synthetic construct
  source 1..80: mol_type = other DNA
ggaaagaaatgcaatttaccagagaccttttaataaggtttaaatttaataatagtataggaaaacttggggggctaggt

SEQ ID NO: 66785 - DNA, 80 bp, synthetic construct
  source 1..80: mol_type = other DNA
gtggaaagaaatgcaatataacagagacattataatagggtttaaatttgataatagtatagtaaaacttggtgggctag

SEQ ID NO: 66786 - DNA, 80 bp, synthetic construct
  source 1..80: mol_type = other DNA
tggctcagatgtattagatattacagcggatccaactactgcaccacaaactgaacgtatgatgcgagtaaattggaaga

SEQ ID NO: 66787 - DNA, 80 bp, synthetic construct
  source 1..80: mol_type = other DNA
tatcaaaaaattacggttctcgcttatgggtgaggttgcccataaatatgaaagagtgtataaatggtattgtaggaacc

SEQ ID NO: 66788 - DNA, 80 bp, synthetic construct
  source 1..80: mol_type = other DNA
taacatcagatactaaattagctggttttctaaaacattataatagtgtttggactttccacggtgaaacgccacatgct

SEQ ID NO: 66789 - DNA, 80 bp, synthetic construct
  source 1..80: mol_type = other DNA
gcaagaatctaagtgtgttgaatatataaatactggattgccaccaatgcagaatacaaggaatatagttccagttgcga

SEQ ID NO: 66790 - DNA, 80 bp, synthetic construct
  source 1..80: mol_type = other DNA
ttgtggaaggaaatgcaatataacagagacatcgtaataaggtttaaatttaataatagcatagtaaaactcggtgggtt

SEQ ID NO: 66791 - DNA, 80 bp, synthetic construct
  source 1..80: mol_type = other DNA
ttatggaaagaaatgcaatataacagggatattataattagatttaaatttggtaatagtatcattaaactagggggact

SEQ ID NO: 66792 - DNA, 80 bp, synthetic construct
  source 1..80: mol_type = other DNA
tatattatccaagttcagtcacgactgaaataactgaccccgattggacgaacacactgtcacaacttttcctgactaaa

SEQ ID NO: 66793 - DNA, 80 bp, synthetic construct
  source 1..80: mol_type = other DNA
ttacaatattgtgttaatacaataccaaaattcattagcgttagatgtctcagaacttgctgatttaattttaaatgaat

SEQ ID NO: 66794 - DNA, 80 bp, synthetic construct
  source 1..80: mol_type = other DNA
ggtggcaggtgttttataccgtagtagattacataaatcaaatagttcaggtaatgtccaaacgatcaaggtcactaaat

SEQ ID NO: 66795 - DNA, 80 bp, synthetic construct
  source 1..80: mol_type = other DNA
tcttccaataacaggttctatggataccgcatatgcaaactctacgcaacaagagaattttatgacttccactttatgtt

SEQ ID NO: 66796 - DNA, 80 bp, synthetic construct
  source 1..80: mol_type = other DNA
caagtactcaaattagtgatggtgaatggaaagactcacaaacaacaaatgtagactcgtttgaaatgattgctgagaat

SEQ ID NO: 66797 - DNA, 80 bp, synthetic construct
  source 1..80: mol_type = other DNA
actgaagcaagtacccaaatcaatgatggtgactggaaagactcacaaacaacgaatgtagactcatttgaaatgattgc

SEQ ID NO: 66798 - DNA, 80 bp, synthetic construct
  source 1..80: mol_type = other DNA
actgaagcaagtactcaaattagtgatggtgaatggaaagactcacgaacaacaaacgtagactcatttgaaatggttgc

SEQ ID NO: 66799 - DNA, 80 bp, synthetic construct
  source 1..80: mol_type = other DNA
ctaaaaatgagatttcagatgatgaatgggaaaatactaaaactacggacgtaaacacatttgagattgttgcgtcgtct

SEQ ID NO: 66800 - DNA, 80 bp, synthetic construct
  source 1..80: mol_type = other DNA
acagaagctaaaaatgagatttcagatgatgaatgggaaaatactaaaactacggatgtaaacacatttgagattgttgc

SEQ ID NO: 66801 - DNA, 80 bp, synthetic construct
  source 1..80: mol_type = other DNA
gtggctctaatatattagacataacagcggatccaacgactaatccacagattgagagaatgatgagagtgaattggaag

SEQ ID NO: 66802 - DNA, 80 bp, synthetic construct
  source 1..80: mol_type = other DNA
gtggaccgaatgcattagatatcactgctgatccaacaacagttccacaggttcaaagaattatgcgaataaattggaag

SEQ ID NO: 66803 - DNA, 80 bp, synthetic construct
  source 1..80: mol_type = other DNA
ggacatggtgaattgtccgattcaacattagttcaaccgacattagacggaccatatcaaccaaccacatttaatctacc

SEQ ID NO: 66804 - DNA, 80 bp, synthetic construct
  source 1..80: mol_type = other DNA
aattgactattggatgctaattgcaccaactcaaataggtagagtagcggagggtacgaatacgactgacagatcgtttg

SEQ ID NO: 66805 - DNA, 80 bp, synthetic construct
  source 1..80: mol_type = other DNA
cttgtgtacttgttgagccgaacgtatcaaatacgcagagagaatacgttttagatggacagacggtacaactacaagtc

SEQ ID NO: 66806 - DNA, 80 bp, synthetic construct
  source 1..80: mol_type = other DNA
tcaaatgactcaagtactctttggaaattcatactatttatgaaactagaaaaaaatggaacctattctcaatattcaac

SEQ ID NO: 66807 - DNA, 80 bp, synthetic construct
  source 1..80: mol_type = other DNA
attgtctacgtcaaataagttatgtgcatggatgaaaagagaagggagagtatactggtacgcaggaactacaccaaatg

SEQ ID NO: 66808 - DNA, 80 bp, synthetic construct
  source 1..80: mol_type = other DNA
cgtcagaaagctattatctaacaatcaatcatgataacagtcatgtgtcgtgcgacgctgagttttatttaataccaaga

SEQ ID NO: 66809 - DNA, 80 bp, synthetic construct
  source 1..80: mol_type = other DNA
ttgcaaactgaattgtgtacgcaatacataaataatggactgcctccgatacaaaacaccgggaatgtagtgccagtaag

SEQ ID NO: 66810 - DNA, 80 bp, synthetic construct
  source 1..80: mol_type = other DNA
tatagcgtccagagagattagacacacacgagcacaaatgaatgaagatatagtagtgtcaaagacatcattatggaaag

SEQ ID NO: 66811 - DNA, 80 bp, synthetic construct
  source 1..80: mol_type = other DNA
agatgcaaggttatagagacacgacgatcagattcctattcgctaactcgatcgtaaagtcaggaggtttgggatacaag

SEQ ID NO: 66812 - DNA, 80 bp, synthetic construct
  source 1..80: mol_type = other DNA
catttatagacagttactatcgaactcatatgttacaaacatttctgacgaagttagtgaaattggagctaaaaaaacaa

SEQ ID NO: 66813 - DNA, 80 bp, synthetic construct
  source 1..80: mol_type = other DNA
tctacattagtgcaaccaactcttgatggtccatatcagcctacttcatttaatttgccaattgattattggatgttaat

SEQ ID NO: 66814 - DNA, 80 bp, synthetic construct
  source 1..80: mol_type = other DNA
cgcacctactagagagggaagagttgctgaaggcacaaatacgactgatagatggtttgcttgcgtgctaattgaaccaa

SEQ ID NO: 66815 - DNA, 80 bp, synthetic construct
  source 1..80: mol_type = other DNA
acgtgcaaagtatgcaaagacaatatatattagatggacaaaacgtacagttacaggtctcaaatgattcaagtacttta

SEQ ID NO: 66816 - DNA, 80 bp, synthetic construct
  source 1..80: mol_type = other DNA
tggaaatttatattgtttatcaaactaacacgtgatggaacgtatactcaatactcgactttgtcaacatcacataagtt

SEQ ID NO: 66817 - DNA, 80 bp, synthetic construct
  source 1..80: mol_type = other DNA
atgtgcgtggataaaaagaaataatagagtatactggtatcaagggacgacaccaaatgcatcagaaagctattatttaa

SEQ ID NO: 66818 - DNA, 80 bp, synthetic construct
  source 1..80: mol_type = other DNA
ccataaacaatgataacagtaacgtttcaagtgacgccgaattctatttaataccacaatcgcaaactaatatatgtacg

SEQ ID NO: 66819 - DNA, 80 bp, synthetic construct
  source 1..80: mol_type = other DNA
caatatataaataatggtttaccaccaatccaaaatacgaggaatattgtgccagtaaatattacatccaggcaaattaa

SEQ ID NO: 66820 - DNA, 80 bp, synthetic construct
  source 1..80: mol_type = other DNA
agacgtaagggctcaaatgaatgaagacataataatatcaaaaacttctttgtggaaggaggtacaatataacagagata

SEQ ID NO: 66821 - DNA, 80 bp, synthetic construct
  source 1..80: mol_type = other DNA
ccaatgttactgttaatccagggccatttgcacaaacaggatacgcacctgttgactggggacatggtgaattgcctgat

SEQ ID NO: 66822 - DNA, 80 bp, synthetic construct
  source 1..80: mol_type = other DNA
gaccacattactcaactatatattaaaatcagtgacccgaataatggactacattatataattcttgttaatttttatat

SEQ ID NO: 66823 - DNA, 80 bp, synthetic construct
  source 1..80: mol_type = other DNA
aaagaatgatgagagtgaattggaaaagatggtggcaagtgttctatactatagtagattatgtaaatcttatggggctt

SEQ ID NO: 66824 - DNA, 80 bp, synthetic construct
  source 1..80: mol_type = other DNA
tatttgcacttactgtgctcagaactatggacttaatatacccataaccaggtcaatggatatgtcatactccaactcta

SEQ ID NO: 66825 - DNA, 80 bp, synthetic construct
  source 1..80: mol_type = other DNA
tttttgttaatttttatggcattatttgtcttaactaaagctcagaattatggacttaatatacccataacaggatcaat

SEQ ID NO: 66826 - DNA, 80 bp, synthetic construct
  source 1..80: mol_type = other DNA
tcgctcatttatagacagttactatcaaactcatatgttacaaacatctctgacgaaattaatgaaattggaactaaaaa

SEQ ID NO: 66827 - DNA, 80 bp, synthetic construct
  source 1..80: mol_type = other DNA
ctgactctacattagtgcaaccaactcttgatggtccataccaacccacttcacttaatttgccagtcgattattggatg

SEQ ID NO: 66828 - DNA, 80 bp, synthetic construct
  source 1..80: mol_type = other DNA
ttaattgcgcctactagagaagggaaagttgctgaaggtacgaatactactgacagatggttcgcttgtgtactagttga

SEQ ID NO: 66829 - DNA, 80 bp, synthetic construct
  source 1..80: mol_type = other DNA
gccaaatgtgcaaaatacacaaaggcaatacgtattagatgggcgaaatgtccaattacatgtctcaaacgattcaagta

SEQ ID NO: 66830 - DNA, 80 bp, synthetic construct
  source 1..80: mol_type = other DNA
cttcgtggaaatttatattattcattaaattgacgcccgacggaacgtacactcaatactcaaccttgtcaacaccgcat

SEQ ID NO: 66831 - DNA, 80 bp, synthetic construct
  source 1..80: mol_type = other DNA
aagttatgcgcgtgaatgaaaagagataacagagtatactggtatcaaggaacgacaccgaacgcatcagagagctatta

SEQ ID NO: 66832 - DNA, 80 bp, synthetic construct
  source 1..80: mol_type = other DNA
cttgacaataaacaatgacaacagcaacgtttcaagtgacgctgaattccatttgataccgcaatcgcagactgccatgt

SEQ ID NO: 66833 - DNA, 80 bp, synthetic construct
  source 1..80: mol_type = other DNA
gtacacaatatataaacaatggtttaccaccaattcagaatacaaggaatattgtaccagtaaatattacatctagacag

SEQ ID NO: 66834 - DNA, 80 bp, synthetic construct
  source 1..80: mol_type = other DNA
attaaagacataagagctcagatgaatgaagacatagtgatatcaaaaacttcgctatggaaagaaatgcaatataatac

SEQ ID NO: 66835 - DNA, 80 bp, synthetic construct
  source 1..80: mol_type = other DNA
agcaactaacgttactgttaatccagggccattcgcacaaacgggatatgcgcctgtcgactggggacatggtgaattgc

SEQ ID NO: 66836 - DNA, 80 bp, synthetic construct
  source 1..80: mol_type = other DNA
gcttccggcatttatagacagctactcactaattcatacacagttgaattatcagacgaaattagcataattggatcaga

SEQ ID NO: 66837 - DNA, 80 bp, synthetic construct
  source 1..80: mol_type = other DNA
tgaatgattcgacgacaatagaaccagtacttgatggtccttatcagccaacaagttttaaaccaccaaacgattactgg

SEQ ID NO: 66838 - DNA, 80 bp, synthetic construct
  source 1..80: mol_type = other DNA
caaatggaaattttacgaaatgtttagaaacagtgctagcgtcgaatttcaacataggcgtactttaacatcagatacta

SEQ ID NO: 66839 - DNA, 80 bp, synthetic construct
  source 1..80: mol_type = other DNA
acagagacattataataagatttaaatttaataacagtatagtaaaacttggtgggttaggttataaaggttccgaaata

SEQ ID NO: 66840 - DNA, 80 bp, synthetic construct
  source 1..80: mol_type = other DNA
gaaaagtcaaaatgtgacgattaaccccggaccgttcgctcaaacaaattatgcgccagtgacttggagtcatggagaag

SEQ ID NO: 66841 - DNA, 80 bp, synthetic construct
  source 1..80: mol_type = other DNA
atgcaatataacagagacattataataagggttaaatttaataatagtttagcaaactgggggactcgtataaaaggggc

SEQ ID NO: 66842 - DNA, 80 bp, synthetic construct
  source 1..80: mol_type = other DNA
caggagctgttactgacggttcaaatacatcagatttaactagcatatcaattataattcactctgagttttacataata

SEQ ID NO: 66843 - DNA, 80 bp, synthetic construct
  source 1..80: mol_type = other DNA
ccgagatctcaagagtctaaatgtgttgaatatattaattatggtctaccaccaattcaaaataccagaaatgtagttcc

SEQ ID NO: 66844 - DNA, 80 bp, synthetic construct
  source 1..80: mol_type = other DNA
tattattgaatccaactaatcaacaagtcgtattagaagttaccaataaaactgatatttgggttgctttattacttgtt

SEQ ID NO: 66845 - DNA, 80 bp, synthetic construct
  source 1..80: mol_type = other DNA
tggcttcgccattttatagacaacttctcactaattcatattcagtagatttatatgatgaaatagagcagattggatca

SEQ ID NO: 66846 - DNA, 80 bp, synthetic construct
  source 1..80: mol_type = other DNA
ttactgatggttcaaatacatcagatttaaccagtatatcaattataattcactctgagttttatataataccgagatcc

SEQ ID NO: 66847 - DNA, 80 bp, synthetic construct
  source 1..80: mol_type = other DNA
ttggtcaatataagaatatgctaaacgtattaacgactttgtatcaatactacgatatatatcatgaaaaaccaatcgta

SEQ ID NO: 66848 - DNA, 80 bp, synthetic construct
  source 1..80: mol_type = other DNA
tgctgacatccttgatataacatctgatcctacgactactccacaaacagaacggatgatgcgagtaatctggaaaatgg

SEQ ID NO: 66849 - DNA, 80 bp, synthetic construct
  source 1..80: mol_type = other DNA
atggcttcgcccatttatagacagctactcactaattcatacacagttgaattgtcagatgaaattaatacaattggatc

SEQ ID NO: 66850 - DNA, 80 bp, synthetic construct
  source 1..80: mol_type = other DNA
gagtcatggggaagtgaatgattcgacaacgatagagccagtactcgatggtccttatcaaccaacaaattttaagccat

SEQ ID NO: 66851 - DNA, 80 bp, synthetic construct
  source 1..80: mol_type = other DNA
caaacgattactggatattattgaatccaactaatcaacaagttgtattagagggtaccaataaaactgatatttgggtt

SEQ ID NO: 66852 - DNA, 80 bp, synthetic construct
  source 1..80: mol_type = other DNA
gctttattacttgttgaaccaaacgtaaccaatcaaagtaggcaatacacattatttggagaaacgaaacaaattactgt

SEQ ID NO: 66853 - DNA, 80 bp, synthetic construct
  source 1..80: mol_type = other DNA
agaaaataacacaaataaatggaaaatcttcgaaatgttcagaagtaatgttaataccgaatttcaacataagcgcactt

SEQ ID NO: 66854 - DNA, 80 bp, synthetic construct
  source 1..80: mol_type = other DNA
taacatcagacactaaattagctgggtttatgaaattttataatagtatttggactttccacggtgaaacgccgcatgct

SEQ ID NO: 66855 - DNA, 80 bp, synthetic construct
  source 1..80: mol_type = other DNA
acaactgattactcgtcaacttcaaatttatccgaagtagaaaccgtaatacatgttgagttttatataataccaagatc

SEQ ID NO: 66856 - DNA, 80 bp, synthetic construct
  source 1..80: mol_type = other DNA
atgcaatataacagagacatcataataaggtttaaatttaataatagtatagtaaaacttggtgggttaggttataaatg

SEQ ID NO: 66857 - DNA, 80 bp, synthetic construct
  source 1..80: mol_type = other DNA
gactctgtgtctatattatccagtagaagctgatacagagattgctgatagttcatggaaagatacattgtcacagttat

SEQ ID NO: 66858 - DNA, 80 bp, synthetic construct
  source 1..80: mol_type = other DNA
ttgtattgtgattataatatagtattaatgaagtataatgctgattcagagttggatatgtcggaattggcggacctgat

SEQ ID NO: 66859 - DNA, 80 bp, synthetic construct
  source 1..80: mol_type = other DNA
tcaaatatcttagatattacagctgatccgacgacagcgccacaaactgagagaatgatgagagttaattggaaaaatgg

SEQ ID NO: 66860 - DNA, 80 bp, synthetic construct
  source 1..80: mol_type = other DNA
tatggtattgaatataccacaattctaacttttttgatatcaattattctattaaattatatattaaaatcaataactaa

SEQ ID NO: 66861 - DNA, 80 bp, synthetic construct
  source 1..80: mol_type = other DNA
aattttatgacttccactttatgtttatattatccaagttcagtcacgactgaaataactgacccagattggacgaacac

SEQ ID NO: 66862 - DNA, 80 bp, synthetic construct
  source 1..80: mol_type = other DNA
actgtcacaacttttcctgactaaaggatggccgacaaattccgtttacttcaaaagttatgctgatatatcatctttct

SEQ ID NO: 66863 - DNA, 80 bp, synthetic construct
  source 1..80: mol_type = other DNA
ctgtagatccgcagttatattgtgattacaatattgtgttaatacagtaccaaaattcattagcgttagatgtttcagaa

SEQ ID NO: 66864 - DNA, 80 bp, synthetic construct
  source 1..80: mol_type = other DNA
cttgctgatttaattttaaatgaatggttatgtaatccgatggacgtaacgttgtactattatcaacaaacagatgaagc

SEQ ID NO: 66865 - DNA, 80 bp, synthetic construct
  source 1..80: mol_type = other DNA
tcatagacataacagcagatccaacaacgatcccacaaactgaaagaatgatgcgaataaactggaaaaaatggtggcag

SEQ ID NO: 66866 - DNA, 80 bp, synthetic construct
  source 1..80: mol_type = other DNA
tataatggactttatcatatatcggtttttactaatagttgttgtcgtgctgccatttattaaagctcaaaattatggaa

SEQ ID NO: 66867 - DNA, 80 bp, synthetic construct
  source 1..80: mol_type = other DNA
atggctttcgccatttatagacagttactttcaaactcatatgttacaaacatctctgacgaagtcaatgaaattggaac

SEQ ID NO: 66868 - DNA, 80 bp, synthetic construct
  source 1..80: mol_type = other DNA
aatgaactcgattatgaaaataataaaataacttctgaattattccaatcagctgaagaatatactgattcattaatgga

SEQ ID NO: 66869 - DNA, 80 bp, synthetic construct
  source 1..80: mol_type = other DNA
atgcgaataaaatttataaacgcagattggatttattcactatagtagcatctacaatcaataaatatggagtaccaagg

SEQ ID NO: 66870 - DNA, 80 bp, synthetic construct
  source 1..80: mol_type = other DNA
tcctgctatactgacttcattatcatctaatttaaatgcagttatgttttggttggaacgccattcaaatgatattgctg

SEQ ID NO: 66871 - DNA, 80 bp, synthetic construct
  source 1..80: mol_type = other DNA
agtcaaaatgttagaagtaccagttaagcatgatgatcaccttttacgtgattctgaattagctggattactatcaatgt

SEQ ID NO: 66872 - DNA, 80 bp, synthetic construct
  source 1..80: mol_type = other DNA
cttaatgtatggtattgaatataccacatttctaatctacttaatatcaattatactattcaattatatattaaagagta

SEQ ID NO: 66873 - DNA, 80 bp, synthetic construct
  source 1..80: mol_type = other DNA
tacggtattaacttaccaataactggatcaatggatgtatcatatgcaaatactacaaaggatgaaccattcctaacgtc

SEQ ID NO: 66874 - DNA, 80 bp, synthetic construct
  source 1..80: mol_type = other DNA
aacgttatgtttatattacccaacggaagctagaacagaaataaatgataatgagtggatgagtacactatcacagttgt

SEQ ID NO: 66875 - DNA, 80 bp, synthetic construct
  source 1..80: mol_type = other DNA
ttttaacaaagggatggccaactggttcagtatatttcaaagagtacgacgatatagctactttctcagtagatccacaa

SEQ ID NO: 66876 - DNA, 80 bp, synthetic construct
  source 1..80: mol_type = other DNA
ctgtattgtgactataatatagttttaatgcgatacaattcaagcttggaactagacatgtcagagttagcgaatttgat

SEQ ID NO: 66877 - DNA, 80 bp, synthetic construct
  source 1..80: mol_type = other DNA
actgaatgaatggctatgtaatccaatggatgttacattgtattattatcaacagacggatgaagcaaataaatggatag

SEQ ID NO: 66878 - DNA, 80 bp, synthetic construct
  source 1..80: mol_type = other DNA
taactagaatgatggactatataatttataaatttttacttatagtcacaattacttcaatctttgtcaatgcacagaat

SEQ ID NO: 66879 - DNA, 80 bp, synthetic construct
  source 1..80: mol_type = other DNA
taacattcctagatataacatgctgatcctacgactactccccacaacagaacggatgatgcgaataaactggaaaatgg

SEQ ID NO: 66880 - DNA, 80 bp, synthetic construct
  source 1..80: mol_type = other DNA
cttaatgtatggtattgaatatcccacaactctaactttcttgatattgcttgtattattgaattatatattaaaatcaa

SEQ ID NO: 66881 - DNA, 80 bp, synthetic construct
  source 1..80: mol_type = other DNA
tatggtattaatctgccaatcactggatcaatggacacaaattatcaaaatgtgtcagctcaagaaccatttttgacatc

SEQ ID NO: 66882 - DNA, 80 bp, synthetic construct
  source 1..80: mol_type = other DNA
aacactctgcttgtattatccaacagaagctgagacagaaatagctgacagttcatggaaagaaacattgtcacaactgt

SEQ ID NO: 66883 - DNA, 80 bp, synthetic construct
  source 1..80: mol_type = other DNA
tcctaacaaaaggatggccaacaggttctgtttatctcaaaagttatgcggatattgcgactttctcaataaatcctcag

SEQ ID NO: 66884 - DNA, 80 bp, synthetic construct
  source 1..80: mol_type = other DNA
ttatattgtgattataatattgtgttgatgaagtacagtgctaattcagagctagatatgtcagaattagcggatctgat

SEQ ID NO: 66885 - DNA, 80 bp, synthetic construct
  source 1..80: mol_type = other DNA
acttaacgaatggttatgtaacccaatggatataacgttgtattattatcagcagacagatgaggcgaataaatggattt

SEQ ID NO: 66886 - DNA, 80 bp, synthetic construct
  source 1..80: mol_type = other DNA
taactagagtaatggactacatattgtatcgattcttgttttttgttgttgttatcgcaccatttgtgaattcacagaat

SEQ ID NO: 66887 - DNA, 80 bp, synthetic construct
  source 1..80: mol_type = other DNA
aaacatattagatataacggcagatccaacgacagcgccacaaacagagagaatgatgagagtgaattggaaaaaatggg

SEQ ID NO: 66888 - DNA, 80 bp, synthetic construct
  source 1..80: mol_type = other DNA
ggctataaaatggcttcgctaatttacagacaattactatcgaattggttgattacaaagaggtcagatcaaattactga

SEQ ID NO: 66889 - DNA, 80 bp, synthetic construct
  source 1..80: mol_type = other DNA
gacatggagaattgccggattcaactttagtacaaccagtgcttgatggtccttaccaacctacatctttcaatttacca

SEQ ID NO: 66890 - DNA, 80 bp, synthetic construct
  source 1..80: mol_type = other DNA
gtggattattggatgatgagggcaccaacaccagcatgtagagtagctgaaggaacaaatggtacagatagatggttggc

SEQ ID NO: 66891 - DNA, 80 bp, synthetic construct
  source 1..80: mol_type = other DNA
gtgtataaaagtagaacccaatgaatcgtgccggtccagagattatgttctagatggccaatttgttcagatacaaggag

SEQ ID NO: 66892 - DNA, 80 bp, synthetic construct
  source 1..80: mol_type = other DNA
ataacacatctaaaactatgtggaaattcatattatttaaccaacctacgaaaaggggaaactattcacaatactcaagc

SEQ ID NO: 66893 - DNA, 80 bp, synthetic construct
  source 1..80: mol_type = other DNA
ttgtcgactaatcataaactatgcgcatggattaaacgagacggtagagtatattggtttgatgggagagtaccaaattc

SEQ ID NO: 66894 - DNA, 80 bp, synthetic construct
  source 1..80: mol_type = other DNA
ttcagataattactatttgacaatcaataatgataatagtagtatttctagtgatgtagatttttatttaattccacgta

SEQ ID NO: 66895 - DNA, 80 bp, synthetic construct
  source 1..80: mol_type = other DNA
ctcagactgatagttttagacaaaatatcaataatgggcttccacccattcagaatacacgtaaagatatttcagtaaca

SEQ ID NO: 66896 - DNA, 80 bp, synthetic construct
  source 1..80: mol_type = other DNA
ccctcatctcgtgagtttacaacagttaaagcacaaatgaatgaggatattatcatatctaaaacatcactatggaagga

SEQ ID NO: 66897 - DNA, 80 bp, synthetic construct
  source 1..80: mol_type = other DNA
tattggaaatgaaaaaaatagtaatgtcactgtcaatccaggaaaagtttcacaggcagggtatgccccggtttattggg

SEQ ID NO: 66898 - DNA, 80 bp, synthetic construct
  source 1..80: mol_type = other DNA
aaattgcggatagtaaatggacggaaacgttatcgcaattatttctaactaaaggatggccgacaggatcagtttatttc

SEQ ID NO: 66899 - DNA, 80 bp, synthetic construct
  source 1..80: mol_type = other DNA
aattaaagtgtgtcctctaaatacgcaaactcttggaataggatgctcaactacggatactagttcgtttgagacagtag

SEQ ID NO: 66900 - DNA, 80 bp, synthetic construct
  source 1..80: mol_type = other DNA
ccaacgcagaaaaattggttataactgatgttgtcgatggagttaatcataaattggacgtaacaacgaatacatgtact

SEQ ID NO: 66901 - DNA, 80 bp, synthetic construct
  source 1..80: mol_type = other DNA
tgactagaacaatggactttattatttacagatttctgttagttatagttttgcttgcaccacttattaagactcagaac

SEQ ID NO: 66902 - DNA, 80 bp, synthetic construct
  source 1..80: mol_type = other DNA
tgtactcgatataacagcagatccaactactgcgccacaaactgaaagaatgatgcgtataaattgaaaaatggcaagta

SEQ ID NO: 66903 - DNA, 80 bp, synthetic construct
  source 1..80: mol_type = other DNA
acaattatttttaactaaaggatggccgactgggtcagtttattttaaagactacaatgatattactacattttctatga

SEQ ID NO: 66904 - DNA, 80 bp, synthetic construct
  source 1..80: mol_type = other DNA
atccacaactgtattgtgattataatgtagtattgatgcgatatgataatacatctgaattagatgcatcggaattagca

SEQ ID NO: 66905 - DNA, 80 bp, synthetic construct
  source 1..80: mol_type = other DNA
atggatatcaatgggaacagactgcacggtaaaagtttgtccactcaatacgcaaactttaggaattggatgcaaaacta

SEQ ID NO: 66906 - DNA, 80 bp, synthetic construct
  source 1..80: mol_type = other DNA
cagatgtggatacatttgagattgttgcgtcgtctgaaaaattggtaattactgatgttgtaaatggtgttaatcataaa

SEQ ID NO: 66907 - DNA, 80 bp, synthetic construct
  source 1..80: mol_type = other DNA
agacattataatagggtttaaatttaataatagtatagtaaaacttggtgggctaggttataaatggtcagaaatttcgt

SEQ ID NO: 66908 - DNA, 80 bp, synthetic construct
  source 1..80: mol_type = other DNA
tagttcaggattatgatagaacatttttaatgttaaagggactgttgaagcaatgcaactatgaatatgtatatgaatag

SEQ ID NO: 66909 - DNA, 80 bp, synthetic construct
  source 1..80: mol_type = other DNA
gactacattatatatagatttttgttaatttttatggcattatttgtcttaactaaagctcagaattatggacttaatat

SEQ ID NO: 66910 - DNA, 80 bp, synthetic construct
  source 1..80: mol_type = other DNA
acccataacaggatcaatggattctgtatattccaactctactcgagaagaagtatttctaacatccacattatgtttgt

SEQ ID NO: 66911 - DNA, 80 bp, synthetic construct
  source 1..80: mol_type = other DNA
aattaaccctggaccgtttgctcaaacaaactatgcgccagtgacttggagtcatggagaagtgaatgattctacgacaa

SEQ ID NO: 66912 - DNA, 80 bp, synthetic construct
  source 1..80: mol_type = other DNA
tattattaaatccaactaatcaacaaattgtattagaaggtactaataaaattgatgtttgggttgctttattacttatt

SEQ ID NO: 66913 - DNA, 80 bp, synthetic construct
  source 1..80: mol_type = other DNA
gaaccaaacgtaactaatcaaagtagacaatacacgttatttggagaaacgaaacaaattactgtggaaaataacacaaa

SEQ ID NO: 66914 - DNA, 80 bp, synthetic construct
  source 1..80: mol_type = other DNA
caaatggaaattcttcgaaatgttcaggagcaatgctagtgctgaattccaacataaacgcactttaacaacagatatta

SEQ ID NO: 66915 - DNA, 80 bp, synthetic construct
  source 1..80: mol_type = other DNA
agttagctgggtttttgaaacatggtggacgtgtttggacttttcacggtgaaacgccacatgctacaactgattattca

SEQ ID NO: 66916 - DNA, 80 bp, synthetic construct
  source 1..80: mol_type = other DNA
tcaacttcaaacttatctgaaatagaaactatgatatatactgagttctatataataccaagatcacaggaatctaagtg

SEQ ID NO: 66917 - DNA, 80 bp, synthetic construct
  source 1..80: mol_type = other DNA
taatgaatatataaatactgggttaccaccaatacagaatacaaggaacgtagttccagttgcgttatcatctaggtcag

SEQ ID NO: 66918 - DNA, 80 bp, synthetic construct
  source 1..80: mol_type = other DNA
tgacttaccatcgtgcccaagttaatgaagatattatcatatcaaagacatcattgtggaaagagatgcaatataacaga

SEQ ID NO: 66919 - DNA, 80 bp, synthetic construct
  source 1..80: mol_type = other DNA
cttcgagatggagagcaagttacggcacatactacttgttcagttaatggtgtgaataactttagttacaatggaggatc

SEQ ID NO: 66920 - DNA, 80 bp, synthetic construct
  source 1..80: mol_type = other DNA
tgatatcgattgttctattgaattatatattaaaatcaataactaatataatggactttatcatatatcggtttttacta

SEQ ID NO: 66921 - DNA, 80 bp, synthetic construct
  source 1..80: mol_type = other DNA
atatacaaactccacacaacaagagaattttatgacttccactttatgcctatattatccaagttcagtcacgactgaaa

SEQ ID NO: 66922 - DNA, 80 bp, synthetic construct
  source 1..80: mol_type = other DNA
taactgaccccgactggacgaacacactgtcacaacttttcctgactaaaggatggccgacaaattccgtctacttcaag

SEQ ID NO: 66923 - DNA, 80 bp, synthetic construct
  source 1..80: mol_type = other DNA
agttatgctgatatagcgtccttctctgtagatccgcagttatattgtgattacaatattgtgttagtacagtaccaaaa

SEQ ID NO: 66924 - DNA, 80 bp, synthetic construct
  source 1..80: mol_type = other DNA
ttcattagcgttggatgtctcagaacttgctgatttaattttaaatgaatggttatgtaatcggatggacgtaacgttgt

SEQ ID NO: 66925 - DNA, 80 bp, synthetic construct
  source 1..80: mol_type = other DNA
agaatcatgtacggttaaagtatgtcccttaaatacgcaaactttaggaattggatgtacaacaaccgacgtcacaacat

SEQ ID NO: 66926 - DNA, 80 bp, synthetic construct
  source 1..80: mol_type = other DNA
ttgaagaggtagcaaacgcggaaaaattagtaataactgacgtcgtggacggagtcaatcacaagattaatattacagtg

SEQ ID NO: 66927 - DNA, 80 bp, synthetic construct
  source 1..80: mol_type = other DNA
aatacatgtactatacggaattgcaaaaagttaggaccgagggaaaatgtagcaattatacaagtaggtggttctgacgt

SEQ ID NO: 66928 - DNA, 80 bp, synthetic construct
  source 1..80: mol_type = other DNA
atagttgttgtcatactgccattaattaaagctcaaaattatggaataaatcttccaataacaggttctatggataccgc

SEQ ID NO: 66929 - DNA, 80 bp, synthetic construct
  source 1..80: mol_type = other DNA
atgatgcgaataaattggaaaaaatggtggcaggtgttttataccgtagtagattacataaatcaaatagttcaggtaat

SEQ ID NO: 66930 - DNA, 80 bp, synthetic construct
  source 1..80: mol_type = other DNA
ccggatgatgttaacaaaagtacactccagagtaggaaggcagcagtctcagcccttgagacaaaattaggggagttgaa

SEQ ID NO: 66931 - DNA, 80 bp, synthetic construct
  source 1..80: mol_type = other DNA
ctgcagactgcccctttctgcctaaaccaaaaagccaggcagatgcttttatgggaacaaatagggcttactttattaac

SEQ ID NO: 66932 - DNA, 80 bp, synthetic construct
  source 1..80: mol_type = other DNA
aggcaaaatcagattgaagaatcaaagatccctgatattgtggacttaattgatgcagcagaagcagaaggggcaacagt

SEQ ID NO: 66933 - DNA, 80 bp, synthetic construct
  source 1..80: mol_type = other DNA
gcagatccaacgactaatccacaaactgagagaatgatgagagtgaattggaaaaaatggtggcaagttatgtatgctat

SEQ ID NO: 66934 - DNA, 80 bp, synthetic construct
  source 1..80: mol_type = other DNA
actcaacgcgagaggaagtattcctaacttcgactttatgtttgtattacccaactgaagcagcaacagaaataaatgat

SEQ ID NO: 66935 - DNA, 80 bp, synthetic construct
  source 1..80: mol_type = other DNA
aattcatggaaagatacactttctcagctatttttaatcaaaggatggccaacaggatctatttattttaaagattatac

SEQ ID NO: 66936 - DNA, 80 bp, synthetic construct
  source 1..80: mol_type = other DNA
tatattatcaccactccttaatgcacaaaattatggaataaatcttccaattactggctcaatggacacaccatatacga

SEQ ID NO: 66937 - DNA, 80 bp, synthetic construct
  source 1..80: mol_type = other DNA
attggaagaaatggtggcaagtgttttatacaatagttgactacgtgaatcaaattgtgcaagcaatgtccaaaagatcg

SEQ ID NO: 66938 - DNA, 80 bp, synthetic construct
  source 1..80: mol_type = other DNA
gagagtgaattggaaaagatggtggcaagtgttctatactatagtagattatattaatcagattgtacaggtaatgtcca

SEQ ID NO: 66939 - DNA, 80 bp, synthetic construct
  source 1..80: mol_type = other DNA
tataaaggaacaatggtctctggtcagactaggagggagctcaaaagctttgatatctctcagtgtcccaagattggagg

SEQ ID NO: 66940 - DNA, 80 bp, synthetic construct
  source 1..80: mol_type = other DNA
caatggtctctggtcagactaggagggagctcaaaagctttgatatctctcagtgtcccaagattggaggacatggtagc

SEQ ID NO: 66941 - DNA, 80 bp, synthetic construct
  source 1..80: mol_type = other DNA
taaatttggtaatagtgtcataaaattaggaggattgggatataaatggtctgaaatatcatacaaagcagcgaattatc

SEQ ID NO: 66942 - DNA, 80 bp, synthetic construct
  source 1..80: mol_type = other DNA
tcaattcttataattggcttccaaaaggtcttatgaccataaacatagcagcacaatgggtgggtggtaggggacagcaa

SEQ ID NO: 66943 - DNA, 80 bp, synthetic construct
  source 1..80: mol_type = other DNA
attttatttgatatcgttcgttcttgtgagttacattttaaaaacaataacaaaagtaatggactatattttatatagag

SEQ ID NO: 66944 - DNA, 80 bp, synthetic construct
  source 1..80: mol_type = other DNA
aataatacaagtaggcggttctgatgtgttagatataacagccgatcctacgacttctccgcaaacagaacgaatgatgc

SEQ ID NO: 66945 - DNA, 80 bp, synthetic construct
  source 1..80: mol_type = other DNA
ttgtcatcctccttggatatgcaggcctcatgctactcaccaatgtccttaaggcaatcggggtttggtggtcatgggtc

SEQ ID NO: 66946 - DNA, 80 bp, synthetic construct
  source 1..80: mol_type = other DNA
acttccaggatgttcaagaaggtatcacacttcacgagcagcagcttgtggctgcccggcagaagttaaaggatgccgaa

SEQ ID NO: 66947 - DNA, 80 bp, synthetic construct
  source 1..80: mol_type = other DNA
taccaattgtgctaaaagctctttacatgttatcaactagaggtagacaaactgtaaaagagaacaaagggcccagaatc

SEQ ID NO: 66948 - DNA, 80 bp, synthetic construct
  source 1..80: mol_type = other DNA
atttcatcaacagacaaaagcaagtagatgaatctaggatacctgatatagtagacttaataaatgcagctgaatctgag

SEQ ID NO: 66949 - DNA, 80 bp, synthetic construct
  source 1..80: mol_type = other DNA
ctgatatagtagacttaataaatgcagctgaatctgagtctgccacactattccatgacattgctgtccctcatagcgtg

SEQ ID NO: 66950 - DNA, 80 bp, synthetic construct
  source 1..80: mol_type = other DNA
ccttccaagacgtacaagagggtatcacactccacgagcagcagcttgtagctgctcgtcagaagcttaaagatcccgag

SEQ ID NO: 66951 - DNA, 80 bp, synthetic construct
  source 1..80: mol_type = other DNA
cagatatagttgacctcatccaggcagcagaatctgagtcagccacactctttaatgatattgctgtcccacattctgtg

SEQ ID NO: 66952 - DNA, 80 bp, synthetic construct
  source 1..80: mol_type = other DNA
ccctccaagaattacaagaaaacatcacagcacacgaacaacagctcgtgactgctcggcaaaagcttaaagatgccgaa

SEQ ID NO: 66953 - DNA, 80 bp, synthetic construct
  source 1..80: mol_type = other DNA
aaaatagcattgaaaacgtcaaaatgttcgtataaagtagtaaagtattgtattgtgacaatttttaacacgttattgaa

SEQ ID NO: 66954 - DNA, 80 bp, synthetic construct
  source 1..80: mol_type = other DNA
ttaaggtgtggacctcattcctgcaattaacgtcgggtggctgacgcgggaattggttaacgggtataatggcttgagtc

SEQ ID NO: 66955 - DNA, 80 bp, synthetic construct
  source 1..80: mol_type = other DNA
acacgcgatttgtgctgactgtggctttctcaggccagccattcagtccaaatgggggagccttactggtgtagagaact

SEQ ID NO: 66956 - DNA, 80 bp, synthetic construct
  source 1..80: mol_type = other DNA
cttgctccgatagagtcggaaatggcggaacttgtttgtgatgcactggctaccttaacccgcaacacatatggtgacaa

SEQ ID NO: 66957 - DNA, 80 bp, synthetic construct
  source 1..80: mol_type = other DNA
aaaagaatgtcacactcaactgtatcaattcaattagataatttagaacgcgaggtgctaaaaattagagctgaaggatt

SEQ ID NO: 66958 - DNA, 80 bp, synthetic construct
  source 1..80: mol_type = other DNA
tatactagaaaggagagaactttgaatgcatttgatttgagtgatgatggcaaaggaaatacaataattaaaccaacaac

SEQ ID NO: 66959 - DNA, 80 bp, synthetic construct
  source 1..80: mol_type = other DNA
agcattattctgcaaaattcatataattcggcttttaagcttccaaaaattccagatggactacttgaaaaaactagata

SEQ ID NO: 66960 - DNA, 80 bp, synthetic construct
  source 1..80: mol_type = other DNA
gaagaaaagaaaaataatgatattttgaagcaaaagatcaaagaactagaaaacacaatttctcaattagaaaactatga

SEQ ID NO: 66961 - DNA, 80 bp, synthetic construct
  source 1..80: mol_type = other DNA
aaagcttctcaatttgttttagaacatcttaaattcacaaatgaatccctaaaaattcaaagagatgaagctcaaatttg

SEQ ID NO: 66962 - DNA, 80 bp, synthetic construct
  source 1..80: mol_type = other DNA
ctctgtaataaattcggtttacagtgtgaaatcgataattccattcatgttactgaatcagataagaaaggaaaacggaa

SEQ ID NO: 66963 - DNA, 80 bp, synthetic construct
  source 1..80: mol_type = other DNA
aatgtaaatgaaatacaatcaattaagtacaattgaatatacttaaatcacaaataatccgttaattacccgagatctct

SEQ ID NO: 66964 - DNA, 80 bp, synthetic construct
  source 1..80: mol_type = other DNA
tgcagaatgtttcgaactatgataagagattctggtctatacggcaatattgaaaactggagagccgcattctacagaga

SEQ ID NO: 66965 - DNA, 80 bp, synthetic construct
  source 1..80: mol_type = other DNA
acaattctgaccattctgatatttatcatattattgaattatatattaaaaactataactaatacgatggactatataat

SEQ ID NO: 66966 - DNA, 80 bp, synthetic construct
  source 1..80: mol_type = other DNA
gatcactagacgctgtatacacaaattcaactagtggagaatcatttctaacttcaacgctatgtttatactatccaaca

SEQ ID NO: 66967 - DNA, 80 bp, synthetic construct
  source 1..80: mol_type = other DNA
gaagcaaaaaatgagatttcagatactgaatgggaagatactctatcgcaattatttttaactaaaggatggccgactgg

SEQ ID NO: 66968 - DNA, 80 bp, synthetic construct
  source 1..80: mol_type = other DNA
atcagtttattttaaagactacagtgatattactacattttctataaatccacaactatattgtgattataatgtagtat

SEQ ID NO: 66969 - DNA, 80 bp, synthetic construct
  source 1..80: mol_type = other DNA
tgatgagatatgataatacatctgaattagatgcatcggagttagcagatcttatattgaacgaatggctgtgcaatcct

SEQ ID NO: 66970 - DNA, 80 bp, synthetic construct
  source 1..80: mol_type = other DNA
atggatatatcactttactattatcaacaaaatagcgaatcaaataaatggatatcaatgggaacagactgtacggtaaa

SEQ ID NO: 66971 - DNA, 80 bp, synthetic construct
  source 1..80: mol_type = other DNA
agtttgtccactcaatacacaaactttaggaattggatgcaaaactacggacgtggatacatttgagattgttgcgtcgt

SEQ ID NO: 66972 - DNA, 80 bp, synthetic construct
  source 1..80: mol_type = other DNA
ctgaaaaattggtaattactgatgttgtaaatggtgttaatcataaaataaatatttcaataagtacgtgtactatacgt

SEQ ID NO: 66973 - DNA, 80 bp, synthetic construct
  source 1..80: mol_type = other DNA
aattgtaataagctaggaccacgagaaaatgttgctataattcaagttggtggaccgaacgcactagatatcactgctga

SEQ ID NO: 66974 - DNA, 80 bp, synthetic construct
  source 1..80: mol_type = other DNA
ttttaggtttttactactcatcgctctgatgtcaccatttgtgaggacgcaaaattatggtatgtatttaccaataacag

SEQ ID NO: 66975 - DNA, 80 bp, synthetic construct
  source 1..80: mol_type = other DNA
taccagatcaaacatttgatgaattaaaacagatgcttaacagtatgaaaaaagctggattggttgatatacctaagatg

SEQ ID NO: 66976 - DNA, 80 bp, synthetic construct
  source 1..80: mol_type = other DNA
aaatgtatgttgacagcaaaagtggagaaaaaagatcaggacaaattttacaattcgataatctatggtattgcgccgcc

SEQ ID NO: 66977 - DNA, 80 bp, synthetic construct
  source 1..80: mol_type = other DNA
accacaatttaaaaaacgctataatacaaatgataactcaagaggaatgaattatgagaatgcaatgtttaacaaggtgg

SEQ ID NO: 66978 - DNA, 80 bp, synthetic construct
  source 1..80: mol_type = other DNA
gaagataaaccgatttcagagttacacgtaaaagaacttattgctgaattacggtggcaatacaataaatttgcagtaat

SEQ ID NO: 66979 - DNA, 80 bp, synthetic construct
  source 1..80: mol_type = other DNA
ttcactcaagggagctactactcaaatcagttttaatagctattggtcattcaaaggaaattgaaacgactgccactgct

SEQ ID NO: 66980 - DNA, 80 bp, synthetic construct
  source 1..80: mol_type = other DNA
ccaagacgcagttgaattggccgctatggagttgaataaactacttactactaaatcacagatagttgctaactcaatct

SEQ ID NO: 66981 - DNA, 80 bp, synthetic construct
  source 1..80: mol_type = other DNA
tgtcaaaatattgggaggagccttattttagtcaaacaaggaatatcagtcttaaagggatgtcagggcaagttcaggag

SEQ ID NO: 66982 - DNA, 80 bp, synthetic construct
  source 1..80: mol_type = other DNA
atatatcttacggtggagagcgaaagattttatccatccaatctgctttggagaaggctttaagatgggcatctggtgaa

SEQ ID NO: 66983 - DNA, 80 bp, synthetic construct
  source 1..80: mol_type = other DNA
atgcatgttgacggcaaaagtagacagaaaagatcaggataaattctataactcaataatttatggtattgcaccaccgc

SEQ ID NO: 66984 - DNA, 80 bp, synthetic construct
  source 1..80: mol_type = other DNA
gtactaatttgtgaagcattgaattcaattaaagttacacaatctgatgttgcgaatgtgctctcaagagtagtttctgt

SEQ ID NO: 66985 - DNA, 80 bp, synthetic construct
  source 1..80: mol_type = other DNA
cacaattcaaaaaacgctataatacaaatgacaattcaagaggaatgaactatgaaacttcgatgttcaataaagtggcg

SEQ ID NO: 66986 - DNA, 80 bp, synthetic construct
  source 1..80: mol_type = other DNA
tgaggccagttctcactaattcatattcggtagacttgcatgacgaaatagaacagattggatcggagaaaactcaaaat

SEQ ID NO: 66987 - DNA, 80 bp, synthetic construct
  source 1..80: mol_type = other DNA
gggaggattgggatataaatggtctgaaatatcatacaaagcagcgaattatcaatatagctattcgcgtgatggtgaca

SEQ ID NO: 66988 - DNA, 80 bp, synthetic construct
  source 1..80: mol_type = other DNA
tttatcatttatatataattcacaatctgcagttcaaattccaatttattattcttccaatagtgaactggaaagtagat

SEQ ID NO: 66989 - DNA, 80 bp, synthetic construct
  source 1..80: mol_type = other DNA
cgcttcacaagagaaatggcccaccaggttgcagcaggtaactccttggacacactatgcatcggtagaatctctcccca

SEQ ID NO: 66990 - DNA, 80 bp, synthetic construct
  source 1..80: mol_type = other DNA
ggaatcagaatgcatcatcagagacaacctctacaaccttcttagagaggcatggctctgtgcaaggaggcagggttaat

SEQ ID NO: 66991 - DNA, 80 bp, synthetic construct
  source 1..80: mol_type = other DNA
aaagatggtggcaagtgttctatgctatagtagattatattaatcatattgtacaggtaatgtccaaaagatcaagatca

SEQ ID NO: 66992 - DNA, 80 bp, synthetic construct
  source 1..80: mol_type = other DNA
gaatgatgagagtgaattggaaaaaatggtggcaagtgttctatactatagtagattatattaatcagattgtacaggta

SEQ ID NO: 66993 - DNA, 80 bp, synthetic construct
  source 1..80: mol_type = other DNA
ggccttacattttgtggtttcacagtgacagaatcaaatggggtatatgtcccagtccccacagaaacagagaaactcat

SEQ ID NO: 66994 - DNA, 80 bp, synthetic construct
  source 1..80: mol_type = other DNA
gtcacaatctgccagatgaccacaaatttaaaaattacatcttggtggccttagaagttgtggctaggcacattcgtgct

SEQ ID NO: 66995 - DNA, 80 bp, synthetic construct
  source 1..80: mol_type = other DNA
agtggaggtgaagagccttactatattacggatggtatgctggatagactttggaggggcggaccaaagcgtggagatgg

SEQ ID NO: 66996 - DNA, 80 bp, synthetic construct
  source 1..80: mol_type = other DNA
ctggtaagcagccccagcatgctgcaactaaggctgccattaaggcagttgctaaagaggttgtcaaggaggagaagaag

SEQ ID NO: 66997 - DNA, 80 bp, synthetic construct
  source 1..80: mol_type = other DNA
gcatttaaacccagacagcaaaacaaaagcactaggaataagtttagaaataaatggcaaactaaacatcaagttaagaa

SEQ ID NO: 66998 - DNA, 80 bp, synthetic construct
  source 1..80: mol_type = other DNA
tgaaattaagactgaacttaagaagaaaggacttgagggacccaagacaaaatttacagttaaagtctcagcaacaattg

SEQ ID NO: 66999 - DNA, 80 bp, synthetic construct
  source 1..80: mol_type = other DNA
gaaaaattggaccaaatgtaaattcagggcctgaattacaaatttcaacatttatgcatcctgctttaatgaaagagcca

SEQ ID NO: 67000 - DNA, 80 bp, synthetic construct
  source 1..80: mol_type = other DNA
aatgatggtaccaactttggcccattgcaagctgcagctgctcagtggggtctgtggagactatcagacctcaagataca

SEQ ID NO: 67001 - DNA, 80 bp, synthetic construct
  source 1..80: mol_type = other DNA
gtttacaccactcgtgggttcatcggctgtaactggctcagtgtaccgcacatctttgaacctaacgcaatcccctgggt

SEQ ID NO: 67002 - DNA, 80 bp, synthetic construct
  source 1..80: mol_type = other DNA
ggctggactagtgcgaccaactaaaagattacctgacattttatcgctgtatgggaaactcctttgctaccgcatactaa

SEQ ID NO: 67003 - DNA, 80 bp, synthetic construct
  source 1..80: mol_type = other DNA
ctacatcttggggtggtctaggtgcccgaaagcacctggacattccagttggggtgtcacggacatggcacctaaggaaa

SEQ ID NO: 67004 - DNA, 80 bp, synthetic construct
  source 1..80: mol_type = other DNA
attccagttggggtgtcacggacatggcacctaaggaaaggtgatcttgctgggcccagggagacatggtggttaacaga

SEQ ID NO: 67005 - DNA, 80 bp, synthetic construct
  source 1..80: mol_type = other DNA
ggcagatgctttcttgatgatgaaccacatctattgagaatgaggacttttaaaaatgatataacaaaagaggatttaac

SEQ ID NO: 67006 - DNA, 80 bp, synthetic construct
  source 1..80: mol_type = other DNA
aaatttgattaatatgtataatgtgttatttccaatgaatcagaagatagtgaataaatttattagtaatacaaaacaac

SEQ ID NO: 67007 - DNA, 80 bp, synthetic construct
  source 1..80: mol_type = other DNA
ataaatgcagaaatgagtatgtgccacaatggtacaatcatttattaatgccaataacattacaatgtttatcaatagaa

SEQ ID NO: 67008 - DNA, 80 bp, synthetic construct
  source 1..80: mol_type = other DNA
ttagcagacatgtatgacaaattgttgcttgatgacgtaaatttcaacagaatgtcatttctgccattagttttacaaca

SEQ ID NO: 67009 - DNA, 80 bp, synthetic construct
  source 1..80: mol_type = other DNA
agagtatgcgctccgatatttttcaaaatcaagattcattagtgaagagaaaaaatgtattagtgattatcatttttcca

SEQ ID NO: 67010 - DNA, 80 bp, synthetic construct
  source 1..80: mol_type = other DNA
atcaatgtactggagaatctacataatccaaatttcaaaatgcaaattactcgtaattgcagtactatgtctatcaaatg

SEQ ID NO: 67011 - DNA, 80 bp, synthetic construct
  source 1..80: mol_type = other DNA
gaatgaagcatgtaaacttgttaaaaatgttaaagattatttcgatattcttaaaacatcacacgttgaattttatgatg

SEQ ID NO: 67012 - DNA, 80 bp, synthetic construct
  source 1..80: mol_type = other DNA
tattcttaaaacatcacacgttgaattttatgatgcttcaccaagatgcagaatatttacacagtataaactgaaggcag

SEQ ID NO: 67013 - DNA, 80 bp, synthetic construct
  source 1..80: mol_type = other DNA
atggaattatgatttttttcatatgaatgtcaacccacacattcacaaaacatctgtatgagaacattttttatacacca

SEQ ID NO: 67014 - DNA, 80 bp, synthetic construct
  source 1..80: mol_type = other DNA
tatagctgcgaaaccactgctggcttttaaaagttctgttccgagagagcgcgtgcggaaagatggataaacttgccgac

SEQ ID NO: 67015 - DNA, 80 bp, synthetic construct
  source 1..80: mol_type = other DNA
agtgtgacccgtgtcggccaggtaaccggtctggcgtggacggaagtgggcggtgacttgctgaccattgaaaccgcgtg

SEQ ID NO: 67016 - DNA, 80 bp, synthetic construct
  source 1..80: mol_type = other DNA
taaattgttttgtaattccagttgactgtttattattattagttgcaaccccatgcgtttagcgcatgataagggtttag

SEQ ID NO: 67017 - DNA, 80 bp, synthetic construct
  source 1..80: mol_type = other DNA
attttagatggtccttatcaacctactacatttacaccacctactgattactggatacttattaactcaaatacaaatgg

SEQ ID NO: 67018 - DNA, 80 bp, synthetic construct
  source 1..80: mol_type = other DNA
aaaattcctatgtatacgtagattattgggacgattcaaaagcatttcgaaatatggtgtatgttagatcattagcagct

SEQ ID NO: 67019 - DNA, 80 bp, synthetic construct
  source 1..80: mol_type = other DNA
gcttctcagtcaatcatcagtccatggggctgcggtaaagagttcgccgctaccgaagacgacacgcactcaactctcaa

SEQ ID NO: 67020 - DNA, 80 bp, synthetic construct
  source 1..80: mol_type = other DNA
cagtccatggggctgcggtaaagagttcgccgctaccgaagacgacacgcactcaactctcaatagatcagtcacttctt

SEQ ID NO: 67021 - DNA, 80 bp, synthetic construct
  source 1..80: mol_type = other DNA
caaccataaaacaaccttaataaggttatgggacaaaatggatcccattattaatggaaactctgccaatgtgtatctaa

SEQ ID NO: 67022 - DNA, 80 bp, synthetic construct
  source 1..80: mol_type = other DNA
accttaataaggttatgggacaaaatggatcccattattaatggaaactctgccaatgtgtatctaactgatagttatct

SEQ ID NO: 67023 - DNA, 80 bp, synthetic construct
  source 1..80: mol_type = other DNA
ttttgttatcctcatttggagaacgatagctataaatttattccttttaataatttagcaataaaatgcatgttgacagc

SEQ ID NO: 67024 - DNA, 80 bp, synthetic construct
  source 1..80: mol_type = other DNA
tgcagaatgtttagggctatgattagagactccggtctatacagtaatatcgaaaattggagagctgcattttacagaga

SEQ ID NO: 67025 - DNA, 80 bp, synthetic construct
  source 1..80: mol_type = other DNA
tcgattgccgaaaagaatgtcacattcaaccgtatcaattcaattagacaatttagaacgcgaagtactaaaaattagag

SEQ ID NO: 67026 - DNA, 80 bp, synthetic construct
  source 1..80: mol_type = other DNA
gaagaaaagaaaaataacgatgttctgaaacagaagattaaagaattagagaatacaatatctcaattagaaaattttga

SEQ ID NO: 67027 - DNA, 80 bp, synthetic construct
  source 1..80: mol_type = other DNA
aaagcctctgaatttgttttggaacatcttaaatttacaaatgaatctttaagaattcagagagacgaagctcaaatttg

SEQ ID NO: 67028 - DNA, 80 bp, synthetic construct
  source 1..80: mol_type = other DNA
ctctgtaataaatttggtctacaatgtgaaatagacaactcaatacgtgttactgaatcagataagaagggaaaacgaaa

SEQ ID NO: 67029 - DNA, 80 bp, synthetic construct
  source 1..80: mol_type = other DNA
agtaaatggaaattaactataactgattggatataattggacatgctaaatttgtaaacaatccgctaattacccaagat

SEQ ID NO: 67030 - DNA, 80 bp, synthetic construct
  source 1..80: mol_type = other DNA
tgattggatataattggacatgctaaatttgtaaacaatccgctaattacccaagatctctccttgggctaaatacaccc

SEQ ID NO: 67031 - DNA, 80 bp, synthetic construct
  source 1..80: mol_type = other DNA
gtattttatactatagtagattatattaaccaaattgtacaggtaatgtccaaaagatcaagatcataaatctgcagctt

SEQ ID NO: 67032 - DNA, 80 bp, synthetic construct
  source 1..80: mol_type = other DNA
gtgttttataccgtagtagattacattatcaaatagttcaggtaatgtccaaacgatcaaggtcactaaatcagctgctt

SEQ ID NO: 67033 - DNA, 80 bp, synthetic construct
  source 1..80: mol_type = other DNA
ttttctatacagtagtagattatattaatcagattgtgcaagttatgtccaaaagatcacggtcattaaatcagcagctt

SEQ ID NO: 67034 - DNA, 80 bp, synthetic construct
  source 1..80: mol_type = other DNA
tgctatccccatttggagaacgatagctataattttattccttttaacaatttggctataatatgtatgttgacagcaga

SEQ ID NO: 67035 - DNA, 80 bp, synthetic construct
  source 1..80: mol_type = other DNA
aaatgaagcgagaaagtaatccatttaaggggctgtcaactgatagaaaaatggatgaagtttctcaagtaggaatctaa

SEQ ID NO: 67036 - DNA, 80 bp, synthetic construct
  source 1..80: mol_type = other DNA
actttaatgaatattcaaatgttttagagttttctgttgacccaaagttatattgtgattataatattgttttgattaga

SEQ ID NO: 67037 - DNA, 80 bp, synthetic construct
  source 1..80: mol_type = other DNA
ttcattgctggggaagaattagatatatctgaattagctgatttaatcctgaatgaatggttgtgtaatccaatggatat

SEQ ID NO: 67038 - DNA, 80 bp, synthetic construct
  source 1..80: mol_type = other DNA
gctgagaacgaaaaattggcgatagttgatgttgttgatggtgtaaaccataagttagatgtcacatccacaacatgcac

SEQ ID NO: 67039 - DNA, 80 bp, synthetic construct
  source 1..80: mol_type = other DNA
gatacggaattgtaacaagctaggaccaagagaaaatgtggcaataatacaagtaggcggttctgatgtattggatataa

SEQ ID NO: 67040 - DNA, 80 bp, synthetic construct
  source 1..80: mol_type = other DNA
tggatataacggctgatcccacgacttctccgcaaacagaacgaatgatgcgtgtgaattggaaaaaatggtggcaagta

SEQ ID NO: 67041 - DNA, 80 bp, synthetic construct
  source 1..80: mol_type = other DNA
aagaaataaaataacaaaaatacaaaaactaaaaatatataaaataaataaaaagtgcgaaagcacaaaaagaactgcag

SEQ ID NO: 67042 - DNA, 80 bp, synthetic construct
  source 1..80: mol_type = other DNA
gaactgcagctgtaatattataaagggttgggtggttggggaaagctatgtcattttagaaaacgtatttttgaattggt

SEQ ID NO: 67043 - DNA, 80 bp, synthetic construct
  source 1..80: mol_type = other DNA
ccacaattctaacctttttgatatcaattattctattaagttatatattaaaatcagtaactagtatccaggactttatc

SEQ ID NO: 67044 - DNA, 80 bp, synthetic construct
  source 1..80: mol_type = other DNA
tcttttaattatagttatgttatcaccactccttaacgcacaaaattatggaataaatcttccgattactggctcaatgg

SEQ ID NO: 67045 - DNA, 80 bp, synthetic construct
  source 1..80: mol_type = other DNA
ttttatacaatagttgactacgtgaatcaaattgtgcaagcaatgtccaaaagatcgagatcattaaattctgctgcatc

SEQ ID NO: 67046 - DNA, 80 bp, synthetic construct
  source 1..80: mol_type = other DNA
ccctaaaagttacgtggatatagcgacattctcaataaatcctcagttgtattgtgattataatgtagtattaatgaagt

SEQ ID NO: 67047 - DNA, 80 bp, synthetic construct
  source 1..80: mol_type = other DNA
agataccccgttaatggaatctggctggtcagacacagcacatggtgtgggtataattcctatgaaaacagatctggagc

SEQ ID NO: 67048 - DNA, 80 bp, synthetic construct
  source 1..80: mol_type = other DNA
gaatatattgaaataaacttttatagaaggaatacttggttgatatgggagatttagttttttatgatgtcgcatccaca

SEQ ID NO: 67049 - DNA, 80 bp, synthetic construct
  source 1..80: mol_type = other DNA
aagaggaggtcttagtgatgctgcaagaactttcttgatcaaatttggtgtaaaactgccataaacaagatagcaatggc

SEQ ID NO: 67050 - DNA, 80 bp, synthetic construct
  source 1..80: mol_type = other DNA
atttcagtaattttcagtatataaattgataaattttaaatcttgaaattggtccaaattcattttttataattggctcc

SEQ ID NO: 67051 - DNA, 80 bp, synthetic construct
  source 1..80: mol_type = other DNA
tataccacaattctaacttttttgatatcagttattctatttaattatatattaaaatcaataactaatataatggactt

SEQ ID NO: 67052 - DNA, 80 bp, synthetic construct
  source 1..80: mol_type = other DNA
cccatttggagaacgatagctatagattcattccatttaacagtttggctataaaatgtatgttgacagcaaaagtggat

SEQ ID NO: 67053 - DNA, 80 bp, synthetic construct
  source 1..80: mol_type = other DNA
caataatttatggtattgcaccaccgccacagttcagaaaacgttataacacaaatgacaattcaagaggaatgaattat

SEQ ID NO: 67054 - DNA, 80 bp, synthetic construct
  source 1..80: mol_type = other DNA
gaaggaggagaaatcgtttttcaaaatgcagcctttacaatgtggagattgacgtacctagagcataaactaatgccaat

SEQ ID NO: 67055 - DNA, 80 bp, synthetic construct
  source 1..80: mol_type = other DNA
gaagataaaccgatttcagaatcacatgtgaaagagctcattgctgagttgcggtggcagtacaataaatttgcagtgat

SEQ ID NO: 67056 - DNA, 80 bp, synthetic construct
  source 1..80: mol_type = other DNA
tttgtttgttttggaattgtaacgttgatcgttacccagccaatgcaattgtgtgtaggtttgacacaagagtcttgtca

SEQ ID NO: 67057 - DNA, 80 bp, synthetic construct
  source 1..80: mol_type = other DNA
ggtgttttaataacagaaggttcagtcaaaggtctaacaccttcaaagggaccagcacaagctagcgtcaatggagtcac

SEQ ID NO: 67058 - DNA, 80 bp, synthetic construct
  source 1..80: mol_type = other DNA
gaaactccaatgtttaataaagtggcggtgttaatttgtgaagcgttgaattcaattaaagttactcaatctgatgttgc

SEQ ID NO: 67059 - DNA, 80 bp, synthetic construct
  source 1..80: mol_type = other DNA
tttctgtaagacatctagagaatttggtgttgagaagagagaatcatcaggacgtacttttccattcaaaagagttgttg

SEQ ID NO: 67060 - DNA, 80 bp, synthetic construct
  source 1..80: mol_type = other DNA
ttgaagtcagtgctaatagctattggtcactcaaaagaaattgagacaactgccactgctgaaggaggagaaatcgtttt

SEQ ID NO: 67061 - DNA, 80 bp, synthetic construct
  source 1..80: mol_type = other DNA
tcaaaatgcagcttttacaatgtggaaattgacatatctagagcataagctaatgccaattctagatcaaaattttattg

SEQ ID NO: 67062 - DNA, 80 bp, synthetic construct
  source 1..80: mol_type = other DNA
agagcaataacaaaaatggaagcatgatagaatattatttacttgatcaaagaataatatggcagaaatcgtttgcgttc

SEQ ID NO: 67063 - DNA, 80 bp, synthetic construct
  source 1..80: mol_type = other DNA
gaagcgagaaagtaatccattcaaagggctgtcaactgatagaaagatggatgaagtctctcaaataggaatttaattcg

SEQ ID NO: 67064 - DNA, 80 bp, synthetic construct
  source 1..80: mol_type = other DNA
gcttgcttttgttatccccatttggagaacgatagctataagtttattccatttaataatttagccataaaatgtatgtt

SEQ ID NO: 67065 - DNA, 80 bp, synthetic construct
  source 1..80: mol_type = other DNA
ttaaagtcagtattgatagctattggtcactcaaaagagattgaaacaactgctaccgctgaaggaggggaaatcgtttt

SEQ ID NO: 67066 - DNA, 80 bp, synthetic construct
  source 1..80: mol_type = other DNA
ccaaaatgcagcgtttacaatgtggagattgacatatttggagcataaattaatgccaattttagatcaaaatttcattg

SEQ ID NO: 67067 - DNA, 80 bp, synthetic construct
  source 1..80: mol_type = other DNA
gagtaacaacaaaaacggaaatatgttggaatttaatttactggaccaacgaataatatggcaaaactggtatgcattca

SEQ ID NO: 67068 - DNA, 80 bp, synthetic construct
  source 1..80: mol_type = other DNA
aaaaaatgaagcgagagagtaatccattcaaaggactgtcaactgatagaaagatggatgaagtctcacaagtaggaatt

SEQ ID NO: 67069 - DNA, 80 bp, synthetic construct
  source 1..80: mol_type = other DNA
gaaggaggggaagtagtttttcaaaatgcagcttttacaatgtggaaattgacatacctggagcatagcctaatgccaat

SEQ ID NO: 67070 - DNA, 80 bp, synthetic construct
  source 1..80: mol_type = other DNA
ttacatcttcaatgaaacaaggtaacactcttgaagtatgtaagaaactactgttccaaaagatgaagcgagaaagtaat

SEQ ID NO: 67071 - DNA, 80 bp, synthetic construct
  source 1..80: mol_type = other DNA
ttttgatatcagttatattattaaattacgttcttaaatcattaactagaataatggactttattatttacagatctctt

SEQ ID NO: 67072 - DNA, 80 bp, synthetic construct
  source 1..80: mol_type = other DNA
taattcgtggaaagatacactttctcagctatttttaactaaagggtggtcaacaggatctgtctattttaaagagtacg

SEQ ID NO: 67073 - DNA, 80 bp, synthetic construct
  source 1..80: mol_type = other DNA
cagatattgcctcattttcagttgatccacaattatactgtgattataatttagtattgatgaaatacgacgccacattg

SEQ ID NO: 67074 - DNA, 80 bp, synthetic construct
  source 1..80: mol_type = other DNA
cagttagacatgtcagagttagcagatttgatactcaatgagtggttatgtaatcctatggatattacgttgtattatta

SEQ ID NO: 67075 - DNA, 80 bp, synthetic construct
  source 1..80: mol_type = other DNA
aataaaagtatgcccattaaatacacaaacgttaggaattgggtgtttaactactgatacaaatacgtttgaagaaattg

SEQ ID NO: 67076 - DNA, 80 bp, synthetic construct
  source 1..80: mol_type = other DNA
caacagctgaaaagttagtgattaccgatgttgtggatggagtcaatcataaactgagcgtaacaacaaacacttgtaca

SEQ ID NO: 67077 - DNA, 80 bp, synthetic construct
  source 1..80: mol_type = other DNA
attagaaactgtaaaaaattaggaccaagagaaaacgtggcagttatacaagttggtggttcagatatactcgatataac

SEQ ID NO: 67078 - DNA, 80 bp, synthetic construct
  source 1..80: mol_type = other DNA
tagttgactatgtgaatcaaattgtgcaagcaatgtccaagagatcaagatcactgaattctgctgcattttattatagg

SEQ ID NO: 67079 - DNA, 80 bp, synthetic construct
  source 1..80: mol_type = other DNA
aataagttaaggatgatgctttcttctaaaggtattgatcagaagatgagagtacttaatgcttgttttagtgttaaaag

SEQ ID NO: 67080 - DNA, 80 bp, synthetic construct
  source 1..80: mol_type = other DNA
aataccaggtaaatcatcatcagttataaagtgtactagacttatgaaagataagattgaacgtggtgcggtagaagttg

SEQ ID NO: 67081 - DNA, 80 bp, synthetic construct
  source 1..80: mol_type = other DNA
atgattcatttgctgaagagaaaatggaagttgacacagttgattggaaatcaagatatgatcagttggaaagaagattc

SEQ ID NO: 67082 - DNA, 80 bp, synthetic construct
  source 1..80: mol_type = other DNA
caacaaaatcaaatagctgatttgcaaaattattgtagtaaattagaagctgatttacagaataaagttggttcgttagt

SEQ ID NO: 67083 - DNA, 80 bp, synthetic construct
  source 1..80: mol_type = other DNA
taattcatgactatgatagaacatttttaatgcttaagggactattacggcaatgcaactatgaatatgcatatgaatag

SEQ ID NO: 67084 - DNA, 80 bp, synthetic construct
  source 1..80: mol_type = other DNA
atatctgattatgatagaatttttattatgtttaaaggattgttgcagcaaagtaattacgtttatacttatgaatagac

SEQ ID NO: 67085 - DNA, 80 bp, synthetic construct
  source 1..80: mol_type = other DNA
gcctcatctgaaaaattggtaattactgatgttgtaaatggcgttaatcataaaataaatatttcaataaatacgtgtac

SEQ ID NO: 67086 - DNA, 80 bp, synthetic construct
  source 1..80: mol_type = other DNA
tatacgtaattgtaataaactaggaccacgagaaaatgttgctataattcaagttggtggaccgaacgcactagatatct

SEQ ID NO: 67087 - DNA, 80 bp, synthetic construct
  source 1..80: mol_type = other DNA
ctgctgatccaacaacagttccacaggttcaaagaatcatgcgagtaaattggaaaaaatggtggcaagtgttttataca

SEQ ID NO: 67088 - DNA, 80 bp, synthetic construct
  source 1..80: mol_type = other DNA
atgaaattaatacaattggatcagaaaaaagtcaaaatgtaacaattaatcccggaccgtttgctcaaacaaattatgca

SEQ ID NO: 67089 - DNA, 80 bp, synthetic construct
  source 1..80: mol_type = other DNA
gaacaagttacggcacatactacttgctcagtcaatggtgtgaataacttcagttataatggaggatcactaccaactga

SEQ ID NO: 67090 - DNA, 80 bp, synthetic construct
  source 1..80: mol_type = other DNA
aaaaaaataacaaaaatacaaaaaaattaaaaaatatataaaataaataaaaaaagtgcgaaagcacaaaaaaagaactg

SEQ ID NO: 67091 - DNA, 80 bp, synthetic construct
  source 1..80: mol_type = other DNA
cagctgtgatgttataaagggttgggtggttggggaaagctatgtcattttagaaaacgtatttttgaattgggagcaca

SEQ ID NO: 67092 - DNA, 80 bp, synthetic construct
  source 1..80: mol_type = other DNA
ataaaaaaagtgcgaaagcacaaaaaaagaactgcagctgtaatgttataaagggttgggtggttggggaaagctatgtc

SEQ ID NO: 67093 - DNA, 80 bp, synthetic construct
  source 1..80: mol_type = other DNA
gtattaagattgatgctatggtagattcttcaatatcaatatctactaaatctaagaaagagaaatccaaacatgaaact

SEQ ID NO: 67094 - DNA, 80 bp, synthetic construct
  source 1..80: mol_type = other DNA
aagaacagaaaatgttatccaaagattgaagcagagtcagattctgatgactacgttttagatgattcagatagtgatga

SEQ ID NO: 67095 - DNA, 80 bp, synthetic construct
  source 1..80: mol_type = other DNA
agaagtattttgcacttcggttaagaatgaaacaagttgcaatgcaattaattgaaaatttgtgaatataaggttacttc

SEQ ID NO: 67096 - DNA, 80 bp, synthetic construct
  source 1..80: mol_type = other DNA
ggcattatacttgtcacttattataagtatataaatgtactgcttaaatgatacaaaaacacattcttcgataatatata

SEQ ID NO: 67097 - DNA, 80 bp, synthetic construct
  source 1..80: mol_type = other DNA
aaacaaaaataaagtatttaatttcatttcgtttaaagtaggaaacactaccattatatagaaaataatacacataatta

SEQ ID NO: 67098 - DNA, 80 bp, synthetic construct
  source 1..80: mol_type = other DNA
ttattatatatattaaatgttattttactgtcttatatgatgttaatcttatgaattgtaatatattattaattctaatg

SEQ ID NO: 67099 - DNA, 80 bp, synthetic construct
  source 1..80: mol_type = other DNA
taatgaaacactaatgagcgaagattaatacgtctaacctgagaggtcactagggagctccccactcccgttttgtgacc

SEQ ID NO: 67100 - DNA, 80 bp, synthetic construct
  source 1..80: mol_type = other DNA
gaaaagatggtggcaagtgttgtatactatagtagattatattaatcagtctgtacaggtaatgtccgaaagatcaagat

SEQ ID NO: 67101 - DNA, 80 bp, synthetic construct
  source 1..80: mol_type = other DNA
tggtattgaatataccacaattctaatctctttgatatcggttatattgttaaattacattttgaaatcaataacgagag

SEQ ID NO: 67102 - DNA, 80 bp, synthetic construct
  source 1..80: mol_type = other DNA
aacttgccaataacaggatcaatggataccgcatatgtgaattctacacaggacgaaccatttttgacatcaactctatg

SEQ ID NO: 67103 - DNA, 80 bp, synthetic construct
  source 1..80: mol_type = other DNA
cctatattatccaaccgaggcgtcgaacgagattgcagatacggaatggaagaatactttatctcaactatttttgacaa

SEQ ID NO: 67104 - DNA, 80 bp, synthetic construct
  source 1..80: mol_type = other DNA
agttaaagtatgtccattaaatacacagacacttgggattggatgttcaacaactgacccgaacacttttgaaacagttg

SEQ ID NO: 67105 - DNA, 80 bp, synthetic construct
  source 1..80: mol_type = other DNA
cgacaacagaaaaactagtgattacagatgtcgtagatggtgtaaatcataagttaaatgtaacaacagagacatgtaca

SEQ ID NO: 67106 - DNA, 80 bp, synthetic construct
  source 1..80: mol_type = other DNA
atacgtaactgtaaaaaattggggccgagagaaaacgttgcagtaattcaggtgggtggttcaaatatactggatataac

SEQ ID NO: 67107 - DNA, 80 bp, synthetic construct
  source 1..80: mol_type = other DNA
tgatggactacataatttataaatttttgtttgttgtggttctcatagccaccatcacgaatgcacagaattatggcata

SEQ ID NO: 67108 - DNA, 80 bp, synthetic construct
  source 1..80: mol_type = other DNA
ggtggcaagttttttatacaatagttgattacgtgaatcagatagtccaagcaatgtccaaaagatctagatcactgaat

SEQ ID NO: 67109 - DNA, 80 bp, synthetic construct
  source 1..80: mol_type = other DNA
aaaaaaagaaataaaataacaaaaaatacaaaaaaactaaaaaatatataaaataaataaaaaaagtgcgaaagcacaaa

SEQ ID NO: 67110 - DNA, 80 bp, synthetic construct
  source 1..80: mol_type = other DNA
agtagtgtactccacactaataactttcagactttggcaaatttgaggattacaaggcgtgacttggcattctaatgatt

SEQ ID NO: 67111 - DNA, 80 bp, synthetic construct
  source 1..80: mol_type = other DNA
ctacaccactgggcttagttatgaccacattcgaatcttctacattaaaggacgcgagattaaaactagtctcacaaaaa

SEQ ID NO: 67112 - DNA, 80 bp, synthetic construct
  source 1..80: mol_type = other DNA
gaagtgaatgggaggttacgcttaaccttgggggctggaagattactgtatttaatacaaattttcctggcaacaggaac

SEQ ID NO: 67113 - DNA, 80 bp, synthetic construct
  source 1..80: mol_type = other DNA
agtccagttccagacgatggtcttaccctccacagactcagtggataccttgccaggtacctacttgagaaaatattgaa

SEQ ID NO: 67114 - DNA, 80 bp, synthetic construct
  source 1..80: mol_type = other DNA
agtgagtgatccagagaaggtcattataaaatcaaaaataataaatccactggctgaaaagaatggaataacctggtctg

SEQ ID NO: 67115 - DNA, 80 bp, synthetic construct
  source 1..80: mol_type = other DNA
atggcgaagaggtttacctctctttcttccctggctcagagatgttcttaggaacattcaagttttatcctctggcaata

SEQ ID NO: 67116 - DNA, 80 bp, synthetic construct
  source 1..80: mol_type = other DNA
ggaatttacaaagttcagaggaaagagatggagcctaagtatttagaaaagacaatgcgccagaggtatatggggctaga

SEQ ID NO: 67117 - DNA, 80 bp, synthetic construct
  source 1..80: mol_type = other DNA
ggcatcaacctggacaatcagtaaagtcaatgaagtgcaggctgcccttacagtggtttctgggctaggctggaagaaga

SEQ ID NO: 67118 - DNA, 80 bp, synthetic construct
  source 1..80: mol_type = other DNA
ctaacgtcagtgctgcagccagagaattcttggcaaaatttggtatcagcatgtaattgagtcttaaaatctaatctgga

SEQ ID NO: 67119 - DNA, 80 bp, synthetic construct
  source 1..80: mol_type = other DNA
gagttggaatttaatgatgtcgctgctaacaccagcagtacttttgacccagagattgcatacgttaactttaagcgtat

SEQ ID NO: 67120 - DNA, 80 bp, synthetic construct
  source 1..80: mol_type = other DNA
gaaattaaacattttattcaatttggcaaaaagagtcttcggactcacaacaaacagctatttgggtgggtggttgggga

SEQ ID NO: 67121 - DNA, 80 bp, synthetic construct
  source 1..80: mol_type = other DNA
tggttggggacagaaatattgcggtatatatattccaaattcattcttgctgttttaagttttaggtggagcacactact

SEQ ID NO: 67122 - DNA, 80 bp, synthetic construct
  source 1..80: mol_type = other DNA
aaaagatgaaacaagagaaaaatccatttaaaggattgtcaactgatagaaagatggatgaagtttcgcacgttggaatt

SEQ ID NO: 67123 - DNA, 80 bp, synthetic construct
  source 1..80: mol_type = other DNA
gaatgtgctctcaagagtagtttctgtaagacatctggaaaatttggtgctgaggagagaaaatcatcaagacgtgcttt

SEQ ID NO: 67124 - DNA, 80 bp, synthetic construct
  source 1..80: mol_type = other DNA
gagtaataataaaaatggaaatgtactggaatttaatttgctagaccaaaggataatttggcaaaactggtatgcgttta

SEQ ID NO: 67125 - DNA, 80 bp, synthetic construct
  source 1..80: mol_type = other DNA
agatgaaaagagaaagtaatccatttaaaggactgtcaactgatagaaagatggatgaagtttctcaaataggaatttaa

SEQ ID NO: 67126 - DNA, 80 bp, synthetic construct
  source 1..80: mol_type = other DNA
agaacattactaagaatggtaatgctattgattttaacctgttagaccagagaatcatttggcaaaattggtacgcgttt

SEQ ID NO: 67127 - DNA, 80 bp, synthetic construct
  source 1..80: mol_type = other DNA
agataaaacaggagaaaaatccgtttaaaggactgtcaactgatagaaagatggatgaagtctctcatgttggaatttaa

SEQ ID NO: 67128 - DNA, 80 bp, synthetic construct
  source 1..80: mol_type = other DNA
tactttgagaatatattgaaataaacttctatagaaggcatacttggttgatatgggagatttggttttttatgatgtcg

SEQ ID NO: 67129 - DNA, 80 bp, synthetic construct
  source 1..80: mol_type = other DNA
atggctgagctagcttgcttttgttatccccatttggagaacgatagctatagattcattccatttaacagtttagctat

SEQ ID NO: 67130 - DNA, 80 bp, synthetic construct
  source 1..80: mol_type = other DNA
tccactcaaaagaattgttgctgaagtcagtactaatagctattggtcactcaaaagaaatcgagacaactgccactgct

SEQ ID NO: 67131 - DNA, 80 bp, synthetic construct
  source 1..80: mol_type = other DNA
tactatccaacagaagctaaaaatgagatttcagataatgaatgggaaaatactttatcgcagttatttttaactaaagg

SEQ ID NO: 67132 - DNA, 80 bp, synthetic construct
  source 1..80: mol_type = other DNA
atggccgactggatcagtttattttaaagactacaatgatattactacattttctatgaatccacaactatattgtgatt

SEQ ID NO: 67133 - DNA, 80 bp, synthetic construct
  source 1..80: mol_type = other DNA
ataatgtagtattgatgagatatgataatacatctgaattagatgcgtcagagttagcagatcttatattgaacgaatgg

SEQ ID NO: 67134 - DNA, 80 bp, synthetic construct
  source 1..80: mol_type = other DNA
ttgttgcttcatctgaaaaattggtaattactgacgttgtaaatggtgttaatcataaaataaatatttcaataagtacg

SEQ ID NO: 67135 - DNA, 80 bp, synthetic construct
  source 1..80: mol_type = other DNA
ggactatataatttttaggttattactactcattgctctgatgtcaccatttgtgaggacgcaaaattatggtatgtatt

SEQ ID NO: 67136 - DNA, 80 bp, synthetic construct
  source 1..80: mol_type = other DNA
tttatacagtagttgactatattaaccaaattatacaagttatgtccaaacgatcaagatcattagacgcagctgctttt

SEQ ID NO: 67137 - DNA, 80 bp, synthetic construct
  source 1..80: mol_type = other DNA
ttccgtttaacaatctggctataaaatgtatgttgacagcgaaagtagagaaaaaagatcaagacaaattttacaattcg

SEQ ID NO: 67138 - DNA, 80 bp, synthetic construct
  source 1..80: mol_type = other DNA
tacgcatgggtaaaggtcactatagagttataaaatactcgtcagttgcaaatcacgcagaccgagtttacgctactttc

SEQ ID NO: 67139 - DNA, 80 bp, synthetic construct
  source 1..80: mol_type = other DNA
aagagagtaataacaaaaatggaggtccactggagtttaatttgcttgaccaaaggataatatggcaaaattggtacgca

SEQ ID NO: 67140 - DNA, 80 bp, synthetic construct
  source 1..80: mol_type = other DNA
tttacgtcctcaatgaaacaaggtaatattcttgatgtatgcaaaaaactactcttccaaaaaatgaagcgagaaagtaa

SEQ ID NO: 67141 - DNA, 80 bp, synthetic construct
  source 1..80: mol_type = other DNA
caagtattttatactatagtagattatattaaccagattgtacaggtaatgtccaaaaggtcaagatcattaaattctgc

SEQ ID NO: 67142 - DNA, 80 bp, synthetic construct
  source 1..80: mol_type = other DNA
aataaacaaataaaatataaaacacaaaaaaacaacaaaaaagaaaataaaataacaaaaatacaaaaaaattaaaaaat

SEQ ID NO: 67143 - DNA, 80 bp, synthetic construct
  source 1..80: mol_type = other DNA
atataaaataaataaaaaaagtgcgaaagcacaaaaaaagaactgcagctgtaatattataaagggttgggtggttgggg

SEQ ID NO: 67144 - DNA, 80 bp, synthetic construct
  source 1..80: mol_type = other DNA
gtaatattataaagggttgggtggttggggaaagctatgtcattctagaaaacgtatttttgaattgggagcacactact

SEQ ID NO: 67145 - DNA, 80 bp, synthetic construct
  source 1..80: mol_type = other DNA
aaaaaacaacaaaaaagaaaataaaataacaaaaatacaaaaaaattaaaaaatatataaaataaataaaaaaagtgcga

SEQ ID NO: 67146 - DNA, 80 bp, synthetic construct
  source 1..80: mol_type = other DNA
aagcacaaaaaaagaactgcagctgtaatattataaagggttgggtggttggggaaagctatgtcattctagaaaacgta

SEQ ID NO: 67147 - DNA, 80 bp, synthetic construct
  source 1..80: mol_type = other DNA
agcaaaaacaagcagttaacgcttcacaagagaaatggctcaccaggttgcagcaggtaactccttggacacactatgca

SEQ ID NO: 67148 - DNA, 80 bp, synthetic construct
  source 1..80: mol_type = other DNA
agggatgagccaacatatagcactgaagaactgcttcaagtggcgctggtatataaatatgtcacaaagagggctccaga

SEQ ID NO: 67149 - DNA, 80 bp, synthetic construct
  source 1..80: mol_type = other DNA
agcatttattttgatatcccagagattaaaaggtggaaagtacgacccgcaaaacgtgaagaaatgtttcaaacagaaag

SEQ ID NO: 67150 - DNA, 80 bp, synthetic construct
  source 1..80: mol_type = other DNA
acggtctgagagaaatctcagagtacatctgttcattggacaaagaagggaagatggtcctatcaagcatgctggttctt

SEQ ID NO: 67151 - DNA, 80 bp, synthetic construct
  source 1..80: mol_type = other DNA
agcagccaagtgctaaacaaaactgtgcttgtagagctgattgctgggctcagtggaaaaaacaaatgtgatgtgctgag

SEQ ID NO: 67152 - DNA, 80 bp, synthetic construct
  source 1..80: mol_type = other DNA
tgtgcaagctaatgacatccaattgtatgaatctgattcagaggacgagcagagggacctttggttggaggaggtgacca

SEQ ID NO: 67153 - DNA, 80 bp, synthetic construct
  source 1..80: mol_type = other DNA
gacagctcaacacattgacccctgtgatacgaggcaagttcgacactgttgaagagaaagaggtctgcgggctggtgaag

SEQ ID NO: 67154 - DNA, 80 bp, synthetic construct
  source 1..80: mol_type = other DNA
cagcggatcgaggcttttatggagctagaaaagatggctaagagttccgggtgtaaatatgacaaaaggatgtacatgaa

SEQ ID NO: 67155 - DNA, 80 bp, synthetic construct
  source 1..80: mol_type = other DNA
aggattgttaaaagaactgtgtggaatactgcagggacagcaggtgctgaaggtcaaagggctcacctaccagatcctcg

SEQ ID NO: 67156 - DNA, 80 bp, synthetic construct
  source 1..80: mol_type = other DNA
tcggtagaatctctccccatgtgagggaaatggagtactgccactcagataaaacatgcaaccgtatttggaagacagtg

SEQ ID NO: 67157 - DNA, 80 bp, synthetic construct
  source 1..80: mol_type = other DNA
tgggcgtcggagaacaattgtaccaactcctgaagagtgtcgaataatccagctggaatcagaatgcatcatcagagaca

SEQ ID NO: 67158 - DNA, 80 bp, synthetic construct
  source 1..80: mol_type = other DNA
aacctctacaaccttcttagagaggcatggctctgtgcaaggaggcagggttaataggaaaaaactgctttgatttctct

SEQ ID NO: 67159 - DNA, 80 bp, synthetic construct
  source 1..80: mol_type = other DNA
atgacagaacatttttaatgttaaaaggactgttgaagcagtgcaattatgaatatgcatgtgagtagtcacataattaa

SEQ ID NO: 67160 - DNA, 80 bp, synthetic construct
  source 1..80: mol_type = other DNA
tgctcaagatggagtctactcagcagatgggaagttctattattaacacttcttttgaagctgcggttgttgctgccact

SEQ ID NO: 67161 - DNA, 80 bp, synthetic construct
  source 1..80: mol_type = other DNA
ggataccagggaaatcatcatcagtcattaaatgcactaggcttatgaaagataaaatagaacgaggagaggttgaagtt

SEQ ID NO: 67162 - DNA, 80 bp, synthetic construct
  source 1..80: mol_type = other DNA
ttgatgctattaatcctattaatgctatagacgatcttgaatcattaatcagaaacttaatccaagattatgacagaaca

SEQ ID NO: 67163 - DNA, 80 bp, synthetic construct
  source 1..80: mol_type = other DNA
acattcttgatgttgaaaggacttgtaaggcaatgcaactacgaatgtacatatgaatagtcacataatctaactaaatt

SEQ ID NO: 67164 - DNA, 80 bp, synthetic construct
  source 1..80: mol_type = other DNA
ttaattcaagattatgacagaacatttttaatgttaaaaggactgttgaagcagtgcaattatgaatatgcatgtgagta

SEQ ID NO: 67165 - DNA, 80 bp, synthetic construct
  source 1..80: mol_type = other DNA
accacagttttaacctttttgatatcagttatattgttgaattacgtactcaaatccttaactagaataatggactttat

SEQ ID NO: 67166 - DNA, 80 bp, synthetic construct
  source 1..80: mol_type = other DNA
ctggttcaatggacacaccatatacgaactcaacacgagaggaagtattcctaacttcgactttatgtttgtattaccca

SEQ ID NO: 67167 - DNA, 80 bp, synthetic construct
  source 1..80: mol_type = other DNA
tatttacagatttcttttagttatagtcatattatcaccactccttaatgcacaaaattatggaataaatcttccgatta

SEQ ID NO: 67168 - DNA, 80 bp, synthetic construct
  source 1..80: mol_type = other DNA
acgttgggtgcgattgagcggatttctccttaactaaagggattaatattaatgttaatcttaattcacgtatatcaata

SEQ ID NO: 67169 - DNA, 80 bp, synthetic construct
  source 1..80: mol_type = other DNA
gaatataccactattctaccctttctgatatcatttattttattgaattatatactaaaatcattaactagaatgatgga

SEQ ID NO: 67170 - DNA, 80 bp, synthetic construct
  source 1..80: mol_type = other DNA
cactctctcaattgtttttaactaaaggatggcctactggatctttttattttaaagcgtatgcagacatcgcttctttc

SEQ ID NO: 67171 - DNA, 80 bp, synthetic construct
  source 1..80: mol_type = other DNA
tctgtcgatccacagttatactgtgattacaatgttgttctaatgaaatatgatgctacgctgcaactggatatgtctga

SEQ ID NO: 67172 - DNA, 80 bp, synthetic construct
  source 1..80: mol_type = other DNA
agttgactatgtaaatcaaataatccaagcaatgtccaaaagatcgcgatcgttaaactctgcagcatttattataggag

SEQ ID NO: 67173 - DNA, 80 bp, synthetic construct
  source 1..80: mol_type = other DNA
aacaaactcagatcattattgtcatcgaaaggaatcgatcaaaaaatgagagttcttaatgcatgctttagtgttaagag

SEQ ID NO: 67174 - DNA, 80 bp, synthetic construct
  source 1..80: mol_type = other DNA
tcattaaatgcactaggttaatgaaagagaaaatagaacgtggagaagtcgaagtggatgacgcattcatagaagaaaaa

SEQ ID NO: 67175 - DNA, 80 bp, synthetic construct
  source 1..80: mol_type = other DNA
tagatcatattaatccggttaacgcttttgacgattttgagtctattcttcgtaatttaatatctgattatgataaaatt

SEQ ID NO: 67176 - DNA, 80 bp, synthetic construct
  source 1..80: mol_type = other DNA
ttaatatctgattatgataaaatttttattatgtttaaaggattgttgcagcaaagtaattacacttatacctatgagta

SEQ ID NO: 67177 - DNA, 80 bp, synthetic construct
  source 1..80: mol_type = other DNA
aaaattatggaataaatctacccatcacaggatcgatggatactgcatatgcaaattctacacagaacgagtcgtttttg

SEQ ID NO: 67178 - DNA, 80 bp, synthetic construct
  source 1..80: mol_type = other DNA
acatcaaccctttgcctatattatccaaccgaagcatcaaatgagatcgctgatacggaatggaaaaacaccttgtccca

SEQ ID NO: 67179 - DNA, 80 bp, synthetic construct
  source 1..80: mol_type = other DNA
actatttttaacaaaaggatggcccacaggatcagtatattttaaagagtatacagatatagcagcgttttcagttgatc

SEQ ID NO: 67180 - DNA, 80 bp, synthetic construct
  source 1..80: mol_type = other DNA
cacaactatactgcgattacaacatagttctgatgaagtatgattcagcgctagaattggatatgtcagaactagctgat

SEQ ID NO: 67181 - DNA, 80 bp, synthetic construct
  source 1..80: mol_type = other DNA
cttattttgaacgaatggctatgcaatccgatggacataacgttgtattattaccaacaaactgatgaggcaaataaatg

SEQ ID NO: 67182 - DNA, 80 bp, synthetic construct
  source 1..80: mol_type = other DNA
agtgaaagtgtgtccattaaatacgcagacacttggaattggatgcttaacaactgatccgagtacttttgaaacagttg

SEQ ID NO: 67183 - DNA, 80 bp, synthetic construct
  source 1..80: mol_type = other DNA
caacgacagagaaactagttattactgacgttgtagacggtgtaaatcataagttaaatgtaacaatcgagacatgtacc

SEQ ID NO: 67184 - DNA, 80 bp, synthetic construct
  source 1..80: mol_type = other DNA
atacgcaactgcaggaagctgggaccaagagaaaatgttgcagtaattcaggtaggtggcgcgaatgtactagacataac

SEQ ID NO: 67185 - DNA, 80 bp, synthetic construct
  source 1..80: mol_type = other DNA
atcagtaacaaggatgatggactacataatttatagatttttattcgttgtagtaattatgaccatcattgtgaacgcgc

SEQ ID NO: 67186 - DNA, 80 bp, synthetic construct
  source 1..80: mol_type = other DNA
gcaagttttttatactgtagttgattatgtgaaccagataattcaagcaatgtccaaaagatccagatcactagatcact

SEQ ID NO: 67187 - DNA, 80 bp, synthetic construct
  source 1..80: mol_type = other DNA
taccaataacgggatcattagacgctgtgtatatgaattcaactagtgaagaaccattcctaacttcaacgctatgtctg

SEQ ID NO: 67188 - DNA, 80 bp, synthetic construct
  source 1..80: mol_type = other DNA
ctgggcaatcctatggatatatcactctactattatcagcaaagtagcgaatcaaataaatggatatcaatgggaacaga

SEQ ID NO: 67189 - DNA, 80 bp, synthetic construct
  source 1..80: mol_type = other DNA
ctgcacagtaaaagtttgtccacttaatacacaaactctaggaattgggtgcaaaactacggacgtggatacatttgaga

SEQ ID NO: 67190 - DNA, 80 bp, synthetic construct
  source 1..80: mol_type = other DNA
tgtactatacgcaattgcaataaactgggaccacgcgaaaatgttgctatcattcaagttggtggaccgaatgcgttaga

SEQ ID NO: 67191 - DNA, 80 bp, synthetic construct
  source 1..80: mol_type = other DNA
ggactacataattttcaaacttttactatttattgccctgatatcaccatttgtaaggacacaaaattatggcatatatt

SEQ ID NO: 67192 - DNA, 80 bp, synthetic construct
  source 1..80: mol_type = other DNA
tatcactgctgatccaacgacagttccacaagttcaaagaattatgcgaataaattggaaaaaatggtggcaagtatttt

SEQ ID NO: 67193 - DNA, 80 bp, synthetic construct
  source 1..80: mol_type = other DNA
aagttttttacactgtcgttgattatgtgaatcaaataattcaagcaatgtccaaaaggtcaagatcactagattcagcg

SEQ ID NO: 67194 - DNA, 80 bp, synthetic construct
  source 1..80: mol_type = other DNA
ttaatgtatggtattgaatataccacaattctaacctttctgatatcatttattttattgaattatatactaaaatcatt

SEQ ID NO: 67195 - DNA, 80 bp, synthetic construct
  source 1..80: mol_type = other DNA
tggtattgaatataccacagttttaacctttttgatatcaattatattattgagttacgtacttaaatcattaactagaa

SEQ ID NO: 67196 - DNA, 80 bp, synthetic construct
  source 1..80: mol_type = other DNA
tatttatattgtcaccatttcttaatgcacaaaattatggaataaatcttccaattactggatcaatggatactccatat

SEQ ID NO: 67197 - DNA, 80 bp, synthetic construct
  source 1..80: mol_type = other DNA
gcaaactcgacacaagaagaggtgttcctaacatcaactttgtgtttgtattatccaactgaagccgcgacacaaataaa

SEQ ID NO: 67198 - DNA, 80 bp, synthetic construct
  source 1..80: mol_type = other DNA
tgataattcatggaaagatacactttctcagctctttttaactaaagggtggccaacaggatctgtctactttaaagatt

SEQ ID NO: 67199 - DNA, 80 bp, synthetic construct
  source 1..80: mol_type = other DNA
ctataaaagtatgcccattaaatacacagacattgggaattggttgtttaactactgatacgaatacgtttgaagaagtt

SEQ ID NO: 67200 - DNA, 80 bp, synthetic construct
  source 1..80: mol_type = other DNA
gcaacagccgaaaagttagtgatcactgacgtcgtagacggagtcaatcataaactgagcgtaacagcaaatacttgtac

SEQ ID NO: 67201 - DNA, 80 bp, synthetic construct
  source 1..80: mol_type = other DNA
agttgactatgtgaatcaaattgtgcaaacaatgtccaaaaggtcaaggtcactgaactctgccgcattttattacagag

SEQ ID NO: 67202 - DNA, 80 bp, synthetic construct
  source 1..80: mol_type = other DNA
taaataaattaagaatgatgctgtcatcgaaaggaattgaccaaaagatgagagtgttgaatgcctgtttcagtgttaag

SEQ ID NO: 67203 - DNA, 80 bp, synthetic construct
  source 1..80: mol_type = other DNA
aacaagcacacattaacgaactacagatgtataacaacaagttagaacgtgacttacagtcaaaaattggatcagtcgtt

SEQ ID NO: 67204 - DNA, 80 bp, synthetic construct
  source 1..80: mol_type = other DNA
aatgagtggtataaaaataattttaccatctccacatgaccctctatgagcacaatagttaaaagctaacactgtcaaaa

SEQ ID NO: 67205 - DNA, 80 bp, synthetic construct
  source 1..80: mol_type = other DNA
ctgtgccaaatgcttgtactacttgcgcggcgctatagcgccgcgctagtgggtccccgcgcgaaacccgcactagccca

SEQ ID NO: 67206 - DNA, 80 bp, synthetic construct
  source 1..80: mol_type = other DNA
tctactgatgattacgatgatatgcgatctgggattgaatccatcttagacgttttagctgccgctattcgaactgaagg

SEQ ID NO: 67207 - DNA, 80 bp, synthetic construct
  source 1..80: mol_type = other DNA
gcgccatccttggcgcatccgcttcagcgccccccaggccttccttgccgggctcttgctcgccgcggtcgccgttggca

SEQ ID NO: 67208 - DNA, 80 bp, synthetic construct
  source 1..80: mol_type = other DNA
cttgccgggctcttgctcgccgcggtcgccgttggcaccgcgcgcgccgggccccagcagccccccggtgcgcacgggca

SEQ ID NO: 67209 - DNA, 80 bp, synthetic construct
  source 1..80: mol_type = other DNA
gcattcccgccaccaccaccatcggctgccgtttctcggacacgacggccatcatggcggcaccttgcgcgtcggccagc

SEQ ID NO: 67210 - DNA, 80 bp, synthetic construct
  source 1..80: mol_type = other DNA
gcaactatgaatatgtatatgaatagtcacataattaaaatcattaaccatctacacatgaccctctatgagcacaatag

SEQ ID NO: 67211 - DNA, 80 bp, synthetic construct
  source 1..80: mol_type = other DNA
cttgaatactttgagagtacattgaaataaacttctatagaaggcatacttggttgatatgggagatctggttttttatg

SEQ ID NO: 67212 - DNA, 80 bp, synthetic construct
  source 1..80: mol_type = other DNA
cgcggggccggccgctcccgcgcgtgacgccgagctggaggtcgcctacgaatcgagcggcccccccgcgtcaaccaagg

SEQ ID NO: 67213 - DNA, 80 bp, synthetic construct
  source 1..80: mol_type = other DNA
gagctggaggtcgcctacgaatcgagcggcccccccgcgtcaaccaaggcagatccagacagcgacgtcgttgaaagtta

SEQ ID NO: 67214 - DNA, 80 bp, synthetic construct
  source 1..80: mol_type = other DNA
cacccatgtctgtcacaccgagcacatggacttttggtgcgtggagcacgaccgaccgccgcccgcgaccccgacgacga

SEQ ID NO: 67215 - DNA, 80 bp, synthetic construct
  source 1..80: mol_type = other DNA
gaccgaccgccgcccgcgaccccgacgacgaccgccgccacccccgccactgcgccggccccctgccacgccggcctcaa

SEQ ID NO: 67216 - DNA, 80 bp, synthetic construct
  source 1..80: mol_type = other DNA
tctgatcttcttggtatcgatcacactgataaattatattttgaaatcaataacaagaataatggactacataatttata

SEQ ID NO: 67217 - DNA, 80 bp, synthetic construct
  source 1..80: mol_type = other DNA
atggatactgcgtatgcaaactctacgcaaaatgaaccatttttgacatcgactctttgtttatactacccaatcgaagc

SEQ ID NO: 67218 - DNA, 80 bp, synthetic construct
  source 1..80: mol_type = other DNA
atcaaacgaaatagcagacacagagtggaaaaacacgttatctcaactatttctaacaaaaggatggccaacaggatcag

SEQ ID NO: 67219 - DNA, 80 bp, synthetic construct
  source 1..80: mol_type = other DNA
agtaaaagtatgtccgttaaacacacagacgcttggaatcgggtgttcaacaactaacccggacacttttgaaacagttg

SEQ ID NO: 67220 - DNA, 80 bp, synthetic construct
  source 1..80: mol_type = other DNA
cgacagcagaaaaactagtaattactgacgttgtagacggtgtaaatcacaaattggatgtaacgactacaacgtgtacg

SEQ ID NO: 67221 - DNA, 80 bp, synthetic construct
  source 1..80: mol_type = other DNA
atacgcaactgtaaaaaactgggcccaagagaaaacgttgcagtaattcaagtaggtggtgcgaacgtattagacataac

SEQ ID NO: 67222 - DNA, 80 bp, synthetic construct
  source 1..80: mol_type = other DNA
gatttctatttgtcgtagttttcatggccattgtcacgagcgcgcagaactatggagtgaatttacccattacaggatca

SEQ ID NO: 67223 - DNA, 80 bp, synthetic construct
  source 1..80: mol_type = other DNA
aaataatccaagcaatgtccaaaaggtctagatcactaaattcagctgcattttactatagagtgtaggtacatgctaga

SEQ ID NO: 67224 - DNA, 80 bp, synthetic construct
  source 1..80: mol_type = other DNA
ttgctatcctcatttggagaacgatagctatagattcattccatttaatagtttagcgataaaatgcatgttgacagcaa

SEQ ID NO: 67225 - DNA, 80 bp, synthetic construct
  source 1..80: mol_type = other DNA
caataatttatggtattgctccgccaccacaattcaaaaaacgttataacacaagtgataactcaagaggaatgaactat

SEQ ID NO: 67226 - DNA, 80 bp, synthetic construct
  source 1..80: mol_type = other DNA
gaaacatcaatgttcaacaaggtggcattattgatttgtgaagcattgaattcaattaaagttacacaatctgatgtcgc

SEQ ID NO: 67227 - DNA, 80 bp, synthetic construct
  source 1..80: mol_type = other DNA
ccagaatgcagcatttacgatgtggaaactaacatacttagagcataagttaatgccaattttagatcaaaactttgttg

SEQ ID NO: 67228 - DNA, 80 bp, synthetic construct
  source 1..80: mol_type = other DNA
agtataaaattacggttaacgaggataaaccaatttctgaatcacatgtgaaagagcttattgctgaattgcgctggcag

SEQ ID NO: 67229 - DNA, 80 bp, synthetic construct
  source 1..80: mol_type = other DNA
tataataaatttgcagtgataacacatggtaaaggtcactatagagtcgtaaaatattcgtcagttgcaaatcatgctga

SEQ ID NO: 67230 - DNA, 80 bp, synthetic construct
  source 1..80: mol_type = other DNA
gagcaataataaaaatggtgtgaacgtggagtttaatttgctagatcaaagaataatatggcaaaattggtatgctttta

SEQ ID NO: 67231 - DNA, 80 bp, synthetic construct
  source 1..80: mol_type = other DNA
tgatagaaagatggatgaagtatcacaagtaggaatttaattcgttatcgatttgagaatgggtgtgatgaagcaagaat

SEQ ID NO: 67232 - DNA, 80 bp, synthetic construct
  source 1..80: mol_type = other DNA
tcgcttaggactcctatccccatggagaaactcctagatgaggttcttgcccccggtgggccttataacttaaccgtcgg

SEQ ID NO: 67233 - DNA, 80 bp, synthetic construct
  source 1..80: mol_type = other DNA
gaataatactaaaaacggtaatgttactgattttaatttactagaccaaagaataatttggcaaaattggtacgcgttta

SEQ ID NO: 67234 - DNA, 80 bp, synthetic construct
  source 1..80: mol_type = other DNA
gaaacaagagaaaaatccatttaaaggattgtcaactgacagaaaaatggatgaagtatcacatgttggaatttaattcg

SEQ ID NO: 67235 - DNA, 80 bp, synthetic construct
  source 1..80: mol_type = other DNA
gcggggatcatgaaaggcgcgaagcgctgcgccgccgactctctgagcgtggccggctggctggacaccatttgggacgc

SEQ ID NO: 67236 - DNA, 80 bp, synthetic construct
  source 1..80: mol_type = other DNA
tggtcttatgcgacccacttggccagccgcttcggggccctgaacgccacttcgccgccggcgcgcacatgtgtgcgcag

SEQ ID NO: 67237 - DNA, 80 bp, synthetic construct
  source 1..80: mol_type = other DNA
gcttcggggccctgaacgccacttcgccgccggcgcgcacatgtgtgcgcaggcgcgcgggctccaggcctttgtccgtg

SEQ ID NO: 67238 - DNA, 80 bp, synthetic construct
  source 1..80: mol_type = other DNA
acctgagcgcccctgggccgacgggggcgccagagcgtgggcgaagttcttccgcggctgcgcctgggcgcagcgcttgc

SEQ ID NO: 67239 - DNA, 80 bp, synthetic construct
  source 1..80: mol_type = other DNA
aagttcttccgcggctgcgcctgggcgcagcgcttgctcggcgagccggcagttatgcacctcccatacactgatggcga

SEQ ID NO: 67240 - DNA, 80 bp, synthetic construct
  source 1..80: mol_type = other DNA
gcccaacagggtgccgccttggcactctcggtgcgcgatctgcccgggggtgcagcgttcgacgcaaacgcggtcaccgc

SEQ ID NO: 67241 - DNA, 80 bp, synthetic construct
  source 1..80: mol_type = other DNA
acccccgcggggtcggcggatcgcgcgcacgacgccgagctggaggtcgcctgcgaaccgagcggcccccctatgccaac

SEQ ID NO: 67242 - DNA, 80 bp, synthetic construct
  source 1..80: mol_type = other DNA
gagctggaggtcgcctgcgaaccgagcggcccccctatgccaaccaaggcggacccagatggcgacatcgttgaaagtta

SEQ ID NO: 67243 - DNA, 80 bp, synthetic construct
  source 1..80: mol_type = other DNA
gagggactgctcgccggctctggcgtgtgcggcgccatctttgccaacgccacggcggcccttgctgcagactgccggcg

SEQ ID NO: 67244 - DNA, 80 bp, synthetic construct
  source 1..80: mol_type = other DNA
gagtggggccctaaagaagccctacacgtccttatcgacccgagcccgggcttgctccgcgaggtcgctcgcgtcgagcg

SEQ ID NO: 67245 - DNA, 80 bp, synthetic construct
  source 1..80: mol_type = other DNA
gagcctgccgagcgcgtgagcctacacatctgccaccccgaccgcgccacgctgacgcacgcctccgtgctcgttggcgc

SEQ ID NO: 67246 - DNA, 80 bp, synthetic construct
  source 1..80: mol_type = other DNA
cgctgacgcacgcctccgtgctcgttggcgcggggctcgctgccaggcgcgtcagtcctcccccgaccgagcccctcgca

SEQ ID NO: 67247 - DNA, 80 bp, synthetic construct
  source 1..80: mol_type = other DNA
ccccctggggatgccaccgcgcccgagccccgcggatgccaggggtgcgaactctgccggtacacgcgcgtcaccaacga

SEQ ID NO: 67248 - DNA, 80 bp, synthetic construct
  source 1..80: mol_type = other DNA
tgcgaactctgccggtacacgcgcgtcaccaacgaccgcgcctatgtcaacctgtggctcgagcgtgaccgcggcgccac

SEQ ID NO: 67249 - DNA, 80 bp, synthetic construct
  source 1..80: mol_type = other DNA
tgggatgcgcctgttcgcgcgtgtgggtcggctccgagcacgaggccccgcccgaccacctcctggtgtccctccaccgt

SEQ ID NO: 67250 - DNA, 80 bp, synthetic construct
  source 1..80: mol_type = other DNA
ccgcccgaccacctcctggtgtccctccaccgtgcccccaatggaccgtggggcgtagtgctcgaggtgcgtgcgcgccc

SEQ ID NO: 67251 - DNA, 80 bp, synthetic construct
  source 1..80: mol_type = other DNA
ggggcgtagtgctcgaggtgcgtgcgcgccccgagggaggcaaccccaccggccactttgtctgcgcagtcggcgtcggc

SEQ ID NO: 67252 - DNA, 80 bp, synthetic construct
  source 1..80: mol_type = other DNA
tcggtgcggcggcacctgtgccgcgaccgacgaggggctggcccaggcgtactacgacgacctcgaggtgcgccgcctcg

SEQ ID NO: 67253 - DNA, 80 bp, synthetic construct
  source 1..80: mol_type = other DNA
tactacgacgacctcgaggtgcgccgcctcggggacgacgccatggcccgggcggccctcgcatcagtccaacgccctcg

SEQ ID NO: 67254 - DNA, 80 bp, synthetic construct
  source 1..80: mol_type = other DNA
gggacgacgccatggcccgggcggccctcgcatcagtccaacgccctcgcaagggcccttacaatatcagggtatggaac

SEQ ID NO: 67255 - DNA, 80 bp, synthetic construct
  source 1..80: mol_type = other DNA
ctgcgcgcggggctcgattacgacatcgagggtgagcacaccggcaccttcgcctgcaacctctgggacggccgtcaggt

SEQ ID NO: 67256 - DNA, 80 bp, synthetic construct
  source 1..80: mol_type = other DNA
gcgctgcggggctcagcgcgttcctcgacgccggcgcattggcggagctcaaggaggttcccgctggcattgaccgcgtc

SEQ ID NO: 67257 - DNA, 80 bp, synthetic construct
  source 1..80: mol_type = other DNA
tccgccagatcccacctccgcgcgtcactgctggggtcgcccaggagtggcgcatgacgtacttgcgggaacggatcgac

SEQ ID NO: 67258 - DNA, 80 bp, synthetic construct
  source 1..80: mol_type = other DNA
gtcccagggacaccgaggactgccacgccgctcaggggaaagccggcctcgagatccgggcgtgtgccaaggaatgggtt

SEQ ID NO: 67259 - DNA, 80 bp, synthetic construct
  source 1..80: mol_type = other DNA
cagcaggtggccctcctcgaccgcctccggggggtctacgcggctctgcctgacaccgttgccgccaatgctgcgtacta

SEQ ID NO: 67260 - DNA, 80 bp, synthetic construct
  source 1..80: mol_type = other DNA
tctgcctgacaccgttgccgccaatgctgcgtactacgactacagcgcggagcgcgttctcgccatcgtgcgcgagctta

SEQ ID NO: 67261 - DNA, 80 bp, synthetic construct
  source 1..80: mol_type = other DNA
acgcgcgggtgcgcggcctcgaccacccggccaccataggcgcgctcgaggagattcagactccctacgcgcgcgccaat

SEQ ID NO: 67262 - DNA, 80 bp, synthetic construct
  source 1..80: mol_type = other DNA
tagggcctttaatctcacctactctaaccaggtcatcacccaccgttgtttcgtcgcatctggtgggtacccaacttgcc

SEQ ID NO: 67263 - DNA, 80 bp, synthetic construct
  source 1..80: mol_type = other DNA
aaccggggccgtggccagcgcagggactggtccagggccccgcctccccccgaagagcggcaagaaagccgctcccagac

SEQ ID NO: 67264 - DNA, 80 bp, synthetic construct
  source 1..80: mol_type = other DNA
gcagggactggtccagggccccgcctccccccgaagagcggcaagaaagccgctcccagactccggccccgaagccattg

SEQ ID NO: 67265 - DNA, 80 bp, synthetic construct
  source 1..80: mol_type = other DNA
cgggcgtggaggctctgccccgcgccccgagctggggccaccgaccaacccattccaggcagccgtggcgcgtggcctgc

SEQ ID NO: 67266 - DNA, 80 bp, synthetic construct
  source 1..80: mol_type = other DNA
caacccattccaggcagccgtggcgcgtggcctgcgcccgcctctccacgaccctgacaccgaggcacccactgaggctt

SEQ ID NO: 67267 - DNA, 80 bp, synthetic construct
  source 1..80: mol_type = other DNA
gacgtcaggggcgtttggggtaaaggtgagcgcacctacgccgagcaggatttccgtgtcggtggcacgcgctggcaccg

SEQ ID NO: 67268 - DNA, 80 bp, synthetic construct
  source 1..80: mol_type = other DNA
ggcggctggggttgctacaacctgagcgactggcaccagggcactcatgtctgtcacaccaagcacatggacttttggtg

SEQ ID NO: 67269 - DNA, 80 bp, synthetic construct
  source 1..80: mol_type = other DNA
gttgcgttgtgcggtggggcctgccaccttgggaactggttgtcctcaccgcccgccccgaagacggctggacttgccgc

SEQ ID NO: 67270 - DNA, 80 bp, synthetic construct
  source 1..80: mol_type = other DNA
gggtataccccccccgcctacggcgaggaggccttcacctacctctgcactgcaccggggtgcgccactcaggcacctgt

SEQ ID NO: 67271 - DNA, 80 bp, synthetic construct
  source 1..80: mol_type = other DNA
catctgcgagatccccaccgacgtctcgtgcgagggcctggtggcctgggtacccacagccccatgcgcgcggatctgga

SEQ ID NO: 67272 - DNA, 80 bp, synthetic construct
  source 1..80: mol_type = other DNA
ctgctggggcttccctaccgacaccgtgatgagcgtgttcgcccttgccagctatgtccagcacccccacaagaccgtcc

SEQ ID NO: 67273 - DNA, 80 bp, synthetic construct
  source 1..80: mol_type = other DNA
atcccggggacctggttgagtacatcatgaattacaccggcaatcagcagtcccggtgtggcctcgggagcccgaattgc

SEQ ID NO: 67274 - DNA, 80 bp, synthetic construct
  source 1..80: mol_type = other DNA
tttgccaacgccattcccctgactgctcgcggcttgtggggtccacgccagagcgtccccggctgcgcctggtcgatgcc

SEQ ID NO: 67275 - DNA, 80 bp, synthetic construct
  source 1..80: mol_type = other DNA
tggggtccacgccagagcgtccccggctgcgcctggtcgatgccgacgaccccttgctgcgcaccgcccccgggcccggc

SEQ ID NO: 67276 - DNA, 80 bp, synthetic construct
  source 1..80: mol_type = other DNA
ggcacccaccgggccccttggggctgaagttcaagacggtccgcccggtggtcttgccacgcgcgttggcgccgccccgc

SEQ ID NO: 67277 - DNA, 80 bp, synthetic construct
  source 1..80: mol_type = other DNA
tgaagttcaagacggtccgcccggtggtcttgccacgcgcgttggcgccgccccgcaatgtgcgtgtgaccgggtgctac

SEQ ID NO: 67278 - DNA, 80 bp, synthetic construct
  source 1..80: mol_type = other DNA
cccggaggagggaattgccatcttactgtcaacggcgaggacgtcggcgccttcccccctgggaagttcgtcaccgccgc

SEQ ID NO: 67279 - DNA, 80 bp, synthetic construct
  source 1..80: mol_type = other DNA
cctaccaagtcagctgcgggggtgagagcgatcgcgcgagcgcgcgggtcatcgaccccgccgcgcaatcgtttaccggc

SEQ ID NO: 67280 - DNA, 80 bp, synthetic construct
  source 1..80: mol_type = other DNA
ggcgctatagcgccgcgctagtgggcccccgcgcgaaacccgcactagcccactagatccccgcacccgttgctgcatag

SEQ ID NO: 67281 - DNA, 80 bp, synthetic construct
  source 1..80: mol_type = other DNA
cgcggggccggcggagcgcgcgcgcgacgccgagctggaggtcgcctgcgaactgagcggcccccccacgttgaccaagg

SEQ ID NO: 67282 - DNA, 80 bp, synthetic construct
  source 1..80: mol_type = other DNA
gagctggaggtcgcctgcgaactgagcggcccccccacgttgaccaaggcagacccagacagcgacatcgtcgaaagtta

SEQ ID NO: 67283 - DNA, 80 bp, synthetic construct
  source 1..80: mol_type = other DNA
gagctggaggtcgcctgcgaaccgagcggccccgccgcgccaaccagggcggacccagacagtgacatcgtcgaaagtta

SEQ ID NO: 67284 - DNA, 80 bp, synthetic construct
  source 1..80: mol_type = other DNA
ccgccgtgcgcgcgggctccagtcagccagcgccagccgcgccccccccagacaattcctcgccaccacgccgtgcacgg

SEQ ID NO: 67285 - DNA, 80 bp, synthetic construct
  source 1..80: mol_type = other DNA
cccagacaattcctcgccaccacgccgtgcacggcggtcgcggcgactcccggacacccgcggcccgccgccttccgcgc

SEQ ID NO: 67286 - DNA, 80 bp, synthetic construct
  source 1..80: mol_type = other DNA
cggtcgcggcgactcccggacacccgcggcccgccgccttccgcgcccgcccgcgacccgccgccccccgcccccagtcc

SEQ ID NO: 67287 - DNA, 80 bp, synthetic construct
  source 1..80: mol_type = other DNA
ctggaggagccggcggatcgcgtgcgtgacgccgagctggaggtcgcctccgacccgagcggccccgccgcgcctacgag

SEQ ID NO: 67288 - DNA, 80 bp, synthetic construct
  source 1..80: mol_type = other DNA
cgccccgggcgccgccacaggtgccccaacccccgcgcatgcaaaccgggcgcggaggcactgccccgcgccccgagctg

SEQ ID NO: 67289 - DNA, 80 bp, synthetic construct
  source 1..80: mol_type = other DNA
tgcaaaccgggcgcggaggcactgccccgcgccccgagctggggccacccaccaacccattccaggcggccgtggcgcgt

SEQ ID NO: 67290 - DNA, 80 bp, synthetic construct
  source 1..80: mol_type = other DNA
ctgcgccatgcggtggggccttcccccttgggaactggtcgtccttacggcccgtcccgaggacgggtggacttgccgcg

SEQ ID NO: 67291 - DNA, 80 bp, synthetic construct
  source 1..80: mol_type = other DNA
ccagtgcggtacccccgcgctggtggagggcctcgccccaggaggagggaactgccacctcaccgtcaacggcgaggacg

SEQ ID NO: 67292 - DNA, 80 bp, synthetic construct
  source 1..80: mol_type = other DNA
tggctcctgccagcgcgcggtgccgtcatcgccgccggaccgccccccgccgccacgccgtgcattgcgattgcgacggc

SEQ ID NO: 67293 - DNA, 80 bp, synthetic construct
  source 1..80: mol_type = other DNA
cggaccgccccccgccgccacgccgtgcattgcgattgcgacggccccgggacgcccgcggcaccccgcctcccgcgccc

SEQ ID NO: 67294 - DNA, 80 bp, synthetic construct
  source 1..80: mol_type = other DNA
tgccaggcgcgtcagcccccctccgactgagccctccgcaccccgccgcgacgatgacccaggccacttggccgagcaaa

SEQ ID NO: 67295 - DNA, 80 bp, synthetic construct
  source 1..80: mol_type = other DNA
accccgccgcgacgatgacccaggccacttggccgagcaaagcgcgccgcccccggcgaccacccctgcggaagccaccg

SEQ ID NO: 67296 - DNA, 80 bp, synthetic construct
  source 1..80: mol_type = other DNA
tggggcctttaatcttacctattccaaccaggtcatcacccaccgttgttttgccgcttccggtgggtacctcacccctg

SEQ ID NO: 67297 - DNA, 80 bp, synthetic construct
  source 1..80: mol_type = other DNA
ctcgccggcctcttgctcgctgcggttgctattggcaccgcgcgcgccgggctccagccccgtcctgaggttgcagtgcc

SEQ ID NO: 67298 - DNA, 80 bp, synthetic construct
  source 1..80: mol_type = other DNA
ccctttgccgctgcagcccccccgagcgcatggggagcattacggccaccatcaccaccagctgccgtttcttgggcatg

SEQ ID NO: 67299 - DNA, 80 bp, synthetic construct
  source 1..80: mol_type = other DNA
acggccatcatggcggtactctgcgtgtcggccagcaccatcgaaacgccagcgacgtgctgcccggccactggcttcaa

SEQ ID NO: 67300 - DNA, 80 bp, synthetic construct
  source 1..80: mol_type = other DNA
ccaccatggtgaccccttgccacgccggcctcaatgacagctgcggcggcttcccttctgggtgcgggccgatgcgcctg

SEQ ID NO: 67301 - DNA, 80 bp, synthetic construct
  source 1..80: mol_type = other DNA
gcgcgtcacccccgactcccccttctggggaggccaccgcgcctgagtcacgcgggtgccaagggtgcgaactctgtcgg

SEQ ID NO: 67302 - DNA, 80 bp, synthetic construct
  source 1..80: mol_type = other DNA
cttcactcctgccatttgggagagccccagggtgcccaaatggcttccactacccccatcactatggaggacctccagaa

SEQ ID NO: 67303 - DNA, 80 bp, synthetic construct
  source 1..80: mol_type = other DNA
cccacgccaccccgcgcgcgcggcccggccccagccgctctggaggagccggcggatcgcgcgcgcgacgccgagccgga

SEQ ID NO: 67304 - DNA, 80 bp, synthetic construct
  source 1..80: mol_type = other DNA
tctggaggagccggcggatcgcgcgcgcgacgccgagccggaggttgcctgcgacccgagcggccccgccgcgccaaccc

SEQ ID NO: 67305 - DNA, 80 bp, synthetic construct
  source 1..80: mol_type = other DNA
accccgccccgtctgcggcccaggccaatcgacccagcgcagcgcgtcccccccgaccaccccctctagggaggccaccg

SEQ ID NO: 67306 - DNA, 80 bp, synthetic construct
  source 1..80: mol_type = other DNA
cccccgaccaccccctctggggaggccaccgcgcctgagtcacgcgggtgccaagggtgcgaactctgccggtatacgcg

SEQ ID NO: 67307 - DNA, 80 bp, synthetic construct
  source 1..80: mol_type = other DNA
ccaggagagccgctcccaaactccggcccctaagtcgccgcgggcgccgccacaggcaccccaacccccgcgcatgcaaa

SEQ ID NO: 67308 - DNA, 80 bp, synthetic construct
  source 1..80: mol_type = other DNA
gggcgccgccacaggcaccccaacccccgcgcatgcaaaccgggcgcggaggcactgccccgcgccccgagctgaggcca

SEQ ID NO: 67309 - DNA, 80 bp, synthetic construct
  source 1..80: mol_type = other DNA
tagggcctttaatcttactactctaaccaggtcatcacccaccgttgtctcgccgcattcggcgggtacttcactcctgc

SEQ ID NO: 67310 - DNA, 80 bp, synthetic construct
  source 1..80: mol_type = other DNA
cccttctgcggggccggcggatcgcgcgcgtgacgcggagttggaggtcgcctgcgaaccgggcggcccccccacatcaa

SEQ ID NO: 67311 - DNA, 80 bp, synthetic construct
  source 1..80: mol_type = other DNA
gagttggaggtcgcctgcgaaccgggcggcccccccacatcaaccaaggcagacccagacagcgacatcgttgaaagcta

SEQ ID NO: 67312 - DNA, 80 bp, synthetic construct
  source 1..80: mol_type = other DNA
tctcggcggcgcccgcggctcgcgcgtgccacgccgagctcgaggttgcctgcgaaccgagcggccccgtgacgccaacc

SEQ ID NO: 67313 - DNA, 80 bp, synthetic construct
  source 1..80: mol_type = other DNA
gagctcgaggttgcctgcgaaccgagcggccccgtgacgccaaccagggcggacccggacagtgacatcgtcgagagcta

SEQ ID NO: 67314 - DNA, 80 bp, synthetic construct
  source 1..80: mol_type = other DNA
cgcgcgctcgccaaaccactcgccgcctatcgccgcatctacatcgacgaggccttcactcttggcggcgagtactgcgc

SEQ ID NO: 67315 - DNA, 80 bp, synthetic construct
  source 1..80: mol_type = other DNA
ggcactcacgtctgtcatgccaagcacatggacttctggtgtgtggagcacgaccgaccgccgcctgtgaccccgatgcc

SEQ ID NO: 67316 - DNA, 80 bp, synthetic construct
  source 1..80: mol_type = other DNA
cgaccgaccgccgcctgtgaccccgatgccccccacccccggggcgagctccgctaccgccgccaccatagccaccaccc

SEQ ID NO: 67317 - DNA, 80 bp, synthetic construct
  source 1..80: mol_type = other DNA
gcgcatgcgcccctcgctgtgacgttccacgcgaacgtccccccgcacctgcggacccgccggatgacgaggcgcttatt

SEQ ID NO: 67318 - DNA, 80 bp, synthetic construct
  source 1..80: mol_type = other DNA
gatgacgaggcgcttattccgccgtggctgtttgccgagcgccgtgccctccgctgccgcgcgtgggacttcgaggctct

SEQ ID NO: 67319 - DNA, 80 bp, synthetic construct
  source 1..80: mol_type = other DNA
ccgccgtggctgtttgccgagcgccgtgccctccgctgccgcgcgtgggacttcgaggctctccgcgcgcgcgccgatac

SEQ ID NO: 67320 - DNA, 80 bp, synthetic construct
  source 1..80: mol_type = other DNA
acctcggcggagccggcgggccgcgcgcggcgtgccgagctagaggtcgcctgcgaacctagcggccccgccacgccagc

SEQ ID NO: 67321 - DNA, 80 bp, synthetic construct
  source 1..80: mol_type = other DNA
ccgcggggtcggcggatcgtgcgcgcgacgccgagctggaagtcgcctgcgaacggagcggctctcccacgtctaccaag

SEQ ID NO: 67322 - DNA, 80 bp, synthetic construct
  source 1..80: mol_type = other DNA
ttaaccgaaatgcctggaacggaacgcgttctcagtgctgtttgcgccgtgcggcgctaccgcgcgggcgaggacgggtc

SEQ ID NO: 67323 - DNA, 80 bp, synthetic construct
  source 1..80: mol_type = other DNA
gcgccgtgcggcgctaccgcgcgggcgaggacgggtcgaccctccgtaccgctgtggcccgccagcacccgcgccctttc

SEQ ID NO: 67324 - DNA, 80 bp, synthetic construct
  source 1..80: mol_type = other DNA
cgcggggccggcggatcgcgcgcgtgacgctgagctggaggtcgcctacgagccgagcggcccctccacgttaaccaagg

SEQ ID NO: 67325 - DNA, 80 bp, synthetic construct
  source 1..80: mol_type = other DNA
tgagctggaggtcgcctacgagccgagcggcccctccacgttaaccaaggcagacccagacagcgacattgttgaaagtt

SEQ ID NO: 67326 - DNA, 80 bp, synthetic construct
  source 1..80: mol_type = other DNA
acttctgcgtggccggcggaccgcgcgcgcgacaccgagctcgaggtcgcctacgaaccgggcggcccccccacgtcaac

SEQ ID NO: 67327 - DNA, 80 bp, synthetic construct
  source 1..80: mol_type = other DNA
tgcgcgcgggctccagtcagcctgcgccggccgcaccccccccggacaattcctcgcccccacgccgcgcacggcggtcg

SEQ ID NO: 67328 - DNA, 80 bp, synthetic construct
  source 1..80: mol_type = other DNA
gacaattcctcgcccccacgccgcgcacggcggtcgcggcgcctcccggacacccgcggcactccgccccccgcgcccgc

SEQ ID NO: 67329 - DNA, 80 bp, synthetic construct
  source 1..80: mol_type = other DNA
ctgcgccatgcggtggggccttcccccctgggaattggtcgttctcaccgcccgccctgaagacggctggacctgccgcg

SEQ ID NO: 67330 - DNA, 80 bp, synthetic construct
  source 1..80: mol_type = other DNA
ctcttttatgtatggtattggatataccacaactctaatcttcttgatattgcttgtattattgaattatatattaaaat

SEQ ID NO: 67331 - DNA, 80 bp, synthetic construct
  source 1..80: mol_type = other DNA
aattatggcataaatctaccaattactggatctatggatatgaactatcagaatgtatcaactccagagccttttttgac

SEQ ID NO: 67332 - DNA, 80 bp, synthetic construct
  source 1..80: mol_type = other DNA
atcgacgctatgtctatattatccagcagaagctgagacagagattgctgatagttcatggaaagacacattgtcacagt

SEQ ID NO: 67333 - DNA, 80 bp, synthetic construct
  source 1..80: mol_type = other DNA
tatttttgacaaaaggatggccaattggttcaatttatcttaaaagttacgtggatatagcgacattctcaataaatcct

SEQ ID NO: 67334 - DNA, 80 bp, synthetic construct
  source 1..80: mol_type = other DNA
cagttgtattgtgattataatctagtattaatgaaatataacgctgattcagagttagatatgtcggaattggcagacct

SEQ ID NO: 67335 - DNA, 80 bp, synthetic construct
  source 1..80: mol_type = other DNA
gatacttaatgaatggttatgcaatccaatggacataacgttgtattactatcaacagacggacgaagcgaacaaatgga

SEQ ID NO: 67336 - DNA, 80 bp, synthetic construct
  source 1..80: mol_type = other DNA
cagtaaccagaattatggactatatattgtatagattcttgctatttgttgtaattgtcacaccattcgtaaactcacag

SEQ ID NO: 67337 - DNA, 80 bp, synthetic construct
  source 1..80: mol_type = other DNA
tactgttgttgattatgtaaaccagataattcaagcaatgtccaaaagatctagatcgttagatcagcggctttatatag

SEQ ID NO: 67338 - DNA, 80 bp, synthetic construct
  source 1..80: mol_type = other DNA
agtagtgtactccacttgaatactttgaaaatagtttgtcattacttgagataccgagaggaataacttggaagtgtgat

SEQ ID NO: 67339 - DNA, 80 bp, synthetic construct
  source 1..80: mol_type = other DNA
ttaaacatggggaagcaattaatctccattccgttaggatcttcttccttaatgccgcaaaagccaaagctgctctcgct

SEQ ID NO: 67340 - DNA, 80 bp, synthetic construct
  source 1..80: mol_type = other DNA
cgtaagccggagaggaaggctagtcctaaatttggagagtggcaggtggaggtcgtcaataatcattttcctggaaacag

SEQ ID NO: 67341 - DNA, 80 bp, synthetic construct
  source 1..80: mol_type = other DNA
gaacaacccaattgataacaacgatcttaccatccaccggctgtcagggtatttggctagatgggtgctagagcagttca

SEQ ID NO: 67342 - DNA, 80 bp, synthetic construct
  source 1..80: mol_type = other DNA
aagaaaatgacgacgcagctcaaagggagttgattaaaacaaccgttatcaaccccatagctgagtctaatgggatcagg

SEQ ID NO: 67343 - DNA, 80 bp, synthetic construct
  source 1..80: mol_type = other DNA
tgggacaatggagcagaaatatatttggcattcttcccaggcacagaaatgtttctggaaacattcaatttttacccgct

SEQ ID NO: 67344 - DNA, 80 bp, synthetic construct
  source 1..80: mol_type = other DNA
gacaattggcatttacagagtcaaacaaggaatgatggacccccagtatctgaagaaagcattgaggcagcgctatggct

SEQ ID NO: 67345 - DNA, 80 bp, synthetic construct
  source 1..80: mol_type = other DNA
ctcttactgcagacaagtggatgtcgcagaaaactactgccatagctaagagcctaaaggatgttgagcagcttaaatgg

SEQ ID NO: 67346 - DNA, 80 bp, synthetic construct
  source 1..80: mol_type = other DNA
ggtagaggcggccttagcgacactgcaagaacattcttgcagaaatttggaatcagactcccataaatgggattaagtct

SEQ ID NO: 67347 - DNA, 80 bp, synthetic construct
  source 1..80: mol_type = other DNA
gtctgatttggttttttatgatgtcgcatccaccggtgcaaatggatttgatcctgatgcagggtatgtggacttctgta

SEQ ID NO: 67348 - DNA, 80 bp, synthetic construct
  source 1..80: mol_type = other DNA
gtaattaggctcaaaattcaaaattttattgtaataatttggtcataattggctatccaaaagggttccccaagagccca

SEQ ID NO: 67349 - DNA, 80 bp, synthetic construct
  source 1..80: mol_type = other DNA
caataatagcagctaaatgggtgggtggtaggggacagcaaaaaaatagaagttagatcatttattttataaaaggtatt

SEQ ID NO: 67350 - DNA, 80 bp, synthetic construct
  source 1..80: mol_type = other DNA
tgggtgggtggtaggggacagcaaaaaaatagaagttagatcatttattttataaaaggtattcagtggagcacactact

SEQ ID NO: 67351 - DNA, 80 bp, synthetic construct
  source 1..80: mol_type = other DNA
atgccaatttggagacccaggtgatatcatgagcacacccttagggatgaagtgcccagaacatgcaggttcctttagaa

SEQ ID NO: 67352 - DNA, 80 bp, synthetic construct
  source 1..80: mol_type = other DNA
tggggctcaggtgtggggtttaatttagtctgttctgtcagccttacagaatgtgcatcatttctcacgtcaatcaaagc

SEQ ID NO: 67353 - DNA, 80 bp, synthetic construct
  source 1..80: mol_type = other DNA
atggttcaagcacagctaatctagtaaggggtcaaaacacagtacatgttgtaggcaaaggtggccattctggatccaaa

SEQ ID NO: 67354 - DNA, 80 bp, synthetic construct
  source 1..80: mol_type = other DNA
acagtatgtgtttatatcaagctgaactatatagcccttatactacttccaaaaaaaactaccattttactactactcta

SEQ ID NO: 67355 - DNA, 80 bp, synthetic construct
  source 1..80: mol_type = other DNA
ttcggccgagccggcggatcgcgcgcgtgacgccgagccggaggttgcctgtgaaccgggcggccccgccacgccagcca

SEQ ID NO: 67356 - DNA, 80 bp, synthetic construct
  source 1..80: mol_type = other DNA
gagccggaggttgcctgtgaaccgggcggccccgccacgccagccagggcggacccagacagcgacattgttgaaagcta

SEQ ID NO: 67357 - DNA, 80 bp, synthetic construct
  source 1..80: mol_type = other DNA
catctaaagggcaagcttagcttcacatgccgctgtgacacagtggtttcgtgtgagggctacgtcgttaagagaataac

SEQ ID NO: 67358 - DNA, 80 bp, synthetic construct
  source 1..80: mol_type = other DNA
gaccaggacaatttggcgatatccaaagtcgcacacctgagagcgaagacgtctatgctaataaccaactggtactgcag

SEQ ID NO: 67359 - DNA, 80 bp, synthetic construct
  source 1..80: mol_type = other DNA
atgtatggtattgaatataccacaattctaacttttttgatatcacttgtatttattaattatatattgaaatcaataac

SEQ ID NO: 67360 - DNA, 80 bp, synthetic construct
  source 1..80: mol_type = other DNA
gaataaacttgccgataactggttctatggatacaccatatatgaattcaacaatgagtgaaacattctcaacttctact

SEQ ID NO: 67361 - DNA, 80 bp, synthetic construct
  source 1..80: mol_type = other DNA
ttatgtttatattacccgaacgaagcggcaactcagatcgcagatgacaagtggaaagatactctctcacaactttttct

SEQ ID NO: 67362 - DNA, 80 bp, synthetic construct
  source 1..80: mol_type = other DNA
cactaaagggtggccaacaggatcggtttactttaaagaatatacagatgttgcatcattttccgtagatccacaactat

SEQ ID NO: 67363 - DNA, 80 bp, synthetic construct
  source 1..80: mol_type = other DNA
tagaacaatggactttgttatctatagatttttgtttgttatagttgtactagcaccattcattaaaacgcaaaactatg

SEQ ID NO: 67364 - DNA, 80 bp, synthetic construct
  source 1..80: mol_type = other DNA
atgtatggtattgaatataccgcaattctaacctttctgatatcaatagttttattgaactatatattaaaatcactaac

SEQ ID NO: 67365 - DNA, 80 bp, synthetic construct
  source 1..80: mol_type = other DNA
gggcattgactgaccgggaaagcgttgcacagtcaatccacagcaagattgatgaactaagaagacagctggctgaccgt

SEQ ID NO: 67366 - DNA, 80 bp, synthetic construct
  source 1..80: mol_type = other DNA
atgaaccaactgggcaaactgctgattggctgagcattgtggtctacctaacatccttcgtggtcccaatactcttaaag

SEQ ID NO: 67367 - DNA, 80 bp, synthetic construct
  source 1..80: mol_type = other DNA
gggcacctgataggtgcccccctacctgcctgtttattgcaggcatggcagagttaggtgcatttttttctgtcctccag

SEQ ID NO: 67368 - DNA, 80 bp, synthetic construct
  source 1..80: mol_type = other DNA
atgtatggtattgaatataccacaattctaatctttctgatatcaatcattctactcaactatatattaaaatcagtgac

SEQ ID NO: 67369 - DNA, 80 bp, synthetic construct
  source 1..80: mol_type = other DNA
ggttagctccttttaatgtatggtattgaatataccacaattctaacctttctgatatcgtttattttattgaattatat

SEQ ID NO: 67370 - DNA, 80 bp, synthetic construct
  source 1..80: mol_type = other DNA
tcattttgtcaccattattgaaagctcagaattatggaattaatctaccaatcactggttcaatggatactgcatacgct

SEQ ID NO: 67371 - DNA, 80 bp, synthetic construct
  source 1..80: mol_type = other DNA
cttttcttacatctactctatgtttgtactatcctagtgaagctgcaacagaaataaatgacaattcatggaaagataca

SEQ ID NO: 67372 - DNA, 80 bp, synthetic construct
  source 1..80: mol_type = other DNA
ctctcacaattgtttttaactaaaggatggcctactggatcagtttattttaacgagtatacaaacatcgcttctttctc

SEQ ID NO: 67373 - DNA, 80 bp, synthetic construct
  source 1..80: mol_type = other DNA
aattaaagtgtgtccgctcaatacgcaaactttaggaattggttgtttgactactgatgcgacaacattcgaagaagttg

SEQ ID NO: 67374 - DNA, 80 bp, synthetic construct
  source 1..80: mol_type = other DNA
agaaattagtcattactgatgtcgttgatggagtcaatcataaactaaatgttactacggctacttgtacgatcagaaat

SEQ ID NO: 67375 - DNA, 80 bp, synthetic construct
  source 1..80: mol_type = other DNA
tgtaaaaaactaggaccaagagaaaatgtagcagtaattcaagttggagattctgatgttcttgatataacagctgatcc

SEQ ID NO: 67376 - DNA, 80 bp, synthetic construct
  source 1..80: mol_type = other DNA
tattttacactgtagttgactatgtaaatcaaataatccaagcaatgtccaaaagatcgcgatcgttaaactctgcagca

SEQ ID NO: 67377 - DNA, 80 bp, synthetic construct
  source 1..80: mol_type = other DNA
agtagtgtactccacttgaatactttgaaaatatcgtgctattacttgttgcttccagaaggaattgaatcgagtgttat

SEQ ID NO: 67378 - DNA, 80 bp, synthetic construct
  source 1..80: mol_type = other DNA
ctaaacatggggaatcaattaaccttgctgcagttaggatcttcttcctcaatgccgcaaaggccaaggctgctctctcg

SEQ ID NO: 67379 - DNA, 80 bp, synthetic construct
  source 1..80: mol_type = other DNA
gaacaatccaattggtaacaacgatcttaccatccaccgcatctcaggataccttgccagatgggtcctagagcaataca

SEQ ID NO: 67380 - DNA, 80 bp, synthetic construct
  source 1..80: mol_type = other DNA
aagaaaatgaagatgaatctcagagagaactggtgaaaacaacagttatcaacccaattgcggagtcaaatggcattaga

SEQ ID NO: 67381 - DNA, 80 bp, synthetic construct
  source 1..80: mol_type = other DNA
tgggagaatggtgcagaaatttatttggcattctttccaggaacagaaatgttcttggaaactttcaaattttacccttt

SEQ ID NO: 67382 - DNA, 80 bp, synthetic construct
  source 1..80: mol_type = other DNA
gactattggaatctacagagtcaaaaatggaatgatggactcacagtatctgaagaaagccttgaggcagaggtatggtt

SEQ ID NO: 67383 - DNA, 80 bp, synthetic construct
  source 1..80: mol_type = other DNA
cactaactgctgaaaagtggatgtcccaaaagaccggcatgattgcaaagagtctaaaggaagtcgagcagcttaaatgg

SEQ ID NO: 67384 - DNA, 80 bp, synthetic construct
  source 1..80: mol_type = other DNA
ggtaggggtggtttgagcgacactgctagaactttccttcagaaattcgggataaagttgccataagctccggcaggcaa

SEQ ID NO: 67385 - DNA, 80 bp, synthetic construct
  source 1..80: mol_type = other DNA
attgtttaggacgaaattttaaaataattggatatttcaaaattagttaattggctaactaaaagggttcctaggggccc

SEQ ID NO: 67386 - DNA, 80 bp, synthetic construct
  source 1..80: mol_type = other DNA
acaaccatagcagctaaatgggtgggtggtaggggacagcaaaataatagaagctaaatcattaatttaataaaaggtat

SEQ ID NO: 67387 - DNA, 80 bp, synthetic construct
  source 1..80: mol_type = other DNA
gtgtgtcgtgagagggctccatcaccctggtcaccatgacgcaatcagtttctctttctgatttcatcgttaagactgaa

SEQ ID NO: 67388 - DNA, 80 bp, synthetic construct
  source 1..80: mol_type = other DNA
gagaaacttttaaggatggaaaaaatgatagatcagctttaagaattaaaatgttcttatctccttcaccttccagacga

SEQ ID NO: 67389 - DNA, 80 bp, synthetic construct
  source 1..80: mol_type = other DNA
atggagttgttccaatgagagaaataaaaacaaatacggatataccaagtacactatggactcttgtgactgattggtta

SEQ ID NO: 67390 - DNA, 80 bp, synthetic construct
  source 1..80: mol_type = other DNA
ttcaagatgaagaaaatcaggaaatgtttgaagattttattagttccaaatttccggatgttttagcttcggcagacaag

SEQ ID NO: 67391 - DNA, 80 bp, synthetic construct
  source 1..80: mol_type = other DNA
tcgcccagcgattggaggatagaaaagatgtgttgcacaagaatttttctaaagccatgaatgcctttggcgcctgtttt

SEQ ID NO: 67392 - DNA, 80 bp, synthetic construct
  source 1..80: mol_type = other DNA
aaccgacttttgccactgagggaaaatgtaatgttgtaagagccactgatgattcaatgatactagagtttcagccagta

SEQ ID NO: 67393 - DNA, 80 bp, synthetic construct
  source 1..80: mol_type = other DNA
ttcgttgtggaagatcaaaagctacattttataaattatacccactctcagacgaacaacccgtcaatggcatgctcgct

SEQ ID NO: 67394 - DNA, 80 bp, synthetic construct
  source 1..80: mol_type = other DNA
ttgctggaaatcagttttttatgtaccatggacatgggcacatcagaacagttccatatcatgaacttgctgatgccatc

SEQ ID NO: 67395 - DNA, 80 bp, synthetic construct
  source 1..80: mol_type = other DNA
ctcgtaaagataaagaaacgctcgagagcatttctaaatcaccacttgcagctcaatgtggtagtaaatttctcgatatg

SEQ ID NO: 67396 - DNA, 80 bp, synthetic construct
  source 1..80: mol_type = other DNA
ttagatcaaaacaaaaaattgaagatgtgattttgaaagcaaaaatttttgaaaagaaaagaagctgaacgtgttaaatc

SEQ ID NO: 67397 - DNA, 80 bp, synthetic construct
  source 1..80: mol_type = other DNA
cacattacaactaattctctagaatgggtagatcctgatagttcattgaaggatcatgtcaatcttattgtaaatagaga

SEQ ID NO: 67398 - DNA, 80 bp, synthetic construct
  source 1..80: mol_type = other DNA
tctttcttttcaggacttagctggaaatccctgccaggtagacttaagtgtatcttctattgatggggcctggggttcag

SEQ ID NO: 67399 - DNA, 80 bp, synthetic construct
  source 1..80: mol_type = other DNA
agtgggaattggatggttgttgcagtcttgattgctctgtttgtattctctttgctattatccagtctttgttgcccacg

SEQ ID NO: 67400 - DNA, 80 bp, synthetic construct
  source 1..80: mol_type = other DNA
ccgacaaaattacaagaagaataagtagtcttatagattgtataatcttatattaaccacaatagtcatatctgtttaga

SEQ ID NO: 67401 - DNA, 80 bp, synthetic construct
  source 1..80: mol_type = other DNA
ctatacatatatattgcttgcactgctttatttattatatacattcattttgttttcaactatataaattttacactagt

SEQ ID NO: 67402 - DNA, 80 bp, synthetic construct
  source 1..80: mol_type = other DNA
attatatacattcattttgttttcaactatataaattttacactagtcccaaaaaaaactattacttcactactattcta

SEQ ID NO: 67403 - DNA, 80 bp, synthetic construct
  source 1..80: mol_type = other DNA
aagtgtactttcaagagtagtttctgtgagacatcttgagaatttagtattaagaagagaaaatcatcaggacgttcttt

SEQ ID NO: 67404 - DNA, 80 bp, synthetic construct
  source 1..80: mol_type = other DNA
agcaatccatttaaggggctgtcaactgatagaaaaatggatgaagtttctcaagtaggaatctaattcgttatctgttt

SEQ ID NO: 67405 - DNA, 80 bp, synthetic construct
  source 1..80: mol_type = other DNA
ctaactctctagagtgggtagatcctgatagttcacttaaagatcatgtgaaccttattgtgaatagaggtctttctttt

SEQ ID NO: 67406 - DNA, 80 bp, synthetic construct
  source 1..80: mol_type = other DNA
caagacttagctgaaaatccttgtcaggtagatttaagtgtatcttctatcgatagggcctggggttcaggggtaggctt

SEQ ID NO: 67407 - DNA, 80 bp, synthetic construct
  source 1..80: mol_type = other DNA
agtgggaattggatggttgttgctgtcttgattgccttgtttgtattctctttgctattgttcagcctctgttgcccgcg

SEQ ID NO: 67408 - DNA, 80 bp, synthetic construct
  source 1..80: mol_type = other DNA
ccgccaaaattataaaaagaacaaatagtctcgtaattcaaataatcttttattaactacaatagtcatatctgctaata

SEQ ID NO: 67409 - DNA, 80 bp, synthetic construct
  source 1..80: mol_type = other DNA
taatcccatggcccccataatttttagatttttcctactcatcgctctgatgtccccatttgggaggacgcaaaattacg

SEQ ID NO: 67410 - DNA, 80 bp, synthetic construct
  source 1..80: mol_type = other DNA
aaccaaaggatggccgacaggttcagtttattttaatgaatattcaaacgttttagaattttccatcgacccaaagctat

SEQ ID NO: 67411 - DNA, 80 bp, synthetic construct
  source 1..80: mol_type = other DNA
actgtgattataatgttgtgctaattagattcgtttctggtgaggagttggacatatctgaattagctgatctaatactg

SEQ ID NO: 67412 - DNA, 80 bp, synthetic construct
  source 1..80: mol_type = other DNA
aatgagtggttatgtaatccaatggatataacattatattattaccaacaaactggagaggcaaacaaatggatatcaat

SEQ ID NO: 67413 - DNA, 80 bp, synthetic construct
  source 1..80: mol_type = other DNA
atgtatggtattgaatataccacaactctaatcttcttgatattgcttgtattattgaattatatattaaaatcagtaac

SEQ ID NO: 67414 - DNA, 80 bp, synthetic construct
  source 1..80: mol_type = other DNA
gcataaatctaccaattactggatctatggatatgaactatcagaatgtatcaacttcagagccttttttgacatcgacg

SEQ ID NO: 67415 - DNA, 80 bp, synthetic construct
  source 1..80: mol_type = other DNA
gacaaaaggatggccaactggttcaatttaccttaaaagttacgtggatatagcgacattctcaataaatcctcagttgt

SEQ ID NO: 67416 - DNA, 80 bp, synthetic construct
  source 1..80: mol_type = other DNA
actacgtgaatcaaattgtgcaagcaatgtccaaaagatcgagatcattaaattctgctgcattttactacagagtatag

SEQ ID NO: 67417 - DNA, 80 bp, synthetic construct
  source 1..80: mol_type = other DNA
atgtatggtattgaatataccacagttctaacctttttgatatcaatcgttttgttgaattatatactaaaatcattaac

SEQ ID NO: 67418 - DNA, 80 bp, synthetic construct
  source 1..80: mol_type = other DNA
attatatcaatcagattgtgcaagttatgtccaaaagatcgcggtcgttgaattcagcagctttctactatagagtctga

SEQ ID NO: 67419 - DNA, 80 bp, synthetic construct
  source 1..80: mol_type = other DNA
atgtatggtattgaatataccacaattctaacttttttgatatcgcttatatttatcaattacctattaaaatcagtgac

SEQ ID NO: 67420 - DNA, 80 bp, synthetic construct
  source 1..80: mol_type = other DNA
gaattaatttacctataactggatcaatggacacaccatatacgaactcaacgatgagtgagacatttctaacttccaca

SEQ ID NO: 67421 - DNA, 80 bp, synthetic construct
  source 1..80: mol_type = other DNA
ttatgcttatattatccgaatgaagcggctactgaaatcgcagataataagtggacggaaacattgtcacaattgtttct

SEQ ID NO: 67422 - DNA, 80 bp, synthetic construct
  source 1..80: mol_type = other DNA
aactaaaggatggccaacaggatcagtttattttaaaggatactcagatatcgcgtcgttctctgtagagccacagttat

SEQ ID NO: 67423 - DNA, 80 bp, synthetic construct
  source 1..80: mol_type = other DNA
attgtgattataacattgtgttgatgaaatacgatgcaaacttacaattagatatgtctgaattagctgacttaatatta

SEQ ID NO: 67424 - DNA, 80 bp, synthetic construct
  source 1..80: mol_type = other DNA
aattaaagtgtgtcctctgaatacacagactcttggaataggatgttcaactacggatactaattcatttgaaatagttg

SEQ ID NO: 67425 - DNA, 80 bp, synthetic construct
  source 1..80: mol_type = other DNA
ctaatgcggaaaaattagctataactgatgttgttgatggagttaatcataaattagatgtaacaacgagcacgtgtact

SEQ ID NO: 67426 - DNA, 80 bp, synthetic construct
  source 1..80: mol_type = other DNA
ataagaaattgtaaaaaactaggaccaagggaaaatgttgcagtaattcaagtaggaggtccaaacgtgctcgacataac

SEQ ID NO: 67427 - DNA, 80 bp, synthetic construct
  source 1..80: mol_type = other DNA
tagaacaatggactttattgtttatagatttttaatggttatagttttacttgcaccaattattaagacccaaaattatg

SEQ ID NO: 67428 - DNA, 80 bp, synthetic construct
  source 1..80: mol_type = other DNA
attatgttaatcaaattgtacaagttatgtccaaacgatcgcgttcattgaattcggctgcattttattatcgagtttag

SEQ ID NO: 67429 - DNA, 80 bp, synthetic construct
  source 1..80: mol_type = other DNA
attatgtgaatcaaatagttcaagcaatgtccaaaagatcacgatcactgaactccgcagcattttactatagagtttag

SEQ ID NO: 67430 - DNA, 80 bp, synthetic construct
  source 1..80: mol_type = other DNA
aactaaaggatggccgactggatcagtttattttaaagactacaatgatattactacattttctatgaatccacagctat

SEQ ID NO: 67431 - DNA, 80 bp, synthetic construct
  source 1..80: mol_type = other DNA
aagtgttttacacagtaattgactatattaaccaaattatacaagttatgtccaaacggtcaagatcattagacacagct

SEQ ID NO: 67432 - DNA, 80 bp, synthetic construct
  source 1..80: mol_type = other DNA
actatattaaccaaattatacaagttatgtccaaacggtcaagatcattagacacagctgctttttattatagaatttag

SEQ ID NO: 67433 - DNA, 80 bp, synthetic construct
  source 1..80: mol_type = other DNA
ctatgtttatactatccaacagaagctaaaaatgagatttcagataatgaatgggaaaatactttatcgcaattattttt

SEQ ID NO: 67434 - DNA, 80 bp, synthetic construct
  source 1..80: mol_type = other DNA
ttatgtctttattatccaacagaggctgaaacagagattgctgacagttcatggaaagatacgctatcacagttattttt

SEQ ID NO: 67435 - DNA, 80 bp, synthetic construct
  source 1..80: mol_type = other DNA
aacaaaagggtggccaactggttctgtttatcttagaagctacacagatattgcaactttttcaataaatcctcagttgt

SEQ ID NO: 67436 - DNA, 80 bp, synthetic construct
  source 1..80: mol_type = other DNA
attgcgattacaacatagttctaatgaaatataacgctaattcggaactagatatgtcagagttagcagacttgatactc

SEQ ID NO: 67437 - DNA, 80 bp, synthetic construct
  source 1..80: mol_type = other DNA
aatgaatggctatgtaatccaatggatataacgttgtactattatcagcagacggatgaagcaaataaatggatatcaat

SEQ ID NO: 67438 - DNA, 80 bp, synthetic construct
  source 1..80: mol_type = other DNA
tcgaattatggactatatactctacagatttttgttgtttattgtaattattacgccatttgtaaattcacagaactatg

SEQ ID NO: 67439 - DNA, 80 bp, synthetic construct
  source 1..80: mol_type = other DNA
attatgtgaatcaaataattcaagcaatgtccaaaagatcgcgatcgttagattcggcagcattttattatagaatttaa

SEQ ID NO: 67440 - DNA, 80 bp, synthetic construct
  source 1..80: mol_type = other DNA
gggaagaggagggctaagcgacactgccagatcattcttgcagaagttcggcatcaggctcccataagtaaggaggtgag

SEQ ID NO: 67441 - DNA, 80 bp, synthetic construct
  source 1..80: mol_type = other DNA
tgccgcaaattaggcttcaaattctaaattttcatattaatttggttcaattggttatccaaaagggttttcctaaggga

SEQ ID NO: 67442 - DNA, 80 bp, synthetic construct
  source 1..80: mol_type = other DNA
cagatggctagttcgattattaacacttcttttgaagccgcagtcgttgctgccacttcaactcttgaactcatgggcat

SEQ ID NO: 67443 - DNA, 80 bp, synthetic construct
  source 1..80: mol_type = other DNA
atatacgtatgaatagtcacataatataattaaattaccatcttcacatgaccctctatgagcacaatagttaaaagcta

SEQ ID NO: 67444 - DNA, 80 bp, synthetic construct
  source 1..80: mol_type = other DNA
agtagtgtactccacttgaatactttgaagataatttgttgttgactgttttttgcctaagggaagttatctagagtgtg

SEQ ID NO: 67445 - DNA, 80 bp, synthetic construct
  source 1..80: mol_type = other DNA
tgttaaaaatgcagaatcactcaaccttgctgcagttaggatcttcttcctcaatgccgcaaaggccaaggctgctctct

SEQ ID NO: 67446 - DNA, 80 bp, synthetic construct
  source 1..80: mol_type = other DNA
aggaacaatccaattggtaacaacgatcttaccatccacagattatctgggtatttagccagatgggtccttgaccagta

SEQ ID NO: 67447 - DNA, 80 bp, synthetic construct
  source 1..80: mol_type = other DNA
taatgagaatgatgacgaatctcagcgtgaattgatcagaacaactattatcaatccaattgctgagtccaacggtgtga

SEQ ID NO: 67448 - DNA, 80 bp, synthetic construct
  source 1..80: mol_type = other DNA
ggtgggacagtgggccagagatctatctatcgtttttcccaggaacagagatgtttttggaaacctttaaattctacccg

SEQ ID NO: 67449 - DNA, 80 bp, synthetic construct
  source 1..80: mol_type = other DNA
ctaaccatcggcattcacagagtcaagcagggcatgatggaccctcaatatctgaaaaaggccttaaggcaacgctatgg

SEQ ID NO: 67450 - DNA, 80 bp, synthetic construct
  source 1..80: mol_type = other DNA
caccctcacagcagacaaatggatgtcacagaaggttgctgcaattgctaagagcctgaaggatgtagagcagcttaaat

SEQ ID NO: 67451 - DNA, 80 bp, synthetic construct
  source 1..80: mol_type = other DNA
ggggaaaaggaggcctgagcgatactgctaaaacattcttgcagaaatttggcatcaggcttccataaataaagtatggg

SEQ ID NO: 67452 - DNA, 80 bp, synthetic construct
  source 1..80: mol_type = other DNA
gcattcaaattgggttctaaattctaaatttctatatgttaatttgatcaattggttatccaaaagggttttcttaaggg

SEQ ID NO: 67453 - DNA, 80 bp, synthetic construct
  source 1..80: mol_type = other DNA
aacccacaaaaatagcagctaaatgggtgggtggtaggggacagcaaaaaactatagatcaggtcataaataaaataaaa

SEQ ID NO: 67454 - DNA, 80 bp, synthetic construct
  source 1..80: mol_type = other DNA
tgggtgggtggtaggggacagcaaaaaactatagatcaggtcataaataaaataaaatgtattcagtggagcacactact

SEQ ID NO: 67455 - DNA, 80 bp, synthetic construct
  source 1..80: mol_type = other DNA
aaatggtggcaggtattttgcactgtagttgactatgtaaatcaaataatccaagcaatgtccaaaagatcgcgatcgtt

SEQ ID NO: 67456 - DNA, 80 bp, synthetic construct
  source 1..80: mol_type = other DNA
caatacagcaccacagactgaaagaatgatgcgtattaattggaaaaaatggtggcaggtattttacactgtagttgact

SEQ ID NO: 67457 - DNA, 80 bp, synthetic construct
  source 1..80: mol_type = other DNA
ttaaccaaattatacaagttaagtccatgcggtcaaggtcattagacacagctgctttttattatagaatttagatatag

SEQ ID NO: 67458 - DNA, 80 bp, synthetic construct
  source 1..80: mol_type = other DNA
acgccatgtatttaccaataacgggatccctagacgctgtatacaccaattcaactagtggagaatcatttctaacttca

SEQ ID NO: 67459 - DNA, 80 bp, synthetic construct
  source 1..80: mol_type = other DNA
ccgttatgtttatattatccaaccggagctaaaaatgagatttcagataatgaatgggaaaatactctatcacaattatt

SEQ ID NO: 67460 - DNA, 80 bp, synthetic construct
  source 1..80: mol_type = other DNA
aatgggaacagactgcacggtaaaagtttgtccactcaatacacaaactttagggattggatgtaaaactacggacgtgg

SEQ ID NO: 67461 - DNA, 80 bp, synthetic construct
  source 1..80: mol_type = other DNA
gtctactcagcagatggcttcttccattatcaactcttcttttgaagctgcagtagttgctgcaacttctactcttgaac

SEQ ID NO: 67462 - DNA, 80 bp, synthetic construct
  source 1..80: mol_type = other DNA
ctttaaatgggaaatttagttcagcaattagaaataaaaattggatgactgactcccgaactgtcgctaaattagatgag

SEQ ID NO: 67463 - DNA, 80 bp, synthetic construct
  source 1..80: mol_type = other DNA
gatgtaaataaactaagaatgatgctgtcatcaaaaggaattgatcaaaagatgagagtgttgaatgcttgctttagtgt

SEQ ID NO: 67464 - DNA, 80 bp, synthetic construct
  source 1..80: mol_type = other DNA
atgaaaaatataatcactgggttcttaaagctaggaaagtaaacgaaaacatgaattctctacagaatgtaatttctcag

SEQ ID NO: 67465 - DNA, 80 bp, synthetic construct
  source 1..80: mol_type = other DNA
caacaaacgcatattaatgaattacagatgtataataataagttggagcgtgacttacaatcaaaaattggatcggttgt

SEQ ID NO: 67466 - DNA, 80 bp, synthetic construct
  source 1..80: mol_type = other DNA
ttcgtcaatagaatggtatttacggtcaatggaattatctgatgatattaaatcagatattgaacaacagcttaattcaa

SEQ ID NO: 67467 - DNA, 80 bp, synthetic construct
  source 1..80: mol_type = other DNA
tagatcaattaaatcctactaacgcaatggatgattttgaatcaatacttcgcaatttaatttctgattatgatagatta

SEQ ID NO: 67468 - DNA, 80 bp, synthetic construct
  source 1..80: mol_type = other DNA
tttataatgtttaaaggactgttgcagcactgtaattatacttgcacttatgaatagtgatacaataatgtcaccatcta

SEQ ID NO: 67469 - DNA, 80 bp, synthetic construct
  source 1..80: mol_type = other DNA
atacttgcacttatgaatagtgatacaataatgtcaccatctacacatgaccctctatgagcgcaatagttaaaagctaa

SEQ ID NO: 67470 - DNA, 80 bp, synthetic construct
  source 1..80: mol_type = other DNA
atacatttgagattgttgcgtcgtctgaaaaattggtaattactgatgtggtaaatggtgttaatcataaaataaatatt

SEQ ID NO: 67471 - DNA, 80 bp, synthetic construct
  source 1..80: mol_type = other DNA
agtagtagtgtactccacttgaatactttgaaaatatattgaaataaacttctatagaaggcatacttggttgatatggg

SEQ ID NO: 67472 - DNA, 80 bp, synthetic construct
  source 1..80: mol_type = other DNA
accacggggaagttatcaatctggcagccgttaggatcttcttccttaatgcagcaaaagccaaagctgctctcgctcgt

SEQ ID NO: 67473 - DNA, 80 bp, synthetic construct
  source 1..80: mol_type = other DNA
aaaccggagcggaaagctactcctaagtttggagagtggcaggtggagattgtcaataatcattttcctgggaacaggaa

SEQ ID NO: 67474 - DNA, 80 bp, synthetic construct
  source 1..80: mol_type = other DNA
caacccaattggtaacaacgaccttaccatccatcggctttccggatatctagccagatgggttcttgagcatttcaccg

SEQ ID NO: 67475 - DNA, 80 bp, synthetic construct
  source 1..80: mol_type = other DNA
aagatgatgatgagtctcaaagagagttaataaggagcaccatcataaatccaattgcagaatccaatggcattcattgg

SEQ ID NO: 67476 - DNA, 80 bp, synthetic construct
  source 1..80: mol_type = other DNA
aacaatggaccagaaatttacctttcatttttcccagggacagaaatgttcttggaagttttcaaattttaccccttaac

SEQ ID NO: 67477 - DNA, 80 bp, synthetic construct
  source 1..80: mol_type = other DNA
catcgggatttacagagtcaaacatggtatgatggatcctcagtacttaaaaaaggctctcagacaacgctatggcacct

SEQ ID NO: 67478 - DNA, 80 bp, synthetic construct
  source 1..80: mol_type = other DNA
tgactgcagagaagtggatggcacagaagacagtgctcattgccaagagtctaaaggatgttgaacaactcaaatgggga

SEQ ID NO: 67479 - DNA, 80 bp, synthetic construct
  source 1..80: mol_type = other DNA
agaggagggcttagcgatgctgcaagaacattcttgatcaaattcggtgtaaaactgccttgaacaaatgcagtagtgaa

SEQ ID NO: 67480 - DNA, 80 bp, synthetic construct
  source 1..80: mol_type = other DNA
agatttggttttctatgatgtcgcatccacaggtgcaaatggatttgatccagatgcagggtttgtggcatttatggctg

SEQ ID NO: 67481 - DNA, 80 bp, synthetic construct
  source 1..80: mol_type = other DNA
attttaagtaaattctagattcataaattggcaaatttgtaattggttaaaattcaattcttataattggcttccaaaag

SEQ ID NO: 67482 - DNA, 80 bp, synthetic construct
  source 1..80: mol_type = other DNA
gtcttatgaccataaacatagcagcacaatgggtgggtggtaggggacagcaacttaatagatctcaggtcattgattta

SEQ ID NO: 67483 - DNA, 80 bp, synthetic construct
  source 1..80: mol_type = other DNA
tgggtgggtggtaggggacagcaacttaatagatctcaggtcattgatttagttaaatgtattcagtggagcacactact

SEQ ID NO: 67484 - DNA, 80 bp, synthetic construct
  source 1..80: mol_type = other DNA
gtctactcagcagatggcatcttctattattaactcttcttttgaagctgcagttgtcgctgcaacttctacattggaat

SEQ ID NO: 67485 - DNA, 80 bp, synthetic construct
  source 1..80: mol_type = other DNA
tgatgctcaagatggagtctactcagcagatggcatcttctattattaactcttcttttgaagctgcagttgtcgctgca

SEQ ID NO: 67486 - DNA, 80 bp, synthetic construct
  source 1..80: mol_type = other DNA
cagcaaagtaattacacttatacctatgagtgaacatagcatattaccatcttcacgtaaccctctatgagcacgatagt

SEQ ID NO: 67487 - DNA, 80 bp, synthetic construct
  source 1..80: mol_type = other DNA
ggcaagtgttctatactatagttgattatattaatcagattgtacaggtaatgtccaaaagatcaagatcattaaatccg

SEQ ID NO: 67488 - DNA, 80 bp, synthetic construct
  source 1..80: mol_type = other DNA
catttcagtaatattcgatatataaattggtaaatttcaaattttaaaattggttcaaattcatttttataattggcttc

SEQ ID NO: 67489 - DNA, 80 bp, synthetic construct
  source 1..80: mol_type = other DNA
gaatataccacaactctaatcttcttgatattgcttgtattattgaattacatattaaaatcagtaaccagaattatgga

SEQ ID NO: 67490 - DNA, 80 bp, synthetic construct
  source 1..80: mol_type = other DNA
caattactggatctatggatatgagctatcagaatgtatcaacttcagagccttttttgacatcgacgctgtgtttatat

SEQ ID NO: 67491 - DNA, 80 bp, synthetic construct
  source 1..80: mol_type = other DNA
tatccagcagaagctgagacagagattgctgatagttcatggaaagacacattggcacagttatttttgacaaaaggatg

SEQ ID NO: 67492 - DNA, 80 bp, synthetic construct
  source 1..80: mol_type = other DNA
gccaactggctcaatttaccttaaaagttacgtggatatagcgacattctcaataaatcctcagttgtattgtgattata

SEQ ID NO: 67493 - DNA, 80 bp, synthetic construct
  source 1..80: mol_type = other DNA
atatagtattaatgaagtataatgctgattcagagttagatatgtcggaattggcggatctgatacttaatgaatggtta

SEQ ID NO: 67494 - DNA, 80 bp, synthetic construct
  source 1..80: mol_type = other DNA
ctatatattgtataaattattgctatttgttgttattgtcacaccattcgtaaactcacaaaattatggcataaatctac

SEQ ID NO: 67495 - DNA, 80 bp, synthetic construct
  source 1..80: mol_type = other DNA
gcaatgtccaaaagatctagatcgttagattcagcggctttttactatagagtttgaatatcattgagattatagttgta

SEQ ID NO: 67496 - DNA, 80 bp, synthetic construct
  source 1..80: mol_type = other DNA
gtggcagtgttaatttgtgaagctctgaactcactaaaaattactcaaacagacgttgcgagtgtattgtctcgtgttgt

SEQ ID NO: 67497 - DNA, 80 bp, synthetic construct
  source 1..80: mol_type = other DNA
taattaaatcagtgctcatagctattggacaatcaaaagaaattgaaaccacagttacagctgagggaggagagattgtg

SEQ ID NO: 67498 - DNA, 80 bp, synthetic construct
  source 1..80: mol_type = other DNA
tgcggttattacacatggaaaaggacattacagagtagttaaatattcatcagttaccaatcacgcagacagagtttatg

SEQ ID NO: 67499 - DNA, 80 bp, synthetic construct
  source 1..80: mol_type = other DNA
aaaataataataaatctggaatttcatctgactttaaccttctcgaccaaagaataatttggcaaaactggtatgcattt

SEQ ID NO: 67500 - DNA, 80 bp, synthetic construct
  source 1..80: mol_type = other DNA
tcagaggtctgtcaactgatagaaagatggatgaagtctctcaagtaggcgtttaattcgctttcaattcaaagttgatg

SEQ ID NO: 67501 - DNA, 80 bp, synthetic construct
  source 1..80: mol_type = other DNA
ttaatttctatatcattatttgcattaactaaagctcaaaactatggacttaatataccaataacaggatcaatggatac

SEQ ID NO: 67502 - DNA, 80 bp, synthetic construct
  source 1..80: mol_type = other DNA
taaatatttcaataaacacgtgcactatacgtaattgtaataaactaggaccacgagagaatgttgctataattcaagtt

SEQ ID NO: 67503 - DNA, 80 bp, synthetic construct
  source 1..80: mol_type = other DNA
cgattactggttcaatggacacaccatatacgaactcaacacgagaggaagttttcctaacttctactttatgtttgtat

SEQ ID NO: 67504 - DNA, 80 bp, synthetic construct
  source 1..80: mol_type = other DNA
ctttattatttacagatttcttttagttatagttatattatccccactccttaatgcacaaaattatggaataaatcttc

SEQ ID NO: 67505 - DNA, 80 bp, synthetic construct
  source 1..80: mol_type = other DNA
gtcaactgatagaaaaatggatgaagtttcacatgttggaatttaattcgctttcgattcaagaatgatgatgacgaagc

SEQ ID NO: 67506 - DNA, 80 bp, synthetic construct
  source 1..80: mol_type = other DNA
catggctgagctagctagctttggctatcccgatttggagaacgatagctatagatttattccttttaacaatttggcta

SEQ ID NO: 67507 - DNA, 80 bp, synthetic construct
  source 1..80: mol_type = other DNA
gagaatgcaatgtttaacaaggtggcgatgctaatttgtgaagcattgaattcaattaaagtcacgcagtctgatgttgc

SEQ ID NO: 67508 - DNA, 80 bp, synthetic construct
  source 1..80: mol_type = other DNA
cttttaggagtaataacaaaaacggaggtccactggagtttaatttgcttgatcagaggataatatggcaaaattggtac

SEQ ID NO: 67509 - DNA, 80 bp, synthetic construct
  source 1..80: mol_type = other DNA
ctatcatctatggaattgcaccaccaccacagttcagaaaacgttataatactagtgataattcaagaggtataaattat

SEQ ID NO: 67510 - DNA, 80 bp, synthetic construct
  source 1..80: mol_type = other DNA
gaaacacccatgtttaacaaagtagcagctttaatttgtgaagcacttaactcaattaaagttactcaatctgatcttgc

SEQ ID NO: 67511 - DNA, 80 bp, synthetic construct
  source 1..80: mol_type = other DNA
taatgttctttcgagagtagtttctgttagacatcttgaaaatttggttattagaaaagaaaattatcaagatgtacttt

SEQ ID NO: 67512 - DNA, 80 bp, synthetic construct
  source 1..80: mol_type = other DNA
tccactcgaaagaactgttattaaaatcagtgttaatagctattggtcaatcaaaggaaattgaaactactgctacagct

SEQ ID NO: 67513 - DNA, 80 bp, synthetic construct
  source 1..80: mol_type = other DNA
aaagtaacgtgaagagtgttcatgctactgattttgatttattggatcaaagaatcatttgccaggactggtatgcattc

SEQ ID NO: 67514 - DNA, 80 bp, synthetic construct
  source 1..80: mol_type = other DNA
gcatcttctatgaaacaaggtaataatcttgatgtgtgtaagaaattactctttcagaaaatgaaacaagagaagagtcc

SEQ ID NO: 67515 - DNA, 80 bp, synthetic construct
  source 1..80: mol_type = other DNA
catttaaaggattgtcaactgatcggaaaatggatgaagtttcacaaattggaatttaattcgctttcggttcaagaatg

SEQ ID NO: 67516 - DNA, 80 bp, synthetic construct
  source 1..80: mol_type = other DNA
gattgtcaactgatcggaaaatggatgaagtttcacaaattggaatttaattcgctttcggttcaagaatgatgatgacg

SEQ ID NO: 67517 - DNA, 80 bp, synthetic construct
  source 1..80: mol_type = other DNA
agcggttagctccttttaatgtatggtattgaatataccacagttctaacctttttgatatcattcattttacttaatta

SEQ ID NO: 67518 - DNA, 80 bp, synthetic construct
  source 1..80: mol_type = other DNA
aactccacacaagaagaaactttcctcacatcaactttatgtttatactatccaactgaagctgcaacagagataaatga

SEQ ID NO: 67519 - DNA, 80 bp, synthetic construct
  source 1..80: mol_type = other DNA
taattcttggaaagatacactttcacaattgtttttaactaaaggatggccttctggatccgtctactttaaagaatatg

SEQ ID NO: 67520 - DNA, 80 bp, synthetic construct
  source 1..80: mol_type = other DNA
gattacaatgtagtactgatgaaatatgacgccaatttacaattggatatgtctgagttggctgatctgatactaaatga

SEQ ID NO: 67521 - DNA, 80 bp, synthetic construct
  source 1..80: mol_type = other DNA
aataaaagtgtgtccgcttaatacacaaactcttggaattggctgtttaactactgatacaacaacatttgaggaagttg

SEQ ID NO: 67522 - DNA, 80 bp, synthetic construct
  source 1..80: mol_type = other DNA
gcaaaaagttaggaccacgagaaaatgtcgcagtaattcaagttggaggttccgacgttctcgacataacagctgatccc

SEQ ID NO: 67523 - DNA, 80 bp, synthetic construct
  source 1..80: mol_type = other DNA
gcaggagaattttctctccccacctttgattcactgaatattactgctgcatctttaaatgacgatggattggataatca

SEQ ID NO: 67524 - DNA, 80 bp, synthetic construct
  source 1..80: mol_type = other DNA
cctttgattcactgaatattactgctgcatctttaaatgacgatggattggataatcatactatactgctttactactca

SEQ ID NO: 67525 - DNA, 80 bp, synthetic construct
  source 1..80: mol_type = other DNA
aaaactgctactcaaggggaggtcaatgtgaccggtgtaataccacttacaacaacacccaccaaatctcattttgcaaa

SEQ ID NO: 67526 - DNA, 80 bp, synthetic construct
  source 1..80: mol_type = other DNA
aattttctctccccacctttgattcactgaatattactgctgcatctttaaatgaagatggattggataaccatactata

SEQ ID NO: 67527 - DNA, 80 bp, synthetic construct
  source 1..80: mol_type = other DNA
cctttaatgcaggagatttttctctccccacttttgactcattgaacattactgctgcatctttaaatgatgatggattg

SEQ ID NO: 67528 - DNA, 80 bp, synthetic construct
  source 1..80: mol_type = other DNA
gctctactactcgactgctgcttccagtttggctgtaacactgatgctagctatttttgttgtttatatggtctccaaaa

SEQ ID NO: 67529 - DNA, 80 bp, synthetic construct
  source 1..80: mol_type = other DNA
acatcgtcaaactcacctcaagtggtcaaaacagctcctcaaggggaggacaacgtcactggcgtgataccactgacaac

SEQ ID NO: 67530 - DNA, 80 bp, synthetic construct
  source 1..80: mol_type = other DNA
agccaatcttctcagaggatatgaaaatatcaggttatcaacccaaaacgttattgaagaatgctctggtccctactacc

SEQ ID NO: 67531 - DNA, 80 bp, synthetic construct
  source 1..80: mol_type = other DNA
cctacagacttgtatcctcaggatcttgccctaacgctaccaatcgaagcggatttttcgcaacaatggcttgggctgtc

SEQ ID NO: 67532 - DNA, 80 bp, synthetic construct
  source 1..80: mol_type = other DNA
acatcttcaaactcacctcatgtggtcaaaacagctactcaaggggaggtcaatgtgactggtgtgataccactatcaac

SEQ ID NO: 67533 - DNA, 80 bp, synthetic construct
  source 1..80: mol_type = other DNA
agagaaaactaaagaaaatgctgggtccctctgctgtagacatagggaatggatgcttcgaaaccaaactaaaagacggc

SEQ ID NO: 67534 - DNA, 80 bp, synthetic construct
  source 1..80: mol_type = other DNA
cagacctgcttagacaggatagctgccggcacctttaatgcaggagaattttctctccccacttttgattcattgaacat

SEQ ID NO: 67535 - DNA, 80 bp, synthetic construct
  source 1..80: mol_type = other DNA
acatcgtcaaactcaccacatgtcgtcaaaactgctactcaaggggaggtcaatgtgaccggtgtaataccactgacaac

SEQ ID NO: 67536 - DNA, 80 bp, synthetic construct
  source 1..80: mol_type = other DNA
gctctattactcaactgctgcttctagtttggctgtaacattaatgctagctatttttattgtttatatggtctccagag

SEQ ID NO: 67537 - DNA, 80 bp, synthetic construct
  source 1..80: mol_type = other DNA
gctttactactcaactgctgcctccagtttggctgtaacactgatgatagctatctttattgtttatatggtctccagag

SEQ ID NO: 67538 - DNA, 80 bp, synthetic construct
  source 1..80: mol_type = other DNA
ttcaaactcacctcatgtggtcaaaacagctactcaaggggaagtcaatgtgactggcgtgataccactgacaacaacac

SEQ ID NO: 67539 - DNA, 80 bp, synthetic construct
  source 1..80: mol_type = other DNA
atggattggataatcataccatactgctttactactcaactgctgcctccagtttggctgtaacactgatgatagctatc

SEQ ID NO: 67540 - DNA, 80 bp, synthetic construct
  source 1..80: mol_type = other DNA
ctgctgcttctagtttggctgtaacattaatgctagctatttttattgtttatatggtctccagagacaacgtttcatgc

SEQ ID NO: 67541 - DNA, 80 bp, synthetic construct
  source 1..80: mol_type = other DNA
tgcactgggataacatcgtcaatctcaccacatgtcgtcaaaactgctactcaaggggaggtcaatgtgaccggtgtaat

SEQ ID NO: 67542 - DNA, 80 bp, synthetic construct
  source 1..80: mol_type = other DNA
atggattggataaccatactatactgctctattactcaactgctgcttctagtttggctgtaacattaatgctagctatt

SEQ ID NO: 67543 - DNA, 80 bp, synthetic construct
  source 1..80: mol_type = other DNA
atgcaagcactcagatggagacagtatcactaataactatactactagtagcaacagtaagcaatgcagataaaatctgc

SEQ ID NO: 67544 - DNA, 80 bp, synthetic construct
  source 1..80: mol_type = other DNA
actcaactgctgcttctagtctggccgtaacattaatgctagctatttttattgtttatatggtctccagagacaacgtt

SEQ ID NO: 67545 - DNA, 80 bp, synthetic construct
  source 1..80: mol_type = other DNA
attgtactactcatggtagtaacatccaatgcagatagaatctgcactgggataacatcgtcagactcaccacatgtcgt

SEQ ID NO: 67546 - DNA, 80 bp, synthetic construct
  source 1..80: mol_type = other DNA
ccatactgctttactactcaactgctgcctccagtttggctgtaacactgatgatagctatctttgttgtttatatggtc

SEQ ID NO: 67547 - DNA, 80 bp, synthetic construct
  source 1..80: mol_type = other DNA
gatcgaatctgcactgggataacatcgtcaaactcaccacatgttgttaaaactgctactcaaggggaggtcaatgtgac

SEQ ID NO: 67548 - DNA, 80 bp, synthetic construct
  source 1..80: mol_type = other DNA
ccatactattctgctccattactccactgctgcttctagtttggctgtaacattaatgctagctatttttattgtttata

SEQ ID NO: 67549 - DNA, 80 bp, synthetic construct
  source 1..80: mol_type = other DNA
aatcatactatactgctttactactcaactgctgcctccagtttggctgtaacactgatgatagctatctttgttgttta

SEQ ID NO: 67550 - DNA, 80 bp, synthetic construct
  source 1..80: mol_type = other DNA
caaccactcaaaatggagacagcatcactgataactatactactagtagtaacagtaagcaatgcagataagatctgcat

SEQ ID NO: 67551 - DNA, 80 bp, synthetic construct
  source 1..80: mol_type = other DNA
ctgggccatgtccaatgggtcttgcagatgcaacatttgtatataatggcagcggtagcgaggattcattatattgtatg

SEQ ID NO: 67552 - DNA, 80 bp, synthetic construct
  source 1..80: mol_type = other DNA
gtgaccggtgtaataccactgacaacaacacccaccaaatctcattttgcaaatctcaaaggaacagaaaccagggggaa

SEQ ID NO: 67553 - DNA, 80 bp, synthetic construct
  source 1..80: mol_type = other DNA
aactgctgcctccagtttggctgtaacactgatgatagctatctttgttgtttatatggtctccagagacaatgtttctt

SEQ ID NO: 67554 - DNA, 80 bp, synthetic construct
  source 1..80: mol_type = other DNA
agaacaaaaatgcaacgaacccattaacagtagaggtaccatacatttgtgcagaaggagaagaccaaattactgtttgg

SEQ ID NO: 67555 - DNA, 80 bp, synthetic construct
  source 1..80: mol_type = other DNA
ctactcatggtagtaacatccaatgcagatcgaatctgcactgggataacatcttcaaactcacctcatgtggtcaaaac

SEQ ID NO: 67556 - DNA, 80 bp, synthetic construct
  source 1..80: mol_type = other DNA
ctgggataacatcgtcaaactcaccacatgttgtcaaaactgctactcagggggaggtcaatgtgactggtgtaatacca

SEQ ID NO: 67557 - DNA, 80 bp, synthetic construct
  source 1..80: mol_type = other DNA
ggatgtgttccaatggatcgttacaatgcagaatttgcatttaaatttgtgagttcaaattgtagttaaaaacacccttg

SEQ ID NO: 67558 - DNA, 80 bp, synthetic construct
  source 1..80: mol_type = other DNA
gtttggctgtaacactgatgatagctatctttgttgtttatatggtctccagagacaatgtttcttgctccatctgtcta

SEQ ID NO: 67559 - DNA, 80 bp, synthetic construct
  source 1..80: mol_type = other DNA
cttctagtttggctgtaacattgatgctagctatttttattgtttatatggtctccagagacaacgtttcttgctccatc

SEQ ID NO: 67560 - DNA, 80 bp, synthetic construct
  source 1..80: mol_type = other DNA
ataattgtactactcatggtagtaacatccaatgcagatcgaatctgcactgggataacattctcaaactcacctcatgt

SEQ ID NO: 67561 - DNA, 80 bp, synthetic construct
  source 1..80: mol_type = other DNA
aaatgcctcaactgcacagatctggatgtagccttgggcaggccaatttgcacggggaaaataccctctgccagggtttc

SEQ ID NO: 67562 - DNA, 80 bp, synthetic construct
  source 1..80: mol_type = other DNA
gacctgtctgcacagaatagctgctggtacctttgatccaggagaattttctctccccacttttgattcactgaatatta

SEQ ID NO: 67563 - DNA, 80 bp, synthetic construct
  source 1..80: mol_type = other DNA
ctgctgcatctttaaaacacgatggattggataatcatactatactgctttactactcaactgctgcctccagtttggct

SEQ ID NO: 67564 - DNA, 80 bp, synthetic construct
  source 1..80: mol_type = other DNA
aatctgcactgggataacatcttcaaactcaccccatgtggtcaaaactgctactcaaggggaagtcaatgtgactggtg

SEQ ID NO: 67565 - DNA, 80 bp, synthetic construct
  source 1..80: mol_type = other DNA
tggctgtaacattgatgatagctattttcattgtttatatgatttccagagacaatgtttcttgctccatctgtctataa

SEQ ID NO: 67566 - DNA, 80 bp, synthetic construct
  source 1..80: mol_type = other DNA
aaaacgataaaaacagaacagcaacaaattcattaacaatagaagtaccatacatttgtaaggaaggagaagaccaaatt

SEQ ID NO: 67567 - DNA, 80 bp, synthetic construct
  source 1..80: mol_type = other DNA
tggctgtaacattaatgctagctatttttattgtttatatggtctccagagacaacgtttcatgctctatctgtctataa

SEQ ID NO: 67568 - DNA, 80 bp, synthetic construct
  source 1..80: mol_type = other DNA
aaaacaatgcagcgacccatctattaacaatagaagtaccatttttttgtacaggaggagaacaccatattgccgtgtgg

SEQ ID NO: 67569 - DNA, 80 bp, synthetic construct
  source 1..80: mol_type = other DNA
atccccagatgttctcctcatctgccaacggaacgaccacacattacgtttcacagattggtggcttcccaaatcaaaca

SEQ ID NO: 67570 - DNA, 80 bp, synthetic construct
  source 1..80: mol_type = other DNA
agttgccaaaccttctccgaggatacgaacatatcaggttatcaactcacaacgttatcaatgcagaaaatgcaccagga

SEQ ID NO: 67571 - DNA, 80 bp, synthetic construct
  source 1..80: mol_type = other DNA
aatactagaactagatgagaaagtggatgatctcagagctgatacaataagctcacaaatagcagaagcagtccattttt

SEQ ID NO: 67572 - DNA, 80 bp, synthetic construct
  source 1..80: mol_type = other DNA
gacctgtctcgtcagaatagctgttggtacctctgatgcaggagaattttctctccccacctttgattcagtgaataggg

SEQ ID NO: 67573 - DNA, 80 bp, synthetic construct
  source 1..80: mol_type = other DNA
ggaatgcatctttaaatgacgatggattggataatcatagtatactcctttactactcaaatgctgcctccagtttggct

SEQ ID NO: 67574 - DNA, 80 bp, synthetic construct
  source 1..80: mol_type = other DNA
agaaagcagaagaaaatgctcggcccgttaacattagagatatggaaacaagtcttcaaaaccaaacacaagggcaacca

SEQ ID NO: 67575 - DNA, 80 bp, synthetic construct
  source 1..80: mol_type = other DNA
gacctgtctccacagaatagctgttggtacaacacccgcaggagaattttttctcaccacctttgattcactgaatatgg

SEQ ID NO: 67576 - DNA, 80 bp, synthetic construct
  source 1..80: mol_type = other DNA
accttctccgaggatacgaacatgtcaggttatcaactcacaacgttattgaagaaggaattgttacaggaggaccctac

SEQ ID NO: 67577 - DNA, 80 bp, synthetic construct
  source 1..80: mol_type = other DNA
cgatgtctaaaactcctgcacacctatcatacttttgcggtttcttcggagctattgctggtttcttagaaggaggatgg

SEQ ID NO: 67578 - DNA, 80 bp, synthetic construct
  source 1..80: mol_type = other DNA
aaatgccccaactgcacagatctggacgtatccttgggcagaccaaaatgcacggggaaaataccctcggcaagagtttc

SEQ ID NO: 67579 - DNA, 80 bp, synthetic construct
  source 1..80: mol_type = other DNA
ttacgcagcaaaaagaccttgcttcccaaatcaaacagaagacggaggactaccacaaagtggtagaattgttgttgatt

SEQ ID NO: 67580 - DNA, 80 bp, synthetic construct
  source 1..80: mol_type = other DNA
tagctatttttattgtttatatggtctccagagacaacgtttcatgctccatctgtctttaaggaaggaaggtaaaaaaa

SEQ ID NO: 67581 - DNA, 80 bp, synthetic construct
  source 1..80: mol_type = other DNA
gacctgtctcgacagaatagctgctggtacctttgatgcaggaggattttctcaccccacctttgattcaaagaatgtta

SEQ ID NO: 67582 - DNA, 80 bp, synthetic construct
  source 1..80: mol_type = other DNA
ctgctgcatctttaaatgacgatggattggatagtggtactatactgctttactactcaactgatgtctccaatttggct

SEQ ID NO: 67583 - DNA, 80 bp, synthetic construct
  source 1..80: mol_type = other DNA
ccccaggtgttcacctcatctgccaacggagtgaatgcagatttcgtttcacagattcgtggcttcccaaatcaaacaga

SEQ ID NO: 67584 - DNA, 80 bp, synthetic construct
  source 1..80: mol_type = other DNA
gaatgattgcaggttggaacggatacacatcccatggggcacatggagtagcggtggtagcagaccttaagagcactcaa

SEQ ID NO: 67585 - DNA, 80 bp, synthetic construct
  source 1..80: mol_type = other DNA
tagctatctttgttgtttatatggtctccagagacaatgtttcttgctccatctgtctataagggaagttaagccctgta

SEQ ID NO: 67586 - DNA, 80 bp, synthetic construct
  source 1..80: mol_type = other DNA
aaggtggggacctcaggatcttgccctaacgttgctaatgggaacggcttcttcaacacaatggcttgggttatcccaaa

SEQ ID NO: 67587 - DNA, 80 bp, synthetic construct
  source 1..80: mol_type = other DNA
acaaaatgaaggcaataattgtactactcatggtagtaacatccaatgcagatcgaatctgcactgggataacatcttca

SEQ ID NO: 67588 - DNA, 80 bp, synthetic construct
  source 1..80: mol_type = other DNA
tatagacctcctgcaaaactattaaaggaaaggggtttcttcggagctattgctggtttcctagaaggaggatgggaagg

SEQ ID NO: 67589 - DNA, 80 bp, synthetic construct
  source 1..80: mol_type = other DNA
ggttggcacggatacacatctcacggagcacatggagtggcagtggcggcagaccttaagagtacacaagaagctataaa

SEQ ID NO: 67590 - DNA, 80 bp, synthetic construct
  source 1..80: mol_type = other DNA
ggaggtcaatgtgactggtgtgataccactgacaacaacaccaacaaaatcttattttgcaaatctcaaaggaacaagga

SEQ ID NO: 67591 - DNA, 80 bp, synthetic construct
  source 1..80: mol_type = other DNA
tgtttatatggtctccagagacaacgtttcatgctccatctgtctataaggaagattaggccttgtattttcctttattg

SEQ ID NO: 67592 - DNA, 80 bp, synthetic construct
  source 1..80: mol_type = other DNA
cggactgtctcaactgtacagatctggatgtggccttgggcaggccaatgtgtgtggggaccacaccttctgcgaaagct

SEQ ID NO: 67593 - DNA, 80 bp, synthetic construct
  source 1..80: mol_type = other DNA
tcaatactccacgaagtcagacctgttacatccgggtgctttcctataatgcacgacagaacaaaaatcaggcaactacc

SEQ ID NO: 67594 - DNA, 80 bp, synthetic construct
  source 1..80: mol_type = other DNA
agacttggaacctcaggatcttgccctaacgctaccagtaaaatcggatttttcgcaacaatggcttgggctgtcccaaa

SEQ ID NO: 67595 - DNA, 80 bp, synthetic construct
  source 1..80: mol_type = other DNA
aggggaagaccaaattactgtttgggggttccattcagatgacaaaacccaaatgaagaacctctatggagactcaaatc

SEQ ID NO: 67596 - DNA, 80 bp, synthetic construct
  source 1..80: mol_type = other DNA
acatgatgcaaaaacctgggaaaacaggaacaattgtctatcaaagaggtgttttgttgcctcaaaaggtgtggtgcgcg

SEQ ID NO: 67597 - DNA, 80 bp, synthetic construct
  source 1..80: mol_type = other DNA
aagccttactacacgggagaacatgcaaaagccataggaaattgcccaatatgggtaaaaacacctttgaagcttgccaa

SEQ ID NO: 67598 - DNA, 80 bp, synthetic construct
  source 1..80: mol_type = other DNA
cgtttcatgctccatctgtctataaggaagattaggccttgtattttcctttgttgtagtgcttgtttgcttgtcatcat

SEQ ID NO: 67599 - DNA, 80 bp, synthetic construct
  source 1..80: mol_type = other DNA
gtttcttgctccatctgtctataagggaagttaagccctgtattttcctttactgtagtgcttgtttgcttgtcatcata

SEQ ID NO: 67600 - DNA, 80 bp, synthetic construct
  source 1..80: mol_type = other DNA
gacaatgtttcttgctccatctgtctataaggaaagttaaaccctgtattttcctttgctgtagtgcttgtttgcttgtt

SEQ ID NO: 67601 - DNA, 80 bp, synthetic construct
  source 1..80: mol_type = other DNA
ccagagacaatgtttcttgctccatctgtctataaggaaaattaagccctgtattttcctttattgtagtgcttgtttgc

SEQ ID NO: 67602 - DNA, 80 bp, synthetic construct
  source 1..80: mol_type = other DNA
cttgctccatctgtctataagggaagttaagccctgtattttcctttattgtagtgcttgtttgcttgttaccattacaa

SEQ ID NO: 67603 - DNA, 80 bp, synthetic construct
  source 1..80: mol_type = other DNA
ctccatctgtctataaggaaggttaggccttgtattttcctttattgtagtgcttgtttgcttgtcatcatacaaagaaa

SEQ ID NO: 67604 - DNA, 80 bp, synthetic construct
  source 1..80: mol_type = other DNA
ccatctgtctataagggaagttaagccctgtattttcctttattgtagtgcttgttcacttgtcgtcatacaaagtaaac

SEQ ID NO: 67605 - DNA, 80 bp, synthetic construct
  source 1..80: mol_type = other DNA
atctgtctataaggaaagttaaaccctgtattttcctttgttgtagtgcttgtttgcttgtcatcattacaaagaaacga

SEQ ID NO: 67606 - DNA, 80 bp, synthetic construct
  source 1..80: mol_type = other DNA
aaaaatctcaactcgttgagtgagctagaagtaaagaatcttcaaaggctaagtggtgccatggatgaactccataatga

SEQ ID NO: 67607 - DNA, 80 bp, synthetic construct
  source 1..80: mol_type = other DNA
ctataaggaaggttaggccttgtattttcctttattgtagtgcttgtttgcttgtcatcattacaaagaaacgttattga

SEQ ID NO: 67608 - DNA, 80 bp, synthetic construct
  source 1..80: mol_type = other DNA
ctgtctataggggaagtcaagccctgtattttcctttattgtaatgcttgtttgcttgttgtcattacagagaaacgtta

SEQ ID NO: 67609 - DNA, 80 bp, synthetic construct
  source 1..80: mol_type = other DNA
ctgtctatagggaaaattgagccctgtattttcctttattgtggtgcttgtttgcttgttaccattacagagaaacgtta

SEQ ID NO: 67610 - DNA, 80 bp, synthetic construct
  source 1..80: mol_type = other DNA
aaaaatctcaattctttgagtgaggccaaagtaaagaatcttcaaaggctaagtggtgccatggatgaactccacaacga

SEQ ID NO: 67611 - DNA, 80 bp, synthetic construct
  source 1..80: mol_type = other DNA
aatactcgagctggatgaaaaagtggatgatctcagagctgacaccataagctcacaaatagaacttgcagtcttgcttt

SEQ ID NO: 67612 - DNA, 80 bp, synthetic construct
  source 1..80: mol_type = other DNA
agagacaacgtttcatgctccatctgtctataaggaaggttaggccttgtattttcctttattgtagtgcttgtttgctt

SEQ ID NO: 67613 - DNA, 80 bp, synthetic construct
  source 1..80: mol_type = other DNA
tgccaatgcagagcattttctaatatccacaaaatgaaggcaataattgtactactcatggtagtaacatccaatgcaga

SEQ ID NO: 67614 - DNA, 80 bp, synthetic construct
  source 1..80: mol_type = other DNA
agggacaacaaaacagcaacgaatccactaacagtagaagtaccatacatttgtacgaaaggagaagaccaaattactgt

SEQ ID NO: 67615 - DNA, 80 bp, synthetic construct
  source 1..80: mol_type = other DNA
cgttttcaaaggacaactacaaaaatgcaacgaacccacaaacagtggaagtaccatacatttgtacagaaggggaagac

SEQ ID NO: 67616 - DNA, 80 bp, synthetic construct
  source 1..80: mol_type = other DNA
agagacaatgtttcttgctccatctgtctataagggaagttaaaccctgtattttccttcattgtggtgattgtttgctt

SEQ ID NO: 67617 - DNA, 80 bp, synthetic construct
  source 1..80: mol_type = other DNA
gtctataagggaaattaagccctgtattttcctttattgtagtgcttgtttgcttgttatcattacaaagaaacgttatt

SEQ ID NO: 67618 - DNA, 80 bp, synthetic construct
  source 1..80: mol_type = other DNA
caacgtttcatgctccatctgtctataaggaagattaggccttgtattttccttcattgtagttttgtgttttcgctaaa

SEQ ID NO: 67619 - DNA, 80 bp, synthetic construct
  source 1..80: mol_type = other DNA
aacgtttcatgctccatctgtctataaggaagattaggccttgtattttccttcattgtattattttgtgtgtctgcata

SEQ ID NO: 67620 - DNA, 80 bp, synthetic construct
  source 1..80: mol_type = other DNA
tctgtagggaaagttgagccctgtattttcctttattgtagtgcttgtttgcttgttaccattgcagaaaacgttattga

SEQ ID NO: 67621 - DNA, 80 bp, synthetic construct
  source 1..80: mol_type = other DNA
ttttcctttattgtagtgcttgtttgcttgttaccattacaaaaaacggttattgaaaaatgctcttgttactactaata

SEQ ID NO: 67622 - DNA, 80 bp, synthetic construct
  source 1..80: mol_type = other DNA
aaaaatctcaactctttgagtgagctttgtaaaacgacggccagtagcagaagcggtgccatggatgaactccacaacga

SEQ ID NO: 67623 - DNA, 80 bp, synthetic construct
  source 1..80: mol_type = other DNA
accttctccgaggatacgaacatgtcaggttatcaactcaaaacgttatcaatacagaagatgcaccaggaggaccctac

SEQ ID NO: 67624 - DNA, 80 bp, synthetic construct
  source 1..80: mol_type = other DNA
tataagggaagttaagccctgtgttttcctttattgtggtgcttgtttgcttgttgccattacaaagaaacgttattgaa

SEQ ID NO: 67625 - DNA, 80 bp, synthetic construct
  source 1..80: mol_type = other DNA
ccccagaagttcacctcatctgctaacggagtgaccacacactacgtttcacagattggtggcttcccaaatcaaacaga

SEQ ID NO: 67626 - DNA, 80 bp, synthetic construct
  source 1..80: mol_type = other DNA
gtgacactgatgatagctatctttgttgtttatatggtctccagagacaatgtttcttgctccatttgtctataaggaaa

SEQ ID NO: 67627 - DNA, 80 bp, synthetic construct
  source 1..80: mol_type = other DNA
aggaaggttaggcctcttattttcctttattgtagtgcctgtttgcttgtcatcattacaaagaaacgttattgaaaaat

SEQ ID NO: 67628 - DNA, 80 bp, synthetic construct
  source 1..80: mol_type = other DNA
aggacaactacaaaaatgcaacgaacccacaaacagtggaagtaccatacatctgtacagaaggggaagaccaaattact

SEQ ID NO: 67629 - DNA, 80 bp, synthetic construct
  source 1..80: mol_type = other DNA
aggaaagttaagccttgtattttcctttattgtagtgcttgtttgtttgttgtcattacaaagaaacgttattgaaaaat

SEQ ID NO: 67630 - DNA, 80 bp, synthetic construct
  source 1..80: mol_type = other DNA
agacttggaacctcagaatcttgccctttcggaagctccaattctttcttcgcaacaatggcttgggctgtcccacatca

SEQ ID NO: 67631 - DNA, 80 bp, synthetic construct
  source 1..80: mol_type = other DNA
atcaggaacatatacgaatccactaacagtagaagtaccatacatttgcacaaaaggagaagaccaaattactgtttggg

SEQ ID NO: 67632 - DNA, 80 bp, synthetic construct
  source 1..80: mol_type = other DNA
cctcaaaagttcacctcatctgccaatggagtaaccacacattatgtttctcagattggtgacttcccaaatcaaacaga

SEQ ID NO: 67633 - DNA, 80 bp, synthetic construct
  source 1..80: mol_type = other DNA
aaacagcaacgaatccattaacagtagaagtaccatacatttgcacaaaaggagaagaccaaattactgtttgggggttc

SEQ ID NO: 67634 - DNA, 80 bp, synthetic construct
  source 1..80: mol_type = other DNA
ttttgtaaagagcattttctaatatccacaaaatgaaggcaataattgtactactcatggtagtaacatccaatgcagat

SEQ ID NO: 67635 - DNA, 80 bp, synthetic construct
  source 1..80: mol_type = other DNA
tgtgataccactaacaacaacaccaacaaaatcttaatatccacaaaatgaaggcaataattgtactactcatggtagta

SEQ ID NO: 67636 - DNA, 80 bp, synthetic construct
  source 1..80: mol_type = other DNA
aagattaggccttgtatttcctttgttgcagtcttgctttccaacgaaggaataataaacagtgaagatgagcatctatt

SEQ ID NO: 67637 - DNA, 80 bp, synthetic construct
  source 1..80: mol_type = other DNA
ggttggcacggatacacatcccatggggcacatggagtagcggtggcagcagaccttaagagcactcaagaggccataaa

SEQ ID NO: 67638 - DNA, 80 bp, synthetic construct
  source 1..80: mol_type = other DNA
cacggggaaaataccctcggcaagagtttcaatactccatgaagtcagacctgttacatctgggtgctttcctataatgc

SEQ ID NO: 67639 - DNA, 80 bp, synthetic construct
  source 1..80: mol_type = other DNA
aaaattggaacctcagggtcttgccctaacattaccaatggaaacggatttttcgcaacaatggcttgggccgtcccaaa

SEQ ID NO: 67640 - DNA, 80 bp, synthetic construct
  source 1..80: mol_type = other DNA
aggagaagaccaaattaccgtttgggggttccactctgacaacgaggcccaaatggcaaagctctatggggactcaaagc

SEQ ID NO: 67641 - DNA, 80 bp, synthetic construct
  source 1..80: mol_type = other DNA
acatggtgcaaaaatctgggaaaacaggaacaattacctatcaaaggggtattttattgcctcaaaaggtgtggtgcgca

SEQ ID NO: 67642 - DNA, 80 bp, synthetic construct
  source 1..80: mol_type = other DNA
ttttgaaaaatggaggccagtgcagagcattttctaatatccacaaaatgaaggcaataattgtactactcatggtagta

SEQ ID NO: 67643 - DNA, 80 bp, synthetic construct
  source 1..80: mol_type = other DNA
agcagaagcagggggttaataatgtttttctcattactcttggtgttgggcctcacagaggctgaaaaaataaagatatg

SEQ ID NO: 67644 - DNA, 80 bp, synthetic construct
  source 1..80: mol_type = other DNA
tgcagtggatcaagcttgcttgagcactccagggtgcatgttgatccaaaagcaaaagccatacattggagaagctgatg

SEQ ID NO: 67645 - DNA, 80 bp, synthetic construct
  source 1..80: mol_type = other DNA
atcaccatggagatcaagaaatgagggagttgctgtcaggactggactatgaagctagatgcatatcacaatcagggtgg

SEQ ID NO: 67646 - DNA, 80 bp, synthetic construct
  source 1..80: mol_type = other DNA
gtgaatgaaaccagtccttttacggagaaatacctccttcctcccaaatttggaagatgccctttggctgcaaaggaaga

SEQ ID NO: 67647 - DNA, 80 bp, synthetic construct
  source 1..80: mol_type = other DNA
atccattccaaaaatcccagatggccttctaattcccaccagtggaaccgataccactgtaaccaaacctaagagcagaa

SEQ ID NO: 67648 - DNA, 80 bp, synthetic construct
  source 1..80: mol_type = other DNA
tttttggaatcgatgacctcattattggtttgctctttgttgcaatcgttgaaacaggaattggaggctatctgcttgga

SEQ ID NO: 67649 - DNA, 80 bp, synthetic construct
  source 1..80: mol_type = other DNA
agtagaaaagaatcaggaggaggtgtgacaaaagaatcagctgaaaaagggtttgagaaaattggaaatgacatacaaat

SEQ ID NO: 67650 - DNA, 80 bp, synthetic construct
  source 1..80: mol_type = other DNA
tttaaaatcttctataaatatcgcaatagaaaaactaaatgacagaatttctcatgatgagcaagccatcagagatctaa

SEQ ID NO: 67651 - DNA, 80 bp, synthetic construct
  source 1..80: mol_type = other DNA
tgtttgagcttgttaagcccaaagctggagcctctgtcttgaatcaaagtacatggattggctttggagattcaaggact

SEQ ID NO: 67652 - DNA, 80 bp, synthetic construct
  source 1..80: mol_type = other DNA
ctttagaaattgaaaatgcaagatctgaagctttattgggagaattgggaataataagagccttattggtaggaaatata

SEQ ID NO: 67653 - DNA, 80 bp, synthetic construct
  source 1..80: mol_type = other DNA
agcataggattacaggaatctttatgggaactagcttcagaaataacaaatagagcaggagacctagcagttgaagtctc

SEQ ID NO: 67654 - DNA, 80 bp, synthetic construct
  source 1..80: mol_type = other DNA
cccaggttgctggataattgacaataacatttgtgatcaaagctgtcaaaattttattttcaagttcaacgaaactgcac

SEQ ID NO: 67655 - DNA, 80 bp, synthetic construct
  source 1..80: mol_type = other DNA
ctgttccaaccattccccctcttgacacaaaaattgatctgcaatcagatcctttttactggggaagcagcttgggctta

SEQ ID NO: 67656 - DNA, 80 bp, synthetic construct
  source 1..80: mol_type = other DNA
gcaataactgctactatttcattggcagctttggtgatctctgggatcgccatctgcagaactaaatgattgagacaatt

SEQ ID NO: 67657 - DNA, 80 bp, synthetic construct
  source 1..80: mol_type = other DNA
gacaattttgaaaaatggataatgtgttggtcaatattttgtacagttttataaaaaacaaaaatccccttgctactgct

SEQ ID NO: 67658 - DNA, 80 bp, synthetic construct
  source 1..80: mol_type = other DNA
gacaaaagcaattcagcttttcctaggtctgctgatgtttcagcaaaaactgctgataagtttcgttctttgtctggtgg

SEQ ID NO: 67659 - DNA, 80 bp, synthetic construct
  source 1..80: mol_type = other DNA
atccttaatgttgagtatgtttggcccacctgggaaggtagactacctttaccaaggatgtggaaaacataaagtttttt

SEQ ID NO: 67660 - DNA, 80 bp, synthetic construct
  source 1..80: mol_type = other DNA
atgaaggagttaactggagtccacatgctgctataaattgttacagaaaaaattggactgatatcaaactgaatttccag

SEQ ID NO: 67661 - DNA, 80 bp, synthetic construct
  source 1..80: mol_type = other DNA
aaaaacatttatgaattggcttcacaatcacattgcatgagcttggtgaatgccttggacaaaactattcctttacaagt

SEQ ID NO: 67662 - DNA, 80 bp, synthetic construct
  source 1..80: mol_type = other DNA
gactgctgggactgcaggaaattgcaacaacagcttcttaaaaaatccagcattgtacacacaagaagtcaagccttcag

SEQ ID NO: 67663 - DNA, 80 bp, synthetic construct
  source 1..80: mol_type = other DNA
aaaacaaatgtgggaaagaaaatcttgctttcttcacacttccaacccaatttggaacctatgagtgcaaactgcatctt

SEQ ID NO: 67664 - DNA, 80 bp, synthetic construct
  source 1..80: mol_type = other DNA
gtggcttcttgctatttcatctatgatagtaaagaagtgtacaataaaagaggatgtgacaactactttcaagtgatcta

SEQ ID NO: 67665 - DNA, 80 bp, synthetic construct
  source 1..80: mol_type = other DNA
ccttcaaaagcaagtgaacagtagcttcagcctacacaatggcttcggaggaaatttgtatgccacagaagaaaaaagaa

SEQ ID NO: 67666 - DNA, 80 bp, synthetic construct
  source 1..80: mol_type = other DNA
tgattcatctggaaaagtcgttgggggactagataacagggtatcaccttacacagggaattctggagacaccccaacaa

SEQ ID NO: 67667 - DNA, 80 bp, synthetic construct
  source 1..80: mol_type = other DNA
tgcaatgtgacatgctccagctgaaacctggaagatattcagtaagaagctctccaagattccttttaatgcctgaaaga

SEQ ID NO: 67668 - DNA, 80 bp, synthetic construct
  source 1..80: mol_type = other DNA
agttattgctttgacatgaaagaaaaaggaccagtcactgctgtccaatccatttggggaaaaggcagagaatctgacta

SEQ ID NO: 67669 - DNA, 80 bp, synthetic construct
  source 1..80: mol_type = other DNA
gtagcttcagcctacacaatggctttggaggaaatttgtatgccacagaagaaaaaagaatgtttgagcttgttaagccc

SEQ ID NO: 67670 - DNA, 80 bp, synthetic construct
  source 1..80: mol_type = other DNA
agttcaatgaaactgcacctgttccaaccattcctcctcttgacacaaaaattgatctgcaatcagatcctttttactgg

SEQ ID NO: 67671 - DNA, 80 bp, synthetic construct
  source 1..80: mol_type = other DNA
gaactttattttcaagttcaatgaaactgcgcctgttccagccattcctcctcttgacacaaaaattgatctgcaatcag

SEQ ID NO: 67672 - DNA, 80 bp, synthetic construct
  source 1..80: mol_type = other DNA
ctttggaggaaatttgtatgccacagaagaaaaaagaatgtttgagcttgttaagcccaaaactggagcctctgtcttga

SEQ ID NO: 67673 - DNA, 80 bp, synthetic construct
  source 1..80: mol_type = other DNA
tcttgacacaaaaattgatctgcaatcagatcctttttactggggaagcagcttgggcttagcaataactgctgctattt

SEQ ID NO: 67674 - DNA, 80 bp, synthetic construct
  source 1..80: mol_type = other DNA
tccccctcttgacacaaaagttgatctgcaatcagatcctttctactggggaagcagcttaggcttagcaataactgctg

SEQ ID NO: 67675 - DNA, 80 bp, synthetic construct
  source 1..80: mol_type = other DNA
atcagatcctttttactggggaagcagcttgggcttagcaataactgctgctatttcattggcagctttggtgatctctg

SEQ ID NO: 67676 - DNA, 80 bp, synthetic construct
  source 1..80: mol_type = other DNA
taactaaaggggttgcaggaaattgcaacgacagcttcttaaaaaatccagcattgtacacacaagaagtaaaaccttca

SEQ ID NO: 67677 - DNA, 80 bp, synthetic construct
  source 1..80: mol_type = other DNA
gaaaaaataaagatatgccttcaaaagcaagtgaacagtagcttcagcctacacaatggcttcggaggaaatttgtatgc

SEQ ID NO: 67678 - DNA, 80 bp, synthetic construct
  source 1..80: mol_type = other DNA
atgttgggcctcacagaggctgaaaaaataaagatatgccttcaaaagcaagtgaatagtagcttcagcctacacaatgg

SEQ ID NO: 67679 - DNA, 80 bp, synthetic construct
  source 1..80: mol_type = other DNA
tgactaaaggagttgcaaaaaattgcaacaacagcttcttaaaaaatccagcattgtacacacaaaaagtcaaaccttta

SEQ ID NO: 67680 - DNA, 80 bp, synthetic construct
  source 1..80: mol_type = other DNA
atgtttttttcattactcttggtgttgggcctcacagaggctgaaaaaataaagatatgccttcaaaagcaagtgaacag

SEQ ID NO: 67681 - DNA, 80 bp, synthetic construct
  source 1..80: mol_type = other DNA
cattggcagctttggtgatctctgggatcgccatctgcagaactaaatgattaggacaattttgaataatgaatgatata

SEQ ID NO: 67682 - DNA, 80 bp, synthetic construct
  source 1..80: mol_type = other DNA
gcagctttggtgatctctgggatcgccatctgcagaactaaatgatcaggacaattttgaaaaatggataatatattagt

SEQ ID NO: 67683 - DNA, 80 bp, synthetic construct
  source 1..80: mol_type = other DNA
cttggtgtttggcctcacagaggctgaaaaaataaaaatatgccttcaaaagcaagtgaacagtagcttcagcctacaca

SEQ ID NO: 67684 - DNA, 80 bp, synthetic construct
  source 1..80: mol_type = other DNA
atttcattggcagctttggtgatctctgggatcgccatctgcagaactaaatgattaggacaatttgaataataactttg

SEQ ID NO: 67685 - DNA, 80 bp, synthetic construct
  source 1..80: mol_type = other DNA
agctttggtgatctctgggatcgccatctgcagaactaaatgattaggacaattttgaataatgaatgaaatttttgaat

SEQ ID NO: 67686 - DNA, 80 bp, synthetic construct
  source 1..80: mol_type = other DNA
ctgggatcgccatctgcagaactaaatgattaagacaattttcaaaaatggataatatattagtcaatattttgtacagt

SEQ ID NO: 67687 - DNA, 80 bp, synthetic construct
  source 1..80: mol_type = other DNA
tttttcatactcttggtgtttggcctcacagaggctgaaaaaataaagatatgccttcaaaagcaagtgaatagtagctt

SEQ ID NO: 67688 - DNA, 80 bp, synthetic construct
  source 1..80: mol_type = other DNA
tcgccatctgcagaactaaatgattgggacaattttgaaaaatggataatgtattagtcaatattttgtacagctttata

SEQ ID NO: 67689 - DNA, 80 bp, synthetic construct
  source 1..80: mol_type = other DNA
atctgcagaactaaatgattaggacaattttgaataatgaatgatatattgatcaatattttgtacagttttataaaaaa

SEQ ID NO: 67690 - DNA, 80 bp, synthetic construct
  source 1..80: mol_type = other DNA
agaactaaatgattgggacaattttgaaaaatggataatgtattagtcaatattttgtacagctttataaaaaacaaaaa

SEQ ID NO: 67691 - DNA, 80 bp, synthetic construct
  source 1..80: mol_type = other DNA
ctgccgaactaaatgattaagacaattttgaaaaatggataatatattagtcaacattttgtacaggtttatataaaaaa

SEQ ID NO: 67692 - DNA, 80 bp, synthetic construct
  source 1..80: mol_type = other DNA
ctaaatgattaagacaattttgaaaaatggataatatattagtcaacattttgtacaagtttataaaaaacaaaaaaccc

SEQ ID NO: 67693 - DNA, 80 bp, synthetic construct
  source 1..80: mol_type = other DNA
tggtgtggagatataaagaccacaattatgcctgaatttgactcgatggagaaagatattgccctttctagggagagact

SEQ ID NO: 67694 - DNA, 80 bp, synthetic construct
  source 1..80: mol_type = other DNA
gtcattttgtcaacatagagatgaaataaaaaactacattgtttctctgccggtcccggaaaaaaaaacccgtttttccg

SEQ ID NO: 67695 - DNA, 80 bp, synthetic construct
  source 1..80: mol_type = other DNA
gatggagaaggcaaagcagaacttgcagaaaaattacactgttggttcggtgggaaagaatttgacctagactctgcctt

SEQ ID NO: 67696 - DNA, 80 bp, synthetic construct
  source 1..80: mol_type = other DNA
aacatggaggtattgaatgaccacataataattgaggggctttctgccgaagagataataaaaatgggtgaaacagtttt

SEQ ID NO: 67697 - DNA, 80 bp, synthetic construct
  source 1..80: mol_type = other DNA
tgggaaagaatttgacctagactctgccttggaatggataaaaaacaaaagatgcttaactgatatacagaaagcactaa

SEQ ID NO: 67698 - DNA, 80 bp, synthetic construct
  source 1..80: mol_type = other DNA
ttgacagaagatggagaaggcaaagcagaactagcagaaaaattacactgttggtttggtgggaaagaatttgacctaga

SEQ ID NO: 67699 - DNA, 80 bp, synthetic construct
  source 1..80: mol_type = other DNA
acaattgcctacctgctttcattgacagaagatggagaaggcaaaccagaactagcaaaaaaattacactgttggttcgg

SEQ ID NO: 67700 - DNA, 80 bp, synthetic construct
  source 1..80: mol_type = other DNA
tacctgctttcattgacagaagatggagaaggcaaagcagaactagcagaaaaattacactgttggttcggtgggaaaga

SEQ ID NO: 67701 - DNA, 80 bp, synthetic construct
  source 1..80: mol_type = other DNA
tgagggactttctgctgaagagataataaaaatgggtgaaacagttttggaggtagaagaattgcattaaattcaatttt

SEQ ID NO: 67702 - DNA, 80 bp, synthetic construct
  source 1..80: mol_type = other DNA
ggctttctgccgaagagataataaaaatgggtgaaacagttttggaaatagaagaattgcattaaattcaatttttactg

SEQ ID NO: 67703 - DNA, 80 bp, synthetic construct
  source 1..80: mol_type = other DNA
acagaggcatttctaaaaaatgttgctcctgagaccaggacagcaataatttcagcaataacaggtgggaaatcagcctg

SEQ ID NO: 67704 - DNA, 80 bp, synthetic construct
  source 1..80: mol_type = other DNA
aattttgagacacagttaccaaaaagaaattcaggctaaggaagcaatgaaggaagtactctctgacaacatggaagtat

SEQ ID NO: 67705 - DNA, 80 bp, synthetic construct
  source 1..80: mol_type = other DNA
ttgattgctgaaacagaggcatttctaaaaaatgttgctcctgagaccaggacagcaataatttcagcaataacaggtgg

SEQ ID NO: 67706 - DNA, 80 bp, synthetic construct
  source 1..80: mol_type = other DNA
aattgactcgatggaaaaagatattgccctctctagggagagacttgacctgggagaggatgcccctgacgaaaccgaca

SEQ ID NO: 67707 - DNA, 80 bp, synthetic construct
  source 1..80: mol_type = other DNA
acatagtaattgaggggctttctgcagaagagataataaaaatgggtgaaacagttttggaggtagaaagatcgcattaa

SEQ ID NO: 67708 - DNA, 80 bp, synthetic construct
  source 1..80: mol_type = other DNA
ttgtgagggacttctggtacacagtgcctgagtctacatactcgccaagccccaagttgggtggtgtgtttggcgtgagc

SEQ ID NO: 67709 - DNA, 80 bp, synthetic construct
  source 1..80: mol_type = other DNA
gtgttaagatgagtcttctaaccgaggtcgaaacgtacgttctctctatcattccatcaggccccctcaaagccgagatc

SEQ ID NO: 67710 - DNA, 80 bp, synthetic construct
  source 1..80: mol_type = other DNA
ggcaaagcagaactagcagaaaagttacactgttggtttggtgggaaagaatttgacctagactcagccttggaatggat

SEQ ID NO: 67711 - DNA, 80 bp, synthetic construct
  source 1..80: mol_type = other DNA
tctaaaaaatgttgctcctgagaccaggacagcaataatttcagcaataacaggtgggaaatcagcctgcaaatcagcag

SEQ ID NO: 67712 - DNA, 80 bp, synthetic construct
  source 1..80: mol_type = other DNA
ttgcctacttgctttcattgacagaagatggagaaggcaaagcagaactagcagaaaagttacactgttggtttggtggg

SEQ ID NO: 67713 - DNA, 80 bp, synthetic construct
  source 1..80: mol_type = other DNA
agataataaaaatgggtgaaacagttttggagatagaagaattgcattaaattcaattttactgtatttcttactatgca

SEQ ID NO: 67714 - DNA, 80 bp, synthetic construct
  source 1..80: mol_type = other DNA
ggagacacaattgcctacctgctttcattgacagaagatggagaaggcaaagcagaactagcagaaaaattacactgttg

SEQ ID NO: 67715 - DNA, 80 bp, synthetic construct
  source 1..80: mol_type = other DNA
tagggagagacttgacctgggagaggatgcccctgacgaaaccgacaactcaccaattcctttttccaatgatggtattt

SEQ ID NO: 67716 - DNA, 80 bp, synthetic construct
  source 1..80: mol_type = other DNA
aatgggtgaaacagttttggagatagaagaattgcattaaattcaatttctactgtatttcttactatgcatttaagcaa

SEQ ID NO: 67717 - DNA, 80 bp, synthetic construct
  source 1..80: mol_type = other DNA
ttctgccgaagagataataaaaatgggtgaaacagttttggagatagaaaaaatgcattaaattcaattttactgtattt

SEQ ID NO: 67718 - DNA, 80 bp, synthetic construct
  source 1..80: mol_type = other DNA
tgctgaagagataataaaaatgggtgaaacaatcttggaagtagaagaactgcagtagacccaatttttttcaccgtatt

SEQ ID NO: 67719 - DNA, 80 bp, synthetic construct
  source 1..80: mol_type = other DNA
caaatttgcctccttgctttcattggccgaagatggagaaggcaaagcagaactagcagaaaagttacactgttggtttg

SEQ ID NO: 67720 - DNA, 80 bp, synthetic construct
  source 1..80: mol_type = other DNA
gttttggagatagaagaattacattaaattcaattttactgtatttcttactatgcattaagcaaatgtaatcaatcagc

SEQ ID NO: 67721 - DNA, 80 bp, synthetic construct
  source 1..80: mol_type = other DNA
aaagaaatccaggccaaagaaacaatgaaggaagtgctctctgataacatggaggtattgaatgaccacataataataga

SEQ ID NO: 67722 - DNA, 80 bp, synthetic construct
  source 1..80: mol_type = other DNA
tgaaacagttttggaggtagaaaaatcgcattaaattcaatttttactgtacttcttactatgcatttaagcaaattgta

SEQ ID NO: 67723 - DNA, 80 bp, synthetic construct
  source 1..80: mol_type = other DNA
atggcacatgaaatattgattgctgaaacagaagcatttctaaaaaatgttgctcctgagaccaggacggcaataatttc

SEQ ID NO: 67724 - DNA, 80 bp, synthetic construct
  source 1..80: mol_type = other DNA
ttgacctgggagaggatgcccctgacgaaaccgacaactcaccaattcctttttccaatgatggcatttttgaaatttaa

SEQ ID NO: 67725 - DNA, 80 bp, synthetic construct
  source 1..80: mol_type = other DNA
aaacagtcttggaggtagaagaactgcagtagacccaatttttcaccgtatttcctgctatgcatttaagcaaattgtaa

SEQ ID NO: 67726 - DNA, 80 bp, synthetic construct
  source 1..80: mol_type = other DNA
tttggaggtagaagaattacattaaattcaatttttcctgtacttcttactatgcatttaagcaaattgtaatcaatgtc

SEQ ID NO: 67727 - DNA, 80 bp, synthetic construct
  source 1..80: mol_type = other DNA
ggagaggatgcccctgacgaaaccgacaactcaccaattcctttttccaatgatggtatttttgaaatttaattaccttg

SEQ ID NO: 67728 - DNA, 80 bp, synthetic construct
  source 1..80: mol_type = other DNA
aacaatggcacatgaaatattaattgccgaaacagaggcatttctaaaaaatgttgctcctgagaccaggacagcaataa

SEQ ID NO: 67729 - DNA, 80 bp, synthetic construct
  source 1..80: mol_type = other DNA
tcgctgtttggagacacaattgcctacctgctttcattgacagaagatggagaaggcaaagcagaactagcagaaaaatt

SEQ ID NO: 67730 - DNA, 80 bp, synthetic construct
  source 1..80: mol_type = other DNA
aagaactgcagtagacccatttttcaccgtatttcctgctatgcatttaagcaaattgtaatcaatgtcagtaaataaac

SEQ ID NO: 67731 - DNA, 80 bp, synthetic construct
  source 1..80: mol_type = other DNA
attgcattaaattcaatttttactgtacttcttactatgcatttaagcaaattgtaatcaatgtcagcaaataaactgga

SEQ ID NO: 67732 - DNA, 80 bp, synthetic construct
  source 1..80: mol_type = other DNA
gatatacagaaagcactaattggtgcctctatctgctttttaaaacccaaagaccaggaaagaaaaagaagattcatcac

SEQ ID NO: 67733 - DNA, 80 bp, synthetic construct
  source 1..80: mol_type = other DNA
tatcaggaatgggaacaacagcaacaaaaaagaagggcctgattctggctgagagaaaaatgagaaaatgtgtgagcttc

SEQ ID NO: 67734 - DNA, 80 bp, synthetic construct
  source 1..80: mol_type = other DNA
catgtacctgaatcctggaaattattcaatgcaagtaaaactaggaacactctgtgctttgtgcgaaaaacaagcatcac

SEQ ID NO: 67735 - DNA, 80 bp, synthetic construct
  source 1..80: mol_type = other DNA
gggctcatagcagagcagcgagatcttcagtgcccggagtgagacgggaaatgcagatggtctcagctatgaacacagca

SEQ ID NO: 67736 - DNA, 80 bp, synthetic construct
  source 1..80: mol_type = other DNA
tggaatgggaaaaggagaagacgtccaaaaactggcagaagaactgcaaagcaacattggagtattgagatctcttgggg

SEQ ID NO: 67737 - DNA, 80 bp, synthetic construct
  source 1..80: mol_type = other DNA
ctagcagaaaaattacactgttggttcggtgggaaagaatttgacctagactctgccttggaatggataaaaaacaaaag

SEQ ID NO: 67738 - DNA, 80 bp, synthetic construct
  source 1..80: mol_type = other DNA
acctataatgctcgaaccatttcagattctttcaatttgttcttttattttatcagctctccatttcatggcttggacaa

SEQ ID NO: 67739 - DNA, 80 bp, synthetic construct
  source 1..80: mol_type = other DNA
taaatcaaataaaaagaggagtaaacatgaaaatacgaataaaggggccaaataaagagacaataaacagagaggtatca

SEQ ID NO: 67740 - DNA, 80 bp, synthetic construct
  source 1..80: mol_type = other DNA
tcttaaaatgtcgctgtttgcaaccacacttgcctactttctttcattgacagaatatgcaaaagtcaaaccagaactaa

SEQ ID NO: 67741 - DNA, 80 bp, synthetic construct
  source 1..80: mol_type = other DNA
aattttgagacacagttaccaaaaagaaatccaggccaaagaaacaatgaaagaagtgctctctgacaacatgaaggtat

SEQ ID NO: 67742 - DNA, 80 bp, synthetic construct
  source 1..80: mol_type = other DNA
aaagaaattcaggctaaggaagcaatgaaggaagtactctctaacaacatggaagtattgagtgaccacatagtaataga

SEQ ID NO: 67743 - DNA, 80 bp, synthetic construct
  source 1..80: mol_type = other DNA
catttacacagagctcatagcagagcagcgagatcctcagtgccaggagtgagacgggaaatgcagatggtctcagctat

SEQ ID NO: 67744 - DNA, 80 bp, synthetic construct
  source 1..80: mol_type = other DNA
atttcaaaacaatggcacatgaaatattgattgctgaaacagaggcatttctaaaaaatgttgctcctgagaccaggaca

SEQ ID NO: 67745 - DNA, 80 bp, synthetic construct
  source 1..80: mol_type = other DNA
agcagaagcacgcactttcttaaaatgtcgctgtttggagacacaattgcctacctgctttcattgacagaagatggaga

SEQ ID NO: 67746 - DNA, 80 bp, synthetic construct
  source 1..80: mol_type = other DNA
agcagaagcaggggtactttttcaaaatgtccgacaaaacagtcaaatcaacaaacctaatggcatttgtagccacaaaa

SEQ ID NO: 67747 - DNA, 80 bp, synthetic construct
  source 1..80: mol_type = other DNA
gagaacagaatcttcttttgcacctagaacatgggaagatgcaataaaagatggtgagcttctattcaacgggacgattc

SEQ ID NO: 67748 - DNA, 80 bp, synthetic construct
  source 1..80: mol_type = other DNA
tgcaaacagagtctcctacaatgacgccagcgtctgtagaaatgaaggggaagaaatttcctattgattttgctccaagc

SEQ ID NO: 67749 - DNA, 80 bp, synthetic construct
  source 1..80: mol_type = other DNA
aacatagcaccaattgggcaaaatccaatatatttgtcaccatgtattcctaactttgatggaaacgtctgggaagcaac

SEQ ID NO: 67750 - DNA, 80 bp, synthetic construct
  source 1..80: mol_type = other DNA
gatgtatcatcatcgtggagcaactttgacaaagacaatgaattgcaactgttttcaaagaacaatttggtgccatccaa

SEQ ID NO: 67751 - DNA, 80 bp, synthetic construct
  source 1..80: mol_type = other DNA
atccttcacgtatgagattgagctatgcatttgttttgtattgcagaaatactaagaagatctgtggatacctcatcgct

SEQ ID NO: 67752 - DNA, 80 bp, synthetic construct
  source 1..80: mol_type = other DNA
aaacaagtggccggaattgaaacaggaattagaaaatgtttcagatgcattaaaagcggattcgttatggctaccgatga

SEQ ID NO: 67753 - DNA, 80 bp, synthetic construct
  source 1..80: mol_type = other DNA
aatctctctcactatactccaaagtatcaaatcaggagcccagctcgatccctattggggaaatgaaaaaccagatattg

SEQ ID NO: 67754 - DNA, 80 bp, synthetic construct
  source 1..80: mol_type = other DNA
acaagactgaagcttatatgctctcgcttagagaagctggaccttaacctgagcaaagcagtcttaggaatccaaaattc

SEQ ID NO: 67755 - DNA, 80 bp, synthetic construct
  source 1..80: mol_type = other DNA
atgttagagagacaagaagatttagacacatgcactgaaatgcaagtagaaaaaatgaaaacgtcaacaaaagccaggct

SEQ ID NO: 67756 - DNA, 80 bp, synthetic construct
  source 1..80: mol_type = other DNA
tgaagatcttattttgatcatatataacagagatgtttgtaaaaacactatattaatgataaaatctttgtgtaattcac

SEQ ID NO: 67757 - DNA, 80 bp, synthetic construct
  source 1..80: mol_type = other DNA
atgataaaatctttgtgtaattcacttatataattgttttaagttgttattccaaagttaaaaaaccccttgctcctgct

SEQ ID NO: 67758 - DNA, 80 bp, synthetic construct
  source 1..80: mol_type = other DNA
agcagaagcaggggacttttaaacaatggcacatgaaatattgattgctgaagcagaggcatttctaaaaaatgttgctc

SEQ ID NO: 67759 - DNA, 80 bp, synthetic construct
  source 1..80: mol_type = other DNA
aaaaagatattgccctctttagggagagacttgacctgggagaaggtgcccctgacgaaaccgacaactcaccaattcct

SEQ ID NO: 67760 - DNA, 80 bp, synthetic construct
  source 1..80: mol_type = other DNA
ccgacaactcaccaattcctttttccaatgatggtatttttgaaatttaattaccttgaaaaaatccccttgctactgct

SEQ ID NO: 67761 - DNA, 80 bp, synthetic construct
  source 1..80: mol_type = other DNA
gaacatcttcccctaatgtctggagaagccaccacaatgcacatcgttatgaggtgcttatatcctgaaataaaaccatg

SEQ ID NO: 67762 - DNA, 80 bp, synthetic construct
  source 1..80: mol_type = other DNA
gaaaaaggcaagcgacatgctgaataaagcaacttctagtttgaaaaaatcagaaggaagagacatcagaaagcaaatga

SEQ ID NO: 67763 - DNA, 80 bp, synthetic construct
  source 1..80: mol_type = other DNA
aagcagctggagacttcttaggagtggagtcaatgatgaaaatgagggcctttagagatgaccaaataatggaaatggtt

SEQ ID NO: 67764 - DNA, 80 bp, synthetic construct
  source 1..80: mol_type = other DNA
gaagaagtatatgatcacccagacgactacacaccagacatccgaataggaacaatcacagcttggttgagatgcaagaa

SEQ ID NO: 67765 - DNA, 80 bp, synthetic construct
  source 1..80: mol_type = other DNA
caagaaaagtgaaagatacaggagtaatgtctcagaaagtggaagaacagctttaaagattcatgaagtaagaaaagcca

SEQ ID NO: 67766 - DNA, 80 bp, synthetic construct
  source 1..80: mol_type = other DNA
gcacagcaatgaacgaaattgctggtattactggccttggagaagaagcactatctctccaaagacaaacagaaagtttg

SEQ ID NO: 67767 - DNA, 80 bp, synthetic construct
  source 1..80: mol_type = other DNA
gccatattatgtaatcacacttttggaagtaatataatgagaccccacttggaaaaagcaataaaaggagttgaaggcag

SEQ ID NO: 67768 - DNA, 80 bp, synthetic construct
  source 1..80: mol_type = other DNA
agttggagagatgggacgaatggcaatgaaatggttagttgttataatatatttctctataacaagtcaacctgcttctg

SEQ ID NO: 67769 - DNA, 80 bp, synthetic construct
  source 1..80: mol_type = other DNA
ctgagaccaggacagcaataatttcagcaataacaggagggaaatcagcctgcaaatcagcagctaaactgattaagaat

SEQ ID NO: 67770 - DNA, 80 bp, synthetic construct
  source 1..80: mol_type = other DNA
cttgcaatctaaagacctgtctaaaactatttaacaatactgatgcggtaactgttcattgttttaatgaaaaccaagga

SEQ ID NO: 67771 - DNA, 80 bp, synthetic construct
  source 1..80: mol_type = other DNA
tacatgctaacattagcctctttgggattagggataattactatgttgtatttattagtaaaaatcataattgaacttgt

SEQ ID NO: 67772 - DNA, 80 bp, synthetic construct
  source 1..80: mol_type = other DNA
caatggttttgtgctcggcagatgggagagatggtgtggagatataaagaccacaattatgcctgaaattgactcgatgg

SEQ ID NO: 67773 - DNA, 80 bp, synthetic construct
  source 1..80: mol_type = other DNA
gggatatggggatgggactgtatgtcaagtatgatggagacccatgggctgacagtgatgcccttgcttttagtggagta

SEQ ID NO: 67774 - DNA, 80 bp, synthetic construct
  source 1..80: mol_type = other DNA
ggcactcagcagcaacagccatttactgtttaatgggctcaggacagctgctgtgggacactgtcacaggtgttgacatg

SEQ ID NO: 67775 - DNA, 80 bp, synthetic construct
  source 1..80: mol_type = other DNA
ggatagagatggtacatgatggtggaaaagagacttggcactcagcagctacagccatttactgtttaatgggctcaggg

SEQ ID NO: 67776 - DNA, 80 bp, synthetic construct
  source 1..80: mol_type = other DNA
tgggaaaacgacttggcactcagcagcaacagccatttattgtttaatgggctcaggacaattgctgtgggacactgtca

SEQ ID NO: 67777 - DNA, 80 bp, synthetic construct
  source 1..80: mol_type = other DNA
tcccctgtattgggatagaaatggtacatgatggtgggaaaacgacttggcactcagcagcaacagccatttattgttta

SEQ ID NO: 67778 - DNA, 80 bp, synthetic construct
  source 1..80: mol_type = other DNA
tcagcggcaacagccatttactgtttaatgggctcaggacaactgctgtgggacactgtcacaggtgttaatatgactct

SEQ ID NO: 67779 - DNA, 80 bp, synthetic construct
  source 1..80: mol_type = other DNA
cagtgatgccctagctaatagtggagtaatggtctcaatgaacgaaccgggttcgtcctcctttggcttcgaaataaaag

SEQ ID NO: 67780 - DNA, 80 bp, synthetic construct
  source 1..80: mol_type = other DNA
ataagaaatgcgatgtcccctgtattgggatagagatggtacatgatggtggaaaagagacttggcactcagcagcaaca

SEQ ID NO: 67781 - DNA, 80 bp, synthetic construct
  source 1..80: mol_type = other DNA
cagcaacagccatttactgtttaatgggctcaggacagctgctgtgggacactgtcacaggtgttgacatggctctgtaa

SEQ ID NO: 67782 - DNA, 80 bp, synthetic construct
  source 1..80: mol_type = other DNA
gcgagggccgaataataaacgaaatttttccaacaggaagagtcaaaccccccgaggaatgcacatgcggatttgccagc

SEQ ID NO: 67783 - DNA, 80 bp, synthetic construct
  source 1..80: mol_type = other DNA
tccacgtggagtctgatccagcagaaataagagcgatgtgcacagatacttatttggactcccccagaccagatgatgga

SEQ ID NO: 67784 - DNA, 80 bp, synthetic construct
  source 1..80: mol_type = other DNA
agcataacaggcccttgtgactctaatggggacaaagggagtggaggcatcaagggaggatttgttcatcaaagaatgga

SEQ ID NO: 67785 - DNA, 80 bp, synthetic construct
  source 1..80: mol_type = other DNA
aacgatatgcaccaacagtgccattggattgtgcaaacgcatcaaatgttcaggctgtgaaccgttctgcaacaaaaggg

SEQ ID NO: 67786 - DNA, 80 bp, synthetic construct
  source 1..80: mol_type = other DNA
ccttcaactatacaaacgttaaccttatttctcacatcagggggagtactattatcactatatgtgtcagcttcattgtc

SEQ ID NO: 67787 - DNA, 80 bp, synthetic construct
  source 1..80: mol_type = other DNA
tgaaagaacctggttggtactcctttggcttcgaaataaaagataagaaatgcgatgtcccctgtattgggatagagatg

SEQ ID NO: 67788 - DNA, 80 bp, synthetic construct
  source 1..80: mol_type = other DNA
agaagtaattgcaccaataataccattggattgtgcaaacgcatcaaatgttcaagctgtgaaccgttctgcaacaaaag

SEQ ID NO: 67789 - DNA, 80 bp, synthetic construct
  source 1..80: mol_type = other DNA
acagaagtaactacaccaatgatgccattggattgtgcaaacgcatcaaatgtccaggctgtgaaccgttctgcaacaaa

SEQ ID NO: 67790 - DNA, 80 bp, synthetic construct
  source 1..80: mol_type = other DNA
aagattggacggtggtactctcggacgatgtccaaaactcaaagaatggggatgggactgtatgtaaagtatgatggaga

SEQ ID NO: 67791 - DNA, 80 bp, synthetic construct
  source 1..80: mol_type = other DNA
gcttcattatcatacttactatattcggatatattgctaaaattctcaccaacagaaataactgcaccaacaatgccatt

SEQ ID NO: 67792 - DNA, 80 bp, synthetic construct
  source 1..80: mol_type = other DNA
atacaaacgttaaccctatttctcacatcagggggagtattattatcattatatgtgtcagcttcattatcatacttact

SEQ ID NO: 67793 - DNA, 80 bp, synthetic construct
  source 1..80: mol_type = other DNA
tgctgtgggacactgtcacaggtgttaatatggctctgtaatggaggaatggttgagtctgttctaaaccctttgttcct

SEQ ID NO: 67794 - DNA, 80 bp, synthetic construct
  source 1..80: mol_type = other DNA
atgctaccttcaactatacaaacgttaaccctatttctcacatcagggggagtattattatcactatatgtgtcagcttc

SEQ ID NO: 67795 - DNA, 80 bp, synthetic construct
  source 1..80: mol_type = other DNA
ctcaggacagctgctgtgggacactgtcacaggtgttaatatggctctgtaatggaggaatggttgagtctgttctaaac

SEQ ID NO: 67796 - DNA, 80 bp, synthetic construct
  source 1..80: mol_type = other DNA
gacagctgctgtgggacactgtcacaggtgttgacatggctctgtaatggaggaatggttaagtctgttctaaacccttt

SEQ ID NO: 67797 - DNA, 80 bp, synthetic construct
  source 1..80: mol_type = other DNA
aaagacttggcactcagcagcaacagccatttactgtttaatgggctcaggacatctgttgtgggacactgtcacaggtg

SEQ ID NO: 67798 - DNA, 80 bp, synthetic construct
  source 1..80: mol_type = other DNA
tgggctcaggacagctgctgtgggacactgtcacaggtgttgacatggctctgtaatggaggagtggttaagtctgttct

SEQ ID NO: 67799 - DNA, 80 bp, synthetic construct
  source 1..80: mol_type = other DNA
ccaaaaatgaacaatgctaccttcaactatacaaacgttaaccctatttctcacatcagggggagtattattatcactat

SEQ ID NO: 67800 - DNA, 80 bp, synthetic construct
  source 1..80: mol_type = other DNA
acactgtcacaggtgttgatatggctctgtaatggaggaatggttgagtctgttctaaaccctttgttcctattttgttt

SEQ ID NO: 67801 - DNA, 80 bp, synthetic construct
  source 1..80: mol_type = other DNA
acaggtgttgatatggctctgtaatggaggaatggttgaatctgttctaaaccctttgttcctattttgtttgaacaatt

SEQ ID NO: 67802 - DNA, 80 bp, synthetic construct
  source 1..80: mol_type = other DNA
tgatatggctctgtaatggaggaatggttgaatctgttctaaaccctttgttcctattttgtttgaacaattgtccttaa

SEQ ID NO: 67803 - DNA, 80 bp, synthetic construct
  source 1..80: mol_type = other DNA
ggtgttgatatggctctgtaatggaggaatggttgagtctgttctaaaccctttgttcctattatgcatgagcaattgtc

SEQ ID NO: 67804 - DNA, 80 bp, synthetic construct
  source 1..80: mol_type = other DNA
atggctttgtaatggaggaatggttggatctgttctaaaccctttgttcctattttatttgaaaaattgtccttactggt

SEQ ID NO: 67805 - DNA, 80 bp, synthetic construct
  source 1..80: mol_type = other DNA
ctatacaaacgttaaccttatttctcacatcagggggagtgcgattattactatatgtgtcagcttcattgtcatactta

SEQ ID NO: 67806 - DNA, 80 bp, synthetic construct
  source 1..80: mol_type = other DNA
ctgttctaaaccctttgttcctattttgtttgaacaattgtccttactgacttaattgtttctaaaaacaaaaaaaaaac

SEQ ID NO: 67807 - DNA, 80 bp, synthetic construct
  source 1..80: mol_type = other DNA
gtgttaatataactctgtaatggaggaatggttgagtctgttctaaaccctttgttcctattttgtttgaacaattgtcc

SEQ ID NO: 67808 - DNA, 80 bp, synthetic construct
  source 1..80: mol_type = other DNA
aataggccaaaaatgaacaatgctaccttcaactatacaaacattaaccctatttctcacatcagggggagtgttattat

SEQ ID NO: 67809 - DNA, 80 bp, synthetic construct
  source 1..80: mol_type = other DNA
atgaacaatgctaccttcaactatacaaatgttaaccctatttctcacattagggggagtattattatcactatatgtgt

SEQ ID NO: 67810 - DNA, 80 bp, synthetic construct
  source 1..80: mol_type = other DNA
tcaaaactgaggcaaataggccaaaaatgaacaatgctaccctcaactatacaaacgttaaccttatttctcacatcagg

SEQ ID NO: 67811 - DNA, 80 bp, synthetic construct
  source 1..80: mol_type = other DNA
aacagggccttgcgaatctaatggggacaaagggagtggaggcatcaagggaggatttgttcaccaaagaatggcatcca

SEQ ID NO: 67812 - DNA, 80 bp, synthetic construct
  source 1..80: mol_type = other DNA
ggtactctcgaacgatgtctaaaactaaaagaatggggatgggactgtatgtaaagtatgatggagacccatggactgac

SEQ ID NO: 67813 - DNA, 80 bp, synthetic construct
  source 1..80: mol_type = other DNA
aatggaggaatggttgagtctgtcctaaaccctttgttcctattttgtttgaacaattgtccttactgaacttgattgtt

SEQ ID NO: 67814 - DNA, 80 bp, synthetic construct
  source 1..80: mol_type = other DNA
accgttctgcaacaaaaggggtgacacttcttctcccagaaccggagtggacgtaccctcgtttatcttgcccgggctca

SEQ ID NO: 67815 - DNA, 80 bp, synthetic construct
  source 1..80: mol_type = other DNA
tcaaccagggggatactacaatggaacaagagaagacagaaacaagctgaggcatctaatttcagtcaaattgggcaaaa

SEQ ID NO: 67816 - DNA, 80 bp, synthetic construct
  source 1..80: mol_type = other DNA
gagcgggtccgcatgccatgatggtagagaatggacatatatcggagttgatggccccgacagtaatgcattgctcaaaa

SEQ ID NO: 67817 - DNA, 80 bp, synthetic construct
  source 1..80: mol_type = other DNA
tgcatcgggggagattgttatcttatgataactgatggcccagcttcagggattagtgaatgcagattccttaagattcg

SEQ ID NO: 67818 - DNA, 80 bp, synthetic construct
  source 1..80: mol_type = other DNA
gggagtgttattatcactatatgtgtcagcttcattgtcatacttactatattcggatatattgctaaaattttcacgaa

SEQ ID NO: 67819 - DNA, 80 bp, synthetic construct
  source 1..80: mol_type = other DNA
aaataattgcaccaacaacgtcgttggactccgcgaacgcatcaaattttcaagccgtgaaccattctgcaacaaaagag

SEQ ID NO: 67820 - DNA, 80 bp, synthetic construct
  source 1..80: mol_type = other DNA
atcttctcaaaactgaagcaaatcggcagaaaatgaaggatgcgaccgtcaactataaaaacgttaaccctagcactaac

SEQ ID NO: 67821 - DNA, 80 bp, synthetic construct
  source 1..80: mol_type = other DNA
ggagattgatacagcagaaataaggttgatgtgcacagatacttatttggacacccccagaccaaatgatggaagcataa

SEQ ID NO: 67822 - DNA, 80 bp, synthetic construct
  source 1..80: mol_type = other DNA
ttgtttgagcaattgtccttactgaacttgattgtttctgaaaaatgctcttgttactacaggtcaagctgttttcctga

SEQ ID NO: 67823 - DNA, 80 bp, synthetic construct
  source 1..80: mol_type = other DNA
tggttgagtctgttctggaccctttgttcctgttttgtttgaacgattgtccttactgagcttgattggttctgaaaaat

SEQ ID NO: 67824 - DNA, 80 bp, synthetic construct
  source 1..80: mol_type = other DNA
atcttctcaaaaaaactgaggcaaataggccaaaaatgaacaatgctaccttcaactatacaaacgttaaccttatttct

SEQ ID NO: 67825 - DNA, 80 bp, synthetic construct
  source 1..80: mol_type = other DNA
aacctttcagaaagcactcctaattagccctcatagattcggagaaaccaaaggaaactcagctcccttgataataaggg

SEQ ID NO: 67826 - DNA, 80 bp, synthetic construct
  source 1..80: mol_type = other DNA
taaaccctttgttcctgttttgtttgaacaattgtccttactaaacttaattgtttctgaaaaatgctcttgttactact

SEQ ID NO: 67827 - DNA, 80 bp, synthetic construct
  source 1..80: mol_type = other DNA
ctatttctcacatcagggggagtattattatcactatatgtgtcagcttcattatcatacttactatattcggatatatt

SEQ ID NO: 67828 - DNA, 80 bp, synthetic construct
  source 1..80: mol_type = other DNA
agcagaagggcgagcatcttctcaaaactgaagcaaataggccaaaaatgaacaatgctaccttcaactatacaaacgtt

SEQ ID NO: 67829 - DNA, 80 bp, synthetic construct
  source 1..80: mol_type = other DNA
tgttttgtttgaacaattgtccttactaaacttaattgtttctgaaaaatgctcttgttactacaggtcatagtggtttt

SEQ ID NO: 67830 - DNA, 80 bp, synthetic construct
  source 1..80: mol_type = other DNA
ggttgagtctgttctaaaccctttgttcctattttgtttgaacaattgtccggtcatagtggttttccgagcctttaaca

SEQ ID NO: 67831 - DNA, 80 bp, synthetic construct
  source 1..80: mol_type = other DNA
gtcatagtggttttccgagcctttaacagtaattggtgttgctggctgagtgccagtcgttttgaccgctgtacggtgtt

SEQ ID NO: 67832 - DNA, 80 bp, synthetic construct
  source 1..80: mol_type = other DNA
ttgtaaaacgacgccagtagcagaagcagagcccaagccggggatgaggctgactattacttcaggtgtgggacagcagc

SEQ ID NO: 67833 - DNA, 80 bp, synthetic construct
  source 1..80: mol_type = other DNA
tttgtaaaaacgacggccagtagcagaagcagagcatcttctcaaaactgaagcaaataggccaaaaatgaacaatgcta

SEQ ID NO: 67834 - DNA, 80 bp, synthetic construct
  source 1..80: mol_type = other DNA
gaagaaggaatggatgaaaattcagagattggacaagccaagaagatgaaacccttggatcaattggccagcaccagtag

SEQ ID NO: 67835 - DNA, 80 bp, synthetic construct
  source 1..80: mol_type = other DNA
gattagaagaagaaggaatggatgaaaattcagagattggacaagccaagaagatgaaacccttggatcaattggccagc

SEQ ID NO: 67836 - DNA, 80 bp, synthetic construct
  source 1..80: mol_type = other DNA
acaattgacaaaacaccggaagaaataacttctggaaccagtggggcaaccagaccaatcattagaccagcaacccttgc

SEQ ID NO: 67837 - DNA, 80 bp, synthetic construct
  source 1..80: mol_type = other DNA
ataacttctggaaccagtgggacaaccagaccaatcatcagaccagcaacccttgccccaccaagcaacaaacgaacccg

SEQ ID NO: 67838 - DNA, 80 bp, synthetic construct
  source 1..80: mol_type = other DNA
gacgccagatgagcaacgcaaagccaatgctctcataataaatgagaacattgaggcctacattgccatttgtaaggaag

SEQ ID NO: 67839 - DNA, 80 bp, synthetic construct
  source 1..80: mol_type = other DNA
aaaaccaatcccgttgaaattccaattaagcaaaccatccccaatttcttctttgggagggacacagcagaggattatga

SEQ ID NO: 67840 - DNA, 80 bp, synthetic construct
  source 1..80: mol_type = other DNA
atggatattgacggtatcagcactgggacaattgacaaaacaccggaagaaataacttctggaaccagtgggacaaccag

SEQ ID NO: 67841 - DNA, 80 bp, synthetic construct
  source 1..80: mol_type = other DNA
ttgaaattccaattaagcagaccatccccaatttcttctttgggagggacacagcagaggattatgatgacctcgattat

SEQ ID NO: 67842 - DNA, 80 bp, synthetic construct
  source 1..80: mol_type = other DNA
tcaaaacagaaagacgccagatgagcaacgcaaagccaatgctctcataataaatgagaacattgaggcctacattgcca

SEQ ID NO: 67843 - DNA, 80 bp, synthetic construct
  source 1..80: mol_type = other DNA
gaaaattcagagattggacaagccaagaagatgaaacccttggatcaattggccagcaccagtagcaacattcctggaaa

SEQ ID NO: 67844 - DNA, 80 bp, synthetic construct
  source 1..80: mol_type = other DNA
ctagggttaaatgttgaagagtactccatggttgggtacgaagacatagctctttacaatatggcaacacatgtttccat

SEQ ID NO: 67845 - DNA, 80 bp, synthetic construct
  source 1..80: mol_type = other DNA
ctcgtcgtctagtccctctctctcccactgtggcgagcaaagtggttcttcccataagcatttacgccaaaatacctcaa

SEQ ID NO: 67846 - DNA, 80 bp, synthetic construct
  source 1..80: mol_type = other DNA
ggtatcaacactgggacaattgacaaaacaccggaagaaataacttctggaaccagtgggacaaccagaccaatcattag

SEQ ID NO: 67847 - DNA, 80 bp, synthetic construct
  source 1..80: mol_type = other DNA
gagattggacaagccaagaagatgaaacccttggatcaattggccagcaccagtagcaacattcctggagaaaattaaag

SEQ ID NO: 67848 - DNA, 80 bp, synthetic construct
  source 1..80: mol_type = other DNA
attttcaaaaatgtctgacagacgtcaaaacagaaagacgccagatgagcaacgcaaagccaatgctctcataataaatg

SEQ ID NO: 67849 - DNA, 80 bp, synthetic construct
  source 1..80: mol_type = other DNA
ttcagagattggacaagccaagaagatgaaacctttggatcaattgaccagcactagtagcaacattcctggaaaaaatt

SEQ ID NO: 67850 - DNA, 80 bp, synthetic construct
  source 1..80: mol_type = other DNA
atgtccaacatggatattgacggtgtcaacactgggataattgacaaagcaccggaagaaataacttctggaaccagtgg

SEQ ID NO: 67851 - DNA, 80 bp, synthetic construct
  source 1..80: mol_type = other DNA
attgacggtatcaacactgggacaattgacaaagcaccggaagaaacaaattctggaaccagtgggacaaccagaccaat

SEQ ID NO: 67852 - DNA, 80 bp, synthetic construct
  source 1..80: mol_type = other DNA
atgtctgacagacgtcaaaacagaaagacgccagatgagcaacgcaaagccaatgctctcataataaatgagaacattga

SEQ ID NO: 67853 - DNA, 80 bp, synthetic construct
  source 1..80: mol_type = other DNA
atgaaacccttggatcaattggccagcaccagtagcaacattcctggagaaaattaaagtcagattaaattcatcacata

SEQ ID NO: 67854 - DNA, 80 bp, synthetic construct
  source 1..80: mol_type = other DNA
ttggccagcactagtagcaacattcctggagaaaattaaagtcagattaaattcatcacatattttatgatcaactgtta

SEQ ID NO: 67855 - DNA, 80 bp, synthetic construct
  source 1..80: mol_type = other DNA
tgtgacttcagtgccaacaaaaaactgaaaatcaaaatgtccaacatggatattgacggtatcaacactgggacaattga

SEQ ID NO: 67856 - DNA, 80 bp, synthetic construct
  source 1..80: mol_type = other DNA
agcaacattcctggagaaaattaaagtcagattaaattcgtcacatattttatgatcaactgttgtattgctatatataa

SEQ ID NO: 67857 - DNA, 80 bp, synthetic construct
  source 1..80: mol_type = other DNA
ttgtgaacttcaagcaccagtaagagaactgaaaatcaaaatgtccaacatggatattgacggtataaacactgggacaa

SEQ ID NO: 67858 - DNA, 80 bp, synthetic construct
  source 1..80: mol_type = other DNA
gtgggacaaccagaccaatcattagaccagcaacccttgccccaccaagcaacaaacgaacccgtaacccatccccggaa

SEQ ID NO: 67859 - DNA, 80 bp, synthetic construct
  source 1..80: mol_type = other DNA
aatgcaagggtttccatgttccagcaaaggaacaggtagaaggaatgggagcagctctgatgtccatcaagctccagttt

SEQ ID NO: 67860 - DNA, 80 bp, synthetic construct
  source 1..80: mol_type = other DNA
aatgggagcagctctgatgtccatcaagctccagttttgggctccgatgaccagatctgggaggaacgaagtaggtggag

SEQ ID NO: 67861 - DNA, 80 bp, synthetic construct
  source 1..80: mol_type = other DNA
agctgcagcccagtgtttgcagtggaaagacctattgctctaagcaagcaagctgtaagaagaatgctgtcaatgaatgt

SEQ ID NO: 67862 - DNA, 80 bp, synthetic construct
  source 1..80: mol_type = other DNA
gaagaaaatgtttcaaatatcagacaaaaacaaaaccaatcccattgaaattccaattaagcagaccatccccaatttct

SEQ ID NO: 67863 - DNA, 80 bp, synthetic construct
  source 1..80: mol_type = other DNA
ggagggacacagcagaggattatgatgacctcgattattaaagcaacaaaatagacactatgactgtgattgtttcaata

SEQ ID NO: 67864 - DNA, 80 bp, synthetic construct
  source 1..80: mol_type = other DNA
tttttaaaagaagaggtgaaaacaatgtacaaaaccaccatggggagtgatggcttcagtggactaaatcacataatgat

SEQ ID NO: 67865 - DNA, 80 bp, synthetic construct
  source 1..80: mol_type = other DNA
cgggaagcacagtccccagaagatcaggtgcgactggtgttgcaatcaaaggaggtggaactttagtggctgaagccatt

SEQ ID NO: 67866 - DNA, 80 bp, synthetic construct
  source 1..80: mol_type = other DNA
aagagcaatggcagatagagggctattgagagacatcaaagccaagactgcctatgaaaagattcttctgaatctgaaaa

SEQ ID NO: 67867 - DNA, 80 bp, synthetic construct
  source 1..80: mol_type = other DNA
tgcgccccaacaaaaggctctagttgatcaagtgatcggaagcagaaatccagggattgcagacattgaagatctaaccc

SEQ ID NO: 67868 - DNA, 80 bp, synthetic construct
  source 1..80: mol_type = other DNA
ctcgtagtatggtcgttgttaggccctctgtggcaagcaaagtggtgcttcccataagcatttacgccaaaatacctcaa

SEQ ID NO: 67869 - DNA, 80 bp, synthetic construct
  source 1..80: mol_type = other DNA
ttaaagcaacaaaatagacactatgactgtgattgtttcaatacgtttggaatgtgggtgtttactcttattaaaataaa

SEQ ID NO: 67870 - DNA, 80 bp, synthetic construct
  source 1..80: mol_type = other DNA
atgaaaaaatcaaaatgtccaacatggatattgacggtatcaacactgggacaattgacaaaacaccggaagaaataact

SEQ ID NO: 67871 - DNA, 80 bp, synthetic construct
  source 1..80: mol_type = other DNA
aaactgaaaaaccaaaatgtccaacatggatattgacggcatcaacactggaacaattgacaaaacaccagaagaaacaa

SEQ ID NO: 67872 - DNA, 80 bp, synthetic construct
  source 1..80: mol_type = other DNA
aagtgccaccaaaagaactgaaaatcaaaatgtccaacatggatattgacggtatcaatactgggacaatcgacaaagca

SEQ ID NO: 67873 - DNA, 80 bp, synthetic construct
  source 1..80: mol_type = other DNA
tgacctcgattattaaagcaacaaaatagacactatgactgtgattgtttcaatacgtttggaatgtgggtgtttattct

SEQ ID NO: 67874 - DNA, 80 bp, synthetic construct
  source 1..80: mol_type = other DNA
gtaaaagaactgaaaatcaaaatgtccaacatggatattgacggtataaacactgggacaatcgacaaaacaccggaaga

SEQ ID NO: 67875 - DNA, 80 bp, synthetic construct
  source 1..80: mol_type = other DNA
caacaaaatagacactataactgtgattgtctcaatacgtttggaatgtgggtgtttattcttgtcaaaataaatataaa

SEQ ID NO: 67876 - DNA, 80 bp, synthetic construct
  source 1..80: mol_type = other DNA
tggagaaaattaaaatcagattaaattcatcacatattttatgattaactgttgtattgctatatataattcaaaaatct

SEQ ID NO: 67877 - DNA, 80 bp, synthetic construct
  source 1..80: mol_type = other DNA
agtaccaacaaaaactgaaaaatcaaaatgtccaacatggatattgacggcatcaacactggaacaattgacaaagcacc

SEQ ID NO: 67878 - DNA, 80 bp, synthetic construct
  source 1..80: mol_type = other DNA
agtaccagtaaaagaactgaaaatcaaaatgtccaacatggatattgacggtatcaacactgggacacttgacaaaacac

SEQ ID NO: 67879 - DNA, 80 bp, synthetic construct
  source 1..80: mol_type = other DNA
gaggattatgatgacctcgattattaaagcaacaaaatagacactatgactgtgattgtttcaatacgtttggaatgtgg

SEQ ID NO: 67880 - DNA, 80 bp, synthetic construct
  source 1..80: mol_type = other DNA
agcagaaaggtcagcattttcttgtgaacttcaagcaccagtaaaagaactgaaaatcaaaatgtccaacatggatattg

SEQ ID NO: 67881 - DNA, 80 bp, synthetic construct
  source 1..80: mol_type = other DNA
agcagaagcaggagatttggttttcaaaaatgtctgacagacgtcaaaacagaaagacgccagatgagcaacgcaaagcc

SEQ ID NO: 67882 - DNA, 80 bp, synthetic construct
  source 1..80: mol_type = other DNA
gaggacaaggctcaagtattaatgatggcatgctttggacttgcttatgaagacttcagtttggtctctgctatggttag

SEQ ID NO: 67883 - DNA, 80 bp, synthetic construct
  source 1..80: mol_type = other DNA
ccaccctcttaagttgagaaacagaatgaaaataggaaacttcagagtcggtgaaaaagtttcaacagtgctttctccct

SEQ ID NO: 67884 - DNA, 80 bp, synthetic construct
  source 1..80: mol_type = other DNA
tattgagattcacaagatgggcagagtttgctcaaagatttgctcttcagacaaatacttcaagagaaggcgctcaaatc

SEQ ID NO: 67885 - DNA, 80 bp, synthetic construct
  source 1..80: mol_type = other DNA
agcaattcagcagtttttgcagtggaaaggaagataaccacagatgtccaaagagttgaagagctactaaataaagttca

SEQ ID NO: 67886 - DNA, 80 bp, synthetic construct
  source 1..80: mol_type = other DNA
agctcatgaagatgaaccattacaaacactttacaaaaaagtaagagaacaaatttccataattggaaggaacaagtctg

SEQ ID NO: 67887 - DNA, 80 bp, synthetic construct
  source 1..80: mol_type = other DNA
aaataaaggagtttctagggtcttcaatgtatgatttaaatgatcaagaaaaacaaaatccaataaatttcaggtctgga

SEQ ID NO: 67888 - DNA, 80 bp, synthetic construct
  source 1..80: mol_type = other DNA
gcacaccctttctttttcgaattcgacccagactacaaccccataagagtgaaaagacccaaaaaaccaatagcaaagag

SEQ ID NO: 67889 - DNA, 80 bp, synthetic construct
  source 1..80: mol_type = other DNA
gatcctggaaaatggcatagcaattgaaaaagctataagaatatgttgtgatggaaagtatcaggaaaaaagggaaaaga

SEQ ID NO: 67890 - DNA, 80 bp, synthetic construct
  source 1..80: mol_type = other DNA
aaattcaaatatcagcagattggaagaagaaggaatggatgaaaattcagaaattggacaagccaagaagatgaagccct

SEQ ID NO: 67891 - DNA, 80 bp, synthetic construct
  source 1..80: mol_type = other DNA
tggatcaattggccaagtagcaacattcctggagaaaattaaagtcagattaaattcatcgcacattttatgatcaactg

SEQ ID NO: 67892 - DNA, 80 bp, synthetic construct
  source 1..80: mol_type = other DNA
agtcagattaaattcatcgcacattttatgatcaactgttgtattgctatatataattcaaaaatctccttgctactgct

SEQ ID NO: 67893 - DNA, 80 bp, synthetic construct
  source 1..80: mol_type = other DNA
aagcaagagaagcccaaagagcggacagcaacttcaatgcagattccattgggatcagactagttaaaagagctggttca

SEQ ID NO: 67894 - DNA, 80 bp, synthetic construct
  source 1..80: mol_type = other DNA
ggcaccaacataacctaccatgcagttgttgaattgacaagccgctcaagaattgttcaaattctcaaatctcattgggg

SEQ ID NO: 67895 - DNA, 80 bp, synthetic construct
  source 1..80: mol_type = other DNA
aaatgaactaaacagagcaaaaattgcaggaaaaagactcggcttctctgcactctttgcttctaacttagaagcaatta

SEQ ID NO: 67896 - DNA, 80 bp, synthetic construct
  source 1..80: mol_type = other DNA
tttatcaaagaggaagaaacgcagcaagaagaaacggttctgctgaattgttcactctcactcaaggggctggaatcgaa

SEQ ID NO: 67897 - DNA, 80 bp, synthetic construct
  source 1..80: mol_type = other DNA
actagatataaatggataatggaaaagcacatcggaattggagttcttatagctgacgcaaaaggtttaataaatggaaa

SEQ ID NO: 67898 - DNA, 80 bp, synthetic construct
  source 1..80: mol_type = other DNA
gagagaaggcaaaaaaggagttgatgccaatgtaaaattgagagcaggaacgactggttcccctctggaaagagccatgc

SEQ ID NO: 67899 - DNA, 80 bp, synthetic construct
  source 1..80: mol_type = other DNA
aaggaattgagaaaaaagcgtttcctgggcccttaagagcactagcaagaagagttgtaaaagcaaactacaatgatgcc

SEQ ID NO: 67900 - DNA, 80 bp, synthetic construct
  source 1..80: mol_type = other DNA
aatgctctcataataaatgagaacattgaagcctacattgccatttgtaaggaagtgggccttaatggcgatgaaatgtt

SEQ ID NO: 67901 - DNA, 80 bp, synthetic construct
  source 1..80: mol_type = other DNA
agagaagctctaaatgtcatcgcagaagcatcactcctgttaaagcctcagataaccaacaaaatgacaatgccttggtg

SEQ ID NO: 67902 - DNA, 80 bp, synthetic construct
  source 1..80: mol_type = other DNA
tatgtggttggctgccagacttactctgaaagatgagtttgccaatttctgtgcatatgcaggaagaagagcctttgaag

SEQ ID NO: 67903 - DNA, 80 bp, synthetic construct
  source 1..80: mol_type = other DNA
tcttcaatattgcaatggagaaaattggaatttgttcctttcaagggacaataatgaacgatgatgaaattgaatcaata

SEQ ID NO: 67904 - DNA, 80 bp, synthetic construct
  source 1..80: mol_type = other DNA
ttattaaagcaacaaaataaacactataactgtgattgtctcaatacgtttggaatgtgggtgtttattcttgtcaaaat

SEQ ID NO: 67905 - DNA, 80 bp, synthetic construct
  source 1..80: mol_type = other DNA
caacaaaatagacacaatgactgtgattgtttcagtacgcttggaatgtgggtgtttactcttattgaaataaatataaa

SEQ ID NO: 67906 - DNA, 80 bp, synthetic construct
  source 1..80: mol_type = other DNA
cgactattaaagcaacaaaatagacactatggctgtgattgtttcagtacgtttgggatgtgggtgtttactcttattaa

SEQ ID NO: 67907 - DNA, 80 bp, synthetic construct
  source 1..80: mol_type = other DNA
atgatggttaaagctggactcaatgatgacatggagagaaatctaatccaaaatgcgcatgccgtggaaagaattttact

SEQ ID NO: 67908 - DNA, 80 bp, synthetic construct
  source 1..80: mol_type = other DNA
ggctgccactgatgataagaaaaccgagttccagaagaaaaagaatgccagagatgtcaaagaagggaaggaagaaatag

SEQ ID NO: 67909 - DNA, 80 bp, synthetic construct
  source 1..80: mol_type = other DNA
aaaatagacactatgactgtgattgtctcaatacgtttggaatgtgggtgtttattctcattaaaataaatataaaaaat

SEQ ID NO: 67910 - DNA, 80 bp, synthetic construct
  source 1..80: mol_type = other DNA
gaaataaacactatagctgtgattgtctcagtacgtttggaatgtgggtgtttattcttgtcaaaataaatataaaaaat

SEQ ID NO: 67911 - DNA, 80 bp, synthetic construct
  source 1..80: mol_type = other DNA
gtgtaaaaggaatctacttatgcccatttcagtgtaaggtcaccataaggaattaaaataatgtcatcgagagaatgcac

SEQ ID NO: 67912 - DNA, 80 bp, synthetic construct
  source 1..80: mol_type = other DNA
gacctcgattattaaagcaacaaaatagacactatgactgtgattgtttcaatacgtttggaatgtgggtagatcggaag

SEQ ID NO: 67913 - DNA, 80 bp, synthetic construct
  source 1..80: mol_type = other DNA
caacatgaccacaacacaaattgaggtgggtccgggagcaaccaatgccactataaactttgaagcaggaattctggagt

SEQ ID NO: 67914 - DNA, 80 bp, synthetic construct
  source 1..80: mol_type = other DNA
tgaccacaacacaaattgaggtggggccgggagcgaccaatgccaccataagctttgaagcaggaattctggagtgctat

SEQ ID NO: 67915 - DNA, 80 bp, synthetic construct
  source 1..80: mol_type = other DNA
atggcgaacaatatgaccacaacacaaattgaggtgggtccgggagcaaccaatgccaccataaactttgaagcaggaat

SEQ ID NO: 67916 - DNA, 80 bp, synthetic construct
  source 1..80: mol_type = other DNA
agttccccaaagagcaactgtctgaaatacagttggattgattacccttcaaccccagggaggtgccttgatgacataga

SEQ ID NO: 67917 - DNA, 80 bp, synthetic construct
  source 1..80: mol_type = other DNA
tagctgacatggttgtatcattatcattattagaaacattgtatgaaatgaaggatgtggttgaagtgtacagcaggcag

SEQ ID NO: 67918 - DNA, 80 bp, synthetic construct
  source 1..80: mol_type = other DNA
acagttcctcaaatagcaactatacgaaatacaattggaccgattacccttcaacaccagagaggtgccttgatgacata

SEQ ID NO: 67919 - DNA, 80 bp, synthetic construct
  source 1..80: mol_type = other DNA
ggcaaacagagaaagatggcaaacaacaacatgaccacaacacaaattgaggtgggtccgggagcaaccaatgccaccat

SEQ ID NO: 67920 - DNA, 80 bp, synthetic construct
  source 1..80: mol_type = other DNA
aaagataaaggaggaagtaaacactcagaaagaagggaagttccgtttgacaataatgtattgtccctgagagtgttagt

SEQ ID NO: 67921 - DNA, 80 bp, synthetic construct
  source 1..80: mol_type = other DNA
aaacggaacattcctcaaacaccccaatggatacaagtccttatcaactctgcatagattgaatgcatatgaccagagtg

SEQ ID NO: 67922 - DNA, 80 bp, synthetic construct
  source 1..80: mol_type = other DNA
gaaaaaatggcggacaacatgaccacaacacaaattgaggtgggtccgggagcaaccaatgccaccataaactttgaagc

SEQ ID NO: 67923 - DNA, 80 bp, synthetic construct
  source 1..80: mol_type = other DNA
aaacaggaaaaatggcgaacaacatgaccacaacacaaattgaggtgggtccaggagcaaccaatgccaccataaacttt

SEQ ID NO: 67924 - DNA, 80 bp, synthetic construct
  source 1..80: mol_type = other DNA
aacagggaaaaatggatgaacaacaacatgaccacaacacaaattgaggtgggtccgggagcaaccaatgccaccataaa

SEQ ID NO: 67925 - DNA, 80 bp, synthetic construct
  source 1..80: mol_type = other DNA
ctggcaaacggaaagatggcggacaacatgaccacaacacaaattgaggtgggtccgggagcaaccaatgccactataaa

SEQ ID NO: 67926 - DNA, 80 bp, synthetic construct
  source 1..80: mol_type = other DNA
agctcctcaaatagcaactgtcagaaatacaattggtccgattacccttcaacaccagggaggtgccttgatgacataga

SEQ ID NO: 67927 - DNA, 80 bp, synthetic construct
  source 1..80: mol_type = other DNA
gtcactggcaaacaggaaaaatggaggacaacatgaccacaacacaaattgaggtgggtccgggagcaaccaatgccacc

SEQ ID NO: 67928 - DNA, 80 bp, synthetic construct
  source 1..80: mol_type = other DNA
tataacaagttcctcaaatagcaactgtcagaaatacaattggaccgattacccttcaacaccagggaggtgccttgatg

SEQ ID NO: 67929 - DNA, 80 bp, synthetic construct
  source 1..80: mol_type = other DNA
ctggcaaacagggaaaaaaatggcggacaatatgaccacaacacaaattgaggtgggtccgggagcaaccaatgccacca

SEQ ID NO: 67930 - DNA, 80 bp, synthetic construct
  source 1..80: mol_type = other DNA
gtttagtcactggcaaacaggaaaaaatggcgaacaacatgaccacaacacaaattgaggtgggtccgggagcaaccaat

SEQ ID NO: 67931 - DNA, 80 bp, synthetic construct
  source 1..80: mol_type = other DNA
ggatgtctcttgaagagagaaaagcaattggagtaaaaatgatgaaagtacttctatttatgaatccgtctgctggaatt

SEQ ID NO: 67932 - DNA, 80 bp, synthetic construct
  source 1..80: mol_type = other DNA
acatagaagaagaaccagatgatgttgatggcccaactgaaatagtattaagggacatgaacaacaaagatgcaaggcaa

SEQ ID NO: 67933 - DNA, 80 bp, synthetic construct
  source 1..80: mol_type = other DNA
aagataaaggaggaagtaaacactcagaaagaagggaagttccgtttgacaataaaaagggatatgcgtaatgtattgtc

SEQ ID NO: 67934 - DNA, 80 bp, synthetic construct
  source 1..80: mol_type = other DNA
gggagcaaccaatgccaccataaactttgaagcaggaattctggagtgctatgaaagactttcatggcaaagggcccttg

SEQ ID NO: 67935 - DNA, 80 bp, synthetic construct
  source 1..80: mol_type = other DNA
cgagcgtcttaatgaaggacattcaaagccaattcgagcagctgaaactgcggtgggagtcttatcccaatttggtcaag

SEQ ID NO: 67936 - DNA, 80 bp, synthetic construct
  source 1..80: mol_type = other DNA
atcaccagaagagggagacaattagactggtcacggaagaactttatcttttaagtaaaagaattgatgataacatattg

SEQ ID NO: 67937 - DNA, 80 bp, synthetic construct
  source 1..80: mol_type = other DNA
cagtaatagctaacagctccataatagctgacatggttgtatcattatcattattagaaacattgtatgaaatgaaggat

SEQ ID NO: 67938 - DNA, 80 bp, synthetic construct
  source 1..80: mol_type = other DNA
tcattatcattattagaaacattgtatgaaatgaaggatgtggttgaagtgtacagcaggcagtgcttgtgaatttaaaa

SEQ ID NO: 67939 - DNA, 80 bp, synthetic construct
  source 1..80: mol_type = other DNA
ccctcagagagcaactgtccgaaatacagttggattaattacccttcaaccccagggaggtgccttgatgacatagaaga

SEQ ID NO: 67940 - DNA, 80 bp, synthetic construct
  source 1..80: mol_type = other DNA
gcaaatgaaaaaaatggcggaaaacatgaccacaacacaaattgaggtgggtccgggagcaaccaatgccaccataaact

SEQ ID NO: 67941 - DNA, 80 bp, synthetic construct
  source 1..80: mol_type = other DNA
tacgaacagttcctcaaatggcaactgtacgaaatacaattggaccgattacccctcaacaccagagaggtgccttgatg

SEQ ID NO: 67942 - DNA, 80 bp, synthetic construct
  source 1..80: mol_type = other DNA
tgaagggtttgagccataccgtataaacagttcctcaaatagcaactgtacgaaatacaattggaccgattacccctcaa

SEQ ID NO: 67943 - DNA, 80 bp, synthetic construct
  source 1..80: mol_type = other DNA
cgccagagaggtgccttgatgacatagaggaagaaccagaggatgttgatggcccaactgaaatagtattaagggacatg

SEQ ID NO: 67944 - DNA, 80 bp, synthetic construct
  source 1..80: mol_type = other DNA
tgtttagtcactggcaaccagagaaaaaaatggcgaacaacaacatgaccacaacacaaattgaggtgggtccgggagca

SEQ ID NO: 67945 - DNA, 80 bp, synthetic construct
  source 1..80: mol_type = other DNA
tgtatgaaatgaaggatgtggttgaagtgtacagcaggcagtgcttgtgaatttaaaataaaaatcctcttgttactact

SEQ ID NO: 67946 - DNA, 80 bp, synthetic construct
  source 1..80: mol_type = other DNA
ttttcaaaatgtccgacaaaacagtcaaatcaacaaatctaatggcatttatagccacaaaaatgttagagagacaagaa

SEQ ID NO: 67947 - DNA, 80 bp, synthetic construct
  source 1..80: mol_type = other DNA
tttgtagccacaaaaatgttagagagacaagaagatttagacacatgcactgaaatgcaagtagaaaaaatgaaaacgtc

SEQ ID NO: 67948 - DNA, 80 bp, synthetic construct
  source 1..80: mol_type = other DNA
aacctgagcaaagcagtcttggaaatccaaaattctgaagatcttattttgattatacataacagagatgtttgtaaaaa

SEQ ID NO: 67949 - DNA, 80 bp, synthetic construct
  source 1..80: mol_type = other DNA
acaaatttaatggcatttgtagccacaaaaatgttagagagacaagaagatttagacacatgcactgaaatgcaagtaga

SEQ ID NO: 67950 - DNA, 80 bp, synthetic construct
  source 1..80: mol_type = other DNA
gcagtcttgggaatccaaaattctgaagatcttattttgattataaataacagagatgtttgtaaaaacattatattaat

SEQ ID NO: 67951 - DNA, 80 bp, synthetic construct
  source 1..80: mol_type = other DNA
atgtccgacaaaacagtcaaatcaacaaatttaatggcatttgtagccacaaaaatgttagagagacaagaagatttaga

SEQ ID NO: 67952 - DNA, 80 bp, synthetic construct
  source 1..80: mol_type = other DNA
acagagatgtttgtaaaaacattatattaatgataaaatctttgtgcaattcacttatataattgttttaagttattgtt

SEQ ID NO: 67953 - DNA, 80 bp, synthetic construct
  source 1..80: mol_type = other DNA
agtcaaatcaacaaatttaatggcatttgtagccacaaaaatgttagagagacaagaagatttagacacatgcactgaaa

SEQ ID NO: 67954 - DNA, 80 bp, synthetic construct
  source 1..80: mol_type = other DNA
agtggagcaagagataagaactttctcgtttcagcttatttaatgataaaaaacacgtgggtttcccaaaaacaaaaggc

SEQ ID NO: 67955 - DNA, 80 bp, synthetic construct
  source 1..80: mol_type = other DNA
gaggtgggtccgggagcaaccaatgccaccataaactttgaagcaggaattctggagtgctatgaaaggctttcatggca

SEQ ID NO: 67956 - DNA, 80 bp, synthetic construct
  source 1..80: mol_type = other DNA
ttgatgataacatattgttccacaaaacgataatagctaacagctccataatagctgacatggttgtatcattatcatta

SEQ ID NO: 67957 - DNA, 80 bp, synthetic construct
  source 1..80: mol_type = other DNA
cacaacacaaattgaggtgggtccgggagcaaccaatgccaccataaacttcgaagcaggaattctggagtgctatgaaa

SEQ ID NO: 67958 - DNA, 80 bp, synthetic construct
  source 1..80: mol_type = other DNA
agctcttcaaatagcaactgtccgaaatacaattggatcaattaccctctaacaccaagaaggtgccttgatgacataga

SEQ ID NO: 67959 - DNA, 80 bp, synthetic construct
  source 1..80: mol_type = other DNA
taatccgatgtgcctttttatggctcaaaggttgaatgaacttgtgattgaggcctcaaaaagaggcgctaagtttttca

SEQ ID NO: 67960 - DNA, 80 bp, synthetic construct
  source 1..80: mol_type = other DNA
ttcttagagccagaagctgtaagaatagcaaaagaagcagtagaagaatatggggatcatgaaagaaaaataatacaaat

SEQ ID NO: 67961 - DNA, 80 bp, synthetic construct
  source 1..80: mol_type = other DNA
aagagtgtcttataaataatccgatgtgcctttttatggctcaaaggttgaatgaacttgtgattgaggcctcaaaaaga

SEQ ID NO: 67962 - DNA, 80 bp, synthetic construct
  source 1..80: mol_type = other DNA
atgtcgaaaacttttgccgaaatagcagaggctttcttagagccagaagctgtaagaatagcaaaagaagcagtagaaga

SEQ ID NO: 67963 - DNA, 80 bp, synthetic construct
  source 1..80: mol_type = other DNA
atgtcaaaaacttttgccgaaatagcagaggcttttctagagccagaagctgtgagaatagccaaagaggcagtggagga

SEQ ID NO: 67964 - DNA, 80 bp, synthetic construct
  source 1..80: mol_type = other DNA
acagaaagggcccttgggtgttcgacttagagggaatgtattctggaatagaagaatgtattagcaacaacccttgggta

SEQ ID NO: 67965 - DNA, 80 bp, synthetic construct
  source 1..80: mol_type = other DNA
ggaaaagcatatacagcattagaaggacaagggaaagaacaaaatttgagaccacaatatgaagtaattgaggggatgcc

SEQ ID NO: 67966 - DNA, 80 bp, synthetic construct
  source 1..80: mol_type = other DNA
aaaacacaatggcagaatttagtgaagatcctgaactacaaccagcaatgctattcaacatctgcgtccatctagaggtc

SEQ ID NO: 67967 - DNA, 80 bp, synthetic construct
  source 1..80: mol_type = other DNA
tttattacaagaaacttccagactacaataatacaaaaggccaaaaacacaatggcagaatttagtgaagatcctgaatt

SEQ ID NO: 67968 - DNA, 80 bp, synthetic construct
  source 1..80: mol_type = other DNA
acaacccttgggtaatacagagtgcatactggttcaatgaatggttgggctttgaaaaggaggggagtaaagtattagaa

SEQ ID NO: 67969 - DNA, 80 bp, synthetic construct
  source 1..80: mol_type = other DNA
tgggtaatacagagtgcatactggttcaatgaatggttgggctttgaaaaggaggggagtaaagtattagaatcagtaga

SEQ ID NO: 67970 - DNA, 80 bp, synthetic construct
  source 1..80: mol_type = other DNA
ggaatagaagaatgtattagcaacaacccttgggtaatacagagtgtatactggttcaatgaatggttgggctttgaaaa

SEQ ID NO: 67971 - DNA, 80 bp, synthetic construct
  source 1..80: mol_type = other DNA
taatacaaaaggccaaaaacacaatggcagaatttagtgaagatcctgaattgcaaccagcaatgctattcaatatctgc

SEQ ID NO: 67972 - DNA, 80 bp, synthetic construct
  source 1..80: mol_type = other DNA
gaatgtattagcaacaacccttgggtaatacagagtgcatactggttcaatgaatggttgggctttgaaaaggaggggag

SEQ ID NO: 67973 - DNA, 80 bp, synthetic construct
  source 1..80: mol_type = other DNA
acagagtgcatactggttcaatgaatggttggactttgaaaaggaggggagtaaagtattagaatcagtagatgaaataa

SEQ ID NO: 67974 - DNA, 80 bp, synthetic construct
  source 1..80: mol_type = other DNA
agtgtctagaaaagtactcaacactgagggatcagactgacccaatattaatagtgaaaagcgaaaaagctaacgaaaat

SEQ ID NO: 67975 - DNA, 80 bp, synthetic construct
  source 1..80: mol_type = other DNA
actggttcaatgaatggttgggctttgaagaggaagggagtaaggtattggaatcagtagatgaaataatggatgaataa

SEQ ID NO: 67976 - DNA, 80 bp, synthetic construct
  source 1..80: mol_type = other DNA
cgcgatgctatttcaatatctgggtccatctagaggtttgctatgtaataagtgacatgaattttcttgacgaagaagga

SEQ ID NO: 67977 - DNA, 80 bp, synthetic construct
  source 1..80: mol_type = other DNA
agtaaatagcgccaaaactttcagtattggaactcaagaagggaaactagtaaaaggatcctttggaaaagcactaagag

SEQ ID NO: 67978 - DNA, 80 bp, synthetic construct
  source 1..80: mol_type = other DNA
actggttcaatgaatggttgggcgttgaaaaggaggggagcaaagtgctggaatcagtggatgaagtaatggatgaataa

SEQ ID NO: 67979 - DNA, 80 bp, synthetic construct
  source 1..80: mol_type = other DNA
gggagtaaagtgttagaatcagtggatgaaataatggatgaataaaaggaaatggtactcaatttggtactattttgttc

SEQ ID NO: 67980 - DNA, 80 bp, synthetic construct
  source 1..80: mol_type = other DNA
agcagaagcaggggatccgaaatgtcaaaaacttttgccgaaatagcagaggcttttttagagccagaagctgtaagaat

SEQ ID NO: 67981 - DNA, 80 bp, synthetic construct
  source 1..80: mol_type = other DNA
tggaggaattggaagagcctctaaaaagatcccagagatttctctaacacaagatgtaataacaacagaaggattaaaac

SEQ ID NO: 67982 - DNA, 80 bp, synthetic construct
  source 1..80: mol_type = other DNA
aatcagagaataagttgccagaaccaagatctttccctagatggttcaatgctgagtggatgtgggcaataaaggattct

SEQ ID NO: 67983 - DNA, 80 bp, synthetic construct
  source 1..80: mol_type = other DNA
gaccttactggatgggtgcccatggcagaataccctcctgctgataatgaattggaagattacgctgaacatctaaataa

SEQ ID NO: 67984 - DNA, 80 bp, synthetic construct
  source 1..80: mol_type = other DNA
aaccatggaaggggtcttgcaaggaacaaattgcgcaagagaaatggggaaatgcattcttactgttgtggcactaatga

SEQ ID NO: 67985 - DNA, 80 bp, synthetic construct
  source 1..80: mol_type = other DNA
ctgaatgtagactatttcctgggaaaataaaagtggtgcccatatatgctagaagtaaagaaaggaaatcaatgcaagaa

SEQ ID NO: 67986 - DNA, 80 bp, synthetic construct
  source 1..80: mol_type = other DNA
gggcttccggtgccctcagaaatggactgtttatttggtatatgcgtcaagtcaaaatcacatttaaacaaggatgatgg

SEQ ID NO: 67987 - DNA, 80 bp, synthetic construct
  source 1..80: mol_type = other DNA
aatgtacacaataataacatttgaattctcaataagagagcctaatttagaaaaacatcaaaaatatactgtatttgaag

SEQ ID NO: 67988 - DNA, 80 bp, synthetic construct
  source 1..80: mol_type = other DNA
tgttctgtgatgagtatttgagtacaaatgggagtgatagatttgtgctcattgaaggaagaaaaagaggaactgcagtg

SEQ ID NO: 67989 - DNA, 80 bp, synthetic construct
  source 1..80: mol_type = other DNA
ctggacacacaacagttagaatgaagaaaggagagtcagttattggaagagaagtccctctttatttatactgtaggaca

SEQ ID NO: 67990 - DNA, 80 bp, synthetic construct
  source 1..80: mol_type = other DNA
actgccctttccaaaattaagaatgactggctatcaaaagctagaagatgtttcatcacaactatggacacagtggaaac

SEQ ID NO: 67991 - DNA, 80 bp, synthetic construct
  source 1..80: mol_type = other DNA
tatatgtctaagagagtcagcaaaggctgaagaaaatctagttgaaaaaacattaaacgaaaaacaaatgtggattggga

SEQ ID NO: 67992 - DNA, 80 bp, synthetic construct
  source 1..80: mol_type = other DNA
agaaaaatggagagttaattgctcaacctttaagagaagctttaagggtacagctggtacaacaattttatttctgcatc

SEQ ID NO: 67993 - DNA, 80 bp, synthetic construct
  source 1..80: mol_type = other DNA
tataatgacagtcaattggaaggcttttgtaatgagcagaagaaaatcctaatggctcttgaaggtgacaagaaaaataa

SEQ ID NO: 67994 - DNA, 80 bp, synthetic construct
  source 1..80: mol_type = other DNA
atcatcttttggatttaatccagaaggattattagaaaagattgaagagtgtcttataaataatccgatgtgccttttta

SEQ ID NO: 67995 - DNA, 80 bp, synthetic construct
  source 1..80: mol_type = other DNA
tggctcaaaggttgaatgaacttgtgattgaggcctcaaaaagaggcgctaagtttttcaaaactgattgatcattataa

SEQ ID NO: 67996 - DNA, 80 bp, synthetic construct
  source 1..80: mol_type = other DNA
gtgattgaggcctcaaaaagaggcgctaagtttttcaaaactgattgatcattataagaaaaaatccccttgctactgct

SEQ ID NO: 67997 - DNA, 80 bp, synthetic construct
  source 1..80: mol_type = other DNA
tctttacaaaatgagctatgtaaaagttatgatcttgaaccactaccttttctttgtgacattttcgacagagaagagaa

SEQ ID NO: 67998 - DNA, 80 bp, synthetic construct
  source 1..80: mol_type = other DNA
acaattcgttgaaattggaataacaagaaaagcagatgatagctattttcaatccaagtttggtaaacttggaaatagct

SEQ ID NO: 67999 - DNA, 80 bp, synthetic construct
  source 1..80: mol_type = other DNA
gcaagatatttgtattctcctatgatggaagattggacaaaaattgtgaaggccctatggaggaacaaaaattgagaatc

SEQ ID NO: 68000 - DNA, 80 bp, synthetic construct
  source 1..80: mol_type = other DNA
ttcagttttcttgcaactgctgctgattttcttaggaaagaaaacatgtttaacgaaatcttcttaccagacaatgaaga

SEQ ID NO: 68001 - DNA, 80 bp, synthetic construct
  source 1..80: mol_type = other DNA
aaccatcattgaaatgaagaaaggaaaaacatttctagaattgagggatgaaagtgttcctttacctttccaaacttatg

SEQ ID NO: 68002 - DNA, 80 bp, synthetic construct
  source 1..80: mol_type = other DNA
aacagatgaaagattactgtgaaaaatttaaaggaaatccaagagaattagcttctaaagtaagccaaatgcaaagcaac

SEQ ID NO: 68003 - DNA, 80 bp, synthetic construct
  source 1..80: mol_type = other DNA
attaaattgccaataaaacattatgagcagaataaatttcgacaaatacgtctaccaaagggaccaatggcaccctatac

SEQ ID NO: 68004 - DNA, 80 bp, synthetic construct
  source 1..80: mol_type = other DNA
agccaaagaagcagtggaagaatatggggatcacgaaagaaaaataatacaaattggaatacactttcaagtttgctgca

SEQ ID NO: 68005 - DNA, 80 bp, synthetic construct
  source 1..80: mol_type = other DNA
ccacaagttcttaatggaagaagcatggatgtttacaaaaattagtgatcctgaaagatcaagagctggtgaaattctca

SEQ ID NO: 68006 - DNA, 80 bp, synthetic construct
  source 1..80: mol_type = other DNA
ttgatttcttcaagaaagggaatctttctgcaatcagacccaaagacaaaccgttacaagggaaatatcccatacattac

SEQ ID NO: 68007 - DNA, 80 bp, synthetic construct
  source 1..80: mol_type = other DNA
aaaaatctttggaatcagattaaagcagcaatagccgatagaaccatggtaataaatgaaaatgatcattcagaatttct

SEQ ID NO: 68008 - DNA, 80 bp, synthetic construct
  source 1..80: mol_type = other DNA
atggcagaatttagtgaagatcctgaattgcaaccagcaatgctattcaacatctgcgtccatctagaggtttgctatgt

SEQ ID NO: 68009 - DNA, 80 bp, synthetic construct
  source 1..80: mol_type = other DNA
tgaaaaggaggggagtaaagtgttagaatcagtggatgaaataatggatgaataaaggaaatggtactcaatttggtact

SEQ ID NO: 68010 - DNA, 80 bp, synthetic construct
  source 1..80: mol_type = other DNA
ggaggggagtaaagtattagaatcagtagatgaaataatggatgaataaaagggcatagtactcaatttagtactatttt

SEQ ID NO: 68011 - DNA, 80 bp, synthetic construct
  source 1..80: mol_type = other DNA
tgttggaatcagtggatgaaataatggatgaataaaaggaaatggtactcaatttggtactattttgttcattatgtatc

SEQ ID NO: 68012 - DNA, 80 bp, synthetic construct
  source 1..80: mol_type = other DNA
attagaatcagtagatgaaataatggatgaataaaagaacatagtactcaatttagtactattttgttcattatgtatct

SEQ ID NO: 68013 - DNA, 80 bp, synthetic construct
  source 1..80: mol_type = other DNA
tagaatcaatagatgaaataatggatgaatgaacgaagggcatagcgctcaatttagtactattttgttcattatgtatc

SEQ ID NO: 68014 - DNA, 80 bp, synthetic construct
  source 1..80: mol_type = other DNA
tttgtcataatggatacttttattacaagaaacttccagactacaataatacaaaaggccaaaaacacaatggcagaatt

SEQ ID NO: 68015 - DNA, 80 bp, synthetic construct
  source 1..80: mol_type = other DNA
ctctggacctaccagaaatagggccagacgtagcaccagtggagcatgttggaagtgaaagaaggaaatactttgttaat

SEQ ID NO: 68016 - DNA, 80 bp, synthetic construct
  source 1..80: mol_type = other DNA
aaaaggagaaagtttcgacatgctttatggtctggcggttaaaggacaatctcatctgaggggtgacactgatgttgtaa

SEQ ID NO: 68017 - DNA, 80 bp, synthetic construct
  source 1..80: mol_type = other DNA
atggggaatggaagctagaagatgtctgcttcaatcaatgcaacaaatggaagcaattgttgaacaagaatcctcgatac

SEQ ID NO: 68018 - DNA, 80 bp, synthetic construct
  source 1..80: mol_type = other DNA
gagggattcagtgccgaatctaggagacttctactgttgattcaagcattaaaggacagaaagggcccttgggtgttcga

SEQ ID NO: 68019 - DNA, 80 bp, synthetic construct
  source 1..80: mol_type = other DNA
aatggttgggttttgaaaaggaggggagtaaagtattagaatcagtagatgaaataatggatgaataaaagacatagtac

SEQ ID NO: 68020 - DNA, 80 bp, synthetic construct
  source 1..80: mol_type = other DNA
aaataatggatgaataaaagacatagtactcaatttagtactactttgttcattatgtatctaaacatccaatataaaga

SEQ ID NO: 68021 - DNA, 80 bp, synthetic construct
  source 1..80: mol_type = other DNA
gctgggaaacagcatggaactgatgatattcagctacaatcaagactattcgttaagtaatgaatcctcattggatgagg

SEQ ID NO: 68022 - DNA, 80 bp, synthetic construct
  source 1..80: mol_type = other DNA
ggagaagaagatgttgaaaagggaattgactttaaacttggacaaacaatatctagactaagggatatatctgttcctgc

SEQ ID NO: 68023 - DNA, 80 bp, synthetic construct
  source 1..80: mol_type = other DNA
gtcacacctaaaaagttgaaatgggaggacctaagaccaatagggcctcacatttacaaccatgagctaccagaagttcc

SEQ ID NO: 68024 - DNA, 80 bp, synthetic construct
  source 1..80: mol_type = other DNA
tttcttttaatgtctgatgaactggggctggccaatatgacggagggaaagtccaaaaaaccaaagacattagccaaaga

SEQ ID NO: 68025 - DNA, 80 bp, synthetic construct
  source 1..80: mol_type = other DNA
aataaaaggaaatagtactcaatttggtactattttgttcattatgtatctaaacatccaataaaaaggaacaagaatca

SEQ ID NO: 68026 - DNA, 80 bp, synthetic construct
  source 1..80: mol_type = other DNA
aaaggacatagtactaaatttggtactattttgttcattatgtatctaaacatccaatacaaagaaccaaaaatcaaaaa

SEQ ID NO: 68027 - DNA, 80 bp, synthetic construct
  source 1..80: mol_type = other DNA
ctaaaacccctaacaaatgtagagtggctgcttgggttcaaacagaaatgaatctattgagcactctaacaaataaaaga

SEQ ID NO: 68028 - DNA, 80 bp, synthetic construct
  source 1..80: mol_type = other DNA
gggggacatggtactcaacttagtactattttgttcattatgtatctaaacatccaataaagagaaccaagaatcaaaaa

SEQ ID NO: 68029 - DNA, 80 bp, synthetic construct
  source 1..80: mol_type = other DNA
aaagacatagtacccaatttagtactactttgttcattatgtatctaaacatccaatataaagaaccaagaatcaaaaat

SEQ ID NO: 68030 - DNA, 80 bp, synthetic construct
  source 1..80: mol_type = other DNA
agcagaagcggtgcgtttgatttgtcataatggatacttttattacaagaaacttccagactacaataatacaaaaggcc

SEQ ID NO: 68031 - DNA, 80 bp, synthetic construct
  source 1..80: mol_type = other DNA
aatggttgggctttgaaaaggaggggaataaagtgttggaatcagtggatgaaataatggatgaataaaaggaaatggta

SEQ ID NO: 68032 - DNA, 80 bp, synthetic construct
  source 1..80: mol_type = other DNA
ctcaatttggtactattttgttcattatgtatctaaacatccaataaaaagaaccaagaatcaaaaatgcacgtgtttct

SEQ ID NO: 68033 - DNA, 80 bp, synthetic construct
  source 1..80: mol_type = other DNA
gctacacaatagacaccgtgatcagaacgcatgagtactcaaacaaggggaaacagtacatttctgatgttacaggatgc

SEQ ID NO: 68034 - DNA, 80 bp, synthetic construct
  source 1..80: mol_type = other DNA
gaaaagagacattggggcaatagaagattcagaatatgaagaaataaaagatattataagggatgcaaagaaagctagaa

SEQ ID NO: 68035 - DNA, 80 bp, synthetic construct
  source 1..80: mol_type = other DNA
atgtcacatcgctgatatcaacaacatacccctatacagggccacctccaatgtcacatggatcatcaaccaaatacact

SEQ ID NO: 68036 - DNA, 80 bp, synthetic construct
  source 1..80: mol_type = other DNA
ctcttcatagatgtacccatacaggcagcaatttcaacaacattcccatacaccggtgttcccccttattcccatggaac

SEQ ID NO: 68037 - DNA, 80 bp, synthetic construct
  source 1..80: mol_type = other DNA
ggcccacagattaagaatggatgcacgactagattatgaatcaggaagaatgtcaaaggatgattttgagaaagcaatgg

SEQ ID NO: 68038 - DNA, 80 bp, synthetic construct
  source 1..80: mol_type = other DNA
cccatacaggcagcaatttcaacaacattcccatacaccggtgttcccccttattctcatggaacgggaacaggccacac

SEQ ID NO: 68039 - DNA, 80 bp, synthetic construct
  source 1..80: mol_type = other DNA
gaatggatgcacgactagattatgaatcaggaagaatgtcaaaggatgattttgagaaagcaatggctcaccttggtgag

SEQ ID NO: 68040 - DNA, 80 bp, synthetic construct
  source 1..80: mol_type = other DNA
aaacaacgatgtcacatcgctgatatcaacaacatacccctatacagggccacctccaatgtcacatggatcatcaacta

SEQ ID NO: 68041 - DNA, 80 bp, synthetic construct
  source 1..80: mol_type = other DNA
aggcagcaatttcaacaacattcccatacactggtgttcccccttattctcatggaacaggaacaggctacacaatagac

SEQ ID NO: 68042 - DNA, 80 bp, synthetic construct
  source 1..80: mol_type = other DNA
aaagcaatggctcaccttggtgagattgggtacatataagcttcgaagatgtttatggggttattggtcatcattggata

SEQ ID NO: 68043 - DNA, 80 bp, synthetic construct
  source 1..80: mol_type = other DNA
cacggttagattatgaatcagggagaatgtcaaaggatgattttgagaaagcaatggctcaccttggtgagattggatac

SEQ ID NO: 68044 - DNA, 80 bp, synthetic construct
  source 1..80: mol_type = other DNA
ggggcaatagaagattcagaatatgaagaaataaaagacattataagggatgcaaagaaagctagacttgaaagtagatg

SEQ ID NO: 68045 - DNA, 80 bp, synthetic construct
  source 1..80: mol_type = other DNA
ggagaatgtcaaaggatgattttgagaaagcaatggctcaccttggtgagattgggtacatataagcttcaaagatgttt

SEQ ID NO: 68046 - DNA, 80 bp, synthetic construct
  source 1..80: mol_type = other DNA
tacaccggtgttcccccttattcccatggaacgggaacaggctacacaatagacaccgtgatcagaacacatgagtactc

SEQ ID NO: 68047 - DNA, 80 bp, synthetic construct
  source 1..80: mol_type = other DNA
accttagtgagattgggtacatataagcttcgaagatgtttatggggttattggtcagcattgaatacatgcgatacata

SEQ ID NO: 68048 - DNA, 80 bp, synthetic construct
  source 1..80: mol_type = other DNA
aaggatgattttgagaaagcaatggctcaccttggtgagattgggtacacataagctccgaagatgtccatggggttatt

SEQ ID NO: 68049 - DNA, 80 bp, synthetic construct
  source 1..80: mol_type = other DNA
tgattttgaaaaagcaatggctcaccttggtgagattgggtacatataagcttcgaagatgtctatggggttattggtca

SEQ ID NO: 68050 - DNA, 80 bp, synthetic construct
  source 1..80: mol_type = other DNA
tttgagaaagcaatggctcaccttggtgagattgggtacacataagctccgaagatgtccatggggttattggtcatcat

SEQ ID NO: 68051 - DNA, 80 bp, synthetic construct
  source 1..80: mol_type = other DNA
ctcaccttggtgagattgggtacacataagctccgaagatgtccatggggttattggtcatcattggatacatgtgataa

SEQ ID NO: 68052 - DNA, 80 bp, synthetic construct
  source 1..80: mol_type = other DNA
gatgtgcccgtacaggcagcaatttcaacaacattcccatacactggtgttcccccttattcccatggaacaggaacagg

SEQ ID NO: 68053 - DNA, 80 bp, synthetic construct
  source 1..80: mol_type = other DNA
cttggtgagattgggtacatataagctccgaagatgtctatggggttattggtcatcattgaatacatgtgataaacaaa

SEQ ID NO: 68054 - DNA, 80 bp, synthetic construct
  source 1..80: mol_type = other DNA
gtgagattggatacatataagcttcgaagatgtttatggggttattggtcatcattgaatacatgcgatacataaatgat

SEQ ID NO: 68055 - DNA, 80 bp, synthetic construct
  source 1..80: mol_type = other DNA
aatatgtctctgacatcacaggatgtacaatggtagatccaataaatggaccattacccgaagacaatgagccaagtgcc

SEQ ID NO: 68056 - DNA, 80 bp, synthetic construct
  source 1..80: mol_type = other DNA
tatgcacaattagattgcgttctggaggctttggatagaatggatgaggaacatccaggtctgtttcaagcagcctcaca

SEQ ID NO: 68057 - DNA, 80 bp, synthetic construct
  source 1..80: mol_type = other DNA
atggaaatcaacccatatttgatgtttctaaacaacgacgtcacatcgctgatatcaacaacatacccctatacagggcc

SEQ ID NO: 68058 - DNA, 80 bp, synthetic construct
  source 1..80: mol_type = other DNA
aagctagaattgaaagtagatgaggaggggctgttaaaccctttcctcctacttgcacatatttttgttattccattaaa

SEQ ID NO: 68059 - DNA, 80 bp, synthetic construct
  source 1..80: mol_type = other DNA
tcagcataccattagaaagatataatgaagaaacaagggcgaaattaaaaaggctgaagccattcttcaatgaagaagga

SEQ ID NO: 68060 - DNA, 80 bp, synthetic construct
  source 1..80: mol_type = other DNA
aacaaggaatacttatgggatggactgcaatcttccgatgattttgctttgtttgttaatgcaaaagatgaagaaacatg

SEQ ID NO: 68061 - DNA, 80 bp, synthetic construct
  source 1..80: mol_type = other DNA
agaggagattccaaagtggaaggaaaaagaatgaaaattataaaggagctatgggaaaacactaaaggaagagatggtct

SEQ ID NO: 68062 - DNA, 80 bp, synthetic construct
  source 1..80: mol_type = other DNA
ggtacacataagctccgaagatgtccatggggttattggtcatcattggatacatgtgataaacaaatgattaaaatgaa

SEQ ID NO: 68063 - DNA, 80 bp, synthetic construct
  source 1..80: mol_type = other DNA
ggagacagactttcgattggacagtatgcagaaaccagcctgctgcaacggcactaaacacaacaataacctccttcaga

SEQ ID NO: 68064 - DNA, 80 bp, synthetic construct
  source 1..80: mol_type = other DNA
gaaaaaattgcctgctaaaaacagaaagggtttcctcataaagagaataccaatgaaagtaaaagacaggatatccagag

SEQ ID NO: 68065 - DNA, 80 bp, synthetic construct
  source 1..80: mol_type = other DNA
gtgagattgggtacatataagtgtcaaaggatgattttgagaaagcaatggctcaccttggtgagattgggtacatataa

SEQ ID NO: 68066 - DNA, 80 bp, synthetic construct
  source 1..80: mol_type = other DNA
tttgccagaaaggcgagcctttaagatgaatataaatccttattttctcttcatagatgtgcccatacaggcagcaattt

SEQ ID NO: 68067 - DNA, 80 bp, synthetic construct
  source 1..80: mol_type = other DNA
atggctcaccttggtgagattgggtacatataagcttcgaagatgtctatggggttattggtcatcattgaatacatgcg

SEQ ID NO: 68068 - DNA, 80 bp, synthetic construct
  source 1..80: mol_type = other DNA
ctttaagatgaatataaatccgtattttctattcatagatgtacctatacaggcagcaatttcaacaacattcccataca

SEQ ID NO: 68069 - DNA, 80 bp, synthetic construct
  source 1..80: mol_type = other DNA
agtatgtttctgacatcacagggtgcacaatgatagatccaacaaatgggccattacctgaagacaatgagccaagtgcc

SEQ ID NO: 68070 - DNA, 80 bp, synthetic construct
  source 1..80: mol_type = other DNA
ataagctccgaagatgtccatggggttattggtcatcattggataagtgtaaatgattaaaatgaaaaaaatgaaaaaag

SEQ ID NO: 68071 - DNA, 80 bp, synthetic construct
  source 1..80: mol_type = other DNA
gggggactttagatgaatataaatccttattttctcttcatagatgtgcccgtacaggcagcaatttcaacaacattccc

SEQ ID NO: 68072 - DNA, 80 bp, synthetic construct
  source 1..80: mol_type = other DNA
agcagaagcagaggattatggaaatcaacccatatttgatgtttctaaacaacgacgtcacatcgctgatatcaacaaca

SEQ ID NO: 68073 - DNA, 80 bp, synthetic construct
  source 1..80: mol_type = other DNA
gctccagtacttttctgtaataagtttgtgaaacttggacaaggaataagactttcaaataaaagaaaaacaaaggaagt

SEQ ID NO: 68074 - DNA, 80 bp, synthetic construct
  source 1..80: mol_type = other DNA
cataataaaagctgagaaaatgggaaaatacaagaacttaatgagagaagaatataaaaacctttttgaacccttagaaa

SEQ ID NO: 68075 - DNA, 80 bp, synthetic construct
  source 1..80: mol_type = other DNA
aatatattcagaaggatgtctgttttttacctggaggaatgcttatgggaatgttcaacatgctgtcaacagttcttgga

SEQ ID NO: 68076 - DNA, 80 bp, synthetic construct
  source 1..80: mol_type = other DNA
gtaagtacattatgttatatggatgaagaactaaaagccaaaggatgtttttggactggactccaatcttctgatgactt

SEQ ID NO: 68077 - DNA, 80 bp, synthetic construct
  source 1..80: mol_type = other DNA
tgttctttttgcagttgcttcaaactggtcaaatatacattggacaataagacggtttaatgctgtatgcaaattaattg

SEQ ID NO: 68078 - DNA, 80 bp, synthetic construct
  source 1..80: mol_type = other DNA
gtataaacatgtctcttgaaaaatcgtatggttctctcccagaactctttgaatttacaagtatgttctttgatggagaa

SEQ ID NO: 68079 - DNA, 80 bp, synthetic construct
  source 1..80: mol_type = other DNA
tttgtatccaatcttgctatggaattgccagctttcactactgcaggagttaatgaaggagttgattttacagctgcaat

SEQ ID NO: 68080 - DNA, 80 bp, synthetic construct
  source 1..80: mol_type = other DNA
ctactcaagaacatcagttgaaaaaacatcgaaagttttcaatataccaagaagaaagttttgcaattgtcttgaagaca

SEQ ID NO: 68081 - DNA, 80 bp, synthetic construct
  source 1..80: mol_type = other DNA
gtcaattattaagacaaatatgataaataacagcttatcaccttctactgctttaatggccttaaggatatgtctccaag

SEQ ID NO: 68082 - DNA, 80 bp, synthetic construct
  source 1..80: mol_type = other DNA
aatttagagcgacttatagagtccatccttgggattcaagagtgaaaggtgggagaatgaaaataataaatgagttcata

SEQ ID NO: 68083 - DNA, 80 bp, synthetic construct
  source 1..80: mol_type = other DNA
aaaaccatagaaaataaagatggattattaattgctgatggtgggaaactgatgaacaacattagcacccttcatattcc

SEQ ID NO: 68084 - DNA, 80 bp, synthetic construct
  source 1..80: mol_type = other DNA
tgaggaagtactgaagtttgaaaaaatggatgaacaatatagaaatagggtattcaaccccaaaaatccctttaccaact

SEQ ID NO: 68085 - DNA, 80 bp, synthetic construct
  source 1..80: mol_type = other DNA
ttgacaaaactattgatatatttagagcacatggcccaataagggttgaagaaaatgaagcagtagtttcaactcatagc

SEQ ID NO: 68086 - DNA, 80 bp, synthetic construct
  source 1..80: mol_type = other DNA
ttcaggactagagcaaacagaaccctattgaatacagatatgagagcaatgatggcagaagagaaaagatatcaaatggt

SEQ ID NO: 68087 - DNA, 80 bp, synthetic construct
  source 1..80: mol_type = other DNA
ttgcgacatgttcaaaagcgtgtttgaatcagcggacataaatcctccaattggggctatgagcattggagaggccatag

SEQ ID NO: 68088 - DNA, 80 bp, synthetic construct
  source 1..80: mol_type = other DNA
aagaaaaactattagagagagctaaaatgaaaagagacattggggcaatagaagattcagaatatgaagaaataaaagac

SEQ ID NO: 68089 - DNA, 80 bp, synthetic construct
  source 1..80: mol_type = other DNA
attataagggatgcaaagaaagctagacttgaaagtagatgaggaggggctgttaaaccctttcctcctacttgcacata

SEQ ID NO: 68090 - DNA, 80 bp, synthetic construct
  source 1..80: mol_type = other DNA
gaggggctgttaaaccctttcctcctacttgcacatatttttgttattccattaaatgaaaaaatcctcttgctactgct

SEQ ID NO: 68091 - DNA, 80 bp, synthetic construct
  source 1..80: mol_type = other DNA
aagatgagttggtaaaaccaacaggaaacgttgatattagttccttgttaggccttgcagagatgatggagaaaagaatg

SEQ ID NO: 68092 - DNA, 80 bp, synthetic construct
  source 1..80: mol_type = other DNA
ggggaaggattttttaagcattgtgtaatggaggcagaaacagaaatacttaaaatgcacttctctagacttacggaagg

SEQ ID NO: 68093 - DNA, 80 bp, synthetic construct
  source 1..80: mol_type = other DNA
aagacaaacatatgattggacttctgaaagaaacatgccagcggccactgctttgcaactgacagttgatgccataaaag

SEQ ID NO: 68094 - DNA, 80 bp, synthetic construct
  source 1..80: mol_type = other DNA
aaacagaaggaccatttaaagggacaacaatgcttgaatattgcaataaaatgatagaaatgcttgattggaaagaaatt

SEQ ID NO: 68095 - DNA, 80 bp, synthetic construct
  source 1..80: mol_type = other DNA
aaattcaaaaaagtcaaaacagtggtgagaagggagaaagataaaagaagtgggaaggagataaaaactaaagtacctgt

SEQ ID NO: 68096 - DNA, 80 bp, synthetic construct
  source 1..80: mol_type = other DNA
aatgggaattgactcaattaaacatgatgagtttttaattagagcattaactattaataccatggccaaagatggggaaa

SEQ ID NO: 68097 - DNA, 80 bp, synthetic construct
  source 1..80: mol_type = other DNA
gagggaagttgcaaagaagagcaattgcaacacccggtatgatagtaagaccattttcaaaaattgttgaaactgtagca

SEQ ID NO: 68098 - DNA, 80 bp, synthetic construct
  source 1..80: mol_type = other DNA
tacccctatacagggccacctccaatgtcacatggatcatcaaccaaatacactttggaaactattaaaagaacatatga

SEQ ID NO: 68099 - DNA, 80 bp, synthetic construct
  source 1..80: mol_type = other DNA
cagaaaatatgtgagaaattaaaagaaagcggtctacctgttggtggtaatgagaagaaagcaaaacttaagaccactgt

SEQ ID NO: 68100 - DNA, 80 bp, synthetic construct
  source 1..80: mol_type = other DNA
tacttctctcaatgccaggatgaacagtgatcagtttgcagttaatataactggagacaatagtaaatggaatgaatgtc

SEQ ID NO: 68101 - DNA, 80 bp, synthetic construct
  source 1..80: mol_type = other DNA
aacaacctgaggcttatttagcacttttggcttacatcaccaaagactcctctgatttaatgaaagacttatgcagtgtt

SEQ ID NO: 68102 - DNA, 80 bp, synthetic construct
  source 1..80: mol_type = other DNA
agcagaagcggagcctttaagatgaatataaatccttattttctcttcatagatgtgcccgtacaggcagcaatttcaac

SEQ ID NO: 68103 - DNA, 80 bp, synthetic construct
  source 1..80: mol_type = other DNA
agtataccgttagaaagatataatgaagaaacaagggcaaaattgaaaaagctaaaaccattcttcaatgaagaaggaac

SEQ ID NO: 68104 - DNA, 80 bp, synthetic construct
  source 1..80: mol_type = other DNA
atgtttatggggttattggtcatcattgaatacatgcgatacacaaatgattaaaatgaaaaaaggctcgtgtttctact

SEQ ID NO: 68105 - DNA, 80 bp, synthetic construct
  source 1..80: mol_type = other DNA
acaaacaaatgattaaaatgaaaaaaggctcgtgtttctagttctccagctatgagtcccagatactgcatcataatcca

SEQ ID NO: 68106 - DNA, 80 bp, synthetic construct
  source 1..80: mol_type = other DNA
ggcaaacagaatccccttggaatacaaggggatacaacttaaaacaaatgctgaagacataggaacaaaaggccaaatgt

SEQ ID NO: 68107 - DNA, 80 bp, synthetic construct
  source 1..80: mol_type = other DNA
aggatctgggcgatgtgttctaattttcccttggctttgaccaagggtgacatggcaaacagaatccccttggaatacaa

SEQ ID NO: 68108 - DNA, 80 bp, synthetic construct
  source 1..80: mol_type = other DNA
aacggtagaccaatataacataataagaaaattcaatacatcaaggattgaaaagaatccttcactaaggatgaagtggg

SEQ ID NO: 68109 - DNA, 80 bp, synthetic construct
  source 1..80: mol_type = other DNA
aaaccagttaaagtagttaaaaggaaaaggtatagtgctttgtccaatgacatttcacaaggaattaagagacaaagaat

SEQ ID NO: 68110 - DNA, 80 bp, synthetic construct
  source 1..80: mol_type = other DNA
tgggatttgggcaaaaagttagactcttcgtaggccaaggaagcgttagaaccttcaagcgaactgcctcacaaagggct

SEQ ID NO: 68111 - DNA, 80 bp, synthetic construct
  source 1..80: mol_type = other DNA
gactatgccaagatactaaggcagctcaaatgatgacagtaggaactgtatcgaactacactacgttcaagaaatggact

SEQ ID NO: 68112 - DNA, 80 bp, synthetic construct
  source 1..80: mol_type = other DNA
atcttactttatcaaggaaagcccgttaaagtagttaaaaggaaaagatatagtgctttatccaatgacatttcacaagg

SEQ ID NO: 68113 - DNA, 80 bp, synthetic construct
  source 1..80: mol_type = other DNA
cggcagaatgatgtcactaaaagggaaaattgaagatgaagaaaggaatagatcaatggggaatgcagtattagcaggct

SEQ ID NO: 68114 - DNA, 80 bp, synthetic construct
  source 1..80: mol_type = other DNA
atgacatttcacagggaattaagagacaaagaatgacagttgagtccatggggtgggccttgagctaatataaatttatc

SEQ ID NO: 68115 - DNA, 80 bp, synthetic construct
  source 1..80: mol_type = other DNA
gggacaatgaggccaaaacagttttgaagcaaacaacagtagaccaatataacataataagaaaattcaatacatcaagg

SEQ ID NO: 68116 - DNA, 80 bp, synthetic construct
  source 1..80: mol_type = other DNA
gacggcctgagctaaaaagaatatcaggaagaggattcaaaaatgatgaagaaatattaatagggaacggaacaatacag

SEQ ID NO: 68117 - DNA, 80 bp, synthetic construct
  source 1..80: mol_type = other DNA
tgttaaaacaactgttaagggacaatgaagccaaaacagtactgaaacaaacaacagtagatcaatataacataataaga

SEQ ID NO: 68118 - DNA, 80 bp, synthetic construct
  source 1..80: mol_type = other DNA
tatagtgctttatccaatgacatttcacaaggaattaagagacaaagaatgacagttgagtccatggggtgggccttgga

SEQ ID NO: 68119 - DNA, 80 bp, synthetic construct
  source 1..80: mol_type = other DNA
actgctaagggacaatgaagccaaaacagttttgaagcaaacaacagtagaccaatataacataataagaaaattcaata

SEQ ID NO: 68120 - DNA, 80 bp, synthetic construct
  source 1..80: mol_type = other DNA
aggaattaagagacaaagaatgacagttgagtccatggggtgggccttgagctaatataaatttatccattaattcaatg

SEQ ID NO: 68121 - DNA, 80 bp, synthetic construct
  source 1..80: mol_type = other DNA
attgttaaaacaactgctaagggacaatgaagccaaaacagttttgaagcaaacaacggtagaccaatataacataataa

SEQ ID NO: 68122 - DNA, 80 bp, synthetic construct
  source 1..80: mol_type = other DNA
gtgctttgtccaatgacatttcacaaggaattaagagacaaagaatgacagttgagtctatggggtgggccttgagctaa

SEQ ID NO: 68123 - DNA, 80 bp, synthetic construct
  source 1..80: mol_type = other DNA
agagattcagctaaggaggaggacatgaaagatggaataatgtggtgcatggtattttctcaagacactaggatgttcca

SEQ ID NO: 68124 - DNA, 80 bp, synthetic construct
  source 1..80: mol_type = other DNA
cagtagatcaatttaccatattaagaaaattcaatacatcaagaattgaaaagaacccttcattaaggatgaagtgggcg

SEQ ID NO: 68125 - DNA, 80 bp, synthetic construct
  source 1..80: mol_type = other DNA
atgtctcttctattgacaatagcaaaggaatacaaaagactatgccaagatgctaaggcagctcaaatgatgacagtagg

SEQ ID NO: 68126 - DNA, 80 bp, synthetic construct
  source 1..80: mol_type = other DNA
tagaaccttcaagcgaactgcctcacaaagggctgcatcaagcgatgtaaataagaatgtgaaaaagataaagatgtcta

SEQ ID NO: 68127 - DNA, 80 bp, synthetic construct
  source 1..80: mol_type = other DNA
tgaagccaaaacagtgctgaaacaaacaacagtagatcaatataacataataagaaaattcaatacatcaagaattgaaa

SEQ ID NO: 68128 - DNA, 80 bp, synthetic construct
  source 1..80: mol_type = other DNA
aaaacagttttgaagcaaacaacagtagaccaatataacataataagaaagttcaatacgtcaaggattgaaaagaatcc

SEQ ID NO: 68129 - DNA, 80 bp, synthetic construct
  source 1..80: mol_type = other DNA
gcaactgttaagggacaatgaagccaaaacagtactgaaacaaacaacagtagatcaatataacataataagaaaattca

SEQ ID NO: 68130 - DNA, 80 bp, synthetic construct
  source 1..80: mol_type = other DNA
gccttgagctaatataaatttatccattaattcaatgaatacaattgagtgaaaaatgctcgtgtttcacctggtcataa

SEQ ID NO: 68131 - DNA, 80 bp, synthetic construct
  source 1..80: mol_type = other DNA
aagatgacattggctaaaattgaattgttaaaacaactgttaagggacaatgaagccaaaacagtactgaaacaaacaac

SEQ ID NO: 68132 - DNA, 80 bp, synthetic construct
  source 1..80: mol_type = other DNA
gaagaggagttccatgtgagatgtggtgaatgcaggggaatattaaaaaagagcaaaatgagaatggaaaaactactaat

SEQ ID NO: 68133 - DNA, 80 bp, synthetic construct
  source 1..80: mol_type = other DNA
acgatctctttgatcaatgggggtatgaggaatcacccaaagcaagtgagctacatgggataaatgaactaatgaatgca

SEQ ID NO: 68134 - DNA, 80 bp, synthetic construct
  source 1..80: mol_type = other DNA
taataaaaaggactggggaagtcataatgggagccaatgacgtaagtgaattagaatcacaagcacagctaatgataaca

SEQ ID NO: 68135 - DNA, 80 bp, synthetic construct
  source 1..80: mol_type = other DNA
gaggagaaaatttcatcgaagtaaggaaagggtctcctctattctcttacaatccacaaacagaagtcctaactatatgc

SEQ ID NO: 68136 - DNA, 80 bp, synthetic construct
  source 1..80: mol_type = other DNA
gaagatgaagaaaggagtagatcaatggggaatgcagtgttggcgggttttcttgttagtggcaagtatgacccagatct

SEQ ID NO: 68137 - DNA, 80 bp, synthetic construct
  source 1..80: mol_type = other DNA
gaatgacagttgagtccatggggtgggccttgagctaatataaatttatccattaattcaatgaatacaattgagtgaaa

SEQ ID NO: 68138 - DNA, 80 bp, synthetic construct
  source 1..80: mol_type = other DNA
gagatactgaaggtttcgaaaaagtctacgaaagcttttttctcagaaagatgagacttgacaatgccacttggggccga

SEQ ID NO: 68139 - DNA, 80 bp, synthetic construct
  source 1..80: mol_type = other DNA
ataacttttggcccagttgaaagagtaagaaaaagggtactgctaaaccctctcaccaaggaaatgcctccagatgaagc

SEQ ID NO: 68140 - DNA, 80 bp, synthetic construct
  source 1..80: mol_type = other DNA
tatatcacccgggagggaataaactaactgaatctaggtcccaatcgatgattgtggcttgtagaaagataatcagaaga

SEQ ID NO: 68141 - DNA, 80 bp, synthetic construct
  source 1..80: mol_type = other DNA
gccatagacggaggtgatgtcgcctgtgacataataagagctgcattaggactaaagatcagacaaagacaaagatttgg

SEQ ID NO: 68142 - DNA, 80 bp, synthetic construct
  source 1..80: mol_type = other DNA
ataataagaaaattcaatacatcaagaattgaaaagaacccttcattaaggatgaagtgggcgatgtgttctaattttcc

SEQ ID NO: 68143 - DNA, 80 bp, synthetic construct
  source 1..80: mol_type = other DNA
ctaaagagaatatcaggaagaggattcaaaaatgatgaagaaatattaatcgggaacggaacaatacagaagattggaat

SEQ ID NO: 68144 - DNA, 80 bp, synthetic construct
  source 1..80: mol_type = other DNA
agcagaagcagaggattggaaatgtctcttctattgacaatagcaaaggaatacaaaagactatgccaagatgctaaggc

SEQ ID NO: 68145 - DNA, 80 bp, synthetic construct
  source 1..80: mol_type = other DNA
gctactcaagaaaatttctggttccggagtaaaagttaaagatacagtatatatccaaggtgtcagagcagtacaatttg

SEQ ID NO: 68146 - DNA, 80 bp, synthetic construct
  source 1..80: mol_type = other DNA
aatactggagtgagcaagaagaattctatggagaatataagtcagccaccgctttattcagcagaaaggaaagatcacta

SEQ ID NO: 68147 - DNA, 80 bp, synthetic construct
  source 1..80: mol_type = other DNA
gaatggattacaataggaggaggaataaatgaagacagaaagagacttctagctatgtgcatgatattttgcagagatgg

SEQ ID NO: 68148 - DNA, 80 bp, synthetic construct
  source 1..80: mol_type = other DNA
agattattttaaagacgcccctgcaacaataacaatggcagatttaagtacgaagttaggaagagaaattccatatcaat

SEQ ID NO: 68149 - DNA, 80 bp, synthetic construct
  source 1..80: mol_type = other DNA
atgtgatgatgaattggatacaaaaatcagaagataatcttgaagccttattatacagtaggggaattgtagaaaccaat

SEQ ID NO: 68150 - DNA, 80 bp, synthetic construct
  source 1..80: mol_type = other DNA
ccaggaaaaatggggagctcaatgggaattgatggttccaaaagagcaattaaatctttaagggctgtcacaatacaatc

SEQ ID NO: 68151 - DNA, 80 bp, synthetic construct
  source 1..80: mol_type = other DNA
aggaaagattgacatgccagaatcaaaagaaaaaattcaccttgagctctctgataatcttgaagcatttgattcatcag

SEQ ID NO: 68152 - DNA, 80 bp, synthetic construct
  source 1..80: mol_type = other DNA
cttcactaagaatgagatgggcaatgagcagcaaattcccaataatagctaacaagagaatgctggaagaagctcaaatt

SEQ ID NO: 68153 - DNA, 80 bp, synthetic construct
  source 1..80: mol_type = other DNA
gaagaattgttgcaacaattttagatcttcctagtgacaaaaaggtaacatttcaggatgtaagctttcaacatcctgat

SEQ ID NO: 68154 - DNA, 80 bp, synthetic construct
  source 1..80: mol_type = other DNA
ctggcagtgttgagagatgagaaaactgccataacaaaagggtatgaagcgctaatcaaaaggctaggaacaggggacaa

SEQ ID NO: 68155 - DNA, 80 bp, synthetic construct
  source 1..80: mol_type = other DNA
tgatattccttccttaattgctaagaaggattatttgtctctttataatttaccagaagtaaaattaatggctcccttaa

SEQ ID NO: 68156 - DNA, 80 bp, synthetic construct
  source 1..80: mol_type = other DNA
tcagacccaatagaaaaggagtttattccagagttgctagaaaattagtgtctacacaagttactactggacattattca

SEQ ID NO: 68157 - DNA, 80 bp, synthetic construct
  source 1..80: mol_type = other DNA
ttacatgaattgataaaggtcttaccctttacttatttcgccccaaaacaaggaatgtttgaaggaaggcttttctttag

SEQ ID NO: 68158 - DNA, 80 bp, synthetic construct
  source 1..80: mol_type = other DNA
caacgatagctttgttgagcctggtgtaaataacaatgtattttcttggagtaaggctgacagttctaaaatatattgtc

SEQ ID NO: 68159 - DNA, 80 bp, synthetic construct
  source 1..80: mol_type = other DNA
atggaatagcgataagggtacctttagttgttggagatgaacacatggacacttcgttagcactattagaagggtttagt

SEQ ID NO: 68160 - DNA, 80 bp, synthetic construct
  source 1..80: mol_type = other DNA
gtttgtgaaaacgaccccagggcaccaatggtaacaagacaagatttaattgatgtgggatttgggcaaaaagttagact

SEQ ID NO: 68161 - DNA, 80 bp, synthetic construct
  source 1..80: mol_type = other DNA
cttcgtaggccaagggagcgttagaaccttcaagcgaactgcctcacaaagggctgcatcaagcgatgtaaataagaatg

SEQ ID NO: 68162 - DNA, 80 bp, synthetic construct
  source 1..80: mol_type = other DNA
acaaagggctgcatcaagcgatgtaaataagaatgtgaaaaagataaagatgtctaactaaaaatcctcttgctactgct

SEQ ID NO: 68163 - DNA, 80 bp, synthetic construct
  source 1..80: mol_type = other DNA
cctaaagaacacaacaatgtagccctttgggaagacacagaagatgtttcaaaaagggatcatgttcttgcaagcgcctc

SEQ ID NO: 68164 - DNA, 80 bp, synthetic construct
  source 1..80: mol_type = other DNA
ttgtataaattattggaatttttgtggaccttgtgtcaacaattcagaagtgatcaaagaagtttataaatctagatttg

SEQ ID NO: 68165 - DNA, 80 bp, synthetic construct
  source 1..80: mol_type = other DNA
gaagattagaaagaaggaaagaaataatgtggaaagaacttagatttacattggttgatagacaacgaagaagagttgac

SEQ ID NO: 68166 - DNA, 80 bp, synthetic construct
  source 1..80: mol_type = other DNA
actcagcctgtagaacaaagattgagaactggagaaattaaggacttgcaaatgtggactttgttcgaagatgaagctcc

SEQ ID NO: 68167 - DNA, 80 bp, synthetic construct
  source 1..80: mol_type = other DNA
tcttgctagcaaatttattttagacaattatggtctagtcaaagaaatgagatcaaagtttgcaaacaaacctctgaata

SEQ ID NO: 68168 - DNA, 80 bp, synthetic construct
  source 1..80: mol_type = other DNA
aagaagtagttgcacacatgttagaaaaacaattcaatccggaaagtagattcttgcctgttttcggagctataaggcca

SEQ ID NO: 68169 - DNA, 80 bp, synthetic construct
  source 1..80: mol_type = other DNA
gaaagaatggaattgatccatgcattaggaggagaaacttggatacaagaagctaacactgcagggatttccaatgttga

SEQ ID NO: 68170 - DNA, 80 bp, synthetic construct
  source 1..80: mol_type = other DNA
agctcaaatgatgacagtaggaactgtatcgaactacactacgttcaagaaatggactacatcaaggaaggaaaagaatc

SEQ ID NO: 68171 - DNA, 80 bp, synthetic construct
  source 1..80: mol_type = other DNA
tcaaaggaaaaatgatataagagcagtatgtagaaaagtttgtcttgcagcaaatgcaagtataatgaacgccaaaagca

SEQ ID NO: 68172 - DNA, 80 bp, synthetic construct
  source 1..80: mol_type = other DNA
aactggttgagtatataaaaagtacaagtatgagaattggagaaacagaaagaaagcttgaagaacttatacttgaaacc

SEQ ID NO: 68173 - DNA, 80 bp, synthetic construct
  source 1..80: mol_type = other DNA
gatgatgtctcacctgaagtaacattatgtaaatctgctttaggaggacaattaggaaaaactctatcttttgggcccat

SEQ ID NO: 68174 - DNA, 80 bp, synthetic construct
  source 1..80: mol_type = other DNA
gtgaaataaattttcttaatagagcaggccaactcttatctccaatgtatcaactccaaagatattttttgagcagaagt

SEQ ID NO: 68175 - DNA, 80 bp, synthetic construct
  source 1..80: mol_type = other DNA
aaataagaatgtgaaaaagataaagatgtctaactaaaaatcctcttgctactgctagacaggatttaattgatgtggga

SEQ ID NO: 68176 - DNA, 80 bp, synthetic construct
  source 1..80: mol_type = other DNA
agcagaagcggagcgttttcaagatgacattggccaaaattgaattgttaaaacaactgctaagggacaatgaagccaaa

SEQ ID NO: 68177 - DNA, 80 bp, synthetic construct
  source 1..80: mol_type = other DNA
tggggtgggccttgagctaatataaatttatccattaattcaatgaacgcaattgagtgaaaaatgctcgtgtttctact

SEQ ID NO: 68178 - DNA, 80 bp, synthetic construct
  source 1..80: mol_type = other DNA
tatatcacccaggagggaataaattaactgagtccaggtctcaatcaatgatagtagcttgtagaaaaataatcagaaga

SEQ ID NO: 68179 - DNA, 80 bp, synthetic construct
  source 1..80: mol_type = other DNA
tagatcaatggggaatactgaaggtttcgaaaaagtctacgaaagcttttttctcagaaagatgagacttgacaatgcca

SEQ ID NO: 68180 - DNA, 80 bp, synthetic construct
  source 1..80: mol_type = other DNA
agagaacattgatagaatactaacccgtaggttaaggataagttaaatattactaacatgcagacatacaatataatcag

SEQ ID NO: 68181 - DNA, 80 bp, synthetic construct
  source 1..80: mol_type = other DNA
gttatttagatgagtagttttaggtttatgtaggcataagggtttatcagggataattattatataagctatggggttat

SEQ ID NO: 68182 - DNA, 80 bp, synthetic construct
  source 1..80: mol_type = other DNA
aactggaatttaagcattatagcctttataagattactactaatgacagttatggatgtattattgcacttacactgctg

SEQ ID NO: 68183 - DNA, 80 bp, synthetic construct
  source 1..80: mol_type = other DNA
cagcattattgaaccagcattaaatagatatatagctatattagttaggatctagtatatttttacagatgttattcata

SEQ ID NO: 68184 - DNA, 80 bp, synthetic construct
  source 1..80: mol_type = other DNA
ttaaggcgcactcaatcaatggggattcaactcgaccaaaggataatcttgttatacatgcttgagtggggaaaagagat

SEQ ID NO: 68185 - DNA, 80 bp, synthetic construct
  source 1..80: mol_type = other DNA
tgctccatctaatgatggtgccgccggcctcgtcccagagatcaacaatgaggcaatggcgctagacccagtggcgggtg

SEQ ID NO: 68186 - DNA, 80 bp, synthetic construct
  source 1..80: mol_type = other DNA
gattttcaacaatggtctttacccgactattctggtcagttcacccacaacatgaacttggccccagctgttgctcccaa

SEQ ID NO: 68187 - DNA, 80 bp, synthetic construct
  source 1..80: mol_type = other DNA
tggtcccccaggaatgggtccaacacttctaccaggaatcggccaccgcccaaacacaagtggccctggttaggtatgtc

SEQ ID NO: 68188 - DNA, 80 bp, synthetic construct
  source 1..80: mol_type = other DNA
actgttcccccaaatggatattttaggtttgaatcttgggtgaaccccttttatacgcttgcccccatgggaactgggaa

SEQ ID NO: 68189 - DNA, 80 bp, synthetic construct
  source 1..80: mol_type = other DNA
cagcgatagcagcacccctcactggtcagcaaaacataattgatccctggattatgaataattttgtgcaagcacctggt

SEQ ID NO: 68190 - DNA, 80 bp, synthetic construct
  source 1..80: mol_type = other DNA
gtgaatgatgatggcgtcgaaagacgtcgttgcagctactgctgctagcagtaacaatgctagtgacaatagtaacacca

SEQ ID NO: 68191 - DNA, 80 bp, synthetic construct
  source 1..80: mol_type = other DNA
cttactatctaactgtgattggacattcatgggggttgttgagactgtgatacttcttatggagctgtttggtgtgtttt

SEQ ID NO: 68192 - DNA, 80 bp, synthetic construct
  source 1..80: mol_type = other DNA
atcttgcaaaggacctcatacccttggtacttggcggtataggtcttgccattgggtttacaaaagataaagtcacaaag

SEQ ID NO: 68193 - DNA, 80 bp, synthetic construct
  source 1..80: mol_type = other DNA
aagttatctcagccacagctataacacaactagtgagagacaaacaatctgcccgaacatacatggccatcctagacgct

SEQ ID NO: 68194 - DNA, 80 bp, synthetic construct
  source 1..80: mol_type = other DNA
accctcatgtggtgtccacaaccaatgccctcattgcacgcatatcattggccagatcagcattggctaaagcacaggcc

SEQ ID NO: 68195 - DNA, 80 bp, synthetic construct
  source 1..80: mol_type = other DNA
gagatgactaacagggttaaacctgtggtcattatgatgtgtggtccaccaggcattggtaagacgaaggccgctgagta

SEQ ID NO: 68196 - DNA, 80 bp, synthetic construct
  source 1..80: mol_type = other DNA
ttggcagggggccatctccagccccccccactgagccacccaaacagcaacgggaccgcgcccccagaagtgtagtggaa

SEQ ID NO: 68197 - DNA, 80 bp, synthetic construct
  source 1..80: mol_type = other DNA
ttggcaggaggccatctccagccccccccactgagccacccaaacagcaacgggaccgcgcccccagaagtgtagtggaa

SEQ ID NO: 68198 - DNA, 80 bp, synthetic construct
  source 1..80: mol_type = other DNA
tctagccaagcgcctggccaatgagattagaccaggtgggaaggttggtttggtgccgcgtgaagcagttgatcattggg

SEQ ID NO: 68199 - DNA, 80 bp, synthetic construct
  source 1..80: mol_type = other DNA
tcgtttattgttcagctccagacgtggaacagacccgccgcaccaatccaggtgacactggtgccctcaaggattgtttc

SEQ ID NO: 68200 - DNA, 80 bp, synthetic construct
  source 1..80: mol_type = other DNA
aaaagcgatttctcacacctaaagatggaattggcaccacaaggtggttttgacaaccaaggcaacacaccatttgggaa

SEQ ID NO: 68201 - DNA, 80 bp, synthetic construct
  source 1..80: mol_type = other DNA
gggcactatgcgcccaaccacattgaacagactgctgatacaggctgtggcacttaccatggagaggcaggatgaattcc

SEQ ID NO: 68202 - DNA, 80 bp, synthetic construct
  source 1..80: mol_type = other DNA
ccccacatacgactttgacgctgaccggatttcagccttcactagtctagctcgtgccaatgggctgggccttatagata

SEQ ID NO: 68203 - DNA, 80 bp, synthetic construct
  source 1..80: mol_type = other DNA
tggctaaactagggaaaagactaaggagtgtggactctattcatggccttaagaatgcactcagtggttactctataaca

SEQ ID NO: 68204 - DNA, 80 bp, synthetic construct
  source 1..80: mol_type = other DNA
ccatgtagcataaaatggcaagctaggatctatgacattgaatctgatggtacaacagtcaaaataaaagaaaacaccgc

SEQ ID NO: 68205 - DNA, 80 bp, synthetic construct
  source 1..80: mol_type = other DNA
acccagcaggccatgggttgggtggaacaaccactggaccagaacctaccaacctgggaagagttgagcgagtccgagaa

SEQ ID NO: 68206 - DNA, 80 bp, synthetic construct
  source 1..80: mol_type = other DNA
agctcaatcccagcaacaacattcaatagacacagcagtcctggcattgacccgcttaagagcggcaagagcagcagctt

SEQ ID NO: 68207 - DNA, 80 bp, synthetic construct
  source 1..80: mol_type = other DNA
atgcctcttgtttgcaaagcgcaatcaccactatccttcaaatggcaggttcggccctggtcatacatcgggctgtaaaa

SEQ ID NO: 68208 - DNA, 80 bp, synthetic construct
  source 1..80: mol_type = other DNA
cgaatgtttggcacgcattcgagcaccatctcattagagggccccactagagaacaccaatgtagagcccacgtcgccaa

SEQ ID NO: 68209 - DNA, 80 bp, synthetic construct
  source 1..80: mol_type = other DNA
ggccaatggaggtggccctatagggcacgatgatgtcatcgataaatatggcctatgtgagactgaggaggaagaggaca

SEQ ID NO: 68210 - DNA, 80 bp, synthetic construct
  source 1..80: mol_type = other DNA
acactcaggaggttaaagtttgtctgcccacggctatacaagaaggtaagaataaagggaaaaccaaaaagggaagaggt

SEQ ID NO: 68211 - DNA, 80 bp, synthetic construct
  source 1..80: mol_type = other DNA
aggcgtgccaattataatgccttctcaagaagaggcctcagtgatgaagagtatgaggagtacaagaagatcagagaaga

SEQ ID NO: 68212 - DNA, 80 bp, synthetic construct
  source 1..80: mol_type = other DNA
gggatggtggtattggagagactgagatggagatacgacatcgcgtgttctataagtctaaatccaggaagaaccgtcaa

SEQ ID NO: 68213 - DNA, 80 bp, synthetic construct
  source 1..80: mol_type = other DNA
accagttaggccttgtgactggcagtgacattagaaagaggaaaccaattgattggaccccccctaaaaatgaatgggct

SEQ ID NO: 68214 - DNA, 80 bp, synthetic construct
  source 1..80: mol_type = other DNA
tgacatcctggctaataatgaaaactggtttgatgcaggtggacttgctccggcatccatccctagcacacatgatcgtg

SEQ ID NO: 68215 - DNA, 80 bp, synthetic construct
  source 1..80: mol_type = other DNA
gttggggcttttgggttagccctacagtgtttatcacaaccacccatgtcatcccatcaggagctaaagaattctttggc

SEQ ID NO: 68216 - DNA, 80 bp, synthetic construct
  source 1..80: mol_type = other DNA
gagcccatagactcaatcgccatccaccgggcaggagaattcacccaattaaggttttcaaagaagatccgccctgatct

SEQ ID NO: 68217 - DNA, 80 bp, synthetic construct
  source 1..80: mol_type = other DNA
gacggggatggtcttagaagaagggtgcccagaaggagtggtctgttccatactcatcaaaagggactctggtgagttgc

SEQ ID NO: 68218 - DNA, 80 bp, synthetic construct
  source 1..80: mol_type = other DNA
tccccctggctgttcgtatgggggccattgcttcaatgaagatacaggggcgactagtccatggtcaatctggtatgttg

SEQ ID NO: 68219 - DNA, 80 bp, synthetic construct
  source 1..80: mol_type = other DNA
aacacagtggtgtgtgcggtgcaagctggtgagggtgagacaactttggaaggtggtgataaaggccactacgctggaca

SEQ ID NO: 68220 - DNA, 80 bp, synthetic construct
  source 1..80: mol_type = other DNA
tgaaataataaaacacagcaaaggaccagctctctcgagcaagactaagttctggaggtctacaactgaaccattaccac

SEQ ID NO: 68221 - DNA, 80 bp, synthetic construct
  source 1..80: mol_type = other DNA
gcgtgtacgagccagcctaccttggaggtcgtgaccctagggtgaaaggcgggccgtcactgcaacaggttctaagagac

SEQ ID NO: 68222 - DNA, 80 bp, synthetic construct
  source 1..80: mol_type = other DNA
caactgaagccattcgctgaaccacgggggcgcatgccagaacctggattgttggaagcagctgttgaaactgtgacatc

SEQ ID NO: 68223 - DNA, 80 bp, synthetic construct
  source 1..80: mol_type = other DNA
tgtcttagaacaagtcatggacacaccagtgccctggtcatatgctgatgcttgtcagtctcttgataaaaccaccagtt

SEQ ID NO: 68224 - DNA, 80 bp, synthetic construct
  source 1..80: mol_type = other DNA
gcagggaagagggtcctctagggcaccaagtgaagtggactgctgcttctggtgtggaccttggagttgttgatctcaca

SEQ ID NO: 68225 - DNA, 80 bp, synthetic construct
  source 1..80: mol_type = other DNA
ttcattggggagttgggtgagcaggctgcccatgctaacaacatgtatgagcaggggaaatcaatgaagcctctctacac

SEQ ID NO: 68226 - DNA, 80 bp, synthetic construct
  source 1..80: mol_type = other DNA
gcctcctatggggggctgacctgtctacagtcatccgagcggccagagctttcggtccattctgtgatgccataaagcca

SEQ ID NO: 68227 - DNA, 80 bp, synthetic construct
  source 1..80: mol_type = other DNA
catgtaataaaattgcccatcaaagttggcatgaactcaattgaagatggcccaatgatatatgctgagcatgcccgatt

SEQ ID NO: 68228 - DNA, 80 bp, synthetic construct
  source 1..80: mol_type = other DNA
caacaccagaattggcttcggtggtcgccaaggatctccttgcaccttctgagatggatgttggggactatataataaga

SEQ ID NO: 68229 - DNA, 80 bp, synthetic construct
  source 1..80: mol_type = other DNA
acagttaacggcccagcttggaatatgtgcccaatgccccctatggaccaacgcaacaatggccccgcgaaggaacccat

SEQ ID NO: 68230 - DNA, 80 bp, synthetic construct
  source 1..80: mol_type = other DNA
ccacacgccctgacaaaagtgaaggaccaatagtgttgagaaggcagatcgatggcttggttttcctgagaagaacaata

SEQ ID NO: 68231 - DNA, 80 bp, synthetic construct
  source 1..80: mol_type = other DNA
tcaaaggatgcagctggttttcaaggcaggttggacaggggctccatcgagagacaactgtggtggacccgcggcccaaa

SEQ ID NO: 68232 - DNA, 80 bp, synthetic construct
  source 1..80: mol_type = other DNA
tacatggggaaaagttttacaggaagatagctggtaaggttatccaggaaattaagactggtggtcttgaaatgtacgtg

SEQ ID NO: 68233 - DNA, 80 bp, synthetic construct
  source 1..80: mol_type = other DNA
ccgggttggcaggcaatgttccgctggatgcgcttccatgatctcgggttgtggacaggagatcgcaatctcctgcccga

SEQ ID NO: 68234 - DNA, 80 bp, synthetic construct
  source 1..80: mol_type = other DNA
aatgctgaaccactgcctcttgatcctgtggctggggcttctactgccttagctactgctggtcaagttaatatgattga

SEQ ID NO: 68235 - DNA, 80 bp, synthetic construct
  source 1..80: mol_type = other DNA
tgcgagtcagggtcatcctggcaggtaacgcatttaccgccggtaaagtgataatttgctgtgtcccccctggcttccaa

SEQ ID NO: 68236 - DNA, 80 bp, synthetic construct
  source 1..80: mol_type = other DNA
aattggtgatatgctggagttttatgagggccacatttaccactacgccatatatattgggcagggaaaatctattgggg

SEQ ID NO: 68237 - DNA, 80 bp, synthetic construct
  source 1..80: mol_type = other DNA
aattggtgatatgctggagttttatgagggccacatttaccactacgccatatatattgggcagggaaaatctattggtg

SEQ ID NO: 68238 - DNA, 80 bp, synthetic construct
  source 1..80: mol_type = other DNA
tctaggaccctatcaattgctcaggccaccctctttcctcatgtgattgctgatgttcgcacattggaaccacttgaaat

SEQ ID NO: 68239 - DNA, 80 bp, synthetic construct
  source 1..80: mol_type = other DNA
cccattggaggatgttagaaatacactgtaccataacaatgacagccagccgacaatgcgtttattgtgcatgctgtaca

SEQ ID NO: 68240 - DNA, 80 bp, synthetic construct
  source 1..80: mol_type = other DNA
cgccacttcgcactggtggtggttctggtggcacagacgcgtttgtcgtcgcagggagagttttaacttgcccaagtcct

SEQ ID NO: 68241 - DNA, 80 bp, synthetic construct
  source 1..80: mol_type = other DNA
gacttcaactttctcttcctggtccccccgactgtggaacaaaagacacgcccttttagtgtacccaatatcccactcca

SEQ ID NO: 68242 - DNA, 80 bp, synthetic construct
  source 1..80: mol_type = other DNA
gaatctttccaactcccgagttcctagtctgatccaaagcatggtcctctctaatgaccatgcacaaacagtccaattcc

SEQ ID NO: 68243 - DNA, 80 bp, synthetic construct
  source 1..80: mol_type = other DNA
agaatggcaggtgtactactgacggtcacctgctggggaccacccccgtttctgctggccagctcatgaaattcagaggt

SEQ ID NO: 68244 - DNA, 80 bp, synthetic construct
  source 1..80: mol_type = other DNA
aaggtaacttcaggttcaaaagtgctaaacctaacagaactagatggttcaccatttctagcctttgaggccccagcccc

SEQ ID NO: 68245 - DNA, 80 bp, synthetic construct
  source 1..80: mol_type = other DNA
tgctggattccccgaccttggaaagtgtgattggcatgtcgagatgagtctttatcaggataacaatcatgcagacccta

SEQ ID NO: 68246 - DNA, 80 bp, synthetic construct
  source 1..80: mol_type = other DNA
ttgtgctgcatgccattgaacccaattcatcttcctttgttccgcaccttggcagtgtttcctttaaagaaaatgttaat

SEQ ID NO: 68247 - DNA, 80 bp, synthetic construct
  source 1..80: mol_type = other DNA
gtagctggtgattatgtttgtactatacaatatacttcacccccctctgatccccataaccctaatgctgatgttgattt

SEQ ID NO: 68248 - DNA, 80 bp, synthetic construct
  source 1..80: mol_type = other DNA
tccattcaccacaagccgcattcaccatagccagaataaccatacaccccattgtggcttggtggcgagtgtgttacacc

SEQ ID NO: 68249 - DNA, 80 bp, synthetic construct
  source 1..80: mol_type = other DNA
ctggtctatccctgattatggttccaacttggctgaagcatcacagcttgccccagttgtctatccccctggttttggtg

SEQ ID NO: 68250 - DNA, 80 bp, synthetic construct
  source 1..80: mol_type = other DNA
aggctattgtctatttcatgtcacgcgtccccggctggaataggaccaacaggctcaatctggtcccttgcctgttgcct

SEQ ID NO: 68251 - DNA, 80 bp, synthetic construct
  source 1..80: mol_type = other DNA
caagagttcattggacatttcgtcagtgaacaagcccccgcaattggtgaggccgccctcttacattatgttgatccaga

SEQ ID NO: 68252 - DNA, 80 bp, synthetic construct
  source 1..80: mol_type = other DNA
taccaatcggaacctgggtgaatttaaattgtatcctgagggtttcatcacttgtgtccctaatggcactggccctcagc

SEQ ID NO: 68253 - DNA, 80 bp, synthetic construct
  source 1..80: mol_type = other DNA
ttggcatcaggagataatggcccaagctataattggtgctattgcagcctccgctgctggcagtgcccttggagctggta

SEQ ID NO: 68254 - DNA, 80 bp, synthetic construct
  source 1..80: mol_type = other DNA
tccaagccggcgcagaagcagcacttcaaagtcaaaggtatcagcaagatttgaccttacagcaaaattcatttaaacat

SEQ ID NO: 68255 - DNA, 80 bp, synthetic construct
  source 1..80: mol_type = other DNA
gataaagagatgattgcctatcaaatggaaatgtccaataatttgcttgctaagaatcttaatactcgctattcattgct

SEQ ID NO: 68256 - DNA, 80 bp, synthetic construct
  source 1..80: mol_type = other DNA
ccaggccggcggcctgtctagtgctgatgctgctagggcggtcgctggcgctcctgtgactcgcatcgttgattggaatg

SEQ ID NO: 68257 - DNA, 80 bp, synthetic construct
  source 1..80: mol_type = other DNA
ccccgaattcatcagcaacaaccttaagatcagggggcttcatgactgtgccaatgccattcagcagcaaggctagggca

SEQ ID NO: 68258 - DNA, 80 bp, synthetic construct
  source 1..80: mol_type = other DNA
ccaaatgctgaacaaagattaacctatgaccagctcaaggagttggagaatgagccatggccatatgcggcagtgaccaa

SEQ ID NO: 68259 - DNA, 80 bp, synthetic construct
  source 1..80: mol_type = other DNA
ccaagcacttcagggtctgttggcatgactaatccaaattacggtgacactatgtcccgtgtctcctcttgggtacaatc

SEQ ID NO: 68260 - DNA, 80 bp, synthetic construct
  source 1..80: mol_type = other DNA
acaaaattcttcagtaagaagtgtttccccttttcaccgtgatgcccttcaaactgtatgggtaacaccaccgggttcaa

SEQ ID NO: 68261 - DNA, 80 bp, synthetic construct
  source 1..80: mol_type = other DNA
cttcttcttcatctgtatcttctgtacctagatttttcaatactgatagattgcctcttttcgcaaatagaggccaataa

SEQ ID NO: 68262 - DNA, 80 bp, synthetic construct
  source 1..80: mol_type = other DNA
atgttgtaataagaatgtgggcatcttattcagaattagataattttaattggaatttaataatttggataattgatgtt

SEQ ID NO: 68263 - DNA, 80 bp, synthetic construct
  source 1..80: mol_type = other DNA
caactgctatgaattctgttgccaggttatgggtgtgcaagattcttggctggagcgccggttggtgacatccgggcgct

SEQ ID NO: 68264 - DNA, 80 bp, synthetic construct
  source 1..80: mol_type = other DNA
ttaaccatccaacccaggattggtctaaagacacaccagattttcagcaagatagcaaattagaaattgttagggatgct

SEQ ID NO: 68265 - DNA, 80 bp, synthetic construct
  source 1..80: mol_type = other DNA
gtcttagctgcaatcaatggccttgtctcaaaaccatttaaagatctccttggaaagctcaagcccctcaacgttctgaa

SEQ ID NO: 68266 - DNA, 80 bp, synthetic construct
  source 1..80: mol_type = other DNA
ctcgcccggggaagtcctattaaacttggaattaggccccgaactaaatccatacctagcacacctttctagaatgtata

SEQ ID NO: 68267 - DNA, 80 bp, synthetic construct
  source 1..80: mol_type = other DNA
ggagctgcggggcacgactcagctcctccccacggcgatttgcccattcaggggccggatcaatcagaaggtgagtggag

SEQ ID NO: 68268 - DNA, 80 bp, synthetic construct
  source 1..80: mol_type = other DNA
acaaggggtgttgaccgcgggcggcttctcccccactgatgcagcaagaggggcagttaatgcacctatgactcaggtct

SEQ ID NO: 68269 - DNA, 80 bp, synthetic construct
  source 1..80: mol_type = other DNA
ctccgtcggagaggggagtcacaagtttagtgaaaagatgatctttattttctttcctttgaagattctttttgtctttt

SEQ ID NO: 68270 - DNA, 80 bp, synthetic construct
  source 1..80: mol_type = other DNA
cgcgcaacggagtcgaccactgggacgcctacaggggagagagagtggttttatgggacgactatggcatgggaaacccc

SEQ ID NO: 68271 - DNA, 80 bp, synthetic construct
  source 1..80: mol_type = other DNA
cctaactcaagggtccctgactgcaagagttgcaggccttgttcatgagaggaaggatgagttccagctacaagggaacg

SEQ ID NO: 68272 - DNA, 80 bp, synthetic construct
  source 1..80: mol_type = other DNA
tgaacataaagcaagggatgttgaccgctggcggcttcttccctgcggatgctgctagaggggctgttaatgctccaatg

SEQ ID NO: 68273 - DNA, 80 bp, synthetic construct
  source 1..80: mol_type = other DNA
tcatgggcggcatcgggatggtgttgggattcactgccgagaagattggccgaatgctgtcatcagcagcatcgaccctt

SEQ ID NO: 68274 - DNA, 80 bp, synthetic construct
  source 1..80: mol_type = other DNA
accattaatgctatactagccagaatcgccgcggctaggtctctcctgcacagggctaaagaagagatgtacagcagacc

SEQ ID NO: 68275 - DNA, 80 bp, synthetic construct
  source 1..80: mol_type = other DNA
caggcaccatgagcggtgatcagagaataggcctcatccctcgcaatggggttgatcactgggatgcctacaggggagaa

SEQ ID NO: 68276 - DNA, 80 bp, synthetic construct
  source 1..80: mol_type = other DNA
cgagtcgtcttgtgggacgactatggtatgggtaacccagtaaaagatgcccttgcattgcaagaactagcagacacttg

SEQ ID NO: 68277 - DNA, 80 bp, synthetic construct
  source 1..80: mol_type = other DNA
tccagtcacccttaattgtgacagaatagaaaataaagggaaaatgtttgacagcgaggtaataattataacaaccaatt

SEQ ID NO: 68278 - DNA, 80 bp, synthetic construct
  source 1..80: mol_type = other DNA
aacccagggttccctcacagcaagagtggccggacttgtgcatgaaaggaaagatgagtttcaactgcaaggtggagagc

SEQ ID NO: 68279 - DNA, 80 bp, synthetic construct
  source 1..80: mol_type = other DNA
tacaggtctacaattttgatacaaataaggtgtcagctttcaggaagcttgctgcagacaataactatggattcctggag

SEQ ID NO: 68280 - DNA, 80 bp, synthetic construct
  source 1..80: mol_type = other DNA
acaatgagagtcggttcctcactcaaggatgtcaagacagtggaggacctcaaatgtgctcttaagagtgtcagcttcaa

SEQ ID NO: 68281 - DNA, 80 bp, synthetic construct
  source 1..80: mol_type = other DNA
tccaaatggtgaagatgtgatttactataatagcaaagatgacactgtgcatggcctgccaaatttgacaacagtcagct

SEQ ID NO: 68282 - DNA, 80 bp, synthetic construct
  source 1..80: mol_type = other DNA
acgtggggttctgggactcgtcacaggagcagacatcaggaaacgaagacccgacgacttccaacctaaagggaaactgt

SEQ ID NO: 68283 - DNA, 80 bp, synthetic construct
  source 1..80: mol_type = other DNA
ccgcttgggactggctggggattttgggtctcatccaatttgctaattaccactacacatgtgttgcccaagggcatcaa

SEQ ID NO: 68284 - DNA, 80 bp, synthetic construct
  source 1..80: mol_type = other DNA
gtgaaggtgaaaacctcccgtacacggtccctcctctcagcgagagggagcacagggcagcaccagaaccactacctggt

SEQ ID NO: 68285 - DNA, 80 bp, synthetic construct
  source 1..80: mol_type = other DNA
aaggaacagtgtgctctgttctcatcaagaggtcaacaggagagatgatcccccttgcagttaggatgggtacccacgcc

SEQ ID NO: 68286 - DNA, 80 bp, synthetic construct
  source 1..80: mol_type = other DNA
ctagagatgtgggatggtgagttctaccattatgcgatatacgtctctggtggcaaggccataggggtgcacaaaccccc

SEQ ID NO: 68287 - DNA, 80 bp, synthetic construct
  source 1..80: mol_type = other DNA
tgttgtggggatctgatctgggaacaatgctgaggtgcgctcgggcatttggaggattgcttgacagcatgaaagagagc

SEQ ID NO: 68288 - DNA, 80 bp, synthetic construct
  source 1..80: mol_type = other DNA
tgtatctccttaccctgcagagttggcatgaatataaatgaagatggaccactcatatttgaaaaacattctaaatacac

SEQ ID NO: 68289 - DNA, 80 bp, synthetic construct
  source 1..80: mol_type = other DNA
aggttgtgcaagccaactcctgcttttcattctatggggatgatgaaatagtcagcacagacataaacctggatccggaa

SEQ ID NO: 68290 - DNA, 80 bp, synthetic construct
  source 1..80: mol_type = other DNA
ggatttgaatggcctcacattcctgagacgaaccatagtgcgggaccccgcaggatggtttggcaaattggaccgtgact

SEQ ID NO: 68291 - DNA, 80 bp, synthetic construct
  source 1..80: mol_type = other DNA
ccatcctaaggcagttgtattggaccagagggcccaaccatgagaacccctttgaaagcatgattccccactcccagaga

SEQ ID NO: 68292 - DNA, 80 bp, synthetic construct
  source 1..80: mol_type = other DNA
gcaacccagctaatggccctccttggggaagcctcgttgcatggtccccagttttacaaaaaggtgagtaaaatggtcat

SEQ ID NO: 68293 - DNA, 80 bp, synthetic construct
  source 1..80: mol_type = other DNA
aattttgtgcaagcccctgctggagaatttactgtttcacctagaaatgctccaggtgaatttttattagatctagagtt

SEQ ID NO: 68294 - DNA, 80 bp, synthetic construct
  source 1..80: mol_type = other DNA
aggccctgagttgaacccctaccttgctcaccttgcacgcatgtataatgggcatgcaggtggtatggaggtgcagatag

SEQ ID NO: 68295 - DNA, 80 bp, synthetic construct
  source 1..80: mol_type = other DNA
tgcttgctgggaatgcgttcacagcgggcaaaatcctgtttgcagttataccacctggattcccctatgaaaatttgtca

SEQ ID NO: 68296 - DNA, 80 bp, synthetic construct
  source 1..80: mol_type = other DNA
cctgcacaattgaccatgtgcccgcatgtagtggtggatgtgaggcagcttgaaccaatcttgctgcccatgccagacat

SEQ ID NO: 68297 - DNA, 80 bp, synthetic construct
  source 1..80: mol_type = other DNA
ccgcaataccttcttccattacaatcagagcaacgggccaaaacttaggttagtagctatgctttacacacccctaaggg

SEQ ID NO: 68298 - DNA, 80 bp, synthetic construct
  source 1..80: mol_type = other DNA
ctaataatgctggtgaagatgttttcacagtttcttgcagggttctgacccgcccatcaccagactttgaatttaatttc

SEQ ID NO: 68299 - DNA, 80 bp, synthetic construct
  source 1..80: mol_type = other DNA
tccaccctgacacactcaagagcttagctggtgaaaagtttccatacactgcatttagcaacaactgttataatttctgt

SEQ ID NO: 68300 - DNA, 80 bp, synthetic construct
  source 1..80: mol_type = other DNA
cttgtccccccttctgttgaatctaagactaaagcttttacactcccaattcttaagatatctgagatgacaaattcaag

SEQ ID NO: 68301 - DNA, 80 bp, synthetic construct
  source 1..80: mol_type = other DNA
gtttcccataccagttgaccagatgtatactagtaggaatgaaaatatagttgttcaaccacagaatggtagggtgacac

SEQ ID NO: 68302 - DNA, 80 bp, synthetic construct
  source 1..80: mol_type = other DNA
ttgatggagagctacagggcacaaccacactacaaccggtgtccatttgtgggttccgagggacactgcagaccaggctg

SEQ ID NO: 68303 - DNA, 80 bp, synthetic construct
  source 1..80: mol_type = other DNA
gcagaccaaccaaattacacataccaagtacaccttgagaatttggacggctcacccgtcgacccgacagatgaagtccc

SEQ ID NO: 68304 - DNA, 80 bp, synthetic construct
  source 1..80: mol_type = other DNA
agcccctttgggaacaccagatttccaggcccagctgtttggagttatcagtcaaaggagtagtgacaatgccaccaggg

SEQ ID NO: 68305 - DNA, 80 bp, synthetic construct
  source 1..80: mol_type = other DNA
cacatgaggccagggtcaacaccaacgatcccaccttcgcacctcagatcgcccaggtgcgtttcaaatcaccatccaac

SEQ ID NO: 68306 - DNA, 80 bp, synthetic construct
  source 1..80: mol_type = other DNA
gacttctttgacaatgaacccattaaattcacaccagttgggattagtgttgatagccaaaacagctacaaccaatggct

SEQ ID NO: 68307 - DNA, 80 bp, synthetic construct
  source 1..80: mol_type = other DNA
ccttcccaggtatggtgggcacctgacaaacaacactcacctggccccctctgtgtccccaatgttccccggcgagcaga

SEQ ID NO: 68308 - DNA, 80 bp, synthetic construct
  source 1..80: mol_type = other DNA
ttctcttcttccgctcgttcatgccaggtgctagtggtcacactgatggtgctattgactgccttttgccacaagaatgg

SEQ ID NO: 68309 - DNA, 80 bp, synthetic construct
  source 1..80: mol_type = other DNA
gttgcccatttctatcaggaggccgcgactgcgcaaacagacgtggctctgatcagatttgtgaatcccgacacaggcag

SEQ ID NO: 68310 - DNA, 80 bp, synthetic construct
  source 1..80: mol_type = other DNA
agtgttatttgaagggaagttacacaagcagggctttataaccatctctaacagtggggaccaccctattgttatgcccg

SEQ ID NO: 68311 - DNA, 80 bp, synthetic construct
  source 1..80: mol_type = other DNA
ctaatgggtacttcaggtttgaggcatgggttaaccagttttattctctcgcccccgtgggaactggaagtgggcgcaga

SEQ ID NO: 68312 - DNA, 80 bp, synthetic construct
  source 1..80: mol_type = other DNA
gcatactctggtaatttcacctcacaaggagttaagcagcccacacctatagttaaatctgtgaaacctcaagtacagca

SEQ ID NO: 68313 - DNA, 80 bp, synthetic construct
  source 1..80: mol_type = other DNA
ggactgtatcaagggcacccactccctcaacaactacaacattgtctaggacaagtgagtgggtaaggagtcaaaatgat

SEQ ID NO: 68314 - DNA, 80 bp, synthetic construct
  source 1..80: mol_type = other DNA
cgtaagcgaggggagtcacgggcttagtgaaaagaatgatttggttagattatccttctttcttacctatcttatctttt

SEQ ID NO: 68315 - DNA, 80 bp, synthetic construct
  source 1..80: mol_type = other DNA
gttcactattctcaaaacctattaaagacttgattgggaaactgaaaccactgaacttcttgaatctcctcgcttcgtgc

SEQ ID NO: 68316 - DNA, 80 bp, synthetic construct
  source 1..80: mol_type = other DNA
gactggactttctccggggtggttgagaccgtcatactagctgctgagttatttggagtgttttggaccccccccgacgt

SEQ ID NO: 68317 - DNA, 80 bp, synthetic construct
  source 1..80: mol_type = other DNA
gtcgaacttcatcgcgtcactcatcggagactttgaattgcagggcccagaggatttagctgtggaattggtaccgatca

SEQ ID NO: 68318 - DNA, 80 bp, synthetic construct
  source 1..80: mol_type = other DNA
agaggcaaggtctcagttgacaaggtgcaaagcgcaacagtccaaactaacaatgagctttcaggagcgttgcaccactt

SEQ ID NO: 68319 - DNA, 80 bp, synthetic construct
  source 1..80: mol_type = other DNA
tggaatcaaagacaaagctttttaccctccccattttaaccatctctgaaatgtccaattccaggtttccagttccaatt

SEQ ID NO: 68320 - DNA, 80 bp, synthetic construct
  source 1..80: mol_type = other DNA
gactctttacacaccagcccaactgagaatatagttgtccagtgccaaaatgggcgcgtcactcttgacggtgagttaat

SEQ ID NO: 68321 - DNA, 80 bp, synthetic construct
  source 1..80: mol_type = other DNA
aagccgacacaccaacccctaggctattcaaccatcgttggcacatacaattggacaatctaaatggaactccctacgac

SEQ ID NO: 68322 - DNA, 80 bp, synthetic construct
  source 1..80: mol_type = other DNA
taaccactgagtctgatgactttgacacaaaccagtcaacaaaattcaccccagttggcatcggggttgacaatgaggca

SEQ ID NO: 68323 - DNA, 80 bp, synthetic construct
  source 1..80: mol_type = other DNA
ttttcctggtgaacagctacttttcttccgatcacagctgccatcctctggtgggcggtctaacggggtcctagactgct

SEQ ID NO: 68324 - DNA, 80 bp, synthetic construct
  source 1..80: mol_type = other DNA
aaccctgacactggcagagtgctatttgaggctaagctacacaaattgggttttatgactatagcaaagaatggtgactc

SEQ ID NO: 68325 - DNA, 80 bp, synthetic construct
  source 1..80: mol_type = other DNA
cttgagctcacactcatccgggtcgtcccgatccagcgggtctacggttgtcagctcgctgccgtcctccagtaggacta

SEQ ID NO: 68326 - DNA, 80 bp, synthetic construct
  source 1..80: mol_type = other DNA
gctgtttgcacaccttcgtagaaggggggagtcaaatgtttagtgaaaagattattcctaaatttgatttagaatctttt

SEQ ID NO: 68327 - DNA, 80 bp, synthetic construct
  source 1..80: mol_type = other DNA
gtgaatgatgatggcgtcgaaagacgtcgttgcagctactgctgctagtgctgaaaacactagtgacaatagtgattcta

SEQ ID NO: 68328 - DNA, 80 bp, synthetic construct
  source 1..80: mol_type = other DNA
tgtgtccagctttatagcctcactactacctgacatgcacttgcaaggaccagaagatctggctaaagacttaataccat

SEQ ID NO: 68329 - DNA, 80 bp, synthetic construct
  source 1..80: mol_type = other DNA
tggtgttggggggtgtagggcttgcaattggatttactaaggacaaagtcacaaaggttatgaaaagtgctgttgaagtg

SEQ ID NO: 68330 - DNA, 80 bp, synthetic construct
  source 1..80: mol_type = other DNA
tggtgttggggggtgtagggcttgcaattggatttactaaggacaaagtcacaaaggttatgaaaagtgctgttgaaggg

SEQ ID NO: 68331 - DNA, 80 bp, synthetic construct
  source 1..80: mol_type = other DNA
ctttaaaggatattgaaacagccgtgatcgacatggaggtcatctcaacaactgctgtcacgcaactggttagggacaaa

SEQ ID NO: 68332 - DNA, 80 bp, synthetic construct
  source 1..80: mol_type = other DNA
caggctgcccgaacttacatgaacatcttggatgccgaagaagaaaaggcaagaaagctttcagttagacatgcagaccc

SEQ ID NO: 68333 - DNA, 80 bp, synthetic construct
  source 1..80: mol_type = other DNA
ccatgtcgtgtccacgactaatgctttgatctcacgtatttcactggctcgctccgcacttgctaaagcacaagctgaga

SEQ ID NO: 68334 - DNA, 80 bp, synthetic construct
  source 1..80: mol_type = other DNA
ctcaacttaattagtagggggtcatctccagttccacaagataagccccctaaagatcagcgggacaaacccccaaggaa

SEQ ID NO: 68335 - DNA, 80 bp, synthetic construct
  source 1..80: mol_type = other DNA
agtgataacaacaaatgccccaggcccagctccagtcgactttgtcaatcttggcccagtgtgtcggcgggtagatttct

SEQ ID NO: 68336 - DNA, 80 bp, synthetic construct
  source 1..80: mol_type = other DNA
ccaagtgtatgattttgatgctgacagggtttccgcctttactagtttagcaagagccaatggtctgggcctcattagca

SEQ ID NO: 68337 - DNA, 80 bp, synthetic construct
  source 1..80: mol_type = other DNA
tgtggccgaaactcaacaagcaatgggatggattgacccccccgtggatcagaatctaccaacctgggaggaattgagcc

SEQ ID NO: 68338 - DNA, 80 bp, synthetic construct
  source 1..80: mol_type = other DNA
ccttgtagtataaaatggcaggctagagtgtatgacattgaatcagatggtactaatgtacaaataaaggaaaacacctc

SEQ ID NO: 68339 - DNA, 80 bp, synthetic construct
  source 1..80: mol_type = other DNA
agcccaaactcaacgccagcagtcaattgacacagctgccctagcactcactaggcttaaagcagcacgggcagcagcgt

SEQ ID NO: 68340 - DNA, 80 bp, synthetic construct
  source 1..80: mol_type = other DNA
aggatgtttggggcacactcaagcaccatagcccttgaagggccgccaagagaacatcggtgtagggctcatttggccaa

SEQ ID NO: 68341 - DNA, 80 bp, synthetic construct
  source 1..80: mol_type = other DNA
agagccaactacaatgctttttcaaggcggggtctgagcgatgaagaatacgaggagtacaagaagatcagggaagaaaa

SEQ ID NO: 68342 - DNA, 80 bp, synthetic construct
  source 1..80: mol_type = other DNA
aaacagagaaacaagagatactcaaaaacaactcaaattggttcgatgctggtggattggcaccagctagcatcccttcc

SEQ ID NO: 68343 - DNA, 80 bp, synthetic construct
  source 1..80: mol_type = other DNA
gagcccattgaatctatagcaatccatcgtgctggtgaatttacacaattcaggttttcacgcaaagtccgcccggatct

SEQ ID NO: 68344 - DNA, 80 bp, synthetic construct
  source 1..80: mol_type = other DNA
tttggagatcaacccctgagccattaccaccaggtgtttatgaaccagcataccttgggggtcgtgacccaagggtaaaa

SEQ ID NO: 68345 - DNA, 80 bp, synthetic construct
  source 1..80: mol_type = other DNA
ggtggaccttccctacaacaagtcctgcgtgatcagttgaaaccatttgccgagccacgaggccggatgccagagcctgg

SEQ ID NO: 68346 - DNA, 80 bp, synthetic construct
  source 1..80: mol_type = other DNA
ggttatgtgaagaacacagagcagcaaccccctgaccaccaagtcaagtggagtgccaataacggggttgatctgggggt

SEQ ID NO: 68347 - DNA, 80 bp, synthetic construct
  source 1..80: mol_type = other DNA
tttacttgaggcagccgttgaaactgtcacatccatgcttgaacaaacaatggatacaccaaccccctggtctttctctg

SEQ ID NO: 68348 - DNA, 80 bp, synthetic construct
  source 1..80: mol_type = other DNA
ccaacaacatgtttgaattgggcaagtctatgaagccactttacaccgcggccctaaaggatgaattagtcaagcctgag

SEQ ID NO: 68349 - DNA, 80 bp, synthetic construct
  source 1..80: mol_type = other DNA
gaattggcctctgttgtagccaaagatctacttgcgccttcagagatggatgttggggactacatcatccgtgtaaaaga

SEQ ID NO: 68350 - DNA, 80 bp, synthetic construct
  source 1..80: mol_type = other DNA
aggtttgccatcaggatttccttgcacttcacaggtgaacagtataaaccattggctaatcacattgtgtgctatgtctg

SEQ ID NO: 68351 - DNA, 80 bp, synthetic construct
  source 1..80: mol_type = other DNA
ggacagtttaaccactgtgccaggcccagcatggaatctatgccccatgccaccaattgatcagcgtaacaatggtccag

SEQ ID NO: 68352 - DNA, 80 bp, synthetic construct
  source 1..80: mol_type = other DNA
gacccattatacttagaagacaggtagatggtctcgttttcttaaggaggacaatctcaaaagatgctgcaggctttcag

SEQ ID NO: 68353 - DNA, 80 bp, synthetic construct
  source 1..80: mol_type = other DNA
caagagagccacttattggtgacatgatagagttctatgagggtcacatctaccattatgcaatatatattggccaagga

SEQ ID NO: 68354 - DNA, 80 bp, synthetic construct
  source 1..80: mol_type = other DNA
tgcgagtgcgtgttgtcttggctggtaatgctttcacggctgggaaggttataatttgttgtgtcccccctggtttccaa

SEQ ID NO: 68355 - DNA, 80 bp, synthetic construct
  source 1..80: mol_type = other DNA
tctcgcaccctttctatagcccaggctactttatttccccatgttattgctgatgttaggacccttgaccctgtagaagt

SEQ ID NO: 68356 - DNA, 80 bp, synthetic construct
  source 1..80: mol_type = other DNA
cctagtccctcccacagtcgagcaaaagacccgcccttttactgtgcctaatatccctttgaagtacctgtctaattcca

SEQ ID NO: 68357 - DNA, 80 bp, synthetic construct
  source 1..80: mol_type = other DNA
gtcaaacccaatagtcaacagtttgtcccacacttgtcaagtatcacccttgatgaaaatgtttccagtggaggtgacta

SEQ ID NO: 68358 - DNA, 80 bp, synthetic construct
  source 1..80: mol_type = other DNA
tgttaggttatcaaatggaaatgtccaacaagttgctagctaaaaatcttaacacccgctattctcttctccaggcgggt

SEQ ID NO: 68359 - DNA, 80 bp, synthetic construct
  source 1..80: mol_type = other DNA
ggcctctcatcctctgatgcggctagggctgtagccggggcccccgtcactaggttggtcgactgggggggagtgcgtgt

SEQ ID NO: 68360 - DNA, 80 bp, synthetic construct
  source 1..80: mol_type = other DNA
ggcctctcatcctctgatgcggctagggctgtagccggggcccccgtcactaggttggtcgactggtgtggagtgcgtgt

SEQ ID NO: 68361 - DNA, 80 bp, synthetic construct
  source 1..80: mol_type = other DNA
agccccttgccagtgaaggttattctaaccctgcttatgaccctgtgcaacgcacagcctcttgggttcaatctcagaac

SEQ ID NO: 68362 - DNA, 80 bp, synthetic construct
  source 1..80: mol_type = other DNA
tccagccggtcttggtctccataccataggcaagcccttcagactgtgtgggtgaccccccctggttctacctcttcttc

SEQ ID NO: 68363 - DNA, 80 bp, synthetic construct
  source 1..80: mol_type = other DNA
ttctgtttctactgcccctcgagggtatttcaatacagatagattgcctctattcgcaaacttgaggcgttaatgttgta

SEQ ID NO: 68364 - DNA, 80 bp, synthetic construct
  source 1..80: mol_type = other DNA
ataagattagtgagcatcctattcaatttttggctttatataatttggttataattggcttttaattttgatttggttga

SEQ ID NO: 68365 - DNA, 80 bp, synthetic construct
  source 1..80: mol_type = other DNA
taaagaaccgcttcttcacaagattgaagaatttaggttctaacaataaacctataaaaattgagaacacccacatggcc

SEQ ID NO: 68366 - DNA, 80 bp, synthetic construct
  source 1..80: mol_type = other DNA
gttctgctgcaggattcttaacctgcaggatacttggttagaacgccgtttggtcacatctggtcgttttaaccacccag

SEQ ID NO: 68367 - DNA, 80 bp, synthetic construct
  source 1..80: mol_type = other DNA
cacaagactggtccagggacacacctgacttccaacaagatagcaaactagaaatagttagggacgccgtgcttgctgct

SEQ ID NO: 68368 - DNA, 80 bp, synthetic construct
  source 1..80: mol_type = other DNA
tcaatggcctggtgtcaaagccctttaaagatctcctaaataaacttaagccactcaacgtgctcaacctactctccaat

SEQ ID NO: 68369 - DNA, 80 bp, synthetic construct
  source 1..80: mol_type = other DNA
cccctgcctcgggttcactaccccctgcggagatcgacccacccgtgactgttgatgccccatctccatctattttggca

SEQ ID NO: 68370 - DNA, 80 bp, synthetic construct
  source 1..80: mol_type = other DNA
ttgccccggccctcagtttttgaacagaccacgcccccattggatccagctggtgacgctgctgcttcggccccgccagg

SEQ ID NO: 68371 - DNA, 80 bp, synthetic construct
  source 1..80: mol_type = other DNA
tgcccctggtgtgcccccggcaccagcgcggcctgtaacccacccatccgggccccgccggcggttactccatacttatc

SEQ ID NO: 68372 - DNA, 80 bp, synthetic construct
  source 1..80: mol_type = other DNA
atcagcttgcggaggaactcggtcatcgaccggctccgatcgctgccgttttgcccccctgcccagagctcgaacagggt

SEQ ID NO: 68373 - DNA, 80 bp, synthetic construct
  source 1..80: mol_type = other DNA
ctgctttatatgccccaggaactaactacgtccgacagcgtgcttacatttgaattaacagatatagtgcactgccgtat

SEQ ID NO: 68374 - DNA, 80 bp, synthetic construct
  source 1..80: mol_type = other DNA
ggatccctgaaccactttatccccgagctcggccccattagtgttaccacctgtgagctttacgagcttgtggaggctat

SEQ ID NO: 68375 - DNA, 80 bp, synthetic construct
  source 1..80: mol_type = other DNA
gccttccacctgccgaccggacgtattgctttgatggtttctccggctgtacattcgctgctgagacgggcgtagccctc

SEQ ID NO: 68376 - DNA, 80 bp, synthetic construct
  source 1..80: mol_type = other DNA
ttcaatacaaaccagcccattagattcactccggtgggcatgggtgacaacaattggagacaatgggaattgcccgacta

SEQ ID NO: 68377 - DNA, 80 bp, synthetic construct
  source 1..80: mol_type = other DNA
actgtggaaacaatcctattgtagtcccccccaatggctatttcagatttgaggcttggggtaatcagttttatacactt

SEQ ID NO: 68378 - DNA, 80 bp, synthetic construct
  source 1..80: mol_type = other DNA
cacgtccaagttaagaacctagacggtacacaatatgacccaacggacgatatacctgcagtcctgggggctattgactt

SEQ ID NO: 68379 - DNA, 80 bp, synthetic construct
  source 1..80: mol_type = other DNA
gcgctcttgttgccaacgagggttggaatgcctccgaggatgcattgactgctgtgattactgcggcctatcttaccatt

SEQ ID NO: 68380 - DNA, 80 bp, synthetic construct
  source 1..80: mol_type = other DNA
tgccatcagaggtaccttcgcacgcaggccatctcgaaagggatgaaaagactggagcttgagcacgcacagaagtttat

SEQ ID NO: 68381 - DNA, 80 bp, synthetic construct
  source 1..80: mol_type = other DNA
tttatgcccagtgccgccgatggctttccgctggtttccatcttgatcctcgtgtacttgtttttgatgaagcggcccct

SEQ ID NO: 68382 - DNA, 80 bp, synthetic construct
  source 1..80: mol_type = other DNA
tgtcgctgccgtagtttcctccgtaaagccgctcatagattttgttgttttatgcggtggctgggccaggattgtacctg

SEQ ID NO: 68383 - DNA, 80 bp, synthetic construct
  source 1..80: mol_type = other DNA
tttcctccagcccgttgaggtgagggttggcgagcagggttacgataatgaggcatttgaggggtcggatgttgaccccg

SEQ ID NO: 68384 - DNA, 80 bp, synthetic construct
  source 1..80: mol_type = other DNA
ctgaggaggccactgtgagtatctctggatcatatattgtcaccggtagccagctacagcctctctaccaggcgcttggc

SEQ ID NO: 68385 - DNA, 80 bp, synthetic construct
  source 1..80: mol_type = other DNA
atcccttctgatcttgccgcccgagcgggtcggcttactgccaccgttgaggtcctagatgctgacggccgcctcacttg

SEQ ID NO: 68386 - DNA, 80 bp, synthetic construct
  source 1..80: mol_type = other DNA
taagactactattggcaataagaccttttcaacagtttttactgatggtgctcagctagaggctaacgggccggagcagt

SEQ ID NO: 68387 - DNA, 80 bp, synthetic construct
  source 1..80: mol_type = other DNA
atgtgctgtcgtttgatccggccaaacaaactatggccgccggcccgcacagtcttagctatgctttgacatctgcgggc

SEQ ID NO: 68388 - DNA, 80 bp, synthetic construct
  source 1..80: mol_type = other DNA
cttgaggtgcgcgttgtctccgctttttgttcagctttgtacaggttcaaccgttgtgttcagcggcactctcttattgg

SEQ ID NO: 68389 - DNA, 80 bp, synthetic construct
  source 1..80: mol_type = other DNA
ccggcctgaggtcctgtggaatcaccccattcaacgcgtgatccacaacgagctcgaacagtactgtcgggctcgtgcgg

SEQ ID NO: 68390 - DNA, 80 bp, synthetic construct
  source 1..80: mol_type = other DNA
gggtttgtggtattaccctgaggggctaattggcttgtttccgccatttgctcccggccatacctgggagtcagccaatc

SEQ ID NO: 68391 - DNA, 80 bp, synthetic construct
  source 1..80: mol_type = other DNA
ccttctgtggagagagcaccctctatactcgcacctggtcggtgtcgggcctctctagttgtttttctccactcgagcca

SEQ ID NO: 68392 - DNA, 80 bp, synthetic construct
  source 1..80: mol_type = other DNA
cccgccccagaactatcatctcctgttgaggttgatacacctgtggctgttggcgtcccatccccagccacttcggctgt

SEQ ID NO: 68393 - DNA, 80 bp, synthetic construct
  source 1..80: mol_type = other DNA
accccaaccttcagtccctgaacaggctgagccaccgccggattcggtcgatagcagtgctgctccggccccactgagca

SEQ ID NO: 68394 - DNA, 80 bp, synthetic construct
  source 1..80: mol_type = other DNA
cctctactacacccccggtgccagcgcagcatgtaacccacccatctggctcccgtcggcggttactccacacctaccct

SEQ ID NO: 68395 - DNA, 80 bp, synthetic construct
  source 1..80: mol_type = other DNA
gatggctcaaaagtgtatgctggctccctctttgagtctgagtgtacttggttagttaatgcatccaatcctggtcatcg

SEQ ID NO: 68396 - DNA, 80 bp, synthetic construct
  source 1..80: mol_type = other DNA
ccccggtggcggcctttgccacgcattttaccaacggttcccggagtcatttgaccctgctgagtttattatgtctgacg

SEQ ID NO: 68397 - DNA, 80 bp, synthetic construct
  source 1..80: mol_type = other DNA
ggtttgcggcctacaccttgacaccccgacccattatccatgctgttgcccctgactatcgggtggaacataaccctaag

SEQ ID NO: 68398 - DNA, 80 bp, synthetic construct
  source 1..80: mol_type = other DNA
aggctcgaggctgcctatcgagagacgtgttcccgtcgtgggacggctgcttatcccttgcttggcgccggtatatacag

SEQ ID NO: 68399 - DNA, 80 bp, synthetic construct
  source 1..80: mol_type = other DNA
ggtgcccgttgggctgagctttgatgcctgggagcgtaaccaccgacccggggatgagttgtatctgactgagccggcta

SEQ ID NO: 68400 - DNA, 80 bp, synthetic construct
  source 1..80: mol_type = other DNA
gccgctgtcttgaagtgggcgcccacccacgctcgatcaacgacaaccccaacgtcttgcaccgctgttttttaaaaccg

SEQ ID NO: 68401 - DNA, 80 bp, synthetic construct
  source 1..80: mol_type = other DNA
tagcttggttcgaggccaaccgacctactctccccgcgcttactattactgaggacacagcacgaacagcgaacctggct

SEQ ID NO: 68402 - DNA, 80 bp, synthetic construct
  source 1..80: mol_type = other DNA
cttgagctagattcagccactgaggtcggcagggcgtgtgccggctgtcgtgtcgagccgggtgtcgtccattaccagtt

SEQ ID NO: 68403 - DNA, 80 bp, synthetic construct
  source 1..80: mol_type = other DNA
tggctccggcaagtcacggtcaattcagcagggcgaggtagacgtcgtagtggtgccaacccgtgagttgcgtaactcgt

SEQ ID NO: 68404 - DNA, 80 bp, synthetic construct
  source 1..80: mol_type = other DNA
ggcggcgccgcgggtttgcagcttatacaccacacaccgcggcccgtgttacctgtggccgtagggttgttatcgacgag

SEQ ID NO: 68405 - DNA, 80 bp, synthetic construct
  source 1..80: mol_type = other DNA
gccccgtcgcttccaccacatttacttttgctgcatatgcagcgagcctcgtcggttcatctccttggcgaccccaacca

SEQ ID NO: 68406 - DNA, 80 bp, synthetic construct
  source 1..80: mol_type = other DNA
aatccctgctatcgattttgagcatgctggcctcgtcccagcgatccggcctgagcttgtcccaacaaagtggtggcacc

SEQ ID NO: 68407 - DNA, 80 bp, synthetic construct
  source 1..80: mol_type = other DNA
ttactcataggtgtcctgcggatgtttgtgagctaatccgcggtgcgtacccaaagatccagacggcaagccgtgttctc

SEQ ID NO: 68408 - DNA, 80 bp, synthetic construct
  source 1..80: mol_type = other DNA
cgctccctgttctggggggagccccccgtcggccaaaaactagtgtttactcaggcggcgaaggccgccaaccccggtgc

SEQ ID NO: 68409 - DNA, 80 bp, synthetic construct
  source 1..80: mol_type = other DNA
aattacagtccacgaggcccagggtgctacatttactgagactactattattgcaacggctgatgcccgcgggctgattc

SEQ ID NO: 68410 - DNA, 80 bp, synthetic construct
  source 1..80: mol_type = other DNA
agtcctccagggctcacgctattgtggctctgactcgccacacagagaaatgtgtggttgttgacgccccggggctcctt

SEQ ID NO: 68411 - DNA, 80 bp, synthetic construct
  source 1..80: mol_type = other DNA
gttggccgcgatgtccagcggtggtacaccgctcctacccgcggccctgcagcgaactgccgccggtcagcccttcgtgg

SEQ ID NO: 68412 - DNA, 80 bp, synthetic construct
  source 1..80: mol_type = other DNA
cgtgaggttggcatttcagatgccattgttaataactttttcctttctggcggccaggttggtcagcaccgcccatcagt

SEQ ID NO: 68413 - DNA, 80 bp, synthetic construct
  source 1..80: mol_type = other DNA
catacctcgtggcactgttgatagcaatgttgccacgcttgatgcatttccaccttcttgtcagtttagcgcctaccacc

SEQ ID NO: 68414 - DNA, 80 bp, synthetic construct
  source 1..80: mol_type = other DNA
agcttgcagaggagcttggtcatcggccggccccgattgccgccgttctgcccccttgtccggagctcgagcaaggctta

SEQ ID NO: 68415 - DNA, 80 bp, synthetic construct
  source 1..80: mol_type = other DNA
ctctatatgctccaggagctgaccacgtctgatagtgtgctcacattcgaacttacagacattgtacactgtcgtatggc

SEQ ID NO: 68416 - DNA, 80 bp, synthetic construct
  source 1..80: mol_type = other DNA
ggcacctagtcagcgcaaggcagtcctgtcgacccttgtcggcaggtacggccgccgtacgaagttgtatgaagctgctc

SEQ ID NO: 68417 - DNA, 80 bp, synthetic construct
  source 1..80: mol_type = other DNA
acacggatgttcgtgggtccctctgtcattttctccccgagctcggccccatcagcgttactacctgcgagctttatgag

SEQ ID NO: 68418 - DNA, 80 bp, synthetic construct
  source 1..80: mol_type = other DNA
cttgttgaggctatggtggagaagggtcaggatggctccgcagtcttggagcttgatctatgcagtcgtgatgtgtcacg

SEQ ID NO: 68419 - DNA, 80 bp, synthetic construct
  source 1..80: mol_type = other DNA
tataacattctttcagaaggactgtaataaattcacaacaggcgagacaatagcgcacggtaaagttgggcaggggatat

SEQ ID NO: 68420 - DNA, 80 bp, synthetic construct
  source 1..80: mol_type = other DNA
ctgcgtggagcaagaccttttgtgccctgtttggcccatggttccgtgctattgagaaggagattcttgcggcgcttgcc

SEQ ID NO: 68421 - DNA, 80 bp, synthetic construct
  source 1..80: mol_type = other DNA
cctaatgtattttatggtgatgcatatgaagatacagttctggccgccgctgtcgccggggccccaggctgtaaggtttt

SEQ ID NO: 68422 - DNA, 80 bp, synthetic construct
  source 1..80: mol_type = other DNA
cctcccacctgttgaccggacatattgctttgacggtttttccggttgcacatttgccgccgagacggggattgcccttt

SEQ ID NO: 68423 - DNA, 80 bp, synthetic construct
  source 1..80: mol_type = other DNA
tgagaatgatttctctgagtttgatagcacccaaaataacttttcactcggactggagtgcataatcatggaggagtgtg

SEQ ID NO: 68424 - DNA, 80 bp, synthetic construct
  source 1..80: mol_type = other DNA
gcatgccgcagtggatgatccgactttatcatcttgttcgctccgcctgggtcctgcaggctcccaaggagtccctgcgg

SEQ ID NO: 68425 - DNA, 80 bp, synthetic construct
  source 1..80: mol_type = other DNA
ttatgaattccgtgacttaaaggtcgcggcatttaaaggagatgactcagttgtgctctgtagtgactaccggcagagcc

SEQ ID NO: 68426 - DNA, 80 bp, synthetic construct
  source 1..80: mol_type = other DNA
gcaacgccgctgctttaatcgccggttgcgggttgaaacttaaggtggattttaggcctattgggctgtatgctggtgtt

SEQ ID NO: 68427 - DNA, 80 bp, synthetic construct
  source 1..80: mol_type = other DNA
ttcagagagggcggaacagctacggctggccgtctgtgattttctgcgaaagttaacgaatgtggctcaggtctgtgtgg

SEQ ID NO: 68428 - DNA, 80 bp, synthetic construct
  source 1..80: mol_type = other DNA
atgttgtttcgcaggtttacggtgtcagccccggtttagtacataacctgattggaatgctccagactattgctgatggt

SEQ ID NO: 68429 - DNA, 80 bp, synthetic construct
  source 1..80: mol_type = other DNA
aaggcgcactttattgaaacagtcaaacccgtccttgatcttactagctctattatataccgggtggagtgaataacatg

SEQ ID NO: 68430 - DNA, 80 bp, synthetic construct
  source 1..80: mol_type = other DNA
ttcttttgctctgtgcatggagatgccaccatgcgctctcgggctcttctgtttctgctcttcgtgcttctgcctatgtt

SEQ ID NO: 68431 - DNA, 80 bp, synthetic construct
  source 1..80: mol_type = other DNA
actcactgcacgacctctggcccgccgatgttgctgaggcgatggcccgccacggtatgacccggttgtatgcggccctc

SEQ ID NO: 68432 - DNA, 80 bp, synthetic construct
  source 1..80: mol_type = other DNA
cgcccgccgtcgacctgccccagctggggcttcgccgctgactgctgtggccccggcccctgataccgcccctgtccccg

SEQ ID NO: 68433 - DNA, 80 bp, synthetic construct
  source 1..80: mol_type = other DNA
acgttgattcccgcggcgctatactacgccgccagtataatctatcaacatccccgctcacgtctaccatcgctaccggc

SEQ ID NO: 68434 - DNA, 80 bp, synthetic construct
  source 1..80: mol_type = other DNA
ccaatcttgttttatatgctgctcccctgagccctttgcttccgcttcaagatgggactaacactcatattatggccact

SEQ ID NO: 68435 - DNA, 80 bp, synthetic construct
  source 1..80: mol_type = other DNA
gaagcatcaaattacgcccagtaccgcgttgtccgtgccaccatccggtatcgcccactcgtgccgaacgctgttggcgg

SEQ ID NO: 68436 - DNA, 80 bp, synthetic construct
  source 1..80: mol_type = other DNA
ctgtcgatatgaattctattacctctactgatgttcggattcttgttcagcctggtatcgcctccgagcttgtgattccc

SEQ ID NO: 68437 - DNA, 80 bp, synthetic construct
  source 1..80: mol_type = other DNA
cacctccctcctgaggtgctgctcccccccggtacttatcataccacctcgtacctactcatccatgatggggatcgtgc

SEQ ID NO: 68438 - DNA, 80 bp, synthetic construct
  source 1..80: mol_type = other DNA
acaccttatactggtgctcttggcttgcttgattttgcactcgaacttgagttccgcaatttgacacccggtaatacgaa

SEQ ID NO: 68439 - DNA, 80 bp, synthetic construct
  source 1..80: mol_type = other DNA
tacgcgtgtttcccgttattcgagtagcgcgcgccacaagctacgtcgtgggcccgacggtactgctgagctaaccacca

SEQ ID NO: 68440 - DNA, 80 bp, synthetic construct
  source 1..80: mol_type = other DNA
ctgctgctacacggtttatgaaagatcttcacttcacagggaccaatggtgttggtgaggtcggtcgcggtatagcgcta

SEQ ID NO: 68441 - DNA, 80 bp, synthetic construct
  source 1..80: mol_type = other DNA
accctgtttaatcttgctgacacgcttctcggcgggctcccgacagaattgatttcgtcggctggtggccagctatttta

SEQ ID NO: 68442 - DNA, 80 bp, synthetic construct
  source 1..80: mol_type = other DNA
tccactaatcctatgtatgtttctgatactgtgacatttgttaatgtggcgactggtgctcagggggtctctcgctctct

SEQ ID NO: 68443 - DNA, 80 bp, synthetic construct
  source 1..80: mol_type = other DNA
ggactggtctaaagtcacccttgatgggcgtccacttactactatccagcagtattctaagaccttctttgttttgcccc

SEQ ID NO: 68444 - DNA, 80 bp, synthetic construct
  source 1..80: mol_type = other DNA
tccgtggcaagctctctttctgggaggctggcaccactaaggccggctacccttataattataacaccaccgccagtgac

SEQ ID NO: 68445 - DNA, 80 bp, synthetic construct
  source 1..80: mol_type = other DNA
agtgattacatacgagggggattctagtgctgggtacaaccatgatgtgtccattttgcgtgcctggatccgcactacta

SEQ ID NO: 68446 - DNA, 80 bp, synthetic construct
  source 1..80: mol_type = other DNA
cagatcttgattgaaaatgcagccggtcaccgtgtttgcatctcgacctacactactaatcttggctctggccctgtttc

SEQ ID NO: 68447 - DNA, 80 bp, synthetic construct
  source 1..80: mol_type = other DNA
acacctttgatgatttctgccctgagtgccgtacactcggccttcagggctgtgcttttcagtcaactgttgctgagctg

SEQ ID NO: 68448 - DNA, 80 bp, synthetic construct
  source 1..80: mol_type = other DNA
tctgcttgtaccttccttctgatttgtttcttttatttctttcttctgcgtttcgcgctccctggaaaaaaaaaaaaaaa

SEQ ID NO: 68449 - DNA, 80 bp, synthetic construct
  source 1..80: mol_type = other DNA
aggtcactggtgaccacccgctggtgattgagcgggttcgggcggtgggctgtcattttgtgctccttctaacagctgca

SEQ ID NO: 68450 - DNA, 80 bp, synthetic construct
  source 1..80: mol_type = other DNA
cctgaaccatcgccaatgccctatgtcccatatcctcgttccactgaggtttacgttcggtccatctttggccctggtgg

SEQ ID NO: 68451 - DNA, 80 bp, synthetic construct
  source 1..80: mol_type = other DNA
ttcaccatccctgtttccaactgcctgctctactaagtcaacatttcatgctgtccctgtgcatatatgggacagactca

SEQ ID NO: 68452 - DNA, 80 bp, synthetic construct
  source 1..80: mol_type = other DNA
tgctattcggtgcgaccctcgacgatcaggccttttgttgctcgaggctaatgacatacctccgtggcattagctacaaa

SEQ ID NO: 68453 - DNA, 80 bp, synthetic construct
  source 1..80: mol_type = other DNA
aactagtgtttactcaggcggcgaaggccgccaaccccggtgcaattacagtccacgaggcccagggtgctacatttact

SEQ ID NO: 68454 - DNA, 80 bp, synthetic construct
  source 1..80: mol_type = other DNA
tgtggccccggcccctgataccgcccctgtccccgacgttgattcccgcggcgctatactacgccgccagtataatctat

SEQ ID NO: 68455 - DNA, 80 bp, synthetic construct
  source 1..80: mol_type = other DNA
cttcatagcatcgctgctgggtgattatgaaatgcagggccctgaggatatcgcggttgaggtcgtgccggtgatcctcg

SEQ ID NO: 68456 - DNA, 80 bp, synthetic construct
  source 1..80: mol_type = other DNA
gtggcataggtatggtacttggattcaccaaagaaaggatcggccgactgttgagctcggctgcgtcttcgctcagagca

SEQ ID NO: 68457 - DNA, 80 bp, synthetic construct
  source 1..80: mol_type = other DNA
cccagggtcccctcccccaataaggagagagggctcggtaccacccctagagctctctcccccaacaagggaggaagaac

SEQ ID NO: 68458 - DNA, 80 bp, synthetic construct
  source 1..80: mol_type = other DNA
acgactacggtatgagcaaccctgtgaccgatgcactgcgacttcaggagctagctgacacgtgtcccctaacacttaat

SEQ ID NO: 68459 - DNA, 80 bp, synthetic construct
  source 1..80: mol_type = other DNA
agtcagacttttcacacataaaactccagttggcgccacaagggggctttgacaagaacgggaatactcctcatgggaag

SEQ ID NO: 68460 - DNA, 80 bp, synthetic construct
  source 1..80: mol_type = other DNA
ggtgtcatgaaaacactgacaacacactccctcattgcccgcgccactggcctcttacacgagaggttggatgagttcga

SEQ ID NO: 68461 - DNA, 80 bp, synthetic construct
  source 1..80: mol_type = other DNA
agtatggcctcatggagaccatgaaagtgggcaacaaattaaagggagtcaggaatctggagcaactcaaggacgctcta

SEQ ID NO: 68462 - DNA, 80 bp, synthetic construct
  source 1..80: mol_type = other DNA
aaagacataagtatcaaaccttgtagaatagtctacaactcgatggcttacgacctcgactcaaacggatcagggagagt

SEQ ID NO: 68463 - DNA, 80 bp, synthetic construct
  source 1..80: mol_type = other DNA
caacgttaaaaaggttgcagatcacaaggtccaaaccaacaatgagctcaactccgcgctcaacaatctgcgtggtgcta

SEQ ID NO: 68464 - DNA, 80 bp, synthetic construct
  source 1..80: mol_type = other DNA
caacatccccccagtaccgcccccaccacccaacggtgaggacataatcatcaaatacaccaaacaagatgatgtggttg

SEQ ID NO: 68465 - DNA, 80 bp, synthetic construct
  source 1..80: mol_type = other DNA
tcggcagtatctgggccagaccagaacaacaagtggagactgctaaggaacccccagcccccccaactgaagattggact

SEQ ID NO: 68466 - DNA, 80 bp, synthetic construct
  source 1..80: mol_type = other DNA
agataaaaattaggcagaggatcttccgccccaccaggaaacaacgtaaggaggagagagcaactctgggcctagttacg

SEQ ID NO: 68467 - DNA, 80 bp, synthetic construct
  source 1..80: mol_type = other DNA
gggtgtcatctaacttgttcattacatcaactcatgtcatccccccaaacatgattgaggcctttggtgtaccaataggt

SEQ ID NO: 68468 - DNA, 80 bp, synthetic construct
  source 1..80: mol_type = other DNA
aaggggtgcccaccgttgccacggtggacgtttctcccacgcacaacaccgcctacagtgtacctcccttggacctaaga

SEQ ID NO: 68469 - DNA, 80 bp, synthetic construct
  source 1..80: mol_type = other DNA
caagagaggcaatgattgggtggttataggggtgcataccgcagctgccagaggcggcaacacagtgatctgcgccaccc

SEQ ID NO: 68470 - DNA, 80 bp, synthetic construct
  source 1..80: mol_type = other DNA
aggacgagctcgttaagaccagcaaggtttatgagagtatcaagaaaaggctactatggggctcagatttgggcacaatg

SEQ ID NO: 68471 - DNA, 80 bp, synthetic construct
  source 1..80: mol_type = other DNA
attcgctgtgctaggggttttggtggtcttatggatgaaatgaaagcaaattgtgtaaacttaccaatcagagttggcat

SEQ ID NO: 68472 - DNA, 80 bp, synthetic construct
  source 1..80: mol_type = other DNA
aaatcgccataaacgagggtttgccctctggggtgccgtgtacatcacagtggaattcaatctctcattggctaataaca

SEQ ID NO: 68473 - DNA, 80 bp, synthetic construct
  source 1..80: mol_type = other DNA
ctgtgtgccatatcagaagtctcagggttgtcaccagatgtagtacaatcaaactcctgcttctctttctacggggatga

SEQ ID NO: 68474 - DNA, 80 bp, synthetic construct
  source 1..80: mol_type = other DNA
tcagcactgacatcaagttagatcccatgaaactaactaacaagctgaaagagtacgggctgatcccaacaagaccagat

SEQ ID NO: 68475 - DNA, 80 bp, synthetic construct
  source 1..80: mol_type = other DNA
aagacagagggaccactcataattaaagagaaccttgaaggtttgactttcctgagaagggacgtgtgccgggacccagc

SEQ ID NO: 68476 - DNA, 80 bp, synthetic construct
  source 1..80: mol_type = other DNA
tggttggtatggaaaacttgaccaatcctcgatcatgagacaactgttctggaccaagggacccaatcatgatgacccca

SEQ ID NO: 68477 - DNA, 80 bp, synthetic construct
  source 1..80: mol_type = other DNA
gtctctactaggggaggcagcactgcacggaccagccttctacaagaaagtcagcaaattggttatcactgagctcaaag

SEQ ID NO: 68478 - DNA, 80 bp, synthetic construct
  source 1..80: mol_type = other DNA
agccagttgctggaggagctatcgcagcccctctcactggacaaacaaatataattgatccctggattagaaataatttt

SEQ ID NO: 68479 - DNA, 80 bp, synthetic construct
  source 1..80: mol_type = other DNA
ctgagttgaaccctttcttggctcacctctccagaatgtacaatggttttgcaggtggtatggaggtacaggtattgatg

SEQ ID NO: 68480 - DNA, 80 bp, synthetic construct
  source 1..80: mol_type = other DNA
gcggggaatgctttcaccgctggaaaggtcatctttgctgcagttccaccccattttccagtggagaatttaagcccccc

SEQ ID NO: 68481 - DNA, 80 bp, synthetic construct
  source 1..80: mol_type = other DNA
ccctagaaccagtcttgttgcccatgcccgatgtgagaaatcaattcttccattacaatcaggtgaacgaacccaggatg

SEQ ID NO: 68482 - DNA, 80 bp, synthetic construct
  source 1..80: mol_type = other DNA
cggttagtggccatgctctacacacccttgagatcaaacggatccactgaagacgttttcacggtgtcctgcagggtgtt

SEQ ID NO: 68483 - DNA, 80 bp, synthetic construct
  source 1..80: mol_type = other DNA
gaccaggccttcaccggattttgagttcaattacctggtgcccccaactgtggagtcaagaacaaaacccttcaccttac

SEQ ID NO: 68484 - DNA, 80 bp, synthetic construct
  source 1..80: mol_type = other DNA
ctgtcctcacaattggagagatgacaaattcacgcttccccgcacccatagatatgctttacactagccccaatggtaat

SEQ ID NO: 68485 - DNA, 80 bp, synthetic construct
  source 1..80: mol_type = other DNA
gtgagcttcagggaagcacacaactagtcccagcaaatgtgtgtgcatttagaggtaaaatcacagcaaggatcgttgat

SEQ ID NO: 68486 - DNA, 80 bp, synthetic construct
  source 1..80: mol_type = other DNA
caggcagcacaccagtggcatatgcagattgacaatcccaatgggacactctttgatccaactgaggatgtgcctgcacc

SEQ ID NO: 68487 - DNA, 80 bp, synthetic construct
  source 1..80: mol_type = other DNA
ccttggaacccctgacttcaaagccaagatattcggggtcatatctcaaaggaatgattacaatgatggtagtcagggac

SEQ ID NO: 68488 - DNA, 80 bp, synthetic construct
  source 1..80: mol_type = other DNA
ctgcaaacagagcacatgatgccgtggtacccaccacgtcagctaaattcaccccaaaattgggttccatattggtgggc

SEQ ID NO: 68489 - DNA, 80 bp, synthetic construct
  source 1..80: mol_type = other DNA
acttgggagaataatgacatagaaacacagccttccaaattcactccagttggcctgctcgagatgaatgacttcaatca

SEQ ID NO: 68490 - DNA, 80 bp, synthetic construct
  source 1..80: mol_type = other DNA
gtggtcacttccaaattattcaggggccctaaccctcaatatgggccttgcaccagcggtcttcccaactttccctggtg

SEQ ID NO: 68491 - DNA, 80 bp, synthetic construct
  source 1..80: mol_type = other DNA
aaatggatattttaggtttgactcttgggtgaatcaattttactcacttgcccccatgggaaacggaaacgggcgcagaa

SEQ ID NO: 68492 - DNA, 80 bp, synthetic construct
  source 1..80: mol_type = other DNA
gatattgggcaccaaattcgacctccacgaccatgtactctggtggttttacaggccaaccagtgcataggccgacgcca

SEQ ID NO: 68493 - DNA, 80 bp, synthetic construct
  source 1..80: mol_type = other DNA
aatttttcaatgaagagcaagcccgtgccgagtgttgcatcatcctcccacaagtccaattccacagcatcaacccagct

SEQ ID NO: 68494 - DNA, 80 bp, synthetic construct
  source 1..80: mol_type = other DNA
cggctctgtgtcgtctggttcgtccagatccagcgtctccactgcaactagctcactcccatccacaaccagaacagtgg

SEQ ID NO: 68495 - DNA, 80 bp, synthetic construct
  source 1..80: mol_type = other DNA
ccataagaggggggagtcaaaagtttagtgaaaagaaagatttttctatgattaggttaatgatttggttttctttcttg

SEQ ID NO: 68496 - DNA, 80 bp, synthetic construct
  source 1..80: mol_type = other DNA
taaaccctacatcaaacctctttgccaacatgtctgttggcttaaggagagccctgggggcgaggccaaaacagcccgtc

SEQ ID NO: 68497 - DNA, 80 bp, synthetic construct
  source 1..80: mol_type = other DNA
acatttcccggggttgtggaggctctcatactgcttgcagaactctttgggatcttttggacaccaccagatatttccac

SEQ ID NO: 68498 - DNA, 80 bp, synthetic construct
  source 1..80: mol_type = other DNA
ccagatcgatgcggcacctgtacctcctgtctctaagactgctggactacctagccccattgtacttgcccctccccccc

SEQ ID NO: 68499 - DNA, 80 bp, synthetic construct
  source 1..80: mol_type = other DNA
ccctttcatcccccgtgcgtaagccatcatcacccccgccttctcgcactcgtcgtctcctttacacctatcccgacggc

SEQ ID NO: 68500 - DNA, 80 bp, synthetic construct
  source 1..80: mol_type = other DNA
caccggttgctgccccagggctgccttaccccaccccaccggtcagcgatatttgggtgttaccaccgccctcagtagag

SEQ ID NO: 68501 - DNA, 80 bp, synthetic construct
  source 1..80: mol_type = other DNA
tctcaagctgatgcagcgtccgtaccccccgcccctgagtctgctgagttgcccagacctattgaacctcccccccctgt

SEQ ID NO: 68502 - DNA, 80 bp, synthetic construct
  source 1..80: mol_type = other DNA
aatgcaagtggtgtgctctgcaaccttctacattttgggatgattttagattatcagatatttatgatctaataatggaa

SEQ ID NO: 68503 - DNA, 80 bp, synthetic construct
  source 1..80: mol_type = other DNA
tttattagagttttagtgaaatctaatgttaatgttggtcattgttcatcaaatgaatggatttatcctcacatgcaaaa

SEQ ID NO: 68504 - DNA, 80 bp, synthetic construct
  source 1..80: mol_type = other DNA
tatttttaatccatgcaggacacagagctacaattttgcaattaataaattgtttgagtatttagaatcagtagaagttg

SEQ ID NO: 68505 - DNA, 80 bp, synthetic construct
  source 1..80: mol_type = other DNA
atggaacagaatatgttatgtttgataataatttaacgatagagctatatgacatcataaggtctgtaatgcaatgtaga

SEQ ID NO: 68506 - DNA, 80 bp, synthetic construct
  source 1..80: mol_type = other DNA
gtgccatccatattgtctaaatttgatgtagctgctattattaaggcaattatatcaaaatggtttaatattgatagaat

SEQ ID NO: 68507 - DNA, 80 bp, synthetic construct
  source 1..80: mol_type = other DNA
gagaaaagtgcctctaacattaatgcagactagtacactgagaaatttgaatagttctgatgacttaattgatgagtacg

SEQ ID NO: 68508 - DNA, 80 bp, synthetic construct
  source 1..80: mol_type = other DNA
cactaatgacatctgatgatgaggattgattattcattctttcgtgaaaagtacaattaattcgtatgcacccgtatgtt

SEQ ID NO: 68509 - DNA, 80 bp, synthetic construct
  source 1..80: mol_type = other DNA
tagatagattgattatattcatcacatattatgccaacacacagccttccacactagagtagcgcctaggtggcataaaa

SEQ ID NO: 68510 - DNA, 80 bp, synthetic construct
  source 1..80: mol_type = other DNA
cattaaaggaacctattacaaaagaggatatttgtaatttagtgtcaatgtatagtattttattccctataaatgataaa

SEQ ID NO: 68511 - DNA, 80 bp, synthetic construct
  source 1..80: mol_type = other DNA
gttgttagaaaattctcaaacaatgtgagacagcataaatgcaggaatgaatatgaatttgaatggtataatcagttact

SEQ ID NO: 68512 - DNA, 80 bp, synthetic construct
  source 1..80: mol_type = other DNA
gtttccaattacgttgcaagctttgaccattaaaatagatgattcagtatatcatatattcggttattatgataatatga

SEQ ID NO: 68513 - DNA, 80 bp, synthetic construct
  source 1..80: mol_type = other DNA
ctaaggtaaatcaaaccccattttcatttacaaacttgatcaatagatatgataagctactattagattcaattaatttc

SEQ ID NO: 68514 - DNA, 80 bp, synthetic construct
  source 1..80: mol_type = other DNA
gacagaatggcgaacctacctggagcccttcagcatcaatatgcattgagatatttttcaaaatcacgattcatttcaca

SEQ ID NO: 68515 - DNA, 80 bp, synthetic construct
  source 1..80: mol_type = other DNA
tggtattaaagacttatgtaagagtcattttactgaagaaacactcgagaataaagaaataccaacgtcaccatacgaat

SEQ ID NO: 68516 - DNA, 80 bp, synthetic construct
  source 1..80: mol_type = other DNA
taaccagaaattgtacagtgaatttaacgtcatatggagtcatgagatggaatgatgaatgcaagaaactggtgaacgct

SEQ ID NO: 68517 - DNA, 80 bp, synthetic construct
  source 1..80: mol_type = other DNA
aaataatcaggtacttaaattaggtgctaattcagtttggagaccagcaccactgtctaagtataaaggatggtgtttag

SEQ ID NO: 68518 - DNA, 80 bp, synthetic construct
  source 1..80: mol_type = other DNA
aatgattatattagtgaaatgaatacctcatatactgaacattataccgtgtcacagcagaatctgatttttgtagagca

SEQ ID NO: 68519 - DNA, 80 bp, synthetic construct
  source 1..80: mol_type = other DNA
taaattaaatttattgtcaaaaagaatacaacccaattatgttgcttctaatcattcattgagagcgagtaaaatgagaa

SEQ ID NO: 68520 - DNA, 80 bp, synthetic construct
  source 1..80: mol_type = other DNA
ggaaggagaaatgagaaacagtaataagacagtagaaggagaaatgagaaactgctctttcaatatcaccacaagcatag

SEQ ID NO: 68521 - DNA, 80 bp, synthetic construct
  source 1..80: mol_type = other DNA
ggccgttactagtggatccgagctcggtaccaagcttgatgcatagcttgagtattctaacgcgtcacctaaatagcggc

SEQ ID NO: 68522 - DNA, 80 bp, synthetic construct
  source 1..80: mol_type = other DNA
gccgttgtcgcagccttcttcgcagggctgcccacaagttctgttgtttcatgcgatggctggggcaggattgtacctgt

SEQ ID NO: 68523 - DNA, 80 bp, synthetic construct
  source 1..80: mol_type = other DNA
catcccttccgatcttgctgcccgggccagccgcctcactgctactgttgaggtctcggatgtggacggccgtcttacct

SEQ ID NO: 68524 - DNA, 80 bp, synthetic construct
  source 1..80: mol_type = other DNA
gcaagaccatcttgggcaataaaactttttcaacagcctttgccgacggcgcccagctagaggctaacgggccggagcag

SEQ ID NO: 68525 - DNA, 80 bp, synthetic construct
  source 1..80: mol_type = other DNA
ccttgaggtacacattgtctccgcgggacttgattgtaagacggtcttcccgtctggtgttgcgaccccctccgctcccg

SEQ ID NO: 68526 - DNA, 80 bp, synthetic construct
  source 1..80: mol_type = other DNA
gggaggtgtctgccttctgttcagccctatataggttcaatcgctgcatccagcggcattccctcattggtggtctgtgg

SEQ ID NO: 68527 - DNA, 80 bp, synthetic construct
  source 1..80: mol_type = other DNA
atctaccaccttctactgatactaatacgcctacagccccaaatattgtaccattagttacttcagagcaacttcgcccc

SEQ ID NO: 68528 - DNA, 80 bp, synthetic construct
  source 1..80: mol_type = other DNA
ccagttcttgaacaggtcgcgccctcactggccttagttggcagcgccgctggcccggcctcaggctcccctgtggcacc

SEQ ID NO: 68529 - DNA, 80 bp, synthetic construct
  source 1..80: mol_type = other DNA
cccggtgccagcgcagtccgtgacccacccgtctgggcctcgccgacggttacttcatacctatcctgacggctcaaagg

SEQ ID NO: 68530 - DNA, 80 bp, synthetic construct
  source 1..80: mol_type = other DNA
ttacggcgggtgtccctggctccggcaagtctcgatcgatccagcaaggcgaggtggatgtggtggtggtaccgacccgc

SEQ ID NO: 68531 - DNA, 80 bp, synthetic construct
  source 1..80: mol_type = other DNA
tggaattggccttgcaattggctttacaagggacaaagtcaccaaagttatgaagagtgccgttgacggattgcgctcgg

SEQ ID NO: 68532 - DNA, 80 bp, synthetic construct
  source 1..80: mol_type = other DNA
tataaagaaatatttctttgggggtgaccagacagagagaaccttgcgaggcattgaagatgctgtgatagacatggagg

SEQ ID NO: 68533 - DNA, 80 bp, synthetic construct
  source 1..80: mol_type = other DNA
atatggcactcgaccttcttcgccggtcacaaacaccctccccatcccggcaagaccaccccccaaaagaccaaagagat

SEQ ID NO: 68534 - DNA, 80 bp, synthetic construct
  source 1..80: mol_type = other DNA
gtcaatttaggacccgtgtgcagacgggtagattttctagtctactgttctgcgcctgaaattgaacaggcacggagggc

SEQ ID NO: 68535 - DNA, 80 bp, synthetic construct
  source 1..80: mol_type = other DNA
ggggctttgataaccagggtaacacgccctttggcaagggtgtgatgaaacccactacccttaacagactactaatccaa

SEQ ID NO: 68536 - DNA, 80 bp, synthetic construct
  source 1..80: mol_type = other DNA
cgtccaccgcgcactgctatggaggtgaggaagacaatggggtgggatgaagagccaagacagcaggagagcaccgttaa

SEQ ID NO: 68537 - DNA, 80 bp, synthetic construct
  source 1..80: mol_type = other DNA
ggctggttctgctgtagtggtgagcagggcggtgaaacgcatgtttggcacgagtaccgaacagcccgcattggagggtg

SEQ ID NO: 68538 - DNA, 80 bp, synthetic construct
  source 1..80: mol_type = other DNA
tcttctataagtcaaaatctggtatgaggaagcagcgccaggaagagaggcgacaattggggctcgttagtggtactgag

SEQ ID NO: 68539 - DNA, 80 bp, synthetic construct
  source 1..80: mol_type = other DNA
ggcgtggtgcgacctcgcaagggaggaaaaagaggagataatgcgcaataacgagaagctctttgatgctggggtggttg

SEQ ID NO: 68540 - DNA, 80 bp, synthetic construct
  source 1..80: mol_type = other DNA
ggcgtggtgcgacctcgcaagggaggaaaaagaggagataatgcgcaataacgagaagctctttgatgctgggggggttg

SEQ ID NO: 68541 - DNA, 80 bp, synthetic construct
  source 1..80: mol_type = other DNA
tggggattttgggtgagctcaacagtgttcatcactacaacccatgttataccacctggagctaaggagatttttgggga

SEQ ID NO: 68542 - DNA, 80 bp, synthetic construct
  source 1..80: mol_type = other DNA
agttttggaagtcaaccccacaacccctaccccctggcacttacgaaccagcctatctggggggcagagacccgagagtt

SEQ ID NO: 68543 - DNA, 80 bp, synthetic construct
  source 1..80: mol_type = other DNA
ctcctgcaattttaccaagcacattcgagagagccacgccacacgaaagcactgatgaatgtcaggcagtgacctggtcc

SEQ ID NO: 68544 - DNA, 80 bp, synthetic construct
  source 1..80: mol_type = other DNA
gacggggggccatctttacaacaagtgctcagagaccagcttaaaccttttgctgaacctcgtggtaggttaccagaagc

SEQ ID NO: 68545 - DNA, 80 bp, synthetic construct
  source 1..80: mol_type = other DNA
gccagtgatggcgtggacattggtgtggacagcttaaaaacagtccgtggccctccttggaatatgtgccccctgccacc

SEQ ID NO: 68546 - DNA, 80 bp, synthetic construct
  source 1..80: mol_type = other DNA
tttggaggctcgcaacagtggacctgcaagagagccccttataggggatatggttgagttttatgagggccatatttttc

SEQ ID NO: 68547 - DNA, 80 bp, synthetic construct
  source 1..80: mol_type = other DNA
gcagcccaaaatgtctcaatagcccaagcaacaatgtttccccacgttattgcagatgtgagagtgcttgaaccaattga

SEQ ID NO: 68548 - DNA, 80 bp, synthetic construct
  source 1..80: mol_type = other DNA
tccagattgggagggtcacattagatggacagctccaaggtaccactcccacttcagctagtcagctctgcaaaattcga

SEQ ID NO: 68549 - DNA, 80 bp, synthetic construct
  source 1..80: mol_type = other DNA
ccccgccccaattggtttccccgatttgggtgagtgtgattggcatattaacgcatctcctgctaatgctttcacagatg

SEQ ID NO: 68550 - DNA, 80 bp, synthetic construct
  source 1..80: mol_type = other DNA
gtagtatcatacacagaattgatgtggcccaggattccacttttgctccccatctaggcactatccactataccaacgct

SEQ ID NO: 68551 - DNA, 80 bp, synthetic construct
  source 1..80: mol_type = other DNA
aactatgatgccaatgttagcctaatttgttcacttgaatggctctcccccccaagcgggggtgctccaaaggttaaccc

SEQ ID NO: 68552 - DNA, 80 bp, synthetic construct
  source 1..80: mol_type = other DNA
atgggctattcctcgatacggttcaaccctgactgaggctgcccagttggccccaccaatataccctcccggatttggcg

SEQ ID NO: 68553 - DNA, 80 bp, synthetic construct
  source 1..80: mol_type = other DNA
aggcaattgtcttctttatgtctgatttccccatagctaatggttcagatggtttgagtgtcccttgcactataccacaa

SEQ ID NO: 68554 - DNA, 80 bp, synthetic construct
  source 1..80: mol_type = other DNA
gagtttgtgacccattttgttaatgaacaagcacccactcgtggtgaggctgcactgttgcactatgttgaccctgacac

SEQ ID NO: 68555 - DNA, 80 bp, synthetic construct
  source 1..80: mol_type = other DNA
gaccccagacactgcctatcaatggggttttcactttcatttcctgggtttctcgcttctatcaattaaagcctgtggga

SEQ ID NO: 68556 - DNA, 80 bp, synthetic construct
  source 1..80: mol_type = other DNA
acgaccggtccggtccgtaggctaggcattcggaggtcataatggcccaagccataattggagcaattgctgcaacggct

SEQ ID NO: 68557 - DNA, 80 bp, synthetic construct
  source 1..80: mol_type = other DNA
tactgaggctgcgctccaacaccagcgctttcagcaggatctcacgttgcaaagtaacaccttcaaacatgacaaagaga

SEQ ID NO: 68558 - DNA, 80 bp, synthetic construct
  source 1..80: mol_type = other DNA
tgcttgggttgcaggttggggcgtctactgcacttttgcaaaatagcctcagcactcgctacaatatgctaactaatgct

SEQ ID NO: 68559 - DNA, 80 bp, synthetic construct
  source 1..80: mol_type = other DNA
ggcctatcctcctcagatgcggcacggttggtggttggtgctccagccacgcgtgttgtggattggaacggcaccagggt

SEQ ID NO: 68560 - DNA, 80 bp, synthetic construct
  source 1..80: mol_type = other DNA
gtcagctccacggtcatctgccactacgttgaagtctgggggtttcatgacaataccaaccctctacaagggcaagcaac

SEQ ID NO: 68561 - DNA, 80 bp, synthetic construct
  source 1..80: mol_type = other DNA
agcagaaagcacccacacaggccggcttttcaaatcctaactatggctcagtagcctcctctagaactgctgactgggtt

SEQ ID NO: 68562 - DNA, 80 bp, synthetic construct
  source 1..80: mol_type = other DNA
tcttctcaaaattcaacccggtcttctcttggcccttatcatcctagtgcattacagatgacatgggtaaccccacctgg

SEQ ID NO: 68563 - DNA, 80 bp, synthetic construct
  source 1..80: mol_type = other DNA
ttctagctccacctctactgtttcttctgtgtctactgcacctaggtattttaatactgataggttgcctctattcgcaa

SEQ ID NO: 68564 - DNA, 80 bp, synthetic construct
  source 1..80: mol_type = other DNA
atatgaggaaatgatttttgtaatatgaaatgtgggcatcatattcaattagatctaattatattttgatttggtttgat

SEQ ID NO: 68565 - DNA, 80 bp, synthetic construct
  source 1..80: mol_type = other DNA
tttttgtaatatgaaatgtgggcatcatattcaattagatctaattatattttgatttggtttgatttggtcatgatgtt

SEQ ID NO: 68566 - DNA, 80 bp, synthetic construct
  source 1..80: mol_type = other DNA
agatggttcgggatgctgtgctgtcggccatcaatggtcttgtgtcacaacctttcaaaaacattctgtcaaaaatcaag

SEQ ID NO: 68567 - DNA, 80 bp, synthetic construct
  source 1..80: mol_type = other DNA
ccaggatcgcccccccccaccccaccagtcagtgatatttgggtgttaccaccgccctcagaaaagtcccaggtgggtgc

SEQ ID NO: 68568 - DNA, 80 bp, synthetic construct
  source 1..80: mol_type = other DNA
gcctcttgcgccccccgccctcgagcctgttggaccgcccagccctattaaacttgcctcccccgtgcgtaagccaccga

SEQ ID NO: 68569 - DNA, 80 bp, synthetic construct
  source 1..80: mol_type = other DNA
agttgccaccttcgggtcacattgacatgtctgtagttactgataccccgccattggtctcccctgtgcaggttcagccc

SEQ ID NO: 68570 - DNA, 80 bp, synthetic construct
  source 1..80: mol_type = other DNA
caaccccccaatcccgccgcgtcctcgctggatttggctgatagtggtgctggccctggtttgactagcgcccctgtgga

SEQ ID NO: 68571 - DNA, 80 bp, synthetic construct
  source 1..80: mol_type = other DNA
gcccccggcgcccgtgcagtctgtaacccaacccgggccccgtcgacgactgctccacacttaccccgacggctcaaaag

SEQ ID NO: 68572 - DNA, 80 bp, synthetic construct
  source 1..80: mol_type = other DNA
agatgccaccttctgaagacattgatatgcctgtagttattgacaccccaccatcgattccccctgtccagactcagctc

SEQ ID NO: 68573 - DNA, 80 bp, synthetic construct
  source 1..80: mol_type = other DNA
ccttgaggtgcgcgttgtctctgccgggcttgattgtaaggctgtatttccatccggggttgcaacccccaccacccctg

SEQ ID NO: 68574 - DNA, 80 bp, synthetic construct
  source 1..80: mol_type = other DNA
gtgaggtctccgctttttgttcagctttgtacaggttcaaccgttgtgttcagcggcactcccttattgggggtttgtgg

SEQ ID NO: 68575 - DNA, 80 bp, synthetic construct
  source 1..80: mol_type = other DNA
tcagtatcccctccgaccttgctgctcaggctggccggcttactgctaccgtcgaagtctcggatgccgatggccgtctc

SEQ ID NO: 68576 - DNA, 80 bp, synthetic construct
  source 1..80: mol_type = other DNA
acttgcaagaccattatgggtaacaagaccttttcaacagtctttactgatggtgctcacctggaggccaatgggccgga

SEQ ID NO: 68577 - DNA, 80 bp, synthetic construct
  source 1..80: mol_type = other DNA
cctcgaggtgcgtgtcgtttccgccggactcgactgtaaggccgttttcccacccggagttgcaacaccctctgcacccg

SEQ ID NO: 68578 - DNA, 80 bp, synthetic construct
  source 1..80: mol_type = other DNA
gggaggtgtcagccttttgttctgctctgtataggtttaatcgttgtgtccagcggcattctctcattggaggcttgtgg

SEQ ID NO: 68579 - DNA, 80 bp, synthetic construct
  source 1..80: mol_type = other DNA
cctgtgttttggatctgtcatctcctgttgaggctgatacaccagcggccgttgatgtcttaccttcggttattcctgca

SEQ ID NO: 68580 - DNA, 80 bp, synthetic construct
  source 1..80: mol_type = other DNA
ccacctcagccctcagcccctacccaggcggcgccttccttgggcttggttgatagtagtgctgccccggccctaccgga

SEQ ID NO: 68581 - DNA, 80 bp, synthetic construct
  source 1..80: mol_type = other DNA
tgtttccaccgcaccccctgtgccagcgcagcccgtaacccatccttctgggcctcatcggcggttgcttcacacttacc

SEQ ID NO: 68582 - DNA, 80 bp, synthetic construct
  source 1..80: mol_type = other DNA
cagatggttcaaaagtatatgctggctcccttttcgagtctgagtgcacttggctagttaatgcatccaaccctggtcac

SEQ ID NO: 68583 - DNA, 80 bp, synthetic construct
  source 1..80: mol_type = other DNA
ttgaccccgccgaattcgtcatgtctgatgggcttgcagcctacaccttgaccccccggcctattatccatgctgtcgct

SEQ ID NO: 68584 - DNA, 80 bp, synthetic construct
  source 1..80: mol_type = other DNA
cgttggagttggactcggccactgaggttggccgggcgtgcgctggctgccgtgttgaacccggcgtcgttcactaccag

SEQ ID NO: 68585 - DNA, 80 bp, synthetic construct
  source 1..80: mol_type = other DNA
gtcttgaggtgcgtgttgattctgctggactcgattgtagggctgtcttcccacctggggttgcaaccccctctgcttcc

SEQ ID NO: 68586 - DNA, 80 bp, synthetic construct
  source 1..80: mol_type = other DNA
ggtgaggtgtccgccttctgttcggctttatacaggtttaaccgctgtgtccagcggcattctctcattggtggcttgtg

SEQ ID NO: 68587 - DNA, 80 bp, synthetic construct
  source 1..80: mol_type = other DNA
ctctggactcaccgccccctgccgaggctgatacacctatggctgtcgatgttccacccccagctaccttgacattacca

SEQ ID NO: 68588 - DNA, 80 bp, synthetic construct
  source 1..80: mol_type = other DNA
caacctccggcccctgaacgggcagtacccccgcaagatcttgccgatggcgatgtcgctcgggcctctccgggtgtctc

SEQ ID NO: 68589 - DNA, 80 bp, synthetic construct
  source 1..80: mol_type = other DNA
tgctgcaccccctgtgccggcgcaatccgtgactgatccacccgtgtcccgccggcggttacttcatacttatcctgatg

SEQ ID NO: 68590 - DNA, 80 bp, synthetic construct
  source 1..80: mol_type = other DNA
ctcgggccgatgcggcgcccgtaccgcccgcccctgagcccgttgggttgtccagccctatcgaaccccccccccccgtg

SEQ ID NO: 68591 - DNA, 80 bp, synthetic construct
  source 1..80: mol_type = other DNA
ttgtccagccctatcgaaccccccccccccgtgcgtaagccaccggcactgccgccttctcgcacccgccgtcttcttta

SEQ ID NO: 68592 - DNA, 80 bp, synthetic construct
  source 1..80: mol_type = other DNA
gcagaccacgtatgtggtcgatgccatggaggcccatcagtttattaaggctcctggcattactactgccatcgagcagg

SEQ ID NO: 68593 - DNA, 80 bp, synthetic construct
  source 1..80: mol_type = other DNA
gtgcacttgtcgccaacgagggctggaacgcctcggaggatgcgctcactgctgtaatcactgctgcgtacctgactatt

SEQ ID NO: 68594 - DNA, 80 bp, synthetic construct
  source 1..80: mol_type = other DNA
gctgtggtggtccggccgttcttgtcccgtacccagactgacattcttattaatttgatgcaaccccggcagcttgtgtt

SEQ ID NO: 68595 - DNA, 80 bp, synthetic construct
  source 1..80: mol_type = other DNA
gcatgcgtcggctagaggtcgagcacgcccagaaatttattaccagactctacagctggttgtttgagaagtccggccgt

SEQ ID NO: 68596 - DNA, 80 bp, synthetic construct
  source 1..80: mol_type = other DNA
tttatgcgcagtgccgccgttggctctccgccggcttccacttagatcctagagtccttgttttcgatgaagcggtgcct

SEQ ID NO: 68597 - DNA, 80 bp, synthetic construct
  source 1..80: mol_type = other DNA
tgtcgctgtaggagttttttgaagaaggttgctggtaagttctgctgttttatgaagtggctagggcaggagtgtacttg

SEQ ID NO: 68598 - DNA, 80 bp, synthetic construct
  source 1..80: mol_type = other DNA
cttcctggagccggctgagggcttgactggtgactgtggccacgataatgaggcctatgagggttctgaggtagactccg

SEQ ID NO: 68599 - DNA, 80 bp, synthetic construct
  source 1..80: mol_type = other DNA
ccgagcctgcccaccttgatgtctctgggacctacgcagttcatggccgccagcttgaggctttatatcgggcgcttaat

SEQ ID NO: 68600 - DNA, 80 bp, synthetic construct
  source 1..80: mol_type = other DNA
atcccacatgacattgcggctcgcgcatcacgcctgacggccactgtggagcttactgctagcccaggccgccttgaatg

SEQ ID NO: 68601 - DNA, 80 bp, synthetic construct
  source 1..80: mol_type = other DNA
ccgtacggtgcttggaaataagaccttccgcacatcaataactgatggtgctcaccttgaggtcaatggccctgagcagt

SEQ ID NO: 68602 - DNA, 80 bp, synthetic construct
  source 1..80: mol_type = other DNA
atgttctgacatttgacgactcccgccaagcgatgggagctgggccccatagtctcacatatgagctcacccccgctggc

SEQ ID NO: 68603 - DNA, 80 bp, synthetic construct
  source 1..80: mol_type = other DNA
ctgcaggtcaggatatcttctaatggcctagactgtactgctgttttcccccccggcggagcgccaagtgctgcgccggg

SEQ ID NO: 68604 - DNA, 80 bp, synthetic construct
  source 1..80: mol_type = other DNA
ccgccctgaggttttgtggaaccatcctatccagcgagtcatacataatgagctggagcagtactgccgcgctcgcgctg

SEQ ID NO: 68605 - DNA, 80 bp, synthetic construct
  source 1..80: mol_type = other DNA
agaggttgcagctttctgcagtgccctatacagatacaatagatttactcagcgccactcgcttaccggcgggttgtggc

SEQ ID NO: 68606 - DNA, 80 bp, synthetic construct
  source 1..80: mol_type = other DNA
tgcatcccgaggggctcttgggtctattcccccccttttcccccgggcacatttgggaatcagcaaatcctttttgtggt

SEQ ID NO: 68607 - DNA, 80 bp, synthetic construct
  source 1..80: mol_type = other DNA
gagggtacactttatacccggacttggtctacatctggtttctctagtgatttctctccccctgaggcggcttttgccgc

SEQ ID NO: 68608 - DNA, 80 bp, synthetic construct
  source 1..80: mol_type = other DNA
cccagctccagatgggggcctgcccctgggcaccccttcctctgccagtgacgtctgggtgcttccgtcgccctctgagg

SEQ ID NO: 68609 - DNA, 80 bp, synthetic construct
  source 1..80: mol_type = other DNA
ggtcagtggctgcctcatcacttgcagccccggttagtaagcccgctagcccgctcagccccgctacgcctaaccccccc

SEQ ID NO: 68610 - DNA, 80 bp, synthetic construct
  source 1..80: mol_type = other DNA
gttcataagccactctcgccaccaacgcctaagccccccgctcgtaagccgcctccaccgccgccggcccgtacccgtcg

SEQ ID NO: 68611 - DNA, 80 bp, synthetic construct
  source 1..80: mol_type = other DNA
gcttctctacacttacccggatggggctaaggtctacgcaggttccttgttcgagtcagactgtgactggctggttaacg

SEQ ID NO: 68612 - DNA, 80 bp, synthetic construct
  source 1..80: mol_type = other DNA
catccaaccctggccaccgccccggtggcggcctctgccatgctttttaccagcgctttccggagtcgttccacccgacc

SEQ ID NO: 68613 - DNA, 80 bp, synthetic construct
  source 1..80: mol_type = other DNA
gattttattatgcgcgaggggctcgccgcgtataccttgaccccacgaccaattattcatgctgtggctcctgactatag

SEQ ID NO: 68614 - DNA, 80 bp, synthetic construct
  source 1..80: mol_type = other DNA
gattgagcagaacccaaagaggttggaggcggcgtaccgcgagacctgctcccgcctcggtacagccgcctaccctctac

SEQ ID NO: 68615 - DNA, 80 bp, synthetic construct
  source 1..80: mol_type = other DNA
gccgctgcctggaggtgggagcccacccaagatccattaatgacaaccctaatgttttgcaccggtgttttcttcgtccg

SEQ ID NO: 68616 - DNA, 80 bp, synthetic construct
  source 1..80: mol_type = other DNA
tgggttcagggatttaccaagtccctgtgggtctaagttttgacgcctgggagcgtaaccatcgcccaggcgacgagctc

SEQ ID NO: 68617 - DNA, 80 bp, synthetic construct
  source 1..80: mol_type = other DNA
tatcttactgagcccgctgctgcgtggtttgaggccaataagccaacccaaccagctttaacaattactgaagacaccgc

SEQ ID NO: 68618 - DNA, 80 bp, synthetic construct
  source 1..80: mol_type = other DNA
tcgcacggctaacctcgcgctcgagatcgactctgctaccgaggtgggccgtgcttgcactggctgtactgttagccctg

SEQ ID NO: 68619 - DNA, 80 bp, synthetic construct
  source 1..80: mol_type = other DNA
ggattgtccattatcagtttactgccggggtacctggttccgggaagtctaggtctatacaacaaggggacgtcgatgtt

SEQ ID NO: 68620 - DNA, 80 bp, synthetic construct
  source 1..80: mol_type = other DNA
gtggttgtaccgactcgtgagctccgtaatagctggcgacgtcgcggtttcgctgctttcacaccccacacggcagcccg

SEQ ID NO: 68621 - DNA, 80 bp, synthetic construct
  source 1..80: mol_type = other DNA
accgccggtcggcgtgttgtgattgatgaagcaccctcgctcccgccacatctgctactacttcatatgcagagggcttc

SEQ ID NO: 68622 - DNA, 80 bp, synthetic construct
  source 1..80: mol_type = other DNA
gtcggtccacctcctcggcgaccctaaccagatccccgccattgactttgagcattcaggattggtgccggcgattcgac

SEQ ID NO: 68623 - DNA, 80 bp, synthetic construct
  source 1..80: mol_type = other DNA
ctgagcttgccccaactagttggtggcacgttacacatcgctgtcctgccgatgtatgtgagctcatacgcggggcttac

SEQ ID NO: 68624 - DNA, 80 bp, synthetic construct
  source 1..80: mol_type = other DNA
cctaagatccaaactactagccgtgtgatgcgatctttgttttggaatgagcctgcggtaggccaaaagttggtcttcac

SEQ ID NO: 68625 - DNA, 80 bp, synthetic construct
  source 1..80: mol_type = other DNA
gcaggccgctaaggcagccaatcccggcgcaattactgtccatgaagcccagggcgctacatttacagagaccaccatta

SEQ ID NO: 68626 - DNA, 80 bp, synthetic construct
  source 1..80: mol_type = other DNA
gttgggagagatgtgcagcgttggtattcagccccgacccgtggtccggcggctaactgtcgccgctccgcattacgtgg

SEQ ID NO: 68627 - DNA, 80 bp, synthetic construct
  source 1..80: mol_type = other DNA
tagctacggctgatgccaggggccttatccagtcctcccgtgcacatgcaattgtcgcactcactcgtcacacagagaga

SEQ ID NO: 68628 - DNA, 80 bp, synthetic construct
  source 1..80: mol_type = other DNA
tgtgtcatcctggatgccccaggcctgctgcgtgaggtcggcatttctgatataattgttaacaatttctttttggccgg

SEQ ID NO: 68629 - DNA, 80 bp, synthetic construct
  source 1..80: mol_type = other DNA
cggtgaggtaggccaccaccgcccctccaccataccccgtggcaaccctgaccagaacttggacatcctgcaggcattcc

SEQ ID NO: 68630 - DNA, 80 bp, synthetic construct
  source 1..80: mol_type = other DNA
ctccatcctgtcaaatcagtgcttaccatcagctagccgaggagctgggtcaccgaccggccccagtggctgctgtacta

SEQ ID NO: 68631 - DNA, 80 bp, synthetic construct
  source 1..80: mol_type = other DNA
ccaccctgccctgagcttgagcagggcctactttacatgccacaagagctcacagtgtctgatagtgttctggtttttga

SEQ ID NO: 68632 - DNA, 80 bp, synthetic construct
  source 1..80: mol_type = other DNA
gcttacggacatagtccactgccgaatggcggcccctagtcagcggaaggccgtcctttcgacgctcgtcggcaggtacg

SEQ ID NO: 68633 - DNA, 80 bp, synthetic construct
  source 1..80: mol_type = other DNA
gccgccggacgaagctgtatgaggcagctcactctgatgtccgtgagtccttagggaggtttatccctaccatcggacca

SEQ ID NO: 68634 - DNA, 80 bp, synthetic construct
  source 1..80: mol_type = other DNA
gtccaggccaccacatgtgagctgtatgaattagtggaggctatggttgagaagggccaggacggttccgctgtgttaga

SEQ ID NO: 68635 - DNA, 80 bp, synthetic construct
  source 1..80: mol_type = other DNA
gcttgatctctgtagccgtgatgtctcacgcatcacattctttcagaaggattgtaataaattcacaacaggcgagacta

SEQ ID NO: 68636 - DNA, 80 bp, synthetic construct
  source 1..80: mol_type = other DNA
ttgcccacggcaaggtgggccagggtatctcggcctggagcaaaactttctgcgctctatttggaccgtggtttcgtgcc

SEQ ID NO: 68637 - DNA, 80 bp, synthetic construct
  source 1..80: mol_type = other DNA
tctacctcctgtcgaccgtacctactgtttcgacgggttttcccgctgcgccttcgccgccgagactgggatcgctttat

SEQ ID NO: 68638 - DNA, 80 bp, synthetic construct
  source 1..80: mol_type = other DNA
attgagaaggaaatcttatccctgctcccacctaatatcttttatggtgatgctttcgaagagtcagtgttctctgcagc

SEQ ID NO: 68639 - DNA, 80 bp, synthetic construct
  source 1..80: mol_type = other DNA
catttccggagcaggctctagtatggtttttgagaatgatttttctgagtttgacagtacccaaaataatttttccctcg

SEQ ID NO: 68640 - DNA, 80 bp, synthetic construct
  source 1..80: mol_type = other DNA
gcatgccccagtggcttatccggctgtaccatttagtcaggtcagcttggactttgcaggccccgaaagagtcattgaaa

SEQ ID NO: 68641 - DNA, 80 bp, synthetic construct
  source 1..80: mol_type = other DNA
ggcttttggaagaagcattctggcgagcccggcacactcctttggaacactgtctggaatatggcgatcatagcgcattg

SEQ ID NO: 68642 - DNA, 80 bp, synthetic construct
  source 1..80: mol_type = other DNA
gtaatgcggccgccttgattgctggttgtgggttaaagttgaaggttgattatcgccccatagggctgtatgctggtgtt

SEQ ID NO: 68643 - DNA, 80 bp, synthetic construct
  source 1..80: mol_type = other DNA
ggggcccgggccccgagcgtgctgaacagctgcgcttagcagtttgtgatttcctccgaaggcttacgaatgttgcgcag

SEQ ID NO: 68644 - DNA, 80 bp, synthetic construct
  source 1..80: mol_type = other DNA
agccgatggaaaggctcattttactgagactgtcaaacctgtactggatcttacaaattctatcatacagaggttagaat

SEQ ID NO: 68645 - DNA, 80 bp, synthetic construct
  source 1..80: mol_type = other DNA
actcattacatgacctctggcctgcggatgttgcggaggccatggcccgccatgggatgacacgcttgtatgcagccctc

SEQ ID NO: 68646 - DNA, 80 bp, synthetic construct
  source 1..80: mol_type = other DNA
tctggggtgacagggttgattctcagcccttcgccctcccctatattcatccaaccaacccctttgccgccgacgtcgta

SEQ ID NO: 68647 - DNA, 80 bp, synthetic construct
  source 1..80: mol_type = other DNA
ccacaacccggggctggagctcgccctcgacagccgccccgccccctcggctcctcttggcgcgaccagtcccagcgccc

SEQ ID NO: 68648 - DNA, 80 bp, synthetic construct
  source 1..80: mol_type = other DNA
tcccgtcgtcgatctaccccagctggggctgcgccgttaactgctgtttcccctgcacctgatacggctccggtccccga

SEQ ID NO: 68649 - DNA, 80 bp, synthetic construct
  source 1..80: mol_type = other DNA
tgttgattctcgcggagctattttacgccgccagtataacttgtctacatctcctttgacctcctctgttgcttctggca

SEQ ID NO: 68650 - DNA, 80 bp, synthetic construct
  source 1..80: mol_type = other DNA
ccaatcttgttttgtatgccgccccgctcaaccccctcctacctctccaggatggcaccaatacccatattatggctact

SEQ ID NO: 68651 - DNA, 80 bp, synthetic construct
  source 1..80: mol_type = other DNA
ccgccctctggtgccgaatgctgtcggtggctatgcaatttctatttccttttggccccagactacaactactcccacct

SEQ ID NO: 68652 - DNA, 80 bp, synthetic construct
  source 1..80: mol_type = other DNA
ctgtcgatatgaactctatcacttctactgatgttaggattttagttcagcccggtgtggcctctgagctggtcatcccg

SEQ ID NO: 68653 - DNA, 80 bp, synthetic construct
  source 1..80: mol_type = other DNA
catctaccccctgaggttctgttaccacctggcacttatcacaccacctcttatttgttgatccacgatggcgaccgcgc

SEQ ID NO: 68654 - DNA, 80 bp, synthetic construct
  source 1..80: mol_type = other DNA
cgggcgtggccgaggaagaggcaacatcgggtcttgtcatgctttgtatacatggttcccccgttaattcttacaccaat

SEQ ID NO: 68655 - DNA, 80 bp, synthetic construct
  source 1..80: mol_type = other DNA
acgccctacactggggcgctggggcttcttgactttgcactcgagcttgaattcaggaacttgacccctgggaacaccaa

SEQ ID NO: 68656 - DNA, 80 bp, synthetic construct
  source 1..80: mol_type = other DNA
tactcgtgtgtcccggtacaccagcacggctcgtcaccgtttacgccgtggcgccgacggaaccgctgagctcacgacca

SEQ ID NO: 68657 - DNA, 80 bp, synthetic construct
  source 1..80: mol_type = other DNA
ctgccgctacgcgcttcatgaaggacctacatttcaccgggacgaatggcgttggtgaggtgggccgtggcatagcccta

SEQ ID NO: 68658 - DNA, 80 bp, synthetic construct
  source 1..80: mol_type = other DNA
actctatttaatcttgctgatacacttctcggcggtttgccgacagaattgatttcgtcggctggaggtcagctctttta

SEQ ID NO: 68659 - DNA, 80 bp, synthetic construct
  source 1..80: mol_type = other DNA
ccttctcggtcctccgtgctaatgatgtcttgtggctctctcttactgctgctgagtatgatcaaaccacttacggttcg

SEQ ID NO: 68660 - DNA, 80 bp, synthetic construct
  source 1..80: mol_type = other DNA
tcgaccaatcctatgtatgtttcagacactgttacctttgttaatgtggccacaggggcccaggctgtcgcccgttccct

SEQ ID NO: 68661 - DNA, 80 bp, synthetic construct
  source 1..80: mol_type = other DNA
tgtcgtgacttatgagggggacaccagcgcgggctataatcatgatgtgtcaattctccgtgcatggattcgcacaacca

SEQ ID NO: 68662 - DNA, 80 bp, synthetic construct
  source 1..80: mol_type = other DNA
cgactggtctaaggtcactttggatggtcgacctcttaccactgttcagcagtactctaagacattctatgtgctcccac

SEQ ID NO: 68663 - DNA, 80 bp, synthetic construct
  source 1..80: mol_type = other DNA
ttcgagggaagttatctttttgggaggctggtactaccaaagctgggtacccctataactataacaccactgctagcgat

SEQ ID NO: 68664 - DNA, 80 bp, synthetic construct
  source 1..80: mol_type = other DNA
cagattttgatagagaatgcagccggtcatcgtgtcgctatctctacctataccactagtcttggtgctggtccagtgtc

SEQ ID NO: 68665 - DNA, 80 bp, synthetic construct
  source 1..80: mol_type = other DNA
tgtttctgcggtcggtgttcttgccccgcactctgctctagctgtgcttgaagatactattgattatcccgctcgcaccc

SEQ ID NO: 68666 - DNA, 80 bp, synthetic construct
  source 1..80: mol_type = other DNA
atacttttgatgatttctgccctgagtgccgtaatcttggcctacagggctgcgctttccaatctactattgctgaactt

SEQ ID NO: 68667 - DNA, 80 bp, synthetic construct
  source 1..80: mol_type = other DNA
aaatagtcggtgaccacccgttggtcatagagagggttcgtgccatcggctgccatttcgtgctgctcctcactgcagcc

SEQ ID NO: 68668 - DNA, 80 bp, synthetic construct
  source 1..80: mol_type = other DNA
cctgaaccatctcccatgccttatgtcccatacccccgttcaacagaggtatatgtcaggtctatatttggccctggtgg

SEQ ID NO: 68669 - DNA, 80 bp, synthetic construct
  source 1..80: mol_type = other DNA
gtcgccttctctcttcccatcagcctgctctaccaaatctacatttcatgccgttccagtccatatctgggaccggctta

SEQ ID NO: 68670 - DNA, 80 bp, synthetic construct
  source 1..80: mol_type = other DNA
tgcttttcggtgccactctggacgaccaagccttttgttgctcgcggcttatgacctatctccgtgggattagttataag

SEQ ID NO: 68671 - DNA, 80 bp, synthetic construct
  source 1..80: mol_type = other DNA
cctatattcatccaaccaacccctttgccgccgacgtcgtaccacaacccggggctggagctcgccctcgacagccgccc

SEQ ID NO: 68672 - DNA, 80 bp, synthetic construct
  source 1..80: mol_type = other DNA
gcaagactattataggcaacaaaacttttttaacggtctttactgacggtgcccaactagaggccaacggaccggaacaa

SEQ ID NO: 68673 - DNA, 80 bp, synthetic construct
  source 1..80: mol_type = other DNA
tatgtgttgtctctagatttagccaagcagaccatggccgcaggcccccacagcctcagttatactctaacacccgcagg

SEQ ID NO: 68674 - DNA, 80 bp, synthetic construct
  source 1..80: mol_type = other DNA
tcttgaagtctgtgttgtttctgatgggcttgactgtaaggtagtttttccacccggtgtggctgccccctctgctcctg

SEQ ID NO: 68675 - DNA, 80 bp, synthetic construct
  source 1..80: mol_type = other DNA
gagaggtgtctgctttttgctcagccctatacaggtttaaccgctgcgttcagaggcactcccttatcgggggtttgtgg

SEQ ID NO: 68676 - DNA, 80 bp, synthetic construct
  source 1..80: mol_type = other DNA
cttgtatccaggacccgccatctcctgccgagtattatacacctatgcctatcaatagcccctcccctgcaactccagca

SEQ ID NO: 68677 - DNA, 80 bp, synthetic construct
  source 1..80: mol_type = other DNA
catacccagttgtcggtccctgagcggatggcaccccccccggatttatctgacggaggcgctcgctccgccacacccgg

SEQ ID NO: 68678 - DNA, 80 bp, synthetic construct
  source 1..80: mol_type = other DNA
tgctcctgctacacccccgacgccgctgcagtccataacccatctgtccgagccccgcaggcgattgctccatacctacc

SEQ ID NO: 68679 - DNA, 80 bp, synthetic construct
  source 1..80: mol_type = other DNA
cagacggctcaaaagtatatgccggctctctttttgagtctgaatgcacttggctggttaatgcatccaatcccggtcac

SEQ ID NO: 68680 - DNA, 80 bp, synthetic construct
  source 1..80: mol_type = other DNA
tcataccacgtggcactattgacagcaatgttgatacgctcgatgctttcccgccctcctgccggttcagtgcttatcat

SEQ ID NO: 68681 - DNA, 80 bp, synthetic construct
  source 1..80: mol_type = other DNA
ccagattctcattgagaacgcggctggtcatcgtgtctgcatttctacttatactactaacctaggttctgggcccgtct

SEQ ID NO: 68682 - DNA, 80 bp, synthetic construct
  source 1..80: mol_type = other DNA
aacagtagctgtaatgctaccaaggataccagtagtgataataatatgtacacttgtcataatgatacttacaagaatga

SEQ ID NO: 68683 - DNA, 80 bp, synthetic construct
  source 1..80: mol_type = other DNA
actaatgacaaattgcgctttcaatgtaactgaagacttacaagataagaaaaagttagtgtctgcatatttttatagaa

SEQ ID NO: 68684 - DNA, 80 bp, synthetic construct
  source 1..80: mol_type = other DNA
tcgcaccggggatcctaggcttattatattgcgctttgtattgaagtctgttctgtgtggactgacctcagcacaagtgt

SEQ ID NO: 68685 - DNA, 80 bp, synthetic construct
  source 1..80: mol_type = other DNA
cttcttggctggaaggtcttgtggcttgtatggtgtctctggctctgacatttacaagggactctaccagttccagtccg

SEQ ID NO: 68686 - DNA, 80 bp, synthetic construct
  source 1..80: mol_type = other DNA
ctgcccacttttagaatgttcttcttagacgtggattttaactccacaagggagtgtactgtctggttcaggctcctcag

SEQ ID NO: 68687 - DNA, 80 bp, synthetic construct
  source 1..80: mol_type = other DNA
ataccatctacaaagctgtgtcctgtgacttcaacaatgggattacaatccagtacaacctaaccttctctgatgcacaa

SEQ ID NO: 68688 - DNA, 80 bp, synthetic construct
  source 1..80: mol_type = other DNA
tgggattacaatccagtacaacctaaccttctctgatgcacaaggtgccatcaatcaatgtggaaccttcagaggtagag

SEQ ID NO: 68689 - DNA, 80 bp, synthetic construct
  source 1..80: mol_type = other DNA
ggtgccatcaatcaatgtggaaccttcagaggtagagttttagatatgtttagaacagcttttggggggaaatacatgag

SEQ ID NO: 68690 - DNA, 80 bp, synthetic construct
  source 1..80: mol_type = other DNA
tatggggcagatcataacaatgtttgaggccctgcctcacattatcgatgaggtcatcaacattgttataatagtgctta

SEQ ID NO: 68691 - DNA, 80 bp, synthetic construct
  source 1..80: mol_type = other DNA
agaagtaatcctggtattaatattaatatgtatactgaatattttctggcaagtagtgatccatatacatatcttaaaaa

SEQ ID NO: 68692 - DNA, 80 bp, synthetic construct
  source 1..80: mol_type = other DNA
aaaggggaaatgaaaagctgctctttcaatgtcaccacaaatataggaggtaaagtaaagaaggaaaatgcactttttta

SEQ ID NO: 68693 - DNA, 80 bp, synthetic construct
  source 1..80: mol_type = other DNA
tattgccgctcgggcggctcaactaacggccactgttgagctcgctgctggcccagaccgtttggaatgccgcaccgtgc

SEQ ID NO: 68694 - DNA, 80 bp, synthetic construct
  source 1..80: mol_type = other DNA
tctcaggttgatgcggctcctgcacctcctgccctcgagcccgttgggctgtctagccctgttaagcctaccccccccgt

SEQ ID NO: 68695 - DNA, 80 bp, synthetic construct
  source 1..80: mol_type = other DNA
gcgtaagccaccggcatcgccgccttcccgcacccgccgtcttctttacacttaccctgacggcgccaaagtgtattctg

SEQ ID NO: 68696 - DNA, 80 bp, synthetic construct
  source 1..80: mol_type = other DNA
ccagggctgtcataccccaccccaccagtcagtgatatttgggtgttaccgccaccctcagaagagactcaggttggtgc

SEQ ID NO: 68697 - DNA, 80 bp, synthetic construct
  source 1..80: mol_type = other DNA
ggttctcgaaccccccgcccctgagccagttaggccgcccagccctgttaaaccgcctccccctgtgcgtaagccaccgg

SEQ ID NO: 68698 - DNA, 80 bp, synthetic construct
  source 1..80: mol_type = other DNA
cattgtcgccttctcgcgcccgccgtcttctttacacctaccctgacggcgccaaggtgtatgcagggtcactatttgag

SEQ ID NO: 68699 - DNA, 80 bp, synthetic construct
  source 1..80: mol_type = other DNA
ccagggctgccttcccccacaccaccagttagtgacatctgggtgttaccgccgccctcagatgagtctcaggttgatgc

SEQ ID NO: 68700 - DNA, 80 bp, synthetic construct
  source 1..80: mol_type = other DNA
ggtgcgcgtaccccccatccccgagcccgttgggccacccagccctactgaacttcctccccccgtgcgtaagccatcgg

SEQ ID NO: 68701 - DNA, 80 bp, synthetic construct
  source 1..80: mol_type = other DNA
cattgccaccttctcgcacccgccgtcttctttacacctaccctgacggcgctaaggtgtacgcggggtcactgttcgag

SEQ ID NO: 68702 - DNA, 80 bp, synthetic construct
  source 1..80: mol_type = other DNA
tatctctgaaatgtccaattctaggtttccagtgccgattgactctctgcacaccagcccaactgagaatattgttgtcc

SEQ ID NO: 68703 - DNA, 80 bp, synthetic construct
  source 1..80: mol_type = other DNA
tccggggcaaagtctttggcgtggccagccagagaaaccccgacagcacaactagagcacatgaagcaaaggtggacaca

SEQ ID NO: 68704 - DNA, 80 bp, synthetic construct
  source 1..80: mol_type = other DNA
acagctggtcgtttcaccccaaaactaggctcattagagatatccactgaatctgatgactttcatcaaaaccaaccaac

SEQ ID NO: 68705 - DNA, 80 bp, synthetic construct
  source 1..80: mol_type = other DNA
cgaaccaggcttccaaaaccacacccagcagtgggtcttcagtgaggtcaaattcaacccaagtcactagcctgagctca

SEQ ID NO: 68706 - DNA, 80 bp, synthetic construct
  source 1..80: mol_type = other DNA
tactcgtccgggtcgtctcgatccagcgggtctacagttgttagctcattaccatcctctaacaggactagggactgggt

SEQ ID NO: 68707 - DNA, 80 bp, synthetic construct
  source 1..80: mol_type = other DNA
gggagagcaccctttacacccgtacctggtcggtgtcgggcttttctagctgtttctccccgcttgaattttgcgctccg

SEQ ID NO: 68708 - DNA, 80 bp, synthetic construct
  source 1..80: mol_type = other DNA
gacataccaccttctgtcgagactagtacacctgtggctgttagtaccccacccccagccgccctagtgcggccccattc

SEQ ID NO: 68709 - DNA, 80 bp, synthetic construct
  source 1..80: mol_type = other DNA
cgtggctcccgaacaggtagccccctcgccggacttggttgataaagccggtccgaccttacctggtgtccccatggcgc

SEQ ID NO: 68710 - DNA, 80 bp, synthetic construct
  source 1..80: mol_type = other DNA
ccccagcgccagtgcagcccgcagcccctcctcctgggcctcgccggcggctgctccacacttaccctgatggctccaag

SEQ ID NO: 68711 - DNA, 80 bp, synthetic construct
  source 1..80: mol_type = other DNA
ttcgtgggtccttgagccgtttcatccctgaacttggtcccattagtgttactacttgtgagctctacgagctcgtggag

SEQ ID NO: 68712 - DNA, 80 bp, synthetic construct
  source 1..80: mol_type = other DNA
acacacgcgtctctcgttactcgagcagcgcgcgccacaagctgcgtcgtggagccgatggtactgctgaattgacaacg

SEQ ID NO: 68713 - DNA, 80 bp, synthetic construct
  source 1..80: mol_type = other DNA
ccttgaaatacatgtcgtctccgccgggcttgattgtaaggccgtctttccgtccggggttgcgaccccgtctgcccccg

SEQ ID NO: 68714 - DNA, 80 bp, synthetic construct
  source 1..80: mol_type = other DNA
gggaggtgtctgccttctgttcagcattgtacagatttaaccgctgtgtccagcggcactccctcattgggggtgtgtgg

SEQ ID NO: 68715 - DNA, 80 bp, synthetic construct
  source 1..80: mol_type = other DNA
acccgccccctcttgttgagactgacacgcctacagttgttgatactctgcctccagttgtttcagtaccccttgagcaa

SEQ ID NO: 68716 - DNA, 80 bp, synthetic construct
  source 1..80: mol_type = other DNA
atagtacttccaccagactctgtagataaggcagccggcccgaccgcatctagcgcccctgttgtaccgccagcaccagt

SEQ ID NO: 68717 - DNA, 80 bp, synthetic construct
  source 1..80: mol_type = other DNA
gcagtctgtagttcaaccatctgggcctcgccggcggctgcttcatacttatcctgatggctcgaaggtgtatgctggct

SEQ ID NO: 68718 - DNA, 80 bp, synthetic construct
  source 1..80: mol_type = other DNA
tccacgtcaccgcttacgtccactatcgctactggcactaatcttgtgctatatgctgccccactgagccctctgctccc

SEQ ID NO: 68719 - DNA, 80 bp, synthetic construct
  source 1..80: mol_type = other DNA
aggagaaatgaaaaactgcactttcaatatcaccaccaatataggagagaagaagagagaatctgcactcttttataaac

SEQ ID NO: 68720 - DNA, 80 bp, synthetic construct
  source 1..80: mol_type = other DNA
caataggaaagaagaaacagaaactgaacaaaaggaattatatagtaagggcattgacattaaacacaatgacaaaggat

SEQ ID NO: 68721 - DNA, 80 bp, synthetic construct
  source 1..80: mol_type = other DNA
agaaaggaacgcaacagagataatttacttgactaacactactatagaaaaagaaatatgccccgaaacaatggagtata

SEQ ID NO: 68722 - DNA, 80 bp, synthetic construct
  source 1..80: mol_type = other DNA
cttgatgactactgtaacattgcatctcaagcaattcgagtacaatactcccgcaaacagccaagtaataacgtgtgaac

SEQ ID NO: 68723 - DNA, 80 bp, synthetic construct
  source 1..80: mol_type = other DNA
ctcgtgaggggaaacaaatagtgaagcgtattctggaagaagaatacgatgaggcactaaatatcgcttctgtgcctgct

SEQ ID NO: 68724 - DNA, 80 bp, synthetic construct
  source 1..80: mol_type = other DNA
cacattgaaagcaaacttcagtgtgatttttaatcgactggaaactctgatactccttagagcttttacggaagaaggag

SEQ ID NO: 68725 - DNA, 80 bp, synthetic construct
  source 1..80: mol_type = other DNA
attgaaccagccacccgcgcggggaagcaaatagtaaagcgcattttggaagaagagtacgatgaggcgcttaaaataag

SEQ ID NO: 68726 - DNA, 80 bp, synthetic construct
  source 1..80: mol_type = other DNA
tgcttctgtgcctacttcacgctatctaactgacatgactcttgaagagatgtcaagggactggttcatgctcatgccca

SEQ ID NO: 68727 - DNA, 80 bp, synthetic construct
  source 1..80: mol_type = other DNA
cttggtaacgactataacattgcattttatgcaacatgagagcgactccccctcaagcaaccaagcgacatcatgtaaac

SEQ ID NO: 68728 - DNA, 80 bp, synthetic construct
  source 1..80: mol_type = other DNA
caccggctgctgccccaaggccgtcctaccccactccaccagtcagtgatatctgggtgttaccaccgccctcagaagag

SEQ ID NO: 68729 - DNA, 80 bp, synthetic construct
  source 1..80: mol_type = other DNA
ccactccaccagtcagtgatatctgggtgttaccaccgccctcagaagagcttcaggttgatgcggtgcccgtacccccc

SEQ ID NO: 68730 - DNA, 80 bp, synthetic construct
  source 1..80: mol_type = other DNA
cttcaggttgatgcggtgcccgtaccccccgcccccgggcccgtcgggctgcccagccttcctgagcctccaccccccgt

SEQ ID NO: 68731 - DNA, 80 bp, synthetic construct
  source 1..80: mol_type = other DNA
atgaagaccgttatcgctttaagctacattttctgcctggccttcggtcagaattttccagggagcgacaatagcacagc

SEQ ID NO: 68732 - DNA, 80 bp, synthetic construct
  source 1..80: mol_type = other DNA
agtgataattgtagtgggaatactaataatacccatagtaatagtagtttgggaagaatagatgcaggagaagtaaaaaa

SEQ ID NO: 68733 - DNA, 80 bp, synthetic construct
  source 1..80: mol_type = other DNA
aagcagtaagtattgttaagtagtatatgtaatgtcacatgtattagcaatagcgatagtagcattaatagtagcactaa

SEQ ID NO: 68734 - DNA, 80 bp, synthetic construct
  source 1..80: mol_type = other DNA
tctcaagacagggtcagaggacctaaaatctctttggaacgcaatagcagtactctggtgcgttcacaacagatttgagg

SEQ ID NO: 68735 - DNA, 80 bp, synthetic construct
  source 1..80: mol_type = other DNA
ttcaaaacacacagcaggcaatacaaaagctaaaagaagtaatggaaaacaggaagtctgcagatgccgctaagggggaa

SEQ ID NO: 68736 - DNA, 80 bp, synthetic construct
  source 1..80: mol_type = other DNA
aatagcagtgcatcaaacacaaccgacctaaggatcgcaggcctagaagaaatacccatgaaaaattgtagttttaatgt

SEQ ID NO: 68737 - DNA, 80 bp, synthetic construct
  source 1..80: mol_type = other DNA
aatattgtagtaaccctaaacacttctataaacatgacatgtacgagaaaaggaagaggtaaaatacaaaggatagcgac

SEQ ID NO: 68738 - DNA, 80 bp, synthetic construct
  source 1..80: mol_type = other DNA
acaacactgaatggataaataccttaaaacaaacagctgaaagatatttagaactagtaaacaagacaagaaatttaagc

SEQ ID NO: 68739 - DNA, 80 bp, synthetic construct
  source 1..80: mol_type = other DNA
aagacaagaaattttagcataatattcaaccacagtataagtggtggagacatagaagcaagctctttacattttaactg

SEQ ID NO: 68740 - DNA, 80 bp, synthetic construct
  source 1..80: mol_type = other DNA
ccaataaaactcagacaaataaaactcaggatactataataccttgcaagataagacaggtagtaagatcatggataaag

SEQ ID NO: 68741 - DNA, 80 bp, synthetic construct
  source 1..80: mol_type = other DNA
ggagagttaggactctatgcacctcccatcccaggtgatctaacatgtaaatccaacataactgggatgattttacaact

SEQ ID NO: 68742 - DNA, 80 bp, synthetic construct
  source 1..80: mol_type = other DNA
agatacaccctacaactcctcatgtgacaatgtcacatttagaccaacagggggagatatgagagatatatggagaactg

SEQ ID NO: 68743 - DNA, 80 bp, synthetic construct
  source 1..80: mol_type = other DNA
aattgtacaactacaaagtaatacaggtaaaaccttttagtgtagcacctacaaaaatttcaagaccaataataggcctt

SEQ ID NO: 68744 - DNA, 80 bp, synthetic construct
  source 1..80: mol_type = other DNA
ctggaaaatttcgcatgcgatcctggtctattagaatctgcagaaggcaatgagcaactgttacagcagttagaaccagc

SEQ ID NO: 68745 - DNA, 80 bp, synthetic construct
  source 1..80: mol_type = other DNA
aggacctaaaatctctttggaacgcaatagcagtactctggtgcgttcacaacagatttgaggttcaaaatacacagcag

SEQ ID NO: 68746 - DNA, 80 bp, synthetic construct
  source 1..80: mol_type = other DNA
gcaatacaaaagctaaaagaagtaatggagaacaggaagtctgcagatgccgctaggggggaaacaagttcaaagcagac

SEQ ID NO: 68747 - DNA, 80 bp, synthetic construct
  source 1..80: mol_type = other DNA
gtctgcagatgccgctaggggggaaacaagttcaaagcagacaagtcaaaattaccctgtagtagcaaatgcgcagggac

SEQ ID NO: 68748 - DNA, 80 bp, synthetic construct
  source 1..80: mol_type = other DNA
aggggctttacaagtgttgaaggaagtaatcaatgaggaagcagcagaatgggatagaactcatccaccagcaatggggc

SEQ ID NO: 68749 - DNA, 80 bp, synthetic construct
  source 1..80: mol_type = other DNA
tggattactagaccaaataaccctgtccctgtaggagacatctatagaaaatggatagtgctaggattaaataaaatggt

SEQ ID NO: 68750 - DNA, 80 bp, synthetic construct
  source 1..80: mol_type = other DNA
ttcgagtgaggatgctagccttttacatccagcttgtaattatggttatgaggatgaacacaaggaaatactaaaatggc

SEQ ID NO: 68751 - DNA, 80 bp, synthetic construct
  source 1..80: mol_type = other DNA
tgcccagcaagaattaaaaggaggatacacagcagtattcatgcaaagagggcaaaatccaaatagaaaagggcctataa

SEQ ID NO: 68752 - DNA, 80 bp, synthetic construct
  source 1..80: mol_type = other DNA
ggcaattatgtgcagaaacaagtgtccccatcagctccaccaatggaggaggaagtgaaggagctagagaagcagagtca

SEQ ID NO: 68753 - DNA, 80 bp, synthetic construct
  source 1..80: mol_type = other DNA
cagctccaccaatggaggaggaagtgaaggagctagagaagcagagtcaggggggggagaaggaagaactgtacccgttt

SEQ ID NO: 68754 - DNA, 80 bp, synthetic construct
  source 1..80: mol_type = other DNA
agtttgatagatcattaggcctcacacatgtagctctgcaaaagcacccagagctcttccccaaataactaagactgcta

SEQ ID NO: 68755 - DNA, 80 bp, synthetic construct
  source 1..80: mol_type = other DNA
acatgaagattgctgacactgcgggactttccaaactgctgacactgtggggactttccagcgtgggagggataaggggc

SEQ ID NO: 68756 - DNA, 80 bp, synthetic construct
  source 1..80: mol_type = other DNA
caaaaggctgaactaatggctgtactaatagccttgcaggattccaaagaggcagtaaacatagtaacagattcacaata

SEQ ID NO: 68757 - DNA, 80 bp, synthetic construct
  source 1..80: mol_type = other DNA
tctaagaaggccaacaaatggcagtataggcatcattatgagtgcagaaatccaaaagtcagttcagttgtatatattcc

SEQ ID NO: 68758 - DNA, 80 bp, synthetic construct
  source 1..80: mol_type = other DNA
agtagcagaagctgatataatggttaccacatattggggattaatgccaggggaaagagaggaacatttgggacatggag

SEQ ID NO: 68759 - DNA, 80 bp, synthetic construct
  source 1..80: mol_type = other DNA
ttagtatagaatggcaatacaagaagtatagaacacagattgatcctgaaacagcagacaggatgatacatctgcattat

SEQ ID NO: 68760 - DNA, 80 bp, synthetic construct
  source 1..80: mol_type = other DNA
ttcaactgttttacagagtcagcaatcaggagggccattctagggcagagagtgctgaccaggtgtgaatactctgcagg

SEQ ID NO: 68761 - DNA, 80 bp, synthetic construct
  source 1..80: mol_type = other DNA
acatagtcaggtagggacactgcaattcttagccttgaaagcactggtgaaggttaaaagaaacaaacctcccctaccca

SEQ ID NO: 68762 - DNA, 80 bp, synthetic construct
  source 1..80: mol_type = other DNA
gtgtccagaagttaacagaaaatcgatggaacaagccccagaagatcaagggccagctagggagccattcaatgaatggg

SEQ ID NO: 68763 - DNA, 80 bp, synthetic construct
  source 1..80: mol_type = other DNA
ggagttatggcaatcataagaatcttacaacaactaatgtttacccattatagaattggatgtcaacatagtaggatagg

SEQ ID NO: 68764 - DNA, 80 bp, synthetic construct
  source 1..80: mol_type = other DNA
aattatcccatctaacacaagaggaagaggaagaagaaatggatccagtagatcctgaaatacctccttggcatcaccct

SEQ ID NO: 68765 - DNA, 80 bp, synthetic construct
  source 1..80: mol_type = other DNA
gggagcaaaccccaaaccccttgtaataattgctattgcaaacgctgctgttatcactgctttgtctgtttcacaaagaa

SEQ ID NO: 68766 - DNA, 80 bp, synthetic construct
  source 1..80: mol_type = other DNA
gggtttgggaatctcccatggcaggaagaagcgacgaagaccagcagctgctgcaagctatccagataataaagatcctg

SEQ ID NO: 68767 - DNA, 80 bp, synthetic construct
  source 1..80: mol_type = other DNA
acaccagtactattctgtgcttcagatgctaatttgacaagcactgaaaagcataatgtttgggcatcacaagcctgtgt

SEQ ID NO: 68768 - DNA, 80 bp, synthetic construct
  source 1..80: mol_type = other DNA
aatagtacgagaagaacagaaaacacatcaatcgcagcaggcctagaagaaatacccatgaaaaattgtagttttaatat

SEQ ID NO: 68769 - DNA, 80 bp, synthetic construct
  source 1..80: mol_type = other DNA
aactacagtcctcaaagataaaaaggagaaaaggcaggctctattctatgtatcagatttggttaagattgacaacagct

SEQ ID NO: 68770 - DNA, 80 bp, synthetic construct
  source 1..80: mol_type = other DNA
acagtaagtactcaattaataatgaatgggacactctctagagggaagataagaattatgggaagaaatattacagacaa

SEQ ID NO: 68771 - DNA, 80 bp, synthetic construct
  source 1..80: mol_type = other DNA
tacaaagaatattatagtaaccttaaacacttctataaacatgacatgtatgagaaaaggaagaggtaaaatacaaagga

SEQ ID NO: 68772 - DNA, 80 bp, synthetic construct
  source 1..80: mol_type = other DNA
tagcgacaggtccactgcgatgggtcagtatggcagctaaaacagagtcacagaacacagggtcaaggatagcttattgt

SEQ ID NO: 68773 - DNA, 80 bp, synthetic construct
  source 1..80: mol_type = other DNA
atgtataataacactgaatggataaataccttaaaacaaacagctgaaagatatttagaactcgtaaacaagacaggaaa

SEQ ID NO: 68774 - DNA, 80 bp, synthetic construct
  source 1..80: mol_type = other DNA
tttaagcaagacaggaaattttagcataatattcaaccacagtataagtggtggagatgtagaagcaagttctctacatt

SEQ ID NO: 68775 - DNA, 80 bp, synthetic construct
  source 1..80: mol_type = other DNA
ttaactgtcatggagaattcttttattgtgacacatctcggctgtttaactatacttttaagtgtaatggttcccaatgt

SEQ ID NO: 68776 - DNA, 80 bp, synthetic construct
  source 1..80: mol_type = other DNA
aatgagaccaataaaaatcagataaatggaactcagggaaatactataataccttgcaagataagacaggtagtaagatc

SEQ ID NO: 68777 - DNA, 80 bp, synthetic construct
  source 1..80: mol_type = other DNA
atggataaagggagagttaggactctatgcacctcccatcccaggtgatctaacatgtcaatccaacataactgggatga

SEQ ID NO: 68778 - DNA, 80 bp, synthetic construct
  source 1..80: mol_type = other DNA
ttttacaactagatacaccctacaactcctcatgtgacaatgtcacatttagaccaacagggggagatatgagagatata

SEQ ID NO: 68779 - DNA, 80 bp, synthetic construct
  source 1..80: mol_type = other DNA
tggagaactgaattgtacaactacaaagtagtacaggtaaaaccttttagtgtagcacctacaaaaatttcaagaccact

SEQ ID NO: 68780 - DNA, 80 bp, synthetic construct
  source 1..80: mol_type = other DNA
gccttagaaacccttatacagaatcagcaacgcctaagcctatggggatgtaagggaaggataatatgttacacatcagc

SEQ ID NO: 68781 - DNA, 80 bp, synthetic construct
  source 1..80: mol_type = other DNA
aaaatggaacaacacatgggcaaactggactgacagtgcttgggacaacttaacatggcagcaatgggaccaacaaatag

SEQ ID NO: 68782 - DNA, 80 bp, synthetic construct
  source 1..80: mol_type = other DNA
atgaatatagcgccactatatacactaaaatacaagaagcacaagaccaacaggaacagaatgaaaaggcattgttggag

SEQ ID NO: 68783 - DNA, 80 bp, synthetic construct
  source 1..80: mol_type = other DNA
aacccctctcgttgcagatccccatcccacaccaggaggaagcagaaacgccaggaagaacaggagaagaaggtggaggc

SEQ ID NO: 68784 - DNA, 80 bp, synthetic construct
  source 1..80: mol_type = other DNA
gtagacaggcgcaagtggacacccttgcaaccaggattcttacaactgttgtacacggatctcaggacaataatcttgtg

SEQ ID NO: 68785 - DNA, 80 bp, synthetic construct
  source 1..80: mol_type = other DNA
gacttaccacctcttgagcaacttagcatcagggatccagaggctgatcagctacctgggacttggactgtggatcctgg

SEQ ID NO: 68786 - DNA, 80 bp, synthetic construct
  source 1..80: mol_type = other DNA
gacaaaagacaattgaagcttgcagactttgtggggctgtaacacaatactggttacaagaattgcgggctagcgctaca

SEQ ID NO: 68787 - DNA, 80 bp, synthetic construct
  source 1..80: mol_type = other DNA
aatctgcttgatactattgcagtggcagttggcaattggactgacagcatcatcttaggtatacaaagaatagggcgagg

SEQ ID NO: 68788 - DNA, 80 bp, synthetic construct
  source 1..80: mol_type = other DNA
attcctcaacatcccaagaagaattagacaaggtgcagaaagagctctaaattaacatggggaatgcatggagcaaaaga

SEQ ID NO: 68789 - DNA, 80 bp, synthetic construct
  source 1..80: mol_type = other DNA
aaatttgcaggatggtcagaagtaagaaggagaattagacaatcctcccctgatcctcaaccatgtgcacctggagtagg

SEQ ID NO: 68790 - DNA, 80 bp, synthetic construct
  source 1..80: mol_type = other DNA
agcagtctccagagagctagcagctagagggggaataccagattcctacactcctcaaaacaatgcagctcttgcatttc

SEQ ID NO: 68791 - DNA, 80 bp, synthetic construct
  source 1..80: mol_type = other DNA
cttttacatccagcttgtaattatggttatgaggatgaacacaaggaaatactaaaatggcagtttgatagatcattagg

SEQ ID NO: 68792 - DNA, 80 bp, synthetic construct
  source 1..80: mol_type = other DNA
cctcacacatgtagctctgcaaaagcacccagagctcttccccaaataactaagactgctaacatgaagattgctgacac

SEQ ID NO: 68793 - DNA, 80 bp, synthetic construct
  source 1..80: mol_type = other DNA
tgcgggactttccaaactgctgacactgtggggactttccagcgtgggagggataaggggcggttcggggagtggctaac

SEQ ID NO: 68794 - DNA, 80 bp, synthetic construct
  source 1..80: mol_type = other DNA
atactatgctaaatgccataggaggacatcaaggggctttacaagtgctaaaggaagtaatcaatgaggaggcatcggag

SEQ ID NO: 68795 - DNA, 80 bp, synthetic construct
  source 1..80: mol_type = other DNA
gacaactagcacccagcaagagcaagttcactgggttactaggaaccccaaccctatcccagtaggagacatctatagaa

SEQ ID NO: 68796 - DNA, 80 bp, synthetic construct
  source 1..80: mol_type = other DNA
caacacccatgttgctaagataacccacccagagttcttccccaaggactaaaactgctgacatgaaggttgctgacact

SEQ ID NO: 68797 - DNA, 80 bp, synthetic construct
  source 1..80: mol_type = other DNA
gtgggactttccaacaaagactgctgacattgcggggactttccagcatgggagggacaaggggcggttcggggagtggc

SEQ ID NO: 68798 - DNA, 80 bp, synthetic construct
  source 1..80: mol_type = other DNA
acatagtcaggtagggacactacaactactagctctaagagctgtagtgagagaaaaaagacataagcctcccctaccca

SEQ ID NO: 68799 - DNA, 80 bp, synthetic construct
  source 1..80: mol_type = other DNA
aagaagcgacgacgtccagccgctgctgcaagccgtccggataataaagatcttgtaccagagcagtaagtagcgctaat

SEQ ID NO: 68800 - DNA, 80 bp, synthetic construct
  source 1..80: mol_type = other DNA
gtatgggaagaggcagaaccagtattattctgtgcctcagatgctaacctaacaagcactgagcagcataatgtttgggc

SEQ ID NO: 68801 - DNA, 80 bp, synthetic construct
  source 1..80: mol_type = other DNA
atcacaagcctgtgtccccacagaccccactccacatgagtatccattacgcaatgtgacagataaatttaatatatgga

SEQ ID NO: 68802 - DNA, 80 bp, synthetic construct
  source 1..80: mol_type = other DNA
agcaatgctacaaacaacagctcaggggacagcttcgagaaccctgtgaaagaatgtgagtttaatgtaaccacggttct

SEQ ID NO: 68803 - DNA, 80 bp, synthetic construct
  source 1..80: mol_type = other DNA
caaagataaaaaggagagaagacaggctttattctatgtatcagacttggctagagtggatgatagcgaaacaagtggca

SEQ ID NO: 68804 - DNA, 80 bp, synthetic construct
  source 1..80: mol_type = other DNA
gtaacacaacaagtggcagtaacacaacaagtagcagtaacacaaaatatacattaattaattgtaactccacaaccatt

SEQ ID NO: 68805 - DNA, 80 bp, synthetic construct
  source 1..80: mol_type = other DNA
acttgtacacatggtatcaagccaacagtaagtactcagctaatattaaatggaacaatctcggaaggaaagataagaat

SEQ ID NO: 68806 - DNA, 80 bp, synthetic construct
  source 1..80: mol_type = other DNA
aatagcaaaaaatatttcagctactggcaacaatatcatagtgaccttaaatactactataaacatgacctgccagagac

SEQ ID NO: 68807 - DNA, 80 bp, synthetic construct
  source 1..80: mol_type = other DNA
caggacatcaagatgtacaagagataatgacaggtccactggcctggtatagcatggaactaaagaaagacacaaacaca

SEQ ID NO: 68808 - DNA, 80 bp, synthetic construct
  source 1..80: mol_type = other DNA
tccaagtcaagaatagcttattgtgagtataatcccaaggattgggaaaaggccttaagacagacagctgaaaggtattt

SEQ ID NO: 68809 - DNA, 80 bp, synthetic construct
  source 1..80: mol_type = other DNA
agaattagtaaacaatacaggtaatataaacatgatattcaattacagtagtactggaggagatccagaaataacccagc

SEQ ID NO: 68810 - DNA, 80 bp, synthetic construct
  source 1..80: mol_type = other DNA
tgcattttaattgtcatggagagttcttttactgcaacacatctcagatgtttaatcataactttagctgtaccggaacc

SEQ ID NO: 68811 - DNA, 80 bp, synthetic construct
  source 1..80: mol_type = other DNA
acctgtagttataccggaatcctctataatcatacctttagccaaaataccactagcactaagataccttgcagattgag

SEQ ID NO: 68812 - DNA, 80 bp, synthetic construct
  source 1..80: mol_type = other DNA
gcaggtagtaaggtcatggatgagaggaggatcgggactctatgcacctcccatccgaggtaacttaacatgtggatcaa

SEQ ID NO: 68813 - DNA, 80 bp, synthetic construct
  source 1..80: mol_type = other DNA
aaataactggaatgattctagaaatggatgagccatggaaagggaaccagaacagcacagacgggaaccagaacagcaca

SEQ ID NO: 68814 - DNA, 80 bp, synthetic construct
  source 1..80: mol_type = other DNA
gacaggaaaagcatatttagaccaacagggggaaatatgaaagatatatggagaactgaactgctcagatacaaagtagt

SEQ ID NO: 68815 - DNA, 80 bp, synthetic construct
  source 1..80: mol_type = other DNA
aaggataaaaccttttagtgtggcacctacaaaaattacaaggccagtcataggctttggcacccgcagagaaaaaagag

SEQ ID NO: 68816 - DNA, 80 bp, synthetic construct
  source 1..80: mol_type = other DNA
ttacacatcagtaatatggaacacatcagaatggaaaggaaatgagtctatttggggcaacctcacatggcagcaatggg

SEQ ID NO: 68817 - DNA, 80 bp, synthetic construct
  source 1..80: mol_type = other DNA
atcaggagatagacaatgtaagtgccaccatatttgaggaaatactaaaagcacaagtacagcaggaagcaaatgagaaa

SEQ ID NO: 68818 - DNA, 80 bp, synthetic construct
  source 1..80: mol_type = other DNA
gttaccacctcttgagcaacttagcatcagggatccagaagctgatcagccatctgagaattggactgtggactctgggg

SEQ ID NO: 68819 - DNA, 80 bp, synthetic construct
  source 1..80: mol_type = other DNA
tctagtagatactattgcagtagcagtagctaattggactgacagtataatcttaggggtacaaagaataggaagaggaa

SEQ ID NO: 68820 - DNA, 80 bp, synthetic construct
  source 1..80: mol_type = other DNA
tctggaacgtccccaggagaattagacagggatttgaaagaagtttgttataacatgggaaacgcattgaggaaaagcaa

SEQ ID NO: 68821 - DNA, 80 bp, synthetic construct
  source 1..80: mol_type = other DNA
atttgcgggatggccagcagtaagagaaagaatgagaagggcttcccctaaacctgaagattgtgcacctggagtaggag

SEQ ID NO: 68822 - DNA, 80 bp, synthetic construct
  source 1..80: mol_type = other DNA
cagtgggcttgggaatgctattcttgggggttctaagtgcagcaggtagcactatgggcgcagcggcaacagcgctgacg

SEQ ID NO: 68823 - DNA, 80 bp, synthetic construct
  source 1..80: mol_type = other DNA
gtacagacccacactttgataaagggtatagtgcaacagcaggacaacctgctaagagcaatacaggcccagcagcactt

SEQ ID NO: 68824 - DNA, 80 bp, synthetic construct
  source 1..80: mol_type = other DNA
gctgaggctatctgtatggggtatcagacaactccgagctcgcctgctagccttagaaaccttaatacagaatcagcaac

SEQ ID NO: 68825 - DNA, 80 bp, synthetic construct
  source 1..80: mol_type = other DNA
tcctaaactcatggggctgtaaaggaaggctagtctgttacacatcagtaatatggaacacatcagaatggaaaggaaat

SEQ ID NO: 68826 - DNA, 80 bp, synthetic construct
  source 1..80: mol_type = other DNA
gagtctatttggggcaacctcacatggcagcaatgggatcaggagatagacaatgtaagtgccaccatatttgaggaaat

SEQ ID NO: 68827 - DNA, 80 bp, synthetic construct
  source 1..80: mol_type = other DNA
actaaaagcacaagtacagcaggaagcaaatgagaaaaagttgctggagttagatgaatgggcttccatttggaattggc

SEQ ID NO: 68828 - DNA, 80 bp, synthetic construct
  source 1..80: mol_type = other DNA
tatccaattacactgtcgctcaagaagataatttagagagattattgttaatcgcatctgtgaagagaatggtaatgtag

SEQ ID NO: 68829 - DNA, 80 bp, synthetic construct
  source 1..80: mol_type = other DNA
caggagaccagcgtgtaggcctcgtcccacgcaatggcgtccactattcgcatgcgtacaagcgggagagggtcgtccta

SEQ ID NO: 68830 - DNA, 80 bp, synthetic construct
  source 1..80: mol_type = other DNA
tggtacgaatatggtatgagcaatcctatccaaggtcccctcacgttactagaactcgctgacacttgccccctcacctt

SEQ ID NO: 68831 - DNA, 80 bp, synthetic construct
  source 1..80: mol_type = other DNA
atgaagaccattatcgctttaagctatgttttctgtttggtcttcagtcaggacctcccagggagcgacaatagcacagc

SEQ ID NO: 68832 - DNA, 80 bp, synthetic construct
  source 1..80: mol_type = other DNA
actggaacaagcgcagcgtgttcaaactcattctacagaagcatgaggtggctgacacaaaagggaaactcttatccttt

SEQ ID NO: 68833 - DNA, 80 bp, synthetic construct
  source 1..80: mol_type = other DNA
agcaaaagcaggggatgattctattaacaatgaagactgtcattgctttaagttacctcctctatcaggttcttggccaa

SEQ ID NO: 68834 - DNA, 80 bp, synthetic construct
  source 1..80: mol_type = other DNA
tcggcgccatagcgggcttcattgaaaatggttgggaagggatggtagacggctggtatggtttcagacatcaaaaccat

SEQ ID NO: 68835 - DNA, 80 bp, synthetic construct
  source 1..80: mol_type = other DNA
caagcagcagatctcaaaagcactcaagcagccattgatcaaatcaatgggaaactggataggataatcgaaaagacgaa

SEQ ID NO: 68836 - DNA, 80 bp, synthetic construct
  source 1..80: mol_type = other DNA
aataacaagtgatcaaatagaggtgacaaatgccaccgaactggtccagagcttctcaatgggaaaaatatgtgacagtc

SEQ ID NO: 68837 - DNA, 80 bp, synthetic construct
  source 1..80: mol_type = other DNA
ctcatcgagttcttgacggagcaaattgtacactaatagatgctttattgggggacccccattgtgaaaggtttgaaaat

SEQ ID NO: 68838 - DNA, 80 bp, synthetic construct
  source 1..80: mol_type = other DNA
gagagatgggaccttttcattgagcgcagcaaggctttcagcaattgttatccttatgatgtgccagattatgtctccct

SEQ ID NO: 68839 - DNA, 80 bp, synthetic construct
  source 1..80: mol_type = other DNA
actggaatggggtcactcaaaatgggggaagcaatgcttgcaagagaggccctgacagcggttttttcagtagactgaac

SEQ ID NO: 68840 - DNA, 80 bp, synthetic construct
  source 1..80: mol_type = other DNA
tggttgtacaaatcaggaaccacatacccgatgctgaatgtgactatgccaaacagtgataattttaacaaattatacat

SEQ ID NO: 68841 - DNA, 80 bp, synthetic construct
  source 1..80: mol_type = other DNA
ttggggagttcatcacccgagcacagacagagaacaaaccaacttatatgttcaagcatcagggaaaataacagtttcca

SEQ ID NO: 68842 - DNA, 80 bp, synthetic construct
  source 1..80: mol_type = other DNA
aatatcgggcctagaccctggatacggggtctgtctagtagaattagcatctactggacgatagttaaaccaggggacac

SEQ ID NO: 68843 - DNA, 80 bp, synthetic construct
  source 1..80: mol_type = other DNA
gaccttccaagaaagggcaacaacactgcgacactgtgcctaggacatcatgcagtgccaaatggaacactagtgagaac

SEQ ID NO: 68844 - DNA, 80 bp, synthetic construct
  source 1..80: mol_type = other DNA
actgataattaatagtaatggtaacctgattgctccccggggttacttcaaaatacacactggaagaagctcaataatga

SEQ ID NO: 68845 - DNA, 80 bp, synthetic construct
  source 1..80: mol_type = other DNA
ggagcatgccctaagtatgtcagacaaaccactctgaagttggcaacagggatgcggaatataccagagaaacaaactag

SEQ ID NO: 68846 - DNA, 80 bp, synthetic construct
  source 1..80: mol_type = other DNA
gctagaatcctttttcaaaattgggggattgaatccatagacaatgttatgggaatgattggcatactgcctgatttagc

SEQ ID NO: 68847 - DNA, 80 bp, synthetic construct
  source 1..80: mol_type = other DNA
gcaggcgctttacttgaagaccccgatgaagggacagctggagtggaatctgctgtcttgagaggatttctcattttagg

SEQ ID NO: 68848 - DNA, 80 bp, synthetic construct
  source 1..80: mol_type = other DNA
tgatgaaacgaaaacgggactcaagcataattactgcaagcccagcaaagggcaccagaattcgaatggccatcaattag

SEQ ID NO: 68849 - DNA, 80 bp, synthetic construct
  source 1..80: mol_type = other DNA
aaagtttatagaacttactttgaaaaagtcgaaagattgaaatatggaacttttggtcctgtccgtttcagaaaccaagt

SEQ ID NO: 68850 - DNA, 80 bp, synthetic construct
  source 1..80: mol_type = other DNA
tgggagctagaatattgacatcggaaacacagctaacggtcactaaagaaaagaaagaggagctacaagagtgcaagatc

SEQ ID NO: 68851 - DNA, 80 bp, synthetic construct
  source 1..80: mol_type = other DNA
attaatgatccctgggttttgcttaatgcgtcttggttcaactccttcctcatacatgcactaggatagttgtggcattg

SEQ ID NO: 68852 - DNA, 80 bp, synthetic construct
  source 1..80: mol_type = other DNA
tagaaggaggatggacaggaatggtagacggatggtatggttatcaccatcagaacgagcaaggatcaggttatgcagca

SEQ ID NO: 68853 - DNA, 80 bp, synthetic construct
  source 1..80: mol_type = other DNA
aacaaggatttaccagattttggcgatatattcaactgtcgccagctccttggtagtgttgatatccctgggggcactca

SEQ ID NO: 68854 - DNA, 80 bp, synthetic construct
  source 1..80: mol_type = other DNA
actcagtttctggatgtgttctaatgggtctttacaatgcagaatatgtatttgaagctaggatttcagagacattggaa

SEQ ID NO: 68855 - DNA, 80 bp, synthetic construct
  source 1..80: mol_type = other DNA
tgtgtaaactgggagggatagccccattgcacctgggtaaatgtaacattgccggatggatcctagggaacccagaatgt

SEQ ID NO: 68856 - DNA, 80 bp, synthetic construct
  source 1..80: mol_type = other DNA
tgcacctgggtaaatgtaacattgccggatggatcctagggaacccagaatgtgaaccattatccacagtgaactcatgg

SEQ ID NO: 68857 - DNA, 80 bp, synthetic construct
  source 1..80: mol_type = other DNA
gaaccattatccacagtgaactcatggtcttacattgtggaaacatcgaagtcaaacaatgggacgtgctacccaggaga

SEQ ID NO: 68858 - DNA, 80 bp, synthetic construct
  source 1..80: mol_type = other DNA
agtcatgaaacaaacagaggtgtgacggcagcatgccctcacgatgggacaaacagcttctatagaaacttgatatggct

SEQ ID NO: 68859 - DNA, 80 bp, synthetic construct
  source 1..80: mol_type = other DNA
gtgatatggggaattcaccatccaccaaccattaacgatcaacaaagtctctaccaaaatgtagatacctatgtttttgt

SEQ ID NO: 68860 - DNA, 80 bp, synthetic construct
  source 1..80: mol_type = other DNA
agggtcatcaacatatgacaagaagtttaaaccagaaatcgcaacaagacccagagtgagaggtcaaacagggaggatgg

SEQ ID NO: 68861 - DNA, 80 bp, synthetic construct
  source 1..80: mol_type = other DNA
attattactggacattagtaaaccctggagacacaataacattcgaagcaacaggaaatctagttgcaccaagatatgct

SEQ ID NO: 68862 - DNA, 80 bp, synthetic construct
  source 1..80: mol_type = other DNA
ttagaactcaaatacctgcggagatgctatcagacatcaacctgagatattttaatgattccactaggaaaaaaattgaa

SEQ ID NO: 68863 - DNA, 80 bp, synthetic construct
  source 1..80: mol_type = other DNA
atgaaagaagtactattagccttatcatgtacatttgccgtcataaatgcagacactttatgcataggttatcatgcaaa

SEQ ID NO: 68864 - DNA, 80 bp, synthetic construct
  source 1..80: mol_type = other DNA
atgaatacaaaccaaagaatgacaaccattgggacaatctgcctaacaattggaataattagcctattattacagatagg

SEQ ID NO: 68865 - DNA, 80 bp, synthetic construct
  source 1..80: mol_type = other DNA
cattttgtggcgtgagtagtgacacagcaagctggtcatggccagatggtgccaacctgccattcaccattgacaagtag

SEQ ID NO: 68866 - DNA, 80 bp, synthetic construct
  source 1..80: mol_type = other DNA
aaatatagtctctctatggataagccattcaattcagactggagggagaaaccatcctgaagcatgcaaccaaagtatca

SEQ ID NO: 68867 - DNA, 80 bp, synthetic construct
  source 1..80: mol_type = other DNA
gtgtattcggtgataacccccgtcctaatgatgggattggcaattgtggaccagtactttcgaatggggcaaatggagtg

SEQ ID NO: 68868 - DNA, 80 bp, synthetic construct
  source 1..80: mol_type = other DNA
cctggtaacgactataacattgcatttcagacaagacgagagtgactccccctcaagcaaccaagcaataccgtgtaaac

SEQ ID NO: 68869 - DNA, 80 bp, synthetic construct
  source 1..80: mol_type = other DNA
ccaattataatagaaaagaacataacagaaatagtgtatttgaataataccaccatagagaaagagacatgccccaaaac

SEQ ID NO: 68870 - DNA, 80 bp, synthetic construct
  source 1..80: mol_type = other DNA
ttctagtaacgactataacattgcattataagcaacatgaaagtgactccccctcaagcaccccagtggtaccatgtaaa

SEQ ID NO: 68871 - DNA, 80 bp, synthetic construct
  source 1..80: mol_type = other DNA
agaaaagaacataacagaaattgtgtatctgaataacaccattttagagaaagagacatgttccaagtcagtggaataca

SEQ ID NO: 68872 - DNA, 80 bp, synthetic construct
  source 1..80: mol_type = other DNA
atggttggatccctttgtgtgcgaatggaccaggcgataatggagaaggacatcatactgaaagcgaatttcagtgtggc

SEQ ID NO: 68873 - DNA, 80 bp, synthetic construct
  source 1..80: mol_type = other DNA
actattaaaggcttttactgaagagggagcaatcgttggagaaatttcacctttactttctcttccaggacatactaatg

SEQ ID NO: 68874 - DNA, 80 bp, synthetic construct
  source 1..80: mol_type = other DNA
aaataacattcatgcaagccttacaactattgcttgaagtagaacaagagataaggactttctcgtttcagcttatttag

SEQ ID NO: 68875 - DNA, 80 bp, synthetic construct
  source 1..80: mol_type = other DNA
cctcgaaatacatgttgtctctgccgggcttgactgtaagaccgttttcccacccggggttgcaaccccgtctacccctg

SEQ ID NO: 68876 - DNA, 80 bp, synthetic construct
  source 1..80: mol_type = other DNA
ttacacccgtacctggtctgcatcgggcttttccagctgcttttctccccttgaactgggggccccggacccgccccctc

SEQ ID NO: 68877 - DNA, 80 bp, synthetic construct
  source 1..80: mol_type = other DNA
ttgctgaaactgacgcacctacagttgttgacactttgcctccggctgtttcagtgccctctgagcagatagtgcttcca

SEQ ID NO: 68878 - DNA, 80 bp, synthetic construct
  source 1..80: mol_type = other DNA
ccagaccctgtggataaggcggccggcctgaccccatctggcgcccctgtcgtgccaccagcaccagtgcattccgtggc

SEQ ID NO: 68879 - DNA, 80 bp, synthetic construct
  source 1..80: mol_type = other DNA
ccagccgtctggacctcgtcgccggctgcttcatacctaccctgatggctcgaaggtgtatgctggctccctgtttgagt

SEQ ID NO: 68880 - DNA, 80 bp, synthetic construct
  source 1..80: mol_type = other DNA
ggacggctggagtggaatctgcggtactaagagggttcctaattttaggaaaggaaaacaaaagatatggaccagcactg

SEQ ID NO: 68881 - DNA, 80 bp, synthetic construct
  source 1..80: mol_type = other DNA
tattacccaaatactattcattgaagaggggaaaatcgttcatattagtccattgtcaggaagtgctcaacatgtcgaag

SEQ ID NO: 68882 - DNA, 80 bp, synthetic construct
  source 1..80: mol_type = other DNA
atctttctgcatcttataaaaataccaacacacagacacataaagggtggctcatgcccaaaaccgcaccggttaaccaa

SEQ ID NO: 68883 - DNA, 80 bp, synthetic construct
  source 1..80: mol_type = other DNA
taaggggatctgcagttgtggtgcgttcaaagtgcctggtgtgaaaaccatctggaaaagacgctgaacaacagcgcctc

SEQ ID NO: 68884 - DNA, 80 bp, synthetic construct
  source 1..80: mol_type = other DNA
ggcctgctgccccaggtgctggtctgggtgaattggtcatggccctctcatttgtcagatctattgttgtgttctcccat

SEQ ID NO: 68885 - DNA, 80 bp, synthetic construct
  source 1..80: mol_type = other DNA
attagaattgaccttcacaaatgattctatcatcacacacaatttctgtaatctgacttccgcttttaacaagaaaacct

SEQ ID NO: 68886 - DNA, 80 bp, synthetic construct
  source 1..80: mol_type = other DNA
ttttaacagtggcataactattcaatataacctaacattctctgatgcacagagtgctctaagccaatgtaagaccttta

SEQ ID NO: 68887 - DNA, 80 bp, synthetic construct
  source 1..80: mol_type = other DNA
gaggaagagtcctggacatgttcagaactgcctttggagggaagtatatgaggagtggctggggctggacaggtgcagac

SEQ ID NO: 68888 - DNA, 80 bp, synthetic construct
  source 1..80: mol_type = other DNA
cgcaccggggatcctaggcgtttagttgcgctgctttattgcacagcttcactctgctaaaccatcaggaactgaccgat

SEQ ID NO: 68889 - DNA, 80 bp, synthetic construct
  source 1..80: mol_type = other DNA
gtcaaagggtcttccatgtaatcttcaaactcttcagacctaatgtcaaagactccatcattcgctttaaagatggagtc

SEQ ID NO: 68890 - DNA, 80 bp, synthetic construct
  source 1..80: mol_type = other DNA
aagtgtcaacagtcccaagctccccacctccctatgaggagtgacgccccagacctcgacacaacaggccacccaacgca

SEQ ID NO: 68891 - DNA, 80 bp, synthetic construct
  source 1..80: mol_type = other DNA
tcttgaattctccctccccttgcccttcattaagcctagtgcctctattataccgtgttattgtggagttgaccttatct

SEQ ID NO: 68892 - DNA, 80 bp, synthetic construct
  source 1..80: mol_type = other DNA
tctaaactcctaaaaaaacttgtctcctcctccccctcgaaacacacatccaccggatcatcttccaatttgtctacttc

SEQ ID NO: 68893 - DNA, 80 bp, synthetic construct
  source 1..80: mol_type = other DNA
tgttttcctggaaccgatgactaatctagagacaagctttgagaccttatattcgtaatctgagtgtctcagcttatact

SEQ ID NO: 68894 - DNA, 80 bp, synthetic construct
  source 1..80: mol_type = other DNA
ggatgagtcccggctctcacaaagttctcaaattcagcaaatggtatatggcattcttgcacgaggcattctgatagtcc

SEQ ID NO: 68895 - DNA, 80 bp, synthetic construct
  source 1..80: mol_type = other DNA
tcccactgctgataggcatttctggatttttgctatgaactcatttatggataccctaaaaagctcatcaagagatgctt

SEQ ID NO: 68896 - DNA, 80 bp, synthetic construct
  source 1..80: mol_type = other DNA
ttttgtgcactcttgattttcttctgttcttcaaaagtctgatgaattcttctttggtactttgaaggctcacaagccta

SEQ ID NO: 68897 - DNA, 80 bp, synthetic construct
  source 1..80: mol_type = other DNA
catcagccatgggccaaggcaagtccaaagaagaaaaggacaccagcaatacaggcagagcagagcttttgccagacacc

SEQ ID NO: 68898 - DNA, 80 bp, synthetic construct
  source 1..80: mol_type = other DNA
tcctctcaaagtcagtagatttgatctcattcagaatccttctagaacctatcagttcaagttctagtgaatcaccaagt

SEQ ID NO: 68899 - DNA, 80 bp, synthetic construct
  source 1..80: mol_type = other DNA
cgcaccggggatcctaggcatttttgttgcgcattttgttgtgctgtttgttgcacagccctctcacgtgggaccatcac

SEQ ID NO: 68900 - DNA, 80 bp, synthetic construct
  source 1..80: mol_type = other DNA
tgttcatccatagctaaatcctcaagcactttttttatatacaggttatccctattcttatttctcacacacctacttcc

SEQ ID NO: 68901 - DNA, 80 bp, synthetic construct
  source 1..80: mol_type = other DNA
cgacacacagcccaacgcaggaaagagacaaaagggcacacacccatcaacacacacggacacagcacccaacgcaagac

SEQ ID NO: 68902 - DNA, 80 bp, synthetic construct
  source 1..80: mol_type = other DNA
atggtctggaggtggtgtagtccttttacatttttaagccccacctcgttttctccttcactagccttcttgcttctttc

SEQ ID NO: 68903 - DNA, 80 bp, synthetic construct
  source 1..80: mol_type = other DNA
ataccgctttattgtggagttgaccttatcttccaggtttttaaagaaacttgtctcttcttccccttcaaaacatatgt

SEQ ID NO: 68904 - DNA, 80 bp, synthetic construct
  source 1..80: mol_type = other DNA
ctgctgagccaccctctggcttcccagtctctgtttccttggaaccgatgaccagtctggagaccaactttgaaactttg

SEQ ID NO: 68905 - DNA, 80 bp, synthetic construct
  source 1..80: mol_type = other DNA
atctaagcaatcgatacactaatttctcagcaggtgtgatcaaatcctctttcagcttgtccatcaatgatgcggatgaa

SEQ ID NO: 68906 - DNA, 80 bp, synthetic construct
  source 1..80: mol_type = other DNA
ataagtaataatagggttctcaatgccgtctcaatgtcattaatacagttcttcaaatcagggcatgatctgatccatga

SEQ ID NO: 68907 - DNA, 80 bp, synthetic construct
  source 1..80: mol_type = other DNA
tagactctgcacattccttaactgctccgtattggactggaaattataatcttcaaactttgtgtaatacattacaggat

SEQ ID NO: 68908 - DNA, 80 bp, synthetic construct
  source 1..80: mol_type = other DNA
gagtccctgacttcatgaaattctcaaactcaacaaatggtatttggcactcatgctcaagatgttcagatagaccataa

SEQ ID NO: 68909 - DNA, 80 bp, synthetic construct
  source 1..80: mol_type = other DNA
tcccaccactgataaacacctctgaatttttaaaatgaactcacttatggatgttttgaacaaatcctcaagagaaacct

SEQ ID NO: 68910 - DNA, 80 bp, synthetic construct
  source 1..80: mol_type = other DNA
taacaaaccaaaccattagccatgggccaaggcaggtccaaagaggagaagaacgccagcagtacgaacagagccgagat

SEQ ID NO: 68911 - DNA, 80 bp, synthetic construct
  source 1..80: mol_type = other DNA
cgcaccggggatcctaggcattaatttgcgcttcatcgtgggcagtgttgctaccccagaggtcactcttttgagcaggt

SEQ ID NO: 68912 - DNA, 80 bp, synthetic construct
  source 1..80: mol_type = other DNA
gatattgttggaccccatcagctctaattccacaaaatcacctagcacgagtgggtcaaccatataatcctcaaattcgt

SEQ ID NO: 68913 - DNA, 80 bp, synthetic construct
  source 1..80: mol_type = other DNA
cagacctaatgtcaaaaatgttatccttgactttaaagacagggtctgttctcaacaagccaagacattcatccaacagt

SEQ ID NO: 68914 - DNA, 80 bp, synthetic construct
  source 1..80: mol_type = other DNA
cttcgatctacctcacctttgaacatataagtgcatgacagaaactcagcaatcccgaggtgaagtaatttacatttcac

SEQ ID NO: 68915 - DNA, 80 bp, synthetic construct
  source 1..80: mol_type = other DNA
tgtgaacatcaatgaaaacttttttaagtgctctgtgttgttctggttatgtgtgaagtcaatggtcagtgtgaactcca

SEQ ID NO: 68916 - DNA, 80 bp, synthetic construct
  source 1..80: mol_type = other DNA
acagaccccccgtgtttttcaagatgtattcccacatgtcctttaatgtcacaaatgttcttgagcttgtcatgccttgc

SEQ ID NO: 68917 - DNA, 80 bp, synthetic construct
  source 1..80: mol_type = other DNA
tttattaacatggctgcgttgcaaactgtatcccccaagcgataagagaaccatccatacccgaactgtaaatcagtctt

SEQ ID NO: 68918 - DNA, 80 bp, synthetic construct
  source 1..80: mol_type = other DNA
atacataggcctctcgacatctttgttcacagctttcagcacaaatgattgaaagggtcccatgacttctgctccatctt

SEQ ID NO: 68919 - DNA, 80 bp, synthetic construct
  source 1..80: mol_type = other DNA
ctatcttggtcctctgaactgcaaatcatgctggcagaggtttgacagcctggtcagatgtcatgaccactatttatgca

SEQ ID NO: 68920 - DNA, 80 bp, synthetic construct
  source 1..80: mol_type = other DNA
cagagggcatcatgctccggtggggaaaccatgaaaagttccctagtgttctggatgttaccacaaactctcgaacgaac

SEQ ID NO: 68921 - DNA, 80 bp, synthetic construct
  source 1..80: mol_type = other DNA
gattcaaaatatacttgtttcaagaagtttttacacacatcccttgtactgaccacaaattcatcagtcagacttgagtc

SEQ ID NO: 68922 - DNA, 80 bp, synthetic construct
  source 1..80: mol_type = other DNA
tgcacgttggtgtgagttaataaggtctgaggatagaactgtgtaatgttcatctctcttccatttcactatgtgtgaga

SEQ ID NO: 68923 - DNA, 80 bp, synthetic construct
  source 1..80: mol_type = other DNA
tgagtgacaatgattcggagtttatatcgatcaacacgcataaatcaagaaactttattcgaggactccatctcatattc

SEQ ID NO: 68924 - DNA, 80 bp, synthetic construct
  source 1..80: mol_type = other DNA
tttgagctttgatctgacataaaaggtaaaagttgttcttcaaaaatctgaggatacaaccttctaacagactgcaatac

SEQ ID NO: 68925 - DNA, 80 bp, synthetic construct
  source 1..80: mol_type = other DNA
gtgacttaggttgattctgtcttctaagagcctcgaactttcaggcttccttgcaacataatcacaagcgttgatgtgtc

SEQ ID NO: 68926 - DNA, 80 bp, synthetic construct
  source 1..80: mol_type = other DNA
ttggcactgattcaacgactccttttgccttgatgggctctgccaacacccacacacctaattcaaatgaattgcttaag

SEQ ID NO: 68927 - DNA, 80 bp, synthetic construct
  source 1..80: mol_type = other DNA
gaaacacatatgtaatcccagagaaggggcctcaggaggcttatgtgacagagatcaggcttcgggtgtgtgtgtttgtc

SEQ ID NO: 68928 - DNA, 80 bp, synthetic construct
  source 1..80: mol_type = other DNA
gcagatgtacagaactataccattgcccctttggacccttgagacatagttatcctggagcaggtcctctaagactcttt

SEQ ID NO: 68929 - DNA, 80 bp, synthetic construct
  source 1..80: mol_type = other DNA
ttatgtacaggttttctttatttttattcctaacacatctactccctaatgttttacagagacctatgaaccctgaagaa

SEQ ID NO: 68930 - DNA, 80 bp, synthetic construct
  source 1..80: mol_type = other DNA
gacagtgtctaaacctcctactgacagtttcagacaggtgccccctctgcaaacaccccctacccaccaaactgagagtg

SEQ ID NO: 68931 - DNA, 80 bp, synthetic construct
  source 1..80: mol_type = other DNA
atgcaactttgaaaggctgatttgtttatagcttctgaaagtagtttttgagcgcctctagtgaacttggaacacaattt

SEQ ID NO: 68932 - DNA, 80 bp, synthetic construct
  source 1..80: mol_type = other DNA
attctgaagagttttaattaatgagggaactttctcttcttgaaagctcatcactgatgggtaaactactttctgtctca

SEQ ID NO: 68933 - DNA, 80 bp, synthetic construct
  source 1..80: mol_type = other DNA
acaccatcctcatagggaacatctcattcagattcaaccagttaatgttagcgatgtcacctagatcatcttcaacacca

SEQ ID NO: 68934 - DNA, 80 bp, synthetic construct
  source 1..80: mol_type = other DNA
agtatttccgcaagttgaaggatcgcatttttcttgtctctattaaagagatccaaaaagaattcttcattgaactcccc

SEQ ID NO: 68935 - DNA, 80 bp, synthetic construct
  source 1..80: mol_type = other DNA
attttttagtttgtgatgcagtcttcttattaacttcctcatgacttttgtttcttgtgggcacaagtcttcaattaacc

SEQ ID NO: 68936 - DNA, 80 bp, synthetic construct
  source 1..80: mol_type = other DNA
tttgaattctataacctctagaaccgtccagccagtcttttgcatctgtgttctcattcaataagaagggatccattgga

SEQ ID NO: 68937 - DNA, 80 bp, synthetic construct
  source 1..80: mol_type = other DNA
aaatttgcatacttcaagagatctagtgttcttttctgaatgcagttgactaacggaatgggcactccatttgcgacagc

SEQ ID NO: 68938 - DNA, 80 bp, synthetic construct
  source 1..80: mol_type = other DNA
ctgatctgcaatcgtatcaatagtctcacacagctgatgaggttctttacatttcacattatgtagagctgctgacacaa

SEQ ID NO: 68939 - DNA, 80 bp, synthetic construct
  source 1..80: mol_type = other DNA
actttgttagaaggggcacttcttctccccagacatagaaccttgacttgaattcagctgcgaacctgcctatgacactt

SEQ ID NO: 68940 - DNA, 80 bp, synthetic construct
  source 1..80: mol_type = other DNA
tttggactaatgaacttattcagaagcccgcttaagtgggagtgaaattctagtaaaatgaggacattttctgggtcact

SEQ ID NO: 68941 - DNA, 80 bp, synthetic construct
  source 1..80: mol_type = other DNA
acacccgctcccagctcaccacccccctatgaggagtagtcgaccgaagcacccagcaatccccaccagccccagaaacc

SEQ ID NO: 68942 - DNA, 80 bp, synthetic construct
  source 1..80: mol_type = other DNA
atcaactaaatcactcaaccttttgtcgaacaaggtgatttggtcatcgcttgatgtgtaagcgtctggcctttcaccaa

SEQ ID NO: 68943 - DNA, 80 bp, synthetic construct
  source 1..80: mol_type = other DNA
agatgataccaatacaataattaataaatctttcactgactagaccataaaaatcagaggcattatgcaagatcccttgt

SEQ ID NO: 68944 - DNA, 80 bp, synthetic construct
  source 1..80: mol_type = other DNA
cccatgtcaataaggctggagatatgggagggaacaattcccagatcaaagtaactcctaaagatttcctctgttactgt

SEQ ID NO: 68945 - DNA, 80 bp, synthetic construct
  source 1..80: mol_type = other DNA
tgtctgtgttcctcttagaagtttcaatttagccttgatataagacttcatcagtgcattaacgacaggaaatgggacct

SEQ ID NO: 68946 - DNA, 80 bp, synthetic construct
  source 1..80: mol_type = other DNA
ccacaagcttgtgcatatgccaagtcaataaggtgcttacatggtctttaccagatttaacatattgatcatcacctaag

SEQ ID NO: 68947 - DNA, 80 bp, synthetic construct
  source 1..80: mol_type = other DNA
cgaaggttttgtaaaagcattaaaaatagaaaaggacacatcattgggccccatttgctatgatccatactatagtttaa

SEQ ID NO: 68948 - DNA, 80 bp, synthetic construct
  source 1..80: mol_type = other DNA
gaacccttccctgacgttaatggtcattgataagattgcattttcaaattccttctcattattgagacatgaacctgaga

SEQ ID NO: 68949 - DNA, 80 bp, synthetic construct
  source 1..80: mol_type = other DNA
aaaagcttgcaaaagactcaaaatagtcctccacaagcctagtgaacatttttgtccttaagtcaccaatatagagctct

SEQ ID NO: 68950 - DNA, 80 bp, synthetic construct
  source 1..80: mol_type = other DNA
ctattcccccctacttgttccttgtaagataatgcaaacttcagcctcccagaatcagggcccacagaagtgtatgaagt

SEQ ID NO: 68951 - DNA, 80 bp, synthetic construct
  source 1..80: mol_type = other DNA
tggcgactcttctgagtagaaacacaaattcttcaaagcagcactcatacattttgtcaatgacagagccttacttaggg

SEQ ID NO: 68952 - DNA, 80 bp, synthetic construct
  source 1..80: mol_type = other DNA
caaccctcgaacgcaaaagcacgcaaacacacagacagagaagcacccacacacccaaacaccacgggacccgacaggag

SEQ ID NO: 68953 - DNA, 80 bp, synthetic construct
  source 1..80: mol_type = other DNA
attcagagttgctctccctctcactgatccttacatcctcctccagtctgtcccaatcaaatttgaagttcaagccctgt

SEQ ID NO: 68954 - DNA, 80 bp, synthetic construct
  source 1..80: mol_type = other DNA
ctttgaacatgcctatatttgcctgagtatgcattggcgttcatttgtaacaaaagcatttttaagcatgaaaaccagtc

SEQ ID NO: 68955 - DNA, 80 bp, synthetic construct
  source 1..80: mol_type = other DNA
cccttctgaaaaaaactttctacaaaggttcattgccatttcatccagactgcactgttccttaacagtgtgagtgaaat

SEQ ID NO: 68956 - DNA, 80 bp, synthetic construct
  source 1..80: mol_type = other DNA
acagtgaagagatatctgcattcttctcaatagcctcacagataagcttcatatcatcaagtgaaaggcaggctgggtca

SEQ ID NO: 68957 - DNA, 80 bp, synthetic construct
  source 1..80: mol_type = other DNA
aagtcctctactaagtggtatgaaatttctgataagatgatcttcctcaaatgagatgactcccctgtcaacaccatctg

SEQ ID NO: 68958 - DNA, 80 bp, synthetic construct
  source 1..80: mol_type = other DNA
agacagagaagcacccacacacccaaacaccacgggacccgacaggagccacccaaacacaacaaccatccacagcccaa

SEQ ID NO: 68959 - DNA, 80 bp, synthetic construct
  source 1..80: mol_type = other DNA
tagatggtgcagacccttggagcctctgttcttttccagctcccccctttgattaacagtggtccttttcccatactgag

SEQ ID NO: 68960 - DNA, 80 bp, synthetic construct
  source 1..80: mol_type = other DNA
atattgtcaaccttatcttgttttctatctctttaaaaaagactgtctcctcttccccttcaaaataagtaccatccatc

SEQ ID NO: 68961 - DNA, 80 bp, synthetic construct
  source 1..80: mol_type = other DNA
ccattctccttattctcattgtgtttcttttctgtgccaagaaccagcctagacaccaacttagacactttatattcata

SEQ ID NO: 68962 - DNA, 80 bp, synthetic construct
  source 1..80: mol_type = other DNA
atcactgtgactcagtttgtacttagttttcctcatgaacccctcagtgatttggctaacagcactaacaagcagtttat

SEQ ID NO: 68963 - DNA, 80 bp, synthetic construct
  source 1..80: mol_type = other DNA
ccactcaaacacaacaaccatccacagcccaacaccccccacggtggggcccccccgggaggccccccctcccctcggtg

SEQ ID NO: 68964 - DNA, 80 bp, synthetic construct
  source 1..80: mol_type = other DNA
gtcgcacaaccagaatttgtcatggggtccaaattgttaagtttcttctctcctctgcggatcaatgtgccattgttaaa

SEQ ID NO: 68965 - DNA, 80 bp, synthetic construct
  source 1..80: mol_type = other DNA
agatgagaccatgagactaaaaatctctagatttacaccagggaccacatcctggcagtccacatccttactaacaaatt

SEQ ID NO: 68966 - DNA, 80 bp, synthetic construct
  source 1..80: mol_type = other DNA
ttttcatttgtacaagaaaggcttcttcctcctgcggtgagattgcctctttgggattcacaaagaacccaaactgagtt

SEQ ID NO: 68967 - DNA, 80 bp, synthetic construct
  source 1..80: mol_type = other DNA
tttggctcaaaaaacttctcaaagcattttatttggtcagtcagcctatcaggtgtttcctttgttattaaatggcataa

SEQ ID NO: 68968 - DNA, 80 bp, synthetic construct
  source 1..80: mol_type = other DNA
gtatgagacattcaacatgaacttgaattttgcgctgagcatcactttccctcctgtgagaaaaaccttcctcaataaaa

SEQ ID NO: 68969 - DNA, 80 bp, synthetic construct
  source 1..80: mol_type = other DNA
atctcagcaacttgtagactactctttcagcattggttatgaggtcctcttttagtttatccatcagtgtcacggaggaa

SEQ ID NO: 68970 - DNA, 80 bp, synthetic construct
  source 1..80: mol_type = other DNA
aagtctgagaccagagccataaccaagtacctcacattctgagtttgtttttgattcctttttgttggatttgttaacaa

SEQ ID NO: 68971 - DNA, 80 bp, synthetic construct
  source 1..80: mol_type = other DNA
caacaaaagcagtgttcttaaagcaacttcgatgtcattgatttgttcaataaggtcagggcatgatttaatccaggaga

SEQ ID NO: 68972 - DNA, 80 bp, synthetic construct
  source 1..80: mol_type = other DNA
tcatcacactcaccataccatgcaaaacttcatcagaaaatattggtagaaaaaatctttttggatctgcataaaaggaa

SEQ ID NO: 68973 - DNA, 80 bp, synthetic construct
  source 1..80: mol_type = other DNA
attaagtggcctgacggtccctgtagagaataacaccttgaacattctccagttttttgatacaatagatggtattcttc

SEQ ID NO: 68974 - DNA, 80 bp, synthetic construct
  source 1..80: mol_type = other DNA
gaagcccgcgggcagcactcagtccacgtcctccacggactgctctctcagccaatcatcgcaggttctccccttaagtc

SEQ ID NO: 68975 - DNA, 80 bp, synthetic construct
  source 1..80: mol_type = other DNA
atcatcaattttagccacttgaaaaaagacctctttgcactccacaacctgatatctgacagagcccagctgattctgtc

SEQ ID NO: 68976 - DNA, 80 bp, synthetic construct
  source 1..80: mol_type = other DNA
tcaacctagccactgaactagtcttcatactgttggttaaagctaaacaaatggaagaaagtttccttagacttctcaca

SEQ ID NO: 68977 - DNA, 80 bp, synthetic construct
  source 1..80: mol_type = other DNA
cttgtcaggttcctttcatctgtttgaaaggtgtaatcgtcaaactttgtgtagtacatcactgggtgattcccctgctt

SEQ ID NO: 68978 - DNA, 80 bp, synthetic construct
  source 1..80: mol_type = other DNA
tttgaacccttcaaattcactgagtgtgatctgacattcaaatgccagatcctcagataacccatagtgtatgagactga

SEQ ID NO: 68979 - DNA, 80 bp, synthetic construct
  source 1..80: mol_type = other DNA
ggcccactgcagagagacacctttttaccttcagaatgaagtcttgtacagaatttttgaatagttcttctaaggataca

SEQ ID NO: 68980 - DNA, 80 bp, synthetic construct
  source 1..80: mol_type = other DNA
ctcttatttgatttggacctctttctatttcttaacacccttaaaaactcttcttttgtactacaatagcttactaatct

SEQ ID NO: 68981 - DNA, 80 bp, synthetic construct
  source 1..80: mol_type = other DNA
atcattcacgctactatagcagacccctacccagtacttctcatttgaagatgcttcagggctgctttgtttgattaggg

SEQ ID NO: 68982 - DNA, 80 bp, synthetic construct
  source 1..80: mol_type = other DNA
aagagagacaaaggacatctaaattaagtagttgtttccttctggtgttcaagagtttcaaactctttactttattcaac

SEQ ID NO: 68983 - DNA, 80 bp, synthetic construct
  source 1..80: mol_type = other DNA
attgaaagcagcctttcgtaggtgctgttggttgctggacacctcacatgccccttggggtctcctgtgatgaacctcat

SEQ ID NO: 68984 - DNA, 80 bp, synthetic construct
  source 1..80: mol_type = other DNA
cagtgggcaggactcaattgattctttacaaagatcatgtatgccatccatttctgtcatgtcttcataaagttgggaga

SEQ ID NO: 68985 - DNA, 80 bp, synthetic construct
  source 1..80: mol_type = other DNA
tgtacctcccacccgctgtctcaaacatgatggtgttctttgacttacagtagcagagcctacagtccctaaaagtaaac

SEQ ID NO: 68986 - DNA, 80 bp, synthetic construct
  source 1..80: mol_type = other DNA
actcttcaatcagtgtattggagtctatcattctgaaatttctagtcagctttcctctctctaaatctctcttaaatctg

SEQ ID NO: 68987 - DNA, 80 bp, synthetic construct
  source 1..80: mol_type = other DNA
ctaaagaaggaattgatgccaacagcaacctcatcacagctcatgttgggatttatgccgtcatggcacatcttcatgat

SEQ ID NO: 68988 - DNA, 80 bp, synthetic construct
  source 1..80: mol_type = other DNA
atcctcattgtgggttgatcttgcatctcttaataccttcattgaatccataccagatcgcttatccacagtggtcttta

SEQ ID NO: 68989 - DNA, 80 bp, synthetic construct
  source 1..80: mol_type = other DNA
gagactcacagagcctgaagtattctgactcttcaaagatcttctcatcctgattagaatattcaagcaatctaaacaag

SEQ ID NO: 68990 - DNA, 80 bp, synthetic construct
  source 1..80: mol_type = other DNA
aggtctctaaacttgaaattgacccagtctggcatgaagctattgtcataggaacaacgaccatccactatagggactag

SEQ ID NO: 68991 - DNA, 80 bp, synthetic construct
  source 1..80: mol_type = other DNA
ggtgatacctgcgagtgcaagatcctcttttatgcttgccagcttattggtatcctctatgaattttctctcaaaactag

SEQ ID NO: 68992 - DNA, 80 bp, synthetic construct
  source 1..80: mol_type = other DNA
ctggtgtgcttctaacgaaacattcaagaagaatgagagaattgtcaatcaacttgtacccatcagggatgattaagggt

SEQ ID NO: 68993 - DNA, 80 bp, synthetic construct
  source 1..80: mol_type = other DNA
aaaccaggacacaccacccctgattcaataaggatggtttccacagacttatcttcaaagttgtgtgtacagccgctctt

SEQ ID NO: 68994 - DNA, 80 bp, synthetic construct
  source 1..80: mol_type = other DNA
gtctgcactatccatctctatacaccttgagagcagcttgagaccttcaatcaacacgagtctaggttctctctgcccta

SEQ ID NO: 68995 - DNA, 80 bp, synthetic construct
  source 1..80: mol_type = other DNA
ggaagttcaacttttgtttggacagccgttcatcctgctcaatgtagtttaagcagagacttcttaactctgaaatgatt

SEQ ID NO: 68996 - DNA, 80 bp, synthetic construct
  source 1..80: mol_type = other DNA
atgtagtttaagcagagacttcttaactctgaaatgatttcttccattgcgcatcaaaaaagcctaggatcctcggtgcg

SEQ ID NO: 68997 - DNA, 80 bp, synthetic construct
  source 1..80: mol_type = other DNA
caatctggtacacttctcaatggtgtgagtaagataaatcttgtaatatgcagctcttggatgatagcatttatctccga

SEQ ID NO: 68998 - DNA, 80 bp, synthetic construct
  source 1..80: mol_type = other DNA
gccaccatgggtcaagcaaaatccagagagacaaggctctccaagagggaagacagggcagaggtactgcccgatgctac

SEQ ID NO: 68999 - DNA, 80 bp, synthetic construct
  source 1..80: mol_type = other DNA
attcatcagatgctcacctgttctaaacctgtgcaagaggaggctaccaagcacctcatcaatcttggtgtaaccttcca

SEQ ID NO: 69000 - DNA, 80 bp, synthetic construct
  source 1..80: mol_type = other DNA
gctcagcaatcatgattctgaggtccttagtttctaggttaaccataatattttgcacaaaattccttccttcaaaaagg

SEQ ID NO: 69001 - DNA, 80 bp, synthetic construct
  source 1..80: mol_type = other DNA
gcaccacatttgacagtcaggggtacaggctcccattcaggcccgaccctattgaaatcagaggatttaacgtcactcag

SEQ ID NO: 69002 - DNA, 80 bp, synthetic construct
  source 1..80: mol_type = other DNA
ccagaccgacgcggcacctgtgccccctgtccctaagacagttggattgcctagtcccattgtagttgcacctccctccc

SEQ ID NO: 69003 - DNA, 80 bp, synthetic construct
  source 1..80: mol_type = other DNA
caccggctgctgcccccggattgtccttccctaccccaccagtcagtgatatttgggtgttaccaccgccctcagaaggg

SEQ ID NO: 69004 - DNA, 80 bp, synthetic construct
  source 1..80: mol_type = other DNA
tctcaggttgatgtggctctcacaccccccgcccccgagcccgttgggttgcccggccctactgaacctcctccccccgt

SEQ ID NO: 69005 - DNA, 80 bp, synthetic construct
  source 1..80: mol_type = other DNA
atacacttcaactggtgtgctgacagcaaaggatgatcctgtatatgtctgggcaccagggattattatggaagggaatc

SEQ ID NO: 69006 - DNA, 80 bp, synthetic construct
  source 1..80: mol_type = other DNA
ttgtgggattgatttggtgtattctattagtattagagttaatcgtctgggcagccagtgctgagacacagaatttaaat

SEQ ID NO: 69007 - DNA, 80 bp, synthetic construct
  source 1..80: mol_type = other DNA
cctggatggacagacacagcacatggctctggagttgtgcctatgaaaactgatctggagttagatttctccctaccttc

SEQ ID NO: 69008 - DNA, 80 bp, synthetic construct
  source 1..80: mol_type = other DNA
accctctgacacactcttgtttctagggccgcttgaacaaggaggactaatatttaagcaatggtgcactacaacctgcc

SEQ ID NO: 69009 - DNA, 80 bp, synthetic construct
  source 1..80: mol_type = other DNA
tcaatgtcatagttgcacgtgatatttcatttcaagacctcggtgagactccttgccaaattgatttaaccacatcatca

SEQ ID NO: 69010 - DNA, 80 bp, synthetic construct
  source 1..80: mol_type = other DNA
tatatatgttcgattatactcccatcacaaagttactaacttactaacatatgtttattaaatattaactcccttataga

SEQ ID NO: 69011 - DNA, 80 bp, synthetic construct
  source 1..80: mol_type = other DNA
aagccactacaggtgacactctaaaaattgaaaagagttttgagacactggtccaaaagaatggttgcacaagcaataat

SEQ ID NO: 69012 - DNA, 80 bp, synthetic construct
  source 1..80: mol_type = other DNA
tttcaaggctattacatctgtctggtaggaagtagctcagaaccattgtatgttcctacacttgatgattacaggtcagc

SEQ ID NO: 69013 - DNA, 80 bp, synthetic construct
  source 1..80: mol_type = other DNA
ggaccagatgataaaacatgactggtcagacaataaagacagggaacaaccaattggtcatgttttattaatggcaggtg

SEQ ID NO: 69014 - DNA, 80 bp, synthetic construct
  source 1..80: mol_type = other DNA
ccaaaatcaaaggctttattggatgtgatatcaaaagactcaaagaagggtgtcttcggtgaattaattgatagcataga

SEQ ID NO: 69015 - DNA, 80 bp, synthetic construct
  source 1..80: mol_type = other DNA
tgttgccagtcagatccagcagaatgagtgtgcaaaaatcatagaaaaaatcctgtctgatttggaagtaaacttaggag

SEQ ID NO: 69016 - DNA, 80 bp, synthetic construct
  source 1..80: mol_type = other DNA
agtcaacagaaggtctgggtcaacctaaaaagacaacaggggtagatgacatactcagaaagttctatgacaacgagctt

SEQ ID NO: 69017 - DNA, 80 bp, synthetic construct
  source 1..80: mol_type = other DNA
acgcattaagatctgtatttgctttccacttcttactatcaacagctcagaaaatgaagttatgtgcaatctttgataat

SEQ ID NO: 69018 - DNA, 80 bp, synthetic construct
  source 1..80: mol_type = other DNA
tttatatggggttatcaagacattattggttaatttagcacaaaataataagattagattctattcaaaggttagactct

SEQ ID NO: 69019 - DNA, 80 bp, synthetic construct
  source 1..80: mol_type = other DNA
agctgctcaagaattgaatacataccttcatgcaaaatcacaagttatggcagccaatattatgaataaacactgggaca

SEQ ID NO: 69020 - DNA, 80 bp, synthetic construct
  source 1..80: mol_type = other DNA
gctgcagcagatgcatttgcttctgagtacaagccaacaaaccaggatatggagttatttcaaactttagtcaactgcac

SEQ ID NO: 69021 - DNA, 80 bp, synthetic construct
  source 1..80: mol_type = other DNA
attaatgagagaaggtgtgtatcgagagctagggcttgacattagtcaaccaaacgtgctaaaaaaagtagctccccttt

SEQ ID NO: 69022 - DNA, 80 bp, synthetic construct
  source 1..80: mol_type = other DNA
gttgaaggcaatgtcattagtaaagacgattaaggtgaaacctaaaaaagaagtattaaaggctgtctcattatatgggc

SEQ ID NO: 69023 - DNA, 80 bp, synthetic construct
  source 1..80: mol_type = other DNA
ggaaagagaaagttggtgatctcactcatttggctgcaatgagattgtgtatagaagtatggaggtggtgcaaggcaaat

SEQ ID NO: 69024 - DNA, 80 bp, synthetic construct
  source 1..80: mol_type = other DNA
tgccgtaatatggttgaagtgtttgatgtttgaaaataaaaccttagaacaatgggttgatttcttttgctctaggggag

SEQ ID NO: 69025 - DNA, 80 bp, synthetic construct
  source 1..80: mol_type = other DNA
ggggaaagcctaatgtaccctgcattgtatatagaaactgtgcattacgaactggtctgcgggttagacatccaaccaac

SEQ ID NO: 69026 - DNA, 80 bp, synthetic construct
  source 1..80: mol_type = other DNA
atgtccctaattataggccacaacaactttgtgaaccctctcttgatcacttagtggactactgtaagaattggttacag

SEQ ID NO: 69027 - DNA, 80 bp, synthetic construct
  source 1..80: mol_type = other DNA
gctattctactgtaagtactatctcaagcacacaatggtcagaagaagttagtctcacgatggacgatagtgatgatgat

SEQ ID NO: 69028 - DNA, 80 bp, synthetic construct
  source 1..80: mol_type = other DNA
aacatttcttacaggatgaatcagcatacacaggagacttgcttattcagactgaggagactgaaataaaaaagctaaga

SEQ ID NO: 69029 - DNA, 80 bp, synthetic construct
  source 1..80: mol_type = other DNA
ttaatggatccttatgaccttactgaatttgagagtatagtgaagggttggggtgaatgtgttaaagataggtttattga

SEQ ID NO: 69030 - DNA, 80 bp, synthetic construct
  source 1..80: mol_type = other DNA
gtttattgaattagaccaggaagcccaaagaaaggtttctgaagagagggtccttccagaggatgtgttgccagattctc

SEQ ID NO: 69031 - DNA, 80 bp, synthetic construct
  source 1..80: mol_type = other DNA
aaaacagtacaagtatagtactaacacatagataaggacaatttaggtaatactaacatgcagacatacactaaagtcag

SEQ ID NO: 69032 - DNA, 80 bp, synthetic construct
  source 1..80: mol_type = other DNA
attaagtaggaatagaaactaagtatattcgtaaatttaggttcatataagtttaaggggttatcagggacaattatcca

SEQ ID NO: 69033 - DNA, 80 bp, synthetic construct
  source 1..80: mol_type = other DNA
ataagctatatggggttataactggaattttaagcattacagccttcctaagattactactaatgacagttatgaatgta

SEQ ID NO: 69034 - DNA, 80 bp, synthetic construct
  source 1..80: mol_type = other DNA
ttattgcacttacactgctgcagcattattgaaccagcattagcaatatatatagtcatgcttgctagagtaattgtatt

SEQ ID NO: 69035 - DNA, 80 bp, synthetic construct
  source 1..80: mol_type = other DNA
tttataggtagtatccatgttagtgggcccatacatgtgaaactgagctatccctttctttcaccactttttttctccca

SEQ ID NO: 69036 - DNA, 80 bp, synthetic construct
  source 1..80: mol_type = other DNA
ctgtatctgcttcttcagggtctactactatggagtagcggaagagccagaaaccttaatgaactcagaatggaatgtcc

SEQ ID NO: 69037 - DNA, 80 bp, synthetic construct
  source 1..80: mol_type = other DNA
ttccaactattacactaatcttactgaaaatattaattgcttttgcttatctctgctccaaatataatacagattcaaaa

SEQ ID NO: 69038 - DNA, 80 bp, synthetic construct
  source 1..80: mol_type = other DNA
cattgactgtgtatgagcccaagcaaggatgctacagaaccctttctctttttagatatcgaagtcggtgttttgtaggg

SEQ ID NO: 69039 - DNA, 80 bp, synthetic construct
  source 1..80: mol_type = other DNA
taatgttatagttgcacgtgacatttcttttcaggaccttggtgagactccttgccaggttgatttaaccacctcatcaa

SEQ ID NO: 69040 - DNA, 80 bp, synthetic construct
  source 1..80: mol_type = other DNA
ttcttatcctgtctatctttctgtttgcactgtgttgtcctcgacgggcaagttataaaaaggagcataggccgtaaagg

SEQ ID NO: 69041 - DNA, 80 bp, synthetic construct
  source 1..80: mol_type = other DNA
aaggtgtatgtgttaagctgttgcatcaccatgtattcttaaacctactaataagtgtttattgaatcttaaaccccata

SEQ ID NO: 69042 - DNA, 80 bp, synthetic construct
  source 1..80: mol_type = other DNA
tactgtctttttgattaatcctatccagacatgtatcacaacaaagagttgccttttaggccttggcaatcagaggatcc

SEQ ID NO: 69043 - DNA, 80 bp, synthetic construct
  source 1..80: mol_type = other DNA
gccacaacaggtgacaccttgaaaattgagaagaacttcgaaacattagttcagaaaaatggctgcacaagcaataattt

SEQ ID NO: 69044 - DNA, 80 bp, synthetic construct
  source 1..80: mol_type = other DNA
tgtatacctcaactggagtattgacagcaaaagatgatcccatatatgtttgggcaccagggattattatggaaggaaac

SEQ ID NO: 69045 - DNA, 80 bp, synthetic construct
  source 1..80: mol_type = other DNA
caaacatggacccaaaatcaaaggcattacttgatgtgatatcgaaggattctaaaaagggcgtcttcggtgagttaatt

SEQ ID NO: 69046 - DNA, 80 bp, synthetic construct
  source 1..80: mol_type = other DNA
tgttgcaagtcagattcagcagaatgagtgtgctaagatcatagagaaaatattgtctgatttagaggtgaatctagggg

SEQ ID NO: 69047 - DNA, 80 bp, synthetic construct
  source 1..80: mol_type = other DNA
cagttttcaaagaaggccttggtttaattgatgttgataaccttgattcaaaagtggaaattgatggggtaacttggtgt

SEQ ID NO: 69048 - DNA, 80 bp, synthetic construct
  source 1..80: mol_type = other DNA
tttatatggtgttattaagacattgctaattaatttagcccagaacaataagataagattttattcaaaagttagacttt

SEQ ID NO: 69049 - DNA, 80 bp, synthetic construct
  source 1..80: mol_type = other DNA
ttcgagacaaggaaaaggcctttggaagttatataatggaagaaggataccatatagaagatgttttaaaccaacaagta

SEQ ID NO: 69050 - DNA, 80 bp, synthetic construct
  source 1..80: mol_type = other DNA
tacggaacagctcctggaatggtcaataatcctaccgcttatttaaaggttgacagaaatttgataccaattccacttgg

SEQ ID NO: 69051 - DNA, 80 bp, synthetic construct
  source 1..80: mol_type = other DNA
attaatgagggaaggtgtttaccgggaattgggacttgatatcagtcagcccaatgtattgaaaaaagtggcccctctgt

SEQ ID NO: 69052 - DNA, 80 bp, synthetic construct
  source 1..80: mol_type = other DNA
atccagaaattcagtgtctgggtttacttatatatgacttgaaaggacaaaaaggccttctgcaaatacaagctaatcgt

SEQ ID NO: 69053 - DNA, 80 bp, synthetic construct
  source 1..80: mol_type = other DNA
tacttatccagactgaggaaactgaaataaaaaagttaagagggatggtaaaaatcttagaaccagtcaagctgattaag

SEQ ID NO: 69054 - DNA, 80 bp, synthetic construct
  source 1..80: mol_type = other DNA
gaccaaaggttagaacatttgatgttcctaattataggccacaacagctttgtgaaccttctctcgatcatttggtggat

SEQ ID NO: 69055 - DNA, 80 bp, synthetic construct
  source 1..80: mol_type = other DNA
tactgtaaaacatggctgcagacagatcatgcatttgcatttaaagaggttacaggacaacgagtgtttaatgtatttaa

SEQ ID NO: 69056 - DNA, 80 bp, synthetic construct
  source 1..80: mol_type = other DNA
ttatacacctcaacgggagtattgacagcaaaagatgatcctgtatatgtctgggcaccagggattattatggaagggaa

SEQ ID NO: 69057 - DNA, 80 bp, synthetic construct
  source 1..80: mol_type = other DNA
actgggatttttaatattagttctcctacatgtttaatcaaccgtgtccagcggttccgtggtgctgaacagcaagtgaa

SEQ ID NO: 69058 - DNA, 80 bp, synthetic construct
  source 1..80: mol_type = other DNA
actaattctactgaaaatattacttgcatttgcctatctctgttctaaatataacacagactcaaagtttaagattttaa

SEQ ID NO: 69059 - DNA, 80 bp, synthetic construct
  source 1..80: mol_type = other DNA
tggaattgccaccagtgccggtgcagcatgttgagaatttaaaactagagagttcttgtaactttgatttgcacaccagt

SEQ ID NO: 69060 - DNA, 80 bp, synthetic construct
  source 1..80: mol_type = other DNA
tacgcctacccatggcaaacagctggctgttttgttgagaaggattttgagttcgagaatggctggggttgcaacccacc

SEQ ID NO: 69061 - DNA, 80 bp, synthetic construct
  source 1..80: mol_type = other DNA
atatttccttccaagacctcggtgaaaccccttgccaagttgatttaaccacctcatcaatagatggtgcatggggttct

SEQ ID NO: 69062 - DNA, 80 bp, synthetic construct
  source 1..80: mol_type = other DNA
ttcttatcctatctatttttctgtttgcactgtgctgcccacgacgggcaagctataaaaaagaacataggccataaggt

SEQ ID NO: 69063 - DNA, 80 bp, synthetic construct
  source 1..80: mol_type = other DNA
tagatatatttgactgctttcctatcacagacttactaacttactaacatatgtttattaaatattaattcccttacata

SEQ ID NO: 69064 - DNA, 80 bp, synthetic construct
  source 1..80: mol_type = other DNA
tatataatctttatatattatccactatatagaaaaaaaactaacactttactaattatttcactgcacaccgatcatgc

SEQ ID NO: 69065 - DNA, 80 bp, synthetic construct
  source 1..80: mol_type = other DNA
tctggtcatagagacagctgcacggactagaaagacaattgcatgttttgacctatcatgtaatcaaacagtgtgccaac

SEQ ID NO: 69066 - DNA, 80 bp, synthetic construct
  source 1..80: mol_type = other DNA
ccactgtttttttaatcagtccaatccaaacatgtattacgacaaaaagctgtcttttaggccttggcaatcagagaatc

SEQ ID NO: 69067 - DNA, 80 bp, synthetic construct
  source 1..80: mol_type = other DNA
gccactacaggtgacaccctgaaaattgaaaagaattttgagacactggtccaaaaaaacggttgcacaagcaacaattt

SEQ ID NO: 69068 - DNA, 80 bp, synthetic construct
  source 1..80: mol_type = other DNA
tcgtcggtaaagtgactggaaaagccccgtcaactgaatcatctgatacaattcaaggtatcgccttctctggaaatcca

SEQ ID NO: 69069 - DNA, 80 bp, synthetic construct
  source 1..80: mol_type = other DNA
aaatgaacaagaaaaaataccatttcatttacaaatagataagcaagttatccatgcagaaatacaacatttaggccatt

SEQ ID NO: 69070 - DNA, 80 bp, synthetic construct
  source 1..80: mol_type = other DNA
catccctacagatattgctgctcgcgccagccgcctcactgccaccgttgaggtctcggatgcgaatggccgtctcacct

SEQ ID NO: 69071 - DNA, 80 bp, synthetic construct
  source 1..80: mol_type = other DNA
gcaaaaccaccttgggtaataagactttttcaacagtctttgctgatggcgcccagttggaggccaacggtccggagcag

SEQ ID NO: 69072 - DNA, 80 bp, synthetic construct
  source 1..80: mol_type = other DNA
tgtgtgttatcatttgacccggccaaacaggctatggctgccggcccgcataatcttagttatgccctaacagctgcagg

SEQ ID NO: 69073 - DNA, 80 bp, synthetic construct
  source 1..80: mol_type = other DNA
tcttgaggtacatatcgtttctgcggggctcgactgtaaggcagtctttccacctggtgtcgcgaccccctccgcccccg

SEQ ID NO: 69074 - DNA, 80 bp, synthetic construct
  source 1..80: mol_type = other DNA
tactatcctgaggggttaattggtttgttcccaccattcgctcccggtcatagctgggagtccgctaaccccttctgtgg

SEQ ID NO: 69075 - DNA, 80 bp, synthetic construct
  source 1..80: mol_type = other DNA
atttaccacctcctgctgatactgatatgcctgcgatcgttaataccacaccgtcagtcactttagtgcagccttactcc

SEQ ID NO: 69076 - DNA, 80 bp, synthetic construct
  source 1..80: mol_type = other DNA
ccagcctctgagcgggtgacgccctctccggctccagtcgatagcgctgccggcccggttataagcacccctgtggcacc

SEQ ID NO: 69077 - DNA, 80 bp, synthetic construct
  source 1..80: mol_type = other DNA
cccggcaccagttcggcctgtaacccatccgtctgggcctcgccgacggctactccatacttatcctgatggctcaaagg

SEQ ID NO: 69078 - DNA, 80 bp, synthetic construct
  source 1..80: mol_type = other DNA
tcataccgcgcggcgctgtcgactgcaatgtcgatacgctggatgcattcccgccctcctgccaatttagcgcttttcat

SEQ ID NO: 69079 - DNA, 80 bp, synthetic construct
  source 1..80: mol_type = other DNA
cagctggcggaggagcttggtcatagaccagccccaattgccgccgtcttgccgccctgtccggagctcgaacaaggctt

SEQ ID NO: 69080 - DNA, 80 bp, synthetic construct
  source 1..80: mol_type = other DNA
tccgtggatctctgagccattttatccctgggctcagccctattagtgttactacctgcgagctttatgagctcgtggag

SEQ ID NO: 69081 - DNA, 80 bp, synthetic construct
  source 1..80: mol_type = other DNA
agactacacagaatgttaaggaaccagggacatttaaactaaacttatcaaatatggacccgaaatcaaaggctttattg

SEQ ID NO: 69082 - DNA, 80 bp, synthetic construct
  source 1..80: mol_type = other DNA
gatgtgatatcaaaagactcaaagaagggtgtctttggtgaattaattgatagcatagatgttgccagtcagattcagca

SEQ ID NO: 69083 - DNA, 80 bp, synthetic construct
  source 1..80: mol_type = other DNA
gaatgagtgtgcaaaaatcatagaaaagattctgtctgatttggaggtaaacctaggagagtcaacagagggtttgggtc

SEQ ID NO: 69084 - DNA, 80 bp, synthetic construct
  source 1..80: mol_type = other DNA
agcctaaaaagacaacaggagtggatgacatactcaggaagttctatgataatgagcttgtcaaatacatgatatctgtg

SEQ ID NO: 69085 - DNA, 80 bp, synthetic construct
  source 1..80: mol_type = other DNA
ttcgagagaaagaaagggcctttggaagctatataatggaggaaggttatcatatacaagatgttttaaatcagcaaata

SEQ ID NO: 69086 - DNA, 80 bp, synthetic construct
  source 1..80: mol_type = other DNA
tcaagaggtggttgagttagctgctcaagaattgaacacataccttcatgcaaagtcacaagttatggcagccaatatta

SEQ ID NO: 69087 - DNA, 80 bp, synthetic construct
  source 1..80: mol_type = other DNA
ttaaagcccttgacatgggtgcttgtccccagttagcacagttgggtattgtcctatgtacaagtaaggttgaacgattg

SEQ ID NO: 69088 - DNA, 80 bp, synthetic construct
  source 1..80: mol_type = other DNA
ttacctataagcatgcacggaaggataatgataggtatatacttggtttatttaagtttctgatgtctttatccgatgat

SEQ ID NO: 69089 - DNA, 80 bp, synthetic construct
  source 1..80: mol_type = other DNA
gggttagggagaaggttcttaagtaccagggtggcttagagtttatagagcatttattgcagattgaagcacagaaggga

SEQ ID NO: 69090 - DNA, 80 bp, synthetic construct
  source 1..80: mol_type = other DNA
gaaggttcttaagtaccaggggggcttagagtttatagagcatttattgcagattgaagcacagaagggaaattgccagt

SEQ ID NO: 69091 - DNA, 80 bp, synthetic construct
  source 1..80: mol_type = other DNA
accttcaattaatgagagaaggtgtctaccgagagctaggacttgacattagtcaaccaaacgttttaaagaaagtggct

SEQ ID NO: 69092 - DNA, 80 bp, synthetic construct
  source 1..80: mol_type = other DNA
gctgtctcattatatgggcggaaagagaaagttggtgaccttactcatttggctgcaatgagattgtgtatagaagtatg

SEQ ID NO: 69093 - DNA, 80 bp, synthetic construct
  source 1..80: mol_type = other DNA
gaggtggtgcaaggcaaatgaacaggatgctataacatggctgaagtgtttaatgtttgagaataaaactctagaacaat

SEQ ID NO: 69094 - DNA, 80 bp, synthetic construct
  source 1..80: mol_type = other DNA
aaagcgttcatgatcactattcaggctaatgggtttagggcaatggcacaattagatgaggagaacccacgatttttact

SEQ ID NO: 69095 - DNA, 80 bp, synthetic construct
  source 1..80: mol_type = other DNA
aaacaactattataatgaaacgaatatcacacaaataagcaacaccaacatccaaatagaagaaggagcaagcagaggtt

SEQ ID NO: 69096 - DNA, 80 bp, synthetic construct
  source 1..80: mol_type = other DNA
catatgtcaacatcagctataccaacttccctattgggcaaactgtgattccagtggcattagcaggtaattcatctctt

SEQ ID NO: 69097 - DNA, 80 bp, synthetic construct
  source 1..80: mol_type = other DNA
aataaaaaaatgctctttcaatatcaccacaagtataaaaactaaggtgaaagactatgcactgttttataaatatgatg

SEQ ID NO: 69098 - DNA, 80 bp, synthetic construct
  source 1..80: mol_type = other DNA
tgctcctgttattagctattaaacattcacctgatgtacgtataataaatgttgtttaattatattgtataatagtattt

SEQ ID NO: 69099 - DNA, 80 bp, synthetic construct
  source 1..80: mol_type = other DNA
aattatattgtataatagtatttaataatatatattatattattaaatttaataatatcctaatgagagaagattaatgc

SEQ ID NO: 69100 - DNA, 80 bp, synthetic construct
  source 1..80: mol_type = other DNA
atgaaagcagtactattagtcttactatgtacatttgcagtcacaaatgcagatacactatgcataggctatcatgcaaa

SEQ ID NO: 69101 - DNA, 80 bp, synthetic construct
  source 1..80: mol_type = other DNA
aaacaactattataatgaaacaaatatcacccaaataagtaacacaaaacatccgaaatggaagagaaaagtaaataggg

SEQ ID NO: 69102 - DNA, 80 bp, synthetic construct
  source 1..80: mol_type = other DNA
ttttccgaagccgtcgaagatgagctatggaggggtttgtgtggcggccagatatgccgaagccgtacaagatgttgtca

SEQ ID NO: 69103 - DNA, 80 bp, synthetic construct
  source 1..80: mol_type = other DNA
atctgagttgcaagtatttcttactcatagattgttcaacacaatgcagaggatttcagccacccccttccagctccaca

SEQ ID NO: 69104 - DNA, 80 bp, synthetic construct
  source 1..80: mol_type = other DNA
ttgccgaagccgtcgaagatgttgtcaaaaatcccaaaagcgctcaggtctgagctacaagtatttctaacccacaggct

SEQ ID NO: 69105 - DNA, 80 bp, synthetic construct
  source 1..80: mol_type = other DNA
tcaggtctgagctacaagtatttctaacccacaggctattcagcacaatgcagcgaatatcagccacccccttccagctc

SEQ ID NO: 69106 - DNA, 80 bp, synthetic construct
  source 1..80: mol_type = other DNA
caaaaaagtgggctttaaggtctggagctacaagtattcctagctcacaggctattcagcacaatgcagcggatatcagc

SEQ ID NO: 69107 - DNA, 80 bp, synthetic construct
  source 1..80: mol_type = other DNA
gtctggagctacaagtattcctagctcacaggctattcagcacaatgcagcggatatcagccacccccttccagctccac

SEQ ID NO: 69108 - DNA, 80 bp, synthetic construct
  source 1..80: mol_type = other DNA
gacattagtgccgaaggccgccaagatgttgtcaaaaatcccaaaagtgctcaggtctgagctacaagtatttctaaccc

SEQ ID NO: 69109 - DNA, 80 bp, synthetic construct
  source 1..80: mol_type = other DNA
gggacttttcaatccttactctggaaacagtattgatgagctcgcagactttaagcagctgctgctataatggctacctc

SEQ ID NO: 69110 - DNA, 80 bp, synthetic construct
  source 1..80: mol_type = other DNA
aaaataaaagcagccaaaatgaaagcagtactattagtcttactatgcacattcacaatcacaaatgcagacacactatg

SEQ ID NO: 69111 - DNA, 80 bp, synthetic construct
  source 1..80: mol_type = other DNA
tagaagggggatggacaggaatgatagatggatggtatggttatcatcatcaaaatgaacaggggtcaggatatgcagcg

SEQ ID NO: 69112 - DNA, 80 bp, synthetic construct
  source 1..80: mol_type = other DNA
atcacaaatgtgatgatatctgcatggaaagcgtgaaaaatggtacttataattacctcaagtactcagaagagtctaga

SEQ ID NO: 69113 - DNA, 80 bp, synthetic construct
  source 1..80: mol_type = other DNA
tggagtaaaattggaatcaacacgaatttaccagatcttagcaatctattcaaccgctgccagttcgttggtactgttgg

SEQ ID NO: 69114 - DNA, 80 bp, synthetic construct
  source 1..80: mol_type = other DNA
atgcaaactaaggggaatggccccgttgcatctaggtagatgcaacattgctggatggcttttggggaacccagaatgtg

SEQ ID NO: 69115 - DNA, 80 bp, synthetic construct
  source 1..80: mol_type = other DNA
aatcactatccaaggtaaactcatggtcttacattgtggaaacatcgcactcagacaacgggacatgttacccaggagat

SEQ ID NO: 69116 - DNA, 80 bp, synthetic construct
  source 1..80: mol_type = other DNA
attaaaaaaaggaagttcatacccaaaaatcagcaagtcttacgtcaacaacaaaaggaaggaagtccttgtcctatggg

SEQ ID NO: 69117 - DNA, 80 bp, synthetic construct
  source 1..80: mol_type = other DNA
ggattcaccacccatccaccagtgatgatcaaagaaggctctatcagaatgaaaatacctatgttttcgtagggacatca

SEQ ID NO: 69118 - DNA, 80 bp, synthetic construct
  source 1..80: mol_type = other DNA
acgtacaacagaaaattcatgccagaaatagcagaaaggctcaaagtgagggaccaagcagggaggatgaactattactg

SEQ ID NO: 69119 - DNA, 80 bp, synthetic construct
  source 1..80: mol_type = other DNA
cgtttgcaatggatagaggttctggatctggtatcataatttcagatgtaccacttcatgattgtactacagagtgccaa

SEQ ID NO: 69120 - DNA, 80 bp, synthetic construct
  source 1..80: mol_type = other DNA
acacccaaaggtgccataaacaccagccttccatttcagaatgtacacccagttacaattggagaatgtcctaaatacgt

SEQ ID NO: 69121 - DNA, 80 bp, synthetic construct
  source 1..80: mol_type = other DNA
caattataatagaaaggaacataacaaaaacaatatatttaaataataccaccatagagaaagagacatgccccaaacca

SEQ ID NO: 69122 - DNA, 80 bp, synthetic construct
  source 1..80: mol_type = other DNA
cttggtaatgaacataacactgcattttaggcaacataatagagatctcccctcgagcaaccaaacgatgtcatgtaaac

SEQ ID NO: 69123 - DNA, 80 bp, synthetic construct
  source 1..80: mol_type = other DNA
tacttaaacaatactatcatagaaagggaaccttgctccaaagtgatagaatacagggattggtcgaaaccacagtgtca

SEQ ID NO: 69124 - DNA, 80 bp, synthetic construct
  source 1..80: mol_type = other DNA
gtaggtgacactccaaggaacgatgatgggtctagcaacagcaattgcaaagatcctaataatgagagagggaacccagg

SEQ ID NO: 69125 - DNA, 80 bp, synthetic construct
  source 1..80: mol_type = other DNA
gcacgtggtccggtcatgaaacaaatggtgtgacggcagcatgttcccaagatggagcaagaagcttctacaagaatttg

SEQ ID NO: 69126 - DNA, 80 bp, synthetic construct
  source 1..80: mol_type = other DNA
atatggatattgcgaaaaggaggttcatacccaaaaatcagcaagtcttacttcaacaacaaagggaaagaagtccttgt

SEQ ID NO: 69127 - DNA, 80 bp, synthetic construct
  source 1..80: mol_type = other DNA
aggattgaattggctccactctccctgtactggagaccagtgtacacaccacagtatctcatctctccagacactcttaa

SEQ ID NO: 69128 - DNA, 80 bp, synthetic construct
  source 1..80: mol_type = other DNA
tgcaccttcagaggggacgtcacccgagtttcaaccactcatgtttatgaaatgaatttggcttctcaaaattggaataa

SEQ ID NO: 69129 - DNA, 80 bp, synthetic construct
  source 1..80: mol_type = other DNA
ttatgacccaacagaagaagtcccagcccctctgggaactccagattttgtgggaaagatccaaggcgtgctcacccaaa

SEQ ID NO: 69130 - DNA, 80 bp, synthetic construct
  source 1..80: mol_type = other DNA
gcagcatccggttcgaaaccaccacgaaccgtgatcttgaaactcaccaaaacacaaagttcaccccagtcggtgtcatc

SEQ ID NO: 69131 - DNA, 80 bp, synthetic construct
  source 1..80: mol_type = other DNA
caggatggtgacaaccaccaaaatgaaccccaacaatggagactcccaggttacgcaggtagggatgctcacaacgtgca

SEQ ID NO: 69132 - DNA, 80 bp, synthetic construct
  source 1..80: mol_type = other DNA
tctcacagtggcccacaccggcccgtatgatttggtcatcccccccaatggctacttcagatttgattcgtgggtcaacc

SEQ ID NO: 69133 - DNA, 80 bp, synthetic construct
  source 1..80: mol_type = other DNA
atgctggggctggggtcattaaccaaaaagttgattttgaacacaacagacaattgcaacaagcttcctttgctttcagc

SEQ ID NO: 69134 - DNA, 80 bp, synthetic construct
  source 1..80: mol_type = other DNA
cttcgggggcatcgccaggaagagctaaccccagggctactgcccccgctcggggctcccccagcactccttctaatgct

SEQ ID NO: 69135 - DNA, 80 bp, synthetic construct
  source 1..80: mol_type = other DNA
accaaaacaggagtttgtcatctttctccagtaggtcctctagccagggcacagtctcaaccgtgcccaaaggagttttg

SEQ ID NO: 69136 - DNA, 80 bp, synthetic construct
  source 1..80: mol_type = other DNA
aaggtcaaaggttatgcagggggttttgaagtgcaggtaattcttgcggggaaagcgttccccgccgggaaaatcatatt

SEQ ID NO: 69137 - DNA, 80 bp, synthetic construct
  source 1..80: mol_type = other DNA
tgcagcatccccacccaattttccaactgaaggcttgagtcccagccaggtcactatgttcccccatataatagtggatg

SEQ ID NO: 69138 - DNA, 80 bp, synthetic construct
  source 1..80: mol_type = other DNA
ccttgggggcactgccaggaagagctaatctcgggactgctgtccccgcccagggttcctccagtacatcttctaactct

SEQ ID NO: 69139 - DNA, 80 bp, synthetic construct
  source 1..80: mol_type = other DNA
ttgaccgcaacaagatacttgcttttagacagcttgctgctgaaaacaagtatgggctgacgatgacactcaagaacgtc

SEQ ID NO: 69140 - DNA, 80 bp, synthetic construct
  source 1..80: mol_type = other DNA
ctcaaacaagcacttaagaacatcgcgatcaagaagtgccagatagtgtacaatggtggcacctacacacttgaggctga

SEQ ID NO: 69141 - DNA, 80 bp, synthetic construct
  source 1..80: mol_type = other DNA
gcgtgggaatccaggagtaaaagggtgtgcctttgacgatggagatgatgtttggatgggaagaacaatcagtagggatt

SEQ ID NO: 69142 - DNA, 80 bp, synthetic construct
  source 1..80: mol_type = other DNA
gaggttggactaaagccaattccaaatcacagataaataggcaagtcatagttgataataacaactggtccggttattca

SEQ ID NO: 69143 - DNA, 80 bp, synthetic construct
  source 1..80: mol_type = other DNA
acaatcataatagaaaggaacataacaaaggtagagattcgttctaaggtggcagagtacagaaattggttgaaacccca

SEQ ID NO: 69144 - DNA, 80 bp, synthetic construct
  source 1..80: mol_type = other DNA
ggtgtgtttgcagggacaattggaaaggctctaataggccaattgtagatataaatatgacagactatagcattggatca

SEQ ID NO: 69145 - DNA, 80 bp, synthetic construct
  source 1..80: mol_type = other DNA
ttctgacaacgactgtgacattgcacttcaagcaaaatgaatgcaacataccctcgagaaatcatgtgactccatgtgaa

SEQ ID NO: 69146 - DNA, 80 bp, synthetic construct
  source 1..80: mol_type = other DNA
gggggcgagacccaaaaggcctccccccaacacacaaccactaagaccatccaccccagaactcgtggcacagataccgc

SEQ ID NO: 69147 - DNA, 80 bp, synthetic construct
  source 1..80: mol_type = other DNA
ccggggccgcatttgttaccacccgcattgccaggcgaatgaacatcagtaacctttggtcaaaaccactcagggaggag

SEQ ID NO: 69148 - DNA, 80 bp, synthetic construct
  source 1..80: mol_type = other DNA
gagaattcagggacgtatggtggggggacagatgggaatgctcttgacagggtctaacgccaagggcatggaccttggca

SEQ ID NO: 69149 - DNA, 80 bp, synthetic construct
  source 1..80: mol_type = other DNA
gagaattcagggacgtatggtgcggggacagatgggaatgctcttgacagggtctaacgccaagggcatggaccttggca

SEQ ID NO: 69150 - DNA, 80 bp, synthetic construct
  source 1..80: mol_type = other DNA
taggaggccgtgacccaagagttaagggcggagcatcactccaacaagtcatgagagaacaactcaagccattcactgaa

SEQ ID NO: 69151 - DNA, 80 bp, synthetic construct
  source 1..80: mol_type = other DNA
ggatggggaaatataccattatgggttgtatgttgaaaaaggactggtccttggagtccacaagccacccgcagcaataa

SEQ ID NO: 69152 - DNA, 80 bp, synthetic construct
  source 1..80: mol_type = other DNA
gcagggtggtttgggaagttagaccaaagctccatcttaagacaaatgtactggaccaagggacccaaccatgatgaccc

SEQ ID NO: 69153 - DNA, 80 bp, synthetic construct
  source 1..80: mol_type = other DNA
gatggggagctccagggcacaacactgcctacgtcaactagcattggcagaatctctggcacctacatgtccagcacccc

SEQ ID NO: 69154 - DNA, 80 bp, synthetic construct
  source 1..80: mol_type = other DNA
acttgaatcagcttcctgactatggaggagctatgactgtcagcaagggtttggccccagcggccgcgcccgacttcccc

SEQ ID NO: 69155 - DNA, 80 bp, synthetic construct
  source 1..80: mol_type = other DNA
tggagaaaggagggacactgagatcttatgtctgctgccgcaggagatggtcacccacttctacgagcagcaagccccct

SEQ ID NO: 69156 - DNA, 80 bp, synthetic construct
  source 1..80: mol_type = other DNA
acgcaccaggggctatgagaacaacaccttactctggaaactttttgaggcagagtgtcccccacaccaccccaaaagct

SEQ ID NO: 69157 - DNA, 80 bp, synthetic construct
  source 1..80: mol_type = other DNA
aatcaatcactagtgattaaaattttattttgtaatcagtgaaatgtgaatttcatgattctttctttatttgcatttta

SEQ ID NO: 69158 - DNA, 80 bp, synthetic construct
  source 1..80: mol_type = other DNA
gtacccaggaggccctgtattccatcatccaaattgccggagctgcatttgtcaccacgcgcatcgtcaagcgtatgaac

SEQ ID NO: 69159 - DNA, 80 bp, synthetic construct
  source 1..80: mol_type = other DNA
ggggaacgcgttcactgccgggaaagtcatatttgcagcagttccaccaaactttccaactgaaggtctaagccccagcc

SEQ ID NO: 69160 - DNA, 80 bp, synthetic construct
  source 1..80: mol_type = other DNA
attggaacccgtgctgatccccctgcctgatgttaggaataatttttaccattacaatcaagcacatgattctaccctca

SEQ ID NO: 69161 - DNA, 80 bp, synthetic construct
  source 1..80: mol_type = other DNA
tgtaactttaggggggatgtcacccatattgtgggtagccatgactatacaatgaatttggtatcccaaaattggaataa

SEQ ID NO: 69162 - DNA, 80 bp, synthetic construct
  source 1..80: mol_type = other DNA
agacggtgatcaccatcagaatgaaccccaacaatgggtactcccaaactactcaggcacatctggtcataatgtacatc

SEQ ID NO: 69163 - DNA, 80 bp, synthetic construct
  source 1..80: mol_type = other DNA
aagttacatcacagtggctcacactggcccgtatgatttggttattccccccaatggttattttaggtttgattcttggg

SEQ ID NO: 69164 - DNA, 80 bp, synthetic construct
  source 1..80: mol_type = other DNA
gctactcaaaaattgcaacaaggtctgatgaaggttaaacaggcagtgctcctagagggtggattttccacagcagatgc

SEQ ID NO: 69165 - DNA, 80 bp, synthetic construct
  source 1..80: mol_type = other DNA
cctcgggggcactgccaggaaggactaatcctagggttcccgttcctgctcggagctctcccagtgtactttctaatgct

SEQ ID NO: 69166 - DNA, 80 bp, synthetic construct
  source 1..80: mol_type = other DNA
tctactgctacctctgtgcattcaaatcaaactgtttcaacgagactaggttcttcagctggttctggtaccgttgtctc

SEQ ID NO: 69167 - DNA, 80 bp, synthetic construct
  source 1..80: mol_type = other DNA
atcaaaacaggaatgtgtcacctttcatgaggggggctctcaacacatcgttcgtcacccctccatctagtagatcctcc

SEQ ID NO: 69168 - DNA, 80 bp, synthetic construct
  source 1..80: mol_type = other DNA
gacacccatgttcaaatcctgatagatggagatgggactagcaactggcttgaggagatcaggctcagtagtgatgccag

SEQ ID NO: 69169 - DNA, 80 bp, synthetic construct
  source 1..80: mol_type = other DNA
cataaatgtatatattaggattaggaataggagcgctagtagtaacatttatcatagccgtaattgtgtggaccatagta

SEQ ID NO: 69170 - DNA, 80 bp, synthetic construct
  source 1..80: mol_type = other DNA
ggttcaggagttattccacttaaaactgatttagagttagatttctctttaccgtcttctgcaacatatacatacaggag

SEQ ID NO: 69171 - DNA, 80 bp, synthetic construct
  source 1..80: mol_type = other DNA
tgcagacccagaatttgtgttttcaccagggatcttgcctgaatctaaccatagtgtatgtgataaaaagactctccctc

SEQ ID NO: 69172 - DNA, 80 bp, synthetic construct
  source 1..80: mol_type = other DNA
aagatcaatttcatttgccaaagaatggatcaggatgttgttgtttactgcaatggtcaaaagaaggtgatactgacaaa

SEQ ID NO: 69173 - DNA, 80 bp, synthetic construct
  source 1..80: mol_type = other DNA
ttataggctcgactgagcttaacttgatacccattggggctgcatcagacctgaagctagaaagttcatgcgattttgac

SEQ ID NO: 69174 - DNA, 80 bp, synthetic construct
  source 1..80: mol_type = other DNA
ttatacaccacgccaatgacccaaaaaagctatacacaggttgaatggaggaagaaaagtgaaacaactgacaccacaaa

SEQ ID NO: 69175 - DNA, 80 bp, synthetic construct
  source 1..80: mol_type = other DNA
ggggttctggtgttggatttacacttacatgtacagttggtttgactgagtgtccaagtttcatgacctcaatcaaagcc

SEQ ID NO: 69176 - DNA, 80 bp, synthetic construct
  source 1..80: mol_type = other DNA
tgctgctgctacgacatttgaatcacagacaaagactgtaaacctacgtgggacctgtatcctggcctcagaattgtatg

SEQ ID NO: 69177 - DNA, 80 bp, synthetic construct
  source 1..80: mol_type = other DNA
atggcttctaggaatcttgaatggtaactggattgttgttgtagtgctcatagtggtattgatcttttctatagtgctct

SEQ ID NO: 69178 - DNA, 80 bp, synthetic construct
  source 1..80: mol_type = other DNA
ttagtatcctctgcccccggagaggacacaagaaagctgtgtaagtagaatactgtatgcatttatgaataataaaattc

SEQ ID NO: 69179 - DNA, 80 bp, synthetic construct
  source 1..80: mol_type = other DNA
attaatttactaatgcttttatgctgaccattaatgcactgtattactatataatcctttattaaaaaaaacaaatactt

SEQ ID NO: 69180 - DNA, 80 bp, synthetic construct
  source 1..80: mol_type = other DNA
ataccttgaataaaatcaagaagcctgtattgtgctatgatctcaactgcaaccaaacacgctgccagccaacagtttac

SEQ ID NO: 69181 - DNA, 80 bp, synthetic construct
  source 1..80: mol_type = other DNA
tgccaagtctagaagatatccgttcagcagaggttgtcagtaggatgatagtacatcctcgaggtgaggatcatgaccca

SEQ ID NO: 69182 - DNA, 80 bp, synthetic construct
  source 1..80: mol_type = other DNA
actagttctagtgacaccttacaaggaacggcattttctggtgtaccaatgtacagttcattatcaacacttgtacggag

SEQ ID NO: 69183 - DNA, 80 bp, synthetic construct
  source 1..80: mol_type = other DNA
actgagagtgcactacaagcccattatactatttgtaaactcactaatcggttccaagaagcattgaagaaatccctcaa

SEQ ID NO: 69184 - DNA, 80 bp, synthetic construct
  source 1..80: mol_type = other DNA
gaagccagaggttaagagaggctgttacaggacactaggagtttttaggtataaaagcaggtgctatgtaggcctagttt

SEQ ID NO: 69185 - DNA, 80 bp, synthetic construct
  source 1..80: mol_type = other DNA
tggtgtctcctcctaatgtttgagttgatcgtatgggctgtgagtgctgagacaccacttcttgaaccaggctggtctga

SEQ ID NO: 69186 - DNA, 80 bp, synthetic construct
  source 1..80: mol_type = other DNA
aacaaaagattcattccaatcgtttaacttaacagaacctcacatcacagcaaataagcttgaatggattgacccagatg

SEQ ID NO: 69187 - DNA, 80 bp, synthetic construct
  source 1..80: mol_type = other DNA
ggggctctggtgtcgggtttacacttacatgtactgtcggattaacagcgtgcccgagttttatgaaatcaattaaagca

SEQ ID NO: 69188 - DNA, 80 bp, synthetic construct
  source 1..80: mol_type = other DNA
attcacttacaaagaagatcagttaaaccagaagagatagaagaggccatgaagaagaaaacaacagattgttctgcttg

SEQ ID NO: 69189 - DNA, 80 bp, synthetic construct
  source 1..80: mol_type = other DNA
ctcagctggggactttccagaaggcgcggcctgagtgactaagccccgttggggactttccgaagaggcatgacgggact

SEQ ID NO: 69190 - DNA, 80 bp, synthetic construct
  source 1..80: mol_type = other DNA
gaccaatggaggagagaacaacaaagtgtgggactttccacagcagaatgcggggactttccaaagaggcgtggcctgag

SEQ ID NO: 69191 - DNA, 80 bp, synthetic construct
  source 1..80: mol_type = other DNA
aacttgatgtagtatcaatagataatgataataaaactactgataaaagtaatgcacaaggtaataatagtaaaactatt

SEQ ID NO: 69192 - DNA, 80 bp, synthetic construct
  source 1..80: mol_type = other DNA
aggccaatggaggagaaaacaacagattgttctgttggggactttccatccgctggggactttccaaggcggcgtggccc

SEQ ID NO: 69193 - DNA, 80 bp, synthetic construct
  source 1..80: mol_type = other DNA
tggaagggctaattcactcacagagaagatcagttgaacagaagaagatagaagaggccatgaagaagaaaacaacagat

SEQ ID NO: 69194 - DNA, 80 bp, synthetic construct
  source 1..80: mol_type = other DNA
tgttccgtttgttccgttggggactttccaggagacgtggcctgagtgactaagccccgctggggactttccgaagaggc

SEQ ID NO: 69195 - DNA, 80 bp, synthetic construct
  source 1..80: mol_type = other DNA
ggttaaataaaatagtaagaacgtatagccccattagcatcttggacataagacaaggaccaaaagaacccttcagagat

SEQ ID NO: 69196 - DNA, 80 bp, synthetic construct
  source 1..80: mol_type = other DNA
tatgtagataggttctttaaatgtctcagagcagaacaagctacccaggaggtgaaaaattggatgacagaaaccctgct

SEQ ID NO: 69197 - DNA, 80 bp, synthetic construct
  source 1..80: mol_type = other DNA
ggtccaaaatgcgaatccagactgtaagtccatcttaaaagcattaggaacaggggctacattagaagaaatgatgacag

SEQ ID NO: 69198 - DNA, 80 bp, synthetic construct
  source 1..80: mol_type = other DNA
catgtcagggagtgggaggacccagccataaagcaagagttttagctgaggcaatgagccaggcatcaaatgcagcagca

SEQ ID NO: 69199 - DNA, 80 bp, synthetic construct
  source 1..80: mol_type = other DNA
gccataatgatgcagaaaagcaaatttaagggccaaagaagaactattaagtgtttcaactgtggcaaggaaggacatct

SEQ ID NO: 69200 - DNA, 80 bp, synthetic construct
  source 1..80: mol_type = other DNA
agccagaaattgcagggcccctaggaaaaagggctgctggaagtgtggaaaggagggacatcaaatgaaagactgcactg

SEQ ID NO: 69201 - DNA, 80 bp, synthetic construct
  source 1..80: mol_type = other DNA
agagacaggctaattttttagggagaatgtggccttccagcaaagggaggccaggaaattttcttcagaacaggccagag

SEQ ID NO: 69202 - DNA, 80 bp, synthetic construct
  source 1..80: mol_type = other DNA
ccaacagccccgcccgcggaatgcttagagaggaaagaggagacaacctcctctctgaagcaggaaccgagggacaagga

SEQ ID NO: 69203 - DNA, 80 bp, synthetic construct
  source 1..80: mol_type = other DNA
actatatcctttaacttccctcaaatcactctttggcagcgaccccttgtcacaataaaactagggggacagataaggga

SEQ ID NO: 69204 - DNA, 80 bp, synthetic construct
  source 1..80: mol_type = other DNA
ggctcttttagatacaggagcagatgatacagtattagaagaaataaatttgccaggaaaatggaagccaaaaatgatag

SEQ ID NO: 69205 - DNA, 80 bp, synthetic construct
  source 1..80: mol_type = other DNA
ggggaatcggaggttttatcaaagtaagacaatatgatcagatacctatagaaatttgtggaaaaaaggccataggcaca

SEQ ID NO: 69206 - DNA, 80 bp, synthetic construct
  source 1..80: mol_type = other DNA
gtgttagtaggacctacacctgtcaacataattggacgaaacatgttgactcagcttggttgtactttaaattttccaat

SEQ ID NO: 69207 - DNA, 80 bp, synthetic construct
  source 1..80: mol_type = other DNA
aaaaaataaaagccttaacagagatatgtacagacatggaaaaggaaggcaagatttcaaaaattgggcctgaaaatcca

SEQ ID NO: 69208 - DNA, 80 bp, synthetic construct
  source 1..80: mol_type = other DNA
aagaactcaggacttctgggaagttcagttaggaataccgcacccagcagggttaaagaagaaaaaatcagtaacagtat

SEQ ID NO: 69209 - DNA, 80 bp, synthetic construct
  source 1..80: mol_type = other DNA
tggatgtgggggatgcatatttttcagttcccttagatccagagttcaggaagtacactgcattcaccatacctagtacc

SEQ ID NO: 69210 - DNA, 80 bp, synthetic construct
  source 1..80: mol_type = other DNA
tgcgagagcgtcagtattaagtgggggaaaattagatgcatgggagaggattcggttaaggccagggggaaagaaaaaat

SEQ ID NO: 69211 - DNA, 80 bp, synthetic construct
  source 1..80: mol_type = other DNA
aacaatgagacaccaggaattagatatcagtacaatgtgcttccacagggctggaaaggatcaccagcaatattccaatg

SEQ ID NO: 69212 - DNA, 80 bp, synthetic construct
  source 1..80: mol_type = other DNA
tagcatgacaaaaatcttagagccctttagattcaaaaacccagaaatagtcatataccaatatatggatgatttgtatg

SEQ ID NO: 69213 - DNA, 80 bp, synthetic construct
  source 1..80: mol_type = other DNA
tagggtctgacttagaaatagggcaacatagagcaaaaatagaagagctaagagagcatctattgagatggggattcacc

SEQ ID NO: 69214 - DNA, 80 bp, synthetic construct
  source 1..80: mol_type = other DNA
gcctatacaaccggcagaaaaggatagctggactgtcaacgatatccagaagttagtgggaaaactaaattgggcaagtc

SEQ ID NO: 69215 - DNA, 80 bp, synthetic construct
  source 1..80: mol_type = other DNA
agatttatccagggattaaagtaaagcaattatgtaaacttcttaggggagctaaagccctaacagacatagtaccacta

SEQ ID NO: 69216 - DNA, 80 bp, synthetic construct
  source 1..80: mol_type = other DNA
actacagaggcagagttagaattagcagagaacagggagattctaaaagaaccagtacatggggcatattatgacccatc

SEQ ID NO: 69217 - DNA, 80 bp, synthetic construct
  source 1..80: mol_type = other DNA
aaaagacttaatagcagaaatacagaagcaagggcaaggtcaatggacatatcaaatatatcaagagccacataaaaatc

SEQ ID NO: 69218 - DNA, 80 bp, synthetic construct
  source 1..80: mol_type = other DNA
tgaaaacagggaagtatgcaagaaccagatctgcccacactaatgatgttagacaattaacagaagcagtgcaaaagata

SEQ ID NO: 69219 - DNA, 80 bp, synthetic construct
  source 1..80: mol_type = other DNA
atagactgaaacatctagtatgggcaagcagagagttggaaagattcgcacttaaccctggccttttagaaacagcagaa

SEQ ID NO: 69220 - DNA, 80 bp, synthetic construct
  source 1..80: mol_type = other DNA
gacagaatattggcaggccacctggatccctgaatgggaatttgtcaatacccctcctctagtaaaattatggtaccagt

SEQ ID NO: 69221 - DNA, 80 bp, synthetic construct
  source 1..80: mol_type = other DNA
tagaaacagaccccatagcaggagcagaaactttctatgtagatggggcagctaatagagaaacaaaacagggaaaagca

SEQ ID NO: 69222 - DNA, 80 bp, synthetic construct
  source 1..80: mol_type = other DNA
ggatatgttactgatagaggcagacaaaaagttgtctccctatctgaaacaacaaatcagaagactgaattacaagcaat

SEQ ID NO: 69223 - DNA, 80 bp, synthetic construct
  source 1..80: mol_type = other DNA
ttacttagctttgcaggattcaggatcagaagtaaacatagtaacagactcacagtatgcaataggaatcattcaagcac

SEQ ID NO: 69224 - DNA, 80 bp, synthetic construct
  source 1..80: mol_type = other DNA
aaccagatagaagtgaatcagatttagttaatcaaataatagagcagttaatacggaaggacaaggtctacctgtcatgg

SEQ ID NO: 69225 - DNA, 80 bp, synthetic construct
  source 1..80: mol_type = other DNA
catcagtggtagcaaaagagatagtagctagctgtaataaatgtcagctaaaaggggaagccatgcatggacaagtggac

SEQ ID NO: 69226 - DNA, 80 bp, synthetic construct
  source 1..80: mol_type = other DNA
tgtagtccagggatatggcagttagattgtacacatttagaaggtaaagttatcatggtagcagttcatgtggctagtgg

SEQ ID NO: 69227 - DNA, 80 bp, synthetic construct
  source 1..80: mol_type = other DNA
ggatgtcaacaattaatggaacagttacaatcaactctcaaaacaggatcagaagaacttagatcattatataatactat

SEQ ID NO: 69228 - DNA, 80 bp, synthetic construct
  source 1..80: mol_type = other DNA
cagtgaaaatgatacatgcagacaacggccccaatttcaccagtgctgcggttaaggcagcctgttggtgggcagatatc

SEQ ID NO: 69229 - DNA, 80 bp, synthetic construct
  source 1..80: mol_type = other DNA
agggcaggtcagggatcaagctgaacaccttaagacagcagtacagatggcagtattcattcacaattttaaaagaaaag

SEQ ID NO: 69230 - DNA, 80 bp, synthetic construct
  source 1..80: mol_type = other DNA
gggggattggggggtacagtgcaggggaaagaataatagacataatagcatcagatatacaaactaaagaactacaaaaa

SEQ ID NO: 69231 - DNA, 80 bp, synthetic construct
  source 1..80: mol_type = other DNA
gggactatggcaaacagatggcaggtaatgattgtgtggcaggtagacaggatgaagattagaacatggaacagtctagt

SEQ ID NO: 69232 - DNA, 80 bp, synthetic construct
  source 1..80: mol_type = other DNA
gaaacatcatatgtatgtttcaaagaaagctaaaggatgattctatagacatcactatgaaagtaggcacccaaaagtaa

SEQ ID NO: 69233 - DNA, 80 bp, synthetic construct
  source 1..80: mol_type = other DNA
gttcagaagtacatatcccactaggggaggctagattagtagtaagaacatattggggtctgcagccaggggaacaagac

SEQ ID NO: 69234 - DNA, 80 bp, synthetic construct
  source 1..80: mol_type = other DNA
tggcacttgggtcatggagtctccatagaatggaggctcagaagatatagcacacaagtggatcctgacctggcagacca

SEQ ID NO: 69235 - DNA, 80 bp, synthetic construct
  source 1..80: mol_type = other DNA
aacaaccctctggtgcgtacatcaaagaatagatgtacaagacaccaaggaagctttagataaaatagaggaaatacaaa

SEQ ID NO: 69236 - DNA, 80 bp, synthetic construct
  source 1..80: mol_type = other DNA
ggtgtgaatatcaagcaggacataataaggtaggatccttacaatacctggcactagcagcattaatatccccaaaaaag

SEQ ID NO: 69237 - DNA, 80 bp, synthetic construct
  source 1..80: mol_type = other DNA
gaaccaaataatgaatggacactagagcttttggaggagcttaaaaatgaagctgttaggcattttcctagaccctggct

SEQ ID NO: 69238 - DNA, 80 bp, synthetic construct
  source 1..80: mol_type = other DNA
ccatggcctaggacagcatatctataacacttatggagatacctgggaaggggttgaagctataataagaattttgcaac

SEQ ID NO: 69239 - DNA, 80 bp, synthetic construct
  source 1..80: mol_type = other DNA
aactactgtttattcatttcagaattgggtgccaacatagtagaataggcattactcctcaaaggagaagaggcagggga

SEQ ID NO: 69240 - DNA, 80 bp, synthetic construct
  source 1..80: mol_type = other DNA
tggagccagtagatcctgacctagagccctggaaccatccgggaagtcagcctacaactgattgtaacaagtgtttctgt

SEQ ID NO: 69241 - DNA, 80 bp, synthetic construct
  source 1..80: mol_type = other DNA
aaaaagtgttgctggcattgccaagtttgctttctgaaaaaaggcttaggcatctcctatggcaggaagaagcggaaaca

SEQ ID NO: 69242 - DNA, 80 bp, synthetic construct
  source 1..80: mol_type = other DNA
tcgacgaggatctcttcaaggcagcaagggccatcaaaatcttataccaaagcagtaagtattaagtatatgtaatgtta

SEQ ID NO: 69243 - DNA, 80 bp, synthetic construct
  source 1..80: mol_type = other DNA
ttctgggaaatctgggcaatagtaggactggtagtagcgctaattatagtaatagtagtgtggactttagtatttataga

SEQ ID NO: 69244 - DNA, 80 bp, synthetic construct
  source 1..80: mol_type = other DNA
gtaagagcaagcaaaagacacagcaggcagcagctgccgcaggaggtagcagcaatgtcagccaaaattaccctatagtg

SEQ ID NO: 69245 - DNA, 80 bp, synthetic construct
  source 1..80: mol_type = other DNA
atataagaaattgagaaggcaaaggagaatagacagcttgtacaatagaataagagaaagagcagaagacagtggcaatg

SEQ ID NO: 69246 - DNA, 80 bp, synthetic construct
  source 1..80: mol_type = other DNA
agagtgatggggatgcagaggaattatccacacttgtgggaatggggaactttgatccttgggttggtgataatctgtag

SEQ ID NO: 69247 - DNA, 80 bp, synthetic construct
  source 1..80: mol_type = other DNA
tgcctcaaacaacttgtgggtcacagtttattatggggtacctgtgtggagagacgcagagaccaccctattttgtgcat

SEQ ID NO: 69248 - DNA, 80 bp, synthetic construct
  source 1..80: mol_type = other DNA
cagaagctaaagcatatgagaaagaagtacataatatctgggctacacatgcctgtgtacccacagaccccaacccacaa

SEQ ID NO: 69249 - DNA, 80 bp, synthetic construct
  source 1..80: mol_type = other DNA
gaagtagctctgataaatgtaacagagaactttaacatgtggaaaaatgacatggtagaacagatgcatgaggatataat

SEQ ID NO: 69250 - DNA, 80 bp, synthetic construct
  source 1..80: mol_type = other DNA
cagtttatggaatgaaggcctaaaaccatgtgcaaagctaacctctctctgtgttacttttacatgtattaatgcaacta

SEQ ID NO: 69251 - DNA, 80 bp, synthetic construct
  source 1..80: mol_type = other DNA
ctactaatagtaccaatggcactgtgattaaagaaggaataaaaaactgctctttcgatataaccacagaaataagggat

SEQ ID NO: 69252 - DNA, 80 bp, synthetic construct
  source 1..80: mol_type = other DNA
aagaagaagaaagaatatgcgcttttctatagaattgatatagtgccaattaatgctagagtgccaattaatggtagtaa

SEQ ID NO: 69253 - DNA, 80 bp, synthetic construct
  source 1..80: mol_type = other DNA
taggaataatagtacagaagagtatatgttaataaattgtaacgcctcaaccattaaacaggcttgcccaaaggtgtctt

SEQ ID NO: 69254 - DNA, 80 bp, synthetic construct
  source 1..80: mol_type = other DNA
ttgagccaattcccatacattattgtgccccagctggttttgcaattttaaagtgtaatgagaaaaatttcactggatta

SEQ ID NO: 69255 - DNA, 80 bp, synthetic construct
  source 1..80: mol_type = other DNA
caaaatgcacaagggcaaatggtacatcagagcatttcacctagaactttgaatgcatgggtaaaagtaatagaagaaaa

SEQ ID NO: 69256 - DNA, 80 bp, synthetic construct
  source 1..80: mol_type = other DNA
gggccatgcacaaatgtcagctcggtacgatgcactcatggaattaagccagtggtatcaactcaattgctgttaaatgg

SEQ ID NO: 69257 - DNA, 80 bp, synthetic construct
  source 1..80: mol_type = other DNA
aagcttagcaacggaagaggtagtaattagatctaaaaatatcacagacaataccaaaaatataatagtacagcttgcaa

SEQ ID NO: 69258 - DNA, 80 bp, synthetic construct
  source 1..80: mol_type = other DNA
aggctgtaaaaattaattgtaccagacctggcaacaatacaagaaaaagtgtacatatagggccaggactaacatggtat

SEQ ID NO: 69259 - DNA, 80 bp, synthetic construct
  source 1..80: mol_type = other DNA
gcaacaggtgaaataataggagatataagacaagcacattgtaacattagtggaaatgattggaatgacaccttaaaagt

SEQ ID NO: 69260 - DNA, 80 bp, synthetic construct
  source 1..80: mol_type = other DNA
gataagtgaagaattgaaaagactcttccctaataaaacaataaaatttgctccacccgtaggaggggacctagaaatta

SEQ ID NO: 69261 - DNA, 80 bp, synthetic construct
  source 1..80: mol_type = other DNA
caacacatagctttaattgtaaaggagaatttttctattgcaatacaacaccactgtttaatagtacacacatgcaaaat

SEQ ID NO: 69262 - DNA, 80 bp, synthetic construct
  source 1..80: mol_type = other DNA
ggtacaaacattacaagtacagattctacaaattcaaccatcacactccaatgcagactaaaacaatttgtaaggatgtg

SEQ ID NO: 69263 - DNA, 80 bp, synthetic construct
  source 1..80: mol_type = other DNA
gcaggaagtggggcaagcaatgtacgcctcccccattgcagggagcattaactgcagctcagatattacaggaataatat

SEQ ID NO: 69264 - DNA, 80 bp, synthetic construct
  source 1..80: mol_type = other DNA
tgacaagagatggtggtactaataatactgagatcttcagacctggaggaggagacatgagggacaattggagaagtgaa

SEQ ID NO: 69265 - DNA, 80 bp, synthetic construct
  source 1..80: mol_type = other DNA
ctatataaatataaagtagtaaagattgaaccaataggagtagcacccaataaggcaaggagacgagtggtgcagagaga

SEQ ID NO: 69266 - DNA, 80 bp, synthetic construct
  source 1..80: mol_type = other DNA
ggctttcagcccagaagtaatacccatgttctcagcattatcagagggagccaccccacaagatttgaacatgatgctaa

SEQ ID NO: 69267 - DNA, 80 bp, synthetic construct
  source 1..80: mol_type = other DNA
aaaatgagcagtgggaataggggccatgttccttgggttcttgggagcagcaggaagcactatgggcgcagcgtcaatga

SEQ ID NO: 69268 - DNA, 80 bp, synthetic construct
  source 1..80: mol_type = other DNA
caacatctgttgagactcacggtctggggcattaaacagctccaggcaagagtcctggctctggaaagctacctaaagga

SEQ ID NO: 69269 - DNA, 80 bp, synthetic construct
  source 1..80: mol_type = other DNA
ataaatcttataatgatatatgggacaatatgacctggttgcaatgggataaagaaattaacaattacacacaaataata

SEQ ID NO: 69270 - DNA, 80 bp, synthetic construct
  source 1..80: mol_type = other DNA
aaagataccatcaatgaggaagctgcagactgggacaggacacatccagtacatgcagggcctattccaccaggccagat

SEQ ID NO: 69271 - DNA, 80 bp, synthetic construct
  source 1..80: mol_type = other DNA
tatgggttacttgaagaatcacagaaccagcaggaaaagaatgagcaagacttattggccttggacaagtgggcaagcct

SEQ ID NO: 69272 - DNA, 80 bp, synthetic construct
  source 1..80: mol_type = other DNA
gtggaattggtttagcataacaaaatggctatggtatataaaaatatttataatgatagtaggaggcttgataggcttaa

SEQ ID NO: 69273 - DNA, 80 bp, synthetic construct
  source 1..80: mol_type = other DNA
gaataatttttgctgtgctttctatagtaaatagagttaggcagggatactcacctttgtctttgcagacccttatccca

SEQ ID NO: 69274 - DNA, 80 bp, synthetic construct
  source 1..80: mol_type = other DNA
acaacccaacggggactcgacaggcccggaggaacagaagaagaaggtggcgagcaagacagaagcagatccattcgctt

SEQ ID NO: 69275 - DNA, 80 bp, synthetic construct
  source 1..80: mol_type = other DNA
agtgaacggattcttgccacttatctgggacgacctgcggaacctgtgcctcttcagctaccgccacttgagaaacttac

SEQ ID NO: 69276 - DNA, 80 bp, synthetic construct
  source 1..80: mol_type = other DNA
ttgaaagtgaaagttaataggactcgaaagcgaaagttccagagaagttctctcgacgcaggactcggcttgctgaggtg

SEQ ID NO: 69277 - DNA, 80 bp, synthetic construct
  source 1..80: mol_type = other DNA
atatagtggggggacaccaggcagcaatgcaaatgttaaaagataccatcaatgaggaagctgcagactgggacaggaca

SEQ ID NO: 69278 - DNA, 80 bp, synthetic construct
  source 1..80: mol_type = other DNA
tcttaattgtagcgaggactgtggaacttctggggataagggggtgggaagccctcaagtatctgtggaacttcctgctg

SEQ ID NO: 69279 - DNA, 80 bp, synthetic construct
  source 1..80: mol_type = other DNA
tattggggacaggagctaaagaatagtgctattaatttgtttaataccacagcaatagcagtagctgagggaacagatag

SEQ ID NO: 69280 - DNA, 80 bp, synthetic construct
  source 1..80: mol_type = other DNA
gattatagaagcagtacagagagcttgtagagctatttgcaacatacctagaagaatcagacagggccttgaaagagctt

SEQ ID NO: 69281 - DNA, 80 bp, synthetic construct
  source 1..80: mol_type = other DNA
tgctttaaaatgggaggcaaatggtcaaaaagtagcatagttggatggcctgagataagggaaagaatgaggcgagctcg

SEQ ID NO: 69282 - DNA, 80 bp, synthetic construct
  source 1..80: mol_type = other DNA
agctgagccagaaagaatgaggcgagctcaagctgagccagcagcagcaggagtaggagcagtgtctcaagacttggaca

SEQ ID NO: 69283 - DNA, 80 bp, synthetic construct
  source 1..80: mol_type = other DNA
aacatggggcaatcacaattaacaatacagcagctactaatcctgacaaaacctggctggaagcacaagaagaggaagaa

SEQ ID NO: 69284 - DNA, 80 bp, synthetic construct
  source 1..80: mol_type = other DNA
gaggtaggttttccagtcaggccacaggtacctttaaggccaatgacctttaaaggagctttagatctcagccacttttt

SEQ ID NO: 69285 - DNA, 80 bp, synthetic construct
  source 1..80: mol_type = other DNA
aaggtttcttccctgattgggataactacacaccaggaccaggggagagattcccactgtgctttggatggtgcttcaag

SEQ ID NO: 69286 - DNA, 80 bp, synthetic construct
  source 1..80: mol_type = other DNA
ctagtaccagtagatccacaggaggtggaagaggccactgaaggagagaacacctgtttgctgcaccctataagccagca

SEQ ID NO: 69287 - DNA, 80 bp, synthetic construct
  source 1..80: mol_type = other DNA
catccagtacatgcagggcctattccaccaggccagatgagagaaccaaggggaagtgatatagcaggaactactagtac

SEQ ID NO: 69288 - DNA, 80 bp, synthetic construct
  source 1..80: mol_type = other DNA
tggaatggaggatgaagagagagaagtattaaagtggaagtttgacagtcgcctggcatacaagcacgtagcccgagagc

SEQ ID NO: 69289 - DNA, 80 bp, synthetic construct
  source 1..80: mol_type = other DNA
cgcggcctgggaggggttggggagtggctaaccctcagatgctgcataaaagcagccgcttctcgcctgtactgggtctc

SEQ ID NO: 69290 - DNA, 80 bp, synthetic construct
  source 1..80: mol_type = other DNA
ccttcaagaacaaataggatggatgacaagcaacccacctgtcccagtgggagaaatctataaaagatggataatcttgg

SEQ ID NO: 69291 - DNA, 80 bp, synthetic construct
  source 1..80: mol_type = other DNA
gttttcacaaggtgacactctagtgttcctaggccctatggaaggtgggggcttaatatttaaggactggtgcaccagta

SEQ ID NO: 69292 - DNA, 80 bp, synthetic construct
  source 1..80: mol_type = other DNA
cctggcattactactgccattgagcaggctgctctggctgcggccaattctgccttggcgaatgctgtggtggttcggcc

SEQ ID NO: 69293 - DNA, 80 bp, synthetic construct
  source 1..80: mol_type = other DNA
tttcaggttgatgcagcacctgtgccccctgcccctgaccctgctggattgcccggtcccgttgtgcttacccccccccc

SEQ ID NO: 69294 - DNA, 80 bp, synthetic construct
  source 1..80: mol_type = other DNA
ctcatgttgatgcggcatctgtaccctctgttcctgagcctgctggattgaccagccctattgtgcttaccccccccccc

SEQ ID NO: 69295 - DNA, 80 bp, synthetic construct
  source 1..80: mol_type = other DNA
ccccctcctcccgtgcgtaagccggcaacatccccgcctccccgcactcgccgtctcctttacacctaccccgacggcgc

SEQ ID NO: 69296 - DNA, 80 bp, synthetic construct
  source 1..80: mol_type = other DNA
ccggacttgattctccctctattaagtgctgtggagcgcaggaatgccctaaggtatataggcccgatgagcagtgcaag

SEQ ID NO: 69297 - DNA, 80 bp, synthetic construct
  source 1..80: mol_type = other DNA
cgtgaatggtcgcacacagaggaatactaacactatgaagaattacctactgccggtggtcgcccaggcatttgccagat

SEQ ID NO: 69298 - DNA, 80 bp, synthetic construct
  source 1..80: mol_type = other DNA
gttgctggaggataaaagagaagcacccccgctgatttcccctgaagatgtctctgcggcgaaagaggcagcagcagaag

SEQ ID NO: 69299 - DNA, 80 bp, synthetic construct
  source 1..80: mol_type = other DNA
ctaaagagatcaaggaggccgaggaattgcgcgttgcgttgccccctatcgtccctgacgtggaggaacctactctggaa

SEQ ID NO: 69300 - DNA, 80 bp, synthetic construct
  source 1..80: mol_type = other DNA
cgggtgaagacaaaatcggatcctacgctgttctgtcgcctcaagcagtcctccgtagcgagaaactttcctgcatccac

SEQ ID NO: 69301 - DNA, 80 bp, synthetic construct
  source 1..80: mol_type = other DNA
ccgctagcggaggaggccatcgtgatcactcattcaggtaggaaaggacgctatgccgtggaaccttaccacggtaaggt

SEQ ID NO: 69302 - DNA, 80 bp, synthetic construct
  source 1..80: mol_type = other DNA
gaacggccggcattgacttgactgcggaacagtggaacacggttgcccattttagggatgataaggcacattctgcggaa

SEQ ID NO: 69303 - DNA, 80 bp, synthetic construct
  source 1..80: mol_type = other DNA
atagtgcttaaccagctgtgtgtccgcttttttggactcgacttagactctggcctgttctcagcacccaccgtaccgtt

SEQ ID NO: 69304 - DNA, 80 bp, synthetic construct
  source 1..80: mol_type = other DNA
gtcgataaggaacaaccactgggacaactcgccttcaccgaatatgtacggtctgaacaaagaggtggtccggcacttgg

SEQ ID NO: 69305 - DNA, 80 bp, synthetic construct
  source 1..80: mol_type = other DNA
cccgacgttatccacaacttcctcgggcagtggcgactggaagagtcctggatatgaacaccgggactttgcgtagctac

SEQ ID NO: 69306 - DNA, 80 bp, synthetic construct
  source 1..80: mol_type = other DNA
ctgttgattggttgtccgagagccctgaagccacctttaaacatcgcttggacctaggcatcccgagcgagctacctaaa

SEQ ID NO: 69307 - DNA, 80 bp, synthetic construct
  source 1..80: mol_type = other DNA
tatgacattgtgttcgtgaacactaggaccccttataagtaccatcattatcaacagtgtgaggaccatgcaataaaact

SEQ ID NO: 69308 - DNA, 80 bp, synthetic construct
  source 1..80: mol_type = other DNA
agcatgcttgcaaagaaagcgtgtctacacctaaatcctggtggaacctgtgtcagcgtcggctacggatacgcggacag

SEQ ID NO: 69309 - DNA, 80 bp, synthetic construct
  source 1..80: mol_type = other DNA
ggccagtgaaagtattgtgggggcgatagctcgacaatttaaattttctcgggtgtgtaagcctaaagtctcattggaag

SEQ ID NO: 69310 - DNA, 80 bp, synthetic construct
  source 1..80: mol_type = other DNA
agacagaagtgctatttgtcttcataggctatgacagaaaggttcgcacccacaacccttacaaattatcctccacccta

SEQ ID NO: 69311 - DNA, 80 bp, synthetic construct
  source 1..80: mol_type = other DNA
acaaatatctacactggctcacgattgcacgaagcagggtgcgccccttcttaccatgtggtaaggggcgacatagctaa

SEQ ID NO: 69312 - DNA, 80 bp, synthetic construct
  source 1..80: mol_type = other DNA
caaccaggtggtggagtctgtggcgccctatacaaaaaattccctgaaaattttgatctgcagccaatcgaggtcggtaa

SEQ ID NO: 69313 - DNA, 80 bp, synthetic construct
  source 1..80: mol_type = other DNA
atcccgacttgtaaaagggggggtaaagcacataattcatgcagtgggacctaacttcagcaaagtgtcagagctggaag

SEQ ID NO: 69314 - DNA, 80 bp, synthetic construct
  source 1..80: mol_type = other DNA
taattcatgcagtgggacctaacttcagcaaagtgtcagagctggaaggggataaacagctggcagacgcgtatgagtcg

SEQ ID NO: 69315 - DNA, 80 bp, synthetic construct
  source 1..80: mol_type = other DNA
ctactgtctacgggcatattcgcgggtagtaaggaccgactcatgcagtcactaaatcacttgctgacagctctggatac

SEQ ID NO: 69316 - DNA, 80 bp, synthetic construct
  source 1..80: mol_type = other DNA
caaaaaatgggagacaacattgaaggaggttattgcgagaagggaggccgtcgaagagatatgcatctccgaagatgcgt

SEQ ID NO: 69317 - DNA, 80 bp, synthetic construct
  source 1..80: mol_type = other DNA
tccctggcaggacgcaaaggtttcagcacgaccgacggcaaaaccttctcgtacctcgaagggacaaagttccaccaagc

SEQ ID NO: 69318 - DNA, 80 bp, synthetic construct
  source 1..80: mol_type = other DNA
gcccaagtacaggattacaggtgtacaaaagattcaatgcgctcaccccatcctcttcctcccgaaggtgcctgagtata

SEQ ID NO: 69319 - DNA, 80 bp, synthetic construct
  source 1..80: mol_type = other DNA
tccatcctcgcagatacctcccaaatccggagagaagcgagactcaggagacgctgccggatgtccaggaatctataccc

SEQ ID NO: 69320 - DNA, 80 bp, synthetic construct
  source 1..80: mol_type = other DNA
gagcctgtgacatcggttacagactctttaagcgtagtttcggagagcaccgtggcttcgataacacccaatgaaatcgt

SEQ ID NO: 69321 - DNA, 80 bp, synthetic construct
  source 1..80: mol_type = other DNA
ggtggaggcagaggtacactcggatcttatgaggttttcctctaattggtcaatcccgcaagcatctgactttgacatcg

SEQ ID NO: 69322 - DNA, 80 bp, synthetic construct
  source 1..80: mol_type = other DNA
tatttagcagtgcaatgcaggaagacatacgtagcttggcgtcatcgaatagctcgggaataaagccaatacctgcacct

SEQ ID NO: 69323 - DNA, 80 bp, synthetic construct
  source 1..80: mol_type = other DNA
cgcactgttactacccaacctcctgttccgaaaccgcgcagacgccgccgcagaccgtctagcgccagttcaacaacacc

SEQ ID NO: 69324 - DNA, 80 bp, synthetic construct
  source 1..80: mol_type = other DNA
acttgtgcgaacgtcttgcgccacttccaggtccagtctggtttctaacccgcctggagaaagaagggttatcaccaggg

SEQ ID NO: 69325 - DNA, 80 bp, synthetic construct
  source 1..80: mol_type = other DNA
gttttgacaccacgcccttcatgttcaagaacctcgcgggagcgtacccgtcctactccacaaactgggccgatgagacg

SEQ ID NO: 69326 - DNA, 80 bp, synthetic construct
  source 1..80: mol_type = other DNA
tctgagaagtgaggggaaggttgaatgttaccgtacattatacccggtccccttatactctgcaagtgtcgaccgagcgt

SEQ ID NO: 69327 - DNA, 80 bp, synthetic construct
  source 1..80: mol_type = other DNA
tctcaagccctcgtgtggcaatagaggcttgtaacacggtgctgaaggaaaacttccctacagtagcgtcgtactgtata

SEQ ID NO: 69328 - DNA, 80 bp, synthetic construct
  source 1..80: mol_type = other DNA
acaccggagtacgacgcctacatggacatggtagatggagcctcatgctgcctggacacggcaagtttttgcccggcaaa

SEQ ID NO: 69329 - DNA, 80 bp, synthetic construct
  source 1..80: mol_type = other DNA
gtgctaacagcccgtaacataggtctatgcagttcggacgttatggagaggtcccgcaggggactatccgtcctacgaaa

SEQ ID NO: 69330 - DNA, 80 bp, synthetic construct
  source 1..80: mol_type = other DNA
gggatacatcgagaattagtgcgcagattaaatgccgtcctgctccctaatgtccataccctgtttgatatgtctgcaga

SEQ ID NO: 69331 - DNA, 80 bp, synthetic construct
  source 1..80: mol_type = other DNA
tagccaccgacgacgagcacgacgacgatcgtcgccgtgcgttgtacgaggagtcgactcgctggaaccgtgtgggcata

SEQ ID NO: 69332 - DNA, 80 bp, synthetic construct
  source 1..80: mol_type = other DNA
ttttctgagttgtgtaaggcggtggagtcgcggtatgagaccacgggaacatctgtgattatcgcagccatgactacgtt

SEQ ID NO: 69333 - DNA, 80 bp, synthetic construct
  source 1..80: mol_type = other DNA
tactcaggcaaagggcaagaaaagaaatggaactccaaagaagaagaagggtcctagtgccccaccccagaagaaccaga

SEQ ID NO: 69334 - DNA, 80 bp, synthetic construct
  source 1..80: mol_type = other DNA
acaatccgaagaagaaggttaacaagaaacctggaaagagacaaaggatggtcatgaaattggaatctgacaaaacgttc

SEQ ID NO: 69335 - DNA, 80 bp, synthetic construct
  source 1..80: mol_type = other DNA
cgctagtcaccaccatgtgtctgctcgcaaatgtcacgtttccatgttctgccccgccgatgtgctacgaccgcaagccc

SEQ ID NO: 69336 - DNA, 80 bp, synthetic construct
  source 1..80: mol_type = other DNA
ttgaaaggaagaacaatgaggtacgacgtgcaaggtaagatcgaggagatcccgttacatcaagtctcactgcacacttc

SEQ ID NO: 69337 - DNA, 80 bp, synthetic construct
  source 1..80: mol_type = other DNA
ctggttccgaagtggacagcgcactactctcaatgagtgggagtgctgtcaaggtgacccctcctgcagggcaaagtgtt

SEQ ID NO: 69338 - DNA, 80 bp, synthetic construct
  source 1..80: mol_type = other DNA
tcggtcgagtgcaactgtggctcagcaatctctgagactatcaacacggccaaaacctattctcagtgcaccaagactgc

SEQ ID NO: 69339 - DNA, 80 bp, synthetic construct
  source 1..80: mol_type = other DNA
gaaacacctgaaaggaaagctgcatgtaccatacctcctgtcggaggccaagtgtactgtgccgctggcacctgagccta

SEQ ID NO: 69340 - DNA, 80 bp, synthetic construct
  source 1..80: mol_type = other DNA
taataactttcggctttagatctgtttccttgaaatttcacccaaggaacccgacctacctgaccactcgccacttgaat

SEQ ID NO: 69341 - DNA, 80 bp, synthetic construct
  source 1..80: mol_type = other DNA
acgtgtggggcaatcacccaccccagagatattgggcacaggaaaccgccccaggggacccacacggcctgccgcatgag

SEQ ID NO: 69342 - DNA, 80 bp, synthetic construct
  source 1..80: mol_type = other DNA
cagtggcagcgtctacctggctgctctgcaaatcgcgcgccacctgcttgacaccatacaggctaaccccgaatgctcgg

SEQ ID NO: 69343 - DNA, 80 bp, synthetic construct
  source 1..80: mol_type = other DNA
ttgcctgtgtgtctggcagtcctttgctgtgcgagagctgcgagggcagaaacgacatgggaatcactagatcacctctg

SEQ ID NO: 69344 - DNA, 80 bp, synthetic construct
  source 1..80: mol_type = other DNA
attgtctatcagtgtcaccccgactaaagtgaggctaattcctacactgaacctcgagtacatcacgtgtcactacaaaa

SEQ ID NO: 69345 - DNA, 80 bp, synthetic construct
  source 1..80: mol_type = other DNA
cgcaccggggatcctaggctttttggattgcgctttactccaggtcaactgagtgttcgattctgtcttgcaagaagatg

SEQ ID NO: 69346 - DNA, 80 bp, synthetic construct
  source 1..80: mol_type = other DNA
ttataatcactagcatcaaggctgtgtacaattttgccacctgtggaattctaacattgatcaggttcctccttctggct

SEQ ID NO: 69347 - DNA, 80 bp, synthetic construct
  source 1..80: mol_type = other DNA
ggtagatcttgtggcatgtatgggctcgctggacccgacatttataaaggagtttatcaatttaaatcagtggagtttga

SEQ ID NO: 69348 - DNA, 80 bp, synthetic construct
  source 1..80: mol_type = other DNA
tgactccattatcagtcacaatttttgcaacttaacttcttcattcaataagaagaccttagaccacacactcatgagtg

SEQ ID NO: 69349 - DNA, 80 bp, synthetic construct
  source 1..80: mol_type = other DNA
gtgaatgatgatggcgtcgaaagacgtcgttgcaactaacgcttcaagcactggtgacaatagtaacacaatgaaggatc

SEQ ID NO: 69350 - DNA, 80 bp, synthetic construct
  source 1..80: mol_type = other DNA
aaccactaaatatcctcaacctactgtccaactgtgactggacctttatgggcatagttgaaaccataatactgttgatg

SEQ ID NO: 69351 - DNA, 80 bp, synthetic construct
  source 1..80: mol_type = other DNA
gaactctttggggtcttttgggacccccctgacgtgtccaacttcatagcttctctcctccctgacatgcaccttcaagg

SEQ ID NO: 69352 - DNA, 80 bp, synthetic construct
  source 1..80: mol_type = other DNA
cccggaagacttggccaaagatctgataccactcatactgggtgggattgggttggccataggtttcactaaggataaag

SEQ ID NO: 69353 - DNA, 80 bp, synthetic construct
  source 1..80: mol_type = other DNA
tgacaaaggtgatgaaaagtgcagttgatggtttgcgtgcagctacccaactggggcaatatggcctggaagtcttcgca

SEQ ID NO: 69354 - DNA, 80 bp, synthetic construct
  source 1..80: mol_type = other DNA
gtcatcaagaagtatttctttggaggtgatcagactgagaagacacttaaagacattgaggcagcagtcattgatatgga

SEQ ID NO: 69355 - DNA, 80 bp, synthetic construct
  source 1..80: mol_type = other DNA
acaagcaatctgccaggacttatatggccatactagatgctgaagaggaaaaggctagaaaactatctgtgaaacacgct

SEQ ID NO: 69356 - DNA, 80 bp, synthetic construct
  source 1..80: mol_type = other DNA
gacccccacgtggtgtcaaccaccaacgcattgatttcacgcatttcaatggcacggtctgccctggctaaggcacaagc

SEQ ID NO: 69357 - DNA, 80 bp, synthetic construct
  source 1..80: mol_type = other DNA
agccgggagccatcaccatcgcccaaccgtgaccctcctaaacaacaacgggacagggcaccacggagtgtggctgaaac

SEQ ID NO: 69358 - DNA, 80 bp, synthetic construct
  source 1..80: mol_type = other DNA
tgagttgacaaacagggttaagccagtggtgataatgatgtgtggccctcctggtataggcaagacgaaggctgccgagt

SEQ ID NO: 69359 - DNA, 80 bp, synthetic construct
  source 1..80: mol_type = other DNA
acctagccaaacggcttgccaatgaaatacgcccaggtgggaaagttggtctagttccacgtgaagctgtcgaccactgg

SEQ ID NO: 69360 - DNA, 80 bp, synthetic construct
  source 1..80: mol_type = other DNA
tcgctgatacagcccctttaacactcaactgtgaccgaatagagaagaaaggtatgcagttcgtgtcagatgctattgtt

SEQ ID NO: 69361 - DNA, 80 bp, synthetic construct
  source 1..80: mol_type = other DNA
gtcaacttaggacctgtctgtcggcgtgttgacttcctagtctattgctccgccccagaagtcgaacaggtacggcgtgt

SEQ ID NO: 69362 - DNA, 80 bp, synthetic construct
  source 1..80: mol_type = other DNA
cagccctggagatactggcgcgctcaaagattgcttcaaagatgatttctctcaccttaagatggaaattgcaccacagg

SEQ ID NO: 69363 - DNA, 80 bp, synthetic construct
  source 1..80: mol_type = other DNA
gtggatttgacaaccaagggaacacaccatttggcaagggcaccatgcgtcccaccaccataaacaggcttttaatccag

SEQ ID NO: 69364 - DNA, 80 bp, synthetic construct
  source 1..80: mol_type = other DNA
gaccaacctatgattttgactcagacaggatttcagctttcactagcctagccaaagctaatggcttaagcttgattggt

SEQ ID NO: 69365 - DNA, 80 bp, synthetic construct
  source 1..80: mol_type = other DNA
atggcaagcctcggaaagaggctacgtagtgtcaactcaatccatggcctcaaaaatgccctgactggttacaccatcac

SEQ ID NO: 69366 - DNA, 80 bp, synthetic construct
  source 1..80: mol_type = other DNA
ccaacaggcaatgggatggacagacccacccgttgatcaaaacctgccaacatgggaggagttgagccagtctgagaagc

SEQ ID NO: 69367 - DNA, 80 bp, synthetic construct
  source 1..80: mol_type = other DNA
accctgcaccataaaatggcaagctaggttttatgacatagagtctgatggcaatgtggtcaagatatgtgagaacacaa

SEQ ID NO: 69368 - DNA, 80 bp, synthetic construct
  source 1..80: mol_type = other DNA
gtgcacaaacccaacgccaacagtccattgacaccgctgtcctcgcgctcacccggctcagggctgccagggctgccgca

SEQ ID NO: 69369 - DNA, 80 bp, synthetic construct
  source 1..80: mol_type = other DNA
tatgcatcttgtctgcaatgtgccatcacgactgtgttgcagatggcgggttcagctcttgtcatacaccgagccgtcaa

SEQ ID NO: 69370 - DNA, 80 bp, synthetic construct
  source 1..80: mol_type = other DNA
gcgtatgttcggcacccacactaatgccgtctccttagagggtcctgacagggaacaccgctgtcgagtgcatcaggcta

SEQ ID NO: 69371 - DNA, 80 bp, synthetic construct
  source 1..80: mol_type = other DNA
aggctaatggtcgtggccccattggacatgatgatgttatagaaaagtatgggctgtgtgaaacagaagatgagggcacc

SEQ ID NO: 69372 - DNA, 80 bp, synthetic construct
  source 1..80: mol_type = other DNA
caagagcaagaagccaccattgaattgcccactgcaagccatgaaggcaagaacaaagggaaaaccaaaaagggccgagg

SEQ ID NO: 69373 - DNA, 80 bp, synthetic construct
  source 1..80: mol_type = other DNA
gcgatggtggaataggtgagacagagatggagatacgccatcgagtcttctttaagtccaagacaaagagaaaccgtcag

SEQ ID NO: 69374 - DNA, 80 bp, synthetic construct
  source 1..80: mol_type = other DNA
gaagaacgtcggcagcttggcttggttacaggcagtgagataaggaagagaaaacctatagattggaccccccccaaaaa

SEQ ID NO: 69375 - DNA, 80 bp, synthetic construct
  source 1..80: mol_type = other DNA
agaaaatcatggctgagaattcaaagtggtttgatgctggtggtctaggtcctgccaccttgccatcgaattattgtcgt

SEQ ID NO: 69376 - DNA, 80 bp, synthetic construct
  source 1..80: mol_type = other DNA
tgaatgggcagatgacgacagagaggtggactacactgaaaaaataaactttgaagcccctcccaccatgtggagccgag

SEQ ID NO: 69377 - DNA, 80 bp, synthetic construct
  source 1..80: mol_type = other DNA
tcacccgattcggctccggatgggggttctgggtcagccctacagtgttcattactactacccatgttataccaattgcg

SEQ ID NO: 69378 - DNA, 80 bp, synthetic construct
  source 1..80: mol_type = other DNA
tcacccgattcggctccggatgggggttctgggtcagccctacagtgttcattactactacccatgttataccaattggg

SEQ ID NO: 69379 - DNA, 80 bp, synthetic construct
  source 1..80: mol_type = other DNA
gccaaagaattctttggggaaccattggattccattgccatacaccgtgcaggagagttcacacagttccgtttctcaag

SEQ ID NO: 69380 - DNA, 80 bp, synthetic construct
  source 1..80: mol_type = other DNA
gaagatacggccagatctaacagggatggttcttgaggaagggtgtcctgaaggggtggtttgctcgatcttgatcaagc

SEQ ID NO: 69381 - DNA, 80 bp, synthetic construct
  source 1..80: mol_type = other DNA
gtgattcaggtgagctgctaccattggctgtgcgtatgggggctgtggcttcaatgaagatacagggtcggttggtccat

SEQ ID NO: 69382 - DNA, 80 bp, synthetic construct
  source 1..80: mol_type = other DNA
ggtcagtcgggtatgctcctgactggtgccaatgcaaaaggaatggatctcggcactctcccaggtgattgtggtgcacc

SEQ ID NO: 69383 - DNA, 80 bp, synthetic construct
  source 1..80: mol_type = other DNA
gtgacaagggtcattatgctgggcacgaaatagtcaggaacagtaagggccctgcactctcatctaaaactaaattctgg

SEQ ID NO: 69384 - DNA, 80 bp, synthetic construct
  source 1..80: mol_type = other DNA
gaggaaaagaccctagagtcaagggtggcccttctttatatcaagtccttcgggaccaactgaaaccttttgctgagcca

SEQ ID NO: 69385 - DNA, 80 bp, synthetic construct
  source 1..80: mol_type = other DNA
gttcaagacaacggtgatggtgaccagcaggttaaatggagtgctaaagatggtgtcaatctgggggttgatgccctaac

SEQ ID NO: 69386 - DNA, 80 bp, synthetic construct
  source 1..80: mol_type = other DNA
cgtgggcgcatgccagagccaggtttactggaggctgctgttgagacagtgacttctatgctggaacaggttatggacac

SEQ ID NO: 69387 - DNA, 80 bp, synthetic construct
  source 1..80: mol_type = other DNA
gcccacgccctggtcatatgctgatgcttgccagtcattagacaagaccactagttctggatacccctaccataagagaa

SEQ ID NO: 69388 - DNA, 80 bp, synthetic construct
  source 1..80: mol_type = other DNA
caaacaacatgtatgagctaggtaagtccatgaagcccctatatacagcagccctcaaagatgaacttgtcaaaccagag

SEQ ID NO: 69389 - DNA, 80 bp, synthetic construct
  source 1..80: mol_type = other DNA
aagatctatcaaaaaattaagaaaaggttactctggggggctgacctgtcaaccgtcatacgatctgcacgggcttttgg

SEQ ID NO: 69390 - DNA, 80 bp, synthetic construct
  source 1..80: mol_type = other DNA
ccccttctgtgacgccataaagtcccatgtaatcaagttgcctattaaagttggtatgaattcaattgaggatggccccc

SEQ ID NO: 69391 - DNA, 80 bp, synthetic construct
  source 1..80: mol_type = other DNA
aactgtccaaggccccccatggaatttatgcccacttcccccagtcgatcaacgcaatagtggggcagccaaggaacccc

SEQ ID NO: 69392 - DNA, 80 bp, synthetic construct
  source 1..80: mol_type = other DNA
tgtccacagacattgattttgacccggctcgactcacccaggtccttagggagtatggactgcgtccaactcgcccagat

SEQ ID NO: 69393 - DNA, 80 bp, synthetic construct
  source 1..80: mol_type = other DNA
aaaagtgagggccccataatcttgaggaaaaatgttgatggcttggtattccttaggcgcactatctccaaggatgcagc

SEQ ID NO: 69394 - DNA, 80 bp, synthetic construct
  source 1..80: mol_type = other DNA
tggttaccagggccgattggatagaaactccatagaaagacagctatggtggactcgtggccccaatcatgatgacccaa

SEQ ID NO: 69395 - DNA, 80 bp, synthetic construct
  source 1..80: mol_type = other DNA
cccacccccaaagaaagatccaacttatatcactgctgggagaggcatcacttcatggggaaaagttttacaggaaaatt

SEQ ID NO: 69396 - DNA, 80 bp, synthetic construct
  source 1..80: mol_type = other DNA
caggtggactggaaatgtatgtgccaggctggcaggccatgttccgctggatgcgttttcatgaccttggactttggaca

SEQ ID NO: 69397 - DNA, 80 bp, synthetic construct
  source 1..80: mol_type = other DNA
tgattggagatatgattgagttctatgaagggcacatataccattatgccatgtacataggtcaggggaaaacaattggt

SEQ ID NO: 69398 - DNA, 80 bp, synthetic construct
  source 1..80: mol_type = other DNA
atgctatataccccattgcgcacaggcggtgggtctggaggcactgatgcttttgtggttgctgggagagttctgacatg

SEQ ID NO: 69399 - DNA, 80 bp, synthetic construct
  source 1..80: mol_type = other DNA
ccccgcaccagactttagttttctgttccttgttcctccctctgtagagcaaaagactagggtctttagtgtccccaata

SEQ ID NO: 69400 - DNA, 80 bp, synthetic construct
  source 1..80: mol_type = other DNA
tcaaagatctctcaaattcccgagtgccaaccttgatccagggcatgtttgtttctcctgatgtcaatcaatcggtgcag

SEQ ID NO: 69401 - DNA, 80 bp, synthetic construct
  source 1..80: mol_type = other DNA
ttccaaaatgggcgatgtcaaattgatggtcagttgcaaggtaccaccccagtatccctcagccaattatgtaagatcag

SEQ ID NO: 69402 - DNA, 80 bp, synthetic construct
  source 1..80: mol_type = other DNA
aggtaggacttccagtaataccagagtgcttaaccttagtgaggttgacgggacaccttttgtaccacttgagtcccctg

SEQ ID NO: 69403 - DNA, 80 bp, synthetic construct
  source 1..80: mol_type = other DNA
cacctgtaggttttccagacataggcgggtgtgattggcatgttggtttcacttttgaggcacgagaccaggacccctct

SEQ ID NO: 69404 - DNA, 80 bp, synthetic construct
  source 1..80: mol_type = other DNA
gtgcattcccctagggccgctttctccatacctaggattaccatacacccaatcgctgcctggtggagggtatgctatgt

SEQ ID NO: 69405 - DNA, 80 bp, synthetic construct
  source 1..80: mol_type = other DNA
gtgatgggttccatagtggtgacatcataggtagtttggattggatctcagctccatcggatggctccgcacttgatgta

SEQ ID NO: 69406 - DNA, 80 bp, synthetic construct
  source 1..80: mol_type = other DNA
tggtctataccaaagtatggatcatctcttccagatgtcacccatctggcccctgcagtttttccccctggctttggtga

SEQ ID NO: 69407 - DNA, 80 bp, synthetic construct
  source 1..80: mol_type = other DNA
ggttatcctttactttcactctaaatttcctggttctggccccactgataaacttagggttccatgtttgataccacaag

SEQ ID NO: 69408 - DNA, 80 bp, synthetic construct
  source 1..80: mol_type = other DNA
agtttataacacatttctgtaatgagcaagcacccatagcgggggaggctgccctccttcactatgtggaccctgacaca

SEQ ID NO: 69409 - DNA, 80 bp, synthetic construct
  source 1..80: mol_type = other DNA
ggtaggaacttaggggaattcaagctttatccagatggctttatgacatgtgtgcctaacagcatcagcagtggtcccca

SEQ ID NO: 69410 - DNA, 80 bp, synthetic construct
  source 1..80: mol_type = other DNA
ccggaagcatactcggtgctggcatacaagctggtgctgaggcaggactccaagcccaacggtatcaacaggatctccaa

SEQ ID NO: 69411 - DNA, 80 bp, synthetic construct
  source 1..80: mol_type = other DNA
ctacaacagaatactttccaacatgatagggaaatgatagggtaccaggtgcaggccagtaatgccctattggctaagaa

SEQ ID NO: 69412 - DNA, 80 bp, synthetic construct
  source 1..80: mol_type = other DNA
tctcaacactagatacactctactgcaggcagggggtttgtctagtgcggatgcagctagggctgttgcaggcgctcctg

SEQ ID NO: 69413 - DNA, 80 bp, synthetic construct
  source 1..80: mol_type = other DNA
ttactcgcatagtggattggaacggaacccgtgtggcagcccccacatcgagcgccactactttaaaatctggtgggttc

SEQ ID NO: 69414 - DNA, 80 bp, synthetic construct
  source 1..80: mol_type = other DNA
atgcctgttcctatacctttaacccagaaatctaaacaacctttaatgactgggcaagataatcctaactatgctgcttc

SEQ ID NO: 69415 - DNA, 80 bp, synthetic construct
  source 1..80: mol_type = other DNA
tacatcttctatgcagtctagtttctatggtgtctttaatacagatagattaccccttttcgcaaataggaggtagggaa

SEQ ID NO: 69416 - DNA, 80 bp, synthetic construct
  source 1..80: mol_type = other DNA
catatgcagctgttactaacaactgctatgagttttgctgcaggataatggatctacaggatacgtggttggagaggaga

SEQ ID NO: 69417 - DNA, 80 bp, synthetic construct
  source 1..80: mol_type = other DNA
gctttttagcgagactcaaaagtttgggtaacaccaagcccataaaaattgaaaacacacaaatggctctcgggcttcta

SEQ ID NO: 69418 - DNA, 80 bp, synthetic construct
  source 1..80: mol_type = other DNA
ttggtaacatcaggtcgcttcaaccacccaactcaggactggtccaaggacactccagacttccagcaagatagtaagtt

SEQ ID NO: 69419 - DNA, 80 bp, synthetic construct
  source 1..80: mol_type = other DNA
ggaggttgtccgtgatgccgtcttagcagcaattaatggcctggtctcacgcccgttcaagaacttgctaaataagctta

SEQ ID NO: 69420 - DNA, 80 bp, synthetic construct
  source 1..80: mol_type = other DNA
agccagcggcagagggagtagggtcagcatctaaagacttagagaaacatggagcgcttaccactagcaacacagccgcc

SEQ ID NO: 69421 - DNA, 80 bp, synthetic construct
  source 1..80: mol_type = other DNA
atcaagacttagataaagatagagcacttacaagcagcaacacagacatcaataatgctgctgctgcttgtgccccgcaa

SEQ ID NO: 69422 - DNA, 80 bp, synthetic construct
  source 1..80: mol_type = other DNA
atcaagacttagataaagatagagcacttacaagcagcaacacagacaccaataatgctgcttgtgcccagcaagaggag

SEQ ID NO: 69423 - DNA, 80 bp, synthetic construct
  source 1..80: mol_type = other DNA
tttaaatacttattatatgctctgcgtaacaaattatgcagttacatggagcctgttgataattgccttagcaataggtt

SEQ ID NO: 69424 - DNA, 80 bp, synthetic construct
  source 1..80: mol_type = other DNA
tattatttaaaagataccaacatcggtttttagatatttatgctatgtattgtgaagaatgcgatatgtatcatgatagg

SEQ ID NO: 69425 - DNA, 80 bp, synthetic construct
  source 1..80: mol_type = other DNA
tggtattgcttaaagattctgtagttatcgttcaagcaaaaggaacagatttcagtgaatgtattgatgcagataaaata

SEQ ID NO: 69426 - DNA, 80 bp, synthetic construct
  source 1..80: mol_type = other DNA
gggtgttgtgtgtttatcgcctagatctggtgtgacatatgactcaataatagcctgtggtgaagggtctagcccgaata

SEQ ID NO: 69427 - DNA, 80 bp, synthetic construct
  source 1..80: mol_type = other DNA
atttctgccttagccccaggtgtgccactgttagattccctatccatccaaagcatataagcaactgcgattggcaagtg

SEQ ID NO: 69428 - DNA, 80 bp, synthetic construct
  source 1..80: mol_type = other DNA
agccactccacagtagacaaagtgaatgtacataacctagaagatattgagcagtacaggaaggccataacgcaaaagct

SEQ ID NO: 69429 - DNA, 80 bp, synthetic construct
  source 1..80: mol_type = other DNA
ccagaatagcttgtcaatatttaagtatgctagaaccaagaacctcccacacataaagcctatatataaatacataacaa

SEQ ID NO: 69430 - DNA, 80 bp, synthetic construct
  source 1..80: mol_type = other DNA
ttgaaggtacagaaactgcagaaggaattgaaagtgcctatatagagtcagaaataccagcattagcagggacttctatc

SEQ ID NO: 69431 - DNA, 80 bp, synthetic construct
  source 1..80: mol_type = other DNA
aagaagcaaccaatgttgaactatgcttgacttttgcagacaagacctactgtacagaattaaatcctgtaacacctata

SEQ ID NO: 69432 - DNA, 80 bp, synthetic construct
  source 1..80: mol_type = other DNA
ataacgaatctatttgaagtacaattcaagactgtggaaacttatagtctgcccagggttgtagcagtccagaatcatga

SEQ ID NO: 69433 - DNA, 80 bp, synthetic construct
  source 1..80: mol_type = other DNA
gattaggataggacagatcaatgacctaggtgtttactctaagggctgtgggaatgtccaaaaagttaataacaccatat

SEQ ID NO: 69434 - DNA, 80 bp, synthetic construct
  source 1..80: mol_type = other DNA
aacgattttcaggcatgcaaatttttgcaaagcccaccgagctataggcttgaagaggatgatggatcaatcacagtgat

SEQ ID NO: 69435 - DNA, 80 bp, synthetic construct
  source 1..80: mol_type = other DNA
agattataagaagatccttggtacaataaagatgaaggctatactaggggatgtaaaatataagacatttgcagagaata

SEQ ID NO: 69436 - DNA, 80 bp, synthetic construct
  source 1..80: mol_type = other DNA
actctgactttagtagaagccaaacctattttagagctagcccctgtcgatcaaactgcatatataagggaaaaagatga

SEQ ID NO: 69437 - DNA, 80 bp, synthetic construct
  source 1..80: mol_type = other DNA
tttagctgtaagggggaggggaatgccaacagcaggagtttatttgaagaacattattttatacttggtagcacactact

SEQ ID NO: 69438 - DNA, 80 bp, synthetic construct
  source 1..80: mol_type = other DNA
aatctggctggttcaaaagcacgacatatattagcctagaccagacttgcgaacatttgaaggtttcttgcggtccaaag

SEQ ID NO: 69439 - DNA, 80 bp, synthetic construct
  source 1..80: mol_type = other DNA
tccatacaattccatgcctgtttcaatcaacacatgtcatgtgtcagatttttacatagaactattctgccaggttctat

SEQ ID NO: 69440 - DNA, 80 bp, synthetic construct
  source 1..80: mol_type = other DNA
ttatgtgtaagtcaaaaggaccagcctctatactgtcaataatcactgctgttttaatactaacctttgtcacacctata

SEQ ID NO: 69441 - DNA, 80 bp, synthetic construct
  source 1..80: mol_type = other DNA
tggtttcttgaaaggctctaagatattattttaggctggtattctacctggcaatgggaaatacacagtaagactataca

SEQ ID NO: 69442 - DNA, 80 bp, synthetic construct
  source 1..80: mol_type = other DNA
ccaggagttactaagccttttttaaagggtcagagggtacatattttaggttttgtgggtcacatatggtcttggttgca

SEQ ID NO: 69443 - DNA, 80 bp, synthetic construct
  source 1..80: mol_type = other DNA
ctccttctctttcttcttctcttcacaacagtttaaaaatgtatgggacacacaaaaacaggtctcgagccacacctggc

SEQ ID NO: 69444 - DNA, 80 bp, synthetic construct
  source 1..80: mol_type = other DNA
caacatgacctctcaccaagtgtgcaattagtttagtttttgaagcactgactatgcagtataaactgacagttaactac

SEQ ID NO: 69445 - DNA, 80 bp, synthetic construct
  source 1..80: mol_type = other DNA
tttggcaactctctggtattaccggtggggctgtctttttcctgccagatggttgtcaaagcctctcatcctgtctttcc

SEQ ID NO: 69446 - DNA, 80 bp, synthetic construct
  source 1..80: mol_type = other DNA
ttctatagtttacaacaagggagagatagatatcatcccaagagtcaatatcagggatgcaacccaaaccagggtcacta

SEQ ID NO: 69447 - DNA, 80 bp, synthetic construct
  source 1..80: mol_type = other DNA
atcagggatgcaacccaaaccagggtcactatctttaatgagcaaaagaccctccgtacatctccagagaagtcggtgac

SEQ ID NO: 69448 - DNA, 80 bp, synthetic construct
  source 1..80: mol_type = other DNA
atggatgtgcttttttctattgcgaaaactgtttcagatctcaaaaagaaagttgtagttggtacaatttataccaatgt

SEQ ID NO: 69449 - DNA, 80 bp, synthetic construct
  source 1..80: mol_type = other DNA
tctagatagacttctacttgttgcatccgtgaagagaatggtgacgtagataagctagagatctaaccaatctctatgtg

SEQ ID NO: 69450 - DNA, 80 bp, synthetic construct
  source 1..80: mol_type = other DNA
gactactcaccatgtagcatgattcacgtatgggtttagtccatgcttgagtaggggcaaatgcgcatgacgtggacgat

SEQ ID NO: 69451 - DNA, 80 bp, synthetic construct
  source 1..80: mol_type = other DNA
tgtagcatgattcacgtatgggtttagtccatgcttgagtaggggcaaatgcgcatgacgtggacgatccccaggaggat

SEQ ID NO: 69452 - DNA, 80 bp, synthetic construct
  source 1..80: mol_type = other DNA
tagttagagaggcttcaagaaatggaatgcaacctcagtctccaactcttatagcacttgcatcatcaaaatttaagact

SEQ ID NO: 69453 - DNA, 80 bp, synthetic construct
  source 1..80: mol_type = other DNA
atctattaagaattggcgtgctcagtcaggcgagagaatccagtttatgaatataaatcatatggtctttgaatatagaa

SEQ ID NO: 69454 - DNA, 80 bp, synthetic construct
  source 1..80: mol_type = other DNA
attcatatattcttcaacgtgctaatccacaatatggaaacttcatgggattgaggtattatacagctagtaatacatgt

SEQ ID NO: 69455 - DNA, 80 bp, synthetic construct
  source 1..80: mol_type = other DNA
actcaacactcgctgaaaatgcaccaaataatactcaacgttttacttacaatggaagacttaagagaccaatttctaat

SEQ ID NO: 69456 - DNA, 80 bp, synthetic construct
  source 1..80: mol_type = other DNA
gttttaatgaaaattgaagctggtgctccaaatattaataattcgacaatcttacctgacccaacaaatcagacgacatg

SEQ ID NO: 69457 - DNA, 80 bp, synthetic construct
  source 1..80: mol_type = other DNA
gttatataacccagaccagctgatgaatggaacattcaccatcgaattttataataacggtcagctagttgacatggtca

SEQ ID NO: 69458 - DNA, 80 bp, synthetic construct
  source 1..80: mol_type = other DNA
tccacaaggcggaccatatccctaccaagctgcatatatgctgactttaagtatactcgatgctactacagaatcagtac

SEQ ID NO: 69459 - DNA, 80 bp, synthetic construct
  source 1..80: mol_type = other DNA
tttttcttttttcgtaaaggattggccagaaaagattgaggagttcttgataaaaccatgtccctttctaaaaaaaggtg

SEQ ID NO: 69460 - DNA, 80 bp, synthetic construct
  source 1..80: mol_type = other DNA
cttgtgcacctgacagatgccctccaacatgcatttacatagcagggatggcagagctgggagctttcttctccattctc

SEQ ID NO: 69461 - DNA, 80 bp, synthetic construct
  source 1..80: mol_type = other DNA
tttttccttttttgtcaaggactggcctaaaaagatcgaggaattcctcatcaagccctgcccatttttaaagaaaagtg

SEQ ID NO: 69462 - DNA, 80 bp, synthetic construct
  source 1..80: mol_type = other DNA
cttttctttttttgtcaaggactggcctgaaaagattgaggagtttcttatcaagccctgcccattcctaaagaaaagtg

SEQ ID NO: 69463 - DNA, 80 bp, synthetic construct
  source 1..80: mol_type = other DNA
cctgtgcaccagataggtgccctcctacatgcatttatatagcagggatggcagagttaggggctttcttctccattctg

SEQ ID NO: 69464 - DNA, 80 bp, synthetic construct
  source 1..80: mol_type = other DNA
agtccttcagggtcattagttgagaataagttagtcctgcagcaaagcccgcggactgcagtgacttatttgaaccccca

SEQ ID NO: 69465 - DNA, 80 bp, synthetic construct
  source 1..80: mol_type = other DNA
aattcaaagatctatgtcacatgcacactgggattgttgtggagaagaaaaagagaggaggtaaagaagaaataactcct

SEQ ID NO: 69466 - DNA, 80 bp, synthetic construct
  source 1..80: mol_type = other DNA
ttccactgggtcttcaggtcttccctcaatgtccatccaggtcttagcatttggatcaagttgcaacattgaatccttga

SEQ ID NO: 69467 - DNA, 80 bp, synthetic construct
  source 1..80: mol_type = other DNA
caatataactggaggaggtaggaggaagaaagaatatgcgcttttctataaagaagatatagcactaattaaagataggc

SEQ ID NO: 69468 - DNA, 80 bp, synthetic construct
  source 1..80: mol_type = other DNA
aagaactggatgacagaaaccctgctggtccaaaatgcaaatccagattgtaaaaccattttaagagcattaggatcagg

SEQ ID NO: 69469 - DNA, 80 bp, synthetic construct
  source 1..80: mol_type = other DNA
ggctacattagaagaaatgatgacagtatgccagggagtgggaggacccggccataaagcaagggttttggccgaggcaa

SEQ ID NO: 69470 - DNA, 80 bp, synthetic construct
  source 1..80: mol_type = other DNA
tgagtcaagtacaaaatgcaaacataatgatgcagaaaagtaattttaggggcccaaaaagaattaagtgtttcaactgt

SEQ ID NO: 69471 - DNA, 80 bp, synthetic construct
  source 1..80: mol_type = other DNA
ggcaaagaaggacacctagccagaaattgcagggcccctaggaaaaagggctgttggaaatgtggaaaggaaggccatca

SEQ ID NO: 69472 - DNA, 80 bp, synthetic construct
  source 1..80: mol_type = other DNA
aatgaaagactgcactgagagacaggctaattttttagggagaatttggccttccagcaaagggaggccaggaaattttc

SEQ ID NO: 69473 - DNA, 80 bp, synthetic construct
  source 1..80: mol_type = other DNA
ctcagagcagaccagagccatcagccccaccagcagaaaactttgggatgggggaagagataaccccctccctgaaacag

SEQ ID NO: 69474 - DNA, 80 bp, synthetic construct
  source 1..80: mol_type = other DNA
gaacagaaggacagggaacagcatcctccttcaatttccctcaaatcactctttggcgacgaccccttgtcacagtaaga

SEQ ID NO: 69475 - DNA, 80 bp, synthetic construct
  source 1..80: mol_type = other DNA
gttaaggccagggggaaaggaaaaatatagaataaaacacctagtatgggcaagcagggagctggaaagattcgcgctta

SEQ ID NO: 69476 - DNA, 80 bp, synthetic construct
  source 1..80: mol_type = other DNA
ataggaggacagctaaaagaagctctattagatacaggagcagatgatacagtattagaagacataaatttgccaggaaa

SEQ ID NO: 69477 - DNA, 80 bp, synthetic construct
  source 1..80: mol_type = other DNA
atggaaaccaaaaatgataggggggattggaggttttatcaaggtaagacagtatgatcagatacttatagaaatttgtg

SEQ ID NO: 69478 - DNA, 80 bp, synthetic construct
  source 1..80: mol_type = other DNA
gaaaaaaggctataggtacggtattagtaggacctacccctgtcaacataattggaagaaatatgttgactcagcttggt

SEQ ID NO: 69479 - DNA, 80 bp, synthetic construct
  source 1..80: mol_type = other DNA
tgtactttaaattttccaataagtcctattgaaactgtaccagtaacattaaagccaggaatggatggcccaaaggttaa

SEQ ID NO: 69480 - DNA, 80 bp, synthetic construct
  source 1..80: mol_type = other DNA
acaatggccattaacagaagagaaaataaaagcattaacagacatttgtaaggagatggaaaaggaaggaaaaatttcaa

SEQ ID NO: 69481 - DNA, 80 bp, synthetic construct
  source 1..80: mol_type = other DNA
aaattgggcctgaaaatccatacaatactccagtatttgccataaagaaaaaagacagtactaaatggagaaaattagta

SEQ ID NO: 69482 - DNA, 80 bp, synthetic construct
  source 1..80: mol_type = other DNA
ggtttcagagaacttaataagagaactcaagacttctgggaagttcaattaggaataccacaccctgcagggttaaaaaa

SEQ ID NO: 69483 - DNA, 80 bp, synthetic construct
  source 1..80: mol_type = other DNA
gaaaaaatctgtaacagtactggatgtgggtgatgcatatttttcagttcccttagatcaagacttcagaaagtatactg

SEQ ID NO: 69484 - DNA, 80 bp, synthetic construct
  source 1..80: mol_type = other DNA
tcaccagcaattttccaaagtagcatgacaaaaatcttagagccttttagaaaacaaaatccagagatagttatctatca

SEQ ID NO: 69485 - DNA, 80 bp, synthetic construct
  source 1..80: mol_type = other DNA
accctagccttttagaaacatcagaaggatgtcaacaaatactggaacagttacaaccaactctcaagacaggatcagaa

SEQ ID NO: 69486 - DNA, 80 bp, synthetic construct
  source 1..80: mol_type = other DNA
atacatggatgatttgtatgtaggatctgacttagagatagggcagcatagaacagaaatagaggaactgagagaacatc

SEQ ID NO: 69487 - DNA, 80 bp, synthetic construct
  source 1..80: mol_type = other DNA
tgctgaggtggggatttaccacaccagacaaaaaacatcagaaagaacctccattcctttggatgggttatgaactccat

SEQ ID NO: 69488 - DNA, 80 bp, synthetic construct
  source 1..80: mol_type = other DNA
cctgataaatggactgtacagcctatagtgttgccagaaaaagacagctggactgtcaatgacatacagaagctagtggg

SEQ ID NO: 69489 - DNA, 80 bp, synthetic construct
  source 1..80: mol_type = other DNA
aaaattgaattgggcaagtcagatttatgcagggattaaagtaaggcaattatgtaaactccttaggggagccaaagcac

SEQ ID NO: 69490 - DNA, 80 bp, synthetic construct
  source 1..80: mol_type = other DNA
taacagaagtaataccactaacagcagaagcagagctagaactggcagaaaacagggagattctaaaagaaccagtacat

SEQ ID NO: 69491 - DNA, 80 bp, synthetic construct
  source 1..80: mol_type = other DNA
ggagtgtattatgacccatcaaaagacttagtagcagaaatacagaagcagggacaaggccaatggacatatcaaattta

SEQ ID NO: 69492 - DNA, 80 bp, synthetic construct
  source 1..80: mol_type = other DNA
tcaagagccatttaaaaatctgaaaacaggaaaatatgcaagactgaggggtgcccacactaatgacgtaaaacagttaa

SEQ ID NO: 69493 - DNA, 80 bp, synthetic construct
  source 1..80: mol_type = other DNA
cagaggcagtgcaaaaaatagccactgaaagcatagtaatatggggaaagactcctaaatttaaactacccatacaaaaa

SEQ ID NO: 69494 - DNA, 80 bp, synthetic construct
  source 1..80: mol_type = other DNA
gaaacatgggaaacatggtggacagagtattggcaagccacctggattcctgagtgggaatttgtcaatacccctccctt

SEQ ID NO: 69495 - DNA, 80 bp, synthetic construct
  source 1..80: mol_type = other DNA
agtaaaattatggtaccagttagagaaagaacccatagtaggagcagaaactttctatgtagatggagcagctaataggg

SEQ ID NO: 69496 - DNA, 80 bp, synthetic construct
  source 1..80: mol_type = other DNA
gaacttaaatcattatataatacagtagcaaccctctattgtgtacatcaacggatagagataaaagacaccaaggaagc

SEQ ID NO: 69497 - DNA, 80 bp, synthetic construct
  source 1..80: mol_type = other DNA
agactaaatcaggaaaagcaggatatgttactgacagaggaagacaaaaggttgtctccctaactgacacaacaaatcag

SEQ ID NO: 69498 - DNA, 80 bp, synthetic construct
  source 1..80: mol_type = other DNA
aagactgagttacaagcaattcatctagctttgcaggattcgggattagaagtaaacatagtaacagactcacaatatgc

SEQ ID NO: 69499 - DNA, 80 bp, synthetic construct
  source 1..80: mol_type = other DNA
attaggaatcattcaagcacaaccagataagagtgaatcagagttagtcagtcaaataatagagcagttgataaaaaagg

SEQ ID NO: 69500 - DNA, 80 bp, synthetic construct
  source 1..80: mol_type = other DNA
aaaaggtctacctggcatgggtaccagcacacaaaggaattggaggaaatgaacaagttgataaattagtcagtgctgga

SEQ ID NO: 69501 - DNA, 80 bp, synthetic construct
  source 1..80: mol_type = other DNA
atcagggaagtactatttttagatggaatagataaggcacaagaagaacatgagaaatatcacggtaattggagagcaat

SEQ ID NO: 69502 - DNA, 80 bp, synthetic construct
  source 1..80: mol_type = other DNA
ggctagtgattttaacctgccacctgtggtagcaaaagaaatagtagccagctgtgataaatgtcaattaaaaggagaag

SEQ ID NO: 69503 - DNA, 80 bp, synthetic construct
  source 1..80: mol_type = other DNA
ccatgcacggacaagtagactgtagtccaggaatatggcaactagattgtacacatttagaaggaaaaattatcctagta

SEQ ID NO: 69504 - DNA, 80 bp, synthetic construct
  source 1..80: mol_type = other DNA
gcagttcatgtagccagtggatatatagaagcagaagttattccagcagaaacaggacaggaaacagcatactttgtctt

SEQ ID NO: 69505 - DNA, 80 bp, synthetic construct
  source 1..80: mol_type = other DNA
aaaattagcaggaagatggccagtaaaaataatacatacagacaatggcagcaatttcaccagtactgcggttaaggctg

SEQ ID NO: 69506 - DNA, 80 bp, synthetic construct
  source 1..80: mol_type = other DNA
cctgttggtgggcagggatcaagcaggaatttggcattccctacaatccccaaagtcaaggagtagtagaatctatgaat

SEQ ID NO: 69507 - DNA, 80 bp, synthetic construct
  source 1..80: mol_type = other DNA
tttagataaaatagaggaaatacaaaataagagcaagcaaaagacccaacaggcagcaactggcacaggaagcagcagca

SEQ ID NO: 69508 - DNA, 80 bp, synthetic construct
  source 1..80: mol_type = other DNA
aaacaattaaagcaaactataggacaggtaagagatcaagctgaacatcttaagacagcagtacaaatggcagtattcat

SEQ ID NO: 69509 - DNA, 80 bp, synthetic construct
  source 1..80: mol_type = other DNA
aaactaaagaattacaaaaacaaattataaaaattcaaaattttcgggtttattacagagacagcagagatccaatttgg

SEQ ID NO: 69510 - DNA, 80 bp, synthetic construct
  source 1..80: mol_type = other DNA
aaaggaccagcaaaactactctggaaaggtgaaggggcagtggtaatacaggacaataacgatataaaagtagtaccaag

SEQ ID NO: 69511 - DNA, 80 bp, synthetic construct
  source 1..80: mol_type = other DNA
agaacatggaacagtttagtaaaacaccatatatatatttcaaagaaagctaggggatgggtttataaacatcactatga

SEQ ID NO: 69512 - DNA, 80 bp, synthetic construct
  source 1..80: mol_type = other DNA
aagcaggaatccaagaataagttcagaagtacacatcccattaggggatgctaaattggtaataaaaacatattggggtc

SEQ ID NO: 69513 - DNA, 80 bp, synthetic construct
  source 1..80: mol_type = other DNA
tgcatacaggagaaagagactggcatttgggccagggagcctccatagaatggagaaaagagagatatagcacacaagta

SEQ ID NO: 69514 - DNA, 80 bp, synthetic construct
  source 1..80: mol_type = other DNA
gaccctaacctagcagaccaactaattcatctgtattattttgattgtttttcagaatctgctataagaaatgccatatt

SEQ ID NO: 69515 - DNA, 80 bp, synthetic construct
  source 1..80: mol_type = other DNA
aggacatagagttagccctagttgtgaatatcgagcaggacataacaaggtaggatctctacagtacttggcactagcag

SEQ ID NO: 69516 - DNA, 80 bp, synthetic construct
  source 1..80: mol_type = other DNA
aggtcagtcaaaattaccccatagtgcaaaatgcacaagggcaaatgacacaccagtccatgtcacctaggactttgaat

SEQ ID NO: 69517 - DNA, 80 bp, synthetic construct
  source 1..80: mol_type = other DNA
cattaagaacaccaaaaaagataaagccacctttgcctagtgttacgaaactgacagaggatagatggaacaagccccag

SEQ ID NO: 69518 - DNA, 80 bp, synthetic construct
  source 1..80: mol_type = other DNA
aggaccaaggaccacagagggagccatacaatgagtggacactagagcttttagaggagcttaagagtgaagctgttaga

SEQ ID NO: 69519 - DNA, 80 bp, synthetic construct
  source 1..80: mol_type = other DNA
cactttcctagggtgtggcttcatagcttaggacaatacatctatgaaacttatggagatacttgggcaggagtggaagc

SEQ ID NO: 69520 - DNA, 80 bp, synthetic construct
  source 1..80: mol_type = other DNA
cataataagaattctgcaacaactgctgtttattcatttcaggattgggtgtcaacatagcagaataggcattattcaac

SEQ ID NO: 69521 - DNA, 80 bp, synthetic construct
  source 1..80: mol_type = other DNA
ggaggagagcaagaaatggagccagtagatcctagactagagccctggaagcatccaggaagccagcctaaaactgcttg

SEQ ID NO: 69522 - DNA, 80 bp, synthetic construct
  source 1..80: mol_type = other DNA
taccaattgctattgtaaaaagtgttgtcttcattgccaagtttgtttcatgaaaaaaggcttaggcatctcctatggca

SEQ ID NO: 69523 - DNA, 80 bp, synthetic construct
  source 1..80: mol_type = other DNA
ggaagaagcggagacagcgacgaagagctcctcaagacaatcagactgatcaagtttctctaccaaagcagtaagtagta

SEQ ID NO: 69524 - DNA, 80 bp, synthetic construct
  source 1..80: mol_type = other DNA
catgtaatgcaatccttagcaatagcagcaatagtagcattagtagtagtaggaataatagcaatagttgtggggtccat

SEQ ID NO: 69525 - DNA, 80 bp, synthetic construct
  source 1..80: mol_type = other DNA
agtattcatagaatataggaaaatattaagacaaagaaaaatagacaggttaattgatagaataagagaaagagcagaag

SEQ ID NO: 69526 - DNA, 80 bp, synthetic construct
  source 1..80: mol_type = other DNA
acagtggcaatgagagtgaaggagatcaggaagcacttatggagatggggcaccttgttccttgggatgctgatgatctg

SEQ ID NO: 69527 - DNA, 80 bp, synthetic construct
  source 1..80: mol_type = other DNA
gcatgggtgaaagtaatagaagaaaaggctttcagcccagaagtaatacccatgttttcagcattgtcagagggagccac

SEQ ID NO: 69528 - DNA, 80 bp, synthetic construct
  source 1..80: mol_type = other DNA
tagtgctacagaaaatttatgggtcacagtttattatggggtacctgtgtggaaagaagcaaccaccactctattttgtg

SEQ ID NO: 69529 - DNA, 80 bp, synthetic construct
  source 1..80: mol_type = other DNA
catcagatgctaaagcatatagtaaggaggtacataatgtttgggccacatatgcctgtgtacccacggaccccagccca

SEQ ID NO: 69530 - DNA, 80 bp, synthetic construct
  source 1..80: mol_type = other DNA
caagaaataccattgaaaaatgtgacagaaaattttaacatggggaaaaataacatggtagaacagatgcatgaggatat

SEQ ID NO: 69531 - DNA, 80 bp, synthetic construct
  source 1..80: mol_type = other DNA
aatcagtttatgggatcaaagcctaaagccatgtgtaaagttaaccccactctgtgttactttaaattgcactgatttga

SEQ ID NO: 69532 - DNA, 80 bp, synthetic construct
  source 1..80: mol_type = other DNA
agaaggaggttactagtaccaatactagtagcataaaaatgatggaaatgaaaaactgctctttcaacatcaccacagac

SEQ ID NO: 69533 - DNA, 80 bp, synthetic construct
  source 1..80: mol_type = other DNA
ctgagagataaagtgaaaaaagaatatgcactcttttataaacttgatgtagtacaaatagataatgatagctataggtt

SEQ ID NO: 69534 - DNA, 80 bp, synthetic construct
  source 1..80: mol_type = other DNA
ggcagctatgcaaatgttgaaagataccatcaatgaggaagctgctgaatgggataggttacatccagcacaggcagggc

SEQ ID NO: 69535 - DNA, 80 bp, synthetic construct
  source 1..80: mol_type = other DNA
gataagttgtaatacctcagtcgttacacaagcctgtccaaagatatcctttgagccaattcccatacattattgtgccc

SEQ ID NO: 69536 - DNA, 80 bp, synthetic construct
  source 1..80: mol_type = other DNA
cagctggttttgcgattctaaagtgtaacgataaaaagttcaacggaacagggccatgtacaaatgtcagtacagtacaa

SEQ ID NO: 69537 - DNA, 80 bp, synthetic construct
  source 1..80: mol_type = other DNA
tgtacacatggaattaagccagtagtatcaactcaactgctgttaaatggtagtctagcagaagaagaggtagtaattag

SEQ ID NO: 69538 - DNA, 80 bp, synthetic construct
  source 1..80: mol_type = other DNA
atctgtcaatttcacggacaatactaaaaccataatagtacagctgaaagaacctgtggaaattaattgtacaagaccca

SEQ ID NO: 69539 - DNA, 80 bp, synthetic construct
  source 1..80: mol_type = other DNA
cccacaagatttaaacatgatgctgaacatagtggggggacaccaggcagctatgcaaatgttgaaagataccatcaatg

SEQ ID NO: 69540 - DNA, 80 bp, synthetic construct
  source 1..80: mol_type = other DNA
acaacaatacaagaaaaggtattcatataggaccagggagagcattttatgcaacaggagacataacaggagatataaga

SEQ ID NO: 69541 - DNA, 80 bp, synthetic construct
  source 1..80: mol_type = other DNA
caagcacattgtaacattagtataacaaaatggaataacacattaaaacagatagttatcaaattaagaaaacaatttgg

SEQ ID NO: 69542 - DNA, 80 bp, synthetic construct
  source 1..80: mol_type = other DNA
gaataaaacaatagtctttaatcaatcctcaggaggggacccagaaattgtaatgcacagttttaattgtggaggggaat

SEQ ID NO: 69543 - DNA, 80 bp, synthetic construct
  source 1..80: mol_type = other DNA
ttttctactgtaatacaacaaaactgtttaatagcacttggaatggtactgaagagttaaataacactgaaggagatata

SEQ ID NO: 69544 - DNA, 80 bp, synthetic construct
  source 1..80: mol_type = other DNA
gtcacactcccatgcagaataaaacaaattataaacatgtggcaggaagtaggaaaagcaaggtatgcccctcccatcgc

SEQ ID NO: 69545 - DNA, 80 bp, synthetic construct
  source 1..80: mol_type = other DNA
aggacaaattagatgttcatcaaatattacaggactgctattaacaagagatggtggtaaccagagcaatgttaccgaga

SEQ ID NO: 69546 - DNA, 80 bp, synthetic construct
  source 1..80: mol_type = other DNA
tttttagaactggaggaggagatatgagggacaattggagaagtgaattatataaatataaagtagttaaaattgaacca

SEQ ID NO: 69547 - DNA, 80 bp, synthetic construct
  source 1..80: mol_type = other DNA
ttaggagtagcacccaccagggcaaagagaagagtggtgcagagagagaaaagagcagtgggaataggagctgtgttcct

SEQ ID NO: 69548 - DNA, 80 bp, synthetic construct
  source 1..80: mol_type = other DNA
tgggttcttgggagcagcaggaagcactatgggcgcggcgtcaataacgctgacggtacaggccagacaattattgtctg

SEQ ID NO: 69549 - DNA, 80 bp, synthetic construct
  source 1..80: mol_type = other DNA
gtatagtgcaacagcagaataatctgctgagggctattgaggcgcaacaacatctgttgcaactcacagtctggggcatc

SEQ ID NO: 69550 - DNA, 80 bp, synthetic construct
  source 1..80: mol_type = other DNA
aggaagctgctgaatgggataggttacatccagcacaggcagggccttttccaccagggcagatgagagaaccaagggga

SEQ ID NO: 69551 - DNA, 80 bp, synthetic construct
  source 1..80: mol_type = other DNA
aagcagctccaggcgagagtcctggctgtggagagatacctaaaggatcaacagctcctggggatttggggttgctctgg

SEQ ID NO: 69552 - DNA, 80 bp, synthetic construct
  source 1..80: mol_type = other DNA
aaaactcatttgcaccactgctgtgccttggaatactagttggagtaataaacctctagatgagatttgaaataacatga

SEQ ID NO: 69553 - DNA, 80 bp, synthetic construct
  source 1..80: mol_type = other DNA
cctggatggagtgggaaagagaaattaataattacacaggtttaatatacaatttaatagaagaatcgcagaaccaacaa

SEQ ID NO: 69554 - DNA, 80 bp, synthetic construct
  source 1..80: mol_type = other DNA
gaaaagaatgaacaagaaatattggcattagataaatgggcaagtttgtggaattggtttgacatatcaaaatggctgtg

SEQ ID NO: 69555 - DNA, 80 bp, synthetic construct
  source 1..80: mol_type = other DNA
gtatataaaaatattcataatgatagtaggaggcttggtaggtttaagaataatttttgctgtactttctatagtgaata

SEQ ID NO: 69556 - DNA, 80 bp, synthetic construct
  source 1..80: mol_type = other DNA
gaggtaggcagggatattcaccattatcatttcagacccgcctcccagcccagaggggacccgacaggcccgaaggaata

SEQ ID NO: 69557 - DNA, 80 bp, synthetic construct
  source 1..80: mol_type = other DNA
gaagaagaagatggagagagagacagagacacatccattcgattagtgaacagattcttagcacttatctgggacgacct

SEQ ID NO: 69558 - DNA, 80 bp, synthetic construct
  source 1..80: mol_type = other DNA
gaggagcctgtgcttcttcatctaccaccacttgagagacttactcttgattgcagcgaggattgtggaacttctgggac

SEQ ID NO: 69559 - DNA, 80 bp, synthetic construct
  source 1..80: mol_type = other DNA
gcagggggtgggaagccctcaaatattggtggaatctcctacagtattggattcaggaactaaagagtagtgctattaat

SEQ ID NO: 69560 - DNA, 80 bp, synthetic construct
  source 1..80: mol_type = other DNA
tggacagatagggttatagaaataggacaaagattttgtagagctatgcgtaacatacctaggagaatcagacagggcgc

SEQ ID NO: 69561 - DNA, 80 bp, synthetic construct
  source 1..80: mol_type = other DNA
ctgataggtaccatagcaatagcagtagctgggtggacagatagggttatagaaataggacaaagattttgtagagctat

SEQ ID NO: 69562 - DNA, 80 bp, synthetic construct
  source 1..80: mol_type = other DNA
agtgacatagcaggaagtagtagtacccttcaagaacaaataggatggatgacaagcaacccacctatcccagtgggaga

SEQ ID NO: 69563 - DNA, 80 bp, synthetic construct
  source 1..80: mol_type = other DNA
gcgtaacatacctaggagaatcagacagggcgcagaaaaggctttgcaataacatggggggcaaatggtcaaaaagtagc

SEQ ID NO: 69564 - DNA, 80 bp, synthetic construct
  source 1..80: mol_type = other DNA
atagtgggatggcctcaggttagggaaagaataagacgagctcctgctccagcggcaagaggagtaggaccagtatctca

SEQ ID NO: 69565 - DNA, 80 bp, synthetic construct
  source 1..80: mol_type = other DNA
agatttggataagtatggagcagtcacaagcagtaatacagcagctaataatgctgattgcgcctggctggaggcgcaag

SEQ ID NO: 69566 - DNA, 80 bp, synthetic construct
  source 1..80: mol_type = other DNA
aggaagaggaggtaggctttccagtcaggccgcaggtacctttgagaccgatgacatataagggagctttcgatctcagc

SEQ ID NO: 69567 - DNA, 80 bp, synthetic construct
  source 1..80: mol_type = other DNA
aaagacaagaaatccttgatctgtgggtctatcacacacaaggctacttccctgattggcagccagggattagattccca

SEQ ID NO: 69568 - DNA, 80 bp, synthetic construct
  source 1..80: mol_type = other DNA
cactttttaaaagaaaaggggggactggatgggttaatttactccaagaaaagacaagaaatccttgatctgtgggtcta

SEQ ID NO: 69569 - DNA, 80 bp, synthetic construct
  source 1..80: mol_type = other DNA
tcacacacaaggctacttccctgattggcagccagggattagattcccactaacatttgggtggtgctacaagctagtac

SEQ ID NO: 69570 - DNA, 80 bp, synthetic construct
  source 1..80: mol_type = other DNA
cagtcgacccagctgaagtagaagaggccacagagggagagaacaacagcctattacaccctatatgccaacacggaatg

SEQ ID NO: 69571 - DNA, 80 bp, synthetic construct
  source 1..80: mol_type = other DNA
gatgatgaggaaaaagaagtgttaatgtggaagtttgacagtcgcctggctctaacacacagagcccgagagctgcatcc

SEQ ID NO: 69572 - DNA, 80 bp, synthetic construct
  source 1..80: mol_type = other DNA
ggagttctacaaagactgctgacacagactgctgacatgaagttgctgacagggactttccgcggggactttccagggga

SEQ ID NO: 69573 - DNA, 80 bp, synthetic construct
  source 1..80: mol_type = other DNA
catctataaaagatggataatcctaggattaaataagatagtaagaatgtatagccctgttagcattttagacataagac

SEQ ID NO: 69574 - DNA, 80 bp, synthetic construct
  source 1..80: mol_type = other DNA
aagggccaaaagaacccttcagagactatgtagataggttctttaaaactcttagagctgagcaagctacacaggatgta

SEQ ID NO: 69575 - DNA, 80 bp, synthetic construct
  source 1..80: mol_type = other DNA
agcaaaagcaggggatacaaaatgaacactcgaattctaatactcacccttgcggcagtcatccacacaaatgcagacaa

SEQ ID NO: 69576 - DNA, 80 bp, synthetic construct
  source 1..80: mol_type = other DNA
agagaaagagaggtttattcggcgccatagctgggttcatcgaaaacggatgggaaggtttggttgatgggtggtatggt

SEQ ID NO: 69577 - DNA, 80 bp, synthetic construct
  source 1..80: mol_type = other DNA
tcctacaatgctgaactcctagtggcaatggagaaccaacacaccatcgatttggctgattcggagatgaacaagttata

SEQ ID NO: 69578 - DNA, 80 bp, synthetic construct
  source 1..80: mol_type = other DNA
tgaaagagtgagacgacaactgagagagaatgctgaagaggatggcactggttgttttgagattttccacaaatgtgatg

SEQ ID NO: 69579 - DNA, 80 bp, synthetic construct
  source 1..80: mol_type = other DNA
atggctgtatggccagtataaggaataatacctatgatcatagcacatacagagaagaagcaatgcagaatagagtgaaa

SEQ ID NO: 69580 - DNA, 80 bp, synthetic construct
  source 1..80: mol_type = other DNA
tagcttcggggcatcatgcttcctacttcttgccattgcaatgggccttgttttcatatgtgtgaaaaatggaaacatgc

SEQ ID NO: 69581 - DNA, 80 bp, synthetic construct
  source 1..80: mol_type = other DNA
ttgttttcatatgtgtgaaaaatggaaacatgcggtgcaccatttgtatataagtttgaaaaaacacccttgtttctact

SEQ ID NO: 69582 - DNA, 80 bp, synthetic construct
  source 1..80: mol_type = other DNA
acattcctaggatttgtactaaggggaagaaagcaatcgaccttggtcagtgtgggttgcttggaattattacaggacca

SEQ ID NO: 69583 - DNA, 80 bp, synthetic construct
  source 1..80: mol_type = other DNA
cctcaatgtgatcaatttctcgagttcacagccgatttgataatcgagaggcgagaggggaatgatgtttgttatcctgg

SEQ ID NO: 69584 - DNA, 80 bp, synthetic construct
  source 1..80: mol_type = other DNA
gaagtttgtaaatgaagaagctctgcgccaaatcctcaggggatcaggagggatcaacaaggaaacaacgggattcacat

SEQ ID NO: 69585 - DNA, 80 bp, synthetic construct
  source 1..80: mol_type = other DNA
atggagaatccaccattctggatcagctgctgagcagaccaaactatatgggagtgggagtaaactaataacagttggga

SEQ ID NO: 69586 - DNA, 80 bp, synthetic construct
  source 1..80: mol_type = other DNA
gagcctttgtggctccagaccgtgtgagcttctttaaagggaaatccacagggattcaaagtgaagtgccagttgacgcc

SEQ ID NO: 69587 - DNA, 80 bp, synthetic construct
  source 1..80: mol_type = other DNA
aatctgccttggacatcatgccgtatcaaatggtaccaaagtgaacacactcacagagaggggtgtagaagttgtcaatg

SEQ ID NO: 69588 - DNA, 80 bp, synthetic construct
  source 1..80: mol_type = other DNA
aattgtgaaggggaatgctatcacagtggaggtacaataacaagcaatttacctttccaaaatgttaatagcagagcagt

SEQ ID NO: 69589 - DNA, 80 bp, synthetic construct
  source 1..80: mol_type = other DNA
gggcaaatgtccaagatatgtgaaacaaaaaagcctgctgttggcaacaggaatgaagaatgtccctgaaatcccgagaa

SEQ ID NO: 69590 - DNA, 80 bp, synthetic construct
  source 1..80: mol_type = other DNA
gacagccactcctacaaatgcagacaaaatctgccttgggcaccacgctgtatcaaatggcaccaagataaacaccctca

SEQ ID NO: 69591 - DNA, 80 bp, synthetic construct
  source 1..80: mol_type = other DNA
gctacggaaacggtggagcggacaaacatccccaaaatttgctctaaagggaaaacgactgttgatcttggtcaatgcgg

SEQ ID NO: 69592 - DNA, 80 bp, synthetic construct
  source 1..80: mol_type = other DNA
cttgctggggaccattacgggaccacctcaatgtagccagtttctagagttttcagctgatttaatagttgaaagacggg

SEQ ID NO: 69593 - DNA, 80 bp, synthetic construct
  source 1..80: mol_type = other DNA
ggaggaaatgatatttgttacccagggaaatttgttaatggagaagcattacgagaaattctcagagggtcaggtgggat

SEQ ID NO: 69594 - DNA, 80 bp, synthetic construct
  source 1..80: mol_type = other DNA
ccaaaatatgtaaagcagaaaagtctgctattagcaacaggaatgaaaaatgttcccgaattttccaaaaaaagaagaaa

SEQ ID NO: 69595 - DNA, 80 bp, synthetic construct
  source 1..80: mol_type = other DNA
agcaaaagcaggggatacaaaatgaacactcaaatcctgatactcgctcttgtggcgatcatcccaacaaatgcagacaa

SEQ ID NO: 69596 - DNA, 80 bp, synthetic construct
  source 1..80: mol_type = other DNA
tgcactatttgtatataagtttggaaaaaacacccttgtttctactgatcacgcgtagaaaaaacacccttgtttctact

SEQ ID NO: 69597 - DNA, 80 bp, synthetic construct
  source 1..80: mol_type = other DNA
tgggaacaatcactgggccaccccaatgtgaccaattcctagaattttcagccgatttaatcattgaaaggcgagaaggg

SEQ ID NO: 69598 - DNA, 80 bp, synthetic construct
  source 1..80: mol_type = other DNA
aatctggggaatccatcattctggatcaactgcagagcagaccaagttatatgggagtggagacaaactaataacagtcg

SEQ ID NO: 69599 - DNA, 80 bp, synthetic construct
  source 1..80: mol_type = other DNA
ggctttcatagctccagaccgtgcaagtttcctgagagggaagtctatgggaattcagagtggagtacaggttgacgcca

SEQ ID NO: 69600 - DNA, 80 bp, synthetic construct
  source 1..80: mol_type = other DNA
gagattgctatcatagtggagggacaataataagtaatttgccttttcagaacatcaatagcagagcagtagggaaatgc

SEQ ID NO: 69601 - DNA, 80 bp, synthetic construct
  source 1..80: mol_type = other DNA
caggtttgggaaacctatgggaaacagacagtctagtgctcagttgaattcgcatttaactcacatcaactctcaaaatt

SEQ ID NO: 69602 - DNA, 80 bp, synthetic construct
  source 1..80: mol_type = other DNA
catgacaacgatcatttacataatcaaatactattgacattaactgactggcatttcctatagactgtggttcagacatt

SEQ ID NO: 69603 - DNA, 80 bp, synthetic construct
  source 1..80: mol_type = other DNA
actgttggatatgatcgtgttcagtgctagtgcagtcatgagtacatcatactatcagatttatgataccgggcatacta

SEQ ID NO: 69604 - DNA, 80 bp, synthetic construct
  source 1..80: mol_type = other DNA
taggtatatacacacaacatgatgagcactgtacacggccatacccagctatggtgccacataaagagaactggatgaca

SEQ ID NO: 69605 - DNA, 80 bp, synthetic construct
  source 1..80: mol_type = other DNA
gaaacagattgctgggcaaaaaaaagcctagatttaaactgtttaggaccaatgctaaatataggctcttgcacaaataa

SEQ ID NO: 69606 - DNA, 80 bp, synthetic construct
  source 1..80: mol_type = other DNA
tcgattatttctcagaccatagagaaggccaggacacaggcgacgattttggcgagtattgtatatctcgcagttgcaat

SEQ ID NO: 69607 - DNA, 80 bp, synthetic construct
  source 1..80: mol_type = other DNA
cagtctaaagtaagtcaattagatgccgaccaagcattacttttaggcagttctattgatagggctattaaggcatctag

SEQ ID NO: 69608 - DNA, 80 bp, synthetic construct
  source 1..80: mol_type = other DNA
agcccaaaaaacttatcctgcaatgcacttattggaaacacatttcttaatgaaaaattgtgattatttcacgagtttca

SEQ ID NO: 69609 - DNA, 80 bp, synthetic construct
  source 1..80: mol_type = other DNA
atactatcggagtctatgtaatagggtttacaattcctatcatcctaaaggctctgtacatgttatcaacacgtggaaga

SEQ ID NO: 69610 - DNA, 80 bp, synthetic construct
  source 1..80: mol_type = other DNA
aaatcatgtggccgacattgatacgttaattgactatgctgcctctggtgaccctacatcacctgatgacatcgaatccc

SEQ ID NO: 69611 - DNA, 80 bp, synthetic construct
  source 1..80: mol_type = other DNA
tgtaacattagtggcacaaaatggaagaatactttagaaaagatagttgcaaaaataagagaaattaaacaatttaagaa

SEQ ID NO: 69612 - DNA, 80 bp, synthetic construct
  source 1..80: mol_type = other DNA
tgttagtgtgtgctgttctctgtccacagctgtggagtctggaagggacccatgttccacacaacgagactaaacacaat

SEQ ID NO: 69613 - DNA, 80 bp, synthetic construct
  source 1..80: mol_type = other DNA
gacaataagactacctcgtatctaccatgaaggaacatttataccaggaacctataaaatagtaatagacaaaagagata

SEQ ID NO: 69614 - DNA, 80 bp, synthetic construct
  source 1..80: mol_type = other DNA
ggaaccggcatcacagcagcacctggagagagtcaaggccccatgtcgcctgcgagcacagcagtgcccctcacaccgga

SEQ ID NO: 69615 - DNA, 80 bp, synthetic construct
  source 1..80: mol_type = other DNA
tggcttttctcttttggtttagtttcggctatgtaataacatgtatattttgtaaaatcattttttacttgttgatagtc

SEQ ID NO: 69616 - DNA, 80 bp, synthetic construct
  source 1..80: mol_type = other DNA
acccccaaacaccaaacctgcagcatcagccagcgaactggaaagctcgggggaagggcacacctcccttttagccacca

SEQ ID NO: 69617 - DNA, 80 bp, synthetic construct
  source 1..80: mol_type = other DNA
cacaaggtctgacttcgccggaggccacgccggagctcccaacaacaaccgacacaggcgtatcaagcacaagcgtcgtc

SEQ ID NO: 69618 - DNA, 80 bp, synthetic construct
  source 1..80: mol_type = other DNA
gacattggcacacagatggccaaagacactcccacatcgacagcccacacaagcctgcccagcaatcccagtgcaccatc

SEQ ID NO: 69619 - DNA, 80 bp, synthetic construct
  source 1..80: mol_type = other DNA
aggaccagaggcttattcaagtacagatatctcaaggacgacgaagagtctggttacagaagaatcattgaaagattaaa

SEQ ID NO: 69620 - DNA, 80 bp, synthetic construct
  source 1..80: mol_type = other DNA
gttaaatcagcagaaagggcctcaaaaggatgacggcagtatgttgactaatactattgcttacgctggtctcattaacc

SEQ ID NO: 69621 - DNA, 80 bp, synthetic construct
  source 1..80: mol_type = other DNA
gtgcttttgctacactgttttcacactgtgtaacatttaatctatttcaccacattcgtgagcaagctttgtgatgtttg

SEQ ID NO: 69622 - DNA, 80 bp, synthetic construct
  source 1..80: mol_type = other DNA
tcaacaccaacagacccaggaaaggcgggtgcagagaccggcagcccaagaccagccatcagcagaaaaccaaccctctc

SEQ ID NO: 69623 - DNA, 80 bp, synthetic construct
  source 1..80: mol_type = other DNA
accaacagctgaagctcccactgaaatcaacaactctagcacccccaaacaacccgagccctcaatacaaccagcaaccc

SEQ ID NO: 69624 - DNA, 80 bp, synthetic construct
  source 1..80: mol_type = other DNA
tattagtagagcagattggaataatactttacaaaggatagctaataaattaagagcacagaatgtaacttccaagaatg

SEQ ID NO: 69625 - DNA, 80 bp, synthetic construct
  source 1..80: mol_type = other DNA
agagagacatccggagtactaccaagactgagactgctacacagagagtgctgactgctgacacagagagtgctgacaca

SEQ ID NO: 69626 - DNA, 80 bp, synthetic construct
  source 1..80: mol_type = other DNA
ccgattgagactgcatcggacttgaagctagaaagctcatgtaattttgacctccatacagcctcaatagcccagaagag

SEQ ID NO: 69627 - DNA, 80 bp, synthetic construct
  source 1..80: mol_type = other DNA
ccaattgaggcagcatcagatttaaaactggaaagctcatgcaactttgatctgcacacaactacaatgactcaaaagag

SEQ ID NO: 69628 - DNA, 80 bp, synthetic construct
  source 1..80: mol_type = other DNA
ccaattgagacagcatcagacttgaagcttgaaagttcatgcaattttgacctgcatactacatccatgactcaaaaaag

SEQ ID NO: 69629 - DNA, 80 bp, synthetic construct
  source 1..80: mol_type = other DNA
gaatctcataagcaaagttgcataaatggtcaatgtccatattgtatgactatgactgaggcaacagaaagtgcgccaca

SEQ ID NO: 69630 - DNA, 80 bp, synthetic construct
  source 1..80: mol_type = other DNA
ccgtactctaggagtctttagatacaagagcaggtgctatgtcggcttagtttggtgcgtgttattgacatgtgagctca

SEQ ID NO: 69631 - DNA, 80 bp, synthetic construct
  source 1..80: mol_type = other DNA
gaatcccataaacaaagctgcatcaatgggcaatgcccttactgtatgaccatgacagaggcaacagaaagtgccttaca

SEQ ID NO: 69632 - DNA, 80 bp, synthetic construct
  source 1..80: mol_type = other DNA
tcgtacattaggggtatttagatacaagagtaggtgctatgttggacttgtgtggtgtgtgctcttaacatgtgagctta

SEQ ID NO: 69633 - DNA, 80 bp, synthetic construct
  source 1..80: mol_type = other DNA
gataacctcgtttcaggtagattgttatctatggcacataagaaagctactcagtatgagagacatgtgtgatgctccct

SEQ ID NO: 69634 - DNA, 80 bp, synthetic construct
  source 1..80: mol_type = other DNA
atgtagaaatatactgacaaagactgaaaatagctttgaacagataacatttttgcaagcattgcaactcttacttgaag

SEQ ID NO: 69635 - DNA, 80 bp, synthetic construct
  source 1..80: mol_type = other DNA
tggaacaacaagcaccctgcaagagcaaattcactggactaccagggctaaccagcctatcccagttggggatatctata

SEQ ID NO: 69636 - DNA, 80 bp, synthetic construct
  source 1..80: mol_type = other DNA
cagccccaccaatggaagagatgatgaaggggcaagaggaggatcagaatcagaagggggagcagaacgagctctatccg

SEQ ID NO: 69637 - DNA, 80 bp, synthetic construct
  source 1..80: mol_type = other DNA
tttgcctccctcagatccctctttgggacagaccagtagtcacagcaagggttgggggccagctatgtgaggttttactg

SEQ ID NO: 69638 - DNA, 80 bp, synthetic construct
  source 1..80: mol_type = other DNA
ttagctttacaggattctaaagaaaaagtaaacatagtaacagattcacaatatgtactgggcatcatatcttcccaacc

SEQ ID NO: 69639 - DNA, 80 bp, synthetic construct
  source 1..80: mol_type = other DNA
ggaacaaattaggttaaagccaggatctaaaaagaaatataagctaaaacatttaatatgggcaagcagggggctggaca

SEQ ID NO: 69640 - DNA, 80 bp, synthetic construct
  source 1..80: mol_type = other DNA
catcattatgaatctataaatccaagggtcagttcaagggtatatattccagtaggtccagcttgtataatggtgaccac

SEQ ID NO: 69641 - DNA, 80 bp, synthetic construct
  source 1..80: mol_type = other DNA
gatttgcatgtaatcctgagctactagaaactgcagaaggtaatgaacaactgttacaacagttagagccagctctcaag

SEQ ID NO: 69642 - DNA, 80 bp, synthetic construct
  source 1..80: mol_type = other DNA
taacacagattgaccctgaaacagcagacaagctaatacatctgcattactttacctgttttacagagtcagcaattagg

SEQ ID NO: 69643 - DNA, 80 bp, synthetic construct
  source 1..80: mol_type = other DNA
agagccactctagggcagagagtgctaccccagtgtgaataccctgaaggacatagtcaggtagggacactacagctcct

SEQ ID NO: 69644 - DNA, 80 bp, synthetic construct
  source 1..80: mol_type = other DNA
agccttaagagcagtagtaaaagcaaagagaaataggcctcctctacccagtgtccagaagttaacagaggatagatgga

SEQ ID NO: 69645 - DNA, 80 bp, synthetic construct
  source 1..80: mol_type = other DNA
acaggcacctgaggatcaaggaccagccagggagccagttaatgcatgggcactagagctcctagaagagctaaaggcag

SEQ ID NO: 69646 - DNA, 80 bp, synthetic construct
  source 1..80: mol_type = other DNA
aagcagtaagacattttcctagaaactggctgcaagccttgggacaatacatttatgagacttatggagacacttgggaa

SEQ ID NO: 69647 - DNA, 80 bp, synthetic construct
  source 1..80: mol_type = other DNA
ggagtaatagcaattacaagaatcttacaacaaataatatttacccattatagaattggatgccaacatagtagaatagg

SEQ ID NO: 69648 - DNA, 80 bp, synthetic construct
  source 1..80: mol_type = other DNA
aattattccatctaacgcaagaagaagaggaagaagagatggatcccatagatcctgaaatgcccccttggcatcaccct

SEQ ID NO: 69649 - DNA, 80 bp, synthetic construct
  source 1..80: mol_type = other DNA
ggaagccaaccccagaccccttgtaacgcttgctattgcaaacaatgctgctatcattgctatctttgtttcacaaagaa

SEQ ID NO: 69650 - DNA, 80 bp, synthetic construct
  source 1..80: mol_type = other DNA
acagggtcagaaagcctgtagtcactctggaacgctatagcagtgctctggtgtgttcataacagatataaagttgaaga

SEQ ID NO: 69651 - DNA, 80 bp, synthetic construct
  source 1..80: mol_type = other DNA
taccagagcagtaagtaacgctgatgcatcatcagggcctgctagtattaatagtcattattgctttgcttcttataaat

SEQ ID NO: 69652 - DNA, 80 bp, synthetic construct
  source 1..80: mol_type = other DNA
gtacttctatggatgtttaatcttagagcatatttagaacaaaagaaacaagatagaacagcaagagaaatacttgaaag

SEQ ID NO: 69653 - DNA, 80 bp, synthetic construct
  source 1..80: mol_type = other DNA
aataagaagaataagagaagttgaggatgacagcgattatgaaagcaatggggaagaggaacaggaagttagggatctgg

SEQ ID NO: 69654 - DNA, 80 bp, synthetic construct
  source 1..80: mol_type = other DNA
tgcttgattttggctttgataatcccatgtttgagctgtaaccaactatatgccacagtctattctggggtacctgtatg

SEQ ID NO: 69655 - DNA, 80 bp, synthetic construct
  source 1..80: mol_type = other DNA
ggaaaattatatggtagaccaaatgcaggaagacattatagatttgtgggaccagagtttaaaaccttgtgttcaaatga

SEQ ID NO: 69656 - DNA, 80 bp, synthetic construct
  source 1..80: mol_type = other DNA
ctttcttgtgtgtacaaatgaattgtacagatatcaaaaatagtattactaccacaaacagtcccttaaactcaaacaat

SEQ ID NO: 69657 - DNA, 80 bp, synthetic construct
  source 1..80: mol_type = other DNA
acaaaggaggtgaaacagtgtgactttaatgtaactacagtgctcaaagacaaacaggagaaaaaacaggctctattcta

SEQ ID NO: 69658 - DNA, 80 bp, synthetic construct
  source 1..80: mol_type = other DNA
tacacagcaggcagtaagaaaattaaaggaggaaatgaagaaaagaaagcctgtcagtagtactaaggaaaacacaagct

SEQ ID NO: 69659 - DNA, 80 bp, synthetic construct
  source 1..80: mol_type = other DNA
acagtaagtacccaactaatactaaatggggcactctctaaggggaatataacaatcatggggaaggatatttcagacag

SEQ ID NO: 69660 - DNA, 80 bp, synthetic construct
  source 1..80: mol_type = other DNA
tggggagaacatcctgataaccctgaatactgatatgacaatagcatgtgagagaccaggaagtcagacaatacgaaaga

SEQ ID NO: 69661 - DNA, 80 bp, synthetic construct
  source 1..80: mol_type = other DNA
taatggcaggtccaatggcttggtacagcatggcccttagtaatacaaagggggatacaagggcagcttattgtaattat

SEQ ID NO: 69662 - DNA, 80 bp, synthetic construct
  source 1..80: mol_type = other DNA
agtgccactgactggaacaaagccttaaaaaacataactgaaagatatttagaacttgtagaatataatcaaactgatgt

SEQ ID NO: 69663 - DNA, 80 bp, synthetic construct
  source 1..80: mol_type = other DNA
taccataaaattcggtaatcacagtggtggagatgcagaagtaacaaatttcttttttaactgtcatggagaattctttt

SEQ ID NO: 69664 - DNA, 80 bp, synthetic construct
  source 1..80: mol_type = other DNA
attgtaacacaaatcagctgtttaatcataccttttcctgcaagaagaatatgacctataacaagatcaattgtactaat

SEQ ID NO: 69665 - DNA, 80 bp, synthetic construct
  source 1..80: mol_type = other DNA
attagcaataatagcaatggcactcaggcaataccttgcaggttgagacaagtagtaagggactggatgaggggaggatc

SEQ ID NO: 69666 - DNA, 80 bp, synthetic construct
  source 1..80: mol_type = other DNA
gggactttatgcacctcccatcccaggaaacctagtatgcaggtcaaacataactggaatgattctacaattggacacgc

SEQ ID NO: 69667 - DNA, 80 bp, synthetic construct
  source 1..80: mol_type = other DNA
catggaataaaacacatcctaacagcaccacccttagaccaggagggggagatatgaaagatatatggagaactcaattg

SEQ ID NO: 69668 - DNA, 80 bp, synthetic construct
  source 1..80: mol_type = other DNA
ttcaaatataaagtagtaagagtaaaaccttttagtgtagcaccaacaaaaattgcaaggccaactataggaactagcac

SEQ ID NO: 69669 - DNA, 80 bp, synthetic construct
  source 1..80: mol_type = other DNA
tcatagagagaaaagagcagcaggtttggcaatgctattcttggggattctaagtgcagcaggaagcactatgggcgcag

SEQ ID NO: 69670 - DNA, 80 bp, synthetic construct
  source 1..80: mol_type = other DNA
cggcaacagcgctgacggtacggacccagcatctgataaagggtatagtgcaacagcaggataacctgctaagagcaata

SEQ ID NO: 69671 - DNA, 80 bp, synthetic construct
  source 1..80: mol_type = other DNA
tatacagaatcagcaactccataacctgtggggctgcaagaatagactaatctgctacacatcagtaaagtggaataaaa

SEQ ID NO: 69672 - DNA, 80 bp, synthetic construct
  source 1..80: mol_type = other DNA
catggggaggagataatgaatcaatttgggatgagttaacatggcagcagtgggatcaacagataaacaacgtaagctcc

SEQ ID NO: 69673 - DNA, 80 bp, synthetic construct
  source 1..80: mol_type = other DNA
ttcatatatgaaaaaatacaagaggcacaagaacaacaggagaaaaatgagaaagaattgctggagttagatgaatgggc

SEQ ID NO: 69674 - DNA, 80 bp, synthetic construct
  source 1..80: mol_type = other DNA
aggcgcaggtggactccattgccgcaagggttcttgcatctgttgtacacggacctcaggacaataatcttgtggattta

SEQ ID NO: 69675 - DNA, 80 bp, synthetic construct
  source 1..80: mol_type = other DNA
ggacaattgaagcttgcagactctttaaagctataatacaatactggctacaagaattgcaaactagtgctacaaatcta

SEQ ID NO: 69676 - DNA, 80 bp, synthetic construct
  source 1..80: mol_type = other DNA
ctagatactgttgcagtggcagttgctaattggactgacagcatcatcctaggtatacaaagcatagggagaggaattct

SEQ ID NO: 69677 - DNA, 80 bp, synthetic construct
  source 1..80: mol_type = other DNA
taacataccaagaaggattagacagggccttgagcgactcttgttataacatgggaaatgtattaggaaaaagtaaatgg

SEQ ID NO: 69678 - DNA, 80 bp, synthetic construct
  source 1..80: mol_type = other DNA
gcaggatggtcagaagtaagaagaagaatgagacaaacttcccctgacccccagtcctctgacacccaacctgcacctgg

SEQ ID NO: 69679 - DNA, 80 bp, synthetic construct
  source 1..80: mol_type = other DNA
ggtaagagcagtatccagggcattagcagacagaagagggataccaagttcttacactcctcaaaacaatcaagcccttg

SEQ ID NO: 69680 - DNA, 80 bp, synthetic construct
  source 1..80: mol_type = other DNA
tcaatactatgctaaatgccatagggggacaccaaggggctttacaagtattggaggaagtaatcaatgatgaggcagca

SEQ ID NO: 69681 - DNA, 80 bp, synthetic construct
  source 1..80: mol_type = other DNA
ctcctgcatccagcttgtaatcatggttatgaagatcaacacaaggaaatactgaaatggcagtttgatagatcactagc

SEQ ID NO: 69682 - DNA, 80 bp, synthetic construct
  source 1..80: mol_type = other DNA
caacacccatgtagctctaataactcacccagagctcttctccaaagactaaaactgtcaacaggaagactgctgacgct

SEQ ID NO: 69683 - DNA, 80 bp, synthetic construct
  source 1..80: mol_type = other DNA
aagtctcagttaaagaaccaagtctgagcccaaaagctccctagcctctagctgaacccgctgcttaacgctcaataaag

SEQ ID NO: 69684 - DNA, 80 bp, synthetic construct
  source 1..80: mol_type = other DNA
gaaagtagatagtaataagactaaacaaaatggtgaaaatgtacagtccagtgagcatcttagatattaagcaaagacca

SEQ ID NO: 69685 - DNA, 80 bp, synthetic construct
  source 1..80: mol_type = other DNA
agaagaccaactcataaggctagagtcctagcagaagcaatggcttcagcccagcaagatctaaaaagaagatacacatc

SEQ ID NO: 69686 - DNA, 80 bp, synthetic construct
  source 1..80: mol_type = other DNA
agtattcatgcaaaaaagacaaaaaccaattaaaaaaggacctataaaatgtttcaattgtagaaaagaaggacatgtag

SEQ ID NO: 69687 - DNA, 80 bp, synthetic construct
  source 1..80: mol_type = other DNA
caggaaaatctctagcagtggcgcccgaacagggaccaaaagtgaaaccagggaagaaaacctccgacgcaacaggctcg

SEQ ID NO: 69688 - DNA, 80 bp, synthetic construct
  source 1..80: mol_type = other DNA
ataaaaaggcaaaaaaaggatcagaatcagaaagaagagcagaacgagctctatccgtttgcctccctcagatccctctt

SEQ ID NO: 69689 - DNA, 80 bp, synthetic construct
  source 1..80: mol_type = other DNA
taagacagaccaatagtcacagcaagagttgggggccagctatgtgaagttttactaaatacagaggcagataatacagt

SEQ ID NO: 69690 - DNA, 80 bp, synthetic construct
  source 1..80: mol_type = other DNA
actaaacaacatacaattaaaaaaaaaataggcaccaaaaatgatagggggtataagaagttttataaaggtaaaaaaat

SEQ ID NO: 69691 - DNA, 80 bp, synthetic construct
  source 1..80: mol_type = other DNA
attataatgtggctgtaaaattaaaaagaaaagaagtaagaaggacagtattagtaagacctactcctgttaacattcta

SEQ ID NO: 69692 - DNA, 80 bp, synthetic construct
  source 1..80: mol_type = other DNA
aaaagaaatatattgacaagattaagttgtacactaaatttccctataagccccataaccccagtaccagtaaaactaaa

SEQ ID NO: 69693 - DNA, 80 bp, synthetic construct
  source 1..80: mol_type = other DNA
gcttagcggagtgcacccgctaagaggcaagaagaactcacaagaaagtaagtaattttgctggcagtggccagacctag

SEQ ID NO: 69694 - DNA, 80 bp, synthetic construct
  source 1..80: mol_type = other DNA
tacaagtaaagattttatacccctgataaaaaacatcaaaaaaaaccaccctttcagtaaataaagtatgaactccaccc

SEQ ID NO: 69695 - DNA, 80 bp, synthetic construct
  source 1..80: mol_type = other DNA
attgacagaagtagtaccattaagcaaagaggcagaactagaattaaaaaagaacaaaaaaaagctgaaaaagccagtac

SEQ ID NO: 69696 - DNA, 80 bp, synthetic construct
  source 1..80: mol_type = other DNA
ataaggtatactatcaacctaataaagacttataagttaacattcaaaagcaaggagaggggcaatagacttaccagata

SEQ ID NO: 69697 - DNA, 80 bp, synthetic construct
  source 1..80: mol_type = other DNA
tatcaagatgaacataagaacctcaaaacaaagaaatatgctaggcaaaaagcctcccacacaaatgatataagacaatt

SEQ ID NO: 69698 - DNA, 80 bp, synthetic construct
  source 1..80: mol_type = other DNA
aggaaaggcgaagtctctaaaagaagaagataagtgcgagagcgtctgtgttgacaaagactaaattaaatgcatagaaa

SEQ ID NO: 69699 - DNA, 80 bp, synthetic construct
  source 1..80: mol_type = other DNA
agcaaatgtaatccagaaagtgtctcaagaagctataatcatatgaagaaaattgcccaaatttaagctgccagtcacta

SEQ ID NO: 69700 - DNA, 80 bp, synthetic construct
  source 1..80: mol_type = other DNA
aagaagtataagaaacatagtaggcagattattggcaagccacctagattcctaaataaaaatttgtcagcacacctcca

SEQ ID NO: 69701 - DNA, 80 bp, synthetic construct
  source 1..80: mol_type = other DNA
ttgatcaaattatgatacaagttaaaaaataagcctatcataaaggcaaaaaccttttatgtagatagagcagctaatag

SEQ ID NO: 69702 - DNA, 80 bp, synthetic construct
  source 1..80: mol_type = other DNA
agacacaaaactaagaaaggcaggatatattacagaacaaaagaaacagaaaataataaaattagataagaccaccaatc

SEQ ID NO: 69703 - DNA, 80 bp, synthetic construct
  source 1..80: mol_type = other DNA
aaaaagctaaattaatggccgtattgttagctttacaagattctaaaaaaaaagtaaacatagtaacagattcacaatat

SEQ ID NO: 69704 - DNA, 80 bp, synthetic construct
  source 1..80: mol_type = other DNA
gtactaagcatcatatcttcccaacctacacagagtgactcccctatagttcagcaaataataaaaaaactgacaaaaaa

SEQ ID NO: 69705 - DNA, 80 bp, synthetic construct
  source 1..80: mol_type = other DNA
aaaacaagtgtatcttacataagttcctgctcataaaagtataagagaaaataaaaaaatagataaattaataagtaaaa

SEQ ID NO: 69706 - DNA, 80 bp, synthetic construct
  source 1..80: mol_type = other DNA
atattaaaaaagtcctattcctaaaaaaaataaatcaaacacaaaaagatcataaaaaatatcataataattaaagagca

SEQ ID NO: 69707 - DNA, 80 bp, synthetic construct
  source 1..80: mol_type = other DNA
ttagctagtgactttagactaccaccagtagtagccaaaaaaatcattgcaagttgtcctaagtgtcatataaaaaaaaa

SEQ ID NO: 69708 - DNA, 80 bp, synthetic construct
  source 1..80: mol_type = other DNA
agcaatgcatagccaagtagactacagtccaaaaatatggcaaataaattgcacacatttaaaaaacaagatcataatag

SEQ ID NO: 69709 - DNA, 80 bp, synthetic construct
  source 1..80: mol_type = other DNA
caaattaagttaaagccaggatctaaaaagaaatataagctaaaacatttaatataggcaagcaaagagctggacagatt

SEQ ID NO: 69710 - DNA, 80 bp, synthetic construct
  source 1..80: mol_type = other DNA
acatacaacataagtttaaaataccatataatccacaaagtcaaaaagtagtaaaagccataaacaaaaaattaaaatca

SEQ ID NO: 69711 - DNA, 80 bp, synthetic construct
  source 1..80: mol_type = other DNA
tctaaaaaggccaaagattagtattataaacatcattatgaaattataaatccaaaggtcagttcaaaggtatatattcc

SEQ ID NO: 69712 - DNA, 80 bp, synthetic construct
  source 1..80: mol_type = other DNA
agtaagtccagcttgtataatggtgacaacatattaaagattgatgccaggagaaagagaggagcagttaggacatggag

SEQ ID NO: 69713 - DNA, 80 bp, synthetic construct
  source 1..80: mol_type = other DNA
ttagtatagaatggcagtgcaggaagtatataacacagattgaccctgaaacagcagacaagctaatacatctgcattac

SEQ ID NO: 69714 - DNA, 80 bp, synthetic construct
  source 1..80: mol_type = other DNA
tttacctgttttacagagtcagcaattaggagagccactctaaggcagagagtgctaccccagtaagaataccctgaagg

SEQ ID NO: 69715 - DNA, 80 bp, synthetic construct
  source 1..80: mol_type = other DNA
acatagtcaggtaaggacactacagctcctagccttaagagtagtagtaaaagcaaagagaaataggcctccattaccca

SEQ ID NO: 69716 - DNA, 80 bp, synthetic construct
  source 1..80: mol_type = other DNA
gtgttcagaagttaacagaagatagatagaacaggcacctgaggatcaaagaccagccaaggagccagttaatgcatagg

SEQ ID NO: 69717 - DNA, 80 bp, synthetic construct
  source 1..80: mol_type = other DNA
cactagagctcctagaagagctaaaggcagaagcagtaagacattttcctagaaactggctgcaagccttaggacaatac

SEQ ID NO: 69718 - DNA, 80 bp, synthetic construct
  source 1..80: mol_type = other DNA
tagaattagaagccaacatagtaaaataggaattattccatctaacgcaagaagaaaaagaagaaaagatagatcccata

SEQ ID NO: 69719 - DNA, 80 bp, synthetic construct
  source 1..80: mol_type = other DNA
gatcctgaaatgcccccttggcatcaccctggaagccaaccccagaccccttgtaacgcttgctattgcaaacaatgctg

SEQ ID NO: 69720 - DNA, 80 bp, synthetic construct
  source 1..80: mol_type = other DNA
atagtcattattgctttgcttcttataaatgtacttctatagatgtttaaacttagaacatatttagaacaaaagaaaca

SEQ ID NO: 69721 - DNA, 80 bp, synthetic construct
  source 1..80: mol_type = other DNA
agataaaacagcaaaaaaaatacttaaaagaataagaagaataagaaaagttgaagatgacagcgattatgaaagcaata

SEQ ID NO: 69722 - DNA, 80 bp, synthetic construct
  source 1..80: mol_type = other DNA
gaaaagagaaacaagaagttaaagatctgatgcttaattttagctttgataatcccatgtttgagctgtaaccaactata

SEQ ID NO: 69723 - DNA, 80 bp, synthetic construct
  source 1..80: mol_type = other DNA
tgccacagtctattctaaggtacctgtataagaagatgcaaaaccaacattgttctgtgcttcagatgctaacttgacaa

SEQ ID NO: 69724 - DNA, 80 bp, synthetic construct
  source 1..80: mol_type = other DNA
gcactgaacagcataatatttaggcaacacaagcctgtgttcccacagaccccagtccaaatgaatataagctaaaaaat

SEQ ID NO: 69725 - DNA, 80 bp, synthetic construct
  source 1..80: mol_type = other DNA
gtgacagataaattcaatatataagaaaattatatagtagaccaaatacaagaagacattatagatttgtaagaccagag

SEQ ID NO: 69726 - DNA, 80 bp, synthetic construct
  source 1..80: mol_type = other DNA
tttaaaaccttgtgttcaaatgactttcttgtgtgtacaaatgaattgtacaaatatcaaaaatagtattactaccacaa

SEQ ID NO: 69727 - DNA, 80 bp, synthetic construct
  source 1..80: mol_type = other DNA
acagtcccttaaactcaaacaatacaaaagaagtaaaacagtgtgactttaatgtaactacagtgctcaaagacaaacag

SEQ ID NO: 69728 - DNA, 80 bp, synthetic construct
  source 1..80: mol_type = other DNA
gagaaaaaacaggctctattctatgtgacagatttagttaagattaacgccacatcaaatgaaacaatgtatagattaat

SEQ ID NO: 69729 - DNA, 80 bp, synthetic construct
  source 1..80: mol_type = other DNA
cagcaggcagtaagaaaattaaaggaagaaatggagaaaaaaaagcctgtcagtagtactaagaaagacacaagctcaaa

SEQ ID NO: 69730 - DNA, 80 bp, synthetic construct
  source 1..80: mol_type = other DNA
acttgtacacatagcatcaaaccaacagtaagtacccaactaatactaaataagacactctctaaaagaaatataacaat

SEQ ID NO: 69731 - DNA, 80 bp, synthetic construct
  source 1..80: mol_type = other DNA
cataagaaagaatatttcagacagtaaggagaacatcctaataaccctaaatactaatataacaatagcatgtgagagac

SEQ ID NO: 69732 - DNA, 80 bp, synthetic construct
  source 1..80: mol_type = other DNA
caagaaatcagacaatacaaaaaataatggcaggtccaatagcttagtacagcatggcccttagtaatacaaaggaggat

SEQ ID NO: 69733 - DNA, 80 bp, synthetic construct
  source 1..80: mol_type = other DNA
acaaaggcagcttattgtaattatagtgccactgactagaacaaagccttaaaaaacataactaaaaaatatttaaaact

SEQ ID NO: 69734 - DNA, 80 bp, synthetic construct
  source 1..80: mol_type = other DNA
tgtaaaatataatcaaactgatgttaccataaaattcagtaatcacagtagtaaagatgcagaaataacaaatttctttt

SEQ ID NO: 69735 - DNA, 80 bp, synthetic construct
  source 1..80: mol_type = other DNA
ttaactgtcataaagaattcttttattataacacaaatcagctgtttaatcataccttttcctgcaagaaaaatatgacc

SEQ ID NO: 69736 - DNA, 80 bp, synthetic construct
  source 1..80: mol_type = other DNA
aataacaagatcaattgtactaatattagcaataataacaatggcactcaggcaataccttgcaagttaagacaagtagt

SEQ ID NO: 69737 - DNA, 80 bp, synthetic construct
  source 1..80: mol_type = other DNA
aaaagactaaataagaaaaagatcaagactttatgcacctcccatcccaaaaaacctagtatgcaagtcaaacataacta

SEQ ID NO: 69738 - DNA, 80 bp, synthetic construct
  source 1..80: mol_type = other DNA
gaatgattctacaattagacacgccataaaataaaacacatcctaacagcaccacccttagaccaggagggggaaatata

SEQ ID NO: 69739 - DNA, 80 bp, synthetic construct
  source 1..80: mol_type = other DNA
aaagatatacaaaaaactcaattgttcaaatataaagtagtaaaagtaaaaccttttagtgtagcaccaacaaaaattgc

SEQ ID NO: 69740 - DNA, 80 bp, synthetic construct
  source 1..80: mol_type = other DNA
aaggccaactataaaaactggcactcataaaaagaaaaaagcagcaggtttagcaatgctattcttgaagattctaagtg

SEQ ID NO: 69741 - DNA, 80 bp, synthetic construct
  source 1..80: mol_type = other DNA
cagcaagaagcactataggcgcagcagcaacagcgctgacagtacagacccagcatctgataaaaagtatagtgcaacag

SEQ ID NO: 69742 - DNA, 80 bp, synthetic construct
  source 1..80: mol_type = other DNA
caagataacctgctaagagcaatacaggcccagcaacacttgctgaagctatctgtataaagtattagacaactccaagc

SEQ ID NO: 69743 - DNA, 80 bp, synthetic construct
  source 1..80: mol_type = other DNA
tcgcctgctagccttaaaaacctttatacaaaatcagcaactccataacctgtaaagctgcaaaaatagactaatctgct

SEQ ID NO: 69744 - DNA, 80 bp, synthetic construct
  source 1..80: mol_type = other DNA
acacatcagtaaagtaaaataaaacataaaaaaaaaataataaatcaatttaagataagttaacatagcagcagtaagat

SEQ ID NO: 69745 - DNA, 80 bp, synthetic construct
  source 1..80: mol_type = other DNA
caacagataaacaacgtaagctccttcatatataaaaaaatacaagaagcacaaaaacaacaaaagaaaaataaaaaaaa

SEQ ID NO: 69746 - DNA, 80 bp, synthetic construct
  source 1..80: mol_type = other DNA
attactaaagttagataaataggcctctatttaaaattagcttgacataactaaatagttgtagtacataaaaatagcta

SEQ ID NO: 69747 - DNA, 80 bp, synthetic construct
  source 1..80: mol_type = other DNA
taatcatagtaagagcactaataagtataaaagtagttatattagtacttaatctagtaaagaacattaagcagagatat

SEQ ID NO: 69748 - DNA, 80 bp, synthetic construct
  source 1..80: mol_type = other DNA
caacccctctcgttacagatccccatccaacaacaagcagaagtaagaacgccaagaagaacaaaaaaaaaaagtaaaga

SEQ ID NO: 69749 - DNA, 80 bp, synthetic construct
  source 1..80: mol_type = other DNA
cttgccttaaataagaagcagtgtgtactcatctgttcaaccctagtgtctaaagatccctcaaatcacttagactgaag

SEQ ID NO: 69750 - DNA, 80 bp, synthetic construct
  source 1..80: mol_type = other DNA
cgaagacaagcgcaagtagactccattgccgcaaaagttcttgcatctgttgtacacagacctcaagacaataatcttgt

SEQ ID NO: 69751 - DNA, 80 bp, synthetic construct
  source 1..80: mol_type = other DNA
agatttaccacctcttgagcaacttagcctcaaagatccagaagttaatcagacacctaagacttagactgtagatcata

SEQ ID NO: 69752 - DNA, 80 bp, synthetic construct
  source 1..80: mol_type = other DNA
aggcagaagacaattgaagcttgcagactctttaaagctataatacaatactagctacaaaaattgcaaactagtgctac

SEQ ID NO: 69753 - DNA, 80 bp, synthetic construct
  source 1..80: mol_type = other DNA
aaatctactagatactgttgcagtagcagttactaattaaactgacagcatcatcctaggcatacaaagcataaaaaaaa

SEQ ID NO: 69754 - DNA, 80 bp, synthetic construct
  source 1..80: mol_type = other DNA
aaattcttaacataccaaaaaagattagacaaggccttgaacgactcctgttataacatgaagattgcattaaaaaaaag

SEQ ID NO: 69755 - DNA, 80 bp, synthetic construct
  source 1..80: mol_type = other DNA
taaatagacaaaatagccagaagtaaaaaaaaaaataagacaaacttcccctgacccccagtcctctgacacccaacctg

SEQ ID NO: 69756 - DNA, 80 bp, synthetic construct
  source 1..80: mol_type = other DNA
cacctaaagtaagagcagtatccaaagcattagcagacagaaaaagaataccaagttcttacactcctcaaaataatcaa

SEQ ID NO: 69757 - DNA, 80 bp, synthetic construct
  source 1..80: mol_type = other DNA
gcccttgcattcctagaaaaccaccaagataaagaaataaagttcccagtaagaccccaagtgcctctaaggccgataac

SEQ ID NO: 69758 - DNA, 80 bp, synthetic construct
  source 1..80: mol_type = other DNA
gcaaaactacacaccaagaccaagaaccaaattcccattaacatttagatagctatttaagctagtaccagtgtcagaag

SEQ ID NO: 69759 - DNA, 80 bp, synthetic construct
  source 1..80: mol_type = other DNA
ctaaggcagaagcactaggcaataagtgtaaaaaggctagcctcctgcatccagcttataatcatagttatgaaaatcaa

SEQ ID NO: 69760 - DNA, 80 bp, synthetic construct
  source 1..80: mol_type = other DNA
cacaaaaaaatactgaaatagcagtttaatagatcactagccaacacccatgtagctctaataactcacccaaagctctt

SEQ ID NO: 69761 - DNA, 80 bp, synthetic construct
  source 1..80: mol_type = other DNA
ctccaaagactaaaactgtcaacaaaaagactgctgacgctacaagactttccagcaaagactgctgacactgcaaaaac

SEQ ID NO: 69762 - DNA, 80 bp, synthetic construct
  source 1..80: mol_type = other DNA
tttccagcgtagaaaagacagagacagttcaaaaagtagctaaccctcagaagctgcatataagcagccgctttctgctt

SEQ ID NO: 69763 - DNA, 80 bp, synthetic construct
  source 1..80: mol_type = other DNA
agtctgagcccaaaagctccctagcctctagctgaacccgctgcttaacgctcaataaagcttgccttaaataagaagca

SEQ ID NO: 69764 - DNA, 80 bp, synthetic construct
  source 1..80: mol_type = other DNA
gactaagatagaactcatccaccagtagtaggaccattaccaccagggcagataaaagaaccaacaggaagtgacattgc

SEQ ID NO: 69765 - DNA, 80 bp, synthetic construct
  source 1..80: mol_type = other DNA
gacacagaagaatcttaagggactttccgctggggactttccagagggcgggccagagggcgtgactggggagtggctca

SEQ ID NO: 69766 - DNA, 80 bp, synthetic construct
  source 1..80: mol_type = other DNA
tcttaagggactttccgctggggactttccagagggcgggccagagggcgtgactggggagtggctcaccctcagatgct

SEQ ID NO: 69767 - DNA, 80 bp, synthetic construct
  source 1..80: mol_type = other DNA
tatattcatccccatagcatatatatacggtataatttacaataagtcgtgcaaaaaatgcaaattatgtggcttagtgt

SEQ ID NO: 69768 - DNA, 80 bp, synthetic construct
  source 1..80: mol_type = other DNA
ttaacttggaaattactgttatgtcttcagaggtcctcccttcgattcaccaagaatacatcacctgcaaatactccact

SEQ ID NO: 69769 - DNA, 80 bp, synthetic construct
  source 1..80: mol_type = other DNA
atcgtgccttccccgaaagtgaaatgctgcggttcccttgagtgccaacccgcttcgcatgccgactacaactgcaaagt

SEQ ID NO: 69770 - DNA, 80 bp, synthetic construct
  source 1..80: mol_type = other DNA
atgtcgagctatcggccgattgtgcccttgatcacgcacaggcggtgaaagtgcacacagccgcaatgaaggtcggacta

SEQ ID NO: 69771 - DNA, 80 bp, synthetic construct
  source 1..80: mol_type = other DNA
cgcattgtgtatgggaacaccactagcctcctggatgcgtacgtaaacggagtcacgccaggcacatctaaagacctgaa

SEQ ID NO: 69772 - DNA, 80 bp, synthetic construct
  source 1..80: mol_type = other DNA
ccggacccatctcgtccgcgttttccccttttgactctaaagtcgtgatacaccgagggctcgtgtacaattacgatttt

SEQ ID NO: 69773 - DNA, 80 bp, synthetic construct
  source 1..80: mol_type = other DNA
ccagagtacggggcaatgaaaccgggtgcctttggggacattcaagctagctctttgacgggcaacgacctgattgccag

SEQ ID NO: 69774 - DNA, 80 bp, synthetic construct
  source 1..80: mol_type = other DNA
caccgacatacgtttgcttaaacccgcagcaaagaatgtgcacgttccctatacccaagcagcatcaggatttgaaattt

SEQ ID NO: 69775 - DNA, 80 bp, synthetic construct
  source 1..80: mol_type = other DNA
ggaagaacaactccggaagaccactgcaagagacggccccatttggctgtaagattgccgtcaaccctctgaaggccgtg

SEQ ID NO: 69776 - DNA, 80 bp, synthetic construct
  source 1..80: mol_type = other DNA
gattgttcctatgggaacatcccgatatcgattgatatcccccacgccgcctttattagaccatccgatgcgccatttat

SEQ ID NO: 69777 - DNA, 80 bp, synthetic construct
  source 1..80: mol_type = other DNA
ctccgaagtgaagtgcgaagtcagcgactgcacatactctgctgacttcggaggcatggccaccctacagtatgtgtctg

SEQ ID NO: 69778 - DNA, 80 bp, synthetic construct
  source 1..80: mol_type = other DNA
accgagagggccagtgcccagtgcattcccattcaagtaccgccacactccaggaatcaactgttcacgtcttggaaaaa

SEQ ID NO: 69779 - DNA, 80 bp, synthetic construct
  source 1..80: mol_type = other DNA
ggggcgacgacagtgcacttcagcacagctagccctcacgccagctttgtggtctcattatgcggaaagaagacgacctg

SEQ ID NO: 69780 - DNA, 80 bp, synthetic construct
  source 1..80: mol_type = other DNA
caccgcaggatgcaaaccacctgtcggccacatagtcagcacaccccacaagaaggaccaagagttccagaccgccgtct

SEQ ID NO: 69781 - DNA, 80 bp, synthetic construct
  source 1..80: mol_type = other DNA
ccaggacatcatggagctggctcttcgcgctgttcggaggagcttcgtccctagtaatcatgggactgttaatcttctcc

SEQ ID NO: 69782 - DNA, 80 bp, synthetic construct
  source 1..80: mol_type = other DNA
tgcagcatgatgctcactaacaccagaagatgaccgctatgccccactgacctgaccagtaaccggtgtgcataatgcac

SEQ ID NO: 69783 - DNA, 80 bp, synthetic construct
  source 1..80: mol_type = other DNA
tggtctggtacattagatccccgcataatgcgggccaactagcaacgtataaatagcagtgcataacgctgcatcacgtt

SEQ ID NO: 69784 - DNA, 80 bp, synthetic construct
  source 1..80: mol_type = other DNA
gcaatataaacacttatacatcgcaaacgccaaaactcaagtactcctgaggaagcatggtgcataatgccatgcagcgt

SEQ ID NO: 69785 - DNA, 80 bp, synthetic construct
  source 1..80: mol_type = other DNA
atcaacggtaaaacgaacaaaaacaccaacactatgcaaaactatttactgcccatcatcgcccaaggattcagcaagtg

SEQ ID NO: 69786 - DNA, 80 bp, synthetic construct
  source 1..80: mol_type = other DNA
ggctaaggagaggaaagaagacctggagaacgaaagattactggggaccagggagcgcaagcttacatacggctgcctgt

SEQ ID NO: 69787 - DNA, 80 bp, synthetic construct
  source 1..80: mol_type = other DNA
gggcttttcgaactaagaaagtacactcattttaccgcccgccagggacacaaaccagtgttaaggtgccctcttccttt

SEQ ID NO: 69788 - DNA, 80 bp, synthetic construct
  source 1..80: mol_type = other DNA
agtgcgtttccactgtcatcggtatggacgacgtctttaccgatgtcactgcgacagaaaatgaaactagcacttagacc

SEQ ID NO: 69789 - DNA, 80 bp, synthetic construct
  source 1..80: mol_type = other DNA
taaatattctgaaaaactgctgcaagtctcggaagggcttgtcgctgaagcgaaagcggcatttgaggaagcccaggaga

SEQ ID NO: 69790 - DNA, 80 bp, synthetic construct
  source 1..80: mol_type = other DNA
ccatccgagcggagaaactgcgtgaagcactcccgcctctagtcgcagataaaaacgtggacgctgcggccgaagtcata

SEQ ID NO: 69791 - DNA, 80 bp, synthetic construct
  source 1..80: mol_type = other DNA
agcaatcagaccgcatgatcgggcaatacattgtggtctctccgacctcagtgctaaagaacaccaaattggccccagcc

SEQ ID NO: 69792 - DNA, 80 bp, synthetic construct
  source 1..80: mol_type = other DNA
cacccgttagcggagcaaattaaaatcattacgcactccgggagatcaggaaggtatgcggtggagccttacgatgcaaa

SEQ ID NO: 69793 - DNA, 80 bp, synthetic construct
  source 1..80: mol_type = other DNA
gtactaatgccggcaggtagtgccataccgtggcccgagttcctggcgcttagcgaaagcgcaaccctggtgtataacga

SEQ ID NO: 69794 - DNA, 80 bp, synthetic construct
  source 1..80: mol_type = other DNA
gagggcatttgtgaaccgcaagctctaccacatagctatgcacggtgcagcaaagaacacggaggaagaacaatacaagg

SEQ ID NO: 69795 - DNA, 80 bp, synthetic construct
  source 1..80: mol_type = other DNA
tcctgagggcggaactcgctgacaccgagtacgtcttcgacgtggacaagaggaggtgtgtaagaaaagaggaggcctcc

SEQ ID NO: 69796 - DNA, 80 bp, synthetic construct
  source 1..80: mol_type = other DNA
gggcttgttctatccggagagctgactaatccgccataccatgaactagccctagaaggactgcggacgcgccctgctgt

SEQ ID NO: 69797 - DNA, 80 bp, synthetic construct
  source 1..80: mol_type = other DNA
cccgtacaaagtggagacaatcggagtaataggaacacccggatctggtaaatccgccataattaaaacaacagtaactg

SEQ ID NO: 69798 - DNA, 80 bp, synthetic construct
  source 1..80: mol_type = other DNA
cacgcgaccttgttaccagcgggaagaaagaaaactgccgagagatcgaggctgatgtaatgaagttacgtggcatgcaa

SEQ ID NO: 69799 - DNA, 80 bp, synthetic construct
  source 1..80: mol_type = other DNA
attacgtctaagactgttgactccgttatgcttaacggatgccacaaggtggtcgatgtcttgtacgtcgacgaggcgtt

SEQ ID NO: 69800 - DNA, 80 bp, synthetic construct
  source 1..80: mol_type = other DNA
tctataagtacatatcaagacgatgcacccagcccgtcacggccatagtttcaacactgcattacgatgggaagatgaga

SEQ ID NO: 69801 - DNA, 80 bp, synthetic construct
  source 1..80: mol_type = other DNA
aagcggagcaccgcggaatcattgccgccataaacagccctgccccaaaaacaaacccatttagttgcaagaccaacgtg

SEQ ID NO: 69802 - DNA, 80 bp, synthetic construct
  source 1..80: mol_type = other DNA
tgctgggctaaagcactagagcccatactagccaccgcagggatatctctgacagggtgccagtggagtgaactttttcc

SEQ ID NO: 69803 - DNA, 80 bp, synthetic construct
  source 1..80: mol_type = other DNA
gcagtttgccgaggacaaacctcattcagctacctacgcgctagatgtcatctgcataaagttctttggcatggacctta

SEQ ID NO: 69804 - DNA, 80 bp, synthetic construct
  source 1..80: mol_type = other DNA
caagcggtctatttgcgaagcaaagcatccctttgacgtaccatccagcagacatttcccgccctgtagcccattgggac

SEQ ID NO: 69805 - DNA, 80 bp, synthetic construct
  source 1..80: mol_type = other DNA
aacagtccaggagcccgcaagtacgggttcgatgctgctgtagccgctgaactttcccggcgtttccccgtctatcaaat

SEQ ID NO: 69806 - DNA, 80 bp, synthetic construct
  source 1..80: mol_type = other DNA
ggcagggaaaggtacgcagctcgacttacaaacgggaagaacaagagtcatttctgcgcaacacaatttggtacccgtta

SEQ ID NO: 69807 - DNA, 80 bp, synthetic construct
  source 1..80: mol_type = other DNA
accgcaacctgccgcacgctttggtcccagagtacaaagacagaaatcctggacctgttgaagatttcctgaaacaattc

SEQ ID NO: 69808 - DNA, 80 bp, synthetic construct
  source 1..80: mol_type = other DNA
aagcatcatacggtggttatggtgtcggcagagaaagtagaagtaccgcagaagaaaattgaatggatagctccactagg

SEQ ID NO: 69809 - DNA, 80 bp, synthetic construct
  source 1..80: mol_type = other DNA
tggcagaaaaagcgcccaaaattaccgacaagaaccttcacgaaaaaattagcgacctccgaaccgttctcgacacacca

SEQ ID NO: 69810 - DNA, 80 bp, synthetic construct
  source 1..80: mol_type = other DNA
cgtccctggtgctgatcggaactataacctggcgttcggatttccaccccagtcgcgctacgatatggtgttcgtgaaga

SEQ ID NO: 69811 - DNA, 80 bp, synthetic construct
  source 1..80: mol_type = other DNA
tcggaactaagtataggaaccatcactttcagcagtgcgaagaccatgcggcgactctaaaaaccctgtcaagctcagct

SEQ ID NO: 69812 - DNA, 80 bp, synthetic construct
  source 1..80: mol_type = other DNA
ctcaattgtcttaatcccgggggaactttagtagtgaaggcgtacggatacgcagaccgtaacagtgaagacgtggtcac

SEQ ID NO: 69813 - DNA, 80 bp, synthetic construct
  source 1..80: mol_type = other DNA
cgctctggccagaaagttcgtccgcgtctcggctgccagacccgagtgcgttaccagtaacactgagatgttcctcattt

SEQ ID NO: 69814 - DNA, 80 bp, synthetic construct
  source 1..80: mol_type = other DNA
tcaggcaattggataacagccgcacacgccagtttacgccccaccacctcaactgcgtggtctcatccgtctatgaagga

SEQ ID NO: 69815 - DNA, 80 bp, synthetic construct
  source 1..80: mol_type = other DNA
acaagagacggagttggtgccgcgccgtcctatcgcgtgaaaagagaaaacatagcagattgcctagaggaagccgtagt

SEQ ID NO: 69816 - DNA, 80 bp, synthetic construct
  source 1..80: mol_type = other DNA
actctgccaccgaaaccggcacggcaagaatgaccgagagcaacggaaaaagagtaattcacgcagtcggccctgacttc

SEQ ID NO: 69817 - DNA, 80 bp, synthetic construct
  source 1..80: mol_type = other DNA
cgcaggcacacagaagccgaagctttaaaactgcttcagaacacctatcatgcggtagcagacctgatcaacgaacacaa

SEQ ID NO: 69818 - DNA, 80 bp, synthetic construct
  source 1..80: mol_type = other DNA
catcaagtcggttgcgatccctctgctatctacgggaatatatgctgcggggaaagaccgccttgaggtctcactaaact

SEQ ID NO: 69819 - DNA, 80 bp, synthetic construct
  source 1..80: mol_type = other DNA
gacgtcgaaacaccgtccctttgctttcacaatgatgtcacgtgcagcatccgtgccgaatactccgtcatgcaggacgt

SEQ ID NO: 69820 - DNA, 80 bp, synthetic construct
  source 1..80: mol_type = other DNA
cgtggtactacagagaaaggaggcagtcaccgagttgaaggatgatgacatggaaatcgatgacgaacttgtatgggttc

SEQ ID NO: 69821 - DNA, 80 bp, synthetic construct
  source 1..80: mol_type = other DNA
accccgatagttgcttaaaaggacgcaaaggatttagcaccacgaaaggcaaactgtactcatactttgaggggacgaag

SEQ ID NO: 69822 - DNA, 80 bp, synthetic construct
  source 1..80: mol_type = other DNA
tccaccaggctgccaaggacatggcggagatcaaagtactattccctgatgatcaggagtgtaacgaacaactgtgtgct

SEQ ID NO: 69823 - DNA, 80 bp, synthetic construct
  source 1..80: mol_type = other DNA
tacatactaggagaaaccatggaggccattcgtgaaaaatgtcctatagaccttaatccatcttccagcccacccaaaac

SEQ ID NO: 69824 - DNA, 80 bp, synthetic construct
  source 1..80: mol_type = other DNA
tttcccgtgcttatgcatgtacgcgatgacacccgagcgagttcaccgacttcggagtaacaacgtaaaagaggtcacag

SEQ ID NO: 69825 - DNA, 80 bp, synthetic construct
  source 1..80: mol_type = other DNA
ccacaaacccctacattcgttcctgcccgcaagtatatcgaaacaccagaacagcgcatcaccgatgtcccgactcaaga

SEQ ID NO: 69826 - DNA, 80 bp, synthetic construct
  source 1..80: mol_type = other DNA
agagcccgttaatacagcaccagaacctacatgtactgctaccggagacaacacttcgcttgatgttacggatatttctt

SEQ ID NO: 69827 - DNA, 80 bp, synthetic construct
  source 1..80: mol_type = other DNA
tagaccatgagcctagcgaccagggctctatgtcctacgactttgcaggctccaatagctccattgacagcggaatgagc

SEQ ID NO: 69828 - DNA, 80 bp, synthetic construct
  source 1..80: mol_type = other DNA
ttacatcaacgccccggggacaatttttcaccaggccttgaaaggggtcaggacactgtactggatcggattcgatacca

SEQ ID NO: 69829 - DNA, 80 bp, synthetic construct
  source 1..80: mol_type = other DNA
tgggcaacaccatcgggacggtccgttatagtgtcagcagaagtccacgctgcacaagcaccaatacccacaccgcctcc

SEQ ID NO: 69830 - DNA, 80 bp, synthetic construct
  source 1..80: mol_type = other DNA
acgccttaagaagctagccaggcttgcagcccaggcccaactcgctgccgaggaaacggagcccgtgaccaccgatacga

SEQ ID NO: 69831 - DNA, 80 bp, synthetic construct
  source 1..80: mol_type = other DNA
ctagcgaggacgaatcactacacctttctttgaatggtatggcaatgtcatttggctcgttcactgacggcgaagtggaa

SEQ ID NO: 69832 - DNA, 80 bp, synthetic construct
  source 1..80: mol_type = other DNA
gagttgagccgcaggaagaccaactccgaaccagtactgtttggatcgtttgagccaggggaagtgaactcaatcatttc

SEQ ID NO: 69833 - DNA, 80 bp, synthetic construct
  source 1..80: mol_type = other DNA
gtctcgctccgctgtgtccttcccagcgcgcagacggcgcagaagacacacccgtaagaaagcggagtactgactaaccg

SEQ ID NO: 69834 - DNA, 80 bp, synthetic construct
  source 1..80: mol_type = other DNA
gaacgtacttacagaaccgttgcttgagcgcaataatctagaacaaatctatgcgccgacgtacgaccagtccaaagaag

SEQ ID NO: 69835 - DNA, 80 bp, synthetic construct
  source 1..80: mol_type = other DNA
agctactaaaatttaagtacccaatgatacccaccgaagccaacaagagcaggtaccaatcacggaaagtagagaatcag

SEQ ID NO: 69836 - DNA, 80 bp, synthetic construct
  source 1..80: mol_type = other DNA
agaaagccgtcaccaccgaacgcttactatcgggattacgattgtacacccacgcacaaaaccaacctgaatgttacaag

SEQ ID NO: 69837 - DNA, 80 bp, synthetic construct
  source 1..80: mol_type = other DNA
gttacgtaccctaaacccatgtactctagcagcgtacccgccagttactccgagcctaaatttgcggtagccgtttgcaa

SEQ ID NO: 69838 - DNA, 80 bp, synthetic construct
  source 1..80: mol_type = other DNA
caattaccttcacgaaaactaccccacagtggcatcctatcagattacagacgagtacgacgcctacttggatatggttg

SEQ ID NO: 69839 - DNA, 80 bp, synthetic construct
  source 1..80: mol_type = other DNA
ggaacagtggcgtgtttggacacagctacattctgtcccgcaaaattgagaagctatcccaagaaacacgactaccacgg

SEQ ID NO: 69840 - DNA, 80 bp, synthetic construct
  source 1..80: mol_type = other DNA
cccgaatatccgcagagccgttccatcagcaatgcaaaacaccctccaaaacgtgctaattgcagctaccaaaagaaatt

SEQ ID NO: 69841 - DNA, 80 bp, synthetic construct
  source 1..80: mol_type = other DNA
gtaatgtcacccagatgcgcgaactgcctacccttgactccgcgaactttaatgttgaatgttttcgcaagtacgcttgc

SEQ ID NO: 69842 - DNA, 80 bp, synthetic construct
  source 1..80: mol_type = other DNA
aatgacgaatattgggatgaattcgcagccaaaccaatccggtttaccaccgagttcgtcaccgcatatgtggctagatt

SEQ ID NO: 69843 - DNA, 80 bp, synthetic construct
  source 1..80: mol_type = other DNA
acccctggccactgcgtacttatgcgggattcacatagaatttgtccgcagacttactgccgtcctcctccctaacatac

SEQ ID NO: 69844 - DNA, 80 bp, synthetic construct
  source 1..80: mol_type = other DNA
gccaagatgacgccatggcattaacaggtctgatgatacttgaggacttgggtgtggaccaacccttgctagacttgatt

SEQ ID NO: 69845 - DNA, 80 bp, synthetic construct
  source 1..80: mol_type = other DNA
tgatctccgataaggaaatggctgaccgatgcgccacgtggcttaacatggaagtaaaaatcatcgatgcggtcatcggt

SEQ ID NO: 69846 - DNA, 80 bp, synthetic construct
  source 1..80: mol_type = other DNA
gaaagtccgccgtatttttgcggcggcttcatactgcaagattcagtcacacttaccgcatgccgggtggctgacccatt

SEQ ID NO: 69847 - DNA, 80 bp, synthetic construct
  source 1..80: mol_type = other DNA
gaagagactgttcaagcttggaaaaccgctacccgcggacgacaatcaagacgaggataggagacgcgccctcctggatg

SEQ ID NO: 69848 - DNA, 80 bp, synthetic construct
  source 1..80: mol_type = other DNA
agaccaaagcgtggtttagagtcggtattactctgacactagactccgccgtggcgactaggtacgaggtggataacatc

SEQ ID NO: 69849 - DNA, 80 bp, synthetic construct
  source 1..80: mol_type = other DNA
gcacccgtattgttggcactacggacgtttgcctcgagcaaaaaggcatttcaggccatcagaggagaagtaaagcagct

SEQ ID NO: 69850 - DNA, 80 bp, synthetic construct
  source 1..80: mol_type = other DNA
ctacggtggtcctaaatagtgcactatcatacacagtatatgatttgacaccgcaccgccaccatgaatagaggaatatt

SEQ ID NO: 69851 - DNA, 80 bp, synthetic construct
  source 1..80: mol_type = other DNA
taacatgctgagccgccgccccttccccgcccccacagctatgtggaggcctaggcgaaggaggcaggcggcaccactgc

SEQ ID NO: 69852 - DNA, 80 bp, synthetic construct
  source 1..80: mol_type = other DNA
ctcaacaaccaaggccacgcccgctaccacgccctaagaagcagtccccgaagcaaccaccgaatgctaaaaagacaaaa

SEQ ID NO: 69853 - DNA, 80 bp, synthetic construct
  source 1..80: mol_type = other DNA
ccgcaggagaacaaggagaaacaacccgcaaaaccgaagccgggtaagagacagcgtatggcactaaaattgatgctgac

SEQ ID NO: 69854 - DNA, 80 bp, synthetic construct
  source 1..80: mol_type = other DNA
aggactctttgacgtgaacaacgaagccggtgacgtaataggacacgccctcgctatggaaggcaaagtgatgaagccac

SEQ ID NO: 69855 - DNA, 80 bp, synthetic construct
  source 1..80: mol_type = other DNA
ttcacgtgaaaggggtcatagaccacccggttttggcaaagctgaaatttaccaagtcatcagcgtacgacatggagttc

SEQ ID NO: 69856 - DNA, 80 bp, synthetic construct
  source 1..80: mol_type = other DNA
gcaccctgaaggcttctacaactggcatcatggtgccgtgcagtacagcggcggtcgctttacagtcccgcgcggagttg

SEQ ID NO: 69857 - DNA, 80 bp, synthetic construct
  source 1..80: mol_type = other DNA
ggggaaaaggcgacagtggaagaccgatcatggataatacaggtaaggtggtcgcgatagtgctgggcggcgctgacgaa

SEQ ID NO: 69858 - DNA, 80 bp, synthetic construct
  source 1..80: mol_type = other DNA
ggcgcccgcactgctctctccgtcgtcacttggaacagcaaaggaaagaccatcaaaacgactccggaagggactgagga

SEQ ID NO: 69859 - DNA, 80 bp, synthetic construct
  source 1..80: mol_type = other DNA
gtgcttctttgagaatgtatcgttcccgtgcagtcgtccgcctacgtgctattcccgaaaaccatctcgtgcccttgaca

SEQ ID NO: 69860 - DNA, 80 bp, synthetic construct
  source 1..80: mol_type = other DNA
tcctggaggagaacgtgaacaacgacgcctacgataccttattagcggcagtgttgaagtgcaggacgtccggtcggaac

SEQ ID NO: 69861 - DNA, 80 bp, synthetic construct
  source 1..80: mol_type = other DNA
aaacgcagcatcaccgacgatttcaccctgaccagcccgtacctgggcacttgctcgtattgccatcatactgaaccctg

SEQ ID NO: 69862 - DNA, 80 bp, synthetic construct
  source 1..80: mol_type = other DNA
cttcagcccaattaagatcgagcaagtttgggacgaggcggacgacggatcaatacgaatacagacatccgcccagttcg

SEQ ID NO: 69863 - DNA, 80 bp, synthetic construct
  source 1..80: mol_type = other DNA
ggtacgaccaaagtggggcagcagacgtcaacaagtacaggtacatgtcaattgaccaggaccatgccgtgaaagaaggc

SEQ ID NO: 69864 - DNA, 80 bp, synthetic construct
  source 1..80: mol_type = other DNA
tctatggatcatatcaagatcagcacatccgggccctgtaggcggcttcaatcacaaaggtacttcttgcttgcgaaatg

SEQ ID NO: 69865 - DNA, 80 bp, synthetic construct
  source 1..80: mol_type = other DNA
cccaccgggagatagcgttacggttagcataaccggcggcactatggccacctcctgtacattagcacgtaaaataaggc

SEQ ID NO: 69866 - DNA, 80 bp, synthetic construct
  source 1..80: mol_type = other DNA
aaaaattcgtaggacgtgagaagtatgaccttcccccagcacacggaaagaacatcccctgcaccgtgtatgatcgtctt

SEQ ID NO: 69867 - DNA, 80 bp, synthetic construct
  source 1..80: mol_type = other DNA
aaggagacgtcagccggatacatcaccatgcacaggcctggacctcatgcctatacctcatacctagaggctacctcagg

SEQ ID NO: 69868 - DNA, 80 bp, synthetic construct
  source 1..80: mol_type = other DNA
aaaaatttacgccaaaccaccatcaggaaagaacatcacgtacgagtgtaagtgtggcgattataaaactgcgaccgttt

SEQ ID NO: 69869 - DNA, 80 bp, synthetic construct
  source 1..80: mol_type = other DNA
ttccgtcagaacagagatcgcaggatgtactgccataaaacagtgcgtggcgtacaagagcgaccagaccaagtgggtgt

SEQ ID NO: 69870 - DNA, 80 bp, synthetic construct
  source 1..80: mol_type = other DNA
tcaactcgcccgatctaatcaggcacgctgaccacacagcccaaggtaaattccactttcctttcaagcctaccttcagt

SEQ ID NO: 69871 - DNA, 80 bp, synthetic construct
  source 1..80: mol_type = other DNA
acatgcctggtaccactggcacacgagccgactgtaattcatgggttcaaacacataagcctccatttagacacagacca

SEQ ID NO: 69872 - DNA, 80 bp, synthetic construct
  source 1..80: mol_type = other DNA
cccaaccttgctcaccattagaagactgggcgagaaacccgaaccgacgtcggagtggatctcaggaaaaacagttagga

SEQ ID NO: 69873 - DNA, 80 bp, synthetic construct
  source 1..80: mol_type = other DNA
attttactgtcgacagagacgggctagagtatatatggggcaatcacgaaccggtgagagtatatgcacaagagtccgcc

SEQ ID NO: 69874 - DNA, 80 bp, synthetic construct
  source 1..80: mol_type = other DNA
cagcttccgctgtggcggtgatagtcggcctggccaccgccgtgatgtgtatctgcagagcgcgacgggagtgcctaacc

SEQ ID NO: 69875 - DNA, 80 bp, synthetic construct
  source 1..80: mol_type = other DNA
ccgtacgcgttagccccgaatgcagtcatcccgacgtccttggccttattgtgctgcgttcggtccgccaacgccgaatc

SEQ ID NO: 69876 - DNA, 80 bp, synthetic construct
  source 1..80: mol_type = other DNA
tttcaccgacacgatgggatacctatggtcgaacagtcaaacatttttctgggtgcagctgtgcatccccttggcagtag

SEQ ID NO: 69877 - DNA, 80 bp, synthetic construct
  source 1..80: mol_type = other DNA
taatagtactcgtacgctgctgttcgtgctgcctcccttttttagtggttgcaggcgcctacctggcgaaggtagacgcc

SEQ ID NO: 69878 - DNA, 80 bp, synthetic construct
  source 1..80: mol_type = other DNA
cattaacagtctatgaaccaatgcagggctgttatcggactttgtcactcttccgatatagaagtaaattctttgtgggc

SEQ ID NO: 69879 - DNA, 80 bp, synthetic construct
  source 1..80: mol_type = other DNA
ccattcttatgttcacattgtgctgtccacgtaggcctagctacaggaaagagcataagccatgatcattaattgctagc

SEQ ID NO: 69880 - DNA, 80 bp, synthetic construct
  source 1..80: mol_type = other DNA
acaagtcttatactgatgcactaataaaattcttgtatagttattttaaatcatttacttcgtaatatatttagtgtact

SEQ ID NO: 69881 - DNA, 80 bp, synthetic construct
  source 1..80: mol_type = other DNA
cagtcaatgatatgaatttgatgggttgggcacaaatttacattaaatcattattcaaattaaacatacactgattgggt

SEQ ID NO: 69882 - DNA, 80 bp, synthetic construct
  source 1..80: mol_type = other DNA
tgttgttgttaagtctctgtttagaatagggttttgtctggtgtaaattttatttttttattgttttatcaatgtgaatt

SEQ ID NO: 69883 - DNA, 80 bp, synthetic construct
  source 1..80: mol_type = other DNA
tagcaattgtaatcatttatagtagctctaatcatagcaatagttatatggaccttagcatatatagaatataggaaatt

SEQ ID NO: 69884 - DNA, 80 bp, synthetic construct
  source 1..80: mol_type = other DNA
agtaaaaaagactcaagtatctgtaaaatctcctgttatattaaggtcaagaactaaaaattagtgctattaacttgctc

SEQ ID NO: 69885 - DNA, 80 bp, synthetic construct
  source 1..80: mol_type = other DNA
tgctgacaagagattttacatccgttggggactttccagggcggtgtggcctgggcgggactggggaatggctaacccta

SEQ ID NO: 69886 - DNA, 80 bp, synthetic construct
  source 1..80: mol_type = other DNA
agactagcatttgaacacaaggccagaataaaacatccggagtactttaaagactgctgaaactgctgacacaagattgc

SEQ ID NO: 69887 - DNA, 80 bp, synthetic construct
  source 1..80: mol_type = other DNA
tggcacgtaagcctcaataaagcttgccttgagtgcggcggaggctagaaggagagagatggcacgtaagcctcaataaa

SEQ ID NO: 69888 - DNA, 80 bp, synthetic construct
  source 1..80: mol_type = other DNA
tggacttcaaatagcataattgtattttgtggaacctcaggtacctatggaacaggctcatggcctgatggggcgaatat

SEQ ID NO: 69889 - DNA, 80 bp, synthetic construct
  source 1..80: mol_type = other DNA
actatgtcaagctttcaggtagactgctttctttggcatgtccgcaaacgatttgcagaccaagaactgggcgacgcccc

SEQ ID NO: 69890 - DNA, 80 bp, synthetic construct
  source 1..80: mol_type = other DNA
gctccctaacggggcctatggagtaaaagggttttcatttaaatacggcgatggtgtttggatcgggagaaccaaaagca

SEQ ID NO: 69891 - DNA, 80 bp, synthetic construct
  source 1..80: mol_type = other DNA
catatgtcaacatcagcaataccaattttcttactgagaaagttgtggcttcaatagcattatcgggcaattcatctctt

SEQ ID NO: 69892 - DNA, 80 bp, synthetic construct
  source 1..80: mol_type = other DNA
ttttgcttaatgcgtcttggttcaactccttcctcacacatgcactaaaatagttgtggcaatgctactatttgctatcc

SEQ ID NO: 69893 - DNA, 80 bp, synthetic construct
  source 1..80: mol_type = other DNA
acatgtttgtgtaactggagatgatagaaatgcaactgctagcatcatttatgatgggatacttgttgacagtattggtt

SEQ ID NO: 69894 - DNA, 80 bp, synthetic construct
  source 1..80: mol_type = other DNA
ccaatcataatagaaaggagcgtagtgcatttgaatagtactatcatagaaaaagaaatttgtcctaaaatgacagaata

SEQ ID NO: 69895 - DNA, 80 bp, synthetic construct
  source 1..80: mol_type = other DNA
tgcatgtttgtgttactggggatgacaggaatgcaactgccagtttcatttataatgggaggcttgtcgacagtattggt

SEQ ID NO: 69896 - DNA, 80 bp, synthetic construct
  source 1..80: mol_type = other DNA
catttacaggaaacactgaaggcagaacatctgacatgaggactgagatcataagaatgatggaaagtgccagaccagaa

SEQ ID NO: 69897 - DNA, 80 bp, synthetic construct
  source 1..80: mol_type = other DNA
tatccagtacttcctgcctctgcataaagtatattttgttcctctttaggaattcagcttcctgtgctggtgtgcctgga

SEQ ID NO: 69898 - DNA, 80 bp, synthetic construct
  source 1..80: mol_type = other DNA
ggtccgatgttgaccctgctgagtctgccattagtgacatctctgggtcctatgtcgtccctggcacagctctccaaccg

SEQ ID NO: 69899 - DNA, 80 bp, synthetic construct
  source 1..80: mol_type = other DNA
ccccgcagagattgtggctcgcgcgtgccggctgaccgccacagtaaaggtatcccaggtcgatgggcggatcgattgcg

SEQ ID NO: 69900 - DNA, 80 bp, synthetic construct
  source 1..80: mol_type = other DNA
ttggtaacaaaaccttccgcacgtcgtttgtcgacggggcggtcttagagaccaatggcccagagcgccacaatctctcc

SEQ ID NO: 69901 - DNA, 80 bp, synthetic construct
  source 1..80: mol_type = other DNA
tatacccgtacttggtcggaggttgatgccgtctctagtccagcccggcccgacttaggttttgtgtctgagccctctat

SEQ ID NO: 69902 - DNA, 80 bp, synthetic construct
  source 1..80: mol_type = other DNA
gccgccacgcctactttggcggcccctctacccccccctgcaccggctccttccccccctccttctgcctcggcgcccga

SEQ ID NO: 69903 - DNA, 80 bp, synthetic construct
  source 1..80: mol_type = other DNA
tgagccggcttctggtactaccgccggggccccggccataacccaccaaatggcccggcaccgccgcctgctcttcacct

SEQ ID NO: 69904 - DNA, 80 bp, synthetic construct
  source 1..80: mol_type = other DNA
cggctttgctgctttcaccccgcacactgccgctagagtcacccaggggcgccgggttgtcattgatgaggctccatccc

SEQ ID NO: 69905 - DNA, 80 bp, synthetic construct
  source 1..80: mol_type = other DNA
cgttcgttgttctggggtgagcctgccgtcgggcagaaattagtgttcacccaggcggccaaggccgccaaccccggctc

SEQ ID NO: 69906 - DNA, 80 bp, synthetic construct
  source 1..80: mol_type = other DNA
gctagtggaggccatggtcgagaagggccaagatggctccgccgtccttgagctcgacctttgcaatcgtgacgtgtcca

SEQ ID NO: 69907 - DNA, 80 bp, synthetic construct
  source 1..80: mol_type = other DNA
caggtgagaccattgcccatggtaaagtgggccagggcatctcggcctggagcaagaccttctgcgccctctttggccct

SEQ ID NO: 69908 - DNA, 80 bp, synthetic construct
  source 1..80: mol_type = other DNA
cagggtgtgttttatggtgatgcctttgatgacaccgtcttctcggcggctgtggccgcagcaaaggcatctatggtgtt

SEQ ID NO: 69909 - DNA, 80 bp, synthetic construct
  source 1..80: mol_type = other DNA
tctggggtgaccgggttgattctccgcccttcgcaatcccctatattcatccaaccaaccccttcgcccccgatgtcacc

SEQ ID NO: 69910 - DNA, 80 bp, synthetic construct
  source 1..80: mol_type = other DNA
tcacgtcgtagacctaccacaactggggccgcgccgctaaccgcggtcgctccggcccatgacaccccgccagtgcctga

SEQ ID NO: 69911 - DNA, 80 bp, synthetic construct
  source 1..80: mol_type = other DNA
cggggtggctcaggaggaggccacctctggtcttgttatgctttgcatacatggctcacccgtaaattcctatagtaata

SEQ ID NO: 69912 - DNA, 80 bp, synthetic construct
  source 1..80: mol_type = other DNA
tccgcggcaagctctctttctgggaggcgggcacaactaaggccgggtacccttataattacaacaccactgctagcgac

SEQ ID NO: 69913 - DNA, 80 bp, synthetic construct
  source 1..80: mol_type = other DNA
tgatttctgcccagagtgccgcccccttggcctccagggctgcgctttccagtctactgtcgctgagctccagcgcctta

SEQ ID NO: 69914 - DNA, 80 bp, synthetic construct
  source 1..80: mol_type = other DNA
accgtctaatgctgttcggggccactttggatgaccaagccttttgctgctcccgtttaatgacctatcttcgcggcatt

SEQ ID NO: 69915 - DNA, 80 bp, synthetic construct
  source 1..80: mol_type = other DNA
ggatgcgtcgtctggaacgggagcatgcccagaagtttataacacgcctttacagctggctcttcgagaagtccggccgt

SEQ ID NO: 69916 - DNA, 80 bp, synthetic construct
  source 1..80: mol_type = other DNA
cagcccggcccgacttaggttttgtgtctgagccctctatacctagtagggccgccacgcctactttggcggcccctcta

SEQ ID NO: 69917 - DNA, 80 bp, synthetic construct
  source 1..80: mol_type = other DNA
ttgcattaatggtcagtgcccatattgtatgaccatgactgaagcaacagaaagtgcattacaagctcactttgctattt

SEQ ID NO: 69918 - DNA, 80 bp, synthetic construct
  source 1..80: mol_type = other DNA
ctctaggagtctttaggtataagagcagatgctatgttggcctagtatggtgtgtgttgctgacatgtgagcttattgtg

SEQ ID NO: 69919 - DNA, 80 bp, synthetic construct
  source 1..80: mol_type = other DNA
aagaactgcgctctttatataacgctctagcagttctttattgtgtccatagtaggatacagatacacaacacacaggaa

SEQ ID NO: 69920 - DNA, 80 bp, synthetic construct
  source 1..80: mol_type = other DNA
tcatagcgttaggagcagcagttagcatagcagtaatagtctgggcattactatatagagaatataagaaaataaaattg

SEQ ID NO: 69921 - DNA, 80 bp, synthetic construct
  source 1..80: mol_type = other DNA
gtggttggatggggatgaagagtggttggttactcttctatcttctagtaagcttgatcaaggtaattgggtctgaacaa

SEQ ID NO: 69922 - DNA, 80 bp, synthetic construct
  source 1..80: mol_type = other DNA
aacaatacaaatatgacaacaagagaaccagacataggatacaaacaaatgaaaaattgctcattcaatgcaaccactga

SEQ ID NO: 69923 - DNA, 80 bp, synthetic construct
  source 1..80: mol_type = other DNA
gctaacagataaaaagaagcaagtttactctctgttttatgtagaagatgtagtaccaatcaatgcctataataaaacat

SEQ ID NO: 69924 - DNA, 80 bp, synthetic construct
  source 1..80: mol_type = other DNA
agtcacagtaatctgttggtgcaatggaatgagacagtgccaataaattgtacaaggccaggaaataatacaggaggaca

SEQ ID NO: 69925 - DNA, 80 bp, synthetic construct
  source 1..80: mol_type = other DNA
ctaaagaactatgggaaccaatgtggaatagaacaagagaggaaataaagaaaatcctggggaaaaacaacataaccttc

SEQ ID NO: 69926 - DNA, 80 bp, synthetic construct
  source 1..80: mol_type = other DNA
ttgtaaatttgtggacaagggtaggaaaaggaatttatgcaccaccaattcggggagttcttaactgtacctccaatatt

SEQ ID NO: 69927 - DNA, 80 bp, synthetic construct
  source 1..80: mol_type = other DNA
actggactggttctagaatatagtggtgggcctgacaccaaggaaacaatagtatatccctcaggaggaaacatggttaa

SEQ ID NO: 69928 - DNA, 80 bp, synthetic construct
  source 1..80: mol_type = other DNA
tctctggagacaagagttgtataagtacaaagtagttagcatagaacccataggagtagcaccaggtaaagctaaaagac

SEQ ID NO: 69929 - DNA, 80 bp, synthetic construct
  source 1..80: mol_type = other DNA
cgtttagttgcgctgtttggttgaacagccttttcctgtgagagtacagagacaaacctagtcattggccatgggtcaag

SEQ ID NO: 69930 - DNA, 80 bp, synthetic construct
  source 1..80: mol_type = other DNA
ctttgcaagtgtccattaccaaccaagctgaagatatcaacagccccaagcccaccacctccctacgaagagtaacaccg

SEQ ID NO: 69931 - DNA, 80 bp, synthetic construct
  source 1..80: mol_type = other DNA
gcaagtccaaggagaaaaaagacaccaacaccggtgacagagccgagattctgccagacaccacctatctcggtccactg

SEQ ID NO: 69932 - DNA, 80 bp, synthetic construct
  source 1..80: mol_type = other DNA
ggccagacagcagattggtatacaatcggggtctatgtaataggattcacacttcccatcatcttaaaagccttatacat

SEQ ID NO: 69933 - DNA, 80 bp, synthetic construct
  source 1..80: mol_type = other DNA
atcacacctggacggtttcgtacaatagtttgtggcctgtttcctacacaaatacaagtacgtaacatcatgagtccagt

SEQ ID NO: 69934 - DNA, 80 bp, synthetic construct
  source 1..80: mol_type = other DNA
ggacatgggaaattaaaggtgatcttgcggagaacacacaggcatcttcaacaagtttccaaacaaaaagtagtgaagtg

SEQ ID NO: 69935 - DNA, 80 bp, synthetic construct
  source 1..80: mol_type = other DNA
tgaaggtatctgttttaatccaatacatacaatggcactctctcaacctagtcacacatatgatataatgaccatgatgg

SEQ ID NO: 69936 - DNA, 80 bp, synthetic construct
  source 1..80: mol_type = other DNA
tgaccatgatggttcgctgtttcttggtaataaagaaagtgacttctggtgacagtatgaagattgaaaagaactttgag

SEQ ID NO: 69937 - DNA, 80 bp, synthetic construct
  source 1..80: mol_type = other DNA
atcaatagtgactagcatctattctatattgcacttatcattagtactgttatataatcaattttatctttctaacctgt

SEQ ID NO: 69938 - DNA, 80 bp, synthetic construct
  source 1..80: mol_type = other DNA
gacttatttagtgtattatattttatcactatatagaaaaaaaactagcactttactaattacatcacttcataccgatt

SEQ ID NO: 69939 - DNA, 80 bp, synthetic construct
  source 1..80: mol_type = other DNA
aatgatgataggtatcattaattgtatatagattaattactagtatataggtcaaatgtattcagggattattgtaatca

SEQ ID NO: 69940 - DNA, 80 bp, synthetic construct
  source 1..80: mol_type = other DNA
tcgaatgttatcacaataatttagcactaatcataagggtagcactaaaggcagttatgaatgtatttttatctatgtag

SEQ ID NO: 69941 - DNA, 80 bp, synthetic construct
  source 1..80: mol_type = other DNA
tcttgtattattatccaatttagagttaagaacatcaaattatattatatatccttatttaatgggcccaaaaatgtgaa

SEQ ID NO: 69942 - DNA, 80 bp, synthetic construct
  source 1..80: mol_type = other DNA
gcaagtagcatatatataagtacacaattcactacctcaacatgcagatttcttgattgcttttcaagagcatactacta

SEQ ID NO: 69943 - DNA, 80 bp, synthetic construct
  source 1..80: mol_type = other DNA
gattgagttcttaaagaaaaataagatctattttatgcagcgccaggatgtgcttgataaaaatcatgtggctgacattg

SEQ ID NO: 69944 - DNA, 80 bp, synthetic construct
  source 1..80: mol_type = other DNA
ggttgaatttttgaagaaaaataagatctacttcatccaaagccaagatgtgcttgataaaaatcatgtggctgatattg

SEQ ID NO: 69945 - DNA, 80 bp, synthetic construct
  source 1..80: mol_type = other DNA
gtctttgcatgtgctccggaccgatgcccaccaacatgtatctatgttgcagggatggcagagcttggggctttcttttc

SEQ ID NO: 69946 - DNA, 80 bp, synthetic construct
  source 1..80: mol_type = other DNA
gattgagatgttaaaaagaaataagatttatttcatgcagcgccaggatgtgcttgacaaaaatcatgtggcagacattg

SEQ ID NO: 69947 - DNA, 80 bp, synthetic construct
  source 1..80: mol_type = other DNA
aatgactcttaatttatgtttaccatagagacagttagttactaacatgcagatgtgtattatcagggattagaatgata

SEQ ID NO: 69948 - DNA, 80 bp, synthetic construct
  source 1..80: mol_type = other DNA
aatttactaacataaaatatacaggtttaattatatattattatcagggtagtagcaatataattatcaggtttattaac

SEQ ID NO: 69949 - DNA, 80 bp, synthetic construct
  source 1..80: mol_type = other DNA
taatgaactaatcagggtttaactggaagtaagggtttgatattaattattcctaatattgaatgtaatagactactaat

SEQ ID NO: 69950 - DNA, 80 bp, synthetic construct
  source 1..80: mol_type = other DNA
taaccatgtagacataatccagatatatatgtgatactatgttattactcaggttgtttaggtaggtattagtttatagt

SEQ ID NO: 69951 - DNA, 80 bp, synthetic construct
  source 1..80: mol_type = other DNA
caattttattatttagtgggccccaaatggaaactgagctatctttttccatttcatcacttttctatcttaacttctac

SEQ ID NO: 69952 - DNA, 80 bp, synthetic construct
  source 1..80: mol_type = other DNA
ttctaccccagtgcacttgtacacaacaaactacctcaacatgctgatttcttgattgcttttcaaggagtctactacta

SEQ ID NO: 69953 - DNA, 80 bp, synthetic construct
  source 1..80: mol_type = other DNA
gcagcttagggaccagctaacattaataattattagtgctttgttgcttgtaaatgtagttctatggacatttattctta

SEQ ID NO: 69954 - DNA, 80 bp, synthetic construct
  source 1..80: mol_type = other DNA
aatagtagtgtaagtaatagtagtgtaagtaatagtagtgtaagtaatagtagtgtaagtgatagtactatacccaagaa

SEQ ID NO: 69955 - DNA, 80 bp, synthetic construct
  source 1..80: mol_type = other DNA
gaaaaataacagcagctcagaggaccttctgaaacagtgtgattttaatgcaaccacagttctcaaagacaaaaaggaga

SEQ ID NO: 69956 - DNA, 80 bp, synthetic construct
  source 1..80: mol_type = other DNA
aaaaacagactctattttatgtatcagatttgatgaaactgacaaatgtcacaaatgacacaatgtatacattaattaat

SEQ ID NO: 69957 - DNA, 80 bp, synthetic construct
  source 1..80: mol_type = other DNA
tgagtacgcaactaatattaaacgggacactctctgaaggaaaaataagaattatgggaagaaatatcacggacagtgga

SEQ ID NO: 69958 - DNA, 80 bp, synthetic construct
  source 1..80: mol_type = other DNA
aaaaatattatagttaccctaaattatactataaacataacttgtgagagaacatggaatcagtcagtacaagagatacc

SEQ ID NO: 69959 - DNA, 80 bp, synthetic construct
  source 1..80: mol_type = other DNA
tataggtccaatggcctggtacagcatgagcgtagagaaagacaaaaacacaactggctcgaggtcagcagattgccagt

SEQ ID NO: 69960 - DNA, 80 bp, synthetic construct
  source 1..80: mol_type = other DNA
ataacacctctgaatggacaagagccttagaacaaacagctgaaaggtatttagaactgatgaacaatacaggtaatact

SEQ ID NO: 69961 - DNA, 80 bp, synthetic construct
  source 1..80: mol_type = other DNA
gataatactacagtgatattcaatcatagcactggtggagatccagaggtatccttcctacattttaattgtcatggaga

SEQ ID NO: 69962 - DNA, 80 bp, synthetic construct
  source 1..80: mol_type = other DNA
gttcttctattgtaacacatctgggatgtttaattataccttttcatgtaaaggaactaactgtacccaagttggttccc

SEQ ID NO: 69963 - DNA, 80 bp, synthetic construct
  source 1..80: mol_type = other DNA
aaaatgaatataataatcatacaaccaagataccttgcaggataaaacaggtggtaaggtcatggataaggggagggtcg

SEQ ID NO: 69964 - DNA, 80 bp, synthetic construct
  source 1..80: mol_type = other DNA
ggactctatgcacctcccaggcaaggtcccctaaaatgtagctcaaacataactggaatgattctacaattggataagcc

SEQ ID NO: 69965 - DNA, 80 bp, synthetic construct
  source 1..80: mol_type = other DNA
atggaacagaagtgggcacaacaatgacaccacatttagaccaataggaggagaaatgaaagatatatggagaactgaat

SEQ ID NO: 69966 - DNA, 80 bp, synthetic construct
  source 1..80: mol_type = other DNA
tacttaatatagtgaagaacattaggcagggatatcaacccctctcatttcagacccccatccatcaccagccggaagca

SEQ ID NO: 69967 - DNA, 80 bp, synthetic construct
  source 1..80: mol_type = other DNA
tgatcagttatctgggacttggactgtggatcctgggacagaagataattaatgcttgcagaatttgcctatctgtagca

SEQ ID NO: 69968 - DNA, 80 bp, synthetic construct
  source 1..80: mol_type = other DNA
caatactggcttcaagaattgcagaatagcgctacaagcatactagatacccttgcagtgacagttgccaattggactga

SEQ ID NO: 69969 - DNA, 80 bp, synthetic construct
  source 1..80: mol_type = other DNA
cagtataattttagggatacaaaggataggaaggggaatacttaataccccaaggagaattagacagggcttagaaagaa

SEQ ID NO: 69970 - DNA, 80 bp, synthetic construct
  source 1..80: mol_type = other DNA
ttcccctaagcctgatccattgggaaaaacttcccctgagcctgaaccatgtgctcctggagtaggacaaatctccaggg

SEQ ID NO: 69971 - DNA, 80 bp, synthetic construct
  source 1..80: mol_type = other DNA
aattagcagcaagaggagggataccaagttcccatactcctcaaaacaatgcaacccttgcattcctagaaagtcaccaa

SEQ ID NO: 69972 - DNA, 80 bp, synthetic construct
  source 1..80: mol_type = other DNA
ctcatgcatccagcttgcaaccatggctttggagattcacatagggaaatgctgaaatggcaatttgatagatcactagg

SEQ ID NO: 69973 - DNA, 80 bp, synthetic construct
  source 1..80: mol_type = other DNA
gtattacatgtaatggtacctttaacagtaggaataatagcattagtagcagcgctaatactagcaataattgtgtggac

SEQ ID NO: 69974 - DNA, 80 bp, synthetic construct
  source 1..80: mol_type = other DNA
tcagtcctgtgatgagtgtgattgggtttttagcccttgcaaagaactggacagagcgggttgaggaatggcttgacctc

SEQ ID NO: 69975 - DNA, 80 bp, synthetic construct
  source 1..80: mol_type = other DNA
ttttgctttggttggatactaatcccttctatcacactagctatattgattgtcttgaagttctttgctgcaatcttaca

SEQ ID NO: 69976 - DNA, 80 bp, synthetic construct
  source 1..80: mol_type = other DNA
tcgattgtgatctattgtaatggacagaaaaaaaccatcttaacaaagacattggtgattggacagtgtatttactcagt

SEQ ID NO: 69977 - DNA, 80 bp, synthetic construct
  source 1..80: mol_type = other DNA
aaggactgcgctctttgtttaacaccctggcagttctttattgtgtccatagtaacataccggtacacaatacacaagag

SEQ ID NO: 69978 - DNA, 80 bp, synthetic construct
  source 1..80: mol_type = other DNA
cctgataagcttgacaattgggtctgacccacattgggtaacagtgtactatggagtaccagtatggagagacgcagaga

SEQ ID NO: 69979 - DNA, 80 bp, synthetic construct
  source 1..80: mol_type = other DNA
gggaatagtactaccaataggacagaggatctagaagacagacaaatgaaaaattgctcattcaatataaccactgagat

SEQ ID NO: 69980 - DNA, 80 bp, synthetic construct
  source 1..80: mol_type = other DNA
aagagatagaaagaagcaagtttactctctgttttatgtagaagatgtagtgccaatcaaagatgggactgacaataata

SEQ ID NO: 69981 - DNA, 80 bp, synthetic construct
  source 1..80: mol_type = other DNA
gctttagacaagataaaagagaaacaggaacagcacaagtccgagccaaagaaaccagaagcagggacagcggcggcagc

SEQ ID NO: 69982 - DNA, 80 bp, synthetic construct
  source 1..80: mol_type = other DNA
gcagataggacctgctatgacattttataatatagaaaaaatagtaggagacgttagacaagcatactgtaatgtctctg

SEQ ID NO: 69983 - DNA, 80 bp, synthetic construct
  source 1..80: mol_type = other DNA
aagaatggggatcaatgtggaataaaacaaaaaagaagataaaaagactcctgggaaacaacacaactttcaaagctcag

SEQ ID NO: 69984 - DNA, 80 bp, synthetic construct
  source 1..80: mol_type = other DNA
gataaaaatggaggagacctagaagtaacacacttaatgttcaattgtggaggagagtttttctattgcaacacttccag

SEQ ID NO: 69985 - DNA, 80 bp, synthetic construct
  source 1..80: mol_type = other DNA
attatttaatgagagcgagaacaagactaataagactattattctgccctgtagaataaaacaaattgtagatttgtgga

SEQ ID NO: 69986 - DNA, 80 bp, synthetic construct
  source 1..80: mol_type = other DNA
gaacatagtggtgaaaacggtaacaagacagtatatccctcaggaggaaacatggttaatctctggagacaagaactgta

SEQ ID NO: 69987 - DNA, 80 bp, synthetic construct
  source 1..80: mol_type = other DNA
taagtacaaagtagttagtatagaacccataggagtagcaccaggtaaagccaaaagacgcacagtgagtagagaaaaga

SEQ ID NO: 69988 - DNA, 80 bp, synthetic construct
  source 1..80: mol_type = other DNA
tcggaaagtaaggaactattcaggtgtcatttttgatcttatagagcaagcacaagaacaacaaaacacaaatgagaaag

SEQ ID NO: 69989 - DNA, 80 bp, synthetic construct
  source 1..80: mol_type = other DNA
aataatgccctcctgcatcccatatgtcaacatggagtagatgatgatcacaaacaagtgctggtgtggcggtttgacag

SEQ ID NO: 69990 - DNA, 80 bp, synthetic construct
  source 1..80: mol_type = other DNA
ctccctggcaagaagacacgtagcaaaagagctgcatccggacttctacaagaactgctgacaagggactttacacgggg

SEQ ID NO: 69991 - DNA, 80 bp, synthetic construct
  source 1..80: mol_type = other DNA
ggggactttccgccaggggctttccaggaaggtgtggtcgggggagtggcttgccctcagagctgcataaaagcagccgc

SEQ ID NO: 69992 - DNA, 80 bp, synthetic construct
  source 1..80: mol_type = other DNA
cttgtgtcccgagtatgccacctcccgcggaggttaatacacctgtggtcttagatgccctaccttcagagattatggag

SEQ ID NO: 69993 - DNA, 80 bp, synthetic construct
  source 1..80: mol_type = other DNA
ccggcccaacctccagcttctgagccggcggcacctccatccgattcagtcgataatagttttagccccacctcatccgg

SEQ ID NO: 69994 - DNA, 80 bp, synthetic construct
  source 1..80: mol_type = other DNA
tgctcccattgcacctccggcaccggcgctgcctgtaacccacctatctgggccccgccggcggttgcttcatacttacc

SEQ ID NO: 69995 - DNA, 80 bp, synthetic construct
  source 1..80: mol_type = other DNA
ggacgctgtcttgaggagggtgctcatccacgttccattaatgacgaccctaacgtcctgcaccgctgctttcttaaacc

SEQ ID NO: 69996 - DNA, 80 bp, synthetic construct
  source 1..80: mol_type = other DNA
tgttggccgtgatgttcagcggtggtataccgctcctacccgtggccctgcagctaactgccggcggtccgctcttcgcg

SEQ ID NO: 69997 - DNA, 80 bp, synthetic construct
  source 1..80: mol_type = other DNA
cgcaccaagttgtacgaggccgcacacacagatgttcgtgggtccctgaatcactttattcctgagcttggccccattaa

SEQ ID NO: 69998 - DNA, 80 bp, synthetic construct
  source 1..80: mol_type = other DNA
tggttgtagccccaggtcttgggactctgcctgatgttgttaggtttgctggccggctctcggaaaagaactgggggcca

SEQ ID NO: 69999 - DNA, 80 bp, synthetic construct
  source 1..80: mol_type = other DNA
ctgtatctgctgttggtgtcctcgcccctcactctgcgctggctgctttggaggataccgctgactaccctgctcgcgcc

SEQ ID NO: 70000 - DNA, 80 bp, synthetic construct
  source 1..80: mol_type = other DNA
caatcacgaccttcaagcaacgttgggtgcgatcaaatggatttctccttaactaaaggtattaatgttagtgctagtct

SEQ ID NO: 70001 - DNA, 80 bp, synthetic construct
  source 1..80: mol_type = other DNA
gattttggtctattaggtacaacacttttaaatttagatgctaattatgttgaaaatgcaagaactacgattgaatattt

SEQ ID NO: 70002 - DNA, 80 bp, synthetic construct
  source 1..80: mol_type = other DNA
aaaactggaatctacaaaatagaagacaacgtactggatttgtctttcataaacctaatatatttccatactcagcttcg

SEQ ID NO: 70003 - DNA, 80 bp, synthetic construct
  source 1..80: mol_type = other DNA
gcagccaataattgcactgataattgtaggtctaataagtactaacatgtagatttattattcagggattgccttagtta

SEQ ID NO: 70004 - DNA, 80 bp, synthetic construct
  source 1..80: mol_type = other DNA
aatgaccctaaattattgtttactctagggatagttagttactaacatgcagacatgtattatcagggattagtgtacta

SEQ ID NO: 70005 - DNA, 80 bp, synthetic construct
  source 1..80: mol_type = other DNA
agtttattaacataaaacatacagattcaattatatattattatcagggtagtcgtaatataattattaggtttatcaat

SEQ ID NO: 70006 - DNA, 80 bp, synthetic construct
  source 1..80: mol_type = other DNA
gggttttgtattgattatccccaatattgaatgtaatggactactaatgacagttatgaatgtaatcatgtacacataat

SEQ ID NO: 70007 - DNA, 80 bp, synthetic construct
  source 1..80: mol_type = other DNA
caggtatatatgtgatattatgctattactcaggttatttaggtaggtattagtttatagccaatcttattatttaatgg

SEQ ID NO: 70008 - DNA, 80 bp, synthetic construct
  source 1..80: mol_type = other DNA
caggggaagacagacggtgaaggagaataaagggacacgtatacggttcaaagatgatacatcttttgaagacataaatg

SEQ ID NO: 70009 - DNA, 80 bp, synthetic construct
  source 1..80: mol_type = other DNA
ggattgggttgagaggataagagaatttatggaaaaggaatgccccttcgtaaagccagagcttaaacctgggacaaatg

SEQ ID NO: 70010 - DNA, 80 bp, synthetic construct
  source 1..80: mol_type = other DNA
gttttgaatgtgtgcgatgacgaaagatggaaaacgtcaataatggaagtctttaattgtctagaaccagtagagcttga

SEQ ID NO: 70011 - DNA, 80 bp, synthetic construct
  source 1..80: mol_type = other DNA
gttctgaatgtgtgtgataatgaaaaatggaaaacgttaataatgaaagtttttaattgtctagaaccagtagagcttga

SEQ ID NO: 70012 - DNA, 80 bp, synthetic construct
  source 1..80: mol_type = other DNA
ttaagtttgcccgaaaggaaactggaagaaaatacacatgaatataaacttttcaaagtacttattaaggtaaatattaa

SEQ ID NO: 70013 - DNA, 80 bp, synthetic construct
  source 1..80: mol_type = other DNA
gttctcgcaaggtgataccctagtattcctaggccctatggaaggtgggggtttgatatttaaggattggtgcactagca

SEQ ID NO: 70014 - DNA, 80 bp, synthetic construct
  source 1..80: mol_type = other DNA
tccggaaaaaatgcaactttgcaacaacacctgtgtgcgagtatgatggtaatatggtctctgggtataagaaagtaatg

SEQ ID NO: 70015 - DNA, 80 bp, synthetic construct
  source 1..80: mol_type = other DNA
aaagttgaagatacgcagcaggcaatacagaaactaaaggaagtaatggggagcaggaagtctgcaggtaccgctaagga

SEQ ID NO: 70016 - DNA, 80 bp, synthetic construct
  source 1..80: mol_type = other DNA
ggaaccaacaggaagtgacattgctggaacaactagcacccagcaagagcaagttcactggattaccaggcccaaccaac

SEQ ID NO: 70017 - DNA, 80 bp, synthetic construct
  source 1..80: mol_type = other DNA
actaggaaacaagtgtgagagggctagcctcctgcatccagcttgcaaccatggctttgaagacaaccacgggcaaatac

SEQ ID NO: 70018 - DNA, 80 bp, synthetic construct
  source 1..80: mol_type = other DNA
aagatctgaagggaggatacacagcagtatttatgcaaagagggcaaaacccaagtaggaaagggcctataaaatgtttc

SEQ ID NO: 70019 - DNA, 80 bp, synthetic construct
  source 1..80: mol_type = other DNA
tgaaatggcagtttgatagatcactaggcagcacccatgttgctatggtaaccaacccagagctctttaacaaggactaa

SEQ ID NO: 70020 - DNA, 80 bp, synthetic construct
  source 1..80: mol_type = other DNA
ttagtatagaatggaggtacaagaagtataaaacacagattgaccctgaaacagcagacagaatgatacatatatattat

SEQ ID NO: 70021 - DNA, 80 bp, synthetic construct
  source 1..80: mol_type = other DNA
ataagtgctattgcaaagcatgctgctaccattgctatgtttgttttgcaagcaagggtttgggaatctcctatggcagg

SEQ ID NO: 70022 - DNA, 80 bp, synthetic construct
  source 1..80: mol_type = other DNA
aagaagcgacggagaccagccgctgctgcgcgccatccagataatcaagatattgtaccagagcagtaagtaacgctaat

SEQ ID NO: 70023 - DNA, 80 bp, synthetic construct
  source 1..80: mol_type = other DNA
gcatcatagggacctgctagcattaataactactagtgctttgctgcttacaaatgtagttctatggacatttattctta

SEQ ID NO: 70024 - DNA, 80 bp, synthetic construct
  source 1..80: mol_type = other DNA
gacaatatttaaaacaaaagaaacaagataaaagggaaagagaaatacttgaaaggttaagaagaataagacaaattgag

SEQ ID NO: 70025 - DNA, 80 bp, synthetic construct
  source 1..80: mol_type = other DNA
gggcatcacaagcctgtgttcccacagacccctctccatatgaatatcctttaaccaaggtgacagataatttcaatata

SEQ ID NO: 70026 - DNA, 80 bp, synthetic construct
  source 1..80: mol_type = other DNA
caagggaattatacaaacaatagctccataaataatgataccagcagtccagagaaccttgtgaaacagtgtgaatttaa

SEQ ID NO: 70027 - DNA, 80 bp, synthetic construct
  source 1..80: mol_type = other DNA
tgtaaccacagttgtcaaagacaaaaaggagaaaaaacaggctctattctatgtatcagatttgatgaagataaatgaag

SEQ ID NO: 70028 - DNA, 80 bp, synthetic construct
  source 1..80: mol_type = other DNA
taagtactcaactaatattaaatgggacactctctgaaggaaacataagaattatgggaaaaaatatttcagacaatatg

SEQ ID NO: 70029 - DNA, 80 bp, synthetic construct
  source 1..80: mol_type = other DNA
aaaaatatcatagtgaccctaaattctactataaacatgacctgtgtgagacaaggaaatcagtcagtacaagagataca

SEQ ID NO: 70030 - DNA, 80 bp, synthetic construct
  source 1..80: mol_type = other DNA
aataggtccaatggcctggtacagcatgagcctggcccaagagggaaaaccaaataactcaaggatagcctattgcaagt

SEQ ID NO: 70031 - DNA, 80 bp, synthetic construct
  source 1..80: mol_type = other DNA
ataacatctctgattgggaaaaagccttaaaacagacagctgaaaggtatttagaccttaggaacaatacaaatacagtt

SEQ ID NO: 70032 - DNA, 80 bp, synthetic construct
  source 1..80: mol_type = other DNA
aacataacattcgagcgcagcattggtggagattcagaggtaacccatttgcatttcaactgtcatggagagttcttcta

SEQ ID NO: 70033 - DNA, 80 bp, synthetic construct
  source 1..80: mol_type = other DNA
ttgtaacacatctaagatgtttaattataccttttcatgtataggaaccaactgtactagtaaccaaaatagcagcaaca

SEQ ID NO: 70034 - DNA, 80 bp, synthetic construct
  source 1..80: mol_type = other DNA
gtaatgacactcggatatattgcaggataaaacaggtggtaaggtcatggatacagggagggtcaggactctatgcacct

SEQ ID NO: 70035 - DNA, 80 bp, synthetic construct
  source 1..80: mol_type = other DNA
cccaggaaaggtaacctaacatgcagctcactcataactggaatgattctacaattggatatgccatggaacagcaccaa

SEQ ID NO: 70036 - DNA, 80 bp, synthetic construct
  source 1..80: mol_type = other DNA
caacagcaacgccacatttagaccaacagggggagatatgaaagatatatggagaactgaattgttcaaatacaaagtag

SEQ ID NO: 70037 - DNA, 80 bp, synthetic construct
  source 1..80: mol_type = other DNA
taaaggtaaaaccttttagtgtggcacctacaaaaattgcaaggccagtcataggcactggcactcaaagagaaaaaaga

SEQ ID NO: 70038 - DNA, 80 bp, synthetic construct
  source 1..80: mol_type = other DNA
aaaatggaacacgacatggacaaattgcacaaataccaataagttagatgatatttgggacaagctaacatggcagcaat

SEQ ID NO: 70039 - DNA, 80 bp, synthetic construct
  source 1..80: mol_type = other DNA
gggatcagcagataagcaacgtaagttccatcatatatgaggaaatacgaaatgcacaagtacagcaggaacaaaatgag

SEQ ID NO: 70040 - DNA, 80 bp, synthetic construct
  source 1..80: mol_type = other DNA
aaaaagttgctggagttagatgaatgggcttctatttggaactggctggacataactaaatggttgtggtatataaaaat

SEQ ID NO: 70041 - DNA, 80 bp, synthetic construct
  source 1..80: mol_type = other DNA
agcaataatcatagtaggggcactaataggggtgagaattgttatgatagtacttaatctagtgaaaaacattaggcagg

SEQ ID NO: 70042 - DNA, 80 bp, synthetic construct
  source 1..80: mol_type = other DNA
gatatcaacccctctcatttaagactcacatacatcaccaaccggaagcagaagcgccaggaggaacaggagaaggaggt

SEQ ID NO: 70043 - DNA, 80 bp, synthetic construct
  source 1..80: mol_type = other DNA
ggagaacgaggcatgcccacgttgataccctggccgcaaggattcttgccactgttgtacacggacctcaggacaataat

SEQ ID NO: 70044 - DNA, 80 bp, synthetic construct
  source 1..80: mol_type = other DNA
cttgtggagctaccacctcttgagcaacttagcatcagggatccagacggtgatcagccatctgggacttggactgtgga

SEQ ID NO: 70045 - DNA, 80 bp, synthetic construct
  source 1..80: mol_type = other DNA
ctctgggacagaagataattagtgcttgcagactttgcatagctgtaatacaatactggctacaagagttgcagaatagt

SEQ ID NO: 70046 - DNA, 80 bp, synthetic construct
  source 1..80: mol_type = other DNA
gctacaagcctactagataccattgcagtggcagttgccaattggactgtcacaataattttagggatacaaaggatagg

SEQ ID NO: 70047 - DNA, 80 bp, synthetic construct
  source 1..80: mol_type = other DNA
aagaggaattcttaacatcccaagaagaattagacagggcttagaaagaagtttattataacatgggaaacgtattgggt

SEQ ID NO: 70048 - DNA, 80 bp, synthetic construct
  source 1..80: mol_type = other DNA
aaagatatatttaagggatggtcagcagtcagagaaagaatgagaggaacttcccctgatcctgaaccatgtgcacctgg

SEQ ID NO: 70049 - DNA, 80 bp, synthetic construct
  source 1..80: mol_type = other DNA
agtaggacaaatctccagggaattagcagctagaggagggataccaagttcctatactcctcaaaacaatgcagcccttg

SEQ ID NO: 70050 - DNA, 80 bp, synthetic construct
  source 1..80: mol_type = other DNA
ggagctggacagatccgcatgtaatcctgagctactagaaactgcagagggcaatgagaaactgttacagcagttagagc

SEQ ID NO: 70051 - DNA, 80 bp, synthetic construct
  source 1..80: mol_type = other DNA
ctcctgcatccagtttgcaaccatggctttgaagatccacacaaggagatgctgaaatggcagtttgatagatcactagg

SEQ ID NO: 70052 - DNA, 80 bp, synthetic construct
  source 1..80: mol_type = other DNA
cagccccaccgatgacggaggaaatgaagggacaagaaaatcaggaacagaagggggaccagaacgaactctatccgttt

SEQ ID NO: 70053 - DNA, 80 bp, synthetic construct
  source 1..80: mol_type = other DNA
acctgtatgggaagaggcaaccccagtactattctgtgcttcagatgttaacttaacgagcactgagcagcataatattt

SEQ ID NO: 70054 - DNA, 80 bp, synthetic construct
  source 1..80: mol_type = other DNA
gatgagaccaacagctccgtaaagaatgataccagcagctcagagaaccttatgaaaaagtgtgagtttaatgtaaccac

SEQ ID NO: 70055 - DNA, 80 bp, synthetic construct
  source 1..80: mol_type = other DNA
agttctcaaagacaaaaaggagaaacaacaggctctattctatgtatcagatttgatgaaagtgaatgaaaataatgaca

SEQ ID NO: 70056 - DNA, 80 bp, synthetic construct
  source 1..80: mol_type = other DNA
aacaggtccagtggcctggtacagcatgggcctgaaaaataacctaactaactcaagggcagcctcttgcaagtataaca

SEQ ID NO: 70057 - DNA, 80 bp, synthetic construct
  source 1..80: mol_type = other DNA
gctctgtttgggaagaagccttaaaacaaacagctgaaaggtatttagaacttatgaacaatacaaatacagttaacata

SEQ ID NO: 70058 - DNA, 80 bp, synthetic construct
  source 1..80: mol_type = other DNA
acattcaatcacagcactggtggagacccagaggtaacccatttgcattttaactgtcatggagaattcttctattgtaa

SEQ ID NO: 70059 - DNA, 80 bp, synthetic construct
  source 1..80: mol_type = other DNA
cacatctcagatgtttaattataccttttcatgtacaagaaccaactgtattagacaaagtaacagtagcattaatggca

SEQ ID NO: 70060 - DNA, 80 bp, synthetic construct
  source 1..80: mol_type = other DNA
caatatcttgcaggataaaacaggtggtaaggtcatggatacagggagggtcgggactttatgcacctcccaggccaggt

SEQ ID NO: 70061 - DNA, 80 bp, synthetic construct
  source 1..80: mol_type = other DNA
tacctaacatgcaactcatccataactggaatgattctacaattggataagacatggaaccgcaccaacaacagcgaatc

SEQ ID NO: 70062 - DNA, 80 bp, synthetic construct
  source 1..80: mol_type = other DNA
atggggctgtaaaggaaggctagtctgctacacatcagtaaaatggaacaggacatggacaaataataatactgatttag

SEQ ID NO: 70063 - DNA, 80 bp, synthetic construct
  source 1..80: mol_type = other DNA
atacaatttggggaaatctaacatggcaggaatgggatcagcagataagcaacataagcgccaccatatatgatgaaata

SEQ ID NO: 70064 - DNA, 80 bp, synthetic construct
  source 1..80: mol_type = other DNA
tagtacttaatctagtgagaaacattaggcatggatatcaacccctctcatttcagacccccacccatcaccaacaaccg

SEQ ID NO: 70065 - DNA, 80 bp, synthetic construct
  source 1..80: mol_type = other DNA
gaagcacaagcgccaggaggaacaggagaaggaggtggagaaagagacaggctcagatcgataccctcgccgcaaggatt

SEQ ID NO: 70066 - DNA, 80 bp, synthetic construct
  source 1..80: mol_type = other DNA
agacggtgatcagccatctgggacttggactgtggatcctgggacagaagataattagtgcttgcagaatttgcatagct

SEQ ID NO: 70067 - DNA, 80 bp, synthetic construct
  source 1..80: mol_type = other DNA
aaagagctttattgtaacatgggaaacgtattgggtaaagataaatttaagggatggtcagcagtcagagaaagaatgag

SEQ ID NO: 70068 - DNA, 80 bp, synthetic construct
  source 1..80: mol_type = other DNA
ttgtagcaactactaatgacagttatgaatgtaattactaatacaacattgatataatctatattgactaagtaagtgta

SEQ ID NO: 70069 - DNA, 80 bp, synthetic construct
  source 1..80: mol_type = other DNA
ggatttatcatacaaattaagtttaggagttatatccttttatttgtctagtgggcccaagaatgtgaaactgagctatc

SEQ ID NO: 70070 - DNA, 80 bp, synthetic construct
  source 1..80: mol_type = other DNA
cgtggaagacagactgtaaaagaaaataaaggaacacgcatacgttttaaggatgatacatcatttgaggacatcaatgg

SEQ ID NO: 70071 - DNA, 80 bp, synthetic construct
  source 1..80: mol_type = other DNA
gatgggggttataggattctcttttttcgtaaaggattggtcagagagggtgagagaatttatggagaaagaatgccctt

SEQ ID NO: 70072 - DNA, 80 bp, synthetic construct
  source 1..80: mol_type = other DNA
aaaatccctttccatttacaattgagtaaacaaattatacatgcagagatacagcatttaggccattggatggatgcaac

SEQ ID NO: 70073 - DNA, 80 bp, synthetic construct
  source 1..80: mol_type = other DNA
agatcagtggggaaagtttttaaaattatatctctaaggtatacaagaaaggcatgtcttcagttgggcaccgaacaaac

SEQ ID NO: 70074 - DNA, 80 bp, synthetic construct
  source 1..80: mol_type = other DNA
atctgataaaaaactgctctagcaatagcaccaccaaggtaaccgatgagataagaaatgaaatcgcgctttactatacg

SEQ ID NO: 70075 - DNA, 80 bp, synthetic construct
  source 1..80: mol_type = other DNA
gggtcgactctcaaagaaacacggtgaaaagtgaacttttgtggaaatttaccttagataccaatgtgagcactacaaat

SEQ ID NO: 70076 - DNA, 80 bp, synthetic construct
  source 1..80: mol_type = other DNA
ttcagcatctcaaggacaaatgaggtagttttaatagcaccattcattaacatcaaagcctttaaacaagctaaccactc

SEQ ID NO: 70077 - DNA, 80 bp, synthetic construct
  source 1..80: mol_type = other DNA
atgaagatggcgtctaaggacgcatcgccatctacggatggtgcagccaacctcgttccagagagtcaacaggaggtttt

SEQ ID NO: 70078 - DNA, 80 bp, synthetic construct
  source 1..80: mol_type = other DNA
actcttgggttaataggttttacacattaagccccatgggaacaggcaatggccgcagaagggctcgcatgcttgagtaa

SEQ ID NO: 70079 - DNA, 80 bp, synthetic construct
  source 1..80: mol_type = other DNA
gcggaacaacaaatcaaatttatctgtcaaagggtagatatggatatcactgtatattgtaatggagtaaaaaaagtgat

SEQ ID NO: 70080 - DNA, 80 bp, synthetic construct
  source 1..80: mol_type = other DNA
actaattgcttactgatctgggtgtataagggtttacatattattatatcagggtttattatcagggtttattaattatc

SEQ ID NO: 70081 - DNA, 80 bp, synthetic construct
  source 1..80: mol_type = other DNA
aggtttatcagggtttacctggaatttatattcattcataataattgtagcaaatactaatgacagttatgaatgtaatc

SEQ ID NO: 70082 - DNA, 80 bp, synthetic construct
  source 1..80: mol_type = other DNA
actaatacaatattaatataatctatattgcctaggtaagtataggatttattatgcaaatccaatttttgagttatatt

SEQ ID NO: 70083 - DNA, 80 bp, synthetic construct
  source 1..80: mol_type = other DNA
acacgaaaaaatcccatttcacctgcaaataagcaaacaagtaatccatgcagaaatccaacatttgggtcattggatgg

SEQ ID NO: 70084 - DNA, 80 bp, synthetic construct
  source 1..80: mol_type = other DNA
tcaacttggtactgaacaaacttgtaagagtgttgacagtaatgattgcttagtgaccacatcagttaaggtttgtttga

SEQ ID NO: 70085 - DNA, 80 bp, synthetic construct
  source 1..80: mol_type = other DNA
ggatcctaggcattttagattgcgcatttctggaatcattgaagagagtgacacacctagacatggggcaaatagtgaca

SEQ ID NO: 70086 - DNA, 80 bp, synthetic construct
  source 1..80: mol_type = other DNA
acgggggtaagatcagtgttcaatacaatctaagtcacagttatgcaggggatgcggctaatcactgtggcactgtgcaa

SEQ ID NO: 70087 - DNA, 80 bp, synthetic construct
  source 1..80: mol_type = other DNA
ggatcctaggcattttggattgcgcatttcttggagccaaagaggggagtgtcttacccaaacatggggcagatagtgac

SEQ ID NO: 70088 - DNA, 80 bp, synthetic construct
  source 1..80: mol_type = other DNA
ctctgcttgcaatcttaaagggagtgtacaactttgccacgtgctcgttcattggtctgataacattcctttcctctgtg

SEQ ID NO: 70089 - DNA, 80 bp, synthetic construct
  source 1..80: mol_type = other DNA
ttggttcaaaatgcgaacccagattgtaagaccatcttaaaagcattaggacaaggagctacactagaagaaatgatgac

SEQ ID NO: 70090 - DNA, 80 bp, synthetic construct
  source 1..80: mol_type = other DNA
agcatgccagggagtaggaggacccagccataaagcaagaatcttagctgaggcaatgagccaggcaacaggggcagcag

SEQ ID NO: 70091 - DNA, 80 bp, synthetic construct
  source 1..80: mol_type = other DNA
agagagacaggctaattttttagggaaaatttggccttcccacaaggggaggccaggaaattttctccagagcaggccag

SEQ ID NO: 70092 - DNA, 80 bp, synthetic construct
  source 1..80: mol_type = other DNA
agccaacagccccaccagcagagagcttcgggttcggggaggagatgaacccccctacgaggcaggagctgaaggacaag

SEQ ID NO: 70093 - DNA, 80 bp, synthetic construct
  source 1..80: mol_type = other DNA
gaacctcctttagcttccctcaaatcactctttggcagcgacccctcgttacaataaaggtagagggacagttaaaagaa

SEQ ID NO: 70094 - DNA, 80 bp, synthetic construct
  source 1..80: mol_type = other DNA
atataggtggaaacatctagtatgggcaagcagggagctagagagatttgcagtcaaccccggccttttagaaacagcgg

SEQ ID NO: 70095 - DNA, 80 bp, synthetic construct
  source 1..80: mol_type = other DNA
gggaattggaggttttattaaagtaagacaatatgaggaagtagttgtagacatctgtggaaaaaaggccataggtacag

SEQ ID NO: 70096 - DNA, 80 bp, synthetic construct
  source 1..80: mol_type = other DNA
tactagtaggacctacacctgtcaatataattggaaggaatttattgactcaaattggttgcacgctaaattttccaatc

SEQ ID NO: 70097 - DNA, 80 bp, synthetic construct
  source 1..80: mol_type = other DNA
aaaaataaaagcattaacagcaatttgtacagaaatggagaaggaaggaaaaatttcaagaattgggcctgaaaatccat

SEQ ID NO: 70098 - DNA, 80 bp, synthetic construct
  source 1..80: mol_type = other DNA
ataacactccagtgtttgccataaagaaaaaagacagtactaaatggagaaaattagttgattttagggaactcgataaa

SEQ ID NO: 70099 - DNA, 80 bp, synthetic construct
  source 1..80: mol_type = other DNA
agatgtgggggatgcatatttttcagtccctctagatgaaaatttcaggaagtatactgcattcactatacctagtacaa

SEQ ID NO: 70100 - DNA, 80 bp, synthetic construct
  source 1..80: mol_type = other DNA
acaatgagacaccagggattagatatcagtacaacgtgctaccacaaggatggaaaggatcaccagcaatattccagagt

SEQ ID NO: 70101 - DNA, 80 bp, synthetic construct
  source 1..80: mol_type = other DNA
agcatgacaaaaatcttagaaccatttagaacacaaaacccagaaatagtcatctatcaatacatggatgacttgtatgt

SEQ ID NO: 70102 - DNA, 80 bp, synthetic construct
  source 1..80: mol_type = other DNA
aaggctgcctagatataataagacagctccaaccaactcttaagacaggatcagaagaacttaaatcattatttaatcta

SEQ ID NO: 70103 - DNA, 80 bp, synthetic construct
  source 1..80: mol_type = other DNA
aggatctgacttggaaatagggcaacatagagcaaaaatagaggagttaagagctcatttgttgaagggaggattcacca

SEQ ID NO: 70104 - DNA, 80 bp, synthetic construct
  source 1..80: mol_type = other DNA
caccagacaaaaaacatcagaaagaacccccatttctctggatgggatatgagctccatcctgacacatggacagtacaa

SEQ ID NO: 70105 - DNA, 80 bp, synthetic construct
  source 1..80: mol_type = other DNA
gatttatccagggattaaggtaaaacaactatgtaaactccttaggggggccaaggctctaacagacatagtaccactga

SEQ ID NO: 70106 - DNA, 80 bp, synthetic construct
  source 1..80: mol_type = other DNA
aaagacttaatagcagaaattcagaaacaagggctagatcaatggacatatcaaatatatcaagagccattcaaaaacct

SEQ ID NO: 70107 - DNA, 80 bp, synthetic construct
  source 1..80: mol_type = other DNA
gaaaacaggaaagtatgcaaaaaggaggactgcccacactaatgatgtaaagcaattaacagaagtagtacaaaaaataa

SEQ ID NO: 70108 - DNA, 80 bp, synthetic construct
  source 1..80: mol_type = other DNA
tcttggaaagtatagtgatatgaggaaagactcctaaatttagactacccatacaaaaagaaacataggagacatggtgg

SEQ ID NO: 70109 - DNA, 80 bp, synthetic construct
  source 1..80: mol_type = other DNA
acggactattggcaggccaccttgattccagaatgggaatttatcaatacccctcctctggtaaaattatggtatcaatt

SEQ ID NO: 70110 - DNA, 80 bp, synthetic construct
  source 1..80: mol_type = other DNA
ggtatgttactgataaaggaagacagaaagtgattaccctaactgaaacaacaaatcaaaagactgaattacaagcaatt

SEQ ID NO: 70111 - DNA, 80 bp, synthetic construct
  source 1..80: mol_type = other DNA
accagataagagtgaatcagagatagttaatcaaataatagagcagttaataagaaaggaaagagtctacttgtcatagg

SEQ ID NO: 70112 - DNA, 80 bp, synthetic construct
  source 1..80: mol_type = other DNA
gatggcatagaaaaagcccaagaagagcatgagagatatcacaacaattggagagcaatggctagtgactttaatttgcc

SEQ ID NO: 70113 - DNA, 80 bp, synthetic construct
  source 1..80: mol_type = other DNA
acctatagtagcaaaagagatagtggccagctgtgataaatgtcagcaaaaaggggaagccatgcatgggcaagtagact

SEQ ID NO: 70114 - DNA, 80 bp, synthetic construct
  source 1..80: mol_type = other DNA
gtagtccaggaatatggcaattagattgtacacatttagaaggacaaattatcctggtggcagtccatatagctagtgga

SEQ ID NO: 70115 - DNA, 80 bp, synthetic construct
  source 1..80: mol_type = other DNA
tatatagaagcagaagttatcccagcagaaacaggacaggaaacagcatattttatattaaaattagcaggaagatggcc

SEQ ID NO: 70116 - DNA, 80 bp, synthetic construct
  source 1..80: mol_type = other DNA
agtaaaagtaatacacacagacaatggcagaaatttcaccagtgctgcagttaaggcagcatgttggtgggcaaatgtta

SEQ ID NO: 70117 - DNA, 80 bp, synthetic construct
  source 1..80: mol_type = other DNA
aaagaaagatcagcaaaaaacacagcaggtagcaatgaataaaagaaataacagccaagtcagccaaaattatcctatag

SEQ ID NO: 70118 - DNA, 80 bp, synthetic construct
  source 1..80: mol_type = other DNA
acattatggaaaacagatggcaggtgatgattgtgtggcaggtagacaggatgaggattaatacatggaaaagtttagtg

SEQ ID NO: 70119 - DNA, 80 bp, synthetic construct
  source 1..80: mol_type = other DNA
aaataccatatgtatatttcaaagaaaactagaagatgggcttatagacatcactatgacagcaatcatccaagaataag

SEQ ID NO: 70120 - DNA, 80 bp, synthetic construct
  source 1..80: mol_type = other DNA
ctcagaagtacacatcccactaggggatgctgaattagtagtgacaacatactggggtctgcatacaggagaaagaaaat

SEQ ID NO: 70121 - DNA, 80 bp, synthetic construct
  source 1..80: mol_type = other DNA
ggcatttgggtcaaggggtctccatagaatggaggctgaagaggtacagaacacaagtagacccgggcctggcagaccaa

SEQ ID NO: 70122 - DNA, 80 bp, synthetic construct
  source 1..80: mol_type = other DNA
ctaatccatatgcattactttgattgtttttcagaatctgccataaggaatgccatattaggacatagagttattcctag

SEQ ID NO: 70123 - DNA, 80 bp, synthetic construct
  source 1..80: mol_type = other DNA
gtgtgaatatcaagcaggacatagtcaggtagggactctacaatttttggcattagcagcattagtaaacccaaaaaaga

SEQ ID NO: 70124 - DNA, 80 bp, synthetic construct
  source 1..80: mol_type = other DNA
tgcaaaatgcacaaggacaaccggtacaccaggccataacacctagaaccctaaatgcataggtaaaagtagtagaagaa

SEQ ID NO: 70125 - DNA, 80 bp, synthetic construct
  source 1..80: mol_type = other DNA
gggatacttgggaggggggtgtagccataataagaatactacaacaactgctgtttattcatttcaggattgggtgccac

SEQ ID NO: 70126 - DNA, 80 bp, synthetic construct
  source 1..80: mol_type = other DNA
caaggcctaggacagataatctataatacttatggggatacttgggaggggggtgtagccataataagaatactacaaca

SEQ ID NO: 70127 - DNA, 80 bp, synthetic construct
  source 1..80: mol_type = other DNA
actgctgtttattcatttcaggattgggtgccaccatagtagaataggtgttgtgcgacagagaagagggagaaaatgga

SEQ ID NO: 70128 - DNA, 80 bp, synthetic construct
  source 1..80: mol_type = other DNA
cccagtagatcctaaaatagagccctggaaccatccaggaagccagcctagaactgcttgtaaccagtgttattgtaaaa

SEQ ID NO: 70129 - DNA, 80 bp, synthetic construct
  source 1..80: mol_type = other DNA
ggtgttgctatcattgcccaatgtgctttttaaagaaaggcttaggcattttccatggcaggaagaagcgacgtcagcga

SEQ ID NO: 70130 - DNA, 80 bp, synthetic construct
  source 1..80: mol_type = other DNA
cgaccagctccttacagcagtaagaatcatcaagatcttataccagagcagtaagtataattagataattctgtaatgat

SEQ ID NO: 70131 - DNA, 80 bp, synthetic construct
  source 1..80: mol_type = other DNA
aactatacaaatagtaggcatagtagcattagtagtagcatttattatagcagtaattgtatggaccatagcatatatag

SEQ ID NO: 70132 - DNA, 80 bp, synthetic construct
  source 1..80: mol_type = other DNA
aatatagaaagctggtaaaacaaaggaaaatagaaaggttaattgaaagaataacagacagagcagaagacagtggcaat

SEQ ID NO: 70133 - DNA, 80 bp, synthetic construct
  source 1..80: mol_type = other DNA
gagagtgaaggggatacagaggaattggcaaaacttgtggaaatggggcctcatgatctttggaatgtttatggttagta

SEQ ID NO: 70134 - DNA, 80 bp, synthetic construct
  source 1..80: mol_type = other DNA
aaggcctttagtccagaagtaatacccatgttttcagcactatcagacagagccaccccacaagatttaaactccatgct

SEQ ID NO: 70135 - DNA, 80 bp, synthetic construct
  source 1..80: mol_type = other DNA
gtacagcagaaaacttgtgggtcacagtctattatggagtgcctgtgtggagagatgcagataccaccttattttgtgca

SEQ ID NO: 70136 - DNA, 80 bp, synthetic construct
  source 1..80: mol_type = other DNA
tcagatgctaaagcacaccacacagaagtacataatgtctgggccacacatgcctgtgtgcccacagatcccaacccaca

SEQ ID NO: 70137 - DNA, 80 bp, synthetic construct
  source 1..80: mol_type = other DNA
agagatacctctggaaaatgtaacagaaaattttaacatgtggaaaaataatatggtagaacaaatgcatgaggatataa

SEQ ID NO: 70138 - DNA, 80 bp, synthetic construct
  source 1..80: mol_type = other DNA
tcagtttatgggatgaaagtctaaagccatgtgtacaactaaccccactctgtgttactctaaactgtactaatgcaaat

SEQ ID NO: 70139 - DNA, 80 bp, synthetic construct
  source 1..80: mol_type = other DNA
actacaacagtgaatgcaaatactacagtgagtgccactgccgaccccctcatgaagggggaactaaaaaattgttcttt

SEQ ID NO: 70140 - DNA, 80 bp, synthetic construct
  source 1..80: mol_type = other DNA
gctaaaggatactatcaatgaggaagctgcagaataggacaggatgcatccacaacaagcagggcctattgcaccaggcc

SEQ ID NO: 70141 - DNA, 80 bp, synthetic construct
  source 1..80: mol_type = other DNA
caatgtaactacagcaataaaagataagaagacaaaggtacaagcgctcttttataaacttgatgtagtagaaattagtg

SEQ ID NO: 70142 - DNA, 80 bp, synthetic construct
  source 1..80: mol_type = other DNA
agggtaagaataatagtacggggatatataggttaataaattgtaatacctcagtcattaaacaagcttgtccaaaggta

SEQ ID NO: 70143 - DNA, 80 bp, synthetic construct
  source 1..80: mol_type = other DNA
acctttgagccaattcccatacattattgtgccccagctggttatgcaattttaaagtgcaataataagaattttaatgg

SEQ ID NO: 70144 - DNA, 80 bp, synthetic construct
  source 1..80: mol_type = other DNA
aacaggaccatgcacaaatgtcagttcagtacaatgcacacatggaattaagccagtgatatcaactcaattgctgttaa

SEQ ID NO: 70145 - DNA, 80 bp, synthetic construct
  source 1..80: mol_type = other DNA
atggcagtctagcagaagatgagatagtaattagatctgaaaatctcacagacaacaccaagaacataatagtacacctt

SEQ ID NO: 70146 - DNA, 80 bp, synthetic construct
  source 1..80: mol_type = other DNA
aaactcagtggggggacatcaagcagccatgcaaatgctaaaggatactatcaatgaggaagctgcagaataggacagga

SEQ ID NO: 70147 - DNA, 80 bp, synthetic construct
  source 1..80: mol_type = other DNA
aataaatctgtactaattaattgtaccagaccctccaacaatacaagaacaagtataagtctaggtccaggaaaattctt

SEQ ID NO: 70148 - DNA, 80 bp, synthetic construct
  source 1..80: mol_type = other DNA
ctatagaacaggagatgtaataggagatataagacaagcacattgtaatattagtaaaacagattgggatgacactttac

SEQ ID NO: 70149 - DNA, 80 bp, synthetic construct
  source 1..80: mol_type = other DNA
gcaaagtagctacacagttaggaaaccttatgaacaagaccacattaaactttagccaaccctcaggaggggacatagaa

SEQ ID NO: 70150 - DNA, 80 bp, synthetic construct
  source 1..80: mol_type = other DNA
attataacacatacttttaattgtggaggagaatttttctattgcaatacaacaaatctgtttaatagtatatggactaa

SEQ ID NO: 70151 - DNA, 80 bp, synthetic construct
  source 1..80: mol_type = other DNA
gaatagcaacaatacatggacatggaataagaccaatgacagctcacacaatggtaccattacactgccatgcagaataa

SEQ ID NO: 70152 - DNA, 80 bp, synthetic construct
  source 1..80: mol_type = other DNA
aacaaattataaacatgtggcagagaacaggacaagcaatgtatgctcctcccatcagtgggataattaattgtgtatca

SEQ ID NO: 70153 - DNA, 80 bp, synthetic construct
  source 1..80: mol_type = other DNA
aatattacaggaataatatttacaagagatactcctaataatagtacagagacctcagagaccctcagacctggaggagg

SEQ ID NO: 70154 - DNA, 80 bp, synthetic construct
  source 1..80: mol_type = other DNA
aaatatgagggacaattggagaagtgaattatataaatacaaaatagtacaaattgaaccactaggactagcacccacca

SEQ ID NO: 70155 - DNA, 80 bp, synthetic construct
  source 1..80: mol_type = other DNA
aggcaaaaagaagagtggtggagagagaaaaaagagcagtaggaataggagctatgatctttgggttcttaggaacagca

SEQ ID NO: 70156 - DNA, 80 bp, synthetic construct
  source 1..80: mol_type = other DNA
tgcatccacaacaagcagggcctattgcaccaggccagataagagaaccaaagggaagtgatatagcaggaactaccagt

SEQ ID NO: 70157 - DNA, 80 bp, synthetic construct
  source 1..80: mol_type = other DNA
caatttgctgagagctatagaggcgcaacaacatatgttgcaactcacagtctggggaattaaacagcttcaggcacgag

SEQ ID NO: 70158 - DNA, 80 bp, synthetic construct
  source 1..80: mol_type = other DNA
tcctagctgtggaaagatacctaaaagatcaacagttcctaggaatttggggctgctctggaaaaaccatctgcaccact

SEQ ID NO: 70159 - DNA, 80 bp, synthetic construct
  source 1..80: mol_type = other DNA
tctgtgccctggaacagtagttggagtaataaatcttatgacgaaatctggaaaaacatgacatggttagaatgggatag

SEQ ID NO: 70160 - DNA, 80 bp, synthetic construct
  source 1..80: mol_type = other DNA
agaaattaacaattacacaaaccaaatatatcagctacttacagaatcgcagagccagcaggaaaacaatgaaaaggatt

SEQ ID NO: 70161 - DNA, 80 bp, synthetic construct
  source 1..80: mol_type = other DNA
tgttggcattggacaagtgggcaagcctgtggaattggtttaccatatcaaattggctgtggtatatacgaatatttata

SEQ ID NO: 70162 - DNA, 80 bp, synthetic construct
  source 1..80: mol_type = other DNA
atgatagtagggggtttaataggtttaagaataatttttgcagtgctttctataataaatagagttaggcagggatactc

SEQ ID NO: 70163 - DNA, 80 bp, synthetic construct
  source 1..80: mol_type = other DNA
acctttgtcattgcagacccttaccccaaacccagagggtcccgacaggctcggaagaatcgaagaaggaggtggagagc

SEQ ID NO: 70164 - DNA, 80 bp, synthetic construct
  source 1..80: mol_type = other DNA
aagacagaaccagatcgattcgattagcgaacggattcttagcacttgcctgggacgatctgaggaacctgtgcctcttc

SEQ ID NO: 70165 - DNA, 80 bp, synthetic construct
  source 1..80: mol_type = other DNA
acctaccacagattgagagactttctctggattctggggaggactgtggaactggggtggcagggcctgaaatatctggg

SEQ ID NO: 70166 - DNA, 80 bp, synthetic construct
  source 1..80: mol_type = other DNA
gaacatcctgctgtattggggacaggagataaagaatagtgctattaatttgcttgatacaatagcaatagcaacagcta

SEQ ID NO: 70167 - DNA, 80 bp, synthetic construct
  source 1..80: mol_type = other DNA
ggtgcgagagcgtcagtattgagcgggggaaaattagatgcaaaggagagaattcggttaaggccaggggggaagaaaaa

SEQ ID NO: 70168 - DNA, 80 bp, synthetic construct
  source 1..80: mol_type = other DNA
accctgcaggaacaaataatatggatgaccagtaacccacctatcccagtaggagaaatttataaaagatggataatcct

SEQ ID NO: 70169 - DNA, 80 bp, synthetic construct
  source 1..80: mol_type = other DNA
actggacagatagggttataggagtagtgcaaagaactggtagagctattcgtaatatacctagaagaataagacaaggc

SEQ ID NO: 70170 - DNA, 80 bp, synthetic construct
  source 1..80: mol_type = other DNA
tttgaaagagctttgctataaaatgggaggcaagtggtcaaaaagtagaataggagggtggcctgcaataagggaaagaa

SEQ ID NO: 70171 - DNA, 80 bp, synthetic construct
  source 1..80: mol_type = other DNA
tgagacaaacccctccagcagcaggtggagtaggagcagtatctcaagatttagctaatcgtggagcagtcacaagcaac

SEQ ID NO: 70172 - DNA, 80 bp, synthetic construct
  source 1..80: mol_type = other DNA
tggctggaggcacaagaggagggagaagaagtgggctttccagtcagacctcaggtacctacaagaccaatgacttataa

SEQ ID NO: 70173 - DNA, 80 bp, synthetic construct
  source 1..80: mol_type = other DNA
aatacagtggttgataatcctgatcgtgcctggctggaggcacaagaggagggagaagaagtgggctttccagtcagacc

SEQ ID NO: 70174 - DNA, 80 bp, synthetic construct
  source 1..80: mol_type = other DNA
tcaggtacctacaagaccaatgacttataagggagctttggatctcagccattttttaaaagaaaaggggggactggatg

SEQ ID NO: 70175 - DNA, 80 bp, synthetic construct
  source 1..80: mol_type = other DNA
ggctaatttactctcagcaaagacaagatatccttgatctgtgggtctataacacacaaggttacttccctgactggcaa

SEQ ID NO: 70176 - DNA, 80 bp, synthetic construct
  source 1..80: mol_type = other DNA
aactacacaccaggaccaggggagagatttcccctaacctttggatggtgcttcaaactagtaccagtagatccacagga

SEQ ID NO: 70177 - DNA, 80 bp, synthetic construct
  source 1..80: mol_type = other DNA
ggtagaagcagccaatgaaggagagaacaacagcttgctacatcctatgtgccagcatggaatggaggacaaagacagag

SEQ ID NO: 70178 - DNA, 80 bp, synthetic construct
  source 1..80: mol_type = other DNA
aagtgttaatatggaggtttgacagtcgcctagcattcagacacagagccagagagcagcatccggagtactacaaagac

SEQ ID NO: 70179 - DNA, 80 bp, synthetic construct
  source 1..80: mol_type = other DNA
aagcagccgcttctcgcctgtacggggtctctctggttagaccagatttgagcctgggagctctctggctagtctaggca

SEQ ID NO: 70180 - DNA, 80 bp, synthetic construct
  source 1..80: mol_type = other DNA
tgctgacacagaagttgctgacaaggggactttccgcccgggactttccaggggaggcgcggcctgggcggggttgggag

SEQ ID NO: 70181 - DNA, 80 bp, synthetic construct
  source 1..80: mol_type = other DNA
aggattaaataaaatagtaagaatgtatagccctgtcagtatcttagatataaaacaaaggccaaaagaaccctttagag

SEQ ID NO: 70182 - DNA, 80 bp, synthetic construct
  source 1..80: mol_type = other DNA
attatgtagataggttcttcaaaactttaagagctgagcaagctacacaagaggtaaaaggttggatgacagacaccttg

SEQ ID NO: 70183 - DNA, 80 bp, synthetic construct
  source 1..80: mol_type = other DNA
tgtttagacatactgagacagctacagccagctctccagacaggatcagaagaacttaaatcattgtttaatctagtagc

SEQ ID NO: 70184 - DNA, 80 bp, synthetic construct
  source 1..80: mol_type = other DNA
aaccctctattgcgtacatcaaagaatagatgtaaaagacaccaaagaagctctagaggaagtggaaaaagtacaaaaga

SEQ ID NO: 70185 - DNA, 80 bp, synthetic construct
  source 1..80: mol_type = other DNA
acaggcagcaaaaaacacagcaggaagagggaagcagcagccaagccagccaaaattatcctatagtgcataatgcacaa

SEQ ID NO: 70186 - DNA, 80 bp, synthetic construct
  source 1..80: mol_type = other DNA
ggacaaatggtacaccaggccttatcacctagaactttgaatgcctgggtaaaagtaatagaagaaaaagcctttagtcc

SEQ ID NO: 70187 - DNA, 80 bp, synthetic construct
  source 1..80: mol_type = other DNA
agaagtaatacccatgttttcagcactatcagagggagccaccccacaagatttaaacaccatgctaaacacagtggggg

SEQ ID NO: 70188 - DNA, 80 bp, synthetic construct
  source 1..80: mol_type = other DNA
ggcatcaagcagctatgcaaatgctaaaggatactattaatgaggaagctgcagagtgggacaggctgcatccacaacag

SEQ ID NO: 70189 - DNA, 80 bp, synthetic construct
  source 1..80: mol_type = other DNA
tggcaaaactacacaccaggaccaggggagagatttcccctgaccttaggatggtgcttcaagctagtaccagtagaccc

SEQ ID NO: 70190 - DNA, 80 bp, synthetic construct
  source 1..80: mol_type = other DNA
aatagcgtggatgaccaataacccacccatcccagtgggggaaatttataaaagatggataatcctaggattaaataaaa

SEQ ID NO: 70191 - DNA, 80 bp, synthetic construct
  source 1..80: mol_type = other DNA
tagtaagaatgtatagccctgtcagtattttggacataagacaagggccaaaagaaccctttagagattatgtggatagg

SEQ ID NO: 70192 - DNA, 80 bp, synthetic construct
  source 1..80: mol_type = other DNA
ttctttaaaactttaagggctgaacaagctacacaagaggtaaaaaattggatgacaagcaccttgttggtccaaaatgc

SEQ ID NO: 70193 - DNA, 80 bp, synthetic construct
  source 1..80: mol_type = other DNA
aaatccagattgtaagaccatcttaagagcattaggaccaggagctacactagaagaaatgatgacagcatgtcagggag

SEQ ID NO: 70194 - DNA, 80 bp, synthetic construct
  source 1..80: mol_type = other DNA
gagtgttagctgaggcaatgagccaggcatcaggtgcagtaacagccataatgatgcagaaaggcaatttcaagggccag

SEQ ID NO: 70195 - DNA, 80 bp, synthetic construct
  source 1..80: mol_type = other DNA
tggggggacctagtcataaagcaagagtgttagctgaggcaatgagccaggcatcaggtgcagtaacagccataatgatg

SEQ ID NO: 70196 - DNA, 80 bp, synthetic construct
  source 1..80: mol_type = other DNA
cagaaaggcaatttcaagggccagaaaagaattattaagtgtttcaactgtggcaaggaaggacatctagccagaaattg

SEQ ID NO: 70197 - DNA, 80 bp, synthetic construct
  source 1..80: mol_type = other DNA
cagggcccctaggaaaaagggctgttggaaatgtggaagagagggacatcaaatgaaagactgtacagagagacaggcta

SEQ ID NO: 70198 - DNA, 80 bp, synthetic construct
  source 1..80: mol_type = other DNA
attttttagggaaaatttggtctcccaacaaagggaggccagggaattttctccagaacaggccagagccaacagcccca

SEQ ID NO: 70199 - DNA, 80 bp, synthetic construct
  source 1..80: mol_type = other DNA
ccagcagagagcctcgggatcatggaggagatgacctcctatccgaaacaggagctgaaggacaaggaacctcctttagt

SEQ ID NO: 70200 - DNA, 80 bp, synthetic construct
  source 1..80: mol_type = other DNA
ttccctcaaatcactctttggcaacgaccccttgtcacagtaaagatagagggacagctaagggaagctctattagatac

SEQ ID NO: 70201 - DNA, 80 bp, synthetic construct
  source 1..80: mol_type = other DNA
caaggaggtagaagaggccaatgaaggagaaaacaacagcctgctacatcctatgagcctgcatggaatggaggacgaag

SEQ ID NO: 70202 - DNA, 80 bp, synthetic construct
  source 1..80: mol_type = other DNA
aggagcagatgatacagtattagaagaaataaatttgcaaggaaaatggaagccaaaaatgatagggggaattggaggtt

SEQ ID NO: 70203 - DNA, 80 bp, synthetic construct
  source 1..80: mol_type = other DNA
ttatcaaagtaaggcaatatgaggaagtaactgtagacatttgtggaaaaaaggccataggtacagtgttagtaggacct

SEQ ID NO: 70204 - DNA, 80 bp, synthetic construct
  source 1..80: mol_type = other DNA
acacctgtcaatataattggaaggaatttattgactcagattggttgcactttaaattttccaattagtcctattgaaac

SEQ ID NO: 70205 - DNA, 80 bp, synthetic construct
  source 1..80: mol_type = other DNA
tgtaccagtaaaattaaagccaggaatggatggcccaaaggttaagcaatggccattgacagaagaaaaaataaaagcat

SEQ ID NO: 70206 - DNA, 80 bp, synthetic construct
  source 1..80: mol_type = other DNA
tagtagaaatttgtacagaaatggaaaaggaaggaaaaatttcaagaattgggcctgaaaatccatataacacaccagtg

SEQ ID NO: 70207 - DNA, 80 bp, synthetic construct
  source 1..80: mol_type = other DNA
tttgccataaggaaaaaagacagtactaaatggagaaaattagttgattttagggaactcaataaaagaactcaagactt

SEQ ID NO: 70208 - DNA, 80 bp, synthetic construct
  source 1..80: mol_type = other DNA
ctgggaagttcaattaggaataccacatccagcagggttaaaaaagaaaaaatcaataacagtactagatgtgggggatg

SEQ ID NO: 70209 - DNA, 80 bp, synthetic construct
  source 1..80: mol_type = other DNA
catatttttcagtccctctagataaagacttcaggaagtatactgcatttactatacctagtataaacaatgagacacca

SEQ ID NO: 70210 - DNA, 80 bp, synthetic construct
  source 1..80: mol_type = other DNA
gggattagatatcagtacaatgtgctaccacagggatggaaaggatcaccagcaatattccagtgtagcatgacaaaaat

SEQ ID NO: 70211 - DNA, 80 bp, synthetic construct
  source 1..80: mol_type = other DNA
cttagaaccatttagaacacaaaacccagaaatagttatctatcagtacatggatgacttgtatgtaggatctgacttag

SEQ ID NO: 70212 - DNA, 80 bp, synthetic construct
  source 1..80: mol_type = other DNA
aaagagaagtgttaatgtggaagtttgacagtcgcctagcactaagacatgtagcccgagagaaacatccggagttctac

SEQ ID NO: 70213 - DNA, 80 bp, synthetic construct
  source 1..80: mol_type = other DNA
agatagggcagcatagagcaaaaatagaggagttaagagcccatttgttgaagtggggatttactacgccagacaaaaaa

SEQ ID NO: 70214 - DNA, 80 bp, synthetic construct
  source 1..80: mol_type = other DNA
catcagaaagaacccccatttctttggatgggatatgagctccatcctgacaaatggacagtacaacctatacagctgcc

SEQ ID NO: 70215 - DNA, 80 bp, synthetic construct
  source 1..80: mol_type = other DNA
agaaaaggaaagctggactgtcaatgatatacaaaagttagtaggaaaactaaattgggcaagtcagatttatccaggga

SEQ ID NO: 70216 - DNA, 80 bp, synthetic construct
  source 1..80: mol_type = other DNA
tcaaagtaaagcaactatgtagactccttaggggggccaaggcactaacagacatagtatcattgactgaagaagcagaa

SEQ ID NO: 70217 - DNA, 80 bp, synthetic construct
  source 1..80: mol_type = other DNA
ttggaattggcagaaaacagggaaattctaagagaaccagtacatggggtatattatgatccatcaaaagacttaatagc

SEQ ID NO: 70218 - DNA, 80 bp, synthetic construct
  source 1..80: mol_type = other DNA
agaagtacagaaacaagggcaagaccagtggacatatcaaatatatcaagagccattcaaaaacctgaaaacaggaaaat

SEQ ID NO: 70219 - DNA, 80 bp, synthetic construct
  source 1..80: mol_type = other DNA
atgcaaagaggaggtgtgcccacactaatgatataaagcaattagcagaagtgatgcagaaaatagccacagaaagcata

SEQ ID NO: 70220 - DNA, 80 bp, synthetic construct
  source 1..80: mol_type = other DNA
gtgatatggggaaagactcctagatttagactacccatacaaaaggaaacatgggaaacatggtggacagattattggca

SEQ ID NO: 70221 - DNA, 80 bp, synthetic construct
  source 1..80: mol_type = other DNA
ggccacctggattcctgaatgggagtttgtcaatacccctcctctagtaaagttatggtatcagttagaacaggagccca

SEQ ID NO: 70222 - DNA, 80 bp, synthetic construct
  source 1..80: mol_type = other DNA
tagtaggagcagaaaccttctatgtagacggggcagctaatagggaaactaaaataggaaaagcagggtatgtcactgac

SEQ ID NO: 70223 - DNA, 80 bp, synthetic construct
  source 1..80: mol_type = other DNA
aaagactgctgacacagaagttgctgacaaaaggactttccgcccgggactttccaagggaggcgcggcctgggcggggt

SEQ ID NO: 70224 - DNA, 80 bp, synthetic construct
  source 1..80: mol_type = other DNA
aaaggaagacagaaggtggttaccctaactgaaacaacaaatcaaaagactgaattacaagcaattcagctagctttaca

SEQ ID NO: 70225 - DNA, 80 bp, synthetic construct
  source 1..80: mol_type = other DNA
ggattcaggatcagaagtaaacatagtaacagactcacagtatgcattaggaatcattcaagcacggccagataaaagtg

SEQ ID NO: 70226 - DNA, 80 bp, synthetic construct
  source 1..80: mol_type = other DNA
aatcagagttagtcaatcaaataatagagcaattaataaagaaggaaaaggtctacctgtcatgggtaccagcacacaaa

SEQ ID NO: 70227 - DNA, 80 bp, synthetic construct
  source 1..80: mol_type = other DNA
ggaattggaggaaatgaacaagtagataagttagttagtagtggaatcaggaaagtattatttttagatggcatagataa

SEQ ID NO: 70228 - DNA, 80 bp, synthetic construct
  source 1..80: mol_type = other DNA
agcccaagaagagcatgaaagatatcacagcaattggagagcaatggccagtgattttaatctgccacctatagtagcaa

SEQ ID NO: 70229 - DNA, 80 bp, synthetic construct
  source 1..80: mol_type = other DNA
aagaaatagtggccagctgtgataaatgtcagttaaaaggggaagccatgcatggacaagtggattgtagtccagggata

SEQ ID NO: 70230 - DNA, 80 bp, synthetic construct
  source 1..80: mol_type = other DNA
tggcaattagattgtacacatttagaaggaaaaattatcctggtggcggtccatgtagccagtggctatatagaagcaga

SEQ ID NO: 70231 - DNA, 80 bp, synthetic construct
  source 1..80: mol_type = other DNA
agttatcccagcagaaacagggcaggaaacagcatacttcctattaaaattagcaggaagatggccagtaaaagtaatac

SEQ ID NO: 70232 - DNA, 80 bp, synthetic construct
  source 1..80: mol_type = other DNA
acacagacaatggcagcaatttcaccagtgctgcaatgaaggcagcatgttggtgggcaggtgttaaacaagaatttgga

SEQ ID NO: 70233 - DNA, 80 bp, synthetic construct
  source 1..80: mol_type = other DNA
attccctacaatccccaaagtcaaggggtagtagaatctatgaataaagaattaaagaaaatcatagggcaggttagaga

SEQ ID NO: 70234 - DNA, 80 bp, synthetic construct
  source 1..80: mol_type = other DNA
tggggagtggcgaaccctcagatgctgcataaaagcagccgcttctcgcctgtactgggtctctctggttagaccagatc

SEQ ID NO: 70235 - DNA, 80 bp, synthetic construct
  source 1..80: mol_type = other DNA
acagtgcgggggaaagaataatagacataatagcatcagatatacaaactagagaattacaaaaacaaattacaaaaatc

SEQ ID NO: 70236 - DNA, 80 bp, synthetic construct
  source 1..80: mol_type = other DNA
caaaattttcgggtttattacagagacagcagagacccagtttggaaaggaccagctaaactgctctggaaaggtgaagg

SEQ ID NO: 70237 - DNA, 80 bp, synthetic construct
  source 1..80: mol_type = other DNA
ggcagtagtaatacaagacaatagtgaaataaaggtagtaccaagaagaaaggcaaagatccttaaacattatggaaaac

SEQ ID NO: 70238 - DNA, 80 bp, synthetic construct
  source 1..80: mol_type = other DNA
agatggcaggggatgattgtgtggcaggtagacaggatgaggattaatgcatggaaaagtttagtaaaataccatatgca

SEQ ID NO: 70239 - DNA, 80 bp, synthetic construct
  source 1..80: mol_type = other DNA
taagtcaaagaaagctaaaggatggcattatagacatcactatgacagccatcatccaaaaataagctcagaagtacaca

SEQ ID NO: 70240 - DNA, 80 bp, synthetic construct
  source 1..80: mol_type = other DNA
tcccactaggggatgctgaattagtagtaacaacatattggggtctgcaaacaggagaaagagactggcacttgggtcag

SEQ ID NO: 70241 - DNA, 80 bp, synthetic construct
  source 1..80: mol_type = other DNA
ggggtctccatagaatggaggttgaaaaggtacagaacacaagtagaccctggcctggcagaccaactaattcatataca

SEQ ID NO: 70242 - DNA, 80 bp, synthetic construct
  source 1..80: mol_type = other DNA
ttactttgattgtttttcagaatctgccataaggaaagccatattaggatatagagttagtcctaggtgtgactatccag

SEQ ID NO: 70243 - DNA, 80 bp, synthetic construct
  source 1..80: mol_type = other DNA
caggacataatcaggtaggatctctacaatatctggcactaacagcgctaataaccccaaaaaagataaagccatctttg

SEQ ID NO: 70244 - DNA, 80 bp, synthetic construct
  source 1..80: mol_type = other DNA
cctagtgttaggaagctaacagaggatagatggaacaagccccagaagaccaggggccacagagagaaccaaacaatgaa

SEQ ID NO: 70245 - DNA, 80 bp, synthetic construct
  source 1..80: mol_type = other DNA
tggacaatagagcttttggaggagcttaaaaatgaagctgttagacattttcctaggccctggctccatggcctaggaca

SEQ ID NO: 70246 - DNA, 80 bp, synthetic construct
  source 1..80: mol_type = other DNA
gtatgtctataacacttatggggacacttgggagggagttgtagctataataagaatattacaacaattgctgtttattc

SEQ ID NO: 70247 - DNA, 80 bp, synthetic construct
  source 1..80: mol_type = other DNA
atttcagaattgggtgccagcatagcagaataggtattataccacagagaagagggagaaatggacccagtagaccctaa

SEQ ID NO: 70248 - DNA, 80 bp, synthetic construct
  source 1..80: mol_type = other DNA
cctagaaccctggaatcagccaggaagtcaacctaaaactgcttgtaaccagtgttattgtaaaaggtgttgctatcatt

SEQ ID NO: 70249 - DNA, 80 bp, synthetic construct
  source 1..80: mol_type = other DNA
gccaacattgctttttaaagaaaggcttaggcattttctatggcaggaagaaacgaagacagcgacgaacagctccttac

SEQ ID NO: 70250 - DNA, 80 bp, synthetic construct
  source 1..80: mol_type = other DNA
ggcaataagaatcatcaagatcctatacaagagcagtaagtataattaaatagtactgtaatgatatctttaaaaacaat

SEQ ID NO: 70251 - DNA, 80 bp, synthetic construct
  source 1..80: mol_type = other DNA
aagcatagcagcattaatagtagcatttcttatagtagtagttgtgtggaccatagtatatatagaatatagaaagttgt

SEQ ID NO: 70252 - DNA, 80 bp, synthetic construct
  source 1..80: mol_type = other DNA
taagacaaaaaagaatagataggttacttgagagaataagagaaagagcagaagacagtggcaatgaaagtgatggggat

SEQ ID NO: 70253 - DNA, 80 bp, synthetic construct
  source 1..80: mol_type = other DNA
acagaggaattggcaaggcttgtggagatggggcctcatgatcttgggaatgataatgatttgtagtgttcaaggaaact

SEQ ID NO: 70254 - DNA, 80 bp, synthetic construct
  source 1..80: mol_type = other DNA
gtgtgcccgtctgttgtgtgactctggtaactagagatccctcagaccattttagtcagtgtggaaaatctctagcagtg

SEQ ID NO: 70255 - DNA, 80 bp, synthetic construct
  source 1..80: mol_type = other DNA
tgtgggtcacagtatattatggggtatctgtgtggagagaagcagataccaccctattttgtgcatcagatgctaaagca

SEQ ID NO: 70256 - DNA, 80 bp, synthetic construct
  source 1..80: mol_type = other DNA
catgagacagaagcgcataatgtctgggctacacatgcctgtgtacccacagaccccaacccacaagagatacttttgga

SEQ ID NO: 70257 - DNA, 80 bp, synthetic construct
  source 1..80: mol_type = other DNA
caatgtaacagaaaattttaacatgtggagaaataacatggcagaacagatgcatgaggatataatcagtttatgggatg

SEQ ID NO: 70258 - DNA, 80 bp, synthetic construct
  source 1..80: mol_type = other DNA
aaagtctaaagccatgtgtaaggttaaccccattttgtgttactctaaactgtactgatgtaaatacaacaaggattcat

SEQ ID NO: 70259 - DNA, 80 bp, synthetic construct
  source 1..80: mol_type = other DNA
gacagtaccaataccagtatccacacgacagaggaactaaaaaattgttctttcaatgtaactacagcaataaaagataa

SEQ ID NO: 70260 - DNA, 80 bp, synthetic construct
  source 1..80: mol_type = other DNA
gaagcagaaattacaagcactttttgagagccttgatgtagtaccaatgaataaaagtagtaatacttataggctaataa

SEQ ID NO: 70261 - DNA, 80 bp, synthetic construct
  source 1..80: mol_type = other DNA
attgtaacacctcagtcattaaacaggcttgtccaaagacatcttttgagccaattcccatacatttttgtgctccggct

SEQ ID NO: 70262 - DNA, 80 bp, synthetic construct
  source 1..80: mol_type = other DNA
ggttttgcgattctaaagtgtaataataagaagttcaatggaacagggccatgcacaaatgtcagctcggtacaatgcac

SEQ ID NO: 70263 - DNA, 80 bp, synthetic construct
  source 1..80: mol_type = other DNA
acatggaattaggccagtggtatcaactcacttgctgttaaatggcagtctagcagaagaagagataataattaaatctg

SEQ ID NO: 70264 - DNA, 80 bp, synthetic construct
  source 1..80: mol_type = other DNA
aaaatctcacagacaataccaaaaccataatagtacaccttaatgaatctgtaaaaattaattgtaccagacccttcaac

SEQ ID NO: 70265 - DNA, 80 bp, synthetic construct
  source 1..80: mol_type = other DNA
aatacaaggaaaagtgtaagtctaggaccaggatccgtatggtatagaccaggagaagtaataggagatataagacaagc

SEQ ID NO: 70266 - DNA, 80 bp, synthetic construct
  source 1..80: mol_type = other DNA
atattgtaatattaatagaaaagagtggaatggaactttatacaaggtagttgcacaattaggaagacacctgaacaaca

SEQ ID NO: 70267 - DNA, 80 bp, synthetic construct
  source 1..80: mol_type = other DNA
tgagcacaataaattttcagccacccccctcaggaggggacatagaaattacaacacatacttttaattgtggaggagaa

SEQ ID NO: 70268 - DNA, 80 bp, synthetic construct
  source 1..80: mol_type = other DNA
tttttctattgcgatacaaaagaactgtttaatagtacctggaataagagcaccaatggcacctggactaagaacagcac

SEQ ID NO: 70269 - DNA, 80 bp, synthetic construct
  source 1..80: mol_type = other DNA
cactggcgagacagggaacacagcaaatattacactgcaatgcagaataaaacaaattgtaaacatgtggcagagaacag

SEQ ID NO: 70270 - DNA, 80 bp, synthetic construct
  source 1..80: mol_type = other DNA
gacaagcaatatatgcccctcctattagaggaataattcagtgtgaatcaaatattacagggatactattgacaagagat

SEQ ID NO: 70271 - DNA, 80 bp, synthetic construct
  source 1..80: mol_type = other DNA
aggcataatcatactaatgagaccttcagacctggaggaggaaatatgaaggacaattggagaaatgaattatataaata

SEQ ID NO: 70272 - DNA, 80 bp, synthetic construct
  source 1..80: mol_type = other DNA
taaagtagtagaaattgaaccactaggaatagcacccaccagggcaaaaaggagagtggtggagagagaaaaaagagcag

SEQ ID NO: 70273 - DNA, 80 bp, synthetic construct
  source 1..80: mol_type = other DNA
tgggaataggagctttgatctttgggttcttaggagcagcaggaagcactatgggcgcggcgtcaataacgctgacggta

SEQ ID NO: 70274 - DNA, 80 bp, synthetic construct
  source 1..80: mol_type = other DNA
catgccagacaattattgtctggtatagtgcaacagcaaagcaatttgctgagggctatagaggcgcaacagcatatgtt

SEQ ID NO: 70275 - DNA, 80 bp, synthetic construct
  source 1..80: mol_type = other DNA
tggatgggctaatttggtccaagaaaagacaagaaatccttgatttgtgggtctataacacacaaggttacttccctgac

SEQ ID NO: 70276 - DNA, 80 bp, synthetic construct
  source 1..80: mol_type = other DNA
gcaactcacagtctggggcattaaacagctccaggcaagagtcctggctgtggaaagatacctaaaagatcaacagttcc

SEQ ID NO: 70277 - DNA, 80 bp, synthetic construct
  source 1..80: mol_type = other DNA
taggaatttggggctgctctggaaaaatcatctgcaccactgctgtgccctggaactctagttggagtaataaatcttat

SEQ ID NO: 70278 - DNA, 80 bp, synthetic construct
  source 1..80: mol_type = other DNA
gaggcaatttggaacaaaatgacatggatagaatgggatagagaaattagtaattacacaaaacaaatatatgagctact

SEQ ID NO: 70279 - DNA, 80 bp, synthetic construct
  source 1..80: mol_type = other DNA
tacagaatcgcaggaccagcaggaaaagaatgaaaaggatttgttggcattggacaagtgggcaagcctgtggaattggt

SEQ ID NO: 70280 - DNA, 80 bp, synthetic construct
  source 1..80: mol_type = other DNA
ttgacatatcaaattggctatggtatataaaaatatttataatgatagtaggaggtttgataggtttaagaatagttttt

SEQ ID NO: 70281 - DNA, 80 bp, synthetic construct
  source 1..80: mol_type = other DNA
actgtgttttctataataaatagagttaggcagggatactcacctctgtcgtttcagatccataccccaaacccagaggg

SEQ ID NO: 70282 - DNA, 80 bp, synthetic construct
  source 1..80: mol_type = other DNA
actcgacaggctcggaagaatcgaagaagaaggtggagagcaaggcaagagcagatcgattcgattagtaagcgggttct

SEQ ID NO: 70283 - DNA, 80 bp, synthetic construct
  source 1..80: mol_type = other DNA
tagcacttgcctgggacgacctgcggaacctgtgcctcttcctctaccaccgcttgaaagactgtgccttgattgcagcg

SEQ ID NO: 70284 - DNA, 80 bp, synthetic construct
  source 1..80: mol_type = other DNA
aggactgtggaacttctgggacacagcagcctcaaggggctgagactggggtgggaaggcctcaaatatctgtggaatct

SEQ ID NO: 70285 - DNA, 80 bp, synthetic construct
  source 1..80: mol_type = other DNA
tctgcagtattggggacaggagctaaagaatagtgctattaatttgcttgatacagtagcaatagcaacagctaactgga

SEQ ID NO: 70286 - DNA, 80 bp, synthetic construct
  source 1..80: mol_type = other DNA
gagagcgtcagtattaagcgggggaaaattagatgcatgggaaaaaattcggttaaggccagggggaaggaaaaaatata

SEQ ID NO: 70287 - DNA, 80 bp, synthetic construct
  source 1..80: mol_type = other DNA
cagatagggttatagaagtagcacaaagagctggtagagctattattaacatacctagaaggataagacaaggcgctgaa

SEQ ID NO: 70288 - DNA, 80 bp, synthetic construct
  source 1..80: mol_type = other DNA
agagctttgcaataaaatgggaggcaagtggtcgcaaagtagcccagttggatggcctgcagtaagggaaaaaatgaggc

SEQ ID NO: 70289 - DNA, 80 bp, synthetic construct
  source 1..80: mol_type = other DNA
gagcccctccagcagcagatggagtaggagcagtatctcaagatttagctaagcatggagcaatcacaaacaacaataca

SEQ ID NO: 70290 - DNA, 80 bp, synthetic construct
  source 1..80: mol_type = other DNA
ggacagtgaagtgggctttccagtcagacctcaagtacctttaagaccaatgacctataaggcagctgtggatctcagcc

SEQ ID NO: 70291 - DNA, 80 bp, synthetic construct
  source 1..80: mol_type = other DNA
gcagctaataatcctgattgtgcctgggtggaagcacaagaggaggacagtgaagtgggctttccagtcagacctcaagt

SEQ ID NO: 70292 - DNA, 80 bp, synthetic construct
  source 1..80: mol_type = other DNA
acctttaagaccaatgacctataaggcagctgtggatctcagccactttttaaaagaaaaggggggactggatgggctaa

SEQ ID NO: 70293 - DNA, 80 bp, synthetic construct
  source 1..80: mol_type = other DNA
tttggtccaagaaaagacaagaaatccttgatttgtgggtctataacacacaaggttacttccctgactggcaaaactac

SEQ ID NO: 70294 - DNA, 80 bp, synthetic construct
  source 1..80: mol_type = other DNA
acaccaggaccaggggagagatttcccctgaccttaggatggtgcttcaagctagtaccagtagaccccaaggaggtaga

SEQ ID NO: 70295 - DNA, 80 bp, synthetic construct
  source 1..80: mol_type = other DNA
agaggccaatgaaggagaaaacaacagcctgctacatcctatgagcctgcatggaatggaggacgaagaaagagaagtgt

SEQ ID NO: 70296 - DNA, 80 bp, synthetic construct
  source 1..80: mol_type = other DNA
taatgtggaagtttgacagtcgcctagcactaagacatgtagcccgagagaaacatccggagttctacaaagactgctga

SEQ ID NO: 70297 - DNA, 80 bp, synthetic construct
  source 1..80: mol_type = other DNA
cacagaagttgctgacaaaaggactttccgcccgggactttccaagggaggcgcggcctgggcggggttggggagtggcg

SEQ ID NO: 70298 - DNA, 80 bp, synthetic construct
  source 1..80: mol_type = other DNA
ggatgaaacatctagtatgggcaagcagggagctggaaagattcgcaattaaccctggcctcttagaagcagcagatggc

SEQ ID NO: 70299 - DNA, 80 bp, synthetic construct
  source 1..80: mol_type = other DNA
aaccctcagatgctgcataaaagcagccgcttctcgcctgtactgggtctctctggttagaccagatctgagcctgggag

SEQ ID NO: 70300 - DNA, 80 bp, synthetic construct
  source 1..80: mol_type = other DNA
ctctctggctagctagggaacccactgcttaagcctcaataaagcttgccttgagtgcttcaagtagtgtgtgcccgtct

SEQ ID NO: 70301 - DNA, 80 bp, synthetic construct
  source 1..80: mol_type = other DNA
ggtacagtgcaggggagagaataatagacataatagcatcagatatacaaactaaagaactacaaaaacgaattacaaac

SEQ ID NO: 70302 - DNA, 80 bp, synthetic construct
  source 1..80: mol_type = other DNA
cttggctccatggcctaggacagcatatctataacacttatggggatacttgggagggagttgaagctataataagaata

SEQ ID NO: 70303 - DNA, 80 bp, synthetic construct
  source 1..80: mol_type = other DNA
ctgcaacaactgctgtttactcatttcagaattgggtgccaccatagtagaataggagtgatgcgacagagaagagggag

SEQ ID NO: 70304 - DNA, 80 bp, synthetic construct
  source 1..80: mol_type = other DNA
aaatggagccagtagatcctaacatagagccctggaaccagccaggaagccagcctaaaactgcttgtaacaattgttat

SEQ ID NO: 70305 - DNA, 80 bp, synthetic construct
  source 1..80: mol_type = other DNA
tgtaaaaagtgttgctttcattgccaactatgctttttaaagaaaggcttaggcattctctatggcaggaagaagcgaag

SEQ ID NO: 70306 - DNA, 80 bp, synthetic construct
  source 1..80: mol_type = other DNA
gcagcgaagagccgctccttacagcaataagaatcatcaagattttataccaaagcagtaagtaccagtaaataaattct

SEQ ID NO: 70307 - DNA, 80 bp, synthetic construct
  source 1..80: mol_type = other DNA
gttatgatacctttagacatagtaagcatagtagcattagtagtagcatttattatagtagtaattgtgtggactatagt

SEQ ID NO: 70308 - DNA, 80 bp, synthetic construct
  source 1..80: mol_type = other DNA
atacctagaatataagaagctgttaaaacaaaaaaggatagatagattaattgagagaataagagacagagcagaagaca

SEQ ID NO: 70309 - DNA, 80 bp, synthetic construct
  source 1..80: mol_type = other DNA
agaaaaggggggattggggggtacagtgcaggggagagaataatagacataatagcatcagatatacaaactaaagaact

SEQ ID NO: 70310 - DNA, 80 bp, synthetic construct
  source 1..80: mol_type = other DNA
gtggcaatgagagtgaaggggacacagaggaattgtcaagactggtggagatggggcctcatgatctttggaatgttgat

SEQ ID NO: 70311 - DNA, 80 bp, synthetic construct
  source 1..80: mol_type = other DNA
gatttgtagtgctgaagaaaatttgtgggtcacagtctattatggagtgcctgtatggaaagaagcagatactaccttat

SEQ ID NO: 70312 - DNA, 80 bp, synthetic construct
  source 1..80: mol_type = other DNA
aacccacaagagataattctggaaaatgtaacagaaaattttaatatgtggaaaaataacatggtagaacaaatgcatga

SEQ ID NO: 70313 - DNA, 80 bp, synthetic construct
  source 1..80: mol_type = other DNA
ggatataatcgatttatgggatgaaagtctaaagccatgtgtaaagttaaccccaatctgtgttactctgcactgtacga

SEQ ID NO: 70314 - DNA, 80 bp, synthetic construct
  source 1..80: mol_type = other DNA
atgccaatgttacggtcaataatactgccaatgccactgccgaggcccccatgggggaaataaaaaattgttctttcaat

SEQ ID NO: 70315 - DNA, 80 bp, synthetic construct
  source 1..80: mol_type = other DNA
gtaaccacagcaatacaagataaaaagcagaaagtacatgcactcttttatagacttgatgtagcaccaattggtaatga

SEQ ID NO: 70316 - DNA, 80 bp, synthetic construct
  source 1..80: mol_type = other DNA
gacagctaataatactgagtataggctaataaattgtaatacctcagtcattaagcaggcttgtccaaaggtatcctttg

SEQ ID NO: 70317 - DNA, 80 bp, synthetic construct
  source 1..80: mol_type = other DNA
agccaattcccatacattattgtgccccagctggttatgcgattttaaagtgtaataataagaatttcactgggacaggg

SEQ ID NO: 70318 - DNA, 80 bp, synthetic construct
  source 1..80: mol_type = other DNA
tctagcagaagatgagataataattagatctgaaaatctcacagacaatgccaagaccataatagtacacctcaatgaat

SEQ ID NO: 70319 - DNA, 80 bp, synthetic construct
  source 1..80: mol_type = other DNA
ctgtagaaattaattgtaccaggccctccaacaacacaagaacacgtgtaactataggaccaggacgagtattctataaa

SEQ ID NO: 70320 - DNA, 80 bp, synthetic construct
  source 1..80: mol_type = other DNA
acaggagagataataggagatatacgaaaagcacattgtaatgttagtggaagagcttggaatgacactttatccaaagt

SEQ ID NO: 70321 - DNA, 80 bp, synthetic construct
  source 1..80: mol_type = other DNA
agctgcacaattaggaaaacacctgaacaagagcacaataatatttcaaccagcctcaggaggggacatagaaattacaa

SEQ ID NO: 70322 - DNA, 80 bp, synthetic construct
  source 1..80: mol_type = other DNA
cacatacttttaattgtggaggagaatttttctattgcaatacaacacaattgtttaatagtacctggattgtcaacagc

SEQ ID NO: 70323 - DNA, 80 bp, synthetic construct
  source 1..80: mol_type = other DNA
actaacagtaatgggacaactgacacaaatattacactgccatgcagaataaaacaaattgtaaacatgtggcagagaac

SEQ ID NO: 70324 - DNA, 80 bp, synthetic construct
  source 1..80: mol_type = other DNA
agggcaagcaatgtatgctcctcccatcagtggagtaataaagtgtgtatcaaatattacaggaatattattaacaagag

SEQ ID NO: 70325 - DNA, 80 bp, synthetic construct
  source 1..80: mol_type = other DNA
atggtggtaatagtagccagactaatgagaccttcagacctggaggaggaaatatgaaggacaattggagaagtgaatta

SEQ ID NO: 70326 - DNA, 80 bp, synthetic construct
  source 1..80: mol_type = other DNA
aagagcagtgggaataggagctatggtctttgggttcttgggagcagcaggaagcactatgggcgcggcgtcaataacgc

SEQ ID NO: 70327 - DNA, 80 bp, synthetic construct
  source 1..80: mol_type = other DNA
gcagttcctaggactttggggctgctctggaaagatcatctgcaccactaacgtgccctggaactctagttggagtaata

SEQ ID NO: 70328 - DNA, 80 bp, synthetic construct
  source 1..80: mol_type = other DNA
aatcttatgatgaaatttggagcaaaatgacatggatagaatgggagagagaaattaacaattatacataccaaatatat

SEQ ID NO: 70329 - DNA, 80 bp, synthetic construct
  source 1..80: mol_type = other DNA
gagatacttacagaatcgcaaagccagcaggaaaagaatgaaaaggatttgttggcattggacaagtgggcaagcctgtg

SEQ ID NO: 70330 - DNA, 80 bp, synthetic construct
  source 1..80: mol_type = other DNA
gaattggtttgacatatcgaggtggctgtggtatataaaaatatttataatgataataggaggtttgataggtttaagaa

SEQ ID NO: 70331 - DNA, 80 bp, synthetic construct
  source 1..80: mol_type = other DNA
taatttttgctgtgctttctataataaatagagttaggcagggatactcacccttgtcgttccagacccaactcccaagc

SEQ ID NO: 70332 - DNA, 80 bp, synthetic construct
  source 1..80: mol_type = other DNA
ctgtgggagggtctcaaacacctggggaaccttctgttgtatgggggacaggagctaaagaatagtgctattaatttgct

SEQ ID NO: 70333 - DNA, 80 bp, synthetic construct
  source 1..80: mol_type = other DNA
cggattcttagcacttgcctgggacgacctgcggagcctgtgcctcttcagctaccaccgattgagagactttgtctgga

SEQ ID NO: 70334 - DNA, 80 bp, synthetic construct
  source 1..80: mol_type = other DNA
ttgtactgaggactgtggaacttctgtgggagggtctcaaacacctggggaaccttctgttgtatgggggacaggagcta

SEQ ID NO: 70335 - DNA, 80 bp, synthetic construct
  source 1..80: mol_type = other DNA
gtctagtaaaataccatatgtacatttcaaggaaagctagaagatggttttatagacatcattatgacagcaatcatcca

SEQ ID NO: 70336 - DNA, 80 bp, synthetic construct
  source 1..80: mol_type = other DNA
aaaataagctcagaggtacacatcccactaggggatgctgaattagtagtgacaacatattggggtctgcatacaggaga

SEQ ID NO: 70337 - DNA, 80 bp, synthetic construct
  source 1..80: mol_type = other DNA
aagagaatggcatttgggtcagggggtctccatagaatggaggctgaaaaggtacagaacacaagtagaccctggcctgg

SEQ ID NO: 70338 - DNA, 80 bp, synthetic construct
  source 1..80: mol_type = other DNA
cagaccaactaattcatatgcattactttgattgtttttcagaatctgccataaggaaggccatattaggacatagagtt

SEQ ID NO: 70339 - DNA, 80 bp, synthetic construct
  source 1..80: mol_type = other DNA
aaatcataggacaggtcagggatcaagcagaacaccttaagacagcagtacagatggcagtattcgttcacaattttaaa

SEQ ID NO: 70340 - DNA, 80 bp, synthetic construct
  source 1..80: mol_type = other DNA
agccctaggtgtgaatatcaagcaggacataataaggtaggatctttgcaatatctggcattagcagcattaataaaccc

SEQ ID NO: 70341 - DNA, 80 bp, synthetic construct
  source 1..80: mol_type = other DNA
aaaaaggacaaagccacctttgcctagtgttaaaaaactagtagaggatcgatggaacaagccccagaagaccaggggcc

SEQ ID NO: 70342 - DNA, 80 bp, synthetic construct
  source 1..80: mol_type = other DNA
acagagagaaccaaacaatgaatggacactagagcttttggaggagcttaaaaatgaagcagttagacattttcctaggc

SEQ ID NO: 70343 - DNA, 80 bp, synthetic construct
  source 1..80: mol_type = other DNA
atattccaaagtagcatgacaaaaatcttagagccttttagaaaacaaaatccagacatagatatctatcaatacatgga

SEQ ID NO: 70344 - DNA, 80 bp, synthetic construct
  source 1..80: mol_type = other DNA
tagtaccactaactgaagaagcagaattagaattggaggaaaacagggaaattttaaaagaaccagtacatggagcatac

SEQ ID NO: 70345 - DNA, 80 bp, synthetic construct
  source 1..80: mol_type = other DNA
tatgacccatcaaaagaattgatagctgaaatacagaagcaagggcaggaccaatggacatatcaaatttaccaagaacc

SEQ ID NO: 70346 - DNA, 80 bp, synthetic construct
  source 1..80: mol_type = other DNA
cattccagagcagactagagccgacagcccctccagcagagagcttcaggtttgaggagacaaccccagctccgaaacag

SEQ ID NO: 70347 - DNA, 80 bp, synthetic construct
  source 1..80: mol_type = other DNA
attcaagaatctgaaaacagggaagtatgcaaaaatgaggactgcccacactaatgatgtaaaacagttaacagaggctg

SEQ ID NO: 70348 - DNA, 80 bp, synthetic construct
  source 1..80: mol_type = other DNA
tgcagaaaatagccatggaaagcatagtaatatggggaaagattcctaaatttagattaccaatccaaaaggaaacatgg

SEQ ID NO: 70349 - DNA, 80 bp, synthetic construct
  source 1..80: mol_type = other DNA
ctgacaatccatataacactccaatatttgccataaaaaagaaggacagtactaagtggagaaaattagtagatttcagg

SEQ ID NO: 70350 - DNA, 80 bp, synthetic construct
  source 1..80: mol_type = other DNA
ttttttaggaagactttggccttcccacaaggggaggccagggaatttcctccagagcagaccagagccaacagcccctc

SEQ ID NO: 70351 - DNA, 80 bp, synthetic construct
  source 1..80: mol_type = other DNA
agtaacagtcctggatgtgggtgatgcatatttctcagttcctttagataaagacttcaggaagtatactgcattcacca

SEQ ID NO: 70352 - DNA, 80 bp, synthetic construct
  source 1..80: mol_type = other DNA
attggtacgtgatggagggtcaaataatacaaatgagacattcagacctggaggaggagatatgagggacaattggagaa

SEQ ID NO: 70353 - DNA, 80 bp, synthetic construct
  source 1..80: mol_type = other DNA
attacaatgcatcattttaattgtagaggggaatttttctactgcaatacaacaagactgtttaataataccagcataaa

SEQ ID NO: 70354 - DNA, 80 bp, synthetic construct
  source 1..80: mol_type = other DNA
taaaacacattataaaaggagggcaaggagtaggacaagcaatcctgcccccaccatcagtagtagtattaatcaatatc

SEQ ID NO: 70355 - DNA, 80 bp, synthetic construct
  source 1..80: mol_type = other DNA
tagtattaatcaatatcaaaaataacaggacactatggcaggtggtaataatagtactaatgaaaccgaaatctcagacc

SEQ ID NO: 70356 - DNA, 80 bp, synthetic construct
  source 1..80: mol_type = other DNA
tgatggaggaaacgaaacaggaaaaaatggtacagagatattcagacctggaggaggagatatgagggacaattggagaa

SEQ ID NO: 70357 - DNA, 80 bp, synthetic construct
  source 1..80: mol_type = other DNA
aatatcacaggactactattggtacgtgatggaggaacaggtaatgatacagatgagaatacagagacattcagaccgta

SEQ ID NO: 70358 - DNA, 80 bp, synthetic construct
  source 1..80: mol_type = other DNA
aatgagacagggtcaaatggtacagagatattcaaacctggaggaggagatatgagggacaattggagaagtgaattata

SEQ ID NO: 70359 - DNA, 80 bp, synthetic construct
  source 1..80: mol_type = other DNA
tggaggaacaggagaagattcaaatgttacagagacattcagacctggaggaggagatatgagggacaattggagaagtg

SEQ ID NO: 70360 - DNA, 80 bp, synthetic construct
  source 1..80: mol_type = other DNA
acgtgatggaggaataaatgatacaagctctacagagatattcagacctggaggaggagatatgagggacaattggagaa

SEQ ID NO: 70361 - DNA, 80 bp, synthetic construct
  source 1..80: mol_type = other DNA
taaatcaaatatcgcaggactactgatggtacgtgatggagaaataaatagtactaatgagacattcagaccggtaggag

SEQ ID NO: 70362 - DNA, 80 bp, synthetic construct
  source 1..80: mol_type = other DNA
agtgagggggacacagatgaattggcaaaacttgtggacatggggaaccatgatcttgggaatgataataatttgtagtg

SEQ ID NO: 70363 - DNA, 80 bp, synthetic construct
  source 1..80: mol_type = other DNA
agtgatggggacacagatgaactatccaaacttgtggaggtggggaactatgatcttgggaatgatgataatgtgtagtg

SEQ ID NO: 70364 - DNA, 80 bp, synthetic construct
  source 1..80: mol_type = other DNA
ctgctgaaccattgtgggttacggtctattatggggtacctgtgtggaaagacgcagagaccaccctattttgtgcatca

SEQ ID NO: 70365 - DNA, 80 bp, synthetic construct
  source 1..80: mol_type = other DNA
agcgagggggatacagaagaattgtcagcgcttgttgagatggggaactataatcttggggatgataatgatctgtagta

SEQ ID NO: 70366 - DNA, 80 bp, synthetic construct
  source 1..80: mol_type = other DNA
acctgtgtggagagatgcagagaccaccttattttgtgcctcagatgctaaagcacagagtccagaagcgcataatgtct

SEQ ID NO: 70367 - DNA, 80 bp, synthetic construct
  source 1..80: mol_type = other DNA
ctacagaaaacttgtgggttactgtatactatggggtacctgtgtggagagatgcagagactactctattctgtgcatca

SEQ ID NO: 70368 - DNA, 80 bp, synthetic construct
  source 1..80: mol_type = other DNA
acctgtgtggagagatgcagagactactctattctgtgcatcagatgctaaagcatatgatacagaagcacataatgtct

SEQ ID NO: 70369 - DNA, 80 bp, synthetic construct
  source 1..80: mol_type = other DNA
agtgagggggatacagacgaattggcagcacttattgaaatggggaactatgatcttgggaatgataataatctgtagtg

SEQ ID NO: 70370 - DNA, 80 bp, synthetic construct
  source 1..80: mol_type = other DNA
ctgcagacaacttgtgggttactgtctactatggggtgcctgtgtggagagatgcagagaccaccttattttgcgcttca

SEQ ID NO: 70371 - DNA, 80 bp, synthetic construct
  source 1..80: mol_type = other DNA
agtgatggggacacagatgaattgtcaaagcttgtggaaatggggaactataatcttggggatgataataatctgtagtg

SEQ ID NO: 70372 - DNA, 80 bp, synthetic construct
  source 1..80: mol_type = other DNA
ctgcagaaaaattgtgggtcactgtctactatggggtacctgtgtggaaagatgcagacaccaccttattttgtgcgtca

SEQ ID NO: 70373 - DNA, 80 bp, synthetic construct
  source 1..80: mol_type = other DNA
gacaccaccttattttgtgcgtcagatgctaaagcatatgatacagaagtgcataatgtctgggctacacatgcctgtgt

SEQ ID NO: 70374 - DNA, 80 bp, synthetic construct
  source 1..80: mol_type = other DNA
agcgatggggatacagatgaattatcaaaacttgtggaaatggggaacgatgatcttggggatgttaataatttgtagta

SEQ ID NO: 70375 - DNA, 80 bp, synthetic construct
  source 1..80: mol_type = other DNA
agtgagggggatacagatgaattggcaaaacttgtggagatggggaactatgatgttggggatgttgataatctgtagag

SEQ ID NO: 70376 - DNA, 80 bp, synthetic construct
  source 1..80: mol_type = other DNA
ctgcagggaacttgtgggttactgtctactatggaggacctgtgtggagagatgcagagaccatcctattttgtgcatca

SEQ ID NO: 70377 - DNA, 80 bp, synthetic construct
  source 1..80: mol_type = other DNA
agtgatggggatacagaggaattgtcagcacttattgacatcgagggctatgatcttggggatgatgatgatatgtagtg

SEQ ID NO: 70378 - DNA, 80 bp, synthetic construct
  source 1..80: mol_type = other DNA
agcgagggggacacagatgatttggcagaactgttggagatggggaacattgttcttggggatattgatgatttgtagtg

SEQ ID NO: 70379 - DNA, 80 bp, synthetic construct
  source 1..80: mol_type = other DNA
agtgaaggagacacagaagaattactctctctcgtggagatggggaactatgatccttgggctgataataatctgtagtg

SEQ ID NO: 70380 - DNA, 80 bp, synthetic construct
  source 1..80: mol_type = other DNA
gtgcaaaacccttgtgggtcacggtctattatggtgtgacctgtgtggaaagatgcaaagaccaccctattttgtgcatc

SEQ ID NO: 70381 - DNA, 80 bp, synthetic construct
  source 1..80: mol_type = other DNA
aagaccaccctattttgtgcatcagacgccaaagcatatgatacagaagtgcataatgtttgggccacacatgcctgtgt

SEQ ID NO: 70382 - DNA, 80 bp, synthetic construct
  source 1..80: mol_type = other DNA
agtgatggagacgcggaagaactatcaacacttgtggagatgggggattatgatttttggaatgataataatctgtttgc

SEQ ID NO: 70383 - DNA, 80 bp, synthetic construct
  source 1..80: mol_type = other DNA
ctacaggaaacttgtgggtcacagtctactatggggtacctgtatggaaagatgcaaagaccaccctattttgtgcatca

SEQ ID NO: 70384 - DNA, 80 bp, synthetic construct
  source 1..80: mol_type = other DNA
ctgcaaatgacttttgggtcacggtctactatggggtacctgtgtggagagatgcagagaccaccctattttgtgcatca

SEQ ID NO: 70385 - DNA, 80 bp, synthetic construct
  source 1..80: mol_type = other DNA
agtgaaggggatacagaagaattgtcaacacttgtggagatgggggattatgatcttggggataataataatttgtagtg

SEQ ID NO: 70386 - DNA, 80 bp, synthetic construct
  source 1..80: mol_type = other DNA
ttgcaaacaaatcagacaattcgtgggtcacggtctattatggggtacctgtgtggaaagaagcaaagactactctattt

SEQ ID NO: 70387 - DNA, 80 bp, synthetic construct
  source 1..80: mol_type = other DNA
agtgatggggatacagaggaattatccacacttgtggaagtgggggattatgttcttttggatgataataatgtgtagtg

SEQ ID NO: 70388 - DNA, 80 bp, synthetic construct
  source 1..80: mol_type = other DNA
agtgatggggacacagaagaattatccacacttgtggagatgggggactatgatctttatgatgttaatgatttgtagtg

SEQ ID NO: 70389 - DNA, 80 bp, synthetic construct
  source 1..80: mol_type = other DNA
agtgatggggacacagaggaattatgcacccttgtggaggtgggggatgatattccttggattaataataatttgtaagg

SEQ ID NO: 70390 - DNA, 80 bp, synthetic construct
  source 1..80: mol_type = other DNA
accggtatggagagatgcagagaccaccctattttgtgcatcagatgctaaagcatatagtcaagaaaaacataatgttt

SEQ ID NO: 70391 - DNA, 80 bp, synthetic construct
  source 1..80: mol_type = other DNA
ctacagaaaagttgtgggtcacagtctactatggagtgcctgtgtggagagatgcagagaccaccttattctgtgcatca

SEQ ID NO: 70392 - DNA, 80 bp, synthetic construct
  source 1..80: mol_type = other DNA
agtgagggggatacagaggaactatacacacttatggagatgggggatgatgttccttggattaataataatatgtaagg

SEQ ID NO: 70393 - DNA, 80 bp, synthetic construct
  source 1..80: mol_type = other DNA
ccaccctattttgtgcatcagaagccaaagcatatgatccagaagtgcataatgtctgggctacacatgcctgtgtacca

SEQ ID NO: 70394 - DNA, 80 bp, synthetic construct
  source 1..80: mol_type = other DNA
agtgagggggacacagatgaattggccacacttgtggacaacatggggggctttgatcattgggttggtgataatgtgta

SEQ ID NO: 70395 - DNA, 80 bp, synthetic construct
  source 1..80: mol_type = other DNA
cctcaaacttgtgggttacagtttattatggggttcctgtgtggagagatgcagataccaccctattttgtgcatcagat

SEQ ID NO: 70396 - DNA, 80 bp, synthetic construct
  source 1..80: mol_type = other DNA
agtgagggggacacaaatgaattggccatacttgtggaaaatggggactttgatccttgggttggtgataatatgtagtg

SEQ ID NO: 70397 - DNA, 80 bp, synthetic construct
  source 1..80: mol_type = other DNA
acctgtgtggaaagaagcaaccaccactctcttttgtgcatcagatgctaaagcatatgatacagaagtacataatgttt

SEQ ID NO: 70398 - DNA, 80 bp, synthetic construct
  source 1..80: mol_type = other DNA
agtgatggggatcaggaagaattatcagcacttgtggagatggggcacgatgctccttgggatattgatgatctgtagtg

SEQ ID NO: 70399 - DNA, 80 bp, synthetic construct
  source 1..80: mol_type = other DNA
agtgatggagatcaggaagaattatcagcacttgtggaaatggggcgccatgctccttggcctattaatgatctgtaaag

SEQ ID NO: 70400 - DNA, 80 bp, synthetic construct
  source 1..80: mol_type = other DNA
agtgatggggacacagaagaattatctatccttatggaggtggggcatcatgctccttgggatattgatgatctgtagtg

SEQ ID NO: 70401 - DNA, 80 bp, synthetic construct
  source 1..80: mol_type = other DNA
ctgcagcacaattgtgggtcacagtctattatggggtacctgtgtggaaagaagcaaccaccactctattttgtgcatca

SEQ ID NO: 70402 - DNA, 80 bp, synthetic construct
  source 1..80: mol_type = other DNA
agtgacggggatcaggaagaattatcagccttggtggacatggggcatgatgctccttgggatgttaatgatctgtaata

SEQ ID NO: 70403 - DNA, 80 bp, synthetic construct
  source 1..80: mol_type = other DNA
gacgctaaagcatatgacacagaagtacataatgtttgggccacacatgcctgtgtacccacagacccccacccacaaga

SEQ ID NO: 70404 - DNA, 80 bp, synthetic construct
  source 1..80: mol_type = other DNA
ctgcagaagacaagtcggtcacagtctcttatggggtacctgtgtggaaagaagcaaccgctcctctattttgtgcatca

SEQ ID NO: 70405 - DNA, 80 bp, synthetic construct
  source 1..80: mol_type = other DNA
catatgacacagaagtacataatgtttgggccacacatgcctgtgtacccacagacccccacccacaagaagtagtattg

SEQ ID NO: 70406 - DNA, 80 bp, synthetic construct
  source 1..80: mol_type = other DNA
gtgctgcagataaattgtgggtcacagtttattatggggtacctgtatggagagaagcaaccaccactctattttgtgca

SEQ ID NO: 70407 - DNA, 80 bp, synthetic construct
  source 1..80: mol_type = other DNA
agtgaaggggataacgaggaactatcaaccctggtggaaatggggcaccatgctccttgggatgttgctgatgacatata

SEQ ID NO: 70408 - DNA, 80 bp, synthetic construct
  source 1..80: mol_type = other DNA
agtgagggggatggagaggaattatcagcatttatggagatggggcaccatgctccttgggttgttgatgatatgtagtg

SEQ ID NO: 70409 - DNA, 80 bp, synthetic construct
  source 1..80: mol_type = other DNA
gtgcagcagataagttgtgggtcacagtgtattatggggtgcctgtatggaaagaagcaaaaaccactctattctgtgca

SEQ ID NO: 70410 - DNA, 80 bp, synthetic construct
  source 1..80: mol_type = other DNA
aagcaaaaaccactctattctgtgcatcagatgctaaatcagttaaagcagaggcacataatatatgggcttcacatgcc

SEQ ID NO: 70411 - DNA, 80 bp, synthetic construct
  source 1..80: mol_type = other DNA
agtgagggggatagagaggaattatcaacacttatggaaatggggcaccctgctccttgggatgttgctgatgacctata

SEQ ID NO: 70412 - DNA, 80 bp, synthetic construct
  source 1..80: mol_type = other DNA
aagcagaaactactttattttgtgcatcagatgctaaatcaattgaaacagaggcacataatatctgggccacacatgcc

SEQ ID NO: 70413 - DNA, 80 bp, synthetic construct
  source 1..80: mol_type = other DNA
agtgatggggatagtgaggaagtggcaacacttatgggaatggggcaccttgctccttgggatgttgctgatcacatata

SEQ ID NO: 70414 - DNA, 80 bp, synthetic construct
  source 1..80: mol_type = other DNA
ggaaccggtgggtcacagtctattatggagtacctgtgtggagagaagcaaaaactactctattctgtgcatcagatgcc

SEQ ID NO: 70415 - DNA, 80 bp, synthetic construct
  source 1..80: mol_type = other DNA
agtgagggggatactgaggaattggcaacaatggtggatatggggcatcttaggcttttggataatttgtagtggggtgg

SEQ ID NO: 70416 - DNA, 80 bp, synthetic construct
  source 1..80: mol_type = other DNA
gtatactatggggtacctgtgtggagagaagcaaaaactactctattttgtgcatcagatgctaaagcatatgatacaca

SEQ ID NO: 70417 - DNA, 80 bp, synthetic construct
  source 1..80: mol_type = other DNA
acctgtgtggaaagaagcaaatactactctgttttgtgcatcagatgctaaaacatatgattcagaagtgcataatgtct

SEQ ID NO: 70418 - DNA, 80 bp, synthetic construct
  source 1..80: mol_type = other DNA
accagtgtggagagaagcaaaaacaactctattctgtgcatcagatgctaaaggatatgaaagagaagtgcataatgtct

SEQ ID NO: 70419 - DNA, 80 bp, synthetic construct
  source 1..80: mol_type = other DNA
gtgtggaaagaagcaaaaactactctattttgtgcatcagatgctaaagcatatgagaaagaagtgcataatgtctgggc

SEQ ID NO: 70420 - DNA, 80 bp, synthetic construct
  source 1..80: mol_type = other DNA
tgggggggaacttgtgggtcacagtttattatggggtacctgtgtggaaagaagcaaaaactactctattttgtgcatca

SEQ ID NO: 70421 - DNA, 80 bp, synthetic construct
  source 1..80: mol_type = other DNA
gagagaagcaaaaactactctattttgtgcatcagatgctaaggcatatgaaagagaagtgcataatgtctgggctacac

SEQ ID NO: 70422 - DNA, 80 bp, synthetic construct
  source 1..80: mol_type = other DNA
agcgagggggatactgaggaattgtcaacaatggtggatatggggcatcttaggcttttggatgctaatgatttgtaatg

SEQ ID NO: 70423 - DNA, 80 bp, synthetic construct
  source 1..80: mol_type = other DNA
tgatgggaaatgaaactttgtgggtcacagtctattatggggtacctgtgtggaaagaagcaaaaactactctattttgt

SEQ ID NO: 70424 - DNA, 80 bp, synthetic construct
  source 1..80: mol_type = other DNA
acctgtgtggaaagaagcaaaaactactctattttgtgcatcagatgctaaagcaattgaaacagaagtgcacaatgtct

SEQ ID NO: 70425 - DNA, 80 bp, synthetic construct
  source 1..80: mol_type = other DNA
tgatgggaaacttgtgggtcacagtatattatggggtacctgtgtggagagaagcaagcccttctctattttgtgcatca

SEQ ID NO: 70426 - DNA, 80 bp, synthetic construct
  source 1..80: mol_type = other DNA
taatgggaaacttgtgggtcacagtatattatggggtacctgtgtaaaaaaaagcaaaagctaccctattctgtgcatca

SEQ ID NO: 70427 - DNA, 80 bp, synthetic construct
  source 1..80: mol_type = other DNA
taccctattctgtgcatcagatgctaaagcatataatacaaaagtgcataatgtctgggccacacatgcctgtgtaccag

SEQ ID NO: 70428 - DNA, 80 bp, synthetic construct
  source 1..80: mol_type = other DNA
agtaaagagaatacagagaaattgtcaaccatagtaaatataaggcatcttaggcttttaaatgctaataatgtataatg

SEQ ID NO: 70429 - DNA, 80 bp, synthetic construct
  source 1..80: mol_type = other DNA
agtgacggggatacagaggaattgtcaactatggtggatatggggaatcttaggcttttggatgatttatagtgggatgg

SEQ ID NO: 70430 - DNA, 80 bp, synthetic construct
  source 1..80: mol_type = other DNA
tgacagggaacttgtgggtcacagtatattatggggtacctgtgtggaaggaagcaaaccctcctttgttttgtgcatca

SEQ ID NO: 70431 - DNA, 80 bp, synthetic construct
  source 1..80: mol_type = other DNA
acctgtgtggaaggaagcaaaccctcctttgttttgtgcatcaaatgctaaagcatatgatacagaagtgcataatgtct

SEQ ID NO: 70432 - DNA, 80 bp, synthetic construct
  source 1..80: mol_type = other DNA
tagtgggaaacttgtgggtcacagtctattatggggtgcctgtgtggaaagatgcaaatcctactctattttgtgcatca

SEQ ID NO: 70433 - DNA, 80 bp, synthetic construct
  source 1..80: mol_type = other DNA
gcctgtgtggaaagatgcaaatcctactctattttgtgcatcagacgctaaagcatatgaaacagaagtgcataatgtct

SEQ ID NO: 70434 - DNA, 80 bp, synthetic construct
  source 1..80: mol_type = other DNA
agtgatggggatacagaggaattgtccaccatggttgatatggggaatcttaggcttttggatgttaatgatctgtagtg

SEQ ID NO: 70435 - DNA, 80 bp, synthetic construct
  source 1..80: mol_type = other DNA
atggtggatatggggcatcttaggcttttggatggtaatgatttgtaatgtgatgggcttgtgggtcacagtatattatg

SEQ ID NO: 70436 - DNA, 80 bp, synthetic construct
  source 1..80: mol_type = other DNA
ggaaagaggacttgtgggtcacagtatattatggggtacctgtgtggagagaagcaaaaactactttattttgtgcatct

SEQ ID NO: 70437 - DNA, 80 bp, synthetic construct
  source 1..80: mol_type = other DNA
tactaaggaacaattgtaagtcacagtttactatgaagtacctgtgtaagaagatgcagagaccaccctattctgtgcat

SEQ ID NO: 70438 - DNA, 80 bp, synthetic construct
  source 1..80: mol_type = other DNA
agtgataaggatacagaggaattgtcaacaatggtagatataaggcatcttaggcttttagatgctagtaatttgtagtg

SEQ ID NO: 70439 - DNA, 80 bp, synthetic construct
  source 1..80: mol_type = other DNA
tgatggggaacaagaaattgtgggttactgtctactatggggtccctgtgtggaaagaagcaaagaccaccttattttgt

SEQ ID NO: 70440 - DNA, 80 bp, synthetic construct
  source 1..80: mol_type = other DNA
ccctgtgtggaaagaagcaaagaccaccttattttgtgcatcagatgctaaagcatatgaaacagaaaagcataatgtct

SEQ ID NO: 70441 - DNA, 80 bp, synthetic construct
  source 1..80: mol_type = other DNA
acctgtgtggaaagatgcagagaccaccctattttgtgcatccgatgctaaagcatatggtacagaggcgcataatgtat

SEQ ID NO: 70442 - DNA, 80 bp, synthetic construct
  source 1..80: mol_type = other DNA
agtgagggggatacagaggaattgtcagcaatggtggatatggggcatcttaggcttttggatgtatagtgtgatgggga

SEQ ID NO: 70443 - DNA, 80 bp, synthetic construct
  source 1..80: mol_type = other DNA
tgatggggaacttgtgggtcacagtctactatggggtacctgtgtggagagacgcagagaccactttattttgtgcatca

SEQ ID NO: 70444 - DNA, 80 bp, synthetic construct
  source 1..80: mol_type = other DNA
ggttagggaaattatgggtcacagtctactatggagtacctgtgtggaaagatgcagagaccaccctattttgtgcatca

SEQ ID NO: 70445 - DNA, 80 bp, synthetic construct
  source 1..80: mol_type = other DNA
gaaacttgtgggtcacaatttattatggggtacctgtgtggaaagaagcaaaaactactctattttgtgcatcagatgct

SEQ ID NO: 70446 - DNA, 80 bp, synthetic construct
  source 1..80: mol_type = other DNA
agtgagggggatactgaggaactgtcaacaatggtggatatggggcatcttaggcttttggatgatctatagtgtgttag

SEQ ID NO: 70447 - DNA, 80 bp, synthetic construct
  source 1..80: mol_type = other DNA
agtgatggggacacagaggaattggcaacaatggtggatttggagcattttggccttttggatgttaatggtttgtagtg

SEQ ID NO: 70448 - DNA, 80 bp, synthetic construct
  source 1..80: mol_type = other DNA
tgtggagagatgcagataccaccctattttgtgcatcagatgccaaagcacatgagacagaagtgcacaatgtctgggcc

SEQ ID NO: 70449 - DNA, 80 bp, synthetic construct
  source 1..80: mol_type = other DNA
agtgagggggatacagaagaattatccactcttgtggaggtgggggactatcatattttggataattataatttgtaatg

SEQ ID NO: 70450 - DNA, 80 bp, synthetic construct
  source 1..80: mol_type = other DNA
agtgatggggatacagaagaattatcccttattatggagatggggggtaataatattttggactttaataatttgtaatg

SEQ ID NO: 70451 - DNA, 80 bp, synthetic construct
  source 1..80: mol_type = other DNA
agtgatggggatacagaagaattatcaactcttatggaaatggggtacgataatatgttggataatgatgatttgtagtg

SEQ ID NO: 70452 - DNA, 80 bp, synthetic construct
  source 1..80: mol_type = other DNA
acagaagcaaacaccactctattttgtgcatcagatgctaaatcatataaaacagaggtacataatatctgggctacaca

SEQ ID NO: 70453 - DNA, 80 bp, synthetic construct
  source 1..80: mol_type = other DNA
agtgatggggacacagaggaattgtccactcttatggaaattgggaatggtgattttttggataataataatttgtaatg

SEQ ID NO: 70454 - DNA, 80 bp, synthetic construct
  source 1..80: mol_type = other DNA
agtgatggggatgaagaagagttatccactcttatggaggtggggggctataatattttggttaatgataatttgtaatg

SEQ ID NO: 70455 - DNA, 80 bp, synthetic construct
  source 1..80: mol_type = other DNA
agtgaaggggacacagaagaattatacacccttatgggggatgatgatatttttgataataataatgtgtaatgctaaag

SEQ ID NO: 70456 - DNA, 80 bp, synthetic construct
  source 1..80: mol_type = other DNA
agtgatggggacacagaagaattatccatgcttatggaagtggggtatgacaatattttggcttatgataatttgtaatg

SEQ ID NO: 70457 - DNA, 80 bp, synthetic construct
  source 1..80: mol_type = other DNA
agtgatggagacacagaagagttatccactcttgtggagcttggggataatattttggataatgataattggtaatgctg

SEQ ID NO: 70458 - DNA, 80 bp, synthetic construct
  source 1..80: mol_type = other DNA
ctgaacaggaaaaactgtgggtcacggtttcctatggggtacctgtgtggagagacgcaaagaccaccctattttgtgca

SEQ ID NO: 70459 - DNA, 80 bp, synthetic construct
  source 1..80: mol_type = other DNA
agtgatggagatacagaagaattatccactcttctggagatggggtatgataatattatggataatgataattggtaatg

SEQ ID NO: 70460 - DNA, 80 bp, synthetic construct
  source 1..80: mol_type = other DNA
tttgtaatgctgaaaatttgtgggtcacggtctactatggggtacctgtgtggaaagacgcagagaccaccctattttgt

SEQ ID NO: 70461 - DNA, 80 bp, synthetic construct
  source 1..80: mol_type = other DNA
agtgatggggatacagaagaattatccacgcttatggagatggggtatgataatatggggtatattttggataatgataa

SEQ ID NO: 70462 - DNA, 80 bp, synthetic construct
  source 1..80: mol_type = other DNA
agtgatggggatactgaagaattgtccacccttctggagatggggtatgataatgatgctttggataatgataatttgta

SEQ ID NO: 70463 - DNA, 80 bp, synthetic construct
  source 1..80: mol_type = other DNA
agtgatggggacacagaagaattatccacccttatggagatggggcatgacaatattttggcttttgatggttgtaatgc

SEQ ID NO: 70464 - DNA, 80 bp, synthetic construct
  source 1..80: mol_type = other DNA
agtgatggggatacagaagaactgtccacccttatggagatggggtatgataatactttggatattgatgatttgtaatg

SEQ ID NO: 70465 - DNA, 80 bp, synthetic construct
  source 1..80: mol_type = other DNA
agtgatggggatacagaagaattatccatccttatggaggtgggggactatgataattttgttaataataatttgtaatg

SEQ ID NO: 70466 - DNA, 80 bp, synthetic construct
  source 1..80: mol_type = other DNA
acctgtgtggagagacgcagagaccaccctattttgtgcatcagatgctaaagcatattctacagaaaagcacaatgtct

SEQ ID NO: 70467 - DNA, 80 bp, synthetic construct
  source 1..80: mol_type = other DNA
ctgaaaatatgtgggtcacagtgtactatggggtacctgtgtggaaagaagcagcgaccaccctattttgtgcatcagat

SEQ ID NO: 70468 - DNA, 80 bp, synthetic construct
  source 1..80: mol_type = other DNA
agtgatggggatactgaggaattgtccactcttgtggaggtgggggactatgatctttttgttaatgacaatttgtaatg

SEQ ID NO: 70469 - DNA, 80 bp, synthetic construct
  source 1..80: mol_type = other DNA
ctcaaaaattgtgggtcacggtttactatggggtacctgtgtggaaagacgcaagcaccactctattttgtgcatcagat

SEQ ID NO: 70470 - DNA, 80 bp, synthetic construct
  source 1..80: mol_type = other DNA
aagatatgtgggtcacggtctactatggggtacctgtgtggaaagacgcaaggaccaccctattttgcgcatcagatgct

SEQ ID NO: 70471 - DNA, 80 bp, synthetic construct
  source 1..80: mol_type = other DNA
agtgagggggacacagaagaattatccactcttatggagatggggtctaataatatttgggataatgataatttgtaatg

SEQ ID NO: 70472 - DNA, 80 bp, synthetic construct
  source 1..80: mol_type = other DNA
agtgagggggacacagaagaattatccactcttatggagatgggggataatattttggctattgatgatttgtaatgctg

SEQ ID NO: 70473 - DNA, 80 bp, synthetic construct
  source 1..80: mol_type = other DNA
ctcaaaatttgtgggtcacagtatactatggagtacctgtgtggagagatgcaaaggccaccctattttgtgcatcagat

SEQ ID NO: 70474 - DNA, 80 bp, synthetic construct
  source 1..80: mol_type = other DNA
agtgatggggatacagaggaattatccacccttgtggagatggggtacgataatattttgcatattgatgatttgtagtg

SEQ ID NO: 70475 - DNA, 80 bp, synthetic construct
  source 1..80: mol_type = other DNA
ctgaaaggctgtgggtcacggtctattatggggtacctgtgtggaaagatgcagacaccaccctgttttgtgcatcagat

SEQ ID NO: 70476 - DNA, 80 bp, synthetic construct
  source 1..80: mol_type = other DNA
acctgtgtggaaagatgcagacaccaccctgttttgtgcatcagatgctaaaggatttactcaagaagtacataatgtct

SEQ ID NO: 70477 - DNA, 80 bp, synthetic construct
  source 1..80: mol_type = other DNA
ctgaacatttgtgggtcgcggtctattatggggtacctgtgtggagagacgcagataccaccctattttgtgcatcagat

SEQ ID NO: 70478 - DNA, 80 bp, synthetic construct
  source 1..80: mol_type = other DNA
accggtgtggagagatgcagataccaccctattttgtgcatcagatgctaaagcatatactacagaggtacacaatgtct

SEQ ID NO: 70479 - DNA, 80 bp, synthetic construct
  source 1..80: mol_type = other DNA
aaagaagcaaccactactctattttgtgcatcagatgctaaagcatatgatgcagaagtacataatgtttgggctacaca

SEQ ID NO: 70480 - DNA, 80 bp, synthetic construct
  source 1..80: mol_type = other DNA
agtgatggggatacagaggaattgtccactcttatggagatggggcacgataatattttggataatgataatttgtaatg

SEQ ID NO: 70481 - DNA, 80 bp, synthetic construct
  source 1..80: mol_type = other DNA
agtgatggggacacagaggaattatccactcttatggagggggggaaccttgctcttttggataatattaatttgtagtg

SEQ ID NO: 70482 - DNA, 80 bp, synthetic construct
  source 1..80: mol_type = other DNA
agagacgcagaaaccaccctattttgtgcatcagatgctaaagcatataaggaagaagcacataatgtctgggccacaca

SEQ ID NO: 70483 - DNA, 80 bp, synthetic construct
  source 1..80: mol_type = other DNA
ctcacccattgtgggtcacgatctactatggggtacctgtgtggaaagatgccgataccaccctattttgtgcatcagat

SEQ ID NO: 70484 - DNA, 80 bp, synthetic construct
  source 1..80: mol_type = other DNA
agtgatggagatacagaggaactatccactcttatggaggtgggggattataatattttggataacaataatttgtaatg

SEQ ID NO: 70485 - DNA, 80 bp, synthetic construct
  source 1..80: mol_type = other DNA
tgagggagatacagaagaactatccactcttatggagagggggtttgataatcctttgtataatgatgatttgtaatgct

SEQ ID NO: 70486 - DNA, 80 bp, synthetic construct
  source 1..80: mol_type = other DNA
agagacgcagagaccaccctattttgtgcatcagatgctaaagcatataaaacagaagttcatgttggttggacaactgc

SEQ ID NO: 70487 - DNA, 80 bp, synthetic construct
  source 1..80: mol_type = other DNA
aagcatgaggatacagaagaattatccactcttatggagattgggtatgatgttttggataatgataatgtgtaatgctg

SEQ ID NO: 70488 - DNA, 80 bp, synthetic construct
  source 1..80: mol_type = other DNA
cctcatggagatggaatatgacgaattatccaatcttatggagatggggtatgataattttttgggtaataataatttgt

SEQ ID NO: 70489 - DNA, 80 bp, synthetic construct
  source 1..80: mol_type = other DNA
agtgagggggctacagaggaattattggggatggggtatgataatattttggatattgataatttgtaatgctaacaaat

SEQ ID NO: 70490 - DNA, 80 bp, synthetic construct
  source 1..80: mol_type = other DNA
agtgatggagacacagaagaattgtcaactcttatggagatggggtacaatattttggataatgatgatttgtaatgctg

SEQ ID NO: 70491 - DNA, 80 bp, synthetic construct
  source 1..80: mol_type = other DNA
tgatcatttgtaatgctgaaaagatgtgggtcacggtctactatggggtacctgtgtggaaagacgcagtgaccacccta

SEQ ID NO: 70492 - DNA, 80 bp, synthetic construct
  source 1..80: mol_type = other DNA
aaagacgcagtgaccaccctattttgtgcatcagatgctaaagcatatagtgcagaagtacataatgtttgggccacaca

SEQ ID NO: 70493 - DNA, 80 bp, synthetic construct
  source 1..80: mol_type = other DNA
agcgatggggacgaagaagaattatccactcttatggagatggggtatgataatatggggtatgataatattttggataa

SEQ ID NO: 70494 - DNA, 80 bp, synthetic construct
  source 1..80: mol_type = other DNA
agtgatggggatacagaagaattatccactcttatggagattgggtacgataataatttggacattgataatttgtaaag

SEQ ID NO: 70495 - DNA, 80 bp, synthetic construct
  source 1..80: mol_type = other DNA
agtgagggggatacagaagaattatccctccttatggaaatggggcatgataatattttggatattgataacttgtaatg

SEQ ID NO: 70496 - DNA, 80 bp, synthetic construct
  source 1..80: mol_type = other DNA
agtgatggggacacggaagaattatccactcttatggagatggggcacgatgatattttgcttattgatgatttgtaatg

SEQ ID NO: 70497 - DNA, 80 bp, synthetic construct
  source 1..80: mol_type = other DNA
ctgacaagttatgggtcacggtctactatggggtacctgtgtggagagacgcagaaaccaccctattttgtgcctcagat

SEQ ID NO: 70498 - DNA, 80 bp, synthetic construct
  source 1..80: mol_type = other DNA
agtgatggagataaggaggaattatccactcttatggagatgggggattatgatctctttgttaatgataatttgtaatg

SEQ ID NO: 70499 - DNA, 80 bp, synthetic construct
  source 1..80: mol_type = other DNA
agtgatggggatacagaagagttatccatggagttggggtatgataatattttggcttttgataatttgtaatgctaaag

SEQ ID NO: 70500 - DNA, 80 bp, synthetic construct
  source 1..80: mol_type = other DNA
taacaaattatgggtaacggtctactatggggtaccggtgtggagagatgcagataccaccctattttgtgcatcagatg

SEQ ID NO: 70501 - DNA, 80 bp, synthetic construct
  source 1..80: mol_type = other DNA
ctgaaaatttgtgggttacggtctactatggggtaccagtgtggaaagacgcagagaccactctattttgtgcatcagat

SEQ ID NO: 70502 - DNA, 80 bp, synthetic construct
  source 1..80: mol_type = other DNA
aaagacgcagagaccactctattttgtgcatcagatgctaaagcatatcatccagaagcacataatatctgggctacaca

SEQ ID NO: 70503 - DNA, 80 bp, synthetic construct
  source 1..80: mol_type = other DNA
agtgatggggatacagaggagttgtccaaccttattgaggtggggagctatggtcttttgtttaatgataatgtgtagtg

SEQ ID NO: 70504 - DNA, 80 bp, synthetic construct
  source 1..80: mol_type = other DNA
ctaataatttgttgtgggtcacggtctactatggagtacctgggtggagagacgcagagaccaccctattttgtgcatca

SEQ ID NO: 70505 - DNA, 80 bp, synthetic construct
  source 1..80: mol_type = other DNA
aggaacgacgacgccgcggaattatccacccttctggacatggggggcgataatatttgggattatcataatttgtaatg

SEQ ID NO: 70506 - DNA, 80 bp, synthetic construct
  source 1..80: mol_type = other DNA
ctgctgacaatatgtgggtcacggtctactatggggtacctgtgtggagagatgcagagactaccttattttgtgcatca

SEQ ID NO: 70507 - DNA, 80 bp, synthetic construct
  source 1..80: mol_type = other DNA
agtgaaggggatacagaagagctatcccttattttggaaatggggtacaataatattgtggatgatgacaatttgtaatg

SEQ ID NO: 70508 - DNA, 80 bp, synthetic construct
  source 1..80: mol_type = other DNA
agtgacggggatacggaggaattggccactcttatggaaatggggaactatgatcttttggataacgacaatttgtaatg

SEQ ID NO: 70509 - DNA, 80 bp, synthetic construct
  source 1..80: mol_type = other DNA
agtgagggggatacagaggaattatccgcccttatggagatggggaactatgatgttctggttaatgataatttgtagtg

SEQ ID NO: 70510 - DNA, 80 bp, synthetic construct
  source 1..80: mol_type = other DNA
agtgatggagacacagaggaattatccacccttctggagatggggaactatgatcttttggataatgatatgttgtagtg

SEQ ID NO: 70511 - DNA, 80 bp, synthetic construct
  source 1..80: mol_type = other DNA
agtgagggggatgcagaggaattatccaatcttatggaggtgggggactataatttgttggttaatgataatttgtaatg

SEQ ID NO: 70512 - DNA, 80 bp, synthetic construct
  source 1..80: mol_type = other DNA
agtgatggggacacagaggaattatccacccttatggaggtgggggactatcatctgttggataatggtaatttgtaatg

SEQ ID NO: 70513 - DNA, 80 bp, synthetic construct
  source 1..80: mol_type = other DNA
ctaaagaaagtttatgggtcacagtctactatggggtacctgtgtggagagatgcagaaaccactttattctgtgcatca

SEQ ID NO: 70514 - DNA, 80 bp, synthetic construct
  source 1..80: mol_type = other DNA
agtgacggggatacagaggaattgtccactcttctggagatgggtaaccatgatttttgggataatgataatttgtaatg

SEQ ID NO: 70515 - DNA, 80 bp, synthetic construct
  source 1..80: mol_type = other DNA
agtgatggggatacagaggaattatccactcttatggagatggggaaccttgatcttttggttaatgatgatttgtaatg

SEQ ID NO: 70516 - DNA, 80 bp, synthetic construct
  source 1..80: mol_type = other DNA
agtgatggggatacagaggaattatccactcttatggagatggggaattataatcttttggacaataataatttgtagtg

SEQ ID NO: 70517 - DNA, 80 bp, synthetic construct
  source 1..80: mol_type = other DNA
agtgacggagacacagaggaactatccactcttatggagatggggagctataatcttttggataatgacaatttgtaatg

SEQ ID NO: 70518 - DNA, 80 bp, synthetic construct
  source 1..80: mol_type = other DNA
agtgatggggatacagaggaattatccacacttattgaggtggggaactatggtcttttggatattgataatttgtagtg

SEQ ID NO: 70519 - DNA, 80 bp, synthetic construct
  source 1..80: mol_type = other DNA
agtgatggagatacagaggaattatccactcttatggaggtgggggactataatcttttgggtgatggcaatttgtagtg

SEQ ID NO: 70520 - DNA, 80 bp, synthetic construct
  source 1..80: mol_type = other DNA
ctaaaccgatgtgggtcacggtctactatggggtacctgtgtggaaagacgcagagaccaccctattttgtgcatcagat

SEQ ID NO: 70521 - DNA, 80 bp, synthetic construct
  source 1..80: mol_type = other DNA
agtgagggagatacagaggaattatccactcttatggagatggggaacgataatattttgcttattaataatttgtaatg

SEQ ID NO: 70522 - DNA, 80 bp, synthetic construct
  source 1..80: mol_type = other DNA
caaaacatttatgggtcacggtttactatggggtacctgtgtggagagatgcagaaaccaccctattttgtgcatcagat

SEQ ID NO: 70523 - DNA, 80 bp, synthetic construct
  source 1..80: mol_type = other DNA
agtgatggggatacagaggaattgtccactcttatggagatggggagctataatttgtgggttaatgatgatttgtaatg

SEQ ID NO: 70524 - DNA, 80 bp, synthetic construct
  source 1..80: mol_type = other DNA
ctaacaatttgtgggtcacggtatattatggggtacctgtatggaaagaagcagataccaccctattctgtgcatcagat

SEQ ID NO: 70525 - DNA, 80 bp, synthetic construct
  source 1..80: mol_type = other DNA
aaaatttgtgggtcacagtctactatggggtgcctgtatggagagacgcagaaaccaccctattttgtgcatcagatgct

SEQ ID NO: 70526 - DNA, 80 bp, synthetic construct
  source 1..80: mol_type = other DNA
agtgatggggacacagaggaattatccacgcttgtggagttgggggattatttgttggataatgctaatttgtaatgctg

SEQ ID NO: 70527 - DNA, 80 bp, synthetic construct
  source 1..80: mol_type = other DNA
gtgctgctgacaaattgtgggttacgatctactatggggtaccggtgtggaaagatgcagagaccacactattctgtgca

SEQ ID NO: 70528 - DNA, 80 bp, synthetic construct
  source 1..80: mol_type = other DNA
aaagatgcagagaccacactattctgtgcatcagatgctaaagcatatgatacagaagtacataatgtctgggccacaca

SEQ ID NO: 70529 - DNA, 80 bp, synthetic construct
  source 1..80: mol_type = other DNA
agtgatggggatgcagaagaattatccacccttattgaggtggggaactatgatgttcttttggatattaataatttgta

SEQ ID NO: 70530 - DNA, 80 bp, synthetic construct
  source 1..80: mol_type = other DNA
agtgaaggggatacagaagaattggcaatgcttatggagaggggtcgctttgatctttgggttggtgataatttgtagtg

SEQ ID NO: 70531 - DNA, 80 bp, synthetic construct
  source 1..80: mol_type = other DNA
cctcacaggacttgtgggtcacaatctattatggggtgcctgtgtgggaagacgcagataccattctattttgtgcatct

SEQ ID NO: 70532 - DNA, 80 bp, synthetic construct
  source 1..80: mol_type = other DNA
agtgaaggggatacagaagaattggcaacacttctggaaatggggagctttgattcttgggttggtgacaatttgtaggg

SEQ ID NO: 70533 - DNA, 80 bp, synthetic construct
  source 1..80: mol_type = other DNA
cctcaaagaacaccaagaacatgtgggtcacagtctattatggggtgcctgcgtgggaagacgcagacaccactctattt

SEQ ID NO: 70534 - DNA, 80 bp, synthetic construct
  source 1..80: mol_type = other DNA
gcctgcgtgggaagacgcagacaccactctattttgtgcatctgatgctaaagcatatagtgctgaaaagcataatgtct

SEQ ID NO: 70535 - DNA, 80 bp, synthetic construct
  source 1..80: mol_type = other DNA
tgtgtgggaagaggcagatactattctattttgtgcatctgatgctaaagcatatagtactgaaaaacataatgtatggg

SEQ ID NO: 70536 - DNA, 80 bp, synthetic construct
  source 1..80: mol_type = other DNA
gccggcatgggaagatgcagataccatcctattttgcgcatctgatgctaaagcatatagtgctgaaaaacataatgtct

SEQ ID NO: 70537 - DNA, 80 bp, synthetic construct
  source 1..80: mol_type = other DNA
cctcaaataacatgtgggtcacagtctattatggggtgcctgcgtgggaagatgcagataccattttattttgtgcatct

SEQ ID NO: 70538 - DNA, 80 bp, synthetic construct
  source 1..80: mol_type = other DNA
cctcacaggacatgtgggtcacagtatattatggggtacctgcatgggaagatgcagacaccattctattttgtgcatct

SEQ ID NO: 70539 - DNA, 80 bp, synthetic construct
  source 1..80: mol_type = other DNA
agtgacggggatgcagaagaagtggcagcacttatggaactggggaactttgatccttgggttggtgataatttgtagtg

SEQ ID NO: 70540 - DNA, 80 bp, synthetic construct
  source 1..80: mol_type = other DNA
agtgaaggggatacagatgaactggcagcaattctggaaatggggaactttgatccttggattggtgataatttgtagtg

SEQ ID NO: 70541 - DNA, 80 bp, synthetic construct
  source 1..80: mol_type = other DNA
ctgcaggaaacttgtgggtcacagtctattatggagtacctgtgtggagggatgcagataccaccctattttgcgcatca

SEQ ID NO: 70542 - DNA, 80 bp, synthetic construct
  source 1..80: mol_type = other DNA
acctgtgtggagggatgcagataccaccctattttgcgcatcagatgctaaggcatactctaaagaaaaacataatgtct

SEQ ID NO: 70543 - DNA, 80 bp, synthetic construct
  source 1..80: mol_type = other DNA
agtgaaggagatgcagaggaattgtcaaaacttgtggagatggggcctcttgatttttgggatgttaatgatttgtaatg

SEQ ID NO: 70544 - DNA, 80 bp, synthetic construct
  source 1..80: mol_type = other DNA
tgataaggaacctgtaggtcacagtttattatgaggtacctgtgtagagagaagcaaccactactctattttgtgcatca

SEQ ID NO: 70545 - DNA, 80 bp, synthetic construct
  source 1..80: mol_type = other DNA
agtgagggagacacagatgaattggcaaaacttgtggagatggggcctcatgatatttggaatgttgatgatctgtagtg

SEQ ID NO: 70546 - DNA, 80 bp, synthetic construct
  source 1..80: mol_type = other DNA
ctgcagaaaaaatgtgggtcactgtctattatggggtgcctgcgtgggaagaggcaaatcccattctattttgtgcatct

SEQ ID NO: 70547 - DNA, 80 bp, synthetic construct
  source 1..80: mol_type = other DNA
atggagggatgcaaacaccactctattttgtgcatctgatgctaaagcatatagtcctgaaaaacataatgtttgggcta

SEQ ID NO: 70548 - DNA, 80 bp, synthetic construct
  source 1..80: mol_type = other DNA
cttcagacaacttgtgggtcacagtctattatggggtacctgcgtgggaggatgcagataccactctattttgtgcatct

SEQ ID NO: 70549 - DNA, 80 bp, synthetic construct
  source 1..80: mol_type = other DNA
agcgaaggagacacagaggcgttgttacaacttgtggagatggggcctgatgatctttgggatgttaatgatctgtagtg

SEQ ID NO: 70550 - DNA, 80 bp, synthetic construct
  source 1..80: mol_type = other DNA
agcgagggggacacagaagaattggcacgacttgtggagatggggcctcatgatcagtggaatgttaatgatctgtaatg

SEQ ID NO: 70551 - DNA, 80 bp, synthetic construct
  source 1..80: mol_type = other DNA
agtgaaggagacacagaggaattggcacgtcttgtggagatggggcctcatgatctttggaatgttgatgatttgtgacg

SEQ ID NO: 70552 - DNA, 80 bp, synthetic construct
  source 1..80: mol_type = other DNA
ctacagataacttgtgggtcacagtctattatggggtacctgtgtggcgagatgcaaataccaccctattttgtgcatct

SEQ ID NO: 70553 - DNA, 80 bp, synthetic construct
  source 1..80: mol_type = other DNA
agtgaaggagacacagaggaattggcacaacttgtggagatggggcctcatgatctttgggttgttaatgatctgtaatg

SEQ ID NO: 70554 - DNA, 80 bp, synthetic construct
  source 1..80: mol_type = other DNA
caccctattttgtgcatcggatgctaaggcatattctacagaaaaacataacgtctgggccacacatgcctgtgtaccag

SEQ ID NO: 70555 - DNA, 80 bp, synthetic construct
  source 1..80: mol_type = other DNA
agtgagggggatacagaggaattggcaaaacttgtggaaatggggaactttgatccttgggttggtgataatttgtagtg

SEQ ID NO: 70556 - DNA, 80 bp, synthetic construct
  source 1..80: mol_type = other DNA
tactctattctgtgcatcagatgctaaagcatatgaccaagaggtacataatatctgggctacacatgcctgtgtaccca

SEQ ID NO: 70557 - DNA, 80 bp, synthetic construct
  source 1..80: mol_type = other DNA
ctacagataacttgtgggtcacagtctattatggagtaccggtttggagagaagcaaacaccactctattttgtgcatca

SEQ ID NO: 70558 - DNA, 80 bp, synthetic construct
  source 1..80: mol_type = other DNA
cactctattttgtgcatcagatgctaaagcacaggaaagcgaggtacataatgcctgggctatatatgcctgtgttccta

SEQ ID NO: 70559 - DNA, 80 bp, synthetic construct
  source 1..80: mol_type = other DNA
ttatggagtaccagtgtggaaagaagcaaccactactttattttgtgcatcagatgctaaaggatatgaagaagaggtac

SEQ ID NO: 70560 - DNA, 80 bp, synthetic construct
  source 1..80: mol_type = other DNA
cagagaagttgtgggttacagtctattatggagtaccagtgtggaaagaagcaaccactactttattttgtgcatcagat

SEQ ID NO: 70561 - DNA, 80 bp, synthetic construct
  source 1..80: mol_type = other DNA
agtgagggagctgcagaggagtcggcaccacttgaggaggtgccttttattcctggggatattaataatctgtaatgcta

SEQ ID NO: 70562 - DNA, 80 bp, synthetic construct
  source 1..80: mol_type = other DNA
ctgctaaagagaacttgtgggtcacagtatattatggagtaccagtttggaaagaagcaaccactactctattttgtgca

SEQ ID NO: 70563 - DNA, 80 bp, synthetic construct
  source 1..80: mol_type = other DNA
agtgagggggatgcagaggaattggcagcacttggggaaatggggccttttattcctggggatattaataatctgtaatg

SEQ ID NO: 70564 - DNA, 80 bp, synthetic construct
  source 1..80: mol_type = other DNA
tacgttattttgtgcatcagatgctaaaggatatgaaagagaagtgcataatgtctgggccacacatgcctgcgtaccca

SEQ ID NO: 70565 - DNA, 80 bp, synthetic construct
  source 1..80: mol_type = other DNA
tactctcttttgtgcatcagatgctaaggcatatgaaaaagaggcacaccatgtcggggcgacacatgccggtgtaccac

SEQ ID NO: 70566 - DNA, 80 bp, synthetic construct
  source 1..80: mol_type = other DNA
ccactctattttgtgcatcagatgctaaaggatatgaaagagaggtacacaatgtctgggccacacatgcctgtgtacca

SEQ ID NO: 70567 - DNA, 80 bp, synthetic construct
  source 1..80: mol_type = other DNA
cactctattttgtgcatcaaatgctaaagcatatgacacagaagtacataatgtctgggctacacatgcctgtgtaccta

SEQ ID NO: 70568 - DNA, 80 bp, synthetic construct
  source 1..80: mol_type = other DNA
tactctattttgtgcatcagatgctaaagcacatgagcgcgaggtacataatgcctgggccacacatgcctgtgtaccag

SEQ ID NO: 70569 - DNA, 80 bp, synthetic construct
  source 1..80: mol_type = other DNA
agtgaaggagacacagaggaattggcaacacttgtggagatggggaattttgatgcttgggttggtgacaatttgtagtg

SEQ ID NO: 70570 - DNA, 80 bp, synthetic construct
  source 1..80: mol_type = other DNA
cctcagaaaacttgtgggtcacaatctattatggggtacctgtatggaaagatgcaaatacaactctattttgtgcatct

SEQ ID NO: 70571 - DNA, 80 bp, synthetic construct
  source 1..80: mol_type = other DNA
cctcaaataaattgtgggtcacagtctattatggggtacctgtgtgggaagaggcagataccaccctattttgtgcatct

SEQ ID NO: 70572 - DNA, 80 bp, synthetic construct
  source 1..80: mol_type = other DNA
cctcagataacttgtgggtcacagtctattatggggtgcctgtgtgggaagaggcagatactcctctgttttgtgcatcg

SEQ ID NO: 70573 - DNA, 80 bp, synthetic construct
  source 1..80: mol_type = other DNA
ctcctctgttttgtgcatcggatgctaaagcatatagtactgaaaaacataatgtctgggccacacatgcctgtgtacca

SEQ ID NO: 70574 - DNA, 80 bp, synthetic construct
  source 1..80: mol_type = other DNA
agtgaaggggataaagaggaattggcagaacttatggaaatgggggactttgatccttgggttggtgataatgtgtaaag

SEQ ID NO: 70575 - DNA, 80 bp, synthetic construct
  source 1..80: mol_type = other DNA
catcagatgacttgtgggtcacagtctattatggggtacctgtgtgggaagacgcaaatacccctctattttgtgcatct

SEQ ID NO: 70576 - DNA, 80 bp, synthetic construct
  source 1..80: mol_type = other DNA
caaacaacttgtgggtcacagtctattatggggtacctgcgtgggaagacgctgataccccgctattttgtgcatctgat

SEQ ID NO: 70577 - DNA, 80 bp, synthetic construct
  source 1..80: mol_type = other DNA
ttgcaggaaacttgtgggtcacagtatattatggggtgcctgtgtggaaagatgcagaaaccactctattctgtgcatca

SEQ ID NO: 70578 - DNA, 80 bp, synthetic construct
  source 1..80: mol_type = other DNA
agtgatggagacacagaggaattatccacacttgtggaaagggggcaccttaatcttgggtatattgctgatttatagtg

SEQ ID NO: 70579 - DNA, 80 bp, synthetic construct
  source 1..80: mol_type = other DNA
cagaaaatttgtgggtcacagtatattatggggtacctgtgtggaaagaagcaacaactactttattctgtgcatcagat

SEQ ID NO: 70580 - DNA, 80 bp, synthetic construct
  source 1..80: mol_type = other DNA
agtgatggagacgcagaggagttatgcaagcttgaaatgggccaccttaatcttgggtatgttgctgatctatagtactg

SEQ ID NO: 70581 - DNA, 80 bp, synthetic construct
  source 1..80: mol_type = other DNA
ctacacaagacttatgggtcacagtatattatggggtgcctgtgtggaaagaagcagaaaccaccttattttgtgcatca

SEQ ID NO: 70582 - DNA, 80 bp, synthetic construct
  source 1..80: mol_type = other DNA
caccttattttgtgcatcagatgctaaagcatatgatacagaaaagcataatgtctgggctacacatgcctgtgtaccca

SEQ ID NO: 70583 - DNA, 80 bp, synthetic construct
  source 1..80: mol_type = other DNA
agtgagggagacacagaggaattatccatactactggagatggagcatcgggatcttaggaatgttattaatctgtagtg

SEQ ID NO: 70584 - DNA, 80 bp, synthetic construct
  source 1..80: mol_type = other DNA
aacttgtgggtcacagtatattatggggtgcctgtgtggaaagatgcagaaaccactctattctgtgcatcagatgctaa

SEQ ID NO: 70585 - DNA, 80 bp, synthetic construct
  source 1..80: mol_type = other DNA
cactctattctgtgcatcagatgctaaggcatatagaacagaaaaccccaatgtctgggccacacatgcctgtttacccg

SEQ ID NO: 70586 - DNA, 80 bp, synthetic construct
  source 1..80: mol_type = other DNA
cacagaggaattatccacacttgtggcacacaaggagcaccttaatcttgggtatattgctgatttatagtgttgcagga

SEQ ID NO: 70587 - DNA, 80 bp, synthetic construct
  source 1..80: mol_type = other DNA
ctgcagggaacttgtgggtcacagtatattatggggtgcctgtgtggagagatgccgatacctctttattatgtgcatct

SEQ ID NO: 70588 - DNA, 80 bp, synthetic construct
  source 1..80: mol_type = other DNA
tctttattatgtgcatctgatgctaaatcatatagtaccgaaaaacataatgtctgggctacacatgcctgtgtacccac

SEQ ID NO: 70589 - DNA, 80 bp, synthetic construct
  source 1..80: mol_type = other DNA
agtgagggagactcagaggaattggctatgcttgtggagatggggaaccataatcctgggtatgttgctgagttgtagta

SEQ ID NO: 70590 - DNA, 80 bp, synthetic construct
  source 1..80: mol_type = other DNA
ctgcagacaacttgtgggttacagtatattatggggtgcctgtgtggaaagatgcagataccaccctattttgtgcatct

SEQ ID NO: 70591 - DNA, 80 bp, synthetic construct
  source 1..80: mol_type = other DNA
accctattttgtgcatctgatgctaaatcatacagtactgaaaaacataatgtctgggctacacatgcctgtgtaccaga

SEQ ID NO: 70592 - DNA, 80 bp, synthetic construct
  source 1..80: mol_type = other DNA
agtgatggggacacagaggaattatccaagcttatggagatggggaaccataatcttgggtatgttgctgatatgtagtg

SEQ ID NO: 70593 - DNA, 80 bp, synthetic construct
  source 1..80: mol_type = other DNA
gaaagaagcaacacccactctattctgtgcatcagatgctaaagcatatgagaaggaggtacataatgtctgggctaccc

SEQ ID NO: 70594 - DNA, 80 bp, synthetic construct
  source 1..80: mol_type = other DNA
agtgagggggatgcagaggaattggcagacattggggaactggggcatcttattcttgggaatattgataatctgtagca

SEQ ID NO: 70595 - DNA, 80 bp, synthetic construct
  source 1..80: mol_type = other DNA
ccagggtcgtcctcccccactccaccagtcagtgatatttgggtgttaccaccgctttcagaggagccccaggtgggtgc

SEQ ID NO: 70596 - DNA, 80 bp, synthetic construct
  source 1..80: mol_type = other DNA
gccgcctgcacctcccacccccgagcctgctcggctgccctgccccactaaacctaacacccccgtgcgtaagccaacgg

SEQ ID NO: 70597 - DNA, 80 bp, synthetic construct
  source 1..80: mol_type = other DNA
caccgccgccttctcgcacccgccgccttctttacacctatcctgatggtgctaaggtgtatgcggggtcactgtttgag

SEQ ID NO: 70598 - DNA, 80 bp, synthetic construct
  source 1..80: mol_type = other DNA
gctctatatatagggagggagaagtgaaaaactgctctttcaatatcaccacaggcgtaagagataagtttaagaaagaa

SEQ ID NO: 70599 - DNA, 80 bp, synthetic construct
  source 1..80: mol_type = other DNA
taccaatatcaccaccaaagacatacaaaatatgaaaaactgttctttcaatatcaccgaaggcataaaaaatagaagga

SEQ ID NO: 70600 - DNA, 80 bp, synthetic construct
  source 1..80: mol_type = other DNA
tgagatgggagtttgacagccgcctggcatttagacacatagccagagagagacatccggagtactaccagaactgagac

SEQ ID NO: 70601 - DNA, 80 bp, synthetic construct
  source 1..80: mol_type = other DNA
gctgacacagagattgctgacacagaagaatctaaagggactttccactggggactttccagcgggcgggccagagggcg

SEQ ID NO: 70602 - DNA, 80 bp, synthetic construct
  source 1..80: mol_type = other DNA
gcacccattggttatgggaatacaattgaaacataccaggccagggaagaatacacaagcatttgcctctttgtactggg

SEQ ID NO: 70603 - DNA, 80 bp, synthetic construct
  source 1..80: mol_type = other DNA
tactgtaggcactgctctgctgatagagaaattcatcagctgcacttgagcatctgcaaaaaaagaaaaacaggaagtaa

SEQ ID NO: 70604 - DNA, 80 bp, synthetic construct
  source 1..80: mol_type = other DNA
gcaccagttgacaggaaaaagacaattgaaatctatcaaatcagagaaagttatactggcatgtgtctctttctattagg

SEQ ID NO: 70605 - DNA, 80 bp, synthetic construct
  source 1..80: mol_type = other DNA
tactgtagattttgctctgctgacaaaatcattcatcaaatgcacgtaaatatttgcaaaagaaggaaagagggtagcaa

SEQ ID NO: 70606 - DNA, 80 bp, synthetic construct
  source 1..80: mol_type = other DNA
cttgcagacttcaagcgacagatggcagatgctgtctcaaggaaaaagatggatactaggcctactgacccgactgggat

SEQ ID NO: 70607 - DNA, 80 bp, synthetic construct
  source 1..80: mol_type = other DNA
ttggggcccggcctaaacagccgcccccgagggaaataccacaaaggcccccaaggccacccaccccagaactggtgaaa

SEQ ID NO: 70608 - DNA, 80 bp, synthetic construct
  source 1..80: mol_type = other DNA
ggctaaggccagttgttgtgatgatatctggcaaacctggcatcgggaagacccatctggctagagaattggcaaagaag

SEQ ID NO: 70609 - DNA, 80 bp, synthetic construct
  source 1..80: mol_type = other DNA
atcgctataaccctttcaggagaccagagggtaggcctcatcccccgcaacggagtcgaccactgggatgcttacaaggg

SEQ ID NO: 70610 - DNA, 80 bp, synthetic construct
  source 1..80: mol_type = other DNA
ctgatggcaaagggaatgtgaaagtggaaaaagtgcaaaataccaacatccaaatcaacaacgagctagctggtgcttta

SEQ ID NO: 70611 - DNA, 80 bp, synthetic construct
  source 1..80: mol_type = other DNA
caccacctccgatgcgctaggatcaggtactatgttaaatgtgttcaggaggctctatattccatcatccaaattgctgg

SEQ ID NO: 70612 - DNA, 80 bp, synthetic construct
  source 1..80: mol_type = other DNA
tttggggctctgacttggcaacaatgatccgttgtgcgcgggcgtttggagggttaatggatgagctcaaggcccattgc

SEQ ID NO: 70613 - DNA, 80 bp, synthetic construct
  source 1..80: mol_type = other DNA
ctgaaggacccctgatcatatccgaggacttgaatggtttgacctttctgcggcggaccgtgacccgtgatccagctggg

SEQ ID NO: 70614 - DNA, 80 bp, synthetic construct
  source 1..80: mol_type = other DNA
aaactgcacggggagttatttccatacacggcctttgataacaactgctatgccttctgctgctgggtgttggacttaaa

SEQ ID NO: 70615 - DNA, 80 bp, synthetic construct
  source 1..80: mol_type = other DNA
ggagctccaaggaacaacacagctccaagttagtggcatttgtgcattcaaaggagaagtgaccgctcacttgcaggaca

SEQ ID NO: 70616 - DNA, 80 bp, synthetic construct
  source 1..80: mol_type = other DNA
ggtgtcatcactcaaagagacaaacagaatgccgctgggcaaagccagccggcaaacaggggacacgatgctgtggtccc

SEQ ID NO: 70617 - DNA, 80 bp, synthetic construct
  source 1..80: mol_type = other DNA
cacttacacagcccagtataccccaaaattgggtcaggttcaaattggcacatggcagaccgacgatcttaaagtcaacc

SEQ ID NO: 70618 - DNA, 80 bp, synthetic construct
  source 1..80: mol_type = other DNA
ggaggttcacatcgaccgccccggcaaggcaggccgatcttcaacacactcaaaatcggccttcgagtggctcttctgtg

SEQ ID NO: 70619 - DNA, 80 bp, synthetic construct
  source 1..80: mol_type = other DNA
tcctcttatgccactcaatcttcaagaccaactctaaccacaaccacagggtcctcacatagtacaacctcatccaattc

SEQ ID NO: 70620 - DNA, 80 bp, synthetic construct
  source 1..80: mol_type = other DNA
aatatggaaaactaggccagcagcagcagaagcagctaggccagcagcagcagaaggagtaggagcagcgtctcaagact

SEQ ID NO: 70621 - DNA, 80 bp, synthetic construct
  source 1..80: mol_type = other DNA
tgtgggcaggatggtcaccagatgaaagattgcagaaatggaaaacaggcaaattttttaggcaaatactggcctccggg

SEQ ID NO: 70622 - DNA, 80 bp, synthetic construct
  source 1..80: mol_type = other DNA
gcaaattttttaggcaaatactggcctccggggggcacgaggccaggcaattttatgcagaaacaagtggccccatcagc

SEQ ID NO: 70623 - DNA, 80 bp, synthetic construct
  source 1..80: mol_type = other DNA
ccctccgatggaggaagtagtgaagggacaggagaaccaggaacagaaagaggactcaaacgaactctatccgtttgcct

SEQ ID NO: 70624 - DNA, 80 bp, synthetic construct
  source 1..80: mol_type = other DNA
atcaggatgaacataagaacctcaaaacagggaaatacactaggcagaaagcatcccacacaaatgatataagacaatta

SEQ ID NO: 70625 - DNA, 80 bp, synthetic construct
  source 1..80: mol_type = other DNA
gcagaagtactacagaaagtgtcccaggaatctatagttatctggggaaaattgcctaagtttaagctgccagtcactag

SEQ ID NO: 70626 - DNA, 80 bp, synthetic construct
  source 1..80: mol_type = other DNA
atagtccaacagataatagaagaactaacaaagaaggaacaagtgtaccttacatgggttcctgcccataagggtatagg

SEQ ID NO: 70627 - DNA, 80 bp, synthetic construct
  source 1..80: mol_type = other DNA
ttatagggacctgttagcattaataattgttagtgctttgcttcttataaatgtacttttatggagctttattcttagaa

SEQ ID NO: 70628 - DNA, 80 bp, synthetic construct
  source 1..80: mol_type = other DNA
ggcaatacaaaagctaagagaagaaaaggggggcaggaagtctgcgggtgccgctaaggaagacacaagcgcaaggcaga

SEQ ID NO: 70629 - DNA, 80 bp, synthetic construct
  source 1..80: mol_type = other DNA
tcccacagaccccaatccacatgaatatccattgcacaatgtgacagatagatttgatatatgggaaaattacatggtgg

SEQ ID NO: 70630 - DNA, 80 bp, synthetic construct
  source 1..80: mol_type = other DNA
aacagatgcaagaggacattactgatttatgggagcagagtttaaaaccttgtgtgaaaatgactttcatgtgtgtacaa

SEQ ID NO: 70631 - DNA, 80 bp, synthetic construct
  source 1..80: mol_type = other DNA
atggaatgtaatgacataaatacaacaaacaccaacacaacaacacacaacccatcaccagacatgaaacagtgtaattt

SEQ ID NO: 70632 - DNA, 80 bp, synthetic construct
  source 1..80: mol_type = other DNA
tgccgctaaggaagacacaagcgcaaggcagacgggtcaaaattaccctgtagtacaaaatgcgcagggacaaatggtac

SEQ ID NO: 70633 - DNA, 80 bp, synthetic construct
  source 1..80: mol_type = other DNA
taatgtaaccacagttatcaaagacaaaaaagagaaaaaacaggctctattttatgtatcagatttgatcaggtttaatg

SEQ ID NO: 70634 - DNA, 80 bp, synthetic construct
  source 1..80: mol_type = other DNA
agtactcaactaatactaaatgggacactctccaaagggaaaataagaattatgggaaaagatattacagctggttctcg

SEQ ID NO: 70635 - DNA, 80 bp, synthetic construct
  source 1..80: mol_type = other DNA
caatatcctagtgactctaaattctactataaatataacctgtgagagaccattcaatctgacggtagaacagatgaaga

SEQ ID NO: 70636 - DNA, 80 bp, synthetic construct
  source 1..80: mol_type = other DNA
taggcccaatggcctggtacagcatagatatagggagaggaaacacaagcgacccaagaagagctttttgcaaatttgaa

SEQ ID NO: 70637 - DNA, 80 bp, synthetic construct
  source 1..80: mol_type = other DNA
gaaaccaaatggaaagaagccttaagacaaacagctgaaaggtatttagaacttgtgaacaatacaatagataatgttag

SEQ ID NO: 70638 - DNA, 80 bp, synthetic construct
  source 1..80: mol_type = other DNA
cgtgatcttcaatagaagcaatgatggagatccagagatagcctttttgcattttaactgccatggagagttcttttatt

SEQ ID NO: 70639 - DNA, 80 bp, synthetic construct
  source 1..80: mol_type = other DNA
gtaacacatcggggatgtttaattatacctttacatgtaacaaaaccaactgcactaacaataggactgataatagcact

SEQ ID NO: 70640 - DNA, 80 bp, synthetic construct
  source 1..80: mol_type = other DNA
ccaactgcactaacaataggactgataatagcactaatgacacaataccttgcaagttgagacaggtagtgaggtcatgg

SEQ ID NO: 70641 - DNA, 80 bp, synthetic construct
  source 1..80: mol_type = other DNA
aatgacacaataccttgcaagttgagacaggtagtgaggtcatggatacagggggggtcaggactctatgcccctcccat

SEQ ID NO: 70642 - DNA, 80 bp, synthetic construct
  source 1..80: mol_type = other DNA
caaaggtaccctaacatgtatgtcaaacataactgggatgattctagaaatggaacggtcatggaacgggagtgctacaa

SEQ ID NO: 70643 - DNA, 80 bp, synthetic construct
  source 1..80: mol_type = other DNA
aggacattaatgctacatggaacattaatgctacattcagaccaatagggggagatatgaaagatatatggagaactcaa

SEQ ID NO: 70644 - DNA, 80 bp, synthetic construct
  source 1..80: mol_type = other DNA
ttattcaactataaggtggtaagggtgaaaccttttagtgtagcacctacaaaaattgcaaggccagtcataggcatggg

SEQ ID NO: 70645 - DNA, 80 bp, synthetic construct
  source 1..80: mol_type = other DNA
ggaacaatacatggggcggagatagggacttaggaaacatttgggacaacatgacatggcaggaatgggatcagcagata

SEQ ID NO: 70646 - DNA, 80 bp, synthetic construct
  source 1..80: mol_type = other DNA
agcaacataagctccaccatatatgaagaaatacaaaaggcacaagtacagcaggaacacaatgagaaaaagttactaga

SEQ ID NO: 70647 - DNA, 80 bp, synthetic construct
  source 1..80: mol_type = other DNA
gctaagtgaatgggcttctatttggaattggtttgacataactaaatggttgtggtacataaaaatagctataatcatag

SEQ ID NO: 70648 - DNA, 80 bp, synthetic construct
  source 1..80: mol_type = other DNA
tcgtttcagatccccatccatcaccaatcggaagtaggagtgccaggaggaacaggagaaggaggtggagaaggagacag

SEQ ID NO: 70649 - DNA, 80 bp, synthetic construct
  source 1..80: mol_type = other DNA
gcccaggttgataccattgcagcaaggattcttgcaactgttgtacacggacctcagaacaataatcttgtggacttacc

SEQ ID NO: 70650 - DNA, 80 bp, synthetic construct
  source 1..80: mol_type = other DNA
acctcttgagcaacttagcatcagggacccagagagtgatcagccatctgggaattggactgtggatcctagggcagaag

SEQ ID NO: 70651 - DNA, 80 bp, synthetic construct
  source 1..80: mol_type = other DNA
ataattgatggttgcaaactttgtaaagctgtaatacaatactggctacaagaattgcagaatagtgctacaagtcttct

SEQ ID NO: 70652 - DNA, 80 bp, synthetic construct
  source 1..80: mol_type = other DNA
atactatgttaaatgccataggaggacatcaaggggccttacaagtactaaaggaagtaatcaatgaagaagcagcagaa

SEQ ID NO: 70653 - DNA, 80 bp, synthetic construct
  source 1..80: mol_type = other DNA
agataccattgcagtggcagtaggcaagtggactgacgacataatcttagggatacaaaggataggaagaggaatactta

SEQ ID NO: 70654 - DNA, 80 bp, synthetic construct
  source 1..80: mol_type = other DNA
acatcccaagaagaattagacagggcttagaaagaagcttattgtaacatgggaaacgttttggggaaaagcaagtttgc

SEQ ID NO: 70655 - DNA, 80 bp, synthetic construct
  source 1..80: mol_type = other DNA
ctcctgcatccagcctgtgctcatggatttggagatgcacacggggaaatattaaagtggcagtttgatagatcactagg

SEQ ID NO: 70656 - DNA, 80 bp, synthetic construct
  source 1..80: mol_type = other DNA
cctcacccatgttgctaagataacacacccagagctcttccccaaggactgaacctgctgatctaaagggactttccagc

SEQ ID NO: 70657 - DNA, 80 bp, synthetic construct
  source 1..80: mol_type = other DNA
tgggatagaactcacccaatagcggtagggccattgccaccgggacagataagggaaccaacaggaagtgacattgctgg

SEQ ID NO: 70658 - DNA, 80 bp, synthetic construct
  source 1..80: mol_type = other DNA
aaagactgctgacactgcgaggacagcgaagactgctgacactgcggggactttccagcatgggagggataggggcggtc

SEQ ID NO: 70659 - DNA, 80 bp, synthetic construct
  source 1..80: mol_type = other DNA
gacaactagcaccctgcaagaacaggtgcactggactaccagagccaacaaccctatcccagtaggagacatctatagaa

SEQ ID NO: 70660 - DNA, 80 bp, synthetic construct
  source 1..80: mol_type = other DNA
cagcccctccgatggaggaggtaatgcagggacagaagaatcagaatcaggaacatagagaggacccaaacgaactctat

SEQ ID NO: 70661 - DNA, 80 bp, synthetic construct
  source 1..80: mol_type = other DNA
agtagggctagcttgtgtagtagtgaccacatattggggattgatgccaggggaaagagaggagcagttaggacatggag

SEQ ID NO: 70662 - DNA, 80 bp, synthetic construct
  source 1..80: mol_type = other DNA
aagaagcgacgacgatcagctgctgcaggccattcggataataaagatcttgtaccagagcagtaagtaacgctaatgca

SEQ ID NO: 70663 - DNA, 80 bp, synthetic construct
  source 1..80: mol_type = other DNA
ttatagggacttatcaacattaataattgttagtgctttgcttcttataaatgtaatgttatggatgtttattcttagac

SEQ ID NO: 70664 - DNA, 80 bp, synthetic construct
  source 1..80: mol_type = other DNA
aatatttggaacataagagacaagaaagaagggagagagaaatacttgaaaggttaagaagaataagagaaattaaggat

SEQ ID NO: 70665 - DNA, 80 bp, synthetic construct
  source 1..80: mol_type = other DNA
aacagatgcaggaagacattactagtctatgggagcagagtttaaaaccttgcgtacaaatgactttcatgtgtgtacaa

SEQ ID NO: 70666 - DNA, 80 bp, synthetic construct
  source 1..80: mol_type = other DNA
atgaactgtacagacacaaactcaacagccaacgcatctaaaacagaaacagaagtccacatgaaacagtgtgagtttaa

SEQ ID NO: 70667 - DNA, 80 bp, synthetic construct
  source 1..80: mol_type = other DNA
tgtaaccacagttgtcaaagacaagaaagagaaaaaacaggctctattttatgtaacagatttggtccagattagtgaca

SEQ ID NO: 70668 - DNA, 80 bp, synthetic construct
  source 1..80: mol_type = other DNA
tactcaactaatactaaatggaacactctctaaaggagatataagaattatgggaagaaatattacagacagtgcaaaaa

SEQ ID NO: 70669 - DNA, 80 bp, synthetic construct
  source 1..80: mol_type = other DNA
atattctagtgaccctaaattcttctgtaagtatgacctgtgagagaccatacaatctatcagtacaacagataaggata

SEQ ID NO: 70670 - DNA, 80 bp, synthetic construct
  source 1..80: mol_type = other DNA
ggcccaatgtcctggtacagcgtgggcatagggagagacaatgcaaccgacccaaggagagccttttgcagttttaatac

SEQ ID NO: 70671 - DNA, 80 bp, synthetic construct
  source 1..80: mol_type = other DNA
cactgactgggtaaaaaccttaaaacaaacagctgaaagatatttagaacttgtgaacaatagcaagacagagaatatta

SEQ ID NO: 70672 - DNA, 80 bp, synthetic construct
  source 1..80: mol_type = other DNA
gcataattttcagtaacagtgctggtggagatctagaggtagcctttttgcattttaactgtcatggagagttcttttat

SEQ ID NO: 70673 - DNA, 80 bp, synthetic construct
  source 1..80: mol_type = other DNA
tgtaacacatctgggatatttaattataactttacatgcttaggaaccacctgcactgacaatagcactaataacactaa

SEQ ID NO: 70674 - DNA, 80 bp, synthetic construct
  source 1..80: mol_type = other DNA
cagcattaatggtactagcatgataccttgcaaattgaaacaggtggtaaggtcatggataaagggagggtcaggactct

SEQ ID NO: 70675 - DNA, 80 bp, synthetic construct
  source 1..80: mol_type = other DNA
atgcccctcccatcaaaggtaacctaacatgtaggtcaaacataactgggatgattctacaaatagatcagccatggggc

SEQ ID NO: 70676 - DNA, 80 bp, synthetic construct
  source 1..80: mol_type = other DNA
agtaatatcacgaatgacacgacatttagaccagtagggggagatatggaagatatatggagaactcaattgttcaacta

SEQ ID NO: 70677 - DNA, 80 bp, synthetic construct
  source 1..80: mol_type = other DNA
atggggctgtaaaggaaacctaatctgctacacatcagtaaaatggaatgatacatggaaaggaagtaataatattagca

SEQ ID NO: 70678 - DNA, 80 bp, synthetic construct
  source 1..80: mol_type = other DNA
tggagaaaatttgggagaacctaacatggcaggaatgggatcagcagataaacaatgtaagctccatcatatatgatgaa

SEQ ID NO: 70679 - DNA, 80 bp, synthetic construct
  source 1..80: mol_type = other DNA
ctctcgttacagatccccatccatcaccaagcggaagtaggaacgccaggaggaacaggagaaggaggtggagaaggagg

SEQ ID NO: 70680 - DNA, 80 bp, synthetic construct
  source 1..80: mol_type = other DNA
accgcctcttgagcaacttagcatcagggactcagagtgtgaccagccatctgagaattggactgtggatcctaggacag

SEQ ID NO: 70681 - DNA, 80 bp, synthetic construct
  source 1..80: mol_type = other DNA
agaataattgatgcttgcaaactttgtaacgctgtaatacaatactggctccaagaattgaagaatagtgctacaaatct

SEQ ID NO: 70682 - DNA, 80 bp, synthetic construct
  source 1..80: mol_type = other DNA
actagatacctttgcagtggcagtcggcaagtggactgacaacataatcttagggatacaaagaataggaagaggaattc

SEQ ID NO: 70683 - DNA, 80 bp, synthetic construct
  source 1..80: mol_type = other DNA
ttaacatcccaagaagaattaggcagggcttagaaagaagcttattgtaacatgggaaacgttttgggaaaaggtaaatt

SEQ ID NO: 70684 - DNA, 80 bp, synthetic construct
  source 1..80: mol_type = other DNA
tgcaggatggtcagcagtaagagacagaatgagaaaagctcctgcagctgagcctgagcctgaaccatgtgcacctggag

SEQ ID NO: 70685 - DNA, 80 bp, synthetic construct
  source 1..80: mol_type = other DNA
catcacccatgttgctaaggtaacaaacccagagctcttcctcaaagactgaacctgctgacctaaagattgttgacacc

SEQ ID NO: 70686 - DNA, 80 bp, synthetic construct
  source 1..80: mol_type = other DNA
cagcaggatttaaagggaggatacacatcaatattcatgcaaagagggcagagtccaaataaaagaaggactataaaatg

SEQ ID NO: 70687 - DNA, 80 bp, synthetic construct
  source 1..80: mol_type = other DNA
ctaagaaggccaagaactggcattataagcatcattatgaattcaggagcccaagaattggttcaggtgtatatatccca

SEQ ID NO: 70688 - DNA, 80 bp, synthetic construct
  source 1..80: mol_type = other DNA
gtagcagaagctaagataatagtcaccacatattggggattaatgccaggggaaagagaggaacacctgggacatggggt

SEQ ID NO: 70689 - DNA, 80 bp, synthetic construct
  source 1..80: mol_type = other DNA
ttgactgttttacagactccgcaatcagaaaggccattctaggacagagagtgctgactaagtgtgaataccctgcagga

SEQ ID NO: 70690 - DNA, 80 bp, synthetic construct
  source 1..80: mol_type = other DNA
cagagagcttgaaatctctctggaacttattagcagtactctggtgtgttcatagcagaattgacattcaggatacacag

SEQ ID NO: 70691 - DNA, 80 bp, synthetic construct
  source 1..80: mol_type = other DNA
catagtcaggtagggacactacaatttttagccttaaaggcaatagagaaagtaaaaaggaataaacctcccctacccag

SEQ ID NO: 70692 - DNA, 80 bp, synthetic construct
  source 1..80: mol_type = other DNA
caggcagtacaaaaggtaaaagaaaaaatggcaaacaggaagtctgcagatgccgctaagaaagaaacaagcccaaagca

SEQ ID NO: 70693 - DNA, 80 bp, synthetic construct
  source 1..80: mol_type = other DNA
attgatagtacagggaataatagtacagggaagaatagtacagggaataatagtacagtagatagcacgacagaaccagg

SEQ ID NO: 70694 - DNA, 80 bp, synthetic construct
  source 1..80: mol_type = other DNA
aacacctatgaaaaactgtagttttaatataactacattcctcaaagacaaaaaggagcaaaaacaggctctattctata

SEQ ID NO: 70695 - DNA, 80 bp, synthetic construct
  source 1..80: mol_type = other DNA
tatcagatctgactagggttaatggaactaatggaacaaatgacacaatatatacattaattaattgtaactccacaact

SEQ ID NO: 70696 - DNA, 80 bp, synthetic construct
  source 1..80: mol_type = other DNA
tggttacttgtacacatggcatcaagccaacagtaagtactcaactaatattgaatgggacactctctagaggagggata

SEQ ID NO: 70697 - DNA, 80 bp, synthetic construct
  source 1..80: mol_type = other DNA
agaattatgggaacaaacattacagacagtgcaaagaatatcatagtaaccctaaacactcctgtaaacatgacctgcac

SEQ ID NO: 70698 - DNA, 80 bp, synthetic construct
  source 1..80: mol_type = other DNA
gagagaagaaagaaaaattcaagagatacacgtaggcccaatgagatggcgcagtatggcaagtgtgcaggagaacagaa

SEQ ID NO: 70699 - DNA, 80 bp, synthetic construct
  source 1..80: mol_type = other DNA
aatcatcaagggcagctaattgtacatataatagcactgaatggagaaacaccttagaaaaaacagctaaaaggtatcta

SEQ ID NO: 70700 - DNA, 80 bp, synthetic construct
  source 1..80: mol_type = other DNA
gaacttgtaagcaagacaggaaatggtgcaggagatgttaccataatatttaacaaaactagtggtggagatgaagaaat

SEQ ID NO: 70701 - DNA, 80 bp, synthetic construct
  source 1..80: mol_type = other DNA
aagcaatttgcattttaactgtcatggggaattcttttattgtaacacatctcaaatgtttaactatacttgtaactgta

SEQ ID NO: 70702 - DNA, 80 bp, synthetic construct
  source 1..80: mol_type = other DNA
caagctcagaatgcaactgtacaagacccggatacaacggaaccaatggaaatgagactataccttgcaggttaagacag

SEQ ID NO: 70703 - DNA, 80 bp, synthetic construct
  source 1..80: mol_type = other DNA
gtagtaagatcatggataaagggagagtcgggactctatgcacctcccatccctggcaacctaacatgtcaatccaacat

SEQ ID NO: 70704 - DNA, 80 bp, synthetic construct
  source 1..80: mol_type = other DNA
aactggaatgattctgcaattagatgcaccatggaattccacatgtactaaaacatttagaccagtagggggagatatga

SEQ ID NO: 70705 - DNA, 80 bp, synthetic construct
  source 1..80: mol_type = other DNA
aagatatatggagaactgaattgtacaactacaaggtagtgcagataaaaccttttagtgtagcacctacaaaagtttca

SEQ ID NO: 70706 - DNA, 80 bp, synthetic construct
  source 1..80: mol_type = other DNA
gccttagaaacccttatacagattcagcaacgcctagacctatggggctgtaaaggaagaataatctgttacacatcagt

SEQ ID NO: 70707 - DNA, 80 bp, synthetic construct
  source 1..80: mol_type = other DNA
agagtggaacaaaacatggggagactataatgacagtatttggaatcaactcacatggcagcaatgggaccaacaaataa

SEQ ID NO: 70708 - DNA, 80 bp, synthetic construct
  source 1..80: mol_type = other DNA
acaatgtaagctccattatatatgatgaaatacaagcagcacaagaccagcaggaaaagaatgtaaaacaattgttggag

SEQ ID NO: 70709 - DNA, 80 bp, synthetic construct
  source 1..80: mol_type = other DNA
ggagacagacccaggtggacgccattgcctccaggattcttgcaacagttgtacacggatctcaggacaataatcttgtg

SEQ ID NO: 70710 - DNA, 80 bp, synthetic construct
  source 1..80: mol_type = other DNA
agcttgtttgatactattgcagtggcagctgccaattggactgacaacatcatcttaggtatacaaagaataggacgagg

SEQ ID NO: 70711 - DNA, 80 bp, synthetic construct
  source 1..80: mol_type = other DNA
ccttacacatgtagctctgcaaaagcacccagagctcttccccaaatagctgagactgatattgctgacactgcgggact

SEQ ID NO: 70712 - DNA, 80 bp, synthetic construct
  source 1..80: mol_type = other DNA
ttccagactgctgacactgtggggactttccagcgtgggagggacaaggggcggttcggggagtggctaaccctcagatg

SEQ ID NO: 70713 - DNA, 80 bp, synthetic construct
  source 1..80: mol_type = other DNA
gggacaaggggcggttcggggagtggctaaccctcagatgctgcatataagcagctgctttctgcttgtaccgggtctta

SEQ ID NO: 70714 - DNA, 80 bp, synthetic construct
  source 1..80: mol_type = other DNA
atcaattctaaagaaaacaactctacaaacgatagctcaataaaccctataagcacagagaaccctaacagcatagagaa

SEQ ID NO: 70715 - DNA, 80 bp, synthetic construct
  source 1..80: mol_type = other DNA
ccctatgaaaaattgtgagtttaatgtaactacagttctcaaagataaaaaggagaaaagacaggctctattctatgtag

SEQ ID NO: 70716 - DNA, 80 bp, synthetic construct
  source 1..80: mol_type = other DNA
cagacttggatagagtgaataatagtgaaataggtaacacagcatatacattaattaactgtaactccacaaccatcaag

SEQ ID NO: 70717 - DNA, 80 bp, synthetic construct
  source 1..80: mol_type = other DNA
agaattagtaaacaatacaggtgttagagaaatgatattcaattacaatactggaggagatccagagataacccagttgc

SEQ ID NO: 70718 - DNA, 80 bp, synthetic construct
  source 1..80: mol_type = other DNA
tgtaattataccaaaaacatccaaaattatacctttagccaaaataccactagcactaagataccttgcagattgaggca

SEQ ID NO: 70719 - DNA, 80 bp, synthetic construct
  source 1..80: mol_type = other DNA
taactggaatgattctagaaatggatgagccatggaacgagagccacagggaaagcatatttagaccaacagggggaaat

SEQ ID NO: 70720 - DNA, 80 bp, synthetic construct
  source 1..80: mol_type = other DNA
agcaagttcactgggttaccaggaaccccaaccctatcccagtaggagacatctatagaaaatggatagtgttgggacta

SEQ ID NO: 70721 - DNA, 80 bp, synthetic construct
  source 1..80: mol_type = other DNA
actggactaccagggcgaataaccctatccctgtaggagacatctatagaaaatggatagtgttagggctaaataaaatg

SEQ ID NO: 70722 - DNA, 80 bp, synthetic construct
  source 1..80: mol_type = other DNA
accaagacataaaaggaggatatacagcagtattcatgcaaagaggacaaaacccaattaggaaaaggcctataaagtgt

SEQ ID NO: 70723 - DNA, 80 bp, synthetic construct
  source 1..80: mol_type = other DNA
cagcaccaccaatggaggaggtagtgaaggagcaagaagatcagaatcaggggaaagaccagaacgagctctatccgttt

SEQ ID NO: 70724 - DNA, 80 bp, synthetic construct
  source 1..80: mol_type = other DNA
cagcagataatagaagaaatgacaaaaaaggaacgagtgtatcttacatgggttcccgctcataaaggcatagggggtaa

SEQ ID NO: 70725 - DNA, 80 bp, synthetic construct
  source 1..80: mol_type = other DNA
ctaggaagaccaaggactggtattacagacatcattatgaacatagaaacccaagagccagttcaggtgtatatattcca

SEQ ID NO: 70726 - DNA, 80 bp, synthetic construct
  source 1..80: mol_type = other DNA
gtaggtttagctactatagtggtgaccacatattggggattaatgccaggggaaagagatgagcacttgggacatggggt

SEQ ID NO: 70727 - DNA, 80 bp, synthetic construct
  source 1..80: mol_type = other DNA
tagtatagaatggcaatacaaaaggtataaaacacagattgacccaggaacagcggacaggatgatacatcagtattatt

SEQ ID NO: 70728 - DNA, 80 bp, synthetic construct
  source 1..80: mol_type = other DNA
tcacctgttttacagggtcagcaatcagaaaagccattttggggcagagagtgctgaccaggtgtgaatacgcagcagga

SEQ ID NO: 70729 - DNA, 80 bp, synthetic construct
  source 1..80: mol_type = other DNA
catagtcaggtagggacattgcaactcctagccttgagagtaatagtaaagggaaacaaaaacaagcctcccctacctag

SEQ ID NO: 70730 - DNA, 80 bp, synthetic construct
  source 1..80: mol_type = other DNA
tgtccagaagttaacagaagatagatggaacaggcacctgaaaaccagagaccaaccagggggccacccaatgaagggac

SEQ ID NO: 70731 - DNA, 80 bp, synthetic construct
  source 1..80: mol_type = other DNA
actagagcttctagaagagataaaagcagaagcagtaagacatttccctaggccttggctacaagccttgggccaataca

SEQ ID NO: 70732 - DNA, 80 bp, synthetic construct
  source 1..80: mol_type = other DNA
tttatgagacatatggagacacatgggagggagttgtggcaattataagaatgttacaacaagtgatatttatccattat

SEQ ID NO: 70733 - DNA, 80 bp, synthetic construct
  source 1..80: mol_type = other DNA
ataattgctattgcaaaagctgctgctatcattgttacctctgttttgaaagaaagggtttgggaatctcctatggcagg

SEQ ID NO: 70734 - DNA, 80 bp, synthetic construct
  source 1..80: mol_type = other DNA
aagaagcgacgaagaccagcagttgctgcaggcgtgccgaataatacaaatcctgtaccaaagcagtaagtaacgctaat

SEQ ID NO: 70735 - DNA, 80 bp, synthetic construct
  source 1..80: mol_type = other DNA
gtataaggaccagataatactcataataattttctgtgttgtgtttcttatagctgcatgtatatggctgtttattctta

SEQ ID NO: 70736 - DNA, 80 bp, synthetic construct
  source 1..80: mol_type = other DNA
aaacctatctagaacaaaagaaacaagatagaagggaaaaagaattacttagaagattgcaaagaataatagaaataaga

SEQ ID NO: 70737 - DNA, 80 bp, synthetic construct
  source 1..80: mol_type = other DNA
gcaatacaaaaacttaaggaagtaatgagaaacaggaagtctgcaaatgaagacacaagcccaaagcagacaagtcaaaa

SEQ ID NO: 70738 - DNA, 80 bp, synthetic construct
  source 1..80: mol_type = other DNA
aaaacctgtacttttctgtgcatcagatgttaacctgacaagcactgagcagcataatatttgggcctcacaagcctgcg

SEQ ID NO: 70739 - DNA, 80 bp, synthetic construct
  source 1..80: mol_type = other DNA
aataacaaagctacaaactcatcagaggaggaaacactcgtaaagaagtgtgactttaatgtaactacagttgttaaaga

SEQ ID NO: 70740 - DNA, 80 bp, synthetic construct
  source 1..80: mol_type = other DNA
caaacatgagaaaaaacaagctctattctatgtatcagatttgattaagcttaataatgcaactaacgaaacactgtata

SEQ ID NO: 70741 - DNA, 80 bp, synthetic construct
  source 1..80: mol_type = other DNA
tactcaattaatattaaatggaacactttctgaagacaaaataagaattatgggaaaagatattaaagataataccaaga

SEQ ID NO: 70742 - DNA, 80 bp, synthetic construct
  source 1..80: mol_type = other DNA
atatcctagtgaccctgaactctactataaatataacttgtgagagaccaggaaatcagaaggtacaaaagataaagaca

SEQ ID NO: 70743 - DNA, 80 bp, synthetic construct
  source 1..80: mol_type = other DNA
ggtccactggcttggtacagcatgggaattgaggaaggcaacaagtcaaggatagcttattgtaattatagtcgcactaa

SEQ ID NO: 70744 - DNA, 80 bp, synthetic construct
  source 1..80: mol_type = other DNA
ttgggaaagagccttacaacaaacagctgaacggtatctagaacttgtaaaccatacaggacctagtaacataacttttg

SEQ ID NO: 70745 - DNA, 80 bp, synthetic construct
  source 1..80: mol_type = other DNA
ctacaagctctggtggagatatagagataagaaccttacatttcagctgtcatggagaattcttttattgcaacacaagt

SEQ ID NO: 70746 - DNA, 80 bp, synthetic construct
  source 1..80: mol_type = other DNA
cagctgtttaaatacaccttggactgtaacaattccaaatgtaacttaagcagtaaccacaacagcaatgacagtcacat

SEQ ID NO: 70747 - DNA, 80 bp, synthetic construct
  source 1..80: mol_type = other DNA
accttgcaagttgaaacaggtagtaaggtcatggatgagaggaggatcgggaatctatgcacctcctatcagcggtagct

SEQ ID NO: 70748 - DNA, 80 bp, synthetic construct
  source 1..80: mol_type = other DNA
taacctgtaggtcaaacataactggtttaattctacaaatagacaagtcatggaacagtagcaccccagatgtcacattt

SEQ ID NO: 70749 - DNA, 80 bp, synthetic construct
  source 1..80: mol_type = other DNA
agaccaatagggggagacatgaaagatatatggaggactaaattgtacaactacaaggtaataaagataaaaccttttag

SEQ ID NO: 70750 - DNA, 80 bp, synthetic construct
  source 1..80: mol_type = other DNA
tgtagcacctacaaaagccacaaggccagtcataggtactggcgctcatagagaaaaaagggcagcagggttgggaatgc

SEQ ID NO: 70751 - DNA, 80 bp, synthetic construct
  source 1..80: mol_type = other DNA
tctgtatggggcattagacagctccgagctcgcctgcaagccttagaaacctttatgcagaatcagcaactcctaaacct

SEQ ID NO: 70752 - DNA, 80 bp, synthetic construct
  source 1..80: mol_type = other DNA
gtggggctgtagaggaaggcaaatctgttacacatcagtaaaatggaatacctcatggggaggaaatgactcaatttgga

SEQ ID NO: 70753 - DNA, 80 bp, synthetic construct
  source 1..80: mol_type = other DNA
ctgacctaacatggcaggaatgggatcaacagataagcaacataagcagcattatatatgaccagatacaagaggcacaa

SEQ ID NO: 70754 - DNA, 80 bp, synthetic construct
  source 1..80: mol_type = other DNA
gaacaacaggaaaggaatgtaaaaagtctgctggaattagatgaatgggcttctatttggagttggcttgatataactaa

SEQ ID NO: 70755 - DNA, 80 bp, synthetic construct
  source 1..80: mol_type = other DNA
ctctcgttacagatccctacccaacgccagttggaagcaggaacagcagaaagaacaggagaagaaggtggagaaagaga

SEQ ID NO: 70756 - DNA, 80 bp, synthetic construct
  source 1..80: mol_type = other DNA
cagaggcaggtggagcatcttgcagccagggttcttgcaactgttgtacacggacagcaggacaatcatcttgtggattt

SEQ ID NO: 70757 - DNA, 80 bp, synthetic construct
  source 1..80: mol_type = other DNA
accacctcttgagcaacttaatatcagggatccagaagctgagcagactactgggactttgtctatggactctggggcaa

SEQ ID NO: 70758 - DNA, 80 bp, synthetic construct
  source 1..80: mol_type = other DNA
aggataactgaaacccttagcctctggaaagctgtaatacaatactggctacaggaattgcgaaatagtgctacaaatct

SEQ ID NO: 70759 - DNA, 80 bp, synthetic construct
  source 1..80: mol_type = other DNA
actagatgccattgcagtggcaactgccaattggactgacagcattatcttaggtgcacaaagaataggaaggggaattt

SEQ ID NO: 70760 - DNA, 80 bp, synthetic construct
  source 1..80: mol_type = other DNA
gtaacatcccaaggagaattagacaagggttagaaagaagcttattgtaacatgggaaatatactaacaaaaagtaaata

SEQ ID NO: 70761 - DNA, 80 bp, synthetic construct
  source 1..80: mol_type = other DNA
ttcaggatggccagcagtactaaacagaatgagacaaacttcccctacccatgaccctcaaccagcacccggagtaggac

SEQ ID NO: 70762 - DNA, 80 bp, synthetic construct
  source 1..80: mol_type = other DNA
agctctctagggagttagcagccagaggagggataccaagttcctacactcctcagaacaatgcagcccttgcattccta

SEQ ID NO: 70763 - DNA, 80 bp, synthetic construct
  source 1..80: mol_type = other DNA
caaggagctttacaagtgttaaaagaagtaatcaatgatgaagcagccgaatgggatagaattcacccacaaccggtagg

SEQ ID NO: 70764 - DNA, 80 bp, synthetic construct
  source 1..80: mol_type = other DNA
ctcttacatccagcttgtaatcatggctttgatgacccccacggggaaatgctgaaatggcaatttgacagatcactagc

SEQ ID NO: 70765 - DNA, 80 bp, synthetic construct
  source 1..80: mol_type = other DNA
taacacccatgtagcccaaataactaacccagagctgttcaacaaagactgaaactgctaaccagaagattgctgacacc

SEQ ID NO: 70766 - DNA, 80 bp, synthetic construct
  source 1..80: mol_type = other DNA
aatgcttcatagggatctgctattactaataattattagtgctttgctgcttacaaatataattctatggatgtttgttc

SEQ ID NO: 70767 - DNA, 80 bp, synthetic construct
  source 1..80: mol_type = other DNA
cctgtatgggaagaagcaaacccagtattgttctgtgcctcagatgctaacctaacaagcactgagcagcataatatttg

SEQ ID NO: 70768 - DNA, 80 bp, synthetic construct
  source 1..80: mol_type = other DNA
acaaacgacccctctacctccccacctacctcgctccctagcggttcagagaaccctatgaaaaaatgtgagtttaatgt

SEQ ID NO: 70769 - DNA, 80 bp, synthetic construct
  source 1..80: mol_type = other DNA
aaccacagttctcaaagacaaaaaggagaaaaaacaggctctattctatatatcagatttggttaaagtgaatgatagcg

SEQ ID NO: 70770 - DNA, 80 bp, synthetic construct
  source 1..80: mol_type = other DNA
aaacaagtaaagggaataatagcgaaacaagtggcaataacacaacaccatcaggaatatatacattaattaattgtaac

SEQ ID NO: 70771 - DNA, 80 bp, synthetic construct
  source 1..80: mol_type = other DNA
agtactcagctaatattaaatggaacactttcgaaaggaaagataagactgatggcaaaaaatatttcagataatagcca

SEQ ID NO: 70772 - DNA, 80 bp, synthetic construct
  source 1..80: mol_type = other DNA
aaatatcatagtgaccctaaatactactataagcatgacctgccagagaccaggaaatacaacagtacaggagataaaaa

SEQ ID NO: 70773 - DNA, 80 bp, synthetic construct
  source 1..80: mol_type = other DNA
taggtccaatgtcctggtacagcatgagcacagaaggcaaccctgagtcaagaagggcttattgtgagtataataccact

SEQ ID NO: 70774 - DNA, 80 bp, synthetic construct
  source 1..80: mol_type = other DNA
aattgggtagaggccttaaaacagacagctgaaaggtatttagaattagtaaacaatacaggtaatataagtatgatatt

SEQ ID NO: 70775 - DNA, 80 bp, synthetic construct
  source 1..80: mol_type = other DNA
caagaacagtactggaggagatctagaggtaacccaattgcattttaattgtcatggagagttcttttactgtaacacat

SEQ ID NO: 70776 - DNA, 80 bp, synthetic construct
  source 1..80: mol_type = other DNA
ctcagatgtttaattatacctttacatgtgatggaaccacctgtaagaacttaggattcaatagcactaataacactcag

SEQ ID NO: 70777 - DNA, 80 bp, synthetic construct
  source 1..80: mol_type = other DNA
ataccttgcaggttgaagcaggtagtaaggtcatggataaaaggagaatcaggactctatgcacctcccatccaaggtca

SEQ ID NO: 70778 - DNA, 80 bp, synthetic construct
  source 1..80: mol_type = other DNA
attaacatgtagatcaaacataactggaatgattctacaaatggatcagccatggaacgggagccagagcaatagcaata

SEQ ID NO: 70779 - DNA, 80 bp, synthetic construct
  source 1..80: mol_type = other DNA
gcacatttagaccgatagggggaaatatgaaagatatatggagaactgaattgtttagatacaaagtaataaggataaaa

SEQ ID NO: 70780 - DNA, 80 bp, synthetic construct
  source 1..80: mol_type = other DNA
ccttttagtgtggcacctacaagaattacaaggccagtcataggctttggccaccacaaggaaaaaagagcagtgggctt

SEQ ID NO: 70781 - DNA, 80 bp, synthetic construct
  source 1..80: mol_type = other DNA
gggaatgctattcttgggggttctaagtgcagcaggtagcactatgggcgcagcggcaacagcgctgacggtacagaccc

SEQ ID NO: 70782 - DNA, 80 bp, synthetic construct
  source 1..80: mol_type = other DNA
acactttgataaagggtatagtgcaacagcaggacaacctgctaagagcaatacaggcccagcagcacttgctgaggcta

SEQ ID NO: 70783 - DNA, 80 bp, synthetic construct
  source 1..80: mol_type = other DNA
atggggctgtaaaggaaagctagtctgttacacatcagtaaagtggaacaagacatggacaggaaatgactctatttggg

SEQ ID NO: 70784 - DNA, 80 bp, synthetic construct
  source 1..80: mol_type = other DNA
gcaacctcacatggcagcaatgggatcagcagatagacaatgtaagctccatcatatttgatgaaatactaaaagcacaa

SEQ ID NO: 70785 - DNA, 80 bp, synthetic construct
  source 1..80: mol_type = other DNA
gtacagcaggaagaaaatgagaaaaagttgctggagttagatgaatgggcttctatttggaattggcttgacataactaa

SEQ ID NO: 70786 - DNA, 80 bp, synthetic construct
  source 1..80: mol_type = other DNA
cagaagataattagtgcttgcagaatttgtgcagctgtaacacaatactggctacaagaattgcagaatagtgttataag

SEQ ID NO: 70787 - DNA, 80 bp, synthetic construct
  source 1..80: mol_type = other DNA
tctagtagatactattgcagtagcagtcgctaattggactgataacataatcttagggatacagaggttaggaagaggaa

SEQ ID NO: 70788 - DNA, 80 bp, synthetic construct
  source 1..80: mol_type = other DNA
aaatctccaaggaattagcagctagaggaggaataccaagttcttatactcctcagaataatgcagcccttgcattttta

SEQ ID NO: 70789 - DNA, 80 bp, synthetic construct
  source 1..80: mol_type = other DNA
actaggaaatgagtgtgagagggctagtctcctgcatccagcttgtaaccacggctttgaagatccacacggggagatac

SEQ ID NO: 70790 - DNA, 80 bp, synthetic construct
  source 1..80: mol_type = other DNA
tgaaatggcagtttgacagatcactgggcaacacccatgttgctaagataactcacccagagctcttcctcaaggactaa

SEQ ID NO: 70791 - DNA, 80 bp, synthetic construct
  source 1..80: mol_type = other DNA
ttgccttgagtgagaagcagtgtgtgctcatctattcaaccctggtatctagagatccctcagatcacttagactgaggc

SEQ ID NO: 70792 - DNA, 80 bp, synthetic construct
  source 1..80: mol_type = other DNA
gtgaagagacaagagaatcaggaacagaagggagaccagaacgagctctatccgtttgcctccctcaaatccctctttgg

SEQ ID NO: 70793 - DNA, 80 bp, synthetic construct
  source 1..80: mol_type = other DNA
gacagaccagtagttacagcaagggttgggggccatctatgtgaagttttgctggatacaggggcagatgatacagtgct

SEQ ID NO: 70794 - DNA, 80 bp, synthetic construct
  source 1..80: mol_type = other DNA
atcaggaagaatataagaacctcaaaacagggaaatatactagacaaaaaacctcccacacaaatgatataagactatta

SEQ ID NO: 70795 - DNA, 80 bp, synthetic construct
  source 1..80: mol_type = other DNA
acagaagtaatccagaaggtgtctcaagaagctatagttatctgggggaaattgcctaaatttaagttgccagtcactag

SEQ ID NO: 70796 - DNA, 80 bp, synthetic construct
  source 1..80: mol_type = other DNA
actaggaaggccagggattggtcttacaaacaccattttgaagctagaaatccaagagtcagttcaagtgtatatattcc

SEQ ID NO: 70797 - DNA, 80 bp, synthetic construct
  source 1..80: mol_type = other DNA
agtagggatggctagggtaaaagtgaccacatactggggattaatgccaggggaaagagatgaacatatgggacatgggg

SEQ ID NO: 70798 - DNA, 80 bp, synthetic construct
  source 1..80: mol_type = other DNA
gtgtccagaaattaacagaagatcaatggaaagggcacctgaggatcacggaccagctagagagccattcaatgaatggg

SEQ ID NO: 70799 - DNA, 80 bp, synthetic construct
  source 1..80: mol_type = other DNA
tactagagaccctagaagagctaaaagcagaggcagtaagacacttccctaggcattggctacaggccttgggaaattac

SEQ ID NO: 70800 - DNA, 80 bp, synthetic construct
  source 1..80: mol_type = other DNA
ggcatcacaagcctgtgttcccacagaccccactccacatgaatacccattacacaatgtgacagataacttcaatatat

SEQ ID NO: 70801 - DNA, 80 bp, synthetic construct
  source 1..80: mol_type = other DNA
gaaggcacaaagagtcctaagactacagagagccctaggaacatagagaaccctgtgaaaaagtgtgagtttaatacaac

SEQ ID NO: 70802 - DNA, 80 bp, synthetic construct
  source 1..80: mol_type = other DNA
cacagttcttaaagacaagaaagagaaaaaacaggctctattctatttatcagatttaagtaaactgaatactacggata

SEQ ID NO: 70803 - DNA, 80 bp, synthetic construct
  source 1..80: mol_type = other DNA
gcccacagtgagcactcacctgagattaaatgggacactctctgaaggaaaaataagaattatgggaaaaaacatttcag

SEQ ID NO: 70804 - DNA, 80 bp, synthetic construct
  source 1..80: mol_type = other DNA
attctgcggaaaatatcttagtgaccctaaattatcctgtaaacataacttgtcagagaccaaatgttacggtacaagag

SEQ ID NO: 70805 - DNA, 80 bp, synthetic construct
  source 1..80: mol_type = other DNA
ataaaaataggtccaatggcctggtacagcatggccatagagaaaaactcaacctcaaggatagcttcttgcaagtataa

SEQ ID NO: 70806 - DNA, 80 bp, synthetic construct
  source 1..80: mol_type = other DNA
tggcactgagtgggaaaaagccttaaaacaaacagctgaaaggtatttagaacttatgaacaataatgagacaaatataa

SEQ ID NO: 70807 - DNA, 80 bp, synthetic construct
  source 1..80: mol_type = other DNA
caatgacattcaatcgcagccttgatggagacgcagagacaacccatttgcactttaactgtcatggagagttcttttat

SEQ ID NO: 70808 - DNA, 80 bp, synthetic construct
  source 1..80: mol_type = other DNA
tgtaacacaagtggaatgtttaattataccttttcatgtaatggaaccacctgtaataatacccaaagtaacaataatac

SEQ ID NO: 70809 - DNA, 80 bp, synthetic construct
  source 1..80: mol_type = other DNA
cttgataccttgcaagttgagacaagtggtcagatcatggatgaggggagggtcgggactctatgcacctcccatctcag

SEQ ID NO: 70810 - DNA, 80 bp, synthetic construct
  source 1..80: mol_type = other DNA
gttacctaacatgtatgtcaaacataactggaatgattctgcaaatggatgagccatggaaaggaagcaacgcctcgttt

SEQ ID NO: 70811 - DNA, 80 bp, synthetic construct
  source 1..80: mol_type = other DNA
agaccaacagggggatatatgcaagatatatggagaactgaattgttcaaatacaaagtagtaaaggtaaaaccttttag

SEQ ID NO: 70812 - DNA, 80 bp, synthetic construct
  source 1..80: mol_type = other DNA
tgtagcacctacaaaaattgcaaggccagtcataagcactggcactcatagagagaaaagagcagtaggattgggaatgc

SEQ ID NO: 70813 - DNA, 80 bp, synthetic construct
  source 1..80: mol_type = other DNA
tattcttgggggttctaagtgcagcaggtagcactatgggcgcagcggcaacggcgctgacggtacagacccattctttg

SEQ ID NO: 70814 - DNA, 80 bp, synthetic construct
  source 1..80: mol_type = other DNA
atgaagggtatagtgcaacagcaggacaacctgctaagagcaatacaggcccagcagcacttgctgaggttatctgtatg

SEQ ID NO: 70815 - DNA, 80 bp, synthetic construct
  source 1..80: mol_type = other DNA
gggtatcagacaactccgagctcgcctgctagccttagaaacctttatacagaatcagcaactcctaaacctatggggct

SEQ ID NO: 70816 - DNA, 80 bp, synthetic construct
  source 1..80: mol_type = other DNA
gtaagggaagactaatctgttacacatcagtagcatggaacaacacatggaccaagtataatgaaacgaacatagacaaa

SEQ ID NO: 70817 - DNA, 80 bp, synthetic construct
  source 1..80: mol_type = other DNA
atttggggcaacctaacatggcaggaatgggataaacaggtagccaacataagtgacatcatatatgaggaaatacaaaa

SEQ ID NO: 70818 - DNA, 80 bp, synthetic construct
  source 1..80: mol_type = other DNA
agcacaagtacagcaggaacaaaatgagaggaagttgctggagttagatgaatgggcttctatttggaattggcttgaca

SEQ ID NO: 70819 - DNA, 80 bp, synthetic construct
  source 1..80: mol_type = other DNA
taactaaatggctgtggtatataaaaatagcaataattatagtaggagcactaataggtgtgagagttatcatgatagta

SEQ ID NO: 70820 - DNA, 80 bp, synthetic construct
  source 1..80: mol_type = other DNA
cttaacctagtaagaaacattaggcagggatatcaacccctctcgttacagatccccatccatcaccaaccggaagcagg

SEQ ID NO: 70821 - DNA, 80 bp, synthetic construct
  source 1..80: mol_type = other DNA
aacgcccggaggaacaggagaaggaggtggagaagaaggcaggcccaagttaataccctcgcctcaaggattcttgcaac

SEQ ID NO: 70822 - DNA, 80 bp, synthetic construct
  source 1..80: mol_type = other DNA
tgttgtacacggacctcaggacaataatcttgtggagctaccacctcttgagcaacttagcatcagggatccagacggtg

SEQ ID NO: 70823 - DNA, 80 bp, synthetic construct
  source 1..80: mol_type = other DNA
atcagccatctgggacttggactgaggatcctagggcagaagataattgatgcttgcagaatttgtacagctgtaactca

SEQ ID NO: 70824 - DNA, 80 bp, synthetic construct
  source 1..80: mol_type = other DNA
atactggctacaagaattgcagaatagtgctacaagtctactagataccattgcagtagcaactgccaattggactgaca

SEQ ID NO: 70825 - DNA, 80 bp, synthetic construct
  source 1..80: mol_type = other DNA
aataccatgctaaatgccataggaggacatcaaggagctttacaggtgctaaaggaagtaatcaatgatgaagcagcaga

SEQ ID NO: 70826 - DNA, 80 bp, synthetic construct
  source 1..80: mol_type = other DNA
gcataatcttagggatacaaagaataggaagaggaatctataacatcccaagaagaattagacagggcttagaaaggagt

SEQ ID NO: 70827 - DNA, 80 bp, synthetic construct
  source 1..80: mol_type = other DNA
ttattgtaacatgggaaacgcattgaggaaacacagagatcagagatggccagcagtaagagaaagaatgagaaatgcac

SEQ ID NO: 70828 - DNA, 80 bp, synthetic construct
  source 1..80: mol_type = other DNA
caagtgcaccatgtgcacctggagtaggacaagtctcccaggaattagcagctagaggagggatatcaactgcccatact

SEQ ID NO: 70829 - DNA, 80 bp, synthetic construct
  source 1..80: mol_type = other DNA
cggcacccatgttgctatgataactcaccctcatctcttcaacaaggactaaaactgctgacctgaaggatgctgacact

SEQ ID NO: 70830 - DNA, 80 bp, synthetic construct
  source 1..80: mol_type = other DNA
ttgggatagaactcacccaccagcggtagggccgttaccaccagggcagataagagaaccaacaggaagcgacattgctg

SEQ ID NO: 70831 - DNA, 80 bp, synthetic construct
  source 1..80: mol_type = other DNA
ggactactagcacccagcaagagcaagtccattggattaccagggccaacaaccctatcccagtaggagacatctataga

SEQ ID NO: 70832 - DNA, 80 bp, synthetic construct
  source 1..80: mol_type = other DNA
agcaagttcactggactaccaggcctaacaaccctatcccagttggagatatttatagaaaatggatagtgttaggatta

SEQ ID NO: 70833 - DNA, 80 bp, synthetic construct
  source 1..80: mol_type = other DNA
aacaaaatggtaaaaatgtacagtccagtgagcatcctagatattaggcagggaccaaaagagccatttagagactatgt

SEQ ID NO: 70834 - DNA, 80 bp, synthetic construct
  source 1..80: mol_type = other DNA
aatgatataaggcaattggcagaagtactccagaaggtatctcaggaatcgatagttatctgggggaaattgcctaaatt

SEQ ID NO: 70835 - DNA, 80 bp, synthetic construct
  source 1..80: mol_type = other DNA
catagtcaggtagggacgctgcaactattagcgctgagaatagtagtaaaagaaaaaaggaataagccccccctacccag

SEQ ID NO: 70836 - DNA, 80 bp, synthetic construct
  source 1..80: mol_type = other DNA
actagagctcctggaagaactgaaagcagaagcagtgagacatttccctaggaattggttacaagacctgggacaattca

SEQ ID NO: 70837 - DNA, 80 bp, synthetic construct
  source 1..80: mol_type = other DNA
taattgctttgcttcttataaatgtacttgtatggatgtttaatcttagaaaatatctagaacaaaagaaacaagagaga

SEQ ID NO: 70838 - DNA, 80 bp, synthetic construct
  source 1..80: mol_type = other DNA
accagatgcatgatgatatcactgatttgtggaagcagagtttaaagccatgtgttgaattgactttcctgtgtgtacaa

SEQ ID NO: 70839 - DNA, 80 bp, synthetic construct
  source 1..80: mol_type = other DNA
atgaattgcacagatgttactcatactaataatgtaaccatctcgcaggctgtaaccagccccgtaaaaaagtgtgattt

SEQ ID NO: 70840 - DNA, 80 bp, synthetic construct
  source 1..80: mol_type = other DNA
caatgtaaccacaattttcaaagacaaaagggagaaaaaacaggctctattctataaagcagatttgcttgaaacaaaag

SEQ ID NO: 70841 - DNA, 80 bp, synthetic construct
  source 1..80: mol_type = other DNA
attatgggaaaaaatatttcagacagtgggcaaagtatcctagtgactctaaattctactataaacataacctgtgagag

SEQ ID NO: 70842 - DNA, 80 bp, synthetic construct
  source 1..80: mol_type = other DNA
accaggaaatcggaaaagagaggagataaaaataggtccaatggcttggtacagtatgtcagtagaaaacaacataacat

SEQ ID NO: 70843 - DNA, 80 bp, synthetic construct
  source 1..80: mol_type = other DNA
caagggaagcttattgcacatataatgtcagtaaatgggcaacagccctaaagcaaacagctgagaggtatctagaactt

SEQ ID NO: 70844 - DNA, 80 bp, synthetic construct
  source 1..80: mol_type = other DNA
gtaaacaatacacaggctagcataacattcaatcaaagcagtggtggagatccagagataaccaatttacatttcaattg

SEQ ID NO: 70845 - DNA, 80 bp, synthetic construct
  source 1..80: mol_type = other DNA
tcatggagaattcttttattgtaacacaacggggttgtttaattatacctttctgtgtgaaaactccatctgtaacttca

SEQ ID NO: 70846 - DNA, 80 bp, synthetic construct
  source 1..80: mol_type = other DNA
cccataacaatacttcagaggagcgcaatctaacttgtagaattagacaggtggtaaggtcatggatgaagacagggtcg

SEQ ID NO: 70847 - DNA, 80 bp, synthetic construct
  source 1..80: mol_type = other DNA
ggactctatgcacctcccatcgaaggtaacctaacatgtaggtcaaacataactggaatgattctagaaatggataaacc

SEQ ID NO: 70848 - DNA, 80 bp, synthetic construct
  source 1..80: mol_type = other DNA
atggaacaaaagtacaaacaatgaaacagccatatttagaccaatagggggagatatgaaagaaatatggagaactgaat

SEQ ID NO: 70849 - DNA, 80 bp, synthetic construct
  source 1..80: mol_type = other DNA
gtggggctgtaagggacaattagtctgctacacatcagtaaaatggaacacaacatggggaagcaatattcctaatatta

SEQ ID NO: 70850 - DNA, 80 bp, synthetic construct
  source 1..80: mol_type = other DNA
ctaatctggaggaaatttggggcaaactaacctggcaggaatgggatcagcaggtaagcaatgtaagctccatcatatat

SEQ ID NO: 70851 - DNA, 80 bp, synthetic construct
  source 1..80: mol_type = other DNA
ttgtcatgataatacttaatctagtgagaaacattaggcagggatatcaacccctatcgttacagacccccatccatcac

SEQ ID NO: 70852 - DNA, 80 bp, synthetic construct
  source 1..80: mol_type = other DNA
caaccggaagcagaaacgccagaaagaacaggagaaggaggtggagaaggagacagacccaagttgaatccatcgccgca

SEQ ID NO: 70853 - DNA, 80 bp, synthetic construct
  source 1..80: mol_type = other DNA
agggttcttgccactgttgtacacggacctcaggacaataatcttgtggagttaccacctcttgagcaacttagcatcag

SEQ ID NO: 70854 - DNA, 80 bp, synthetic construct
  source 1..80: mol_type = other DNA
ggatccagaggttgatcagccatctgggacttggactgtggatcctagggcagaagataattgaagcttgtagaattggt

SEQ ID NO: 70855 - DNA, 80 bp, synthetic construct
  source 1..80: mol_type = other DNA
agagctgtaatacaatactggctacaagaattgcagaatagtgctataagtctggtagataccttggcagtggtagttgc

SEQ ID NO: 70856 - DNA, 80 bp, synthetic construct
  source 1..80: mol_type = other DNA
caattggactgacggcatcattttaggactacaacgcataggaagaggaattcttaacatcccaacaagaattaggcagg

SEQ ID NO: 70857 - DNA, 80 bp, synthetic construct
  source 1..80: mol_type = other DNA
gcctagaattaggtttattgtaacatgggaaacgcattgaagaaaagtagctttgtgggatggccagcagtaagagaaag

SEQ ID NO: 70858 - DNA, 80 bp, synthetic construct
  source 1..80: mol_type = other DNA
aatgagaaaagctcccagtagtgatcctgagccatgtgcacctggagtaggagaactctccagagaattagcagctagag

SEQ ID NO: 70859 - DNA, 80 bp, synthetic construct
  source 1..80: mol_type = other DNA
gagggataccaggctcatatactcctcaaaataatgcagcccttgcattcctagaaagccaccgagaagaagaagaagta

SEQ ID NO: 70860 - DNA, 80 bp, synthetic construct
  source 1..80: mol_type = other DNA
caacactcatgttgctatgataacccacccagagctcttccacaaggactaaaactgctgagatgaagagtgctaaagat

SEQ ID NO: 70861 - DNA, 80 bp, synthetic construct
  source 1..80: mol_type = other DNA
ccgtttgcctccctcagatccctctttgggacagaccagtagttgtagcaaaggtagggggccacctatgtgaggtttta

SEQ ID NO: 70862 - DNA, 80 bp, synthetic construct
  source 1..80: mol_type = other DNA
aatcaaaaggctgaattaatggcagtattaatagcattacaggattccaaggaaacggtaaacatagtaacagattccca

SEQ ID NO: 70863 - DNA, 80 bp, synthetic construct
  source 1..80: mol_type = other DNA
aaaaggagcggacgtatattacatgggttcctgctcacaagggcatagggagaaatgaaaaaatagataaattagtaagc

SEQ ID NO: 70864 - DNA, 80 bp, synthetic construct
  source 1..80: mol_type = other DNA
cagacggtctgaagtcactctggaacacaatagcggtactctggtgcgttcataacagatttaaagttgaagatacgcag

SEQ ID NO: 70865 - DNA, 80 bp, synthetic construct
  source 1..80: mol_type = other DNA
gcagtaagtaacgctaatgaattataaggaattgctaagcttaatagttgttagtgttttgcttcttgcagctatagtga

SEQ ID NO: 70866 - DNA, 80 bp, synthetic construct
  source 1..80: mol_type = other DNA
caggcaatacagaaattaaaagaagtaatgggaaacaggaagtctgcagataccgctaaagaaaacaactcaaagcagac

SEQ ID NO: 70867 - DNA, 80 bp, synthetic construct
  source 1..80: mol_type = other DNA
tatggatgtttattcttaagaaatatttagaacagaaggaacaagatagaagggaaagagagctgcttaaaagaatagaa

SEQ ID NO: 70868 - DNA, 80 bp, synthetic construct
  source 1..80: mol_type = other DNA
cctgtgtgggaagatgcaaccccaacattattctgtgcttcagatgccaaccttactagcactgagaagcataatatttg

SEQ ID NO: 70869 - DNA, 80 bp, synthetic construct
  source 1..80: mol_type = other DNA
ggcatcacaagcctgcgtccccacagacccctcaccacatgagtatccactaatcaatgtgacagataaattcaatatat

SEQ ID NO: 70870 - DNA, 80 bp, synthetic construct
  source 1..80: mol_type = other DNA
tgtacagatgtcaatgcaaccacaagtaataatacaccaagaactaatactgcaacaagtacaccagggatagaggagat

SEQ ID NO: 70871 - DNA, 80 bp, synthetic construct
  source 1..80: mol_type = other DNA
gaaagtaaaaaaatgtgaatttaatgtaactacaattttaaaagacaaaaaggaaaagaaacaggctctattctatgtat

SEQ ID NO: 70872 - DNA, 80 bp, synthetic construct
  source 1..80: mol_type = other DNA
cagatttgactaaggttaataatagtgaaacgggtaataatactgaaccaatatacacattaattaattgcaattccaca

SEQ ID NO: 70873 - DNA, 80 bp, synthetic construct
  source 1..80: mol_type = other DNA
tgataatatcctagtgaccctaaattccactctaaacataacctgcgagagaccatacgagcagttagtacaagaaatga

SEQ ID NO: 70874 - DNA, 80 bp, synthetic construct
  source 1..80: mol_type = other DNA
agataggtcctatggcttggtacagcatggaagtagaacgaaacaagacagccgccactcccaggacagcttattgcaca

SEQ ID NO: 70875 - DNA, 80 bp, synthetic construct
  source 1..80: mol_type = other DNA
tataatgtctctgaatgggaaagtgcattaaaacaaatagctgaaagatatttagaacttataaatcagacagacaatgt

SEQ ID NO: 70876 - DNA, 80 bp, synthetic construct
  source 1..80: mol_type = other DNA
tgctgtgatcttcgatagaagtactggtggagatccagaggtaagttatttgcattttaactgtcatggagaattctttt

SEQ ID NO: 70877 - DNA, 80 bp, synthetic construct
  source 1..80: mol_type = other DNA
attgtaacacaagtgagatgtttaattacacctttaactgtaccccgaccaaatgtaatgaaagtagttacaatagtaca

SEQ ID NO: 70878 - DNA, 80 bp, synthetic construct
  source 1..80: mol_type = other DNA
ggtagttacaatagtacacttaggcgaataccttgcaagataaaacaggtagtaaggtcatggataaagggagagtcggg

SEQ ID NO: 70879 - DNA, 80 bp, synthetic construct
  source 1..80: mol_type = other DNA
actctatgcaccacccattaaaggttacctaacctgcatatcaaacataactggaatgattctacaaagggacagtccaa

SEQ ID NO: 70880 - DNA, 80 bp, synthetic construct
  source 1..80: mol_type = other DNA
ataaaaccttttagtgtagcacctacaaaaattacaaggccagtcataagcactggcaatcatagaaagaaaagagcagt

SEQ ID NO: 70881 - DNA, 80 bp, synthetic construct
  source 1..80: mol_type = other DNA
caagagcaacaggaacaaaatgagaaaaggttactggagttagatgaatgggcctctctttggagttggcttgacataac

SEQ ID NO: 70882 - DNA, 80 bp, synthetic construct
  source 1..80: mol_type = other DNA
cccctctcgttacagaccctcaaccagcaccaaccggaagcagaaacgccaggaggaacaggaggagaaggtggaggcga

SEQ ID NO: 70883 - DNA, 80 bp, synthetic construct
  source 1..80: mol_type = other DNA
agacaggcacaggtggagacccttgcagcaagggttcttgcaactgttgtacacagatctcaggacgataatcttgtgga

SEQ ID NO: 70884 - DNA, 80 bp, synthetic construct
  source 1..80: mol_type = other DNA
gttaccgcctcttgagcagcttagcatcagggatccggaacgtgaccagttacctgggacttggactggagatcctaggg

SEQ ID NO: 70885 - DNA, 80 bp, synthetic construct
  source 1..80: mol_type = other DNA
cagaggacaattgaagcttgcagacaaacaggagctgtggtacaatactggctacaagaattgcagaaaagtgctacaag

SEQ ID NO: 70886 - DNA, 80 bp, synthetic construct
  source 1..80: mol_type = other DNA
cttggtagataccattgcaatagcagttggcaattggactgatagcatcatcttaggaatacaaagaataggaaggggaa

SEQ ID NO: 70887 - DNA, 80 bp, synthetic construct
  source 1..80: mol_type = other DNA
ttcttaatatcccacgaagaattagacagggcttcgaacgctgcttattgtaacatggggaatgcatggagtaaaaacaa

SEQ ID NO: 70888 - DNA, 80 bp, synthetic construct
  source 1..80: mol_type = other DNA
atttgcaggatggtcagcagtaagagatagaatgagaagaaccagaacctccagaacctcccctaattctgaaccatgtg

SEQ ID NO: 70889 - DNA, 80 bp, synthetic construct
  source 1..80: mol_type = other DNA
cacctggggtaggagaaatctccagacagttagcagatagagggggaataccaatttcctatactcctcaaaacaatgca

SEQ ID NO: 70890 - DNA, 80 bp, synthetic construct
  source 1..80: mol_type = other DNA
ctcctacatccagcttgtaatcatggtagtgacgatgcacatggagaaataccgaaatggcagtttgatacttcattagc

SEQ ID NO: 70891 - DNA, 80 bp, synthetic construct
  source 1..80: mol_type = other DNA
caaccccatcagccccaccgatggaggaggaaatgaagggacaggagaatcgggaacagaacccgaacgagctctatccg

SEQ ID NO: 70892 - DNA, 80 bp, synthetic construct
  source 1..80: mol_type = other DNA
tttgcctccctcaaatccctctttgggacagaccaatagttatagcaaaagttgggggccagttatgtgaagttttgctg

SEQ ID NO: 70893 - DNA, 80 bp, synthetic construct
  source 1..80: mol_type = other DNA
ggcaatggacctaccaggtttatcagactgaacataagaacctcaaaacagggaaatatactaggcaaaaggcctcccac

SEQ ID NO: 70894 - DNA, 80 bp, synthetic construct
  source 1..80: mol_type = other DNA
gagctggaaacattcgcatgtaatcctgagctactagaaactgcagagggtaatgagaagctgctacagcagctagagcc

SEQ ID NO: 70895 - DNA, 80 bp, synthetic construct
  source 1..80: mol_type = other DNA
agctctcaagacagggacacgagatttgcaatcactctggaacacaatagtagtgctctggtgtgtccacaacagatata

SEQ ID NO: 70896 - DNA, 80 bp, synthetic construct
  source 1..80: mol_type = other DNA
aaaacacagattgaccctacaacagcagacaggatgatacatctgtattatttcacctgttttacagaatcagctatcag

SEQ ID NO: 70897 - DNA, 80 bp, synthetic construct
  source 1..80: mol_type = other DNA
gaatgccatcttagggcaaagagtactgaccaggtgtgaatacactgcaggacatagcaaggtagggacactgcaactac

SEQ ID NO: 70898 - DNA, 80 bp, synthetic construct
  source 1..80: mol_type = other DNA
tagctctaagagtagttgtaaaagcaaaaagaagtaagcctcccctacccagtgtccagaaattaacagaagatagatgg

SEQ ID NO: 70899 - DNA, 80 bp, synthetic construct
  source 1..80: mol_type = other DNA
aagttgaagatacacagcaggcaatacaaaagttaaaggaagtaatggagagcaagaagtctgcgagcgccgctaaggaa

SEQ ID NO: 70900 - DNA, 80 bp, synthetic construct
  source 1..80: mol_type = other DNA
cccagaccccttgtaatgcttgctattgcaaaaaatgctgctatcattgccctgtttgtttcacaaagaagggtttggga

SEQ ID NO: 70901 - DNA, 80 bp, synthetic construct
  source 1..80: mol_type = other DNA
atctcctatggcaggaagaagcgacgacacccagctgctgcaagcaatccagatcataaagatcctgtaccaaagcagta

SEQ ID NO: 70902 - DNA, 80 bp, synthetic construct
  source 1..80: mol_type = other DNA
agtaacgctgatgcatcatagggacctgctaaccttaatagctgttagtgctttgctgtttataaatataatcttatgga

SEQ ID NO: 70903 - DNA, 80 bp, synthetic construct
  source 1..80: mol_type = other DNA
ccagagatagaaagtaataataccacaagtaatgccggcacgacaaccagtagcccagatctcaaacaagatctcaaaca

SEQ ID NO: 70904 - DNA, 80 bp, synthetic construct
  source 1..80: mol_type = other DNA
gtgtgagtttaatatgaccacagttgttaaggacaaaaaggagaaaaaacaggctctattctataaagcagatttgatgg

SEQ ID NO: 70905 - DNA, 80 bp, synthetic construct
  source 1..80: mol_type = other DNA
agtactcagatactattcaatgggacactatctaaaggaaaaataagaattatgggacaaaatatctcggacagtgggaa

SEQ ID NO: 70906 - DNA, 80 bp, synthetic construct
  source 1..80: mol_type = other DNA
aaatatcatagtgaccctaaattctaccctaaacatgacctgtgagagaccatacagggagatacaacaggtaatcgcag

SEQ ID NO: 70907 - DNA, 80 bp, synthetic construct
  source 1..80: mol_type = other DNA
gtccaatggccttgaacagcatggccctaacaacggatgcaataagaaatagctcaagggcagcttattgcacgtataat

SEQ ID NO: 70908 - DNA, 80 bp, synthetic construct
  source 1..80: mol_type = other DNA
accactgattgggagaaaacattaaaacaaacagctgaaaggtatctagaacttgtaaacaatacaggtaaggtcagcat

SEQ ID NO: 70909 - DNA, 80 bp, synthetic construct
  source 1..80: mol_type = other DNA
gatattcaatcacagcagtgatggagatgcggagatagtaaatttacattttaactgtcatggggaattcttttattgta

SEQ ID NO: 70910 - DNA, 80 bp, synthetic construct
  source 1..80: mol_type = other DNA
acacatctaagatgtttaattatagcttctcatgtgtagaaaacacctgtaatgttagccaagatcaccaaagtaatgac

SEQ ID NO: 70911 - DNA, 80 bp, synthetic construct
  source 1..80: mol_type = other DNA
accactcggataccttgtaagctgagacaggtggtaaggtcatggatacagggagggtcgggaatctatgcacctcccat

SEQ ID NO: 70912 - DNA, 80 bp, synthetic construct
  source 1..80: mol_type = other DNA
ccaaggtaagctaagatgtgaatcaaacataactggaatgatcctacaaatggataagccatggaacaaaagtgaaggca

SEQ ID NO: 70913 - DNA, 80 bp, synthetic construct
  source 1..80: mol_type = other DNA
gtggggctgtagaggaaggctagtctgctacacatcagtaccatggaatacatcatggacaggaaacgaaagcatttggg

SEQ ID NO: 70914 - DNA, 80 bp, synthetic construct
  source 1..80: mol_type = other DNA
acctactaacatggcaggaatgggatcggcaaatagacaacataagcgccaccatttatgaggaaatacaaaaggcacaa

SEQ ID NO: 70915 - DNA, 80 bp, synthetic construct
  source 1..80: mol_type = other DNA
ctctcgttacagatccccatccagcaccgggaggaagcagaagcgccaggaggaacaggagaaggaggtggagaagaagg

SEQ ID NO: 70916 - DNA, 80 bp, synthetic construct
  source 1..80: mol_type = other DNA
gccacctcttgagcgccttagcatcagggatccagagagtgatcagctatctgggacttggactggggatcctagggcag

SEQ ID NO: 70917 - DNA, 80 bp, synthetic construct
  source 1..80: mol_type = other DNA
ggaacatcccaaggagaattagacagggctttgaacgagctttattgtaacatgggaaacgtattgggaaaaggtaaatt

SEQ ID NO: 70918 - DNA, 80 bp, synthetic construct
  source 1..80: mol_type = other DNA
tgcaggatgggatagagtaagagaaagaatgagaagaatttcccctgagacttcccctgagtctgaaccatgtgcacctg

SEQ ID NO: 70919 - DNA, 80 bp, synthetic construct
  source 1..80: mol_type = other DNA
agtttgatagatctctaggcaacatccatgtttctaaggtaacccacccagagctcttcctgaaggactaaagctgttga

SEQ ID NO: 70920 - DNA, 80 bp, synthetic construct
  source 1..80: mol_type = other DNA
cctgaagattgctgacgctgtgggactttccagcagaagctgctgacactgcggggactttccagtgtgggagggataag

SEQ ID NO: 70921 - DNA, 80 bp, synthetic construct
  source 1..80: mol_type = other DNA
cagctccaccaatggaggacgaaatgaagggacaagagaaagagaatcaggaacagaagggggacccaaacgaactctat

SEQ ID NO: 70922 - DNA, 80 bp, synthetic construct
  source 1..80: mol_type = other DNA
ccgtttgcctccctcaaatccctctttgggacagaccagtagttacagcaaaagttgggggccatctatgtgaagtgttg

SEQ ID NO: 70923 - DNA, 80 bp, synthetic construct
  source 1..80: mol_type = other DNA
gacctatatgtaggatcagatttacccctgacagaacatagaagaagggtagaaatgcttagagaacacttatataagtg

SEQ ID NO: 70924 - DNA, 80 bp, synthetic construct
  source 1..80: mol_type = other DNA
cagaagcatgaatcagggcaatggacttaccagatatatcaggatgaatataagaacctcaaaacaggaaagtatactag

SEQ ID NO: 70925 - DNA, 80 bp, synthetic construct
  source 1..80: mol_type = other DNA
gaagcgacgcagaccagccactgttgaacgccatcaagataataaagatcttgtaccagagcagtaagtaacgctaatgc

SEQ ID NO: 70926 - DNA, 80 bp, synthetic construct
  source 1..80: mol_type = other DNA
tacatggtagaacaaatgcaggaagacattattagtctatgggaccagagtttaaaaccttgtgttcaaatgactttcat

SEQ ID NO: 70927 - DNA, 80 bp, synthetic construct
  source 1..80: mol_type = other DNA
gtgtgtacaaatgaattgtacagacatagaaaacaaaaacagtagctcagaaaaccctatgaaaaagtgtgagtttaata

SEQ ID NO: 70928 - DNA, 80 bp, synthetic construct
  source 1..80: mol_type = other DNA
taaccacagttctcaaggacaaaaaggagaaaaaacaggctttattctatagagcagatttgactgaaataagagacaac

SEQ ID NO: 70929 - DNA, 80 bp, synthetic construct
  source 1..80: mol_type = other DNA
acagtgagtactcaactgatattaaatgggacactctcaaaagaaaaaataagaattatgggacaaaatatttcggccac

SEQ ID NO: 70930 - DNA, 80 bp, synthetic construct
  source 1..80: mol_type = other DNA
tgcacaaaatatcatagtgaccctaagttctgctgtaaacataacctgtgtgagaccagggaataagacagtacaagaga

SEQ ID NO: 70931 - DNA, 80 bp, synthetic construct
  source 1..80: mol_type = other DNA
tgagaataggtccgatggcctggtacagcatggccataagtggaacaaacagctcaagggtagcctattgccagtataac

SEQ ID NO: 70932 - DNA, 80 bp, synthetic construct
  source 1..80: mol_type = other DNA
accactgagtgggaaaaagccttaaaaaacacagctgaaaggtatttggaacttataaataagacagaagagaatacaac

SEQ ID NO: 70933 - DNA, 80 bp, synthetic construct
  source 1..80: mol_type = other DNA
aataatgttcaaccggagccatgatggcgatgtagaggtaacccatttgcattttaactgtcatggagagttcttctatt

SEQ ID NO: 70934 - DNA, 80 bp, synthetic construct
  source 1..80: mol_type = other DNA
gtaacacatctgggatgtttaattatacctttttatgtaatgggaccaactgtaaaaaccaaagtacccatagcaataat

SEQ ID NO: 70935 - DNA, 80 bp, synthetic construct
  source 1..80: mol_type = other DNA
ggcacgataccttgcaagttgaaacaggtggtaagatcatggatgaggggagggtcgggactctatgcacctcccatccc

SEQ ID NO: 70936 - DNA, 80 bp, synthetic construct
  source 1..80: mol_type = other DNA
aggtaacctaacatgcatgtcacacataactggaatgattctacaaatagatgggccatggaacaacaacaccacaaaca

SEQ ID NO: 70937 - DNA, 80 bp, synthetic construct
  source 1..80: mol_type = other DNA
atacatttagaccaatagggggagatatgaaagatatatggagaaatgaattgttcaactacaaagtagtgagggtaaaa

SEQ ID NO: 70938 - DNA, 80 bp, synthetic construct
  source 1..80: mol_type = other DNA
ccttttagtgtggcacctacatcaattgcaaggccagtcataggcactggcactcatagagagaaaagagcagtaggatt

SEQ ID NO: 70939 - DNA, 80 bp, synthetic construct
  source 1..80: mol_type = other DNA
gttaccacctcttgagcaacttaatatcagggatccagacggtgatcagccatctgagaagtggactgtggatcctagga

SEQ ID NO: 70940 - DNA, 80 bp, synthetic construct
  source 1..80: mol_type = other DNA
cagaagataattgatgcttgcagaatttgtgcagctgtaatacatttctggctacaagaattgcagaagagcgctactag

SEQ ID NO: 70941 - DNA, 80 bp, synthetic construct
  source 1..80: mol_type = other DNA
cctactagatacctgtgcagtagcagttgctaattggactgacggcataatcttagggatacaaaggctaggaagaggaa

SEQ ID NO: 70942 - DNA, 80 bp, synthetic construct
  source 1..80: mol_type = other DNA
ttcttaatatcccccgaagaataagacagggcttggaaagaagtttattgtaacatgggaaacgtattggggaaagataa

SEQ ID NO: 70943 - DNA, 80 bp, synthetic construct
  source 1..80: mol_type = other DNA
atttaaaggatgggcagcagtaagagagagaatgagaaaaacttcctctgatcctgatcctcaaccatgtgcacctggag

SEQ ID NO: 70944 - DNA, 80 bp, synthetic construct
  source 1..80: mol_type = other DNA
tagggccagtgtccagggaactagcagctagaggaggagtaccaagttcctatactcctcaaaacaatgcagcccttgca

SEQ ID NO: 70945 - DNA, 80 bp, synthetic construct
  source 1..80: mol_type = other DNA
ctccacccatgttgctaagataactcacccagagctcttccccaaggactaaactgctgacctgaagaatgctgacactg

SEQ ID NO: 70946 - DNA, 80 bp, synthetic construct
  source 1..80: mol_type = other DNA
aacaagatctaaaaggaggctacacagcagtatttatgcaaaggggacaaaatccaactaggggaagacctataaaatgt

SEQ ID NO: 70947 - DNA, 80 bp, synthetic construct
  source 1..80: mol_type = other DNA
cagcccctccaatggaggaggtagtgaagggacaagagaatcagaatcagaatcaagggggggaccagaacgagctatat

SEQ ID NO: 70948 - DNA, 80 bp, synthetic construct
  source 1..80: mol_type = other DNA
tgaagggacaagagaatcagaatcagaatcaagggggggaccagaacgagctatatccgtttgcctccctcaaatccctc

SEQ ID NO: 70949 - DNA, 80 bp, synthetic construct
  source 1..80: mol_type = other DNA
gctgaattaatggcagtactaatagcattacaggattccaaagaaaaggtaaacatagtaacagactcacaatatgtatt

SEQ ID NO: 70950 - DNA, 80 bp, synthetic construct
  source 1..80: mol_type = other DNA
aaacgtatattacatgggttcctgctcataagggcataggaggaaatgaaaaaatagataaattagtaagcaaagatatt

SEQ ID NO: 70951 - DNA, 80 bp, synthetic construct
  source 1..80: mol_type = other DNA
tctaaaaaggcccagagatggcattatagacatcattatgaaaccagaaatccaagaattagctcaggtgtatatattcc

SEQ ID NO: 70952 - DNA, 80 bp, synthetic construct
  source 1..80: mol_type = other DNA
agtaggtacagctaatatagtggtgactacatattggggattaatgccaggggaaagagatgagcatttaggacatggag

SEQ ID NO: 70953 - DNA, 80 bp, synthetic construct
  source 1..80: mol_type = other DNA
tcagtatagaatggcaatacaaaaaatatagtacacagattgaccctgaaacagcagatagactgatacatctgcattat

SEQ ID NO: 70954 - DNA, 80 bp, synthetic construct
  source 1..80: mol_type = other DNA
gaagacctgaagtcactctggaacgcaatagcagtactctggtgcgttcataacagatataaagttggagatacacagca

SEQ ID NO: 70955 - DNA, 80 bp, synthetic construct
  source 1..80: mol_type = other DNA
acatagccaggtagggacactgcaactcctagcattaagagcagtggtaaaagacaaaagaagtaaacctcccctaccca

SEQ ID NO: 70956 - DNA, 80 bp, synthetic construct
  source 1..80: mol_type = other DNA
gtgtccagaagttaacaggagacagatggaacaggcacctgaaaatcagggaccagcaagagagccattcaatgaatggg

SEQ ID NO: 70957 - DNA, 80 bp, synthetic construct
  source 1..80: mol_type = other DNA
atcaccctggaagtcagcccccaaccccttgcaacgcttgctattgcaaaaaatgctgttatcattgctatctttgtttc

SEQ ID NO: 70958 - DNA, 80 bp, synthetic construct
  source 1..80: mol_type = other DNA
acaaagaagggtttgggaatctcccatggcaggaagaagcgacgacgaccggcagctgctgcaagctgttcgaataataa

SEQ ID NO: 70959 - DNA, 80 bp, synthetic construct
  source 1..80: mol_type = other DNA
ggatcttgtatcaaagcagtaagtaacgctaatgcattacagagacttgctaatcttaatagttgttagtgctttgcttc

SEQ ID NO: 70960 - DNA, 80 bp, synthetic construct
  source 1..80: mol_type = other DNA
ttataaatatagtgatatggacatttattcttaagaaatatttagagcaaaagaaacaagatagaagggaaagagaacta

SEQ ID NO: 70961 - DNA, 80 bp, synthetic construct
  source 1..80: mol_type = other DNA
agcagtgcaaaaattaaaagaagtaatgggaaacaggaagtctgcagataccgctaaagaaaccactagctcaaagcaga

SEQ ID NO: 70962 - DNA, 80 bp, synthetic construct
  source 1..80: mol_type = other DNA
aagcccaacattattctgtgcttcagatgttaaccttactagcactgagagccataatatttgggcatcacaggcctgcg

SEQ ID NO: 70963 - DNA, 80 bp, synthetic construct
  source 1..80: mol_type = other DNA
tccccacagacccctcaccacatgagtatccactaattaatgtgacagatagattcaatatatggaagaattacatggta

SEQ ID NO: 70964 - DNA, 80 bp, synthetic construct
  source 1..80: mol_type = other DNA
gatcaaatgcaggaagacattattagtttatgggagcagagtctaaaaccttgtgttcaaatgactttcctgtgtgtaca

SEQ ID NO: 70965 - DNA, 80 bp, synthetic construct
  source 1..80: mol_type = other DNA
aatgaattgtacagatgtcaatcaaacattgagtaatgcgacacaagggatggaagtaaaaaagtgtgaatttaatgtaa

SEQ ID NO: 70966 - DNA, 80 bp, synthetic construct
  source 1..80: mol_type = other DNA
ctacagttttaaaagacaaaaaggaaaagaaacaggctctattctatgtatcagatttggctaaggttcaagatagtggt

SEQ ID NO: 70967 - DNA, 80 bp, synthetic construct
  source 1..80: mol_type = other DNA
acagtaagtactcaactaatactaaatggaacaatctctgaaggaaacataagaatgctgggaaaaaatctgacaagtaa

SEQ ID NO: 70968 - DNA, 80 bp, synthetic construct
  source 1..80: mol_type = other DNA
tgagaatatcctagtgactctaaattccactataagcataacctgtgagagaccatacaatcagtcaatacaagagttaa

SEQ ID NO: 70969 - DNA, 80 bp, synthetic construct
  source 1..80: mol_type = other DNA
ggataggtccaatggcttggtacagcatgacattagaacaaaacaaaacaggcagtaacataaggacagcttattgcaat

SEQ ID NO: 70970 - DNA, 80 bp, synthetic construct
  source 1..80: mol_type = other DNA
tataatggctctgactgggaaggtacattaaaaggagtagctgaaagatatttagaacttataaatcagacaaacaatgc

SEQ ID NO: 70971 - DNA, 80 bp, synthetic construct
  source 1..80: mol_type = other DNA
taccgtgacattcagtaatagtacgggtggagatccagagataagctttttgcattttaactgtcatggagaattctttt

SEQ ID NO: 70972 - DNA, 80 bp, synthetic construct
  source 1..80: mol_type = other DNA
attgtgacacaagtaagatgtttaattatacctttaattgtaacaagaccaaatgtaataatagtaaaaatagtacccat

SEQ ID NO: 70973 - DNA, 80 bp, synthetic construct
  source 1..80: mol_type = other DNA
aataacactatgacaacaataccttgcagaataaaacaggtagtaaggtcatggataaggggagagtcgggactctatgc

SEQ ID NO: 70974 - DNA, 80 bp, synthetic construct
  source 1..80: mol_type = other DNA
accccccattaaaggtaatttaacctgcatatcaaacataactggaatgattctattaagggacgagccagggaataaca

SEQ ID NO: 70975 - DNA, 80 bp, synthetic construct
  source 1..80: mol_type = other DNA
gcagacacacccttaggccagtagggggagatatgaaagatatatggagaactgaattagtcaattacaaagtagtaaaa

SEQ ID NO: 70976 - DNA, 80 bp, synthetic construct
  source 1..80: mol_type = other DNA
ataaaaccttttagtgtagcacctacaaaaattacaaggccagtcataagcacccatagagaaaaaagagcagtaggatt

SEQ ID NO: 70977 - DNA, 80 bp, synthetic construct
  source 1..80: mol_type = other DNA
ctggggctgtaagggaaagctaatttgctatacatcagtaaaatggaacaaaacatggggaggagatgagtcaatctggg

SEQ ID NO: 70978 - DNA, 80 bp, synthetic construct
  source 1..80: mol_type = other DNA
gtaacctaacatggcagcagtgggatcagcagatagagaatgtaagctccatcatatatgaagaaatacaaaaggcacaa

SEQ ID NO: 70979 - DNA, 80 bp, synthetic construct
  source 1..80: mol_type = other DNA
ctctcgttacagaccctcaaccagcaccaaccggaagtagaaacgccaggaggaacaagagaagaaggtggagaagaaga

SEQ ID NO: 70980 - DNA, 80 bp, synthetic construct
  source 1..80: mol_type = other DNA
caggcacaggtggcgacccttgcagcaaagtttcttgcagatattgtacacagacctccggacgataatcctgtggagtt

SEQ ID NO: 70981 - DNA, 80 bp, synthetic construct
  source 1..80: mol_type = other DNA
accgtctcttgaccagcttagcatcagggatctggagagtgaacagttacctgggacttggactggggattctgggacag

SEQ ID NO: 70982 - DNA, 80 bp, synthetic construct
  source 1..80: mol_type = other DNA
aggacaattgaagcctgcagacaaacaagagctttattacaatattggctacaagaattgcaaaaaagtgctacaagctt

SEQ ID NO: 70983 - DNA, 80 bp, synthetic construct
  source 1..80: mol_type = other DNA
gctagataccattgcaataatagttggcaattggactgatagtatcatcttaggactacaaagaataggaaggggaattc

SEQ ID NO: 70984 - DNA, 80 bp, synthetic construct
  source 1..80: mol_type = other DNA
ttaacatcccaagaagaattagacagggccttgaacgctgcttagtgtaacatggggagtgcatggagtaaaagtaaatt

SEQ ID NO: 70985 - DNA, 80 bp, synthetic construct
  source 1..80: mol_type = other DNA
ttcaggatggtcagcagtaagagatagaatgagacaaacctcccctaatcctgagccctgtgcacctggggtaggagaaa

SEQ ID NO: 70986 - DNA, 80 bp, synthetic construct
  source 1..80: mol_type = other DNA
tttccagacagttatcagaaagaggggggataacaaattcttatactcctcaaaacaatgcagcccttgcattcctcgaa

SEQ ID NO: 70987 - DNA, 80 bp, synthetic construct
  source 1..80: mol_type = other DNA
tcctcaaaacaatgcagcccttgcattcctcgaaagccaccaagaggaggaagaagtagggttcccagtaagacctcaag

SEQ ID NO: 70988 - DNA, 80 bp, synthetic construct
  source 1..80: mol_type = other DNA
gggggctttacaagtgttgaaggaagtcatcaatgaggaagcagcagattgggatagaactcacccaccggtggtagggc

SEQ ID NO: 70989 - DNA, 80 bp, synthetic construct
  source 1..80: mol_type = other DNA
ctcctacatccactttgtaaccatggtagtgaggatgaagaaggggaaatactacaatggaagtttgatagttcattagc

SEQ ID NO: 70990 - DNA, 80 bp, synthetic construct
  source 1..80: mol_type = other DNA
gcgcacccatgttgctttaataactcacccagagctcttcaacaaggactaaaactgctgacatgaagattgctgacact

SEQ ID NO: 70991 - DNA, 80 bp, synthetic construct
  source 1..80: mol_type = other DNA
taagtaagaaagcagtgtgtgctcatctgttcaaccctggtgtctagaaatccctcagagcacgtagcctgaagcagaaa

SEQ ID NO: 70992 - DNA, 80 bp, synthetic construct
  source 1..80: mol_type = other DNA
cggagtgcacccgctaagaggcgagaggaactcacgagaaggtgagtaaatttgctggcggtggccagacctaggggaag

SEQ ID NO: 70993 - DNA, 80 bp, synthetic construct
  source 1..80: mol_type = other DNA
tatccgtttgcctccctcaaatccctctttgggacagaccaatagtcacagcaaaggttgggggccatctatgtgaggtt

SEQ ID NO: 70994 - DNA, 80 bp, synthetic construct
  source 1..80: mol_type = other DNA
ggcgaagtccctagaggaagaagataggtgcgagagcgtctgtattgacagggaaaaaattagatacataggaacaaatt

SEQ ID NO: 70995 - DNA, 80 bp, synthetic construct
  source 1..80: mol_type = other DNA
caaaaggctgaattaatggcagtattgttagccttacaggactctaaagagagagtaaacatagtaacagattcacaata

SEQ ID NO: 70996 - DNA, 80 bp, synthetic construct
  source 1..80: mol_type = other DNA
tgtattgggcatcatatcctcccaacctacacagagtgactcccctatagttcaacagataatagaagaactgacaaaaa

SEQ ID NO: 70997 - DNA, 80 bp, synthetic construct
  source 1..80: mol_type = other DNA
ggggattaatgccaggggaaagagatgagcatctaggacatggggttagtatagaatgggagtacaagaattataaaaca

SEQ ID NO: 70998 - DNA, 80 bp, synthetic construct
  source 1..80: mol_type = other DNA
gacagcctgcagtcactctagaacgcaatagtagtacttaggtgtgttcacaaaagatatagagttaaagacacacagca

SEQ ID NO: 70999 - DNA, 80 bp, synthetic construct
  source 1..80: mol_type = other DNA
cagattgaccctgaaacagcagacaggatgatacatctgcactacttcacctgttttacagattcagcaatcaggaaagc

SEQ ID NO: 71000 - DNA, 80 bp, synthetic construct
  source 1..80: mol_type = other DNA
ctgtctagggcagaaagtgctgaccaggtgtgaattccataaaggacatagtcaggtagggacactacaactcctagcct

SEQ ID NO: 71001 - DNA, 80 bp, synthetic construct
  source 1..80: mol_type = other DNA
taagagtagtagtaggagaaaaaacaagtagacctccagtacccagtgtccagaagttaacaggagataggtggaacagg

SEQ ID NO: 71002 - DNA, 80 bp, synthetic construct
  source 1..80: mol_type = other DNA
tgtcagaagatcaaggaccagctagagagccattcaatgaatggacaatacagctcttagaagagctaaaaacagaagca

SEQ ID NO: 71003 - DNA, 80 bp, synthetic construct
  source 1..80: mol_type = other DNA
agaataggaattatcccatctaacacaagaggaagaggaagaagagatggatccagtagaccatgagatgcccccctggc

SEQ ID NO: 71004 - DNA, 80 bp, synthetic construct
  source 1..80: mol_type = other DNA
atcaccctggaagtagcccccagaccccttgtaatacctgctattgcaaaagttgctgctatcattgcattgtttgtttc

SEQ ID NO: 71005 - DNA, 80 bp, synthetic construct
  source 1..80: mol_type = other DNA
acaaagaagggtttgggaatctcctatggcaggaagaagcggcgaagaccaacaactgctgaacgccatacagataataa

SEQ ID NO: 71006 - DNA, 80 bp, synthetic construct
  source 1..80: mol_type = other DNA
agatcctgtaccagagcagtaagtatcgccaatgcagtacaaggacttgctattcttactagcttatagtgctttgtttc

SEQ ID NO: 71007 - DNA, 80 bp, synthetic construct
  source 1..80: mol_type = other DNA
ttacaaccgcgcttatatggatgtttgtgcttaaactttgcttagaacaaaagagacaaggaaaaagggaaagagaaata

SEQ ID NO: 71008 - DNA, 80 bp, synthetic construct
  source 1..80: mol_type = other DNA
cctgtgtgggaagatgcaagccctacactattctgtgcttcagatgttaatttaacaagcactgagcagcataatatttg

SEQ ID NO: 71009 - DNA, 80 bp, synthetic construct
  source 1..80: mol_type = other DNA
ggcatcacaagcctgcgttcccacagatcccagtccaaatgagtatgacttaaaaaatgtgacagattattttaatatat

SEQ ID NO: 71010 - DNA, 80 bp, synthetic construct
  source 1..80: mol_type = other DNA
gacaatacaacaaacacaacaaccgcaaagacaacaaacccagaggaagagaccaatccggtaaaaaaatgtgattttaa

SEQ ID NO: 71011 - DNA, 80 bp, synthetic construct
  source 1..80: mol_type = other DNA
tgtaactacggttgtgaaagacaaacaggagaaaaaacaggctctattctatgtatcagatttgcttaagattggaaatg

SEQ ID NO: 71012 - DNA, 80 bp, synthetic construct
  source 1..80: mol_type = other DNA
tagttacctgtacacatggcatcaagccaacagtaagcactcacctaatatttaatgggacaatctctaaaggaaaaata

SEQ ID NO: 71013 - DNA, 80 bp, synthetic construct
  source 1..80: mol_type = other DNA
agaattatggcaaaaaacatttcgagcaactcagataatatcttagtgaccctaaattctactataaacatgacctgcat

SEQ ID NO: 71014 - DNA, 80 bp, synthetic construct
  source 1..80: mol_type = other DNA
gaggccaggaaataattcagtacaagagatgagaataggtccaatggcttggtacagtatgggacttgggaacgggtata

SEQ ID NO: 71015 - DNA, 80 bp, synthetic construct
  source 1..80: mol_type = other DNA
caaatagatcaagaatagctttttgtacctataatgccacggaatggaaagaaaccttgcaaggaatagctgaaaggtat

SEQ ID NO: 71016 - DNA, 80 bp, synthetic construct
  source 1..80: mol_type = other DNA
ttagaacttgtaaattatacagaaaaaattaacataacattcaagaacagcactgatggagatatcgaagtaacccattt

SEQ ID NO: 71017 - DNA, 80 bp, synthetic construct
  source 1..80: mol_type = other DNA
gcattttaactgtcatggagaattcttttattgtaacacaaatcaaatgtttaattatacattcgaatgtaataactcca

SEQ ID NO: 71018 - DNA, 80 bp, synthetic construct
  source 1..80: mol_type = other DNA
actgtaggattcagaatgacaataatacttatgaaaacagtacaagaacaatatattgccggttgagacaggtagtaagg

SEQ ID NO: 71019 - DNA, 80 bp, synthetic construct
  source 1..80: mol_type = other DNA
tcatggatgaggggagggtcaggcctctatgcacctcctatcaaaggtagtctaacctgcagttcaaacataactggatt

SEQ ID NO: 71020 - DNA, 80 bp, synthetic construct
  source 1..80: mol_type = other DNA
aatcctaacaagagatgcactaataaacagaagctccagcaaccccaacatcacatttagaccaacaggaggagatatga

SEQ ID NO: 71021 - DNA, 80 bp, synthetic construct
  source 1..80: mol_type = other DNA
aggatatatggagaacccaattgtacaattacaaagtagtaagagtaaaatcttttagtgtagcacctactaagattagt

SEQ ID NO: 71022 - DNA, 80 bp, synthetic construct
  source 1..80: mol_type = other DNA
gccttagaaacccttatgcagaatcagcaactcctaaacctatggggctgtaaaggaaaatcaatctgctacacatcagt

SEQ ID NO: 71023 - DNA, 80 bp, synthetic construct
  source 1..80: mol_type = other DNA
aaaatggaatgaaacatggggaggaaatctctcaatttgggacagcttaacatggcagcaatgggatcaacaggtatcca

SEQ ID NO: 71024 - DNA, 80 bp, synthetic construct
  source 1..80: mol_type = other DNA
atgtaagctctttcatatatgacaaaatacaagaagcacaagaacaacaggaggaaaatgaaagggccttgctggagtta

SEQ ID NO: 71025 - DNA, 80 bp, synthetic construct
  source 1..80: mol_type = other DNA
cccctctcgttacagatccccaaccatcaccagcaggaagtaggaacgccagaaagaacaggagaaggaggtggagaaga

SEQ ID NO: 71026 - DNA, 80 bp, synthetic construct
  source 1..80: mol_type = other DNA
aggcaggcgcaggtggatagcctcgccacccggattcttgcaactattgtacacggacctccggacaataatcctgtgga

SEQ ID NO: 71027 - DNA, 80 bp, synthetic construct
  source 1..80: mol_type = other DNA
atctctagcagtggcgcccgaacagggacttgaaagtgaaaccaaggaagaaaacctccgacgcaacaggctcggcttag

SEQ ID NO: 71028 - DNA, 80 bp, synthetic construct
  source 1..80: mol_type = other DNA
gttaccagatcttgagcagcttaacatcagggatccagaagttgatcagcctgctgggacttggactgtgcactctatgg

SEQ ID NO: 71029 - DNA, 80 bp, synthetic construct
  source 1..80: mol_type = other DNA
caaaggataactgaagcctgcagactttgtgcagctgtaacacaatactggctacaagaattgaaaattagtgctacaag

SEQ ID NO: 71030 - DNA, 80 bp, synthetic construct
  source 1..80: mol_type = other DNA
cttactagatactgttgcagtggcagttggcagttggactgacaacattatctcaggtgtgcaaaggataggaagaggaa

SEQ ID NO: 71031 - DNA, 80 bp, synthetic construct
  source 1..80: mol_type = other DNA
ttcttaacatcccaaggagaattagacagggtgcagaaagaatcttagtataacatgggaaacatattaacaaagagcaa

SEQ ID NO: 71032 - DNA, 80 bp, synthetic construct
  source 1..80: mol_type = other DNA
atttgaaggatggccagcagtaagaagaagaatgagacaaacttcccctgatcctcaaccatgtgcacctggagtaggag

SEQ ID NO: 71033 - DNA, 80 bp, synthetic construct
  source 1..80: mol_type = other DNA
aggggctttacaagtattaaaagaagtaatcaatgaggaagcagcagattgggatagaactcacccaccaccgataggac

SEQ ID NO: 71034 - DNA, 80 bp, synthetic construct
  source 1..80: mol_type = other DNA
aggtatccagggcattggcaggtagaggagggataccaaattcctatactccccagaacaatgcagcccttgcattccta

SEQ ID NO: 71035 - DNA, 80 bp, synthetic construct
  source 1..80: mol_type = other DNA
gaagcctaccaggatgaggacgtaggtttcccagtaagacctcaagtgcctctacagccaatgacctttaaagcagcaca

SEQ ID NO: 71036 - DNA, 80 bp, synthetic construct
  source 1..80: mol_type = other DNA
ctcctacatccagcatgtaatcatggtagtgaggatcatcacggagaaatgctaaaatggcagtttgatagctcactagg

SEQ ID NO: 71037 - DNA, 80 bp, synthetic construct
  source 1..80: mol_type = other DNA
catcacccatgtagccatggtaactcaccctgagctcttcatcaagaactaaaactgctaaccagaagaagattgctgac

SEQ ID NO: 71038 - DNA, 80 bp, synthetic construct
  source 1..80: mol_type = other DNA
aacgcgggactttccagcttgctgacacggcagggactttccagcgtgggagggataaggggcggtccggggagtggcta

SEQ ID NO: 71039 - DNA, 80 bp, synthetic construct
  source 1..80: mol_type = other DNA
cgttaccaccagggcagataagggaaccaacaggaagtgacattgctggaacaaccagcacacagcaagagcaaattcac

SEQ ID NO: 71040 - DNA, 80 bp, synthetic construct
  source 1..80: mol_type = other DNA
tggaccagtaggccaggtaaccctatcccagttggagacatctatagaaaatggatagtactgggtctaaacaaaatggt

SEQ ID NO: 71041 - DNA, 80 bp, synthetic construct
  source 1..80: mol_type = other DNA
tatcaggaggaacataaaaacctcaaaacaggaaaatatactaggcaaagggcctcccacacaaatgatataagaatatt

SEQ ID NO: 71042 - DNA, 80 bp, synthetic construct
  source 1..80: mol_type = other DNA
aaaggctgaattaatggcaatattgttagccttaaaggattccaaggaaacagtaaacatagtaacagattcacaatttg

SEQ ID NO: 71043 - DNA, 80 bp, synthetic construct
  source 1..80: mol_type = other DNA
tctagaaagaccaaggaatggcattacaaacaccattttgaattcagaaatccaagagccagttcaggtgtatatattcc

SEQ ID NO: 71044 - DNA, 80 bp, synthetic construct
  source 1..80: mol_type = other DNA
acataaggatctgctaatattaataattactagtgctttgctgcttataaatgtaattctatggctgtttgttcttaagc

SEQ ID NO: 71045 - DNA, 80 bp, synthetic construct
  source 1..80: mol_type = other DNA
aatgtttagaacaaaagaaacaaactaaaagagaaagagaaataattagaaggttaagaagaataagagaaattgaggat

SEQ ID NO: 71046 - DNA, 80 bp, synthetic construct
  source 1..80: mol_type = other DNA
cctgtatgggaagaggcaaaaccaacgttattctgtgcttcagatgttaacctaacaagcactgagaagcataatatttg

SEQ ID NO: 71047 - DNA, 80 bp, synthetic construct
  source 1..80: mol_type = other DNA
gacacaacaaacgcaacagcggccagcagcgcagtgaaaaagtgtgagtttaatgtaaccacagttctcaaagacaaaaa

SEQ ID NO: 71048 - DNA, 80 bp, synthetic construct
  source 1..80: mol_type = other DNA
ggagaaacaacaggctctattctatagatcagatttaaataaaatagagaacagcacaaccagcacaatgtatacattaa

SEQ ID NO: 71049 - DNA, 80 bp, synthetic construct
  source 1..80: mol_type = other DNA
aaatataatagtgaccctagattctgctataaacataacctgtgagagaccatggaatcagtcagtacaagagctgaaaa

SEQ ID NO: 71050 - DNA, 80 bp, synthetic construct
  source 1..80: mol_type = other DNA
taggtccaatgtcctggtacagcatgggcataagctcaccactctcaaatgcctcaaggttagcttattgccggtataat

SEQ ID NO: 71051 - DNA, 80 bp, synthetic construct
  source 1..80: mol_type = other DNA
gccactgagtggaaaaaagccttaaaacaaatagctgaaaggtacttagaacttgtaaacaatacaaacaatacaggtga

SEQ ID NO: 71052 - DNA, 80 bp, synthetic construct
  source 1..80: mol_type = other DNA
caatgttagcatgatattcagtaaaagcactggtggagattcagagatagcccacttgcattttagctgtcatggagagt

SEQ ID NO: 71053 - DNA, 80 bp, synthetic construct
  source 1..80: mol_type = other DNA
ttttctattgtaacacaacccagatgtttaattataccttctcatgtaacggaaccagctgtactaataaccaaagtaac

SEQ ID NO: 71054 - DNA, 80 bp, synthetic construct
  source 1..80: mol_type = other DNA
agtgagaacaagaatggcacattgacagagataccttgcaagataaaacaggtagtaaggtcatggataaggggagagtc

SEQ ID NO: 71055 - DNA, 80 bp, synthetic construct
  source 1..80: mol_type = other DNA
gggactctatgcacctcccatcaaaggtcctctaaaatgtgagtcaaacataactggaatgattctacaaaaagatgaac

SEQ ID NO: 71056 - DNA, 80 bp, synthetic construct
  source 1..80: mol_type = other DNA
catggaacaaaacaaacaacacacacgccacatttagaccaggagggggagatatgaaagacatatggagaactgaattg

SEQ ID NO: 71057 - DNA, 80 bp, synthetic construct
  source 1..80: mol_type = other DNA
tacaaatacaaggtagtaagggtaaaaccttttagtgtggcacctacaaaaattgcaaggccagtcataggcactggtac

SEQ ID NO: 71058 - DNA, 80 bp, synthetic construct
  source 1..80: mol_type = other DNA
tcatagggagaaaagagcagtaggattgggaatgctgttcttgggggttctaagtgcagcaggtagcactatgggcgcaa

SEQ ID NO: 71059 - DNA, 80 bp, synthetic construct
  source 1..80: mol_type = other DNA
cggcaacaacgttggcggtacagacccacactttgatgaagggtatagtgcaacagcaggacaacctgctaagagcaata

SEQ ID NO: 71060 - DNA, 80 bp, synthetic construct
  source 1..80: mol_type = other DNA
caggcccagcagcaattgctgaggctatctgtatggggtatcagacaactccgagctcgcctgcaagccttagaaacctt

SEQ ID NO: 71061 - DNA, 80 bp, synthetic construct
  source 1..80: mol_type = other DNA
aatacagaatcagcaactcctaaacctatggggttgtaagggaaggctaatctgttacacatcagtaaaatggaataaca

SEQ ID NO: 71062 - DNA, 80 bp, synthetic construct
  source 1..80: mol_type = other DNA
catgggcaaacggcactaatctaaatacaatttgggacaacctaacatggcagcaatgggatcagcagatagacaacata

SEQ ID NO: 71063 - DNA, 80 bp, synthetic construct
  source 1..80: mol_type = other DNA
agcgacgttatatatggtgaaatacaaaaagcacaggaccagcaggaacaaaatgagaagaagttgctggagttaaatga

SEQ ID NO: 71064 - DNA, 80 bp, synthetic construct
  source 1..80: mol_type = other DNA
agacaggcccagattgatacccttgccgccaggtttcttgcatctgttgtacacggacctcaggacaataatcttgtgga

SEQ ID NO: 71065 - DNA, 80 bp, synthetic construct
  source 1..80: mol_type = other DNA
ttcttaacatcccaagaagaattagacagggcttagaacaggctttagtgtaacatgggaaacgcattgaggaaaagcag

SEQ ID NO: 71066 - DNA, 80 bp, synthetic construct
  source 1..80: mol_type = other DNA
aatgccataggaggccatcaaggggccttacaagtgctaaaagaagtaatcaatgaggaagcatcagaatgggatagaac

SEQ ID NO: 71067 - DNA, 80 bp, synthetic construct
  source 1..80: mol_type = other DNA
tcacccaccagcgatggggccattaccaccagggcagatgagggaaccaacaggaagtgacattgctgggacaactagca

SEQ ID NO: 71068 - DNA, 80 bp, synthetic construct
  source 1..80: mol_type = other DNA
cccagcaagagcaagttcactggactaccagggccaacaaccctatcccagtaggagacatctacagaaaatggatagtg

SEQ ID NO: 71069 - DNA, 80 bp, synthetic construct
  source 1..80: mol_type = other DNA
gaaagtctccagtcactctggaacacaataacagtgctctggtgtgttcacaacagatatcaagttatagacacgcagga

SEQ ID NO: 71070 - DNA, 80 bp, synthetic construct
  source 1..80: mol_type = other DNA
acatagtcaggtagggacactacagctactagctctaacagcaatagtaaaaacaagaaacagtaggccccccctaccca

SEQ ID NO: 71071 - DNA, 80 bp, synthetic construct
  source 1..80: mol_type = other DNA
aagaagcgacgacgacctgctgcgagccatccggatcataaggatcctgtaccaaagcagtaagtaacgctaatgcatca

SEQ ID NO: 71072 - DNA, 80 bp, synthetic construct
  source 1..80: mol_type = other DNA
tagggacctgctaacattaataattggtagtgctttgctgcttataaatgtactgttatggatgtttatgcttagaaaat

SEQ ID NO: 71073 - DNA, 80 bp, synthetic construct
  source 1..80: mol_type = other DNA
ggcaatacaaaagttaaaggaagtcatggggagcaggaagtctgcggaggccgctaaagaaaacaaaagcacaaagcagg

SEQ ID NO: 71074 - DNA, 80 bp, synthetic construct
  source 1..80: mol_type = other DNA
gggcagcacatgcctgtgttcctacagatccctctccatatgaatatccattggacaatgtgacagattattttaatgta

SEQ ID NO: 71075 - DNA, 80 bp, synthetic construct
  source 1..80: mol_type = other DNA
gacacagtaaatggaaccagcagctcagaaagcgatatgcaaaggtgtgagtttaatgtaaccactgttgtaaaagacaa

SEQ ID NO: 71076 - DNA, 80 bp, synthetic construct
  source 1..80: mol_type = other DNA
aaaggagaaaaaacaggctttattctatagatcagatttgatggaattaaaggataaggataatagcacaaacacaacaa

SEQ ID NO: 71077 - DNA, 80 bp, synthetic construct
  source 1..80: mol_type = other DNA
agtactcaactaatattaaatgggacactctctaaaggaaaaataagaatgatgtcaacaaatatttcagacagtgggaa

SEQ ID NO: 71078 - DNA, 80 bp, synthetic construct
  source 1..80: mol_type = other DNA
gaatatcatagtgaccctaaattctaccataaacatgacctgtagtagaccagcattggaagtacagagcatgggcgtag

SEQ ID NO: 71079 - DNA, 80 bp, synthetic construct
  source 1..80: mol_type = other DNA
gtccaatggccgtatacagtgcacacctaagggaatcagggacaaacggatcaaggatagcttactgtgagtataatacc

SEQ ID NO: 71080 - DNA, 80 bp, synthetic construct
  source 1..80: mol_type = other DNA
agtgattgggaaaaagcattaagacaaacagctgagaggtatttagaacttgtaaacaacacaggtagtattagcatgac

SEQ ID NO: 71081 - DNA, 80 bp, synthetic construct
  source 1..80: mol_type = other DNA
attcaacaaaagcaacgatggtggagatccagagacaacccatttacattttaattgtcatggagaattcttttattgta

SEQ ID NO: 71082 - DNA, 80 bp, synthetic construct
  source 1..80: mol_type = other DNA
acacatctaatttatttaattataccttttcatgtaatggaaccacctgtaatgatagccaaagtaccaccaatgacaca

SEQ ID NO: 71083 - DNA, 80 bp, synthetic construct
  source 1..80: mol_type = other DNA
cagataccttgcaaactgagacaggtagtaaggtcatggataaaaggacagtcaggattctatgcacctcccatcaaggg

SEQ ID NO: 71084 - DNA, 80 bp, synthetic construct
  source 1..80: mol_type = other DNA
taacctgacatgtacatcaaacataacaggaatgattctacaaatggatgcaccatggaacagcaccagaaacaacagcg

SEQ ID NO: 71085 - DNA, 80 bp, synthetic construct
  source 1..80: mol_type = other DNA
aaaaccaaactgcaacatttagaccaacagggggagaaatgaaagatatatggagaactgagttgttcaactacaaagta

SEQ ID NO: 71086 - DNA, 80 bp, synthetic construct
  source 1..80: mol_type = other DNA
gtaagagtaaaaccttttagtgtggcacccacatcaattgcaaggccagttgtaggcactagcactcatagagaaaaaag

SEQ ID NO: 71087 - DNA, 80 bp, synthetic construct
  source 1..80: mol_type = other DNA
ctacacatcagtaaaatggaatgaatcatggacaggaaacgaaagcatttgggaagaactaacatggcaggaatgggatc

SEQ ID NO: 71088 - DNA, 80 bp, synthetic construct
  source 1..80: mol_type = other DNA
ggcagataagaaacataagctccaccatatatgaggaaatacaaaaggcacaagtacagcaggaagtaaatgagagaaag

SEQ ID NO: 71089 - DNA, 80 bp, synthetic construct
  source 1..80: mol_type = other DNA
aacccctctcgttgcagatccccaaccaccaccaaggggaagcaggaacgccaggaagaacaggagaaggaggtggagaa

SEQ ID NO: 71090 - DNA, 80 bp, synthetic construct
  source 1..80: mol_type = other DNA
gaaggcaggcccaagtggacaaccttgccgccagggttcttgcaactgttgtacacggacctcaggacaatagtgctgtg

SEQ ID NO: 71091 - DNA, 80 bp, synthetic construct
  source 1..80: mol_type = other DNA
agtttgctagatacagttgcagtggcagtagccaattggactgacggtataatctcagggatacaagcaataggaagagg

SEQ ID NO: 71092 - DNA, 80 bp, synthetic construct
  source 1..80: mol_type = other DNA
aattcgtaacatcccaactagaattagacagggcttagagagaagtctattgtaacatgggacacgtattgggaaaaaat

SEQ ID NO: 71093 - DNA, 80 bp, synthetic construct
  source 1..80: mol_type = other DNA
aaatatgagggatgggcagcagtaagacaaagaatgaggagaactagaatttcccatgagcctgaaccatgtgcacctgg

SEQ ID NO: 71094 - DNA, 80 bp, synthetic construct
  source 1..80: mol_type = other DNA
tgtgggactttccagcaaagactgctgacactgcaaagactgctgacactgcggggactttccagtgggagggacagggg

SEQ ID NO: 71095 - DNA, 80 bp, synthetic construct
  source 1..80: mol_type = other DNA
aaagcagtaagtagtatatgtaatgtctgatttgttagcaataagtgtaacagcattaatagtagcactaataatagcaa

SEQ ID NO: 71096 - DNA, 80 bp, synthetic construct
  source 1..80: mol_type = other DNA
tagtttgagacagatggaggaagaaatgaaaaactgctctttcaatgtcaccgcaggcctaaaagataaggtgcgaacag

SEQ ID NO: 71097 - DNA, 80 bp, synthetic construct
  source 1..80: mol_type = other DNA
ttcactgtaggacgggatctagtagggggcacagaagacacaagaggtaattaaagacaattaaattggatagccttaat

SEQ ID NO: 71098 - DNA, 80 bp, synthetic construct
  source 1..80: mol_type = other DNA
agtacaacagggatagggttagaaatgaaaaactgctctttcaatatcaccacaagcataaatactaaggtaaaagacta

SEQ ID NO: 71099 - DNA, 80 bp, synthetic construct
  source 1..80: mol_type = other DNA
gctctaccaagctcttgatcttcccgccgacattgtggcccgtgcaggccggctgaccgccacagtaaaggtttcccagg

SEQ ID NO: 71100 - DNA, 80 bp, synthetic construct
  source 1..80: mol_type = other DNA
gccgccacacccaccttggcggctcccttaccctctgttgtattaggcccctcccctcctccttctgccccggcgtccag

SEQ ID NO: 71101 - DNA, 80 bp, synthetic construct
  source 1..80: mol_type = other DNA
cgagccggcccctggtgctagcgccgggaccccggccataacccaccagatggcccggcatcgccgcctgctttttacct

SEQ ID NO: 71102 - DNA, 80 bp, synthetic construct
  source 1..80: mol_type = other DNA
aagaagtattaaaatggaggtttgacagcaaactagcattaaagcacctggccagagagcaacacccagaattctaccaa

SEQ ID NO: 71103 - DNA, 80 bp, synthetic construct
  source 1..80: mol_type = other DNA
cctgccgaatctgccacctgtgacatatctgggtcctacgtggtgcctggtgctgccctccagccgctctaccaggctct

SEQ ID NO: 71104 - DNA, 80 bp, synthetic construct
  source 1..80: mol_type = other DNA
tgatctccctgccgatattgtggcccgtgcaggtcggctgaccgccacagtaaaggtttctcaggctgaggggcggattg

SEQ ID NO: 71105 - DNA, 80 bp, synthetic construct
  source 1..80: mol_type = other DNA
tctacacccgtacctggtcggaagttgatgccgcttctaacccggcccagcccgacctaggccttgcatctgagcctccc

SEQ ID NO: 71106 - DNA, 80 bp, synthetic construct
  source 1..80: mol_type = other DNA
tgccctccattgtaccgggccccaccccccccccctccgccctggtgcctagtgagccggcctctggtgccagcgccggg

SEQ ID NO: 71107 - DNA, 80 bp, synthetic construct
  source 1..80: mol_type = other DNA
tgcctagtgagccggcctctggtgccagcgccggggctctggccataacccaccagacggtccgacaccgccgtttgctt

SEQ ID NO: 71108 - DNA, 80 bp, synthetic construct
  source 1..80: mol_type = other DNA
caggagccgcagtcctaattgctggctgcggcctgaagttgaaggtggatttccgcccgattggcttatatgcaggtgtt

SEQ ID NO: 71109 - DNA, 80 bp, synthetic construct
  source 1..80: mol_type = other DNA
aacggggaggatgaaccagtggttacttacagcgtcaaagatggcgtttccggcttgcctgagctcactactgtcaggca

SEQ ID NO: 71110 - DNA, 80 bp, synthetic construct
  source 1..80: mol_type = other DNA
gggtttcccccagcctgttcataacatcaactcatgtcataccccagggcgcacaggagttcttcggggttcccatcaag

SEQ ID NO: 71111 - DNA, 80 bp, synthetic construct
  source 1..80: mol_type = other DNA
ctgggggtatggaagtacagatcatgctagctgggaatgcgttcactgctggtaaactgatctttgctgctgtgccccca

SEQ ID NO: 71112 - DNA, 80 bp, synthetic construct
  source 1..80: mol_type = other DNA
tcccccccagattacaatgtttccacatgtgattatagatgttagaaccttagaacctgtgttgctccctatgcctgaca

SEQ ID NO: 71113 - DNA, 80 bp, synthetic construct
  source 1..80: mol_type = other DNA
tcaggaattctttctttcactttattcagagggatgagccaaagatgaggttggtggcaatgctgtacacgccactgagg

SEQ ID NO: 71114 - DNA, 80 bp, synthetic construct
  source 1..80: mol_type = other DNA
tccaacggatctggggatgatgtattcacagtctcctgcagggttctgacccgccccactcctgattttgatttcactta

SEQ ID NO: 71115 - DNA, 80 bp, synthetic construct
  source 1..80: mol_type = other DNA
gatgtcctgtatactaacccaaatgagagtgcaattgttcaatgtcagaatggtaggtgcaccctggacggcgagttgca

SEQ ID NO: 71116 - DNA, 80 bp, synthetic construct
  source 1..80: mol_type = other DNA
ggtgacgactcaactcctacccacaggcatctgtgcgttcaggggcaaagtcactcaacaggtgcaggatgaacatcggg

SEQ ID NO: 71117 - DNA, 80 bp, synthetic construct
  source 1..80: mol_type = other DNA
ggggacgactcaactcctacccacaggcatctgtgcgttcaggggcaaagtcactcaacaggtgcaggatgaacatcggg

SEQ ID NO: 71118 - DNA, 80 bp, synthetic construct
  source 1..80: mol_type = other DNA
gcacacattggaatatgacagtaaccaacttaaatggcaccccgtttgacccaactgaggatgtccctgctccactgggc

SEQ ID NO: 71119 - DNA, 80 bp, synthetic construct
  source 1..80: mol_type = other DNA
accccggatttctccggccaaatttatggggtaattagtcagaggaataccaacacagttcccggtgaaggaaacctccc

SEQ ID NO: 71120 - DNA, 80 bp, synthetic construct
  source 1..80: mol_type = other DNA
cttgggaaactcaagatgtgagctctggacaacccaccaagttcaccccagttggcttggcctccgtggatgctaactct

SEQ ID NO: 71121 - DNA, 80 bp, synthetic construct
  source 1..80: mol_type = other DNA
cattttgaccaatggaccctccccagctattctggtgccctaactctaaatatgaacttggccccatctgttgccccagt

SEQ ID NO: 71122 - DNA, 80 bp, synthetic construct
  source 1..80: mol_type = other DNA
gtttggctggtgacgttctcagtaatgggatcgggtcgctcattaatgctggtgccaatgcaatcaatcagaaagctgaa

SEQ ID NO: 71123 - DNA, 80 bp, synthetic construct
  source 1..80: mol_type = other DNA
ttcgatttcaatagacaattacaacaaaactctttcaatcatgataaagaaatgctccaggcccagattcaagcaacaaa

SEQ ID NO: 71124 - DNA, 80 bp, synthetic construct
  source 1..80: mol_type = other DNA
agtggcacgaggtactgggccccaggtgccatgagaacatctagttattcaggtaggtttctgtcaactactccaactag

SEQ ID NO: 71125 - DNA, 80 bp, synthetic construct
  source 1..80: mol_type = other DNA
gcaggttgagttccctcagcgcaagagtgctgccccctctagtgctgattccacctatagtgggtcttctaggtctacag

SEQ ID NO: 71126 - DNA, 80 bp, synthetic construct
  source 1..80: mol_type = other DNA
tttctactactctcggatcttctgcttcttctagttctagaatatcaccctcaactcattctagtttgatttctggcact

SEQ ID NO: 71127 - DNA, 80 bp, synthetic construct
  source 1..80: mol_type = other DNA
tcttcctcaagatcaagaaccagtgactgggtgcgtgagcaaaaccgaagtctagaaccctttatgcatggggctttgca

SEQ ID NO: 71128 - DNA, 80 bp, synthetic construct
  source 1..80: mol_type = other DNA
gactgcttatgtcactcctccatcaagcagagcttctagcaacgggacagtctcgaccgtcccaaaaggtgttttggact

SEQ ID NO: 71129 - DNA, 80 bp, synthetic construct
  source 1..80: mol_type = other DNA
tattggggtctagagttaaaaaagagtgctattagtctgcttgataccatagcaataagaacagccgaaggaacagatag

SEQ ID NO: 71130 - DNA, 80 bp, synthetic construct
  source 1..80: mol_type = other DNA
aattcttctatgttgtataatacaacttattattatgtggcggagagcaggacgagcagtatttgcccctcctatcctac

SEQ ID NO: 71131 - DNA, 80 bp, synthetic construct
  source 1..80: mol_type = other DNA
gaggagtaatgtggggatcatacatcacagggctactattatcaacagatggtggggatggtacacatgaagaactcttc

SEQ ID NO: 71132 - DNA, 80 bp, synthetic construct
  source 1..80: mol_type = other DNA
gtacctggacgaggagatatgaaggtcaagggcagaagcaaattctatttgtataaagttgtaaaaattgaacctgtacg

SEQ ID NO: 71133 - DNA, 80 bp, synthetic construct
  source 1..80: mol_type = other DNA
aacaagttgaattactcaaacgtatacatgacaacctgataactagaccagttgacgttatagatatgacgaaggatttc

SEQ ID NO: 71134 - DNA, 80 bp, synthetic construct
  source 1..80: mol_type = other DNA
aattgcttaaacgtatacatgacaatttaataactagaccagtggacattgtagatatgacgaaggaattcaatcagaaa

SEQ ID NO: 71135 - DNA, 80 bp, synthetic construct
  source 1..80: mol_type = other DNA
tcatactattggctctacaaggctggcgtgaccccagaaaccttcccaacggtgtcacagttcctctttgagctagggaa

SEQ ID NO: 71136 - DNA, 80 bp, synthetic construct
  source 1..80: mol_type = other DNA
tcaacgggtacctggataaacacaaggacgaagttgacaaagcaagtgccgacaacatgataacaaaccttctcaaacac

SEQ ID NO: 71137 - DNA, 80 bp, synthetic construct
  source 1..80: mol_type = other DNA
ctgtggccaatcccgatgatgctgcccagggatctggacacaccaagtccattcttaacctgcgaacaaacaccgagacc

SEQ ID NO: 71138 - DNA, 80 bp, synthetic construct
  source 1..80: mol_type = other DNA
tgtttccctcctgttgctgttcaaaacctacggacggaaactgcacctgtattcccatcccatcatcttgggctttagga

SEQ ID NO: 71139 - DNA, 80 bp, synthetic construct
  source 1..80: mol_type = other DNA
actgccattggagaggaagtagagagcggttgctataccagtacggatctatgggatacgaatacgaaggagtatgcact

SEQ ID NO: 71140 - DNA, 80 bp, synthetic construct
  source 1..80: mol_type = other DNA
cggatctatgggatacgaatacgaaggagtatgcactttcagatagacttgttctagttccacttgctgaagagctagag

SEQ ID NO: 71141 - DNA, 80 bp, synthetic construct
  source 1..80: mol_type = other DNA
ttcagatagacttgttctagttccacttgctgaagagctagagaagagtagtagtgggggggattgtttaataaatagta

SEQ ID NO: 71142 - DNA, 80 bp, synthetic construct
  source 1..80: mol_type = other DNA
gaaatgcaaaattgctctttcaatgtcgccaccgatgtaagagatgaagagaaaaatgtacatgcgcttgttcatagact

SEQ ID NO: 71143 - DNA, 80 bp, synthetic construct
  source 1..80: mol_type = other DNA
tgtggtggtagcagatgatgttgataatactattggtattactacttctaatacaactactggtagtactactgctatta

SEQ ID NO: 71144 - DNA, 80 bp, synthetic construct
  source 1..80: mol_type = other DNA
gaaactacaccccactgctatagtggtggaggggaatttttctgctgtacatcatcacagctgtttaatacgtgcgtgct

SEQ ID NO: 71145 - DNA, 80 bp, synthetic construct
  source 1..80: mol_type = other DNA
tcttcattattatactggatgcaccaccaacgtacaacagaaaacaatgcttcccatcagactacaactcataataagta

SEQ ID NO: 71146 - DNA, 80 bp, synthetic construct
  source 1..80: mol_type = other DNA
atgtatgcccttgtccatggcaaggagtgtcagcagcaacatctgctgctaccatcctattatcaacaataacaggagga

SEQ ID NO: 71147 - DNA, 80 bp, synthetic construct
  source 1..80: mol_type = other DNA
accagctgttctactgatgccgccacagaagggaataagagggagccaggagttgcacctctttctgatcttgttgcggc

SEQ ID NO: 71148 - DNA, 80 bp, synthetic construct
  source 1..80: mol_type = other DNA
aaaagcaaggggaaaattttattaaccatgaagactgtcattgccttgagctatattttctgtatggtccttggccgaga

SEQ ID NO: 71149 - DNA, 80 bp, synthetic construct
  source 1..80: mol_type = other DNA
gactggatcctgtggatctcctttgccatatcatgctttttgatttgtattgtttggctgggattcatcatgtgggcttg

SEQ ID NO: 71150 - DNA, 80 bp, synthetic construct
  source 1..80: mol_type = other DNA
taatcacatggtggaagcctttgatcgtgatgttttgccagacaaattttatgaggaattctgcaatactgtctatgaga

SEQ ID NO: 71151 - DNA, 80 bp, synthetic construct
  source 1..80: mol_type = other DNA
ttctgcagaacttaatattcctttcaaaggacttgcaagctgatattaaagggagagactacctctcaaccctgctcatg

SEQ ID NO: 71152 - DNA, 80 bp, synthetic construct
  source 1..80: mol_type = other DNA
ccgactgggattgaacctgatgatcatctcaaggagagatcaagccttagatatggaaatgtccttgatgtgaatgcaat

SEQ ID NO: 71153 - DNA, 80 bp, synthetic construct
  source 1..80: mol_type = other DNA
aaaaaggaaaacaggaagtaatgttatgctggctgtttgcaaacgcatgtgtttcagggcaactatggaagtaagcaaca

SEQ ID NO: 71154 - DNA, 80 bp, synthetic construct
  source 1..80: mol_type = other DNA
cacttagttggagctcagtggaacacagaggcaataaggttttggtctcaggcagatcagaatcaattatgaagctggaa

SEQ ID NO: 71155 - DNA, 80 bp, synthetic construct
  source 1..80: mol_type = other DNA
aaagcaggggagtggatatgctgcagacaaagaatctacccagagagcaatcgatggaatcaccaataaagtaaactcaa

SEQ ID NO: 71156 - DNA, 80 bp, synthetic construct
  source 1..80: mol_type = other DNA
caccactagccaaaatagcaccctgaaggaaaatagcaccctgaaggaagacccaggggaaatacaagactgtactttca

SEQ ID NO: 71157 - DNA, 80 bp, synthetic construct
  source 1..80: mol_type = other DNA
agtttgatggtaatacagtatcaggttacaagaggatgattgccactaaagactctttccagtcattcaatgtgacagag

SEQ ID NO: 71158 - DNA, 80 bp, synthetic construct
  source 1..80: mol_type = other DNA
agctcggatcagtccaaattggaacttgggacaccgatgatttacttgaaagacagcctgttaaattcacgcccgttggt

SEQ ID NO: 71159 - DNA, 80 bp, synthetic construct
  source 1..80: mol_type = other DNA
ctcaatgaaattggacaagacaagcactttgaccaatgggtgttgccaaattattccggtgccctaggactcaacatgca

SEQ ID NO: 71160 - DNA, 80 bp, synthetic construct
  source 1..80: mol_type = other DNA
cctggctcctgctgtatccccactcttccccggggagagactgctgttctttagatcatacatacctttaaaaggtggcc

SEQ ID NO: 71161 - DNA, 80 bp, synthetic construct
  source 1..80: mol_type = other DNA
atggggacccatttattgattgtcttgtgcctcaagaatggatacaacacttttatcaagagtcagccccagcacaatcc

SEQ ID NO: 71162 - DNA, 80 bp, synthetic construct
  source 1..80: mol_type = other DNA
ccaggccatcccctgactttgattttaactatttggttcccccaacagttgaatccaaaactaaacccttctcagtccca

SEQ ID NO: 71163 - DNA, 80 bp, synthetic construct
  source 1..80: mol_type = other DNA
gtgctgaccctcaatgagctgaccaactctcgctttcccgtcccggttgacgctatgtacaccagccctaacgactcaat

SEQ ID NO: 71164 - DNA, 80 bp, synthetic construct
  source 1..80: mol_type = other DNA
tgtggtccaacctcagaatgggagggcaaccatagacggtgagttgcttggcaccactcaactcatccccagtggcatct

SEQ ID NO: 71165 - DNA, 80 bp, synthetic construct
  source 1..80: mol_type = other DNA
ataccacccctgaaacctttgttcctcatttgggatcaatccaggcaaatggtgttggtagtggcaattacattggtgtt

SEQ ID NO: 71166 - DNA, 80 bp, synthetic construct
  source 1..80: mol_type = other DNA
ggtcgagcattactgaggcaacacacttggccccatcagtgttcccacccggttttggggaagtgctggtcttctttatg

SEQ ID NO: 71167 - DNA, 80 bp, synthetic construct
  source 1..80: mol_type = other DNA
aggatgcagtgctggacctcgaggcaattgaaaacaaccatatgaccaccttgctcaaagacaaagacagtctggcaacc

SEQ ID NO: 71168 - DNA, 80 bp, synthetic construct
  source 1..80: mol_type = other DNA
ctacaaggtgggatggctctacccgcggccacaaagctacagtgagcactggggatgtccacttcactccaaagctgggc

SEQ ID NO: 71169 - DNA, 80 bp, synthetic construct
  source 1..80: mol_type = other DNA
ctacaaggggggatggctctacccgcggccacaaagctacagtgagcactggggatgtccacttcactccaaagctgggc

SEQ ID NO: 71170 - DNA, 80 bp, synthetic construct
  source 1..80: mol_type = other DNA
agtattcagttcaacactgatacaaacaatgattttgaaactggccaaaacacgaaattcaccccagtcggtgttgtcca

SEQ ID NO: 71171 - DNA, 80 bp, synthetic construct
  source 1..80: mol_type = other DNA
ggatggtaatggtacccaccaaaatgaaccccaacaatgggtgctcccaagctactcaggtagaactggtcataatgtac

SEQ ID NO: 71172 - DNA, 80 bp, synthetic construct
  source 1..80: mol_type = other DNA
acctagcccccgccgtagcccccacttttccgggtgagcaacttcttttcttcaggtccactatgcccggatgcagcggg

SEQ ID NO: 71173 - DNA, 80 bp, synthetic construct
  source 1..80: mol_type = other DNA
agtgctggggctggggccatcaaccaaaaagttgaatttgaaaataacagaaaattgcaacaagcttccttccaatttag

SEQ ID NO: 71174 - DNA, 80 bp, synthetic construct
  source 1..80: mol_type = other DNA
cctcgggggcactgccaggaaggaccaatcccagggctgctgtccccgctcggggcttctccagtgtaccttctaatact

SEQ ID NO: 71175 - DNA, 80 bp, synthetic construct
  source 1..80: mol_type = other DNA
tcacattcgtaagcgaggggagtcacgggcgtaatgtgaaaagacaaaattgattatcttccctttctttagtgtctttt

SEQ ID NO: 71176 - DNA, 80 bp, synthetic construct
  source 1..80: mol_type = other DNA
aatgaaaaactgctctttcgatatcaccacaagcatgggtactaaggtgaaagactatgcacttttttataaacttgatg

SEQ ID NO: 71177 - DNA, 80 bp, synthetic construct
  source 1..80: mol_type = other DNA
gctctcgcaacagggtcagaaggactgcgctccttatataacgccctagcagttctttattgtgtccatagtaacataca

SEQ ID NO: 71178 - DNA, 80 bp, synthetic construct
  source 1..80: mol_type = other DNA
tagggagaccagtattccctaggtgtgaatatccggcagggcacaatcaggtaggcactttgcaacatctagcactcaca

SEQ ID NO: 71179 - DNA, 80 bp, synthetic construct
  source 1..80: mol_type = other DNA
ggtacacaatacacaagaggcgttggacaagataaaagagataaaagagaaaaaggaacggcacaagtccgagccaaaaa

SEQ ID NO: 71180 - DNA, 80 bp, synthetic construct
  source 1..80: mol_type = other DNA
agacaaagaataagagatagaacagaagatagtggcagtgagaatgatggggatgcagattggttggccattcttctgtc

SEQ ID NO: 71181 - DNA, 80 bp, synthetic construct
  source 1..80: mol_type = other DNA
tcatgataagtttgacaattgggtctaaaaaatattgggcaacagtgtactatggagtaccagtatggagagatgtagaa

SEQ ID NO: 71182 - DNA, 80 bp, synthetic construct
  source 1..80: mol_type = other DNA
acagatgagaaagaaaaaccaggaaatgggacagacctagaagcaagacacatgaaaaattgctcattcaatataaccac

SEQ ID NO: 71183 - DNA, 80 bp, synthetic construct
  source 1..80: mol_type = other DNA
tgaaatacatgacaaaaagaagcaagcttactctctgttttatgtagaagatgtagtgccactcaatgatgggaataata

SEQ ID NO: 71184 - DNA, 80 bp, synthetic construct
  source 1..80: mol_type = other DNA
atggaatgagatagtgacaatgaattgtacaaggccagggaataatacaggaggacaggtacaaataggacctgctatga

SEQ ID NO: 71185 - DNA, 80 bp, synthetic construct
  source 1..80: mol_type = other DNA
cattttataacatagaaaaaatagtaggagacattagacaagcacactgtaatgtctctaacgaatggagatcaatgtgg

SEQ ID NO: 71186 - DNA, 80 bp, synthetic construct
  source 1..80: mol_type = other DNA
aataaaacaaaagagaaaataaagagcctcctgggaaacaacataacattcaaggctcaggaaaagaatggaggagaccc

SEQ ID NO: 71187 - DNA, 80 bp, synthetic construct
  source 1..80: mol_type = other DNA
agaagtaacacacttaatgttcaattgtggaggagagtttatctattgtaatacttccagattattcaatgagagcatga

SEQ ID NO: 71188 - DNA, 80 bp, synthetic construct
  source 1..80: mol_type = other DNA
atacaaatgggactaatgggactattactctgccctgtagaataagacaaattgtaaatttgtggacaagagtaggaaaa

SEQ ID NO: 71189 - DNA, 80 bp, synthetic construct
  source 1..80: mol_type = other DNA
ggaatttatgcaccgccaattcggggaaatcttacctgtaactccactattactggactgattctagaacatagtggtgg

SEQ ID NO: 71190 - DNA, 80 bp, synthetic construct
  source 1..80: mol_type = other DNA
cagtaatggcacagtatatcccacaggaggaaacatggtcaatctctggagacaagagttgtataagtacaaaacagtca

SEQ ID NO: 71191 - DNA, 80 bp, synthetic construct
  source 1..80: mol_type = other DNA
gtatagaacccataggagtagcaccaggtaaagctaaaagacgcacagtgagtagagaaaaaagagcagcctttggacta

SEQ ID NO: 71192 - DNA, 80 bp, synthetic construct
  source 1..80: mol_type = other DNA
ttctcccctctcgttgcagacccttatcccaacaacaacaaccaggggaccagacaggccagaagaaacagaagaaggcg

SEQ ID NO: 71193 - DNA, 80 bp, synthetic construct
  source 1..80: mol_type = other DNA
gtaggagcagcttctcaagatctagccaatcgaggggccctcaccacaagcaatactagaaccaataatccaactgtagc

SEQ ID NO: 71194 - DNA, 80 bp, synthetic construct
  source 1..80: mol_type = other DNA
ttgggtagaagcacaagaagaagaaggggaagtaggctttccagtacgccctcaggtaccattgaggccaatgacctata

SEQ ID NO: 71195 - DNA, 80 bp, synthetic construct
  source 1..80: mol_type = other DNA
agagctgcatccggacttttacaagaactgctgacaagggactttactaatggggactttccgccagggactttccaggg

SEQ ID NO: 71196 - DNA, 80 bp, synthetic construct
  source 1..80: mol_type = other DNA
ggaagtgatatagcagggacaactagtactctgctggaacaggtgacctggatgacttctaatcctcctgttccagtagg

SEQ ID NO: 71197 - DNA, 80 bp, synthetic construct
  source 1..80: mol_type = other DNA
ctaaagggactttccgctggggactttccagagggcgtgccagagggcgggtttagggagtggtttaccctcagatgctg

SEQ ID NO: 71198 - DNA, 80 bp, synthetic construct
  source 1..80: mol_type = other DNA
tactacaagaactgctgagatcaactataagaactgctgacatcgagcttctctctgggactttccgctggggactttcc

SEQ ID NO: 71199 - DNA, 80 bp, synthetic construct
  source 1..80: mol_type = other DNA
ctctttcaatgtcaccacaagcataggaagtaaggtacaagaaactgcacttttttatagacttgatgtagaaccaatag

SEQ ID NO: 71200 - DNA, 80 bp, synthetic construct
  source 1..80: mol_type = other DNA
gtgggtcttctgtggttccatgctgttttggttactgtagctctgtagtatcatttgaagtcaggtaatgtgattcctcc

SEQ ID NO: 71201 - DNA, 80 bp, synthetic construct
  source 1..80: mol_type = other DNA
agttttgttctttttgctcactacagcaatagtatcattagtagtagcagcaataatagcaatagttgtatggtccatag

SEQ ID NO: 71202 - DNA, 80 bp, synthetic construct
  source 1..80: mol_type = other DNA
ggagaaataaaaaactgctctttcaatataagagatagggggcgaaaagaatatgcagttttttataaacttgatgtagt

SEQ ID NO: 71203 - DNA, 80 bp, synthetic construct
  source 1..80: mol_type = other DNA
tagatggcatttaagaaaacatgacctagatgcagtaagaaaaagaaattagtaactacacaaacataatatatgactta

SEQ ID NO: 71204 - DNA, 80 bp, synthetic construct
  source 1..80: mol_type = other DNA
ttgaagcagctttgcaataaaatggggaacaagtggtcaaaattgggatggcctgctgtaagggaaagaatgagacgagc

SEQ ID NO: 71205 - DNA, 80 bp, synthetic construct
  source 1..80: mol_type = other DNA
tcctcctggtgtaggagacagaaggagacaagatgctccagctgcagagggagtaggaccagcttctcaagacttagata

SEQ ID NO: 71206 - DNA, 80 bp, synthetic construct
  source 1..80: mol_type = other DNA
ccacctaaagctgggtatttccttggagtgagccataatgacttgcaaccaaaggatttgaattaaagctcagtagaaga

SEQ ID NO: 71207 - DNA, 80 bp, synthetic construct
  source 1..80: mol_type = other DNA
atttaatattagtaaagctgatgagagtagagtgtatggcaagaagataagaaatggaatgaggcacctctttaggggct

SEQ ID NO: 71208 - DNA, 80 bp, synthetic construct
  source 1..80: mol_type = other DNA
agttgccccatttgctggcaggtgtgtcagcacttctacaccaagccaagctgttcagccaataagcgtgatcaagaatc

SEQ ID NO: 71209 - DNA, 80 bp, synthetic construct
  source 1..80: mol_type = other DNA
gagcacaaggccaaaataatgcatccggagttctacaaagactgctgacaccaagttttctacaagggacttttccgcgg

SEQ ID NO: 71210 - DNA, 80 bp, synthetic construct
  source 1..80: mol_type = other DNA
catccggagttctataaagactgcagacaccaactctacaaagactgctgacaccaagatatctgcaagggactttccgc

SEQ ID NO: 71211 - DNA, 80 bp, synthetic construct
  source 1..80: mol_type = other DNA
tcaagtagaatattttaataaattgctacttgatgatatatcttttaataaaatgtcattcttaccagtagtatttcaac

SEQ ID NO: 71212 - DNA, 80 bp, synthetic construct
  source 1..80: mol_type = other DNA
aagaatatgcacttagatatttttctaagtcaagatttattactgaagaaagaaaaggtgttaatggttttcattcctcg

SEQ ID NO: 71213 - DNA, 80 bp, synthetic construct
  source 1..80: mol_type = other DNA
ccagcactagcactgtgggtagcactgccagcactagcactgtgggtagtactgcgggttacagagaagaactaaaaaac

SEQ ID NO: 71214 - DNA, 80 bp, synthetic construct
  source 1..80: mol_type = other DNA
acagcctgcactcactctggaacacaataacagtgctctggtgtgttcacaacagatataaagttgaagatacacagcag

SEQ ID NO: 71215 - DNA, 80 bp, synthetic construct
  source 1..80: mol_type = other DNA
gcaatacaaaagttgaaggaagtaatggggaacaggaaatctgcaggtgctgctaaggaagacacaagcgcaaggcagcc

SEQ ID NO: 71216 - DNA, 80 bp, synthetic construct
  source 1..80: mol_type = other DNA
acagcccatcaagatttgaaaggagggtacacagcagtatttatgcaaagagggcaaaatccaggaaggaaaggacctat

SEQ ID NO: 71217 - DNA, 80 bp, synthetic construct
  source 1..80: mol_type = other DNA
cagcccctccaatggaggaggaaatgaagggacaagagaatcagaagggggatccgaacgaactctatccgtttgcctcc

SEQ ID NO: 71218 - DNA, 80 bp, synthetic construct
  source 1..80: mol_type = other DNA
ctcaaatccctctttgggacagaccagtagttacagcaagggttgggggccatctatgtgaagttttgctggacacaggg

SEQ ID NO: 71219 - DNA, 80 bp, synthetic construct
  source 1..80: mol_type = other DNA
aacagagaaaagctaaaggagccagtgcatggtgcatactatcagcctgacaaagatttatgggttaatattcagaagca

SEQ ID NO: 71220 - DNA, 80 bp, synthetic construct
  source 1..80: mol_type = other DNA
ccaccaatcaaaaggctgaattaatggcaatattattagccttacaggattccaagaaaacagtaaacatagtaacagat

SEQ ID NO: 71221 - DNA, 80 bp, synthetic construct
  source 1..80: mol_type = other DNA
tcacaatatgcactgggcatcatctcctcccaacctacacagagtgaatcccctatagttcagcagataatagaggaact

SEQ ID NO: 71222 - DNA, 80 bp, synthetic construct
  source 1..80: mol_type = other DNA
agtagagagagcttggatagtagtgaccacctattggggattgatgccaggggaaagagatgaacatttgggacatgggg

SEQ ID NO: 71223 - DNA, 80 bp, synthetic construct
  source 1..80: mol_type = other DNA
gtgtccagaaactaacagaagatagatggaacaggcacctgaagatcagggaccacctagggaaccatttaatgaatagg

SEQ ID NO: 71224 - DNA, 80 bp, synthetic construct
  source 1..80: mol_type = other DNA
cactagagaccctagaagatctaaaagcagaagcagtaagacatttccctaggccttggctacacgcgttgggacaatac

SEQ ID NO: 71225 - DNA, 80 bp, synthetic construct
  source 1..80: mol_type = other DNA
atttatgagacttatggggacacttgggtaggagttatggcaattatgagaatattacaacaactgctatttacccattt

SEQ ID NO: 71226 - DNA, 80 bp, synthetic construct
  source 1..80: mol_type = other DNA
caatagccccaaaaggggtttccccatacccagagtatctaatcagttggttgactcgcttagatattctggacactatt

SEQ ID NO: 71227 - DNA, 80 bp, synthetic construct
  source 1..80: mol_type = other DNA
tcgaggcatgcctgccaggggtctgcacatcacacccttcaatctgaatgacccctggatgtctgatatcacaagctctt

SEQ ID NO: 71228 - DNA, 80 bp, synthetic construct
  source 1..80: mol_type = other DNA
ggaatatgttttctaatgagccctttcaattcttggacacattcatccatggccaagtgtcgcctaggatccactgtgcg

SEQ ID NO: 71229 - DNA, 80 bp, synthetic construct
  source 1..80: mol_type = other DNA
cagcagttagaaccagctctcaagacagggtcaaaagacctgcagtcactctggaacacaatagcagtgctctggtgtgt

SEQ ID NO: 71230 - DNA, 80 bp, synthetic construct
  source 1..80: mol_type = other DNA
tcaccacagatataaagttgaagatacacagcgggcaatacaaaaattaaaggaagtcatgagggacaggaagtctgcag

SEQ ID NO: 71231 - DNA, 80 bp, synthetic construct
  source 1..80: mol_type = other DNA
ttaatactatgctaaatgccataggaggacatcaaggggctttacaaatgctaaaggaagtgatcaatgaggaagcagca

SEQ ID NO: 71232 - DNA, 80 bp, synthetic construct
  source 1..80: mol_type = other DNA
gagtgggatagaactcacccaccaccgatagggccattgccaccagggcagataagggaaccaacaggaagtgacattgc

SEQ ID NO: 71233 - DNA, 80 bp, synthetic construct
  source 1..80: mol_type = other DNA
ggggacaactagcaccccgcaagagcaaattcactggactaccaggcccaaccaacctatcccagtaggagacatctata

SEQ ID NO: 71234 - DNA, 80 bp, synthetic construct
  source 1..80: mol_type = other DNA
actaggaaataaatgtgagaatgctagtctcctgcatccagcatgtgatcatggctatgaagacccacataaggaaatac

SEQ ID NO: 71235 - DNA, 80 bp, synthetic construct
  source 1..80: mol_type = other DNA
cagccccgccgatggaggagggcatgcagggacaggagaatcaggaacagaaagagggtccgaccgagctctacccgttt

SEQ ID NO: 71236 - DNA, 80 bp, synthetic construct
  source 1..80: mol_type = other DNA
tgatgtggaagtttgatagatctctagccgacacccatgttgctatggtaaccaacccagagctcttcctgaagaactaa

SEQ ID NO: 71237 - DNA, 80 bp, synthetic construct
  source 1..80: mol_type = other DNA
aagctgttgacttgaagattgctgacactgcgggactttccagcagagactgctgacgctgcggggactttccagtgtgg

SEQ ID NO: 71238 - DNA, 80 bp, synthetic construct
  source 1..80: mol_type = other DNA
tacgcagagtgaatcccctatagttcagcagataatagaggaactaacaaacaaggaacaggtgtatcttacatgggttc

SEQ ID NO: 71239 - DNA, 80 bp, synthetic construct
  source 1..80: mol_type = other DNA
agtagggatggcatatgtagtagtaaccacatattggggattgatgccaggggaaagagatgaacacttgggacatgggg

SEQ ID NO: 71240 - DNA, 80 bp, synthetic construct
  source 1..80: mol_type = other DNA
ttcacctgttttacaaagtcagcaatcaggagagccatcttaggggaaaaagtactgccaaagtgtgaataccctgcagg

SEQ ID NO: 71241 - DNA, 80 bp, synthetic construct
  source 1..80: mol_type = other DNA
acatagccaggtagggactttacaactactagctctaagagtagtagtaaaaacaaaaggaagtaagcctcccctaccca

SEQ ID NO: 71242 - DNA, 80 bp, synthetic construct
  source 1..80: mol_type = other DNA
gtgtccagaaactaacagaagatagatggaacaggcacctgaggatcagggaccagctaaagagccattcaatgaatgga

SEQ ID NO: 71243 - DNA, 80 bp, synthetic construct
  source 1..80: mol_type = other DNA
gcagcatagggatctgataacattaataattattagtgctttgctgcttataaatataattctatggatgtttattctta

SEQ ID NO: 71244 - DNA, 80 bp, synthetic construct
  source 1..80: mol_type = other DNA
aacaatgtatagaacaaaagaaacaaagtagaagagaaagagaaataattgaaaggttaagaagaataagaaaaattcag

SEQ ID NO: 71245 - DNA, 80 bp, synthetic construct
  source 1..80: mol_type = other DNA
ggcatcacaagcctgtgttcccacagatcccactccatatgaatatccactaacaaatgtgacagataacttcaatgtat

SEQ ID NO: 71246 - DNA, 80 bp, synthetic construct
  source 1..80: mol_type = other DNA
tgtacaaacgtaaacggaacaaacgcaaacggaaccaggaaagagcaagagcaacttatgaaacagtgtgagtttaatgt

SEQ ID NO: 71247 - DNA, 80 bp, synthetic construct
  source 1..80: mol_type = other DNA
gaccacagttctcaaggacaaaaaggagaaaaaacaggctctattctatgtatcagatttgagtaaactagaaggaaaca

SEQ ID NO: 71248 - DNA, 80 bp, synthetic construct
  source 1..80: mol_type = other DNA
ttacttgcacgcttggcattaggccaacagtaagtactcaactagtattaaatgggacactctctaaagaaaaaataagg

SEQ ID NO: 71249 - DNA, 80 bp, synthetic construct
  source 1..80: mol_type = other DNA
attatgggaaaaaatatttcagacagtgcaaaaaatatcatagtgaccctgaattctactgtaaacatgacctgtgagag

SEQ ID NO: 71250 - DNA, 80 bp, synthetic construct
  source 1..80: mol_type = other DNA
accatggaatcagacagtacaagagataagaataggtccaatggcctggtacagcatgggcataatcagagaggaaaaat

SEQ ID NO: 71251 - DNA, 80 bp, synthetic construct
  source 1..80: mol_type = other DNA
cctcaaacctctcaaggttagcctattgcaagtataatatcactgactgggaaaaagccttaaaacaagtagctgaaagg

SEQ ID NO: 71252 - DNA, 80 bp, synthetic construct
  source 1..80: mol_type = other DNA
tacttagaacttgtaaattatacagatgggaatgctagcatgacattcaaggaaacctctggtggagatccagaaataac

SEQ ID NO: 71253 - DNA, 80 bp, synthetic construct
  source 1..80: mol_type = other DNA
ccaattgcattttaactgtcatggagagttcttctattgtaacacatctgggatgtttaattatactttctcatgtaaag

SEQ ID NO: 71254 - DNA, 80 bp, synthetic construct
  source 1..80: mol_type = other DNA
gaaccaactgcactactaaccaaagtagtaatgaaactagtataccttgcagaataaaacagatagtaaggtcatggatg

SEQ ID NO: 71255 - DNA, 80 bp, synthetic construct
  source 1..80: mol_type = other DNA
aggggagagtcgggactctatgcacctcccatcaaaggtaatctaacatgtagatcacgaattactggaatgattctaca

SEQ ID NO: 71256 - DNA, 80 bp, synthetic construct
  source 1..80: mol_type = other DNA
aatagatatgccatggaataaaagcgaagcaaacgttacatttagaccagtagggggagatatgaaagacatatggagaa

SEQ ID NO: 71257 - DNA, 80 bp, synthetic construct
  source 1..80: mol_type = other DNA
ctgaattgttcaaatacaaagtagtggaaataaaaccttttagtgtggcacctacaaaaattgcaaggccagtcataggc

SEQ ID NO: 71258 - DNA, 80 bp, synthetic construct
  source 1..80: mol_type = other DNA
actgacactcatagagaaaaaagagcagtaggattgggaatgctattcttgggggttctaagtgcagcaggtagcactat

SEQ ID NO: 71259 - DNA, 80 bp, synthetic construct
  source 1..80: mol_type = other DNA
gggcgcaacggcaacagcgttgacggtacagacccacactttgataaagggtatagtgcaacagcaggacaacctgctaa

SEQ ID NO: 71260 - DNA, 80 bp, synthetic construct
  source 1..80: mol_type = other DNA
gagcaatacaggcccagcagcaattgctgagactatctgtatggggtatcagacaactccgagctcgcctgctagcctta

SEQ ID NO: 71261 - DNA, 80 bp, synthetic construct
  source 1..80: mol_type = other DNA
gaaaccttaatacagaatcagcaactcctaaacctatggggttgtaagggaaggctaatctgttacacatcagtaaaatg

SEQ ID NO: 71262 - DNA, 80 bp, synthetic construct
  source 1..80: mol_type = other DNA
gaacgatacatggacaaaaactggcactaatctaagtacaatttgggaaaacctaacatggcagcaatgggatcagcaga

SEQ ID NO: 71263 - DNA, 80 bp, synthetic construct
  source 1..80: mol_type = other DNA
tagacaacataagctacgttatatatgatgaaatacaaaaagcacaagtacagcaggaacaaaatgagaagaagttgctg

SEQ ID NO: 71264 - DNA, 80 bp, synthetic construct
  source 1..80: mol_type = other DNA
cccctctcatttcagatccccatccatcaccaatcggaagcagaagcgccaggaggaacaggagaaggaggtggagaagg

SEQ ID NO: 71265 - DNA, 80 bp, synthetic construct
  source 1..80: mol_type = other DNA
agacaggcccaaattgacacgcttgccacaaggattcttgctacagttgtacacggacctcaggacaataatcttgtgga

SEQ ID NO: 71266 - DNA, 80 bp, synthetic construct
  source 1..80: mol_type = other DNA
cagaagataattgatgcttgcagaatttgtacagctgtagtacaatactggctacaagaattgcagagtagtgctacaaa

SEQ ID NO: 71267 - DNA, 80 bp, synthetic construct
  source 1..80: mol_type = other DNA
cctattagatacccttgcagtggcagttgccaattggactgacagcatattcttagggatacaaaggataggaagaggaa

SEQ ID NO: 71268 - DNA, 80 bp, synthetic construct
  source 1..80: mol_type = other DNA
ttcttaacattccaaggagaattagacaaggcttagaacagattttattgtaacatggaaaatgcattgagaaaaagcag

SEQ ID NO: 71269 - DNA, 80 bp, synthetic construct
  source 1..80: mol_type = other DNA
atttgaaggatggccagccataagagaaagaatgagaaaaacttcccctgagcctgaaccatgtgcacctggagtaggac

SEQ ID NO: 71270 - DNA, 80 bp, synthetic construct
  source 1..80: mol_type = other DNA
ctcctgcatccagcttgcaaccatggctttggggatccacacggagaaatactgaaatggcagtttgatagctcactagg

SEQ ID NO: 71271 - DNA, 80 bp, synthetic construct
  source 1..80: mol_type = other DNA
ccgcacccatgttgctatgataacccacccagatctcttccacaaggactaaaactgctgacctaaagaagatggctgcc

SEQ ID NO: 71272 - DNA, 80 bp, synthetic construct
  source 1..80: mol_type = other DNA
gctgtgggactttccaacagagactgctgacactgcggggactttccagggtgggagggatatgggcggttcggggagtg

SEQ ID NO: 71273 - DNA, 80 bp, synthetic construct
  source 1..80: mol_type = other DNA
tctgtgaaaggagcccaagatagccgatgggagatggtcttgagaactgacaatggtcttcccaggttgtgttctgaatt

SEQ ID NO: 71274 - DNA, 80 bp, synthetic construct
  source 1..80: mol_type = other DNA
acaacacaccaattcagcgatgagtgtctcaaaggagataaaatcctttctgtggacacagtctctgaggagggagttgt

SEQ ID NO: 71275 - DNA, 80 bp, synthetic construct
  source 1..80: mol_type = other DNA
tggggaatctaagttcacagcaacttgatcaaagaagggctcttctaaacatgattggcatgactggtggaaacagaggg

SEQ ID NO: 71276 - DNA, 80 bp, synthetic construct
  source 1..80: mol_type = other DNA
ccaattcatctgatctcgataggctggcccagagtcatccgatattgaatatgattgatactaagaaaagctcactcaac

SEQ ID NO: 71277 - DNA, 80 bp, synthetic construct
  source 1..80: mol_type = other DNA
tatccaacaaccagacagctttcataacaatgagtgcttccaaggaagtgaaatcattcctgtggactcagtctctgaga

SEQ ID NO: 71278 - DNA, 80 bp, synthetic construct
  source 1..80: mol_type = other DNA
tctgcgcttctcactactgctgatgccaaaaccaggtcctcatcaataattccgactgctatgagtagcttctttttgtc

SEQ ID NO: 71279 - DNA, 80 bp, synthetic construct
  source 1..80: mol_type = other DNA
cctccttcagctggtacactgatatcagattggccactatagacgcacccttctctgacatcttcttcatcatagcctca

SEQ ID NO: 71280 - DNA, 80 bp, synthetic construct
  source 1..80: mol_type = other DNA
aatacatacagttaagacagatatagtcgctagtgtgtccataagttcataaacacaatcacgactattaagcaacgctg

SEQ ID NO: 71281 - DNA, 80 bp, synthetic construct
  source 1..80: mol_type = other DNA
ggtgcaatcaaatggatttctcctttaataaagcagtaaagacaaacacaaatttagattcattagtacccatgtcaatg

SEQ ID NO: 71282 - DNA, 80 bp, synthetic construct
  source 1..80: mol_type = other DNA
aattaaagacaggagaaattcaagaagaaccacacaagtaggacacactaaaattgaagcagaatccgattcggatgatt

SEQ ID NO: 71283 - DNA, 80 bp, synthetic construct
  source 1..80: mol_type = other DNA
ccattgaaaagttgttcaatgcaatgaacccagtacaagtgaatgatcagaaagtaattagttttcattggcagatagac

SEQ ID NO: 71284 - DNA, 80 bp, synthetic construct
  source 1..80: mol_type = other DNA
attgcactatatacgcatatcaagatgatattaaaaactgaagctcttccattcacatttacgctacatcagttcaattc

SEQ ID NO: 71285 - DNA, 80 bp, synthetic construct
  source 1..80: mol_type = other DNA
tataattaagggaattgtgaatcaatggtgcaacgtgagtgaattggatgatttacctctatgtactgaacagaccgaca

SEQ ID NO: 71286 - DNA, 80 bp, synthetic construct
  source 1..80: mol_type = other DNA
cattggttagattagaagaagagggtaaactagctgaagaatatgagcttctgatctcagattctgaagatgacgattaa

SEQ ID NO: 71287 - DNA, 80 bp, synthetic construct
  source 1..80: mol_type = other DNA
tacttaaataagctaaactcagtttttgccatcacaagaccttctggactagagtagcgcctagccagcaaaaactgtga

SEQ ID NO: 71288 - DNA, 80 bp, synthetic construct
  source 1..80: mol_type = other DNA
tgaatgctgtcaacttactgaattaacattctgtcatggatgctcattagctcatgtatgtcagtggtgtatacaaaaca

SEQ ID NO: 71289 - DNA, 80 bp, synthetic construct
  source 1..80: mol_type = other DNA
ttacaatgtattattaatttgtataatatgctctttccaattaactcaagtatcataaataaattcaggaagacagttaa

SEQ ID NO: 71290 - DNA, 80 bp, synthetic construct
  source 1..80: mol_type = other DNA
ctgaatagagaactactgagaataggagcaaattcagtgtggactccagtttctacgaataaaattaaggggtggtgtgt

SEQ ID NO: 71291 - DNA, 80 bp, synthetic construct
  source 1..80: mol_type = other DNA
tcccaactcaacttgcattatgacctacttaataataaagataaaatactcgctgcgttatcaacatcatcactaaagca

SEQ ID NO: 71292 - DNA, 80 bp, synthetic construct
  source 1..80: mol_type = other DNA
attcgaaacgcacgacttaaatctgggaagaataaaagctgacgtttttgaactcggacgtcattgcaaaccaaattata

SEQ ID NO: 71293 - DNA, 80 bp, synthetic construct
  source 1..80: mol_type = other DNA
atcagatctaacaaatagtatgtcagacgcagcatcttcagtcagtagatcagcttcagttagatcaattagcagtaatg

SEQ ID NO: 71294 - DNA, 80 bp, synthetic construct
  source 1..80: mol_type = other DNA
cagcatcgcggattagtacagccattcaagctagtgatgatctgagaacagtagcggacgcttcaacgcaaatatctagc

SEQ ID NO: 71295 - DNA, 80 bp, synthetic construct
  source 1..80: mol_type = other DNA
gttagcagaagtttgcggttacgtgagttcactacacagactgacaatttaagttttgatgatatctctgctgcagtact

SEQ ID NO: 71296 - DNA, 80 bp, synthetic construct
  source 1..80: mol_type = other DNA
gcctgcgtactcgttgaaccaagcgtacaaagcacacgccgggaatacgtccttgacggacagacagtacaattacaagt

SEQ ID NO: 71297 - DNA, 80 bp, synthetic construct
  source 1..80: mol_type = other DNA
ctgttcttcgaaaaggacataggcaaactaaaagataactccatattgtatattgatattagaaccgatcggggtaacgt

SEQ ID NO: 71298 - DNA, 80 bp, synthetic construct
  source 1..80: mol_type = other DNA
tgattggaaggaatggagaaaaatagtcgaactacaaactatcaataatctcgatcttgcgtataaatatttagctaccg

SEQ ID NO: 71299 - DNA, 80 bp, synthetic construct
  source 1..80: mol_type = other DNA
acttcgatacaactaatgctatagtaacttcatatgatgggtgcttgggtatgtttggactatctatatctttagcctca

SEQ ID NO: 71300 - DNA, 80 bp, synthetic construct
  source 1..80: mol_type = other DNA
agagacaaattatttcctttattagtcaaaaaacataaacgcgtgataaatgttggacctagaaatgagtcaatgtttac

SEQ ID NO: 71301 - DNA, 80 bp, synthetic construct
  source 1..80: mol_type = other DNA
acgtaaggcaatattctgaatttctatttgaaacatgggacccgctagatactccatattcatccatacaccataaagaa

SEQ ID NO: 71302 - DNA, 80 bp, synthetic construct
  source 1..80: mol_type = other DNA
atggtttgtacaacattgtacactgtttgcgcaattctcttcattcttttcatttacatattattatttagaaaaatgtt

SEQ ID NO: 71303 - DNA, 80 bp, synthetic construct
  source 1..80: mol_type = other DNA
acattaatacaattgtacaatcaatgactcccagacatcgggcaatttatccagaagggtggatgttgaggtatgcgtaa

SEQ ID NO: 71304 - DNA, 80 bp, synthetic construct
  source 1..80: mol_type = other DNA
gaaaaactgctctttcaatatcacctcaagcataagaaatgcagtgcgaaaagaatatgcaatttttaatagccttgatg

SEQ ID NO: 71305 - DNA, 80 bp, synthetic construct
  source 1..80: mol_type = other DNA
ccgccagttacatccggagtactacaaagactgctgacaccgagttttctacaggggactttccgctggggactttccag

SEQ ID NO: 71306 - DNA, 80 bp, synthetic construct
  source 1..80: mol_type = other DNA
caggaatgacgaaatagagctattaacttgcttgatacaatatcaatacttacagctgcggggacagatacggttacaga

SEQ ID NO: 71307 - DNA, 80 bp, synthetic construct
  source 1..80: mol_type = other DNA
aattgcaatggcactaattggaatagtagtagtgaatgggaagagatgaagaaagaaatgacaaactgctctttcaatat

SEQ ID NO: 71308 - DNA, 80 bp, synthetic construct
  source 1..80: mol_type = other DNA
cgtgttacaggcggggtttttcttgttgacaagaatcctcacaataccacagagtctagactcgtggtggacttctctca

SEQ ID NO: 71309 - DNA, 80 bp, synthetic construct
  source 1..80: mol_type = other DNA
aaattaagcaatgttttcgaaaactgcctgtaaatagacctattgattggaaagtatgtcagagaattgtgggtcttttg

SEQ ID NO: 71310 - DNA, 80 bp, synthetic construct
  source 1..80: mol_type = other DNA
tattaaagtcaggagctaaaaaatagtactgttagtttgcttaatgctacagctatagcagttactaaaaggacagataa

SEQ ID NO: 71311 - DNA, 80 bp, synthetic construct
  source 1..80: mol_type = other DNA
tggtaatgtcaatattagcagcagggaaccgataaacaactgctcttttaataccaccacagaggtggaagataagatgc

SEQ ID NO: 71312 - DNA, 80 bp, synthetic construct
  source 1..80: mol_type = other DNA
atggtcaacaacaagtcaatgagaagtataaaaacacattgtaaccttagtatagaaaattgggagaccactttaaaacg

SEQ ID NO: 71313 - DNA, 80 bp, synthetic construct
  source 1..80: mol_type = other DNA
tcgtgtgggcactccgggggggttgaaccaaattcgcaggtccccaacctccaatcacgtcagcaacctcctgttcctcc

SEQ ID NO: 71314 - DNA, 80 bp, synthetic construct
  source 1..80: mol_type = other DNA
agtttactagtgccatttgttcagtggttcgtcgggctttcccccattgtatggcttaatacctctcactgtttggttgt

SEQ ID NO: 71315 - DNA, 80 bp, synthetic construct
  source 1..80: mol_type = other DNA
atttttctactgtaatacaacaaaactgtttaatagtacttggggtggtaataacacagatgttagtcctaatggaacta

SEQ ID NO: 71316 - DNA, 80 bp, synthetic construct
  source 1..80: mol_type = other DNA
caatacatcaggactgtttaactagtacatggaatactagtacatggagtaatagtacatgggggaatgatggtaataca

SEQ ID NO: 71317 - DNA, 80 bp, synthetic construct
  source 1..80: mol_type = other DNA
aatagtacttggtgggggaatgagactaattggaataatagtagtcctgggaacggaactatcacactcccatgcagaat

SEQ ID NO: 71318 - DNA, 80 bp, synthetic construct
  source 1..80: mol_type = other DNA
ctgtttaatagtacttggactaatagtaatggtacttggaatagtaccatagaagggaatgatacaatcatactcccatg

SEQ ID NO: 71319 - DNA, 80 bp, synthetic construct
  source 1..80: mol_type = other DNA
tctgtgatgctgtatatggaaatcaaagactgaagaggaagtacttttactgtggtcatatgtcacagtgtcctattggg

SEQ ID NO: 71320 - DNA, 80 bp, synthetic construct
  source 1..80: mol_type = other DNA
tattgcagaatctgattttcctctcaaaagacttgcaagctgatataaagggaagggactatctttcaaccctgttgaca

SEQ ID NO: 71321 - DNA, 80 bp, synthetic construct
  source 1..80: mol_type = other DNA
agagatgctgtctgacatgattcggagaaggaaccaaattctaaacaggggtggtgatgagaatccacgtggccctgtga

SEQ ID NO: 71322 - DNA, 80 bp, synthetic construct
  source 1..80: mol_type = other DNA
cgcacagtggatcctaggcgattcttgatcacgcttattggttgaccaatttaacttggcattaaagtgttgacacactc

SEQ ID NO: 71323 - DNA, 80 bp, synthetic construct
  source 1..80: mol_type = other DNA
gtggcactaactatctctccaaatgtcaatttgaccatgtgaacacccttcacttccttgtgagaagcaaaacacatctc

SEQ ID NO: 71324 - DNA, 80 bp, synthetic construct
  source 1..80: mol_type = other DNA
gccaacacatggggcaacttatcagcttctttcaggaaattcctgtttttctacaggaagccttgaacatagctttggtg

SEQ ID NO: 71325 - DNA, 80 bp, synthetic construct
  source 1..80: mol_type = other DNA
cgggctggcgggaaccaaaattcccgaggtcgccaaccctccaattcacgccacggaaccctccctggtcctccaacgtt

SEQ ID NO: 71326 - DNA, 80 bp, synthetic construct
  source 1..80: mol_type = other DNA
tttcccccattgtctggcttactctcccggactatgagggtatgttgcccgtttgtcctccaattccaggatcttcaacc

SEQ ID NO: 71327 - DNA, 80 bp, synthetic construct
  source 1..80: mol_type = other DNA
cagtttactagtgccatttgttcagtggttcgtagggctttcccccactgtatggcttactttcccccactgtctggctt

SEQ ID NO: 71328 - DNA, 80 bp, synthetic construct
  source 1..80: mol_type = other DNA
gagtgggcctcagcccgtttctcctggctcagtttactagtgccatttgttcagtggttcgtagggctttcccccactgt

SEQ ID NO: 71329 - DNA, 80 bp, synthetic construct
  source 1..80: mol_type = other DNA
aatactatagcaatagcagtagcggggtaaacaaataaggttataaaagtagtacaaaaagctaaaaaagccattctcca

SEQ ID NO: 71330 - DNA, 80 bp, synthetic construct
  source 1..80: mol_type = other DNA
tgacatattcatgttcacattatactacagaatcaaaattcaagctgattctggagaaagttaaggttgaatatcagaaa

SEQ ID NO: 71331 - DNA, 80 bp, synthetic construct
  source 1..80: mol_type = other DNA
ttgatacagactttatttcctgacaagtttgaagatttcttggatcgaacccaactgcatccagagttcagagatctaac

SEQ ID NO: 71332 - DNA, 80 bp, synthetic construct
  source 1..80: mol_type = other DNA
aataactgatgagtttgaacggacaaaatttaagcacgagcttacacagaatgttacaactagtgaaaagatgctattga

SEQ ID NO: 71333 - DNA, 80 bp, synthetic construct
  source 1..80: mol_type = other DNA
aataactgatgaattcgagcgaacaaaatttaaacatgaactaactcagaatgttaccactagtgaaaaattgctgttta

SEQ ID NO: 71334 - DNA, 80 bp, synthetic construct
  source 1..80: mol_type = other DNA
agcaaaagcaggagttcaaaatgaatccaaatcagaaaataataaccattggatacgtttgcatgacgcttggggcaatc

SEQ ID NO: 71335 - DNA, 80 bp, synthetic construct
  source 1..80: mol_type = other DNA
agcttaacactgcaattagggaacataatttctatatgggttagccactcaattcaaactggggaccaaaaacgcccaga

SEQ ID NO: 71336 - DNA, 80 bp, synthetic construct
  source 1..80: mol_type = other DNA
ccaaggacatccttgagaaagtgcacaatggaaagttatgcagattaagcggaatccctccgttggtactgggggactgc

SEQ ID NO: 71337 - DNA, 80 bp, synthetic construct
  source 1..80: mol_type = other DNA
tatagtggaaaaggaaaatccggcgcacggtctgtgctatccaggcaatttcaatgattatgaggaattgaaacatctcc

SEQ ID NO: 71338 - DNA, 80 bp, synthetic construct
  source 1..80: mol_type = other DNA
gcgtatggcggtccttcgttcttcaggaatatggtttggcttacaaagaaagaatcaaactatccagttgcccaaagatc

SEQ ID NO: 71339 - DNA, 80 bp, synthetic construct
  source 1..80: mol_type = other DNA
agcaaaagcaggggaaaatgattgcaatcataatacttgcaatagtggtctctaccagcaagtcagacaggatctgcatt

SEQ ID NO: 71340 - DNA, 80 bp, synthetic construct
  source 1..80: mol_type = other DNA
tgttccacaggcacaaacaagaggattgtttggagcaatagctgggtttatagaaggaggatggacaggtatggtagacg

SEQ ID NO: 71341 - DNA, 80 bp, synthetic construct
  source 1..80: mol_type = other DNA
gatggtacggataccaccatgaaaattcacaggggtctggttatgcagcagataaagaaagcacccagaaagctatagac

SEQ ID NO: 71342 - DNA, 80 bp, synthetic construct
  source 1..80: mol_type = other DNA
atgaacacacaatttgaggcagtagaacatgagttctcaagtctcgaaaggagaatagacaatctaaacaaaagaatgga

SEQ ID NO: 71343 - DNA, 80 bp, synthetic construct
  source 1..80: mol_type = other DNA
agatggatttttagacgtgtggacatacaatgctgaacttctggttctactggaaaatgagaggactttggacatgcatg

SEQ ID NO: 71344 - DNA, 80 bp, synthetic construct
  source 1..80: mol_type = other DNA
atgctaatgtaaagaatctacatgaaaaggtgaaatcacaattaaaggataatgcaaaggatttgggtaatggatgtttt

SEQ ID NO: 71345 - DNA, 80 bp, synthetic construct
  source 1..80: mol_type = other DNA
gaattttggcacaaatgcgacaatgaatgcatcaactcagttaagaatggcacatatgactacccaaagtaccaggaaga

SEQ ID NO: 71346 - DNA, 80 bp, synthetic construct
  source 1..80: mol_type = other DNA
actcagtggagctcctagaaaaccagaaggagaatagattctgcagagtcttgaataaagcgccgctggatctaatggac

SEQ ID NO: 71347 - DNA, 80 bp, synthetic construct
  source 1..80: mol_type = other DNA
gagcagacttaataggcaggaaataaaatcagtgatgctggaaaatctgggagtataccaaatccttgctatttatagta

SEQ ID NO: 71348 - DNA, 80 bp, synthetic construct
  source 1..80: mol_type = other DNA
cggtatcgagcagtctggttttggtgggactgatcattgccatgggtctttggatgtgctctaatggctcaatgcaatgc

SEQ ID NO: 71349 - DNA, 80 bp, synthetic construct
  source 1..80: mol_type = other DNA
tgggtctttggatgtgctctaatggctcaatgcaatgcaagatatgtatataactagaaaaaaacacccttgtttctact

SEQ ID NO: 71350 - DNA, 80 bp, synthetic construct
  source 1..80: mol_type = other DNA
tgcaccactgagggttggatccttggaaacccccgatgtgataacttactcggcgatcaaagttggtcatacatagtaga

SEQ ID NO: 71351 - DNA, 80 bp, synthetic construct
  source 1..80: mol_type = other DNA
gaggcctgatgcccaaaatgggatatgttacccaggggtattgaaagagacggaagagctgaaagcactcattgggtcta

SEQ ID NO: 71352 - DNA, 80 bp, synthetic construct
  source 1..80: mol_type = other DNA
tagatagcatacaaagatttgaaatgtttcccaagagcacgtggaccggggtagatactaatagcggagttacgagcgct

SEQ ID NO: 71353 - DNA, 80 bp, synthetic construct
  source 1..80: mol_type = other DNA
tgctcctacaatggtggatcttccttctacaggaatctgttgtggataataaaaataagatctgatccgtactcattgat

SEQ ID NO: 71354 - DNA, 80 bp, synthetic construct
  source 1..80: mol_type = other DNA
caagggaacatataccaatacaggctctcagccaatcttatatttctggggtgtgcaccatcctccagatgaagttgagc

SEQ ID NO: 71355 - DNA, 80 bp, synthetic construct
  source 1..80: mol_type = other DNA
aagctaacctgtatggaattggtacccggtatgttaggatgggaactgaaagtatgaattttgtcaaaggtcctgaaata

SEQ ID NO: 71356 - DNA, 80 bp, synthetic construct
  source 1..80: mol_type = other DNA
gcagacagaccacctgcgaatgggcaacgaggaagaattgattattattggtctgtgttgaagccaggagaaaccttgaa

SEQ ID NO: 71357 - DNA, 80 bp, synthetic construct
  source 1..80: mol_type = other DNA
tgtggaatccaatgggaatttagtagctccttggtatgcttacaagttcactagttccagaaataagggagctattttca

SEQ ID NO: 71358 - DNA, 80 bp, synthetic construct
  source 1..80: mol_type = other DNA
aatcagaccttccaattgagaattgtgatgctgtttgtcaaactttagctggagcaataaatacaaacaaaaccttccaa

SEQ ID NO: 71359 - DNA, 80 bp, synthetic construct
  source 1..80: mol_type = other DNA
aatattagtccagtctggattggagaatgccccaaatatgttaaaagtaaaagcctaaaactagcaactggtctgagaaa

SEQ ID NO: 71360 - DNA, 80 bp, synthetic construct
  source 1..80: mol_type = other DNA
caagtagagagttcaacaacttgactaaaggactctgcactataaattcatggcacatatatgggaaagacaatgcagtt

SEQ ID NO: 71361 - DNA, 80 bp, synthetic construct
  source 1..80: mol_type = other DNA
gtgacgaaccggagctgagatcgcttgcaagctggattcaaagtgagttcaataaggcgtgtgaactgactgattcaagc

SEQ ID NO: 71362 - DNA, 80 bp, synthetic construct
  source 1..80: mol_type = other DNA
ccagtgagcaacagagtctataccagaacactgatgcatacgtctcagttggatcatcaaagtacaaccgaagattcaat

SEQ ID NO: 71363 - DNA, 80 bp, synthetic construct
  source 1..80: mol_type = other DNA
tcctgatgaaggcacagctggagtggaatctgctgtcctgagaggattcctcattttgggcaaagaagacaagagatatg

SEQ ID NO: 71364 - DNA, 80 bp, synthetic construct
  source 1..80: mol_type = other DNA
cggagataggaactcctagcatcaacgagacaaactccacaaccacgataatcaactataatacccaaaacaatttcaca

SEQ ID NO: 71365 - DNA, 80 bp, synthetic construct
  source 1..80: mol_type = other DNA
aatgtgaccaatattgtgttaattaaagaagaagacaaaatgttcacgaacctttcaaaacctttatgtgaagtaaattc

SEQ ID NO: 71366 - DNA, 80 bp, synthetic construct
  source 1..80: mol_type = other DNA
cttaggtttgaacatcggactccattataaggtaggtgatacaccagatgcgaatactccgaatgtgaatggcacaaact

SEQ ID NO: 71367 - DNA, 80 bp, synthetic construct
  source 1..80: mol_type = other DNA
acaggagggagcccagatcctggggtgaagggatttgcattcctagacggagagaactcatggctcggaaggacgattag

SEQ ID NO: 71368 - DNA, 80 bp, synthetic construct
  source 1..80: mol_type = other DNA
caaagactccagatcaggctatgaaatgttaaaagtcccaaatgcagaaaccgacacccaatcgggaccaatctcacacc

SEQ ID NO: 71369 - DNA, 80 bp, synthetic construct
  source 1..80: mol_type = other DNA
gtcctggcatgatggtgctgaaatcatctactttaagtaggaatgatttagaaaaaaacacccttgtttctactaatact

SEQ ID NO: 71370 - DNA, 80 bp, synthetic construct
  source 1..80: mol_type = other DNA
caaacatgaacgataccaactcaacaacaacaataataaacaatcatactcagaacaatttcacaaacatcactaacatt

SEQ ID NO: 71371 - DNA, 80 bp, synthetic construct
  source 1..80: mol_type = other DNA
atagtgaataagaacgagaagggaacatttctaaacctgaccaagcccctgtgtgaagtaagctcatggcatattctgtc

SEQ ID NO: 71372 - DNA, 80 bp, synthetic construct
  source 1..80: mol_type = other DNA
gaaagacaacgcaataaggataggtgaggatgctcatatactagtcacaagggagccctacttgtcctgtgacccacaag

SEQ ID NO: 71373 - DNA, 80 bp, synthetic construct
  source 1..80: mol_type = other DNA
gctgcaggatgtttgctctgagccaaggcacaacactcagagggcgacatgcaaatgggaccatacatgataggagccca

SEQ ID NO: 71374 - DNA, 80 bp, synthetic construct
  source 1..80: mol_type = other DNA
ttcagagctctcataagctgggaaatgggtcaggcacccagtccatataatgttagggtcgagtgcataggatggtcaag

SEQ ID NO: 71375 - DNA, 80 bp, synthetic construct
  source 1..80: mol_type = other DNA
cacgtcatgccatgatggcatatcaagaatgtcaatatgcatgtcgggaccgaacaacaatgcatcagcagtagtgtggt

SEQ ID NO: 71376 - DNA, 80 bp, synthetic construct
  source 1..80: mol_type = other DNA
cggggggaggccagtaacagaaattccatcatgggcaggaaatattcttaggacccaagaatcagaatgtgtgtgccata

SEQ ID NO: 71377 - DNA, 80 bp, synthetic construct
  source 1..80: mol_type = other DNA
aagggatctgcccagtagtcatgacagatggcccagcaaacaatagagcagcgactaagataatttatttcaaagaggga

SEQ ID NO: 71378 - DNA, 80 bp, synthetic construct
  source 1..80: mol_type = other DNA
cctgctgataggaattgccaatttaggcctaaacatcggactccactataaggtgggtgatacaccagatgtaaacattc

SEQ ID NO: 71379 - DNA, 80 bp, synthetic construct
  source 1..80: mol_type = other DNA
aagatacagaaaattgaagaactggcagggaatgctcaacacatcgaagaatgttcatgctatggagcagtaggggtgat

SEQ ID NO: 71380 - DNA, 80 bp, synthetic construct
  source 1..80: mol_type = other DNA
gcaagtacttgtgttcaaagatcctaaccgatacaagccgccccaatgatcccaccaatgggaactgtgatgcgccaata

SEQ ID NO: 71381 - DNA, 80 bp, synthetic construct
  source 1..80: mol_type = other DNA
aggacccaagaatcagaatgtgtgtgccataaagggatctgcccagtagtcatgacagatggcccagcaaacaatagagc

SEQ ID NO: 71382 - DNA, 80 bp, synthetic construct
  source 1..80: mol_type = other DNA
agcaaaagcagggtcaagatgaatccaaatcagaagattctatgcacatctgccactgccattgcaataggcacaattgc

SEQ ID NO: 71383 - DNA, 80 bp, synthetic construct
  source 1..80: mol_type = other DNA
cttaggtttgaacataggactacacctgaaaccgagctgcaactgctctaactctccttctgaagccacaaatgtaagcc

SEQ ID NO: 71384 - DNA, 80 bp, synthetic construct
  source 1..80: mol_type = other DNA
aacaatggagttaagggattctcatatttagatggtgacaacacctggctaggaagaacaataagcacagcttctagatc

SEQ ID NO: 71385 - DNA, 80 bp, synthetic construct
  source 1..80: mol_type = other DNA
aacctactcaaggtcagacaattgtattaaacacagattggagtggttacagtgggtctttcattgattactgggcaaaa

SEQ ID NO: 71386 - DNA, 80 bp, synthetic construct
  source 1..80: mol_type = other DNA
ggggattgctatagagcatgcttctatgttgagttgattcgtggaagaccaaaggaggacaaagtgtggtggaccagtaa

SEQ ID NO: 71387 - DNA, 80 bp, synthetic construct
  source 1..80: mol_type = other DNA
ccttggacaatggaactggccagatggggctaaaatagagtacttcctctaagatgtagaaaaagacccttgtttctact

SEQ ID NO: 71388 - DNA, 80 bp, synthetic construct
  source 1..80: mol_type = other DNA
aaacaataataaacaattactacaatgaaacgaatgttacccaaataagcaacacaaacattcagcatatgggaggagct

SEQ ID NO: 71389 - DNA, 80 bp, synthetic construct
  source 1..80: mol_type = other DNA
gatagagacttcaacaatctgaccaaagggctctgcacaataaattcatggcatatattcgggaaagacaatgctataag

SEQ ID NO: 71390 - DNA, 80 bp, synthetic construct
  source 1..80: mol_type = other DNA
gatctcaataccgtgctttagtgagttggcctttatcatcaccacccacagtgtacaataccagagtagagtgcattgga

SEQ ID NO: 71391 - DNA, 80 bp, synthetic construct
  source 1..80: mol_type = other DNA
tggtccagtacaagctgccatgatgggaaagcacgaatgtctatatgtgtctcaggtcccaacaacaatgcatcagcagt

SEQ ID NO: 71392 - DNA, 80 bp, synthetic construct
  source 1..80: mol_type = other DNA
atgggcggcctatcacagaaattaatacgtgggcccgaaacatattgagaacccaagaatctgaatgtgtatgccacaat

SEQ ID NO: 71393 - DNA, 80 bp, synthetic construct
  source 1..80: mol_type = other DNA
aggagggaaaaatcctcaaatgggagccactaactgggaccgccaagcacattgaggaatgctcctgctatggaaaagat

SEQ ID NO: 71394 - DNA, 80 bp, synthetic construct
  source 1..80: mol_type = other DNA
tcagaaataacatgcacgtgtagggacaattggcaaggctcgaatagaccagtgatacaaatagatcccacaatgatgac

SEQ ID NO: 71395 - DNA, 80 bp, synthetic construct
  source 1..80: mol_type = other DNA
gcagtcctgtcctcacagacaacccacgtcccaatgaccccacagtaggaaaatgtaatgatccttacccagggaacaac

SEQ ID NO: 71396 - DNA, 80 bp, synthetic construct
  source 1..80: mol_type = other DNA
tatacagaccaaacccgaagagaagacattcttaaatctgacaaaacccctatgtgaggtgaattcatggcacatcctat

SEQ ID NO: 71397 - DNA, 80 bp, synthetic construct
  source 1..80: mol_type = other DNA
aatcaccaatttaggtctgaatattgggcttcattataaggtgggtggtacaccaagtgtgaatgttccaaatgaaaacg

SEQ ID NO: 71398 - DNA, 80 bp, synthetic construct
  source 1..80: mol_type = other DNA
ctgggtatgaaatgttgaaagtgcctaatgcattaacagatgacagatcaaagcctactcagggtcagacaattgtacta

SEQ ID NO: 71399 - DNA, 80 bp, synthetic construct
  source 1..80: mol_type = other DNA
tggaatatgtccagtggtattcactgacggttctgctactggtccagcggaaactaggatatactatttcaaagagggga

SEQ ID NO: 71400 - DNA, 80 bp, synthetic construct
  source 1..80: mol_type = other DNA
caatttaggtttgaacatcggactccattataaggtaggctatacaccagatgtgaatactccaaatgtgaatggtacca

SEQ ID NO: 71401 - DNA, 80 bp, synthetic construct
  source 1..80: mol_type = other DNA
aaggagatgatgtgtgctatcctgggaaattcacaaatgaggagtcattaaggcagatccttcgaaggtcaggaggaatc

SEQ ID NO: 71402 - DNA, 80 bp, synthetic construct
  source 1..80: mol_type = other DNA
gtcaggctgcggattacgaaagtactcaagcagctatagatcaaataaccgggaaattgaacagactaatagagaagaca

SEQ ID NO: 71403 - DNA, 80 bp, synthetic construct
  source 1..80: mol_type = other DNA
tagggatgataataggaactccggcctgtgacttgcacctcaccgggacatgggacactctgatagagagagagaattcc

SEQ ID NO: 71404 - DNA, 80 bp, synthetic construct
  source 1..80: mol_type = other DNA
agcaaaagcaggggataattctgttaatcatgaagaccatcattgccttaagctacattctctgtctggtttctggccag

SEQ ID NO: 71405 - DNA, 80 bp, synthetic construct
  source 1..80: mol_type = other DNA
aggtttgttcggtgcaatagcagggtttatagaaaatggatgggaggggatgatagatggctggtatggattcaggcatc

SEQ ID NO: 71406 - DNA, 80 bp, synthetic construct
  source 1..80: mol_type = other DNA
ggcaggcagcagatcttaagagcactcaagcagctatagatcaaatcaatgggaaattaaacagagtgattgagaaaaca

SEQ ID NO: 71407 - DNA, 80 bp, synthetic construct
  source 1..80: mol_type = other DNA
catcagattgaaaaggagttctcagaagtggaaggaagaatccaagacctcgagaaatatgttgaagacacaaaagtgga

SEQ ID NO: 71408 - DNA, 80 bp, synthetic construct
  source 1..80: mol_type = other DNA
agaaaacaagaagacaactgagggaaaatgccgaagacatgggtaatggttgcttcaagatatatcacaaatgcgataac

SEQ ID NO: 71409 - DNA, 80 bp, synthetic construct
  source 1..80: mol_type = other DNA
tcctgcatggaatcaatcagaaatggaacttatgatcatgatgtatatagggacgaggcactaaataatcggtttcagat

SEQ ID NO: 71410 - DNA, 80 bp, synthetic construct
  source 1..80: mol_type = other DNA
aaaggtgttgagctgaggtctggatataaagattggattctgtggatttcctttgccatatcatgctttttgctttgcac

SEQ ID NO: 71411 - DNA, 80 bp, synthetic construct
  source 1..80: mol_type = other DNA
aatcacagatgaccagattgaagtgactaacgccactgaactagttcaaagctcctcattgggaaagatatgcaataatc

SEQ ID NO: 71412 - DNA, 80 bp, synthetic construct
  source 1..80: mol_type = other DNA
tgttttgctagggttcattatgtgggcctgccaaaggggcaacattagatgcaacatctgcatttgagtgtattggtaat

SEQ ID NO: 71413 - DNA, 80 bp, synthetic construct
  source 1..80: mol_type = other DNA
ctcacaaaatccttgatggaagggattgcacattgatagatgctctattgggagatcctcactgcgatgtcttccaggat

SEQ ID NO: 71414 - DNA, 80 bp, synthetic construct
  source 1..80: mol_type = other DNA
actgctatccttatgatgtgccagactatgcaactcttagatcaatagttgcctcgtcaggcaccctggagttcattacg

SEQ ID NO: 71415 - DNA, 80 bp, synthetic construct
  source 1..80: mol_type = other DNA
gagggtttcacttggacaggagtaactcaaaacggaggaagtggtgcttgcaagagaggaccggctaatgggttcttcag

SEQ ID NO: 71416 - DNA, 80 bp, synthetic construct
  source 1..80: mol_type = other DNA
tagactgaattggttgactaaatcagggagtgcataccccttgctgaatgtaactatgcccaacaatgacaatttcaaca

SEQ ID NO: 71417 - DNA, 80 bp, synthetic construct
  source 1..80: mol_type = other DNA
aaatgtacatatggggggtccatcatccaagcacagaaagagaacaaacagatctatatgttcaggcgtcagggagagtt

SEQ ID NO: 71418 - DNA, 80 bp, synthetic construct
  source 1..80: mol_type = other DNA
acagtttccactaaagaaagccagcaaactataatcccaaatattgggtctagaccttgggtaagaggtcaatctggcag

SEQ ID NO: 71419 - DNA, 80 bp, synthetic construct
  source 1..80: mol_type = other DNA
aataagcatatattggacgatagttaaaccgggagatatactggtgattaatagtaatggaaatttaattgctcctcgag

SEQ ID NO: 71420 - DNA, 80 bp, synthetic construct
  source 1..80: mol_type = other DNA
aacccttcagaaaacaataacaacacagcaacactatgcctaggacatcatgcagtgcctaatggaacaatggtgaagac

SEQ ID NO: 71421 - DNA, 80 bp, synthetic construct
  source 1..80: mol_type = other DNA
ggtatttcaaaatgagaattgggaaaagctcgataatgaagtcgaatgcacccatcgatacttgcatttccgattgcatc

SEQ ID NO: 71422 - DNA, 80 bp, synthetic construct
  source 1..80: mol_type = other DNA
ggagcatgccccaaatatatcaaacaaaacaccctaaagttggcaacagggatgaggaatgtaccagagaagcagaccag

SEQ ID NO: 71423 - DNA, 80 bp, synthetic construct
  source 1..80: mol_type = other DNA
tccaagcacagaaagagaacaaacagatctatatgttcaggcgtcagggagagttacagtttccactaaagaaagccagc

SEQ ID NO: 71424 - DNA, 80 bp, synthetic construct
  source 1..80: mol_type = other DNA
atgcgtcttggttcaactccttcctcgtgcatgcactgaaataattgtggcaatgctactacttgctatccatattgtcc

SEQ ID NO: 71425 - DNA, 80 bp, synthetic construct
  source 1..80: mol_type = other DNA
gccattcaattactggaacttgcaaccgaagcatctatgtcaatattagcaacactaacgttgttgctgggaaggataca

SEQ ID NO: 71426 - DNA, 80 bp, synthetic construct
  source 1..80: mol_type = other DNA
cgtttatgcaagcattacaactactgcttgaagtggagcaagagataaggactttctcgtttcagtttatttaatgataa

SEQ ID NO: 71427 - DNA, 80 bp, synthetic construct
  source 1..80: mol_type = other DNA
agcaaaagcaggggataattctattaatcatgaagaccattattgtcctaagttgttttttctgtctggctttcagccaa

SEQ ID NO: 71428 - DNA, 80 bp, synthetic construct
  source 1..80: mol_type = other DNA
caaacagagcaccctaaagttggcaaccgggatgcggaatgtacctgaaaaacagaccaggggtctgttcggtgcaatag

SEQ ID NO: 71429 - DNA, 80 bp, synthetic construct
  source 1..80: mol_type = other DNA
cagggttcatagaaaatggatgggaaggaatgatagatggttggtatggtttcaggcatcaaaactcagaaggcacagga

SEQ ID NO: 71430 - DNA, 80 bp, synthetic construct
  source 1..80: mol_type = other DNA
caggcagcagaccttaaaagcactcaagccgccattgaccagatcaatgggaaattgaaccgggtaatcgagaaaacaaa

SEQ ID NO: 71431 - DNA, 80 bp, synthetic construct
  source 1..80: mol_type = other DNA
gttctactgggattcatcatgtgggcctgccagagaggcaatattaggtgcaacatttgcatttgagtatattaataatt

SEQ ID NO: 71432 - DNA, 80 bp, synthetic construct
  source 1..80: mol_type = other DNA
tactgaactggttcagagctcctcaacagggaaaatatgcaacaatccccacagaattctcgatggaagagactgcacac

SEQ ID NO: 71433 - DNA, 80 bp, synthetic construct
  source 1..80: mol_type = other DNA
tctactaggggaccctcattgtgatgtatttcaagatgaaacatgggacctttatatagagcgcagcaatgctttcagca

SEQ ID NO: 71434 - DNA, 80 bp, synthetic construct
  source 1..80: mol_type = other DNA
actgctacccatatgacgtgccagattacgcatctctcagatctctagtggcctcatcaggaaccttagagttcatcacc

SEQ ID NO: 71435 - DNA, 80 bp, synthetic construct
  source 1..80: mol_type = other DNA
gaaggctttacgtggacaggagtcacacaaaatggtgggagtggtgcttgcaaaagagggcccgctaatggcttcttcag

SEQ ID NO: 71436 - DNA, 80 bp, synthetic construct
  source 1..80: mol_type = other DNA
tagactgaattggctgactaaatctggtaatgcttatccattgctgaacgtgactatgccgaataatgataactttgaca

SEQ ID NO: 71437 - DNA, 80 bp, synthetic construct
  source 1..80: mol_type = other DNA
agttgtacgtgtggggaattcatcacccaagcacaaaccaagagcaaaccaacttgtatgttcaggcatcgggaagggtc

SEQ ID NO: 71438 - DNA, 80 bp, synthetic construct
  source 1..80: mol_type = other DNA
acagtctcaactagaagaagccagcaaaccataattcctaacatcggatccaggccctgggtcagaggccaatcagggag

SEQ ID NO: 71439 - DNA, 80 bp, synthetic construct
  source 1..80: mol_type = other DNA
aatcagtatctactggacaatagtaaagccaggagacatactggtgattaacagcaatggaaatctaattgcccctcgag

SEQ ID NO: 71440 - DNA, 80 bp, synthetic construct
  source 1..80: mol_type = other DNA
gatccttcagagaacaacaacaacaacactgctacactgtgtttggggcatcatgcagtaccaaatggaacaatagtgaa

SEQ ID NO: 71441 - DNA, 80 bp, synthetic construct
  source 1..80: mol_type = other DNA
gttatttcaagatacgcactgggaaaagctcaataatgagatcagatgcacctattgacacatgtatctctgagtgcatc

SEQ ID NO: 71442 - DNA, 80 bp, synthetic construct
  source 1..80: mol_type = other DNA
actcctaacgggagcatctccaatgacaagccctttcagaatgtgaacaagattacttatggagcatgtcccaaatatgt

SEQ ID NO: 71443 - DNA, 80 bp, synthetic construct
  source 1..80: mol_type = other DNA
catatgttaacatcagcaataccaacattgtcactgagcaaactgtaatttcagtggcactagcgggcaactcctctctc

SEQ ID NO: 71444 - DNA, 80 bp, synthetic construct
  source 1..80: mol_type = other DNA
caggactgaggaatgttcctcaaagagacacaaggggcctgtttggagcaatagcaggattcatagaaggtggatggcaa

SEQ ID NO: 71445 - DNA, 80 bp, synthetic construct
  source 1..80: mol_type = other DNA
aaaccgaacgatgcaatcagctttgaaagcaatggaaactttatagcccctgagtatgcatacaagatagttaaaagagg

SEQ ID NO: 71446 - DNA, 80 bp, synthetic construct
  source 1..80: mol_type = other DNA
aaattcggcagtcatgagaagtgaactggagtatggtaactgtgataccaaatgccagacccccgtaggtgctataaatt

SEQ ID NO: 71447 - DNA, 80 bp, synthetic construct
  source 1..80: mol_type = other DNA
aatagcaccagatcgagttagcaaactaattggaaagggaataggaatccaatccggagcagtaatagacaaagattgtg

SEQ ID NO: 71448 - DNA, 80 bp, synthetic construct
  source 1..80: mol_type = other DNA
aaacaactactataatgaaacaaacatcacccaaataagtaatactaacatccaagtagaagagagggcaaatagagaat

SEQ ID NO: 71449 - DNA, 80 bp, synthetic construct
  source 1..80: mol_type = other DNA
agcaaaagcaggggaataacatagccaatcaagatggaaacaaaagcaataattgctgcactgctaatggtaacagcagc

SEQ ID NO: 71450 - DNA, 80 bp, synthetic construct
  source 1..80: mol_type = other DNA
gaggactgttcggagcaatagctgggttcatagagggaggttggccagggctagtggccggatggtatggttttcaacat

SEQ ID NO: 71451 - DNA, 80 bp, synthetic construct
  source 1..80: mol_type = other DNA
agggagttgggatggccgcagacaagggatctacccaaaaagcaatcgataaaataacatcaaaagtgaacaacataatc

SEQ ID NO: 71452 - DNA, 80 bp, synthetic construct
  source 1..80: mol_type = other DNA
acaagcaatatgaggtcattgatcatgaattcaatgagcttgaggccaggctgaacatgatcaacaacaaaattgatgat

SEQ ID NO: 71453 - DNA, 80 bp, synthetic construct
  source 1..80: mol_type = other DNA
cagattcaagacatttgggcttataatgcagagttgctggtcttgcttgaaaaccagaaaactctagatgagcatgatgc

SEQ ID NO: 71454 - DNA, 80 bp, synthetic construct
  source 1..80: mol_type = other DNA
aacctatacaacaaagtgaaaagagccttgggttccaatgctgtagaggatggaaacggatgctttgaactgtaccacaa

SEQ ID NO: 71455 - DNA, 80 bp, synthetic construct
  source 1..80: mol_type = other DNA
atgtgatgatcaatgcatggaaacaatcagaaatggaacctacgacaggcagaaataccaagaagaatcaagattagaaa

SEQ ID NO: 71456 - DNA, 80 bp, synthetic construct
  source 1..80: mol_type = other DNA
tgttgtgtgcaactgatctaggacatcccctcattctagacacctgcactattgaaggactaatctatggaaatccttcc

SEQ ID NO: 71457 - DNA, 80 bp, synthetic construct
  source 1..80: mol_type = other DNA
tgtgacatactactaggaggaaaagaatggtcctacatcgttgaaaggtcgtcagccgtcaatggaatgtgttacccagg

SEQ ID NO: 71458 - DNA, 80 bp, synthetic construct
  source 1..80: mol_type = other DNA
agcggaacaagcagagcatgctcaaattcattctataggagcatgagatggctgacccacaatagtaattcctacccttt

SEQ ID NO: 71459 - DNA, 80 bp, synthetic construct
  source 1..80: mol_type = other DNA
tcagaacgctcattacaccaacaatgagagggagaacattcttttcatgtggggcatacaccatccacctaccgacacag

SEQ ID NO: 71460 - DNA, 80 bp, synthetic construct
  source 1..80: mol_type = other DNA
gaagatataaatcgcactttcaaaccagtaatagggccaaggccccttgtcaacggccagcagggaagaatcgattacta

SEQ ID NO: 71461 - DNA, 80 bp, synthetic construct
  source 1..80: mol_type = other DNA
aattgtgtggtacaatgtcagactgaaaaaggaggactcaatacaaccttgccatttcacaatattagcaaatatgcatt

SEQ ID NO: 71462 - DNA, 80 bp, synthetic construct
  source 1..80: mol_type = other DNA
tgggaattgtcctaagtatgttggagtgaaaagtctcaaattggcagttggtttaaggaatgtgcctgctgtatctagta

SEQ ID NO: 71463 - DNA, 80 bp, synthetic construct
  source 1..80: mol_type = other DNA
ccaatttgattgctgaacaggctgtagcttcagtgacactagcaggcaattcctctctctgtcccattagtggatgggct

SEQ ID NO: 71464 - DNA, 80 bp, synthetic construct
  source 1..80: mol_type = other DNA
atgaatgtagcatccccgcgaataatactgtcatagagaaagagatttgtcctaaagcagtagactacaggaattggtca

SEQ ID NO: 71465 - DNA, 80 bp, synthetic construct
  source 1..80: mol_type = other DNA
agcaaaagcaggggatacaaaatgaacattcaaattctggcattcattgcttgtgtgctgactggagctaaaggagacaa

SEQ ID NO: 71466 - DNA, 80 bp, synthetic construct
  source 1..80: mol_type = other DNA
aagcacccagtctgcaatagatcagatcacaggcaaattgaatcgtttaattggcaaaacaaatcagcagtttgagctga

SEQ ID NO: 71467 - DNA, 80 bp, synthetic construct
  source 1..80: mol_type = other DNA
tagacaatgagttcaatgagatagaacaacaaataggaaatgtcattaattggacacgagacgcaatgactgagatatgg

SEQ ID NO: 71468 - DNA, 80 bp, synthetic construct
  source 1..80: mol_type = other DNA
tcgtataatgctgagctgttggtggcaatggaaaatcagcatacaatagatcttgcggactcagaaatgagcaaacttta

SEQ ID NO: 71469 - DNA, 80 bp, synthetic construct
  source 1..80: mol_type = other DNA
atcagtgtatggagagcataaggaacaacacgtatgaccatacccaatacagaacagagtcattgcagaatagaatacag

SEQ ID NO: 71470 - DNA, 80 bp, synthetic construct
  source 1..80: mol_type = other DNA
atagacccagtgaaattgagtagtggatacaaagacataatcttatggtttagcttcggggcatcatgttttcttcttct

SEQ ID NO: 71471 - DNA, 80 bp, synthetic construct
  source 1..80: mol_type = other DNA
ccacagagacagtggaaactgcgaatatcaagaaaatatgtacccaggggaaaaggccaacagatctgggacaatgtgga

SEQ ID NO: 71472 - DNA, 80 bp, synthetic construct
  source 1..80: mol_type = other DNA
agccattgcaatgggattggttttcatttgcataaagaatggaaacatgcagtgcactatttgtatatagtttgagaaaa

SEQ ID NO: 71473 - DNA, 80 bp, synthetic construct
  source 1..80: mol_type = other DNA
tggttttcatttgcataaagaatggaaacatgcagtgcactatttgtatatagtttgagaaaaacacccttgtttctact

SEQ ID NO: 71474 - DNA, 80 bp, synthetic construct
  source 1..80: mol_type = other DNA
cttctaggaaccctaataggacctccccaatgtgatcaattcctggagttttcctctgatttgataattgagcgaagaga

SEQ ID NO: 71475 - DNA, 80 bp, synthetic construct
  source 1..80: mol_type = other DNA
aggaaccgatgtatgctatcccggtaaattcacaaatgaagaatcactgaggcagatccttcgaagatcaggaggaattg

SEQ ID NO: 71476 - DNA, 80 bp, synthetic construct
  source 1..80: mol_type = other DNA
aagaaccaatggagcgacaagtgcctgcacaagatcaggttcttctttctatgcagagatgaagtggttgctgtcgaatt

SEQ ID NO: 71477 - DNA, 80 bp, synthetic construct
  source 1..80: mol_type = other DNA
cagataatgcagcattcccacagatgacaaaggcgtatagaaatcccagaaacaaaccagctctgataatttggggagtt

SEQ ID NO: 71478 - DNA, 80 bp, synthetic construct
  source 1..80: mol_type = other DNA
catcactctgaatcggttagcgagcagaccaaactctatggaagcggaaacaagttgataacagtaagaagctcaaaata

SEQ ID NO: 71479 - DNA, 80 bp, synthetic construct
  source 1..80: mol_type = other DNA
ccagcaatcattcaccccaagtccgggagcacggagaatcgattttcactggctactccttgatcccaatgacacagtga

SEQ ID NO: 71480 - DNA, 80 bp, synthetic construct
  source 1..80: mol_type = other DNA
ccttcactttcaatggggcattcatagcccctgacagggcaagtttctttaggggagaatcactaggagtccagagtgat

SEQ ID NO: 71481 - DNA, 80 bp, synthetic construct
  source 1..80: mol_type = other DNA
aatatgtcttgggcaccatgctgtggcaaatggaacaaaagtgaacacattaacagagagggggattgaagtagtgaatg

SEQ ID NO: 71482 - DNA, 80 bp, synthetic construct
  source 1..80: mol_type = other DNA
gctcctttggattctagttgtagaggggattgctttcacagtgggggtacgatagtcagttccctgccattccaaaacat

SEQ ID NO: 71483 - DNA, 80 bp, synthetic construct
  source 1..80: mol_type = other DNA
caactctagaactgtggggaaatgccctcggtatgtcaaacagaaaagcctccttctggctacaggaatgagaaatgttc

SEQ ID NO: 71484 - DNA, 80 bp, synthetic construct
  source 1..80: mol_type = other DNA
cagagaaaccaaagcccagaggcctttttggagcaattgctggattcatagagaatggatgggagggtctcatcaatgga

SEQ ID NO: 71485 - DNA, 80 bp, synthetic construct
  source 1..80: mol_type = other DNA
aaatgaaggctcagctggagttgagtctgctgttctgagaggatttctcattttgggcaaagaagacaggagatatggcc

SEQ ID NO: 71486 - DNA, 80 bp, synthetic construct
  source 1..80: mol_type = other DNA
agcaaaagcagggtgattgagaatgaatcctaatcaaaaactatttgcattatcaggagtggcaatagcacttagtgtat

SEQ ID NO: 71487 - DNA, 80 bp, synthetic construct
  source 1..80: mol_type = other DNA
taactggaagtcctggtgcaccgggagtgaaagggttcgggttcttaaatggtgacaacacatggctagggaggactatc

SEQ ID NO: 71488 - DNA, 80 bp, synthetic construct
  source 1..80: mol_type = other DNA
agtcccagatctaggagtgggttcgagatgctgaaaatacccaatgcagaaaccgacccaaattctagaataatagagcg

SEQ ID NO: 71489 - DNA, 80 bp, synthetic construct
  source 1..80: mol_type = other DNA
gcaggagatcgtcgacagcagtaaccggtcaggttattctggaagcttcatcgactattgggatgaggctaatgaatgtt

SEQ ID NO: 71490 - DNA, 80 bp, synthetic construct
  source 1..80: mol_type = other DNA
acaacccctgcttttatgtagagttaattagagggaggcctgaggaggcaaaatacgtctggtggacgagcaacagtcta

SEQ ID NO: 71491 - DNA, 80 bp, synthetic construct
  source 1..80: mol_type = other DNA
attgccttgtgtggaagcccagtctcagttgggtccggttctttccccgatggggctcagatccaatacttttcgtaaaa

SEQ ID NO: 71492 - DNA, 80 bp, synthetic construct
  source 1..80: mol_type = other DNA
tcagttgggtccggttctttccccgatggggctcagatccaatacttttcgtaaaatgcaaaaacacccttgtttctact

SEQ ID NO: 71493 - DNA, 80 bp, synthetic construct
  source 1..80: mol_type = other DNA
aatttgacgtgcacaaccattacccaaaacaacactactgtagtggaaaacacatacgtcaataacacaacaataatcaa

SEQ ID NO: 71494 - DNA, 80 bp, synthetic construct
  source 1..80: mol_type = other DNA
caaggggacaaatctgaaggctccaaactatttgctgctgaataaaagtctatgcagtgtggaaggatgggtcgtgatag

SEQ ID NO: 71495 - DNA, 80 bp, synthetic construct
  source 1..80: mol_type = other DNA
ccaaagacaatgcaataagattcggagaaagtgaacaaatcatcgttactagggagccatatgtgtcatgcgatccatca

SEQ ID NO: 71496 - DNA, 80 bp, synthetic construct
  source 1..80: mol_type = other DNA
ggatgcaagatgtatgccctacaccaaggaactaccataaggaacaaacactcaaatggaaccatacatgacagaacgac

SEQ ID NO: 71497 - DNA, 80 bp, synthetic construct
  source 1..80: mol_type = other DNA
tttccgtggtctcttatccaccccattgggcaccccaccgacagtgagtaacagtgatttcatatgtgttgggtggtcga

SEQ ID NO: 71498 - DNA, 80 bp, synthetic construct
  source 1..80: mol_type = other DNA
gtacaagctgccatgacggagttggtagaatgactatctgcatacaggggaataatgacaatgctacagcgacggtgtat

SEQ ID NO: 71499 - DNA, 80 bp, synthetic construct
  source 1..80: mol_type = other DNA
tacaacaggagacttactactactattaaaacttgggccaagaatattctgaggactcaggagtcagagtgcgtatgcca

SEQ ID NO: 71500 - DNA, 80 bp, synthetic construct
  source 1..80: mol_type = other DNA
caacggcacatgtgcagttgtaatgactgatgggcccgccagcagtcaagcctatacaaaaataatgtactttcataaag

SEQ ID NO: 71501 - DNA, 80 bp, synthetic construct
  source 1..80: mol_type = other DNA
tgaacctattgataggaatttcaaatgttggactgaatatgtctctacacttaaaaggagagggggtcaaacaagagaac

SEQ ID NO: 71502 - DNA, 80 bp, synthetic construct
  source 1..80: mol_type = other DNA
ggctaataataaaggaagaaccactcaggggatcagccaggcatattgaggaatgctcttgttatggacacgatcagaaa

SEQ ID NO: 71503 - DNA, 80 bp, synthetic construct
  source 1..80: mol_type = other DNA
gtaagttgtgtatgcagggataactggcaaggcgcaaatagacccattatagagattgatatgagcacactagagcacac

SEQ ID NO: 71504 - DNA, 80 bp, synthetic construct
  source 1..80: mol_type = other DNA
aagtagatacgtgtgcactggagttctaacagataccagtagacctggggacaaacctaatggtgattgttccaatccaa

SEQ ID NO: 71505 - DNA, 80 bp, synthetic construct
  source 1..80: mol_type = other DNA
agcaaaagcaggtgcgagatgaatccgaatcagaagataataacaatcggggtagtgaataccactctgtcaacaatagc

SEQ ID NO: 71506 - DNA, 80 bp, synthetic construct
  source 1..80: mol_type = other DNA
tgtcaatggaggacccggagtgaaggggtttggtttcaaagctggcaatgatgtatggttaggtagaacagtgtcaacta

SEQ ID NO: 71507 - DNA, 80 bp, synthetic construct
  source 1..80: mol_type = other DNA
gtggtagatcgggctttgaaattatcaaagttacagaagggtggatcaactctcctaaccatgtcaaatcaattacacaa

SEQ ID NO: 71508 - DNA, 80 bp, synthetic construct
  source 1..80: mol_type = other DNA
acactagtgtccaacaatgactggtcaggctattcaggtagcttcattgtcaaagccaaggactgttttcagccctgttt

SEQ ID NO: 71509 - DNA, 80 bp, synthetic construct
  source 1..80: mol_type = other DNA
ttatgttgagcttatacgagggaggcccaacaagaatgatgacgtctcttggacaagtaatagtatagttactttctgtg

SEQ ID NO: 71510 - DNA, 80 bp, synthetic construct
  source 1..80: mol_type = other DNA
gactagacaatgaacctggatcgggaaattggccagatggttctaacattgggtttatgcccaagtaatagaaaaaagca

SEQ ID NO: 71511 - DNA, 80 bp, synthetic construct
  source 1..80: mol_type = other DNA
acctggatcgggaaattggccagatggttctaacattgggtttatgcccaagtaatagaaaaaagcaccttgtttctact

SEQ ID NO: 71512 - DNA, 80 bp, synthetic construct
  source 1..80: mol_type = other DNA
caacaataatgacccctgaagtaccgaactgcagtgacactataataacatacaataacactgttataaacaacataaca

SEQ ID NO: 71513 - DNA, 80 bp, synthetic construct
  source 1..80: mol_type = other DNA
caaggacaatgcaatacgactgggtgaaaacaaagacgtcatagtcacaagggagccttatgttagctgcgataatgaca

SEQ ID NO: 71514 - DNA, 80 bp, synthetic construct
  source 1..80: mol_type = other DNA
actgctggtcctttgctctcgcacaaggagcattgctagggactaaacatagcaatgggaccattaaagacagaacacca

SEQ ID NO: 71515 - DNA, 80 bp, synthetic construct
  source 1..80: mol_type = other DNA
tataggtctctaattcgtttcccaataggaacagctccagtactaggaaattacaaagagatatgcattgcttggtcgag

SEQ ID NO: 71516 - DNA, 80 bp, synthetic construct
  source 1..80: mol_type = other DNA
cagcagttgctttgacgggaaagagtggatgcatgtgtgcatgacagggaatgataatgatgcaagtgcccagataatat

SEQ ID NO: 71517 - DNA, 80 bp, synthetic construct
  source 1..80: mol_type = other DNA
atggaggaagaatgacagactccattaaatcatggaggaaagacatactaagaacccaggagtctgaatgtcaatgcatt

SEQ ID NO: 71518 - DNA, 80 bp, synthetic construct
  source 1..80: mol_type = other DNA
gacgggacttgtgttgttgctgtcacagatggccctgctgctaatagtgcagatcacagggtttactggatacgggagtg

SEQ ID NO: 71519 - DNA, 80 bp, synthetic construct
  source 1..80: mol_type = other DNA
ccttctcattggagtgggaaacttagttttcaacacagtcatacatgagaaaataggagaccatcaaatagtgacccatc

SEQ ID NO: 71520 - DNA, 80 bp, synthetic construct
  source 1..80: mol_type = other DNA
aagaataataaagtatgaaaatgttcccaaaacaaagatacaacacttagaagaatgttcctgctatgtggacattgatg

SEQ ID NO: 71521 - DNA, 80 bp, synthetic construct
  source 1..80: mol_type = other DNA
tttactgtatatgtagggacaattggaagggctctaacagaccttggatgagaatcaacaacgagactatactggaaaca

SEQ ID NO: 71522 - DNA, 80 bp, synthetic construct
  source 1..80: mol_type = other DNA
ggatatgtatgtagtaaatttcactcagacacccccaggccagctgacccttcaataatgtcatgtgactccccaagcaa

SEQ ID NO: 71523 - DNA, 80 bp, synthetic construct
  source 1..80: mol_type = other DNA
accaaagaaccagaatttagagctcctagctatctgctattaaataaaagtctatgcaatgttgaaggatgggtagtggt

SEQ ID NO: 71524 - DNA, 80 bp, synthetic construct
  source 1..80: mol_type = other DNA
agcaaaagcaggggatacaaaatgaacatccaaattctggtagccatcgcttgtgcactcatcgaaactaaagcagacaa

SEQ ID NO: 71525 - DNA, 80 bp, synthetic construct
  source 1..80: mol_type = other DNA
tttggggcaattgctggttttatagagaatgggtgggaaggtctcatcgacggctggtatggtttcagacatcagaatgc

SEQ ID NO: 71526 - DNA, 80 bp, synthetic construct
  source 1..80: mol_type = other DNA
aagcactcaatctgcaatagaccagatcacaggcaaactgaaccgtttaattgacaagacaaatcaacaatttgaactta

SEQ ID NO: 71527 - DNA, 80 bp, synthetic construct
  source 1..80: mol_type = other DNA
tcgataatgagttcaatgagatagaacaacagattgggaatgtcataaattggacaagagactcagtaactgaattgtgg

SEQ ID NO: 71528 - DNA, 80 bp, synthetic construct
  source 1..80: mol_type = other DNA
tcatacaatgctgaattgctagtggccatggagaatcaacacacaatagatcttgcagattcagaaatgaacaaactcta

SEQ ID NO: 71529 - DNA, 80 bp, synthetic construct
  source 1..80: mol_type = other DNA
atcaatgcatggagagcataaggaacaacacctatgatcacactcaatacagagccgaatcgctacagaacagaatacag

SEQ ID NO: 71530 - DNA, 80 bp, synthetic construct
  source 1..80: mol_type = other DNA
ccacagaaaccgtagagaccacaaacatagagaggatttgcacaaaagggaagagatcaacagacttgggtcaatgcgga

SEQ ID NO: 71531 - DNA, 80 bp, synthetic construct
  source 1..80: mol_type = other DNA
attctgggaatattgacgggtccaccacagtgcgatcaatttctggaatttgagtccgatctaattgttgaacgacagga

SEQ ID NO: 71532 - DNA, 80 bp, synthetic construct
  source 1..80: mol_type = other DNA
tgggaaagatgtgtgctaccctggcaaattctcgaatgaagagtcattaagacagatcctccgagaatcaggaggaatag

SEQ ID NO: 71533 - DNA, 80 bp, synthetic construct
  source 1..80: mol_type = other DNA
cagacaatgccgcattcccacagacaaccaagtcttacaggaatcccaaaagcaaacctgccttaatagtttggggaatt

SEQ ID NO: 71534 - DNA, 80 bp, synthetic construct
  source 1..80: mol_type = other DNA
caccattctgggtcagccaatgaacagaccaaactttatgggagtggagctaaactgataacagtaggaagctccaagta

SEQ ID NO: 71535 - DNA, 80 bp, synthetic construct
  source 1..80: mol_type = other DNA
tacttgatccgaacgacacagtgactttcagtttcaatggggcattcatagctccagacagagcaactttcctgaaggga

SEQ ID NO: 71536 - DNA, 80 bp, synthetic construct
  source 1..80: mol_type = other DNA
aatatgccttgggcatcatgccgtggcaaatggaacaaaggtcaacacactgacagaaaggggagttgaagtagtgaatg

SEQ ID NO: 71537 - DNA, 80 bp, synthetic construct
  source 1..80: mol_type = other DNA
aaatccctcggggttcaaagtaatgtgcctactgattccaattgtgtgggagactgtttccacagtggaggcaccattac

SEQ ID NO: 71538 - DNA, 80 bp, synthetic construct
  source 1..80: mol_type = other DNA
aagcccactgccatttcaaaacattaaccccaggactgttgggaaatgccccagatatgttaggcaaccaagtctcctgt

SEQ ID NO: 71539 - DNA, 80 bp, synthetic construct
  source 1..80: mol_type = other DNA
tggcaacagggatgaggaatgttccagaaaaaccaaagacatgcagcccactttctcggtgcagagaaaccagagggctc

SEQ ID NO: 71540 - DNA, 80 bp, synthetic construct
  source 1..80: mol_type = other DNA
agggaccagagtagttcccagaggacagctggcaaccagaggagtgcaaattgcttccaatgaaaacatggaaacaatag

SEQ ID NO: 71541 - DNA, 80 bp, synthetic construct
  source 1..80: mol_type = other DNA
agaagaacaatccgatcaatggcttatgttatccaggagattttaatgattatgaagagctgaaacatttagtgagcagc

SEQ ID NO: 71542 - DNA, 80 bp, synthetic construct
  source 1..80: mol_type = other DNA
acaaacctttttgagaaaattagaataatccctaggaactcttggaccaatcatgatgcctcttcaggagtgagctccgc

SEQ ID NO: 71543 - DNA, 80 bp, synthetic construct
  source 1..80: mol_type = other DNA
acgaacgcagcattcctgcctacaaccaaacgacgccatgcaagccaatcataatagagaggaacataaaatacaggaat

SEQ ID NO: 71544 - DNA, 80 bp, synthetic construct
  source 1..80: mol_type = other DNA
catatgttaacatcagcaatactaactttgttactgaacaggccttagctccagtagcattagcaggcaattcctctctc

SEQ ID NO: 71545 - DNA, 80 bp, synthetic construct
  source 1..80: mol_type = other DNA
tacttatgtgctggaattcctagtgataccccaagaggggaagatgcccaatttacgggttcttgcactagtccaatagg

SEQ ID NO: 71546 - DNA, 80 bp, synthetic construct
  source 1..80: mol_type = other DNA
gaaaataaagattctgcccagaaatgaatggacacagcatacaacaactggaggttcacaggcttgcgcagcgtatggtg

SEQ ID NO: 71547 - DNA, 80 bp, synthetic construct
  source 1..80: mol_type = other DNA
gtccgtcatttttccggaacatggtctggttgacaaagaaagggtcgaattatccaattgccaaaagatcttacaacaat

SEQ ID NO: 71548 - DNA, 80 bp, synthetic construct
  source 1..80: mol_type = other DNA
aactaataagggggagacctaaagaggaaactatctggactagtgggagtagcatttccttttgtggtgtgagtggtgac

SEQ ID NO: 71549 - DNA, 80 bp, synthetic construct
  source 1..80: mol_type = other DNA
gagtatcattacctatgaaaataatacctgggtcaataagacgtatttgaacatcagcgtcacgaatttggctgttgaac

SEQ ID NO: 71550 - DNA, 80 bp, synthetic construct
  source 1..80: mol_type = other DNA
aggacataaccccaagagtattagctggtaactcctccctttgccccatcagtggttgggccatatacagcaaagacaat

SEQ ID NO: 71551 - DNA, 80 bp, synthetic construct
  source 1..80: mol_type = other DNA
ttaatacttcaattagggaacataatttcaatatgggtcagccactcaattcaaactggagaccaaaaatatccagaaac

SEQ ID NO: 71552 - DNA, 80 bp, synthetic construct
  source 1..80: mol_type = other DNA
cggaaatggggacccccaacgtcaacgaaacaaactccacaaccatgataatcaactacaatacccaaaacaatttcaca

SEQ ID NO: 71553 - DNA, 80 bp, synthetic construct
  source 1..80: mol_type = other DNA
atgaatgcagcatcccctcgaataatcaagtagaaaaggaaatttgtcctaaagcggtagaatacaggaattggtcaaaa

SEQ ID NO: 71554 - DNA, 80 bp, synthetic construct
  source 1..80: mol_type = other DNA
gcgtgaacagtggcactgcaagctggtcatggccagacggcgctgatctgccattcaccattgacaagtagtttattcaa

SEQ ID NO: 71555 - DNA, 80 bp, synthetic construct
  source 1..80: mol_type = other DNA
gcaaagacataatggattccaatactgtgtcaagctttcaggtagactgtttcctttggcatatccgcaaacggtttgca

SEQ ID NO: 71556 - DNA, 80 bp, synthetic construct
  source 1..80: mol_type = other DNA
atggaaacattatcaataataactatactactagtgataacagtaagcaatgcagataaaatctgcatcggttaccaatc

SEQ ID NO: 71557 - DNA, 80 bp, synthetic construct
  source 1..80: mol_type = other DNA
ccaatcacagtagagaggaacacagtgcatttgaatagtactaccatagagaaggaaatttgtcctaagatggcaggata

SEQ ID NO: 71558 - DNA, 80 bp, synthetic construct
  source 1..80: mol_type = other DNA
atggaagtagtatcactaataactatactactagtagcaacagtaagcaatgcagataaaatctgcatgggctaccaatc

SEQ ID NO: 71559 - DNA, 80 bp, synthetic construct
  source 1..80: mol_type = other DNA
aagaggaatcaagactagaaagacagaaaatagaaggggtcaagctggaatctgaaggaacttacaaaatcctcaccatt

SEQ ID NO: 71560 - DNA, 80 bp, synthetic construct
  source 1..80: mol_type = other DNA
tacacagacaaatctgtatacaaggactgacacaacaacaagtgtagcaacagaagatataaacaggaccttcaaaccag

SEQ ID NO: 71561 - DNA, 80 bp, synthetic construct
  source 1..80: mol_type = other DNA
atgaaagcattatcaccaataaccatactactagtagtagcggtaagcaatgcagataaaatctgcatcggctaccaatc

SEQ ID NO: 71562 - DNA, 80 bp, synthetic construct
  source 1..80: mol_type = other DNA
aacggatgaatgttcccagaatttgtactaaggggaagaaggcaattgatcttggtcaatgtggattgcttggaattatt

SEQ ID NO: 71563 - DNA, 80 bp, synthetic construct
  source 1..80: mol_type = other DNA
cgggactcaagcatacttactgacagccagacagcgaccaaaagaattcgaatggccatcaattagtgttaaatagttta

SEQ ID NO: 71564 - DNA, 80 bp, synthetic construct
  source 1..80: mol_type = other DNA
atgaatccaaatcagaaaataataactatcggagcaatatccctaggattagtggtccttaatattttattgcatataat

SEQ ID NO: 71565 - DNA, 80 bp, synthetic construct
  source 1..80: mol_type = other DNA
attctattaatcatgaagaccatcattgctctgagctgcattctctgcctggctctcggccaagacctccctaaaaacaa

SEQ ID NO: 71566 - DNA, 80 bp, synthetic construct
  source 1..80: mol_type = other DNA
tgctttcagcaattgttacccctatgatgtgccagatcgcgcctccctcaggtcactggttgcctcttcaggcactctgg

SEQ ID NO: 71567 - DNA, 80 bp, synthetic construct
  source 1..80: mol_type = other DNA
aagcaaccaagatgaaggcaatactattagtcttgctatatacatttacagccgcaaatgcagacacattatgtataggt

SEQ ID NO: 71568 - DNA, 80 bp, synthetic construct
  source 1..80: mol_type = other DNA
tcaaatatattcaatatggagaggataaaggaactaagaaatctaatgtcacagtctcgcactcgcgagatactaacaag

SEQ ID NO: 71569 - DNA, 80 bp, synthetic construct
  source 1..80: mol_type = other DNA
agtgaagtagtggaatatagaaattggtcaaagccgcagtgtcaaatcacaggatttgcacctttctctaaggacaattc

SEQ ID NO: 71570 - DNA, 80 bp, synthetic construct
  source 1..80: mol_type = other DNA
acaccacgcccacttagactgccatgtgggcctccctgtttccagcgatctaaatttctgttgatggatgctctgaaatt

SEQ ID NO: 71571 - DNA, 80 bp, synthetic construct
  source 1..80: mol_type = other DNA
agcaaaagcaggggataattctattagacatgaaggcaatcattgcactaagctattttttctgtctggctttcagccaa

SEQ ID NO: 71572 - DNA, 80 bp, synthetic construct
  source 1..80: mol_type = other DNA
ggtgctatagcaggattcatagaaaatggatgggaaggaatggtagatggctggtatggcttcagacatcaaaattctga

SEQ ID NO: 71573 - DNA, 80 bp, synthetic construct
  source 1..80: mol_type = other DNA
caagctgcagatttaaaaagcacccaagcagccattgatcagatcaatgggaaactgaatcgagtaatagagaaaacaaa

SEQ ID NO: 71574 - DNA, 80 bp, synthetic construct
  source 1..80: mol_type = other DNA
tgaaaaattccatcaaattgaaaaggaattctcagaagtggaaggcagaatccaagaccttgagagatatgtcgaagaca

SEQ ID NO: 71575 - DNA, 80 bp, synthetic construct
  source 1..80: mol_type = other DNA
tgttttgctgggattcatcatgtgggcttgccagaaaggcaacattagatgcaacatttgcatttgagtatactaataat

SEQ ID NO: 71576 - DNA, 80 bp, synthetic construct
  source 1..80: mol_type = other DNA
ccactgaattagttcaaagcgtctccacaggaacaatttgcaacaacccccatagggttcttgatgggagagactgcact

SEQ ID NO: 71577 - DNA, 80 bp, synthetic construct
  source 1..80: mol_type = other DNA
cttatagatgccctattaggagatcctcattgtgactcattccaagatgctacatgggatctctatgtagagcgaagcag

SEQ ID NO: 71578 - DNA, 80 bp, synthetic construct
  source 1..80: mol_type = other DNA
cgcattcagcaactgttatccatatgatgtgccagactatgcatctcttagatctcttgttgcttcatcaggaaccctgg

SEQ ID NO: 71579 - DNA, 80 bp, synthetic construct
  source 1..80: mol_type = other DNA
agttcattacagaaggtttcacatggacgggagtaacccaaaatggaggaagtaatgcttgtaagagaggaccagtgggt

SEQ ID NO: 71580 - DNA, 80 bp, synthetic construct
  source 1..80: mol_type = other DNA
ggtttcttcagcagattgaattggctgactaaatctggaaatgcttatccactactaaatgtaaccatgcccaataatga

SEQ ID NO: 71581 - DNA, 80 bp, synthetic construct
  source 1..80: mol_type = other DNA
caactttgacaaattgtacatatggggggttcatcacccaagcacaaaccaggagcaaactaacctgtatgttcaagcat

SEQ ID NO: 71582 - DNA, 80 bp, synthetic construct
  source 1..80: mol_type = other DNA
caggaagagtcacagtatcaacaagaaagagtcagcaaactataatcccgaacatcggatcaagaccttgggtcagaggc

SEQ ID NO: 71583 - DNA, 80 bp, synthetic construct
  source 1..80: mol_type = other DNA
caatcaggtagggtgagcatatactggacaatagtgaaatcaggagatgtattagtagtcaacagcaacggaaacctaat

SEQ ID NO: 71584 - DNA, 80 bp, synthetic construct
  source 1..80: mol_type = other DNA
gacctcacaggaagcaacactagtgatgcaaccctatgtctgggacatcatgcagtccctaatgggacaatagtgaaaac

SEQ ID NO: 71585 - DNA, 80 bp, synthetic construct
  source 1..80: mol_type = other DNA
tgcccctagaggctacttcaaaatgcgaactgggaaaagctctataatgaaatcagatgctcctatcgacacttgcattt

SEQ ID NO: 71586 - DNA, 80 bp, synthetic construct
  source 1..80: mol_type = other DNA
ggagcatgccctaaatacgtcaaacaaggctctctgaaattagcaacaggaatgcggaacgtgccagagaaacaaacccg

SEQ ID NO: 71587 - DNA, 80 bp, synthetic construct
  source 1..80: mol_type = other DNA
gggttcatcacccaagcacaaaccaggagcaaactaacctgtatgttcaagcatcaggaagagtcacagtatcaacaaga

SEQ ID NO: 71588 - DNA, 80 bp, synthetic construct
  source 1..80: mol_type = other DNA
agtgaaaaatgaatccaaatcaaaaaataataacaattggctctgtctccctaaccattgcaacagcatgcttcctcatg

SEQ ID NO: 71589 - DNA, 80 bp, synthetic construct
  source 1..80: mol_type = other DNA
gggaaaaaagattgttgaggacattctgaagagtgaaacagatgagaatcttaaaatagccattgcctccagtcctgctc

SEQ ID NO: 71590 - DNA, 80 bp, synthetic construct
  source 1..80: mol_type = other DNA
cgttcttgcaagcattgcaactcttacttgaagttgaaagtgagataaggactttctcttttcagcttatttagtactaa

SEQ ID NO: 71591 - DNA, 80 bp, synthetic construct
  source 1..80: mol_type = other DNA
ggaagtggatatgctgcagacagaaaatctacccagaaagcaattgatgggataaccaataaagtaaactcaatcatcga

SEQ ID NO: 71592 - DNA, 80 bp, synthetic construct
  source 1..80: mol_type = other DNA
agctcctgaatatgcgtacaaaatcgcaaaaaaaggaaaatcagcaatcatgaaaagtgaactggaatacggtaactgtg

SEQ ID NO: 71593 - DNA, 80 bp, synthetic construct
  source 1..80: mol_type = other DNA
ttgcttgtgtgctgattggagctaaaggagacaaaatatgtcttgggcaccatgctgtggcaaatggaacaaaagtgaac

SEQ ID NO: 71594 - DNA, 80 bp, synthetic construct
  source 1..80: mol_type = other DNA
aacagtaacaactgtagtaaacaacataacaacaacaatagtaactgaagcggaaaggcatttcaagtcctcactgccac

SEQ ID NO: 71595 - DNA, 80 bp, synthetic construct
  source 1..80: mol_type = other DNA
cccaatttacttcagtgggcaaggaattcaatgatctagaaaaaaggattgagaatttgaataagaaggtagatgatgga

SEQ ID NO: 71596 - DNA, 80 bp, synthetic construct
  source 1..80: mol_type = other DNA
aacggccagtagcaaaagcaggtcaattatattcaatatggaaagaataaaagagctaaggaatttgatgtcacaatctc

SEQ ID NO: 71597 - DNA, 80 bp, synthetic construct
  source 1..80: mol_type = other DNA
ggccagtagcaaaagcaggcaaaccatttgaatggatgtcaatccgacattacttttcttaaaagtgccagcacaaaatg

SEQ ID NO: 71598 - DNA, 80 bp, synthetic construct
  source 1..80: mol_type = other DNA
tgaggattaccaggggcgtttatgcaacccattaaacccgtttgtcagccataaagagattgaatcagtgaacaatgcag

SEQ ID NO: 71599 - DNA, 80 bp, synthetic construct
  source 1..80: mol_type = other DNA
gatgtaatggagtcgatggacagaggcgaagtagaggtcacaactcattttcaaagaaagaggagagtgagagacaatgt

SEQ ID NO: 71600 - DNA, 80 bp, synthetic construct
  source 1..80: mol_type = other DNA
aactaaaaaaatggtgacccaaagaacaataggcaaaaagaaacataaattagacaaaagaagttacctaattagggcat

SEQ ID NO: 71601 - DNA, 80 bp, synthetic construct
  source 1..80: mol_type = other DNA
cccaggacactgaaatttctttcaccataaccggagataacacaaaatggaacgaaaatcaaaaccctagaatgttcttg

SEQ ID NO: 71602 - DNA, 80 bp, synthetic construct
  source 1..80: mol_type = other DNA
cggccagtagcgaaagcaggagtttaaaatgaacccaaatcaaaagataataaccattggatcaatcagtatagcaatcg

SEQ ID NO: 71603 - DNA, 80 bp, synthetic construct
  source 1..80: mol_type = other DNA
aaataggaaatattatttcaatatgggctagtcactcaatccaaactggaagtcaaaacaacactggaatatgcaaccaa

SEQ ID NO: 71604 - DNA, 80 bp, synthetic construct
  source 1..80: mol_type = other DNA
cttggccagacggtgctgagttgccgttcaccattgacaagtagttcgttgaaaaaaactccttgtttctactggtcata

SEQ ID NO: 71605 - DNA, 80 bp, synthetic construct
  source 1..80: mol_type = other DNA
aggggaaggttactaaatcaatagagttgaatgcacccaattttcattatgaggaatgttcctgttacccagacactggc

SEQ ID NO: 71606 - DNA, 80 bp, synthetic construct
  source 1..80: mol_type = other DNA
agcaaaagcaggagtgattgagaatgaatcctaatcaaaaattattcgcactctctggggtggccatagcactgagtatc

SEQ ID NO: 71607 - DNA, 80 bp, synthetic construct
  source 1..80: mol_type = other DNA
actgggagtccgggagcccctggggtcaaaggattcggcttcctggatagtgacaatacatggttgggccgcacaataag

SEQ ID NO: 71608 - DNA, 80 bp, synthetic construct
  source 1..80: mol_type = other DNA
tcctcgttccaggagtggttttgagatgttgaagatacctaatgctgggacagacccaaattctagaatcactgagaggc

SEQ ID NO: 71609 - DNA, 80 bp, synthetic construct
  source 1..80: mol_type = other DNA
aagaaatagttgacaacaacaattggtcaggatactcaggaagtttcattgactattgggatgaaagcagtgtgtgctac

SEQ ID NO: 71610 - DNA, 80 bp, synthetic construct
  source 1..80: mol_type = other DNA
aacccctgtttttatgttgaattaataagaggaaggcctgaagaagccaagtatgtttggtggacgagcaacagtttagt

SEQ ID NO: 71611 - DNA, 80 bp, synthetic construct
  source 1..80: mol_type = other DNA
tgcactatgtggaagcccaatctcagttgggtccggttccttccccgatggggcacaaatccaatacttttcgtaaattg

SEQ ID NO: 71612 - DNA, 80 bp, synthetic construct
  source 1..80: mol_type = other DNA
ttggacatgcacgagtgtaacacaaaacaacacgactttaatcgaaaacacatatgtcaacaataccactgtcatcaata

SEQ ID NO: 71613 - DNA, 80 bp, synthetic construct
  source 1..80: mol_type = other DNA
agggaacagggactacaaagcaaaattatctaatgctgaacaagagtttatgcaaagttgaaggatgggtagtggtggcc

SEQ ID NO: 71614 - DNA, 80 bp, synthetic construct
  source 1..80: mol_type = other DNA
aaggacaatgccataagattcggtgaaagtgaacaaataatagtgacaagggagccgtatgtgtcatgtgatccattagg

SEQ ID NO: 71615 - DNA, 80 bp, synthetic construct
  source 1..80: mol_type = other DNA
atgtaagatgtacgcactgcatcaagggacaaccattagaaacaagcactcaaacggaacaatacacgacaggactgctt

SEQ ID NO: 71616 - DNA, 80 bp, synthetic construct
  source 1..80: mol_type = other DNA
tcagagggttgatatcaactcctttggggagcccccctgtagtcagcaatagtgactttctttgtgtagggtggtcaagc

SEQ ID NO: 71617 - DNA, 80 bp, synthetic construct
  source 1..80: mol_type = other DNA
accagttgccatgacggcatcgggcggatgaccatttgtgtgcagggaaataataacaacgcaacagctacagtgtacta

SEQ ID NO: 71618 - DNA, 80 bp, synthetic construct
  source 1..80: mol_type = other DNA
tgaccgaaggctcactaccacaataaaaacatgggcaggaaatatccttaggacgcaagagtcggaatgtgtatgccaca

SEQ ID NO: 71619 - DNA, 80 bp, synthetic construct
  source 1..80: mol_type = other DNA
atggaacatgtgtagtaataatgaccgatggatcggcaagcagccaggcacatacaaaagttctgtatttccacaaagga

SEQ ID NO: 71620 - DNA, 80 bp, synthetic construct
  source 1..80: mol_type = other DNA
ctcaacctactaataggaatatccaatgtgggactgaatgtctcactacacctgaagggaagcagtgaccaggataagaa

SEQ ID NO: 71621 - DNA, 80 bp, synthetic construct
  source 1..80: mol_type = other DNA
ctagtaataaaagaggaagccctcaagggatcagccagacacatagaggagtgctcatgctatgggcacaattcaaaggt

SEQ ID NO: 71622 - DNA, 80 bp, synthetic construct
  source 1..80: mol_type = other DNA
gacttgtgtatgcagggacaactggcaaggagccaatagaccagtgattgaaatagatatgaatgccatggagcatacaa

SEQ ID NO: 71623 - DNA, 80 bp, synthetic construct
  source 1..80: mol_type = other DNA
gtcagtatctatgtacaggagttctcactgacacgagcagaccatcagacaaatcaatgggcgactgtaataatccgatc

SEQ ID NO: 71624 - DNA, 80 bp, synthetic construct
  source 1..80: mol_type = other DNA
atgaagaccgttattgctttaagctgcattttctgtctggccttcggtcaggaccttccaatgaagaccgttattgcttt

SEQ ID NO: 71625 - DNA, 80 bp, synthetic construct
  source 1..80: mol_type = other DNA
acggggcatgccccaaatatgtgaagcagaacaccctgaagttggcaacaggaatgcggaatgtacctgagaaacaaacc

SEQ ID NO: 71626 - DNA, 80 bp, synthetic construct
  source 1..80: mol_type = other DNA
tcggtgcaatagcaggttttatagaaaatggatgggaagggatgatagatggttggtacggcttcaggcatcaaaattca

SEQ ID NO: 71627 - DNA, 80 bp, synthetic construct
  source 1..80: mol_type = other DNA
ggcaagcagcagaccttaaaagcactcaggcagccattgaccagatcaatgggaagttgaacagagtaattgagaagacg

SEQ ID NO: 71628 - DNA, 80 bp, synthetic construct
  source 1..80: mol_type = other DNA
aatgagaagttccatcaaatcgaaaaggaattctccgaagtagaagggagaattcaggaccttgagaaatacgttgaaga

SEQ ID NO: 71629 - DNA, 80 bp, synthetic construct
  source 1..80: mol_type = other DNA
tggggttcattatgtgggcctgccagagaggcaacattaggtgcaacatttgcatttaaaggtgcaacatttgcatttaa

SEQ ID NO: 71630 - DNA, 80 bp, synthetic construct
  source 1..80: mol_type = other DNA
taccgagctagttcaaagctcttcaacagggaaaatatgtaacaatccccacaggatccttgatggaagggactgcacac

SEQ ID NO: 71631 - DNA, 80 bp, synthetic construct
  source 1..80: mol_type = other DNA
taatggatgccctactgggggatcctcattgtgatgtctttcaagatgaaacatgggacctctttgtagagcggagcaat

SEQ ID NO: 71632 - DNA, 80 bp, synthetic construct
  source 1..80: mol_type = other DNA
gctttcagcaattgttacccttacgatgtaccagactatgcatcccttcgatccctagttgcatcatcaggcacattgga

SEQ ID NO: 71633 - DNA, 80 bp, synthetic construct
  source 1..80: mol_type = other DNA
gttcatcactgaaggtttcacttggacaggagtaactcaggatggagggagcaatgcttgcaaaaggggacctgctagcg

SEQ ID NO: 71634 - DNA, 80 bp, synthetic construct
  source 1..80: mol_type = other DNA
gtttcttcagtagattgaactggttgactaagtcagaaaacgcatacccagtgttgaacgtgactatgccaaacaatgac

SEQ ID NO: 71635 - DNA, 80 bp, synthetic construct
  source 1..80: mol_type = other DNA
aattttgacaaactatacatctggggagttcatcacccgagcacaagtcaagaacaaaccaacctgtatgttcaagcctc

SEQ ID NO: 71636 - DNA, 80 bp, synthetic construct
  source 1..80: mol_type = other DNA
aacattggatctaggccctgggtaaggggccagtctggcagaataagcatctattggacgatagtcaagcctggtgacgt

SEQ ID NO: 71637 - DNA, 80 bp, synthetic construct
  source 1..80: mol_type = other DNA
aagctgcattttctgtctggccttcggtcaggaccttccaggaaatgacaacagtacagcaacactgtgcctggggcacc

SEQ ID NO: 71638 - DNA, 80 bp, synthetic construct
  source 1..80: mol_type = other DNA
actggtaatcaatagtaatggaaacctaatcgctcctaggggctacttcaaaatgcgcactgggaaaagctcaataatga

SEQ ID NO: 71639 - DNA, 80 bp, synthetic construct
  source 1..80: mol_type = other DNA
caacaggaatgacactatccgtagtaagtctgctaataggattggccaacttggggctgaacattgggcttcatttcaag

SEQ ID NO: 71640 - DNA, 80 bp, synthetic construct
  source 1..80: mol_type = other DNA
atctcagcaacaggaatgacactatccgtagtaagtctgctaatagggttggccaacttggggctgaacattgggcttca

SEQ ID NO: 71641 - DNA, 80 bp, synthetic construct
  source 1..80: mol_type = other DNA
gtattgtggacatccaatagtatagtagcgctctgtggatccaaggagcgattgggatcttggtcgtggcatgatggggc

SEQ ID NO: 71642 - DNA, 80 bp, synthetic construct
  source 1..80: mol_type = other DNA
tctgccactgctattgtaataggcataattgcagtactaataggaatagcgaacttagggttgaatataggactacatct

SEQ ID NO: 71643 - DNA, 80 bp, synthetic construct
  source 1..80: mol_type = other DNA
tgctattgtaataggcataattgcagtactaataggaatagcgaacttagggttgaatataggactacatctgaaaccaa

SEQ ID NO: 71644 - DNA, 80 bp, synthetic construct
  source 1..80: mol_type = other DNA
aagacccaaggaggacaaagtatggtggaccagtaatagcatagtatcgatgtgttccagcacagaattccttggacaat

SEQ ID NO: 71645 - DNA, 80 bp, synthetic construct
  source 1..80: mol_type = other DNA
ttgtaaaacgaccggccagtagcgaaagcaggtactgattcgaaatggaagattttgttcgacaatgcttcaatccgatg

SEQ ID NO: 71646 - DNA, 80 bp, synthetic construct
  source 1..80: mol_type = other DNA
catgcattgagatagctggggcaatgctactatttgttatccatactgtccaaaaaagtacattgtttctactggtcata

SEQ ID NO: 71647 - DNA, 80 bp, synthetic construct
  source 1..80: mol_type = other DNA
gaatatgcatctaagaccagaatttcagaaatataaggaaaaacacccttgtttctactggtcatagctgtttcctgaac

SEQ ID NO: 71648 - DNA, 80 bp, synthetic construct
  source 1..80: mol_type = other DNA
tcctatgcaaacaacaaggagaaagaagtcctcgtactatggggtgttcatcacccgccaaacataggtgaccaaacgac

SEQ ID NO: 71649 - DNA, 80 bp, synthetic construct
  source 1..80: mol_type = other DNA
tttattcgtctccagggagcaaaagcaggtagatattgaaagatgagtcttctaaccgaggtcgaaacgtacgttctctc

SEQ ID NO: 71650 - DNA, 80 bp, synthetic construct
  source 1..80: mol_type = other DNA
atggagagagtagtgcttcttcttgcaatgatcagtcttgtcaaaagtgaccagatttgcattggttaccatgcaaacaa

SEQ ID NO: 71651 - DNA, 80 bp, synthetic construct
  source 1..80: mol_type = other DNA
cactggcaatcatgatagctggtctatctttttggatgtgctccaatggatcattgcaatgcagaatatgcatttgagtt

SEQ ID NO: 71652 - DNA, 80 bp, synthetic construct
  source 1..80: mol_type = other DNA
ttctaaggggatcagttgcacataagtcttgcctgcctgcttgtgtgtatggacttgcagtagcaagtgggcatgaattt

SEQ ID NO: 71653 - DNA, 80 bp, synthetic construct
  source 1..80: mol_type = other DNA
aaggcaaaaaggttgttgaagaaatcctaaagaatgaaactgatggaaatctcagaattgcaattgcttccagccctgca

SEQ ID NO: 71654 - DNA, 80 bp, synthetic construct
  source 1..80: mol_type = other DNA
gaataggggacctccattctctccaaaacaggaacgctacatggagggaagagttgagtcagaaatttgaagagatcaga

SEQ ID NO: 71655 - DNA, 80 bp, synthetic construct
  source 1..80: mol_type = other DNA
aaagaggcccttctacggaaggggtgcctgagtccatgagggaagaatatcggcaggaacagcagagtgctgtggatgtg

SEQ ID NO: 71656 - DNA, 80 bp, synthetic construct
  source 1..80: mol_type = other DNA
tgcttgtgtgtatgggcttgcagtagcaagtgggcagactttgaaagggaaggtttttgtaaaaagccgcgccagtagca

SEQ ID NO: 71657 - DNA, 80 bp, synthetic construct
  source 1..80: mol_type = other DNA
ggtcttggccagacggtgctgagttgccatttaccattgacaagtaatttgttcaaaaaactccttgtttctactggtca

SEQ ID NO: 71658 - DNA, 80 bp, synthetic construct
  source 1..80: mol_type = other DNA
ggggatgtgtttgtcataagggaaccattcatatcatgctcccccttggaatgcagaaccttcttcttgactcaaggggc

SEQ ID NO: 71659 - DNA, 80 bp, synthetic construct
  source 1..80: mol_type = other DNA
aagttccctctccatacaactcaagatttgagtcagtcgcttggtcagcaagtgcttgtcatgatggcatcaattggcta

SEQ ID NO: 71660 - DNA, 80 bp, synthetic construct
  source 1..80: mol_type = other DNA
aaagcaggagtttaaaatgaatccaaaccaaaagataataaccattggttcggtctgtatgacaattggaatggctaact

SEQ ID NO: 71661 - DNA, 80 bp, synthetic construct
  source 1..80: mol_type = other DNA
ataatagcaatcggggtagtgaataccactctgtcaacaatagcccttctcatcggagtggggaatttagttttcaacac

SEQ ID NO: 71662 - DNA, 80 bp, synthetic construct
  source 1..80: mol_type = other DNA
agtcatacatgagaaaataggagacaataacactgtaataaacaacataacaacaacaataataactgaagcgaaaaggc

SEQ ID NO: 71663 - DNA, 80 bp, synthetic construct
  source 1..80: mol_type = other DNA
atgaattcagcataaataatactatcatagagaaagagatctgtccgaaagcagtagactacaggagttggtcaaagccg

SEQ ID NO: 71664 - DNA, 80 bp, synthetic construct
  source 1..80: mol_type = other DNA
tgtaaaaccgactggccagtatacgactagcaaaagcaggggaaaacaaaagcaacaaaaatgaaggcaatactagtagt

SEQ ID NO: 71665 - DNA, 80 bp, synthetic construct
  source 1..80: mol_type = other DNA
tgaaggggggtggacagggatggtagatggatggtacggttatcaccatcaaaatgagcagtggtcaggatatgcagccg

SEQ ID NO: 71666 - DNA, 80 bp, synthetic construct
  source 1..80: mol_type = other DNA
tggtacggttatcaccatcaaaatgagcaggggtcaggatatgcagccgacctgaagagcacacagaatgccattgacga

SEQ ID NO: 71667 - DNA, 80 bp, synthetic construct
  source 1..80: mol_type = other DNA
tggggtaaagctggaatcaacaaggatttaccagattttggcgatctattcaactgtcgccagttcattggtactggtag

SEQ ID NO: 71668 - DNA, 80 bp, synthetic construct
  source 1..80: mol_type = other DNA
attaggatttcagaagcatgagaaaaacacccttgtttctactgacacggtcatagctgtttcctgaccaaatccatttt

SEQ ID NO: 71669 - DNA, 80 bp, synthetic construct
  source 1..80: mol_type = other DNA
atgcaaactaagaggggtagccccattgcatttgggtaaatgtaacattgctggctggatcctgggaaatccagagtgtg

SEQ ID NO: 71670 - DNA, 80 bp, synthetic construct
  source 1..80: mol_type = other DNA
gtgctatggggcattcaccatccatctactagtgctgaccaacaaagtctctatcagaatgcagatgcatatgtttttgt

SEQ ID NO: 71671 - DNA, 80 bp, synthetic construct
  source 1..80: mol_type = other DNA
ggggacatcaagatacagcaagaagttcaagccggaaatagcaataagacccaaagtgagggatcaagaagggagaatga

SEQ ID NO: 71672 - DNA, 80 bp, synthetic construct
  source 1..80: mol_type = other DNA
tgtaaaacggacggccagtagcaaaagcagggtgacaaagacataatggactccaacaccatgtcaagctttcaggtaga

SEQ ID NO: 71673 - DNA, 80 bp, synthetic construct
  source 1..80: mol_type = other DNA
ctacttcgcgctacctttctgacatgaccctcgaggaaatgtcacgagactggttcatgctcatgcctaggcaaaagaca

SEQ ID NO: 71674 - DNA, 80 bp, synthetic construct
  source 1..80: mol_type = other DNA
tttgcgtgcgattggaccaggcggtcatggaaaagaacatagtactgaaagcgaacttcagtgtaatctttaaccgatta

SEQ ID NO: 71675 - DNA, 80 bp, synthetic construct
  source 1..80: mol_type = other DNA
agaacaagagataagagctttctcgtttcagcttatttaatgataaaaaacacccttgtttctactggtcatagctgttt

SEQ ID NO: 71676 - DNA, 80 bp, synthetic construct
  source 1..80: mol_type = other DNA
ggactccagtgtgggagcatgatccgaaatttgtaaaaccgcggccagtagcaaaagcaggtagatatttaaagatgagt

SEQ ID NO: 71677 - DNA, 80 bp, synthetic construct
  source 1..80: mol_type = other DNA
tgtaaaacgacggccagtctcgagcaaaagcaggtcaaatatattcaatatggagagaataaaagaactgagagatctaa

SEQ ID NO: 71678 - DNA, 80 bp, synthetic construct
  source 1..80: mol_type = other DNA
aaaagaattcggatggccatcaattagtgtcgaattgtttaaaaacgaccttgtttctactaggtcatagctgtttcctg

SEQ ID NO: 71679 - DNA, 80 bp, synthetic construct
  source 1..80: mol_type = other DNA
ataactattgggtcaatctgcatggtaattggaatactaagtctggtgctacaaattggaaacataatctctatatgggt

SEQ ID NO: 71680 - DNA, 80 bp, synthetic construct
  source 1..80: mol_type = other DNA
ccgtcaggccccctcaaagccgagatcgcgcagagacttgaagatgtgtttgcagggaagaacaccgatctcgaggcact

SEQ ID NO: 71681 - DNA, 80 bp, synthetic construct
  source 1..80: mol_type = other DNA
acaaaatgaacactcgaattctaatactcacccttacggcagtcatccacacaaatgcagataaaatctgccttgggcac

SEQ ID NO: 71682 - DNA, 80 bp, synthetic construct
  source 1..80: mol_type = other DNA
ccaacaatgaacgagaccaattcaacaacgacgataatcaacaacaatacccagaataatttcactaatatcaccaacat

SEQ ID NO: 71683 - DNA, 80 bp, synthetic construct
  source 1..80: mol_type = other DNA
tatactgaacaaaaatgaagaaagggcattcctaaacctaactaaacccctatgtgaagtgaactcgtggcatatcctgt

SEQ ID NO: 71684 - DNA, 80 bp, synthetic construct
  source 1..80: mol_type = other DNA
caaaagacaatgcagtaagaataggagaagacgctcatatattagtcacgagggaaccctacttatcctgtgatcctcag

SEQ ID NO: 71685 - DNA, 80 bp, synthetic construct
  source 1..80: mol_type = other DNA
agcaacaaaaatgaagacaatactagtagtcctactatatacatttacaaccgcaaatgcagatacattatgtataggtt

SEQ ID NO: 71686 - DNA, 80 bp, synthetic construct
  source 1..80: mol_type = other DNA
gaggtaaatgccaggattgagccattcttgagggatacaccacgccccctcagattgcccgatggacctccctgttctca

SEQ ID NO: 71687 - DNA, 80 bp, synthetic construct
  source 1..80: mol_type = other DNA
tgcttacgagaacaacacttggataaaccagacatatgttaatatcagcaacatcaattttgatgctaaacaggcagcaa

SEQ ID NO: 71688 - DNA, 80 bp, synthetic construct
  source 1..80: mol_type = other DNA
tttcagcgagattagcgggcaattcctctctctgccccgttagtggatgggctatatacagtaaagacaatagtgtaaga

SEQ ID NO: 71689 - DNA, 80 bp, synthetic construct
  source 1..80: mol_type = other DNA
ctcgtttcagcttatttaatgataacagagcgaaagcaggtacctttttggacattttggatcagtacctgctttcgctc

SEQ ID NO: 71690 - DNA, 80 bp, synthetic construct
  source 1..80: mol_type = other DNA
tgtcaacatagagctagagtaactgagtagaaacaaggtacctttttggacaccattttggatcagtacctgctttgctc

SEQ ID NO: 71691 - DNA, 80 bp, synthetic construct
  source 1..80: mol_type = other DNA
agaagacgactaggagcagcaacagctggtataaaagaaggaggatggcaagtagtggatggtggttggtatgggtacca

SEQ ID NO: 71692 - DNA, 80 bp, synthetic construct
  source 1..80: mol_type = other DNA
aaacaactactataacgaaacaaacatcacccaaataagcaataccaacatccaaatggaggagaaagcaaatagagaat

SEQ ID NO: 71693 - DNA, 80 bp, synthetic construct
  source 1..80: mol_type = other DNA
aaatactaaaatgggaacctctaactggaactgctaaacacattgaagaatgctcatgctatggggtgcaagcaggcatt

SEQ ID NO: 71694 - DNA, 80 bp, synthetic construct
  source 1..80: mol_type = other DNA
accttcccaaaatatgttcaaaagggaaaagaacaatcgaccttagccagtgtggactgttgggaacagtcactggacca

SEQ ID NO: 71695 - DNA, 80 bp, synthetic construct
  source 1..80: mol_type = other DNA
tatacagagcaaaggtggagaaagaacatttctaaacctaactaagcccctatgtgaagtaaactcatggcacatcctat

SEQ ID NO: 71696 - DNA, 80 bp, synthetic construct
  source 1..80: mol_type = other DNA
tattggtctcagggagcgaaagcaggtcaaatatattcaatatggagagaataaaagaattaagagatctaatgtcgcag

SEQ ID NO: 71697 - DNA, 80 bp, synthetic construct
  source 1..80: mol_type = other DNA
aaagaattcggatggccatcaattagtgtcgaattgtttaaaaacgaccttgtttctactaatacgagaccatatagatg

SEQ ID NO: 71698 - DNA, 80 bp, synthetic construct
  source 1..80: mol_type = other DNA
tattcgtctcagggagcaaaagcaggggaatttcacaactaaccaagatggaagcaacagcaataataaccatactatta

SEQ ID NO: 71699 - DNA, 80 bp, synthetic construct
  source 1..80: mol_type = other DNA
aaggggttggaatagctgcagacagggaatcaacccaagaggcaattgacaagataacaactagagttaacaatataatt

SEQ ID NO: 71700 - DNA, 80 bp, synthetic construct
  source 1..80: mol_type = other DNA
caaatactggacatttgggcatacaatgcagaattgttagtactcctggaaaaccagaagacactcgatgagcatgatgc

SEQ ID NO: 71701 - DNA, 80 bp, synthetic construct
  source 1..80: mol_type = other DNA
agaaggggtaaagctggaatctgagggaacttacaaaattcttaccatttattcgactgtcgcctcacctctcgtgcttg

SEQ ID NO: 71702 - DNA, 80 bp, synthetic construct
  source 1..80: mol_type = other DNA
tgctgtgtgctacaagcctggggcgtcctctcattctggacacatgcaccatcgaaggactggtctatggcaacccttct

SEQ ID NO: 71703 - DNA, 80 bp, synthetic construct
  source 1..80: mol_type = other DNA
tgttgggagggagagaatggtcctatattgtcgaaagatcatcggctgtaaatggaatgtgttaccctggaaatgtagag

SEQ ID NO: 71704 - DNA, 80 bp, synthetic construct
  source 1..80: mol_type = other DNA
tcaggatgcccaatacacaaacaatgaggggaagagcatcctctttctgtggggcatacatcatccacctaatgacaatg

SEQ ID NO: 71705 - DNA, 80 bp, synthetic construct
  source 1..80: mol_type = other DNA
aacagacgagcttatataagaagactgatacaacaacaagtgtgtcaacagaagacataaataggaccttcaaaccggtg

SEQ ID NO: 71706 - DNA, 80 bp, synthetic construct
  source 1..80: mol_type = other DNA
ggcctcttgtcaatggccagcaggggaggattgactattattggtcagtactaaaaccgggtcagacattgcgggtaaga

SEQ ID NO: 71707 - DNA, 80 bp, synthetic construct
  source 1..80: mol_type = other DNA
acttaatagctccatggtatggacacattctttcaggagaaagccatggaaggatcctaaagactgacttggacagtggc

SEQ ID NO: 71708 - DNA, 80 bp, synthetic construct
  source 1..80: mol_type = other DNA
aattgtgtagtgcagtgtcagactgaaaaaggcggcttaaacacgacactgccattccataatgtcagcaaatacgcctt

SEQ ID NO: 71709 - DNA, 80 bp, synthetic construct
  source 1..80: mol_type = other DNA
tattcgtctcagggagcaaaagcagggtagataatcactcaccgagtgacatcaacattatggcgtctcaaggcaccaaa

SEQ ID NO: 71710 - DNA, 80 bp, synthetic construct
  source 1..80: mol_type = other DNA
aattagtcagaggactgcctagagaaaatacaacaatttggacaagtgggagcagcatttccttttgtggcgttgatagt

SEQ ID NO: 71711 - DNA, 80 bp, synthetic construct
  source 1..80: mol_type = other DNA
ggcgttgatagtgatactgcaaactggtcctggccagacggtgctgagttgccattcaccattgacaagtagttcattga

SEQ ID NO: 71712 - DNA, 80 bp, synthetic construct
  source 1..80: mol_type = other DNA
cctggcaactactgtgacactgcattttaagcaacatgaatgcaactcccctgcaatcaaccaagtgaacccatgtgtgg

SEQ ID NO: 71713 - DNA, 80 bp, synthetic construct
  source 1..80: mol_type = other DNA
ggttggtccacagctaactccaaatcgcaggtcaatagacaggtcatagttgacaacaacaactggtctggttactctgg

SEQ ID NO: 71714 - DNA, 80 bp, synthetic construct
  source 1..80: mol_type = other DNA
tcatggcctgatggggcgaacatcaattttatgcctatataagctttcgcaattttagaaaaaaactccttgtttctact

SEQ ID NO: 71715 - DNA, 80 bp, synthetic construct
  source 1..80: mol_type = other DNA
aatacagaaattggtcaaagccacagtgtcaaattacagggtttgctcctttttctaaggacaattcaattcggctttct

SEQ ID NO: 71716 - DNA, 80 bp, synthetic construct
  source 1..80: mol_type = other DNA
ggtgtatctgcagagacaactggaagggctctaataggcccgttatagacataaatatggcagattatagcattgattcc

SEQ ID NO: 71717 - DNA, 80 bp, synthetic construct
  source 1..80: mol_type = other DNA
gtcattcaattcagactgaaaatcaaaatcaccatgaagcatgcaacccaagcattgctggacaggatgcagcttcagtg

SEQ ID NO: 71718 - DNA, 80 bp, synthetic construct
  source 1..80: mol_type = other DNA
aaggtagtcaaatcaagtgaattaaatgcacctaattaccactacgaggaatgttcttgttatcctgatgcaggtgaagt

SEQ ID NO: 71719 - DNA, 80 bp, synthetic construct
  source 1..80: mol_type = other DNA
taatacatactaaaactgaagaggaaccattcctaaacctaaccaaacccctatgtgaggtgaattcatggcacattcta

SEQ ID NO: 71720 - DNA, 80 bp, synthetic construct
  source 1..80: mol_type = other DNA
caatgtcttctaatggggcatatggagtgaaagggttttcatttaaatacggcaatggcgtctggatcgggaggactaaa

SEQ ID NO: 71721 - DNA, 80 bp, synthetic construct
  source 1..80: mol_type = other DNA
aaaacagaaacgctacatggcgatacgagctgagtcagaagtttgaagagatcagatggctcatcgctgaatgcaggaat

SEQ ID NO: 71722 - DNA, 80 bp, synthetic construct
  source 1..80: mol_type = other DNA
gcaggcattgcaactcttacttgaagttgagagcgagataaggactttctcttttcagcttatttaatactaaaaaacac

SEQ ID NO: 71723 - DNA, 80 bp, synthetic construct
  source 1..80: mol_type = other DNA
ggaaccagctcaacaacaacaataattaataacaatacccaaaataatttcacaaacataactaacataatacatactaa

SEQ ID NO: 71724 - DNA, 80 bp, synthetic construct
  source 1..80: mol_type = other DNA
aaaatacaaaagattgaagaattaacgggaagtgcccagcacatcgaggaatgttcgtgttacggtgcagagaatgtgat

SEQ ID NO: 71725 - DNA, 80 bp, synthetic construct
  source 1..80: mol_type = other DNA
ccaatctgggtctgaatattgggcttcattataaagtggatgataaaccagacataaatgttccaaatgagaacggaacc

SEQ ID NO: 71726 - DNA, 80 bp, synthetic construct
  source 1..80: mol_type = other DNA
atactttcattaatcatgaagactgttattgctttaggctacattttctgtttggcattcggtcaggacctttcagggaa

SEQ ID NO: 71727 - DNA, 80 bp, synthetic construct
  source 1..80: mol_type = other DNA
ctatttgcactatccggggtggcaatagcgcttagtgtgctgaacttattaataggaatttcaaacgtcggactaaatgt

SEQ ID NO: 71728 - DNA, 80 bp, synthetic construct
  source 1..80: mol_type = other DNA
agggatgggttgtaatagccaaagataacgcggtgagattcggagaaagcgaacaaatcattgtcaccagagagccatat

SEQ ID NO: 71729 - DNA, 80 bp, synthetic construct
  source 1..80: mol_type = other DNA
gtgttccagtacagaattcctgggacaatgggactggcctgatggggctaaaatagagtacttcctctaagatacaaaaa

SEQ ID NO: 71730 - DNA, 80 bp, synthetic construct
  source 1..80: mol_type = other DNA
aaatgattgcaatcataatattagcgatagtggcctctaccagcaaatcagataagatctgcattggataccatgccaac

SEQ ID NO: 71731 - DNA, 80 bp, synthetic construct
  source 1..80: mol_type = other DNA
ttcggggccatagcagggtttatagaaggaggatggacaggcatgatagatggatggtacggctaccatcatgagaactc

SEQ ID NO: 71732 - DNA, 80 bp, synthetic construct
  source 1..80: mol_type = other DNA
gtactcagaaagcaattgacgggatcaccaataaagtcaattccattattgacaagatgaacacacaatttgaagcagtg

SEQ ID NO: 71733 - DNA, 80 bp, synthetic construct
  source 1..80: mol_type = other DNA
gagcatgagttctcaaacctagaaagaagaatagacaacctaaacaagagaatggaagatggatttctagatgtgtggac

SEQ ID NO: 71734 - DNA, 80 bp, synthetic construct
  source 1..80: mol_type = other DNA
atgctaatgtaaagaacctatatgaaaaagtgaagtcacaattgagagacaatgcaaaggatttgggtaatgggtgtttt

SEQ ID NO: 71735 - DNA, 80 bp, synthetic construct
  source 1..80: mol_type = other DNA
gaattttggcacaaatgtgatgatgaatgcatcaactcagttaagaatggcacatatgactatccaaaataccaaggcga

SEQ ID NO: 71736 - DNA, 80 bp, synthetic construct
  source 1..80: mol_type = other DNA
gagcaaacttaataggcaggaaatagattcagtaaaactggaaaatctgggtgtgtatcaaatccttgctatttatagta

SEQ ID NO: 71737 - DNA, 80 bp, synthetic construct
  source 1..80: mol_type = other DNA
ggaggagagattgtgcagagtattaaataaagcccctttggatctaaagggttgcaccattgaaggttggattcttggaa

SEQ ID NO: 71738 - DNA, 80 bp, synthetic construct
  source 1..80: mol_type = other DNA
cgatatcgagcagtctagttttgatgggactgattgttgccataggtctttggatgtgctcgaatggttcaatgcagtgc

SEQ ID NO: 71739 - DNA, 80 bp, synthetic construct
  source 1..80: mol_type = other DNA
gatgggactgattgttgccataggtctttggatgtgctcgaatggttcaatgcagtgcaggatatgtatatgattaggaa

SEQ ID NO: 71740 - DNA, 80 bp, synthetic construct
  source 1..80: mol_type = other DNA
acccccaatgtgacatcttacttggggaccaaagttggtcttacatagtagagagacctggatcccaacatgggatatgc

SEQ ID NO: 71741 - DNA, 80 bp, synthetic construct
  source 1..80: mol_type = other DNA
tacccagggacattaaatgaattggaagaattgagagcactcattggatctggagaaagagtacagagatttgaaatgtt

SEQ ID NO: 71742 - DNA, 80 bp, synthetic construct
  source 1..80: mol_type = other DNA
tcccaaaagcacatgggctggagtggacactggcagtggagttacaaaagcctgcccctacaacagtggctcgtctttct

SEQ ID NO: 71743 - DNA, 80 bp, synthetic construct
  source 1..80: mol_type = other DNA
acagaaaccttttgtgggtaataaaaccaaaatccgctgcatatccaataattaggggaacatataataatactggctcc

SEQ ID NO: 71744 - DNA, 80 bp, synthetic construct
  source 1..80: mol_type = other DNA
caaccaattctatatttttggggtgtacaccatcctcctgataccaatgagcaaaataccctgtatggttctggtgatag

SEQ ID NO: 71745 - DNA, 80 bp, synthetic construct
  source 1..80: mol_type = other DNA
atatgttagaatgggtactgagagcatgaactttgccaaaagtccagaaatagcagcaagaccagctgtgaatgggcaaa

SEQ ID NO: 71746 - DNA, 80 bp, synthetic construct
  source 1..80: mol_type = other DNA
gagggaggattgattattattggtctgtattgaagccaggagaaaccttaaatgtagaatccaatggcaatttgatagct

SEQ ID NO: 71747 - DNA, 80 bp, synthetic construct
  source 1..80: mol_type = other DNA
aactcgacaacgcaagtggatacaatattagaaaggaatgtgacagtgacgcattcagttgagctcctagagagtcaaaa

SEQ ID NO: 71748 - DNA, 80 bp, synthetic construct
  source 1..80: mol_type = other DNA
ccttggtatgcttacaaattcaccagttccaataataagggagctgtcttcaaatcaaaccttccaattgaaaattgtga

SEQ ID NO: 71749 - DNA, 80 bp, synthetic construct
  source 1..80: mol_type = other DNA
tactgcctgtcagacagccgctggggcactaaggacaaacaaaactttccaaaatgttagccctctctggattggagaat

SEQ ID NO: 71750 - DNA, 80 bp, synthetic construct
  source 1..80: mol_type = other DNA
gccccaagtatgttaaaagtgatagcctaagactggcaactggtctgagaaatgtcccacaggcagagacaagaggattg

SEQ ID NO: 71751 - DNA, 80 bp, synthetic construct
  source 1..80: mol_type = other DNA
cagtgattgagaaaatgaacactcaattcactgcaattaacaaggaattcaacaatctggaacaaagaattgagaatttg

SEQ ID NO: 71752 - DNA, 80 bp, synthetic construct
  source 1..80: mol_type = other DNA
ttgtgatctggggggtacaccatcctccaactatcaaggaacaagaagatctctatcagaatgctaatgcatatgtttca

SEQ ID NO: 71753 - DNA, 80 bp, synthetic construct
  source 1..80: mol_type = other DNA
gggtacaccatcctccaactatcaaggaacaagaagatctctatcagaatgctaatgcatatgtttcagttgggtcttca

SEQ ID NO: 71754 - DNA, 80 bp, synthetic construct
  source 1..80: mol_type = other DNA
aagggagactcagccattatgaaaagcaatttggaatatggtaattgtaatactaaatgtcagactccaattggtgcaat

SEQ ID NO: 71755 - DNA, 80 bp, synthetic construct
  source 1..80: mol_type = other DNA
gataataacaattggctctgtctctctaaccatcgcaacagtatgctttctcatgcaaattgctatcctagcaacaactg

SEQ ID NO: 71756 - DNA, 80 bp, synthetic construct
  source 1..80: mol_type = other DNA
ccatgcgaggaaaagcagtttttacaaaaatttagtctggctgacggaggcaaatggctcatacccaaatctgagcaagt

SEQ ID NO: 71757 - DNA, 80 bp, synthetic construct
  source 1..80: mol_type = other DNA
cctatgtgaacaatcaagagaaagaagtccttgtgctatggggtgttcatcacccgtctaacatagaggatcaaaggacc

SEQ ID NO: 71758 - DNA, 80 bp, synthetic construct
  source 1..80: mol_type = other DNA
gccattcaattcaaactggcattacctataaaaatagcacctgggtaaatcaaacatatgttaatattagcaacactaac

SEQ ID NO: 71759 - DNA, 80 bp, synthetic construct
  source 1..80: mol_type = other DNA
cagtacagaattccttggacagtggaactggcctgatggggctaaaatagagtacttcctctaagatacagaaaaaagac

SEQ ID NO: 71760 - DNA, 80 bp, synthetic construct
  source 1..80: mol_type = other DNA
gaaacggaaacaatggaagttgcaatgaaattgagtatatagagagaccagagagcgatcacttcatgaacaatacagaa

SEQ ID NO: 71761 - DNA, 80 bp, synthetic construct
  source 1..80: mol_type = other DNA
attgtgatgtgtggagtagaccatgagattgccgactggtcgtggcacgatggagctattcttccttttgacatcgataa

SEQ ID NO: 71762 - DNA, 80 bp, synthetic construct
  source 1..80: mol_type = other DNA
aaatacggggattcgtatatttcgttgagacacttgcgagaagtatttgtgaaaaacttgaacaatcaggactgccagtt

SEQ ID NO: 71763 - DNA, 80 bp, synthetic construct
  source 1..80: mol_type = other DNA
actattcgtattactctgcatgttcactacactaaaagccgacaccatctgtataggctaccatacaaacaattctacgg

SEQ ID NO: 71764 - DNA, 80 bp, synthetic construct
  source 1..80: mol_type = other DNA
tattccacagtcgccagttccctggtcttgttagtctccctgggggcaatcagcttctggatgtgctctaatgggtcttt

SEQ ID NO: 71765 - DNA, 80 bp, synthetic construct
  source 1..80: mol_type = other DNA
tcaggactcagatacctgcggagatactgtcaagcatcgacttgaggtactttaatgattcaaccaggaaaaaaattgag

SEQ ID NO: 71766 - DNA, 80 bp, synthetic construct
  source 1..80: mol_type = other DNA
cacgggtagacaaactaacgcaaggacggcaaacattcgattggactctgaacaggaatcagcccgctgcaacagcatta

SEQ ID NO: 71767 - DNA, 80 bp, synthetic construct
  source 1..80: mol_type = other DNA
cacaggggtgatactcaaatacagacacgtaggtcatttgagataaagaaattatgggatcagacccattctaaggctgg

SEQ ID NO: 71768 - DNA, 80 bp, synthetic construct
  source 1..80: mol_type = other DNA
aggggaaaataaaagcaaccgatatgaaggcaatactggtagtcctgctatatgcatttacaaggggaaatgcagacaca

SEQ ID NO: 71769 - DNA, 80 bp, synthetic construct
  source 1..80: mol_type = other DNA
cctggtaactactataagattgcatcttaaggaatatggatgcagtgcccctttaaaaaaccaagtaataccatgcgagc

SEQ ID NO: 71770 - DNA, 80 bp, synthetic construct
  source 1..80: mol_type = other DNA
caataataatagaaaggaatataacagagatagtgtatctgactaacaccactatagagaaggaaacatgcccaaaatca

SEQ ID NO: 71771 - DNA, 80 bp, synthetic construct
  source 1..80: mol_type = other DNA
ccaaaatggaagcaaaactgtttgtattattctgtacattcactgcactgaaagctgacaccatttgtgtaggctaccat

SEQ ID NO: 71772 - DNA, 80 bp, synthetic construct
  source 1..80: mol_type = other DNA
tctcactattgccacaacatgcttccttaagcaaattgccaccctggtaactaccgtaacattgcatttcaagcatcatg

SEQ ID NO: 71773 - DNA, 80 bp, synthetic construct
  source 1..80: mol_type = other DNA
gaacagtaaaaccacaagctggtcatggccagacggagctgatttgccattcaccattgacaagtagtttatccaaaaaa

SEQ ID NO: 71774 - DNA, 80 bp, synthetic construct
  source 1..80: mol_type = other DNA
atatagtctcgttatggataagccattcaattcagactgaaaaaaaccactctgagatatgcaaccaaaatatcattaca

SEQ ID NO: 71775 - DNA, 80 bp, synthetic construct
  source 1..80: mol_type = other DNA
caataggaaagaagaaacagaaactgaataagaggaattatctaataaaggcattgacactaaacacaatgacaaaagac

SEQ ID NO: 71776 - DNA, 80 bp, synthetic construct
  source 1..80: mol_type = other DNA
ttacaggagaagaaatggcaacaaaagccgactacacactagatgaagaaagtagagccagaataaagaccaggctattt

SEQ ID NO: 71777 - DNA, 80 bp, synthetic construct
  source 1..80: mol_type = other DNA
acaccacgaccccttagactgccaagtgggcctccctgctttcaaagatccaaatttcttttgatggatgctctgaaatt

SEQ ID NO: 71778 - DNA, 80 bp, synthetic construct
  source 1..80: mol_type = other DNA
aggagaaggaataccgctttatgatgcggtcagatgcatgaagacgttctttgggtggaaggaacctaccatcattaaac

SEQ ID NO: 71779 - DNA, 80 bp, synthetic construct
  source 1..80: mol_type = other DNA
agttaaaatgaagtgggcactcggtgaaaataaggaggagagttgatacaaaccctggccatgcagatctcagtgccaag

SEQ ID NO: 71780 - DNA, 80 bp, synthetic construct
  source 1..80: mol_type = other DNA
aagagggccttctacggaaggagtgcctgagtccatgagggaagaatatcaacaggaacaagcaggagttgtgggaattt

SEQ ID NO: 71781 - DNA, 80 bp, synthetic construct
  source 1..80: mol_type = other DNA
gaagatggtgctattgtggctgaaatatctcccattccctccatgccaggacattctacagaggatgtcaaaaatgcaat

SEQ ID NO: 71782 - DNA, 80 bp, synthetic construct
  source 1..80: mol_type = other DNA
ccattgaaaaagtatgtttcttcatacaaattcccttttaggcaaggtttgggcaattgcatttcaagcaaaatgaatga

SEQ ID NO: 71783 - DNA, 80 bp, synthetic construct
  source 1..80: mol_type = other DNA
ggcatcccttggacaaaccaaagggtgcaaggtgaaccattcttaataaaaaaaaacataacagagatagtgtatttgaa

SEQ ID NO: 71784 - DNA, 80 bp, synthetic construct
  source 1..80: mol_type = other DNA
ataaccattggttcagtgtccttaggattggtagtacttaatattctcctacatatagttagcattacaataacagtgtt

SEQ ID NO: 71785 - DNA, 80 bp, synthetic construct
  source 1..80: mol_type = other DNA
gtcatccacacaaatgcagataaaatctgccttgggcaccatgccgtatcaaatggtaccaaagtgaacacactcacaga

SEQ ID NO: 71786 - DNA, 80 bp, synthetic construct
  source 1..80: mol_type = other DNA
cagataatgctgctttcccgcaaatgacaaaatcatacaaaaacatcagaaatgagcctgccttaattgtgtggggaatt

SEQ ID NO: 71787 - DNA, 80 bp, synthetic construct
  source 1..80: mol_type = other DNA
ccctgggttttgcttaatgcatcttggttcaactccttcctcacacatgcactaaagtagttgtggcaatgctactattt

SEQ ID NO: 71788 - DNA, 80 bp, synthetic construct
  source 1..80: mol_type = other DNA
agaagcctaaatttcttcctgatttgtatacggagggaagtccacatatattacctagagaaagccaacaaaataaaatc

SEQ ID NO: 71789 - DNA, 80 bp, synthetic construct
  source 1..80: mol_type = other DNA
agatgtgtctttccaggggcggggagtcttcgagctctcggacgaaaaggcaacgaacccgatcgtgccttcctttgaca

SEQ ID NO: 71790 - DNA, 80 bp, synthetic construct
  source 1..80: mol_type = other DNA
aatctctagaggatccccgggtactcgagcatactgaatcgtacagtcagtcatcgaccaaaagaattcggatggccatc

SEQ ID NO: 71791 - DNA, 80 bp, synthetic construct
  source 1..80: mol_type = other DNA
agagttatcaatgggtggaccacggctaattccaaatcgcaggtaaatagacaaatcatagttgataatagtaactggtc

SEQ ID NO: 71792 - DNA, 80 bp, synthetic construct
  source 1..80: mol_type = other DNA
ataaaaacaaccaaaatgaagacaatactagtagtcttactatatacatttacaactgcagatgcagacacattatgtat

SEQ ID NO: 71793 - DNA, 80 bp, synthetic construct
  source 1..80: mol_type = other DNA
taaaagcaacaagaatgaaggcaatactagtagtcttgctatatacatttacaaccgcaaatgcagacacattatgtata

SEQ ID NO: 71794 - DNA, 80 bp, synthetic construct
  source 1..80: mol_type = other DNA
gagatagtgcacctgaatggtactatcatagagaaagaaagttgtcccagaacagcagaatacaagaattggtcaaaacc

SEQ ID NO: 71795 - DNA, 80 bp, synthetic construct
  source 1..80: mol_type = other DNA
aatgctcttgttaccccagatatccagaagttatatgtgtatgcagagacaattggaagggatccaatagaccagtacta

SEQ ID NO: 71796 - DNA, 80 bp, synthetic construct
  source 1..80: mol_type = other DNA
ggatactttcatcaaccatgaagaccatcattgctctgatctacattttctgtctggcttctggccgggacttttcgggt

SEQ ID NO: 71797 - DNA, 80 bp, synthetic construct
  source 1..80: mol_type = other DNA
aatggcagcaatacagcgacattgtgcctaggacaccatgcagtgccgaatgggacaatagtgaagacaatcacagacga

SEQ ID NO: 71798 - DNA, 80 bp, synthetic construct
  source 1..80: mol_type = other DNA
aaagagcgattgggatcatggtcctggcatgatggtgctgaaatcatctactttaagtaggaatgattcagaaaaaacac

SEQ ID NO: 71799 - DNA, 80 bp, synthetic construct
  source 1..80: mol_type = other DNA
aatttaacgacaacaataattaacaataacacccagaataatttcacaaatatcactaacattatattgaacagagacga

SEQ ID NO: 71800 - DNA, 80 bp, synthetic construct
  source 1..80: mol_type = other DNA
ggataattctatcaatcatgaagaccatcattgttctaaattaccttttctgtctggctttcagccaagattactcagag

SEQ ID NO: 71801 - DNA, 80 bp, synthetic construct
  source 1..80: mol_type = other DNA
agcaaaagcaggagtttaaaatgaatccaaatcaaaagacaacaaccattggaccaatccgcatggcaactggaatagcc

SEQ ID NO: 71802 - DNA, 80 bp, synthetic construct
  source 1..80: mol_type = other DNA
ggggatgtgcctgcaactagagagccgcccatcccatgctcccacctggaatgcagaaccctccccccgacccagggagc

SEQ ID NO: 71803 - DNA, 80 bp, synthetic construct
  source 1..80: mol_type = other DNA
agcccaatgccacagattgggaacactactccaatgtgggccagtcattcaattcaaacaaggaatcaacaccaagccga

SEQ ID NO: 71804 - DNA, 80 bp, synthetic construct
  source 1..80: mol_type = other DNA
cgaatcaatagtggtactggagctggaaaaccgaagtttctaccagatttgtatgattacaaggagaacagattcatcga

SEQ ID NO: 71805 - DNA, 80 bp, synthetic construct
  source 1..80: mol_type = other DNA
gctcaatgcgtcttggtttaactccttcctgacacatgcattaaaatagttatggcagtgctactatttgttatccgtac

SEQ ID NO: 71806 - DNA, 80 bp, synthetic construct
  source 1..80: mol_type = other DNA
tactaccatggaaaaagaaattcattctaaggtggtagaatacagaaattggtcgaaaccccaatgccaaattacgggtt

SEQ ID NO: 71807 - DNA, 80 bp, synthetic construct
  source 1..80: mol_type = other DNA
tggaacaggctcatggcctgatggggcagatatcaatttcatgcctatataagctttcgcaaactagtggcaaactagtg

SEQ ID NO: 71808 - DNA, 80 bp, synthetic construct
  source 1..80: mol_type = other DNA
atggttgcctacatgctggaaagggagctagtgaggaaaacacggttcctgccagtagctggtggaaccagcagtgttta

SEQ ID NO: 71809 - DNA, 80 bp, synthetic construct
  source 1..80: mol_type = other DNA
actactagagatgtgtcacagtactcaaataggggggataagaatggtggacatactcaggcagaatccaacggaggagc

SEQ ID NO: 71810 - DNA, 80 bp, synthetic construct
  source 1..80: mol_type = other DNA
tggtggacatactcaggcagaatccaacggaggagcaggctgttgacatatgcaaagcagcaatgggtttgagaatcagt

SEQ ID NO: 71811 - DNA, 80 bp, synthetic construct
  source 1..80: mol_type = other DNA
atggaaataaaaactctgatagctgcacttctgattgtaacaacgagcaaagcggacaagatctgtatagggtaccaatc

SEQ ID NO: 71812 - DNA, 80 bp, synthetic construct
  source 1..80: mol_type = other DNA
aacgggaggaagcccagatcctggggtgaaagggtttgcatttttagacggggaaaactcatggatcggaaggacaatta

SEQ ID NO: 71813 - DNA, 80 bp, synthetic construct
  source 1..80: mol_type = other DNA
agcaagtacaaaaaatcaaaggtcctaaccgatacaagccgccccaatgatcccatcaatgggaattgtgatgcgccaat

SEQ ID NO: 71814 - DNA, 80 bp, synthetic construct
  source 1..80: mol_type = other DNA
actctcccgtatttaactacaataaggtgaccaaaaggataacagtccttggaaaggacgcaggtgcattaacagaaggt

SEQ ID NO: 71815 - DNA, 80 bp, synthetic construct
  source 1..80: mol_type = other DNA
atggaagcaaaactactcatattattctgtatgttcactgcactgaaagcagacaccatctgtataggctatcatgcaaa

SEQ ID NO: 71816 - DNA, 80 bp, synthetic construct
  source 1..80: mol_type = other DNA
acggctggaatagagtctgcggtactgagaggattcctaattctagggaaggaaaacaaaagatatggaccagcattgag

SEQ ID NO: 71817 - DNA, 80 bp, synthetic construct
  source 1..80: mol_type = other DNA
ccgaaagtctacaaaacatactttgaaaaagttgaaagattaaagcatgggatctttggacccgtccattttcggaatca

SEQ ID NO: 71818 - DNA, 80 bp, synthetic construct
  source 1..80: mol_type = other DNA
cttatgaaaacaacacttggataaatcagacatatgtaaacatcagcaacaccaaatttgttgctgagcagaacgtagtt

SEQ ID NO: 71819 - DNA, 80 bp, synthetic construct
  source 1..80: mol_type = other DNA
tcagtgagattggcgggcaattcctccctctgccctgttagtggatgggccatatacagtaaagataatagtgtaagaat

SEQ ID NO: 71820 - DNA, 80 bp, synthetic construct
  source 1..80: mol_type = other DNA
tcgtgcgggaaaacagatagtgaaacgtattttagaggaagatcgcgaagaagcacttaaaataaccattgcttctgtgc

SEQ ID NO: 71821 - DNA, 80 bp, synthetic construct
  source 1..80: mol_type = other DNA
ttgagagagcgactgttatggccgctttcgttgggaacaatgagggacggacatcagatatgcgaaccgaaatcataagg

SEQ ID NO: 71822 - DNA, 80 bp, synthetic construct
  source 1..80: mol_type = other DNA
atgaaagcaaaactgtttgtattactctgtacactcactgtgctgaaagccgacaccatctgcgtaggctaccatgctaa

SEQ ID NO: 71823 - DNA, 80 bp, synthetic construct
  source 1..80: mol_type = other DNA
ctccgactaacaatgatcaacagagtctttatcagaatgctgatacatacgtttcagttggttcatcaaaatactaccag

SEQ ID NO: 71824 - DNA, 80 bp, synthetic construct
  source 1..80: mol_type = other DNA
aaatccaaacaagaagatcatttgagctgagaaggctatgggaacaaacccattcaaaaacagggctactggtttcagat

SEQ ID NO: 71825 - DNA, 80 bp, synthetic construct
  source 1..80: mol_type = other DNA
atggaagcaaaaatggtggtattattctgtacattcactgtgctgaaagctgataccatctgtgtaggatatcatgctaa

SEQ ID NO: 71826 - DNA, 80 bp, synthetic construct
  source 1..80: mol_type = other DNA
gggatcagtaacaaagtgaactcaataattgaaaaaatgaacactcaatttacttcagtgggcaaggaattcaatgatct

SEQ ID NO: 71827 - DNA, 80 bp, synthetic construct
  source 1..80: mol_type = other DNA
agagaggaacacaacagagatagtgtacttggctaacaccaccatagagaaagaaatatgctccaaaacagtggagtata

SEQ ID NO: 71828 - DNA, 80 bp, synthetic construct
  source 1..80: mol_type = other DNA
gaccagcaaagcctatatcagaatgcttatacatatgtttcagtcgaatcatcaaaatattaccgaaggttcactccaga

SEQ ID NO: 71829 - DNA, 80 bp, synthetic construct
  source 1..80: mol_type = other DNA
atcgaacaagccacttgtgctggaaaacaaatagtagagcacattatggaggaagagtacgatgaggcacttaagataac

SEQ ID NO: 71830 - DNA, 80 bp, synthetic construct
  source 1..80: mol_type = other DNA
aaaggagtaacggcatcgtgtccccgtaatgggaaaagcagtttttacagaaatttgctgtggttgacggagaaagatgg

SEQ ID NO: 71831 - DNA, 80 bp, synthetic construct
  source 1..80: mol_type = other DNA
cgtctctaatgcatcggtggatgaatgcgacacaaagtgtcaaacaccccagggagctataaacagtagtcttcctttcc

SEQ ID NO: 71832 - DNA, 80 bp, synthetic construct
  source 1..80: mol_type = other DNA
tcctacacgaacaacaaagagaaagaagttcttgtgatatggggtgttcaccatccgtctaacatagagaaccaaaaagc

SEQ ID NO: 71833 - DNA, 80 bp, synthetic construct
  source 1..80: mol_type = other DNA
catctaccgtaaggaaactgcttatatttctgtagtgtcctctcattataaccggagattcaccccagaaattgcaagaa

SEQ ID NO: 71834 - DNA, 80 bp, synthetic construct
  source 1..80: mol_type = other DNA
atgaatgctatcatcgctttaagctacattctctgtctggttcttggtcaaggattctcaagaaatgacgacaacatagc

SEQ ID NO: 71835 - DNA, 80 bp, synthetic construct
  source 1..80: mol_type = other DNA
atgaagactattatcgctttgagctacattttttgtctgggtctggggcaagaattttcaaaaaatgacgaaagcatagc

SEQ ID NO: 71836 - DNA, 80 bp, synthetic construct
  source 1..80: mol_type = other DNA
aaaaaggaacataacagagatagtgtacttgaataacaccaccatagagaaagaaatgtgccccaaaacggtggagtata

SEQ ID NO: 71837 - DNA, 80 bp, synthetic construct
  source 1..80: mol_type = other DNA
atggaagcaaaactatttgtattattctgtgcattcactacgctgaaagctgacaccatctgtgtaggctaccatgctaa

SEQ ID NO: 71838 - DNA, 80 bp, synthetic construct
  source 1..80: mol_type = other DNA
cacattgaaagccaacttcagtgtgatttttgatcaactggagactctgacactccttagagctttcacagaagaagggg

SEQ ID NO: 71839 - DNA, 80 bp, synthetic construct
  source 1..80: mol_type = other DNA
agaaaggaacacaacggaggtggtatacttgattaacaccaccatagagaaagaaatatgccccaaaacagtgaaataca

SEQ ID NO: 71840 - DNA, 80 bp, synthetic construct
  source 1..80: mol_type = other DNA
atgaatccaaatcagaaaataataacaattgggtcactatccttgggattggtagtccttaatatcctcttacatatagt

SEQ ID NO: 71841 - DNA, 80 bp, synthetic construct
  source 1..80: mol_type = other DNA
ttacctatgtaaataacacatgggtgaaccgaacttatgtgaacattaacaatatcaaaattgctactattcaggatgtg

SEQ ID NO: 71842 - DNA, 80 bp, synthetic construct
  source 1..80: mol_type = other DNA
ggcgctttgcttaatgacaaacctttcaatggaacccgccaggacaggaatccccatagaaccctgatgagctgccccat

SEQ ID NO: 71843 - DNA, 80 bp, synthetic construct
  source 1..80: mol_type = other DNA
aaacataatctcattatggattaaccactccatcccgaccaaatgggaaaatcccactgaaatgtgccacccaagtggca

SEQ ID NO: 71844 - DNA, 80 bp, synthetic construct
  source 1..80: mol_type = other DNA
aaagtcagaaaaaaaagaaaggaacctacgggaaaacgctgccgtcacgggcaatgggcgcttcaaaatacaccacaaat

SEQ ID NO: 71845 - DNA, 80 bp, synthetic construct
  source 1..80: mol_type = other DNA
gcgtcaatgcctgcatacaatcaatcagaaatggaacttatgaccatgatatatacagaaacgaggcattaaacaatcgg

SEQ ID NO: 71846 - DNA, 80 bp, synthetic construct
  source 1..80: mol_type = other DNA
agcaaaagcaggagtttaaaatgaatacaaatcaaagaataataaccattgggacagtctgtctgatagtcggaataacc

SEQ ID NO: 71847 - DNA, 80 bp, synthetic construct
  source 1..80: mol_type = other DNA
tagatatggcaatggtgtttggatagggagaactaaaagtatcagctctagaagtggatttgagatgatttgggatccaa

SEQ ID NO: 71848 - DNA, 80 bp, synthetic construct
  source 1..80: mol_type = other DNA
aaatcgcaagctggtcatggccagacggagctgatctgccattcattgacaagtagtttatccaaaaaactccttgtttc

SEQ ID NO: 71849 - DNA, 80 bp, synthetic construct
  source 1..80: mol_type = other DNA
tgacggcccaccttgctctcaaaggtcgaaattcctactaatggatgccctcaagttaagtattgaggacccaagccatg

SEQ ID NO: 71850 - DNA, 80 bp, synthetic construct
  source 1..80: mol_type = other DNA
agtttcataatgaatccaaatcagaaaatcataaccatcggcagtgttagtattatattaacaacgataggccttcttct

SEQ ID NO: 71851 - DNA, 80 bp, synthetic construct
  source 1..80: mol_type = other DNA
ttgcccctatactaccagtggatcatccttttacaggaatcttttgtggataataaaaacaaggtctgctgcatacccag

SEQ ID NO: 71852 - DNA, 80 bp, synthetic construct
  source 1..80: mol_type = other DNA
ggttataccatggacaaccgaacaaagacaatgaccatcacctttctcatcctcctgttcacagtagtgaaaggggacca

SEQ ID NO: 71853 - DNA, 80 bp, synthetic construct
  source 1..80: mol_type = other DNA
gaagagaggaagctcaggaattatgaagacagagaaaacgctagaaagttgtgaaaccaaatgtcagacccccttggggg

SEQ ID NO: 71854 - DNA, 80 bp, synthetic construct
  source 1..80: mol_type = other DNA
ggataattctattaatcatgaagaccatcattgtcctaagctatcttttctgtctggctctcagccaagattattcaggg

SEQ ID NO: 71855 - DNA, 80 bp, synthetic construct
  source 1..80: mol_type = other DNA
ggctaggaagaactgtgtcgactagtggaaggtcaggctttgaaatcatcaaagtcacagatgggtggattaactccccc

SEQ ID NO: 71856 - DNA, 80 bp, synthetic construct
  source 1..80: mol_type = other DNA
tgggcctttgacaatggagatgatgtgtggatgggaagaactgtcagcaaagattcacgctcaggttacgagactttcaa

SEQ ID NO: 71857 - DNA, 80 bp, synthetic construct
  source 1..80: mol_type = other DNA
ggttggtccacaccaaattcaaaatcacaggtaagtagacaggttatagttgacaataataattggtctggttattctgg

SEQ ID NO: 71858 - DNA, 80 bp, synthetic construct
  source 1..80: mol_type = other DNA
ggaatatctgggtaacaagggaaccctatgtgtcatgcgatcctagtaaatgttatcaattcgcactagggcagggaacc

SEQ ID NO: 71859 - DNA, 80 bp, synthetic construct
  source 1..80: mol_type = other DNA
gctgcacatttgtgttacaggggatgacaaaaatgcgactgctagtatcatctataatgggaaactagctgacagtattg

SEQ ID NO: 71860 - DNA, 80 bp, synthetic construct
  source 1..80: mol_type = other DNA
ttttggcaaccactgtgacactgcatttcaagcaacatgaatgcaactaccccccaatcaaccaagtgaccccctgtgaa

SEQ ID NO: 71861 - DNA, 80 bp, synthetic construct
  source 1..80: mol_type = other DNA
cataaggtgtgtctgtagagacaactggaaaggctctaataggcctgttattgaaataaatatggaagactatagtatcg

SEQ ID NO: 71862 - DNA, 80 bp, synthetic construct
  source 1..80: mol_type = other DNA
tttatgtacgaatggaccaggcgatcatggaaaagaacatcatactgaaagcgaatttcagtgtgatttttgaccggttg

SEQ ID NO: 71863 - DNA, 80 bp, synthetic construct
  source 1..80: mol_type = other DNA
catttatgcaagccttacaactattgcttgaagtagaacaagagatgagaactttctcgtttcagcttatttaataataa

SEQ ID NO: 71864 - DNA, 80 bp, synthetic construct
  source 1..80: mol_type = other DNA
gccattcaattcaagctgggagtagcacctgggtgaatcaaacatatgttaatattagcaacactaacgttgtcgctgga

SEQ ID NO: 71865 - DNA, 80 bp, synthetic construct
  source 1..80: mol_type = other DNA
aaaagcaattaaaatgaaggcaatactattagtcttgctatatacattcacggccgcaaacacagacacaatatgtatag

SEQ ID NO: 71866 - DNA, 80 bp, synthetic construct
  source 1..80: mol_type = other DNA
tgtggcgtaaatggtgaatccgcaagctggtcatggccagacggagctgatctgccattcaccattgacaagtagtttat

SEQ ID NO: 71867 - DNA, 80 bp, synthetic construct
  source 1..80: mol_type = other DNA
ggaaaccgatagtagtttctctataaagcaggatgttatagcattaactgattggtcaggatacagtgggagctttgtcc

SEQ ID NO: 71868 - DNA, 80 bp, synthetic construct
  source 1..80: mol_type = other DNA
tggtgtagagagtgaaaccgctagctggtcatggccagacggagctgatctgccattcactattgacaagtagtttagcc

SEQ ID NO: 71869 - DNA, 80 bp, synthetic construct
  source 1..80: mol_type = other DNA
cactctgtcaatctacttgaggacagtcacaatggaaagctgtgctcactaaagggaatagtccccctgcaattgggtaa

SEQ ID NO: 71870 - DNA, 80 bp, synthetic construct
  source 1..80: mol_type = other DNA
aaatgaatacaaaccaaagaataataaccatcggaacagcctgtctgatagttggactagttagtctattattgcagata

SEQ ID NO: 71871 - DNA, 80 bp, synthetic construct
  source 1..80: mol_type = other DNA
gtcatctaattcaaactgggaaaaaccattctgagatatgcaatcaaaatatcattacatatgaaaacaaaacatgggtg

SEQ ID NO: 71872 - DNA, 80 bp, synthetic construct
  source 1..80: mol_type = other DNA
tagtggaagcagtgtttctttctgtggcgtagacagtgaaaccgcaagctggtcatggccagacggggctaatctgccat

SEQ ID NO: 71873 - DNA, 80 bp, synthetic construct
  source 1..80: mol_type = other DNA
gcgtagacagtgaaaccgcaagctggtcatggccagacggggctaatctgccattcaccattgacaagtagtttatccaa

SEQ ID NO: 71874 - DNA, 80 bp, synthetic construct
  source 1..80: mol_type = other DNA
caaactatttgaatggatgtcaatccgactctacttttcctaaaagttccagcgcagaacgccataagcaccacattccc

SEQ ID NO: 71875 - DNA, 80 bp, synthetic construct
  source 1..80: mol_type = other DNA
ctgaagtctgcttaaagaaattgagtctgtaaacaatgctgtagtaatgccagcccatggtccggccaaaagtatggaat

SEQ ID NO: 71876 - DNA, 80 bp, synthetic construct
  source 1..80: mol_type = other DNA
gattgatgccagaattgactttgagtctggaaggattaagaaggaagagttctctgagatcatgaagatctgttccacca

SEQ ID NO: 71877 - DNA, 80 bp, synthetic construct
  source 1..80: mol_type = other DNA
tcaaatatattcaatatggagagaataaaagaactgagagatctaatgtcacagtcccgcacccgcgagatactcaccaa

SEQ ID NO: 71878 - DNA, 80 bp, synthetic construct
  source 1..80: mol_type = other DNA
ctgatgaaggcacagctggagtggagtctgccgttctgagaggatttctcattttaggcaaagaagacaaaagatatggc

SEQ ID NO: 71879 - DNA, 80 bp, synthetic construct
  source 1..80: mol_type = other DNA
ggataaccaaatcaatcaaaatggaagcaaaactatttgtactattctgtacattcactgcactgaaagctgacaccatc

SEQ ID NO: 71880 - DNA, 80 bp, synthetic construct
  source 1..80: mol_type = other DNA
agaatggcaacaggactaagaaacgtcccatccattcaatcccgaggactgttcggggcaattgctggattcattgaggg

SEQ ID NO: 71881 - DNA, 80 bp, synthetic construct
  source 1..80: mol_type = other DNA
cgtcccatccattcaatcccgaggactgttcggggcaattgctggattcattgaggtgggatggacaggcatgatagatg

SEQ ID NO: 71882 - DNA, 80 bp, synthetic construct
  source 1..80: mol_type = other DNA
gaaggtcagatcgcagttgaggaacaatgccaaagaaattgggaatggttgctttgagttctaccacaagtgtgacgatg

SEQ ID NO: 71883 - DNA, 80 bp, synthetic construct
  source 1..80: mol_type = other DNA
ctcactcaattaatttgcttgaagacagccataatgggaaactctgcagcctaaacggaatagctcccctgcaactaggg

SEQ ID NO: 71884 - DNA, 80 bp, synthetic construct
  source 1..80: mol_type = other DNA
acgactatcccaagtattcagaagagtccaaactgaatcgagaagaaatagatggagtgaagctagaatcaatgggagtt

SEQ ID NO: 71885 - DNA, 80 bp, synthetic construct
  source 1..80: mol_type = other DNA
taccaaattttggcgatctattccacagtcgccagttccctaatctggttagtctccctgggggcaatcagtttctggat

SEQ ID NO: 71886 - DNA, 80 bp, synthetic construct
  source 1..80: mol_type = other DNA
tttctggatgtgttccaatgggtcattgcaatgcagaatatgcatttaaagctggaatttcagaatgtatggaaaaacac

SEQ ID NO: 71887 - DNA, 80 bp, synthetic construct
  source 1..80: mol_type = other DNA
aaatgcaatgtagcaggatggcttcttggcaatccggagtgtgatcttctactgactgcaaactcatggtcatacataat

SEQ ID NO: 71888 - DNA, 80 bp, synthetic construct
  source 1..80: mol_type = other DNA
agaaactacaaattcagagaacggaacatgctaccccggtgaattcatagactatgaagaattaagagagcagctaagtt

SEQ ID NO: 71889 - DNA, 80 bp, synthetic construct
  source 1..80: mol_type = other DNA
cagtttcttcatttgaaaaatttgtaattttcccaaaagaaagctcatggccaggtcatgagacaactaaaggtgttacc

SEQ ID NO: 71890 - DNA, 80 bp, synthetic construct
  source 1..80: mol_type = other DNA
gctgcatgctcttataacgggggaagcagtttttatcggaatttgctgtggataataaagaagggaaattcatacccaaa

SEQ ID NO: 71891 - DNA, 80 bp, synthetic construct
  source 1..80: mol_type = other DNA
gatcagcaaaacatacacgaacaataaggggaaagaagtgcttgtgctctggggagttcaccaccctccaaatgtcgatg

SEQ ID NO: 71892 - DNA, 80 bp, synthetic construct
  source 1..80: mol_type = other DNA
aacaacaagaactctaccagaatactaatgcatacgtttcagttgggtcgtcaaaatacaaccggaggttcactccagaa

SEQ ID NO: 71893 - DNA, 80 bp, synthetic construct
  source 1..80: mol_type = other DNA
ctagcagccagacctaaagtaagaggacaggcaggcagaattaattactattggaccctgttagagcaaggagacaacat

SEQ ID NO: 71894 - DNA, 80 bp, synthetic construct
  source 1..80: mol_type = other DNA
aacatttgaggccactggaaatttaatagcaccatggtacgctttcgcactgaataaaggttctggctctggaatcatca

SEQ ID NO: 71895 - DNA, 80 bp, synthetic construct
  source 1..80: mol_type = other DNA
catcagataccccagtccataattgtgacacaaaatgccaaacccctcatggggctctgaacagcagcctcccttttcag

SEQ ID NO: 71896 - DNA, 80 bp, synthetic construct
  source 1..80: mol_type = other DNA
aatgtacatcctatcactattggagaatgtcccaaatacgtcaagaccacaaaactaagaatggcaacaggactaagaaa

SEQ ID NO: 71897 - DNA, 80 bp, synthetic construct
  source 1..80: mol_type = other DNA
taattctattaatcatgaagaccattattgttctaagctgttttttctgtctggcttcaagccaagacctctcggggaac

SEQ ID NO: 71898 - DNA, 80 bp, synthetic construct
  source 1..80: mol_type = other DNA
tgtattgaacagaaaagaggagagggcatttctaaacctaactaagcctttatgcgaagtaaactcatggcacattctgt

SEQ ID NO: 71899 - DNA, 80 bp, synthetic construct
  source 1..80: mol_type = other DNA
ggaatttcacaaacaatcaagatggaaataaaggcactgatagctgtacttctgattgtaacaacgggcgatgcagacaa

SEQ ID NO: 71900 - DNA, 80 bp, synthetic construct
  source 1..80: mol_type = other DNA
gcacggctggagtggagtctgctgttctgagagggtttctcatcttgggcaaagaagacaagagatatggtccagcatta

SEQ ID NO: 71901 - DNA, 80 bp, synthetic construct
  source 1..80: mol_type = other DNA
caatgtcctctaacggggcatatggagtaaaagggttctcatttaagtacggaaatggtgtttggatcggaagaacaaaa

SEQ ID NO: 71902 - DNA, 80 bp, synthetic construct
  source 1..80: mol_type = other DNA
gctacggagacagtagaagccgcgaatatcgagaaaatctgcaccaaagggaaaaggtcaaccgacctggggcagtgtgg

SEQ ID NO: 71903 - DNA, 80 bp, synthetic construct
  source 1..80: mol_type = other DNA
actcttaggaaccctaataggacctcctcaatgcgatcagttcctggagtttgaatccgatttaataattgagcgaagag

SEQ ID NO: 71904 - DNA, 80 bp, synthetic construct
  source 1..80: mol_type = other DNA
ggatacaaaatgaacactcaaattctagtattcattgcttgtgtgctgattgggactaagggagacaaaatatgccttgg

SEQ ID NO: 71905 - DNA, 80 bp, synthetic construct
  source 1..80: mol_type = other DNA
tcgataaggagccgatgggtttcacatataatggaataagaaccaatggagcaacaagtgcctgcagaagattaggttct

SEQ ID NO: 71906 - DNA, 80 bp, synthetic construct
  source 1..80: mol_type = other DNA
atcagcaatcgttcactccgagtccgggagcacgaccacaggtaaatggacagcctggaagaatcgatttccattggatg

SEQ ID NO: 71907 - DNA, 80 bp, synthetic construct
  source 1..80: mol_type = other DNA
cttcttgaccccaacgacacagtgactttcaccttcaatggggcattcatagcccctgatagggcaagtttctttaggtg

SEQ ID NO: 71908 - DNA, 80 bp, synthetic construct
  source 1..80: mol_type = other DNA
atacaaaatgaacactcaaattctggcattcattgcttgtatgctgattggaatcaaaggagacaaaatatgccttgggc

SEQ ID NO: 71909 - DNA, 80 bp, synthetic construct
  source 1..80: mol_type = other DNA
tatagtggaaaaggaaaacccaatgaatggtctgtgctacccaggcagcttcaatgattatgaagaactgaaacatctcc

SEQ ID NO: 71910 - DNA, 80 bp, synthetic construct
  source 1..80: mol_type = other DNA
gtcaggctgcggatcacaaaagtacccaggcagctatagatcaaataacagggaaattgaacaggctgatagaaaaaaca

SEQ ID NO: 71911 - DNA, 80 bp, synthetic construct
  source 1..80: mol_type = other DNA
tggtgaaaaaaggaaattcatacccaaagctcaacgcatcctatgtcaacaataagaaaaaggaggtccttgtgttatgg

SEQ ID NO: 71912 - DNA, 80 bp, synthetic construct
  source 1..80: mol_type = other DNA
atgggtgaaccacacatatgtaaatattagcaatatcaacacagttgctaaacggagcgtggcttcaacgataatatcgg

SEQ ID NO: 71913 - DNA, 80 bp, synthetic construct
  source 1..80: mol_type = other DNA
aagggaaaattattaagactattgaactggatgcacccaattaccactatgaggaatgctcctgttaccctgactcaaac

SEQ ID NO: 71914 - DNA, 80 bp, synthetic construct
  source 1..80: mol_type = other DNA
gtgacaaagacataatggactcaaatactgtgtcaagctttcaggtagactgtttcctctggcacatccgcaaacggttt

SEQ ID NO: 71915 - DNA, 80 bp, synthetic construct
  source 1..80: mol_type = other DNA
accataaatgtgatgatgcatgtatagaaagtgtcaaaaatggaacttatgactatccaaaatactcagaagagtcacga

SEQ ID NO: 71916 - DNA, 80 bp, synthetic construct
  source 1..80: mol_type = other DNA
ccatgctgggacaaccggcttctacagaaatttaatatggttggtgaagaaagaaaacaaatatccaaagatcagcaaat

SEQ ID NO: 71917 - DNA, 80 bp, synthetic construct
  source 1..80: mol_type = other DNA
cctatgttaacaataaagggaaagaagttcttgtcttatggggcattcaccatccacctaccaataatgatcaactaagt

SEQ ID NO: 71918 - DNA, 80 bp, synthetic construct
  source 1..80: mol_type = other DNA
aataaagacaaccaagatgataacaatactattcgcactgctatatacatttacagccgcaaatgcagacacactatgca

SEQ ID NO: 71919 - DNA, 80 bp, synthetic construct
  source 1..80: mol_type = other DNA
ataacggaagattatgcaaactagggggaatagccccattaaatttgggtagatgtaacattgctggatggcttttggga

SEQ ID NO: 71920 - DNA, 80 bp, synthetic construct
  source 1..80: mol_type = other DNA
tagcggaagcagcatctctttctgtggcatagacagtgaaaccacaagctggtcatggccagacggagctgatctgccat

SEQ ID NO: 71921 - DNA, 80 bp, synthetic construct
  source 1..80: mol_type = other DNA
ctttctgtggcatagacagtgaaaccacaagctggtcatggccagacggagctgatctgccattcaccattgacaagtag

SEQ ID NO: 71922 - DNA, 80 bp, synthetic construct
  source 1..80: mol_type = other DNA
attacacatgtaaataacacatgggtaaatcaaacttatgtaaacattagcaataccaacattgatactgtaagggatgc

SEQ ID NO: 71923 - DNA, 80 bp, synthetic construct
  source 1..80: mol_type = other DNA
gacctcaacaacattagcaggcaattcctctctttgctcagtcagcgggtgggctatatacagcaaagacaatagcataa

SEQ ID NO: 71924 - DNA, 80 bp, synthetic construct
  source 1..80: mol_type = other DNA
ccatccccgtataactcaaggtttgaatcagttgcttggtcagcaagtgcatgccatgatggaatgggatggttaacaat

SEQ ID NO: 71925 - DNA, 80 bp, synthetic construct
  source 1..80: mol_type = other DNA
gaaacatagtctcattatggatcagccactcaattcagacaggcggaaaaaattactctgagatgtgcaaccaaaatgtc

SEQ ID NO: 71926 - DNA, 80 bp, synthetic construct
  source 1..80: mol_type = other DNA
ccaagagatatttaattggactggtgttgctcaagatggatcaagctacgcatgcagaaggaattctgttaaaagtttct

SEQ ID NO: 71927 - DNA, 80 bp, synthetic construct
  source 1..80: mol_type = other DNA
atgaaggcaacaatactaataactatactattaatggtagcaacaggcagcgcagataaaatttgcatcggttatcagtc

SEQ ID NO: 71928 - DNA, 80 bp, synthetic construct
  source 1..80: mol_type = other DNA
ggtccaaattgcaaaaatgaaaagaatagtgattgccctcgcaataatcagcattgtcaaaggtgaccaaatctgcattg

SEQ ID NO: 71929 - DNA, 80 bp, synthetic construct
  source 1..80: mol_type = other DNA
ctaagggcgtagaagaaggatcaataggaaaagtatgccgaaccctgttggcaaaatctgtgttcaacagcctgtatgcg

SEQ ID NO: 71930 - DNA, 80 bp, synthetic construct
  source 1..80: mol_type = other DNA
aggaagggaaaatactaaaatgggaatctctaactgggactgctaaacacattgaagaatgctcatgctatggagtgcag

SEQ ID NO: 71931 - DNA, 80 bp, synthetic construct
  source 1..80: mol_type = other DNA
gcaggtattacttgcacgtgcagggataattggcagggttcaaatagaccagtaattcaaatagatccagtggcaatgac

SEQ ID NO: 71932 - DNA, 80 bp, synthetic construct
  source 1..80: mol_type = other DNA
ttggctgcatagtttaaattacaaatatccagcgctgaacgtaaccatgccaaacaatgacaaatttgacaaattgtaca

SEQ ID NO: 71933 - DNA, 80 bp, synthetic construct
  source 1..80: mol_type = other DNA
ggatatttctattgaccatgaagactatcattgcttttagctgcatttcatgtctgattttcgctaaaaaaaccccccga

SEQ ID NO: 71934 - DNA, 80 bp, synthetic construct
  source 1..80: mol_type = other DNA
ttggttgcacaatttgaataacaaatatccagcacagaacgtaactatgccaaacaatgacaaatttgacaaattgtaca

SEQ ID NO: 71935 - DNA, 80 bp, synthetic construct
  source 1..80: mol_type = other DNA
agtaaagatgaatccaaatcagaagataataacaattggctctgtttctctcatcattgccacaacctgcctctttctgc

SEQ ID NO: 71936 - DNA, 80 bp, synthetic construct
  source 1..80: mol_type = other DNA
agaaaatttcgattggattggagtcaaacaaaatggatcaagcattgcttgcgaaaggaaatctgttaacagtttcttta

SEQ ID NO: 71937 - DNA, 80 bp, synthetic construct
  source 1..80: mol_type = other DNA
gcatagtttgagtaacaaatatcaagcgctgaatgtaactatgccaaacaatggcgaatttgacaaattgtacatttggg

SEQ ID NO: 71938 - DNA, 80 bp, synthetic construct
  source 1..80: mol_type = other DNA
caatggaaggttatgcaaactaggaggagtagccccattacatttgggtaaatgtaacattgcagggtggcttttgggaa

SEQ ID NO: 71939 - DNA, 80 bp, synthetic construct
  source 1..80: mol_type = other DNA
tgacaaaaaagggaaccacatatccgaagatcagcaaatcctatgttaatgataaagggaaggaagttcttgtcttatgg

SEQ ID NO: 71940 - DNA, 80 bp, synthetic construct
  source 1..80: mol_type = other DNA
actcgggagttatagtttatctgcttgtgccccccttctttctgttgcttatttcttatttctgcgttccgcgctccctg

SEQ ID NO: 71941 - DNA, 80 bp, synthetic construct
  source 1..80: mol_type = other DNA
atgcagattgctatcctggcaaccactgtgacattgcattttaagcaacatgaatgcaattcccctgcaatcaaccaagt

SEQ ID NO: 71942 - DNA, 80 bp, synthetic construct
  source 1..80: mol_type = other DNA
actgcgctccttatataacaccatagcagttctttattgtgtccatagtacaataccggtactcaatacacaagaggctt

SEQ ID NO: 71943 - DNA, 80 bp, synthetic construct
  source 1..80: mol_type = other DNA
tctcagcgctcggggtggcaattataatagcagtcataatctgggtattactatataaagaatataaggaaataaaactg

SEQ ID NO: 71944 - DNA, 80 bp, synthetic construct
  source 1..80: mol_type = other DNA
tggacaagataaaagagaaaaaggaacagcacaagtctgaggcaaaaaatccagaagcaggggcagcggcagcagctgat

SEQ ID NO: 71945 - DNA, 80 bp, synthetic construct
  source 1..80: mol_type = other DNA
caggaaaaaatagaacaaataaaacagagagtaagagacagagcagaagatagtggcaatgagagtgatggggatgcaga

SEQ ID NO: 71946 - DNA, 80 bp, synthetic construct
  source 1..80: mol_type = other DNA
gtggttggccattcttctgtctcctgataagctcgataattgggtctgaacaacattgggtaacagtgtactatggggtg

SEQ ID NO: 71947 - DNA, 80 bp, synthetic construct
  source 1..80: mol_type = other DNA
tgggacagttgacaatggggaattagatataggatacaaacaaatgaaaaattgttcattcaatgtaaccactgagagaa

SEQ ID NO: 71948 - DNA, 80 bp, synthetic construct
  source 1..80: mol_type = other DNA
aagataaaaagaagctagcttactctctgttttatgcagaagatgtagtgcaactcaatgagagtgacagtacgaatcaa

SEQ ID NO: 71949 - DNA, 80 bp, synthetic construct
  source 1..80: mol_type = other DNA
aaaggggaatgtaaaaatgtgagtactgtacaatgcacacatggaataaagccaacgatatctactcagttaatcctaaa

SEQ ID NO: 71950 - DNA, 80 bp, synthetic construct
  source 1..80: mol_type = other DNA
taaattgtacaaggccagggaataatacaggaggacaggtgcagataggacctgctatgacattttataacatagagaaa

SEQ ID NO: 71951 - DNA, 80 bp, synthetic construct
  source 1..80: mol_type = other DNA
ataataggggacattagacaagcacactgtaatgtctctgaagaatggaaatcaatgtgggatagaacaaaagagaaaat

SEQ ID NO: 71952 - DNA, 80 bp, synthetic construct
  source 1..80: mol_type = other DNA
aaagggcctcctgggaaacaacacaacctttaagtctcgggtgaacattggaggagacccagaagtaagacacttcatgt

SEQ ID NO: 71953 - DNA, 80 bp, synthetic construct
  source 1..80: mol_type = other DNA
tcaattgtggaggagagtttttcctttgtaacacttccagattatttgatgagaacgggactgtaaatgggactattatt

SEQ ID NO: 71954 - DNA, 80 bp, synthetic construct
  source 1..80: mol_type = other DNA
tattacctgtaactccagtattactggactaattctagaagttagtggaaatagtacagtatatccttcaggaggaaaca

SEQ ID NO: 71955 - DNA, 80 bp, synthetic construct
  source 1..80: mol_type = other DNA
tggttaatctctggagacaagagttgtacaagtacaaagtagttagcatagaacccataggagtagcaccaggtaaagct

SEQ ID NO: 71956 - DNA, 80 bp, synthetic construct
  source 1..80: mol_type = other DNA
actgtgccttggaatgagacttggagcaatcatacctcctatgattcaatctggggaaatttaacctggcaacaatggga

SEQ ID NO: 71957 - DNA, 80 bp, synthetic construct
  source 1..80: mol_type = other DNA
gaagacaaagacaaactcaagcagcagcagcagcagtaggagtaggagcagcttctcaagacctagctaatcgaggggcc

SEQ ID NO: 71958 - DNA, 80 bp, synthetic construct
  source 1..80: mol_type = other DNA
atcaccacaagcaatactagagataataatgaaactgtagcttgggtagaagcacaagaagaagaagaggaagtaggctt

SEQ ID NO: 71959 - DNA, 80 bp, synthetic construct
  source 1..80: mol_type = other DNA
tacaagaactgctgacaagggactttactgctgacaagggactttacacatggggactttccgtcagggactttccaggg

SEQ ID NO: 71960 - DNA, 80 bp, synthetic construct
  source 1..80: mol_type = other DNA
ggtacttaatacacaagaggctttggacaaaataaaagagaaaaaggaacagcacaagcctgaggcaaaaaatccagaag

SEQ ID NO: 71961 - DNA, 80 bp, synthetic construct
  source 1..80: mol_type = other DNA
acagttgggaatgggacattagacataggatacaaacaaatgaaaaattgctcattcaatgtaaccactgagagagaaga

SEQ ID NO: 71962 - DNA, 80 bp, synthetic construct
  source 1..80: mol_type = other DNA
tagaaagaagaaagcttactctctgttttatacagaagatgtagtgcaactcaatgacagtgacagtgacagtaatacat

SEQ ID NO: 71963 - DNA, 80 bp, synthetic construct
  source 1..80: mol_type = other DNA
tatattggtgcaatggaataagacagtattaataaattgtacaaggccagggaataatacaggaggacaggtgcagatag

SEQ ID NO: 71964 - DNA, 80 bp, synthetic construct
  source 1..80: mol_type = other DNA
gacctgctatgacattttataacatagagaaaataataggggacattagacaagcacactgtaatgtctctgaagaagaa

SEQ ID NO: 71965 - DNA, 80 bp, synthetic construct
  source 1..80: mol_type = other DNA
tggaaatcaatgtggaatagaacaaaagaaaaaataaaggacattctgggaaacaaaacaacctttgaggctcgggggaa

SEQ ID NO: 71966 - DNA, 80 bp, synthetic construct
  source 1..80: mol_type = other DNA
cgatggaagtgacccagaagtaacacacttaatgttcaattgtggaggagagtttttcctttgtaacacttccagattat

SEQ ID NO: 71967 - DNA, 80 bp, synthetic construct
  source 1..80: mol_type = other DNA
ttaatgagagcaagaacgagactacaaatgggactattattctgccctgtagaataaaacaaattgtaaatttatggaca

SEQ ID NO: 71968 - DNA, 80 bp, synthetic construct
  source 1..80: mol_type = other DNA
atatagtaatagcacaaatggtacagtagtatatccttcaggaggaaacatggttaatctctggagacaagagttgtata

SEQ ID NO: 71969 - DNA, 80 bp, synthetic construct
  source 1..80: mol_type = other DNA
cagcaaatcctaggtctatggggctgctcaggaaaaactatatgctataccactgtgccttggaatgagacttggagcag

SEQ ID NO: 71970 - DNA, 80 bp, synthetic construct
  source 1..80: mol_type = other DNA
gaaaggacacttgtataagatggggaaaattttgtcaaagaacagagtagcaggatggtcagaaatcagagaaagaatga

SEQ ID NO: 71971 - DNA, 80 bp, synthetic construct
  source 1..80: mol_type = other DNA
gaaggcaaactcaagagccagctcaagagccagcagcagtaggagtaggagcagcttctcaagacctagctaatcgaggg

SEQ ID NO: 71972 - DNA, 80 bp, synthetic construct
  source 1..80: mol_type = other DNA
gtacagctggagtagagtctgccgttctaagaggattcctcattttgggtaaagaagacaagagatatggtccagcactg

SEQ ID NO: 71973 - DNA, 80 bp, synthetic construct
  source 1..80: mol_type = other DNA
tctgttgtgtgactctggtaatactctggtaactagagatccctcagaccctagtggtattgtggaaaatctctagcagt

SEQ ID NO: 71974 - DNA, 80 bp, synthetic construct
  source 1..80: mol_type = other DNA
ctgagattgatgacttgattgaccttgctgcctcaggggatccaacaccaccggattccattaagtctccgcaagcacca

SEQ ID NO: 71975 - DNA, 80 bp, synthetic construct
  source 1..80: mol_type = other DNA
tcaaccactggtcttgttgcagctgcaccgcatttagaccgtgtgacgggatacaatcaagcagatagtgataaaatctt

SEQ ID NO: 71976 - DNA, 80 bp, synthetic construct
  source 1..80: mol_type = other DNA
ggaatgccctttcataaaaccagaggttaagcccgggacaccagcacaggagatagaatttttgaaaagaaatagggttt

SEQ ID NO: 71977 - DNA, 80 bp, synthetic construct
  source 1..80: mol_type = other DNA
agagagaagcagtcagagcagtggaagatttaattctaatgttaacaggcaaagcaatcaagcccagtgctgtaacgcaa

SEQ ID NO: 71978 - DNA, 80 bp, synthetic construct
  source 1..80: mol_type = other DNA
cgcaccattcagttgacatcaaagccttcaatgcaagccaactgctccgcatccttcacagtcaatccaactgctctgat

SEQ ID NO: 71979 - DNA, 80 bp, synthetic construct
  source 1..80: mol_type = other DNA
gacacttttagtcagtgtggaaaaatctcatagcagtggcgcccgaacagggacttgaaaagcgaaagtagacccaaaga

SEQ ID NO: 71980 - DNA, 80 bp, synthetic construct
  source 1..80: mol_type = other DNA
agttttttcaccccagaattcggtttgccaaacccccaacggcaaaaggcaaggggcgccaactggtaattcccccaaat

SEQ ID NO: 71981 - DNA, 80 bp, synthetic construct
  source 1..80: mol_type = other DNA
cctgataactactgtaacattaatagaaagaaacataacagagatagtgtatctgaccaacaccaccatagagaaggaaa

SEQ ID NO: 71982 - DNA, 80 bp, synthetic construct
  source 1..80: mol_type = other DNA
taaccactgaatctgatgattttaaccaaaataagccaacgagattcaccccagttggcattggagttgacaatgaggca

SEQ ID NO: 71983 - DNA, 80 bp, synthetic construct
  source 1..80: mol_type = other DNA
gatttccaacaatggatcttacctgattactccggccagtttactcataatatgaatttggccccagctgtcgcccccaa

SEQ ID NO: 71984 - DNA, 80 bp, synthetic construct
  source 1..80: mol_type = other DNA
tttccctggtgagcaacttcttttcttccgctcacagttgccatcttctggtgggcggtcgaacgggattctagactgcc

SEQ ID NO: 71985 - DNA, 80 bp, synthetic construct
  source 1..80: mol_type = other DNA
agttcacagtgtcacctagaaattctcctggtgaagtgttacttaatttggaattgggtccagaaataaatccctacttg

SEQ ID NO: 71986 - DNA, 80 bp, synthetic construct
  source 1..80: mol_type = other DNA
atggctatgcaggtgggtttgaagtacaggtagtcctggctggaaatgcatttacagcaggaaaggtgatctttgcagcc

SEQ ID NO: 71987 - DNA, 80 bp, synthetic construct
  source 1..80: mol_type = other DNA
gactccctacacaccagcccgaccgagagtgtcgttgtccaatgccaaaatgggcgcgtcaccctcgatggtgagctaat

SEQ ID NO: 71988 - DNA, 80 bp, synthetic construct
  source 1..80: mol_type = other DNA
gggtaccacccaactcttgccaagtcaaatatgtgctttcaggggcacacttactagaccaacaaatagggccagtgacc

SEQ ID NO: 71989 - DNA, 80 bp, synthetic construct
  source 1..80: mol_type = other DNA
aagctgacacagcaacccctaggctgttcaaccatcagtggcacatacaattggataatctaaatggaaccccctatgat

SEQ ID NO: 71990 - DNA, 80 bp, synthetic construct
  source 1..80: mol_type = other DNA
cccgcagaggacataccagctcccttgggtacaccagacttccggggcaaggtctttggtgtggccagtcaaagagaccc

SEQ ID NO: 71991 - DNA, 80 bp, synthetic construct
  source 1..80: mol_type = other DNA
atgaagatggcgtcgaatgacgctgctccatctacggatggtgcgggcaacctcgtcccagagagtcaacaagaggtgtt

SEQ ID NO: 71992 - DNA, 80 bp, synthetic construct
  source 1..80: mol_type = other DNA
attcttgggttagttctttctatatcttgtcccccgtgggaagcggccaaggtcgaaggggtagagtgaggtttcaataa

SEQ ID NO: 71993 - DNA, 80 bp, synthetic construct
  source 1..80: mol_type = other DNA
aggtcctgtggaatgtatggtcttgatgggcccaacatttacaaaggggtttatcaattcaagtcagtagagtttgacat

SEQ ID NO: 71994 - DNA, 80 bp, synthetic construct
  source 1..80: mol_type = other DNA
ttgtttggctgaagcttaagcccacctgaggtgggcccgctgctccaggcactggtttgggtgagttggccataggcctc

SEQ ID NO: 71995 - DNA, 80 bp, synthetic construct
  source 1..80: mol_type = other DNA
tcgtttgtcagatcaattgttgtgttctcccatgctctccctacaactgatgttctgcaggctatgtatggccacccttc

SEQ ID NO: 71996 - DNA, 80 bp, synthetic construct
  source 1..80: mol_type = other DNA
ctccatcatcagtaacaaaccttgtaatctgtcttcctccttccagaaggaaacttttgaccacacacttatgagcatag

SEQ ID NO: 71997 - DNA, 80 bp, synthetic construct
  source 1..80: mol_type = other DNA
ttttaacaatggcatcactattcaatacaatctgtcattttctgatgcacagagcgctctgagtcaatgcaggactttca

SEQ ID NO: 71998 - DNA, 80 bp, synthetic construct
  source 1..80: mol_type = other DNA
gcagtattaaggtttagaactaaaaaagagtgctattagtctgcttgacgccttagcaatagtagtagctgaaagaacag

SEQ ID NO: 71999 - DNA, 80 bp, synthetic construct
  source 1..80: mol_type = other DNA
acctaggtacagtaagataaaaaaattgacaattacacaaacataatatacaagctgcttaaaaaatcgcaaatccagca

SEQ ID NO: 72000 - DNA, 80 bp, synthetic construct
  source 1..80: mol_type = other DNA
aaattgctctttcaatgtcaccacaagcataggaaataagatgcacaaagaatatgcacttttgtataagctcgatttag

SEQ ID NO: 72001 - DNA, 80 bp, synthetic construct
  source 1..80: mol_type = other DNA
ttaattgattgcgctttcttctggttcgactgggtgccagactctgttgtgcgataggatgggccaaattgtgacaatgt

SEQ ID NO: 72002 - DNA, 80 bp, synthetic construct
  source 1..80: mol_type = other DNA
tgatcagctttcttcttttggctggcaggtcttgtgggatgtacggtcttagcggccctgatgtttacaaaggagtctat

SEQ ID NO: 72003 - DNA, 80 bp, synthetic construct
  source 1..80: mol_type = other DNA
ttcttcttttggctggcaggtcttgtgggatgtacggtcttagcggccctgatgtttacaaaggagtctatcagtttaag

SEQ ID NO: 72004 - DNA, 80 bp, synthetic construct
  source 1..80: mol_type = other DNA
tatctaagaagtcttgtgcagtattgaagcctagaactaaaaaagagtgctattagtctatttaataccatagcaataac

SEQ ID NO: 72005 - DNA, 80 bp, synthetic construct
  source 1..80: mol_type = other DNA
agtagctgaaagaacagatagaattctagaaatactacaaagaatttgcagagctatccgcaacctacctagaagaataa

SEQ ID NO: 72006 - DNA, 80 bp, synthetic construct
  source 1..80: mol_type = other DNA
cgcaccggggatcctaggctttttggattgcgctttcctctagatcaactgtgtgttggactctatcctgtcgaaggatg

SEQ ID NO: 72007 - DNA, 80 bp, synthetic construct
  source 1..80: mol_type = other DNA
aactattcaaaattctggtatctggagcacgcaaagactggtgaaaccagtgttcctaagtgttggcttgtcactaacgg

SEQ ID NO: 72008 - DNA, 80 bp, synthetic construct
  source 1..80: mol_type = other DNA
taatcaccagcataaaggctgtgtacaaccttgccacctgtgggatatttgcattggtcagcttcctcctcttggctggg

SEQ ID NO: 72009 - DNA, 80 bp, synthetic construct
  source 1..80: mol_type = other DNA
cgagaactgctttcaagaggtcctcactgttgcctggtttgatcagaatggactccagcatattgcccccgtccaagaga

SEQ ID NO: 72010 - DNA, 80 bp, synthetic construct
  source 1..80: mol_type = other DNA
gctgcccctgctttcacagcagcaccgagactgaagttgtagccagaaatgttgattcctgattgctgttcagtgataac

SEQ ID NO: 72011 - DNA, 80 bp, synthetic construct
  source 1..80: mol_type = other DNA
tggaattgactttcaccaatgactccatcattgaccacaagctctgtaacttgacttctgctttcaataagaagaccttt

SEQ ID NO: 72012 - DNA, 80 bp, synthetic construct
  source 1..80: mol_type = other DNA
gaccacaccctcatgagcatagtgtccagcctacaccttagtatcagagggaattcgaattacaaagcagtatcttgtga

SEQ ID NO: 72013 - DNA, 80 bp, synthetic construct
  source 1..80: mol_type = other DNA
cgcaccggggatcctaggcatttccttgcgctattttattgcatcgccttttcctgcaagaccacctggagcgaagtggg

SEQ ID NO: 72014 - DNA, 80 bp, synthetic construct
  source 1..80: mol_type = other DNA
ttctctcgaaatcaagagatccaacttcatctagtattctcttggagcccatcaactcaagctcaagtgaatcaccaagt

SEQ ID NO: 72015 - DNA, 80 bp, synthetic construct
  source 1..80: mol_type = other DNA
cagtcctaatatcaaagatgttatcatttaccctgaaaatggggtccgtcctcagtaagcatagacattcatccagcaat

SEQ ID NO: 72016 - DNA, 80 bp, synthetic construct
  source 1..80: mol_type = other DNA
aagtgacactttaccaaaaagatcaacgagaacttctttaaacaatcagtgttgttttggttgtgtgtgaaatccaccgt

SEQ ID NO: 72017 - DNA, 80 bp, synthetic construct
  source 1..80: mol_type = other DNA
cccaaggacttaaatgctctgggatttaccaaaccttgtttgactaacatagcagcattacacacaatatcctctatttt

SEQ ID NO: 72018 - DNA, 80 bp, synthetic construct
  source 1..80: mol_type = other DNA
cacctaccttggacccttgaactgcaagtcatgctggcagaaactcgacagtctagtcaggtgtcatgatcactaccttt

SEQ ID NO: 72019 - DNA, 80 bp, synthetic construct
  source 1..80: mol_type = other DNA
atgtggtcacgatgagcttctgggtgattttgtctgtcacagatgtacagtgttatgccattgcatttctgaacccttgt

SEQ ID NO: 72020 - DNA, 80 bp, synthetic construct
  source 1..80: mol_type = other DNA
cacatgctcatccataatcaagtcctcgagtattttctttatgaacaaattctttctatttttattcctcacacatctac

SEQ ID NO: 72021 - DNA, 80 bp, synthetic construct
  source 1..80: mol_type = other DNA
tttttcaagatcaagaatgttccctaactgaaggatggccgctctcttatctctattgaataagtctaagaaaaattcct

SEQ ID NO: 72022 - DNA, 80 bp, synthetic construct
  source 1..80: mol_type = other DNA
cattgaactcaccatttttgagcttgtggtgcaacttcctcacaagctttctcatgatctttgtttcactaggacataat

SEQ ID NO: 72023 - DNA, 80 bp, synthetic construct
  source 1..80: mol_type = other DNA
caaccaggctcacgatctcaacagccccgagctcaccgcctccctacgaggagtgacgccccccaaagggcccgcaccaa

SEQ ID NO: 72024 - DNA, 80 bp, synthetic construct
  source 1..80: mol_type = other DNA
agagcacaacacacaagccaacacacacaagcacaacacaaaacacagacacagccacacccacacccaacaaaaacaca

SEQ ID NO: 72025 - DNA, 80 bp, synthetic construct
  source 1..80: mol_type = other DNA
tgaccttcctcaagtgagccatttttccctttaaaacagtctgaagatgatgtagtcctttagcatttttgagtccttcc

SEQ ID NO: 72026 - DNA, 80 bp, synthetic construct
  source 1..80: mol_type = other DNA
tcacttccccattcattggccttcttgcctcttctatactgtattattgtggagttgaccttgtcctctagatttctaaa

SEQ ID NO: 72027 - DNA, 80 bp, synthetic construct
  source 1..80: mol_type = other DNA
gctaactggttcttcctctggtctctctgctcttgcctccttagaaccaatgaccaatttagagaccagctttgaaacct

SEQ ID NO: 72028 - DNA, 80 bp, synthetic construct
  source 1..80: mol_type = other DNA
tgtactcatagtctgaatgtttcagcttaaatttttgttttctcataaagccctcgctaatctggcttacagcactgaca

SEQ ID NO: 72029 - DNA, 80 bp, synthetic construct
  source 1..80: mol_type = other DNA
aacacacacacaccacacacacccacgcgcccccacagggaggcgcccccccgggggcgacccccggtggccaggcgcga

SEQ ID NO: 72030 - DNA, 80 bp, synthetic construct
  source 1..80: mol_type = other DNA
ttgttctgatcagaaacctaagtaacctatacactattttttcagcaggtgtgatcagatcttctcttaatttgtccatc

SEQ ID NO: 72031 - DNA, 80 bp, synthetic construct
  source 1..80: mol_type = other DNA
ataagtaagagcagagtccttgaagcagtttcaatgtcaaggagatgatctctcaaatcaggacatgatctgatccaaga

SEQ ID NO: 72032 - DNA, 80 bp, synthetic construct
  source 1..80: mol_type = other DNA
ccccgcggagacgccaatcagtcgatctcctcgacgtccgaccccgccaaccaatcatcacaggacctccccttgagcct

SEQ ID NO: 72033 - DNA, 80 bp, synthetic construct
  source 1..80: mol_type = other DNA
gagttccagttttcgtgaaattcttaaactcagtgaatgatacacggcactcatgttcaagggaatcagacaacccgtag

SEQ ID NO: 72034 - DNA, 80 bp, synthetic construct
  source 1..80: mol_type = other DNA
tgttcaaaactaagtcccaccagtgacagacaatttttgattttcttaataaagccattcaaagatgtgctgaacaattc

SEQ ID NO: 72035 - DNA, 80 bp, synthetic construct
  source 1..80: mol_type = other DNA
ctcaaggggcactcctttgcaaacccttgatcttcttctgttcctcagaagcctaataaattcttccttggtgctctgaa

SEQ ID NO: 72036 - DNA, 80 bp, synthetic construct
  source 1..80: mol_type = other DNA
gtttctcactttctgagcctttagatctagattgcttgatcagtgaagaaaggcacaaaacatccagattcaacaattgc

SEQ ID NO: 72037 - DNA, 80 bp, synthetic construct
  source 1..80: mol_type = other DNA
agcactggtctcattccttctttgatgcccatgagtctttgctgtgatgaacttcattaaggggcaggattcaactgcct

SEQ ID NO: 72038 - DNA, 80 bp, synthetic construct
  source 1..80: mol_type = other DNA
ccatcagccatgggtcaagccaagtctagaggtagagagaatgctggcaagatggacagagctgagattctgccagatac

SEQ ID NO: 72039 - DNA, 80 bp, synthetic construct
  source 1..80: mol_type = other DNA
tacttcaaggactgctgacactgagctaaggactgctgacactgagctttctacaagggactttccgctggggactttcc

SEQ ID NO: 72040 - DNA, 80 bp, synthetic construct
  source 1..80: mol_type = other DNA
tgatttaatgcatgtacaaaaggtgctatctgcaagcacagtttgcaaactacaaagctgcacacatggtgtgccaggtg

SEQ ID NO: 72041 - DNA, 80 bp, synthetic construct
  source 1..80: mol_type = other DNA
atggagacacccctcagttggatcttaaggcgaggccaacatatggtgctggtgaagtcactgtcctggtaaaagttgct

SEQ ID NO: 72042 - DNA, 80 bp, synthetic construct
  source 1..80: mol_type = other DNA
tgatttaatgcatgtacaaaaagtgctatcagcaagtacagtgtgtaagctacagagttgcacacatggtgtgccagggg

SEQ ID NO: 72043 - DNA, 80 bp, synthetic construct
  source 1..80: mol_type = other DNA
atggagacacaccacaattagatttgaaagctaggccaacttacggtgcaggtgaaatcactgtgctggtaaaagttgct

SEQ ID NO: 72044 - DNA, 80 bp, synthetic construct
  source 1..80: mol_type = other DNA
gttttctttttttgttaaggactgggctgatcggatagcccaggaagctgaatttctaaagaggaataaaatatacttta

SEQ ID NO: 72045 - DNA, 80 bp, synthetic construct
  source 1..80: mol_type = other DNA
atacaattggagtatatgttataggctttacacttcctattatcctgaaggctctgtatatgttgtcaacacgtgggaga

SEQ ID NO: 72046 - DNA, 80 bp, synthetic construct
  source 1..80: mol_type = other DNA
aggctgaagaattgacccctggacgatttaggaccatagtatgcgggctatttccaactcaaattcaagtacgcaacata

SEQ ID NO: 72047 - DNA, 80 bp, synthetic construct
  source 1..80: mol_type = other DNA
atggtaatgctaccagcaatggtagtgatacctccattgaaagcataaaggaagagacaggtagcataaaaaattgctct

SEQ ID NO: 72048 - DNA, 80 bp, synthetic construct
  source 1..80: mol_type = other DNA
aaatattgcattgtgacaatttttaatacgctattaaaattagcaggttacaaagaacagattactactaaagatgaaat

SEQ ID NO: 72049 - DNA, 80 bp, synthetic construct
  source 1..80: mol_type = other DNA
aatttgacctgggggctaaaaattttgacgggatgcttatgacaaaagaaattaatcagaaaaacgtaaaaacgttagaa

SEQ ID NO: 72050 - DNA, 80 bp, synthetic construct
  source 1..80: mol_type = other DNA
ccagtagtccgctggaggaaagagaaatgaaaaactgctctttcgacatcaccacaacaatgaatactaaggtgaaagac

SEQ ID NO: 72051 - DNA, 80 bp, synthetic construct
  source 1..80: mol_type = other DNA
tagtgctaataccactagtactaataccagtagtataatagagggaggagaaatgacaaactgctcttttaatatcacca

SEQ ID NO: 72052 - DNA, 80 bp, synthetic construct
  source 1..80: mol_type = other DNA
tgatagggatgacattagcaggaaggacgtaatgaaagactgctctttcagtttctccacgggcatagcaaatataatga

SEQ ID NO: 72053 - DNA, 80 bp, synthetic construct
  source 1..80: mol_type = other DNA
atagggaatatgcactttatgatacttctcgatgtagttccaatagatactgcaggcaatacaaggctaatacaagctat

SEQ ID NO: 72054 - DNA, 80 bp, synthetic construct
  source 1..80: mol_type = other DNA
atgttaattgtactcattgtagcattagtagtagcactaatattagcaatagttgtgtggactatagtatatatagaata

SEQ ID NO: 72055 - DNA, 80 bp, synthetic construct
  source 1..80: mol_type = other DNA
cgtgatcacgggtatcaaggctgtctacaattttgccacctgtgggatattcgcattgatcagtttcctacttctggctg

SEQ ID NO: 72056 - DNA, 80 bp, synthetic construct
  source 1..80: mol_type = other DNA
agcttaagcccacctgaggtggacctgctgctccaggcgctggcctgggtgaattgactgcaggtttctcgcttgtgaga

SEQ ID NO: 72057 - DNA, 80 bp, synthetic construct
  source 1..80: mol_type = other DNA
tcaattgttgtgttttcccatgctctccccacaatcgatgttctacaagctatgtatggccatccttcacctgaaaggca

SEQ ID NO: 72058 - DNA, 80 bp, synthetic construct
  source 1..80: mol_type = other DNA
gcaggtcctgtggcatgtacggtcttaagggacccgacatttacaaaggagtttaccaatttaagtcagtggagtttgat

SEQ ID NO: 72059 - DNA, 80 bp, synthetic construct
  source 1..80: mol_type = other DNA
cctctgccttcaacaaaaagacctttgaccacacactcatgagtatagtttcgagcctacacctcagtatcagagggaac

SEQ ID NO: 72060 - DNA, 80 bp, synthetic construct
  source 1..80: mol_type = other DNA
tctcagatgcacaaagtgctcagagccagtgtagaaccttcagaggtagagtcctagatatgtttagaactgccttcggg

SEQ ID NO: 72061 - DNA, 80 bp, synthetic construct
  source 1..80: mol_type = other DNA
tgctcagagccagtgtagaaccttcagaggtagagtcctagatatgtttagaactgccttcggggggaaatacatgagga

SEQ ID NO: 72062 - DNA, 80 bp, synthetic construct
  source 1..80: mol_type = other DNA
aaatggttcaatgcagtgcaggatatgtatataattaagaaaaacacccttgtttctactctcttggcaaaattcatgct

SEQ ID NO: 72063 - DNA, 80 bp, synthetic construct
  source 1..80: mol_type = other DNA
catatgtcaacatcagcaataccaatttttccactgagcaagctgtggcttcagtaactttagcgggcaattcctctctt

SEQ ID NO: 72064 - DNA, 80 bp, synthetic construct
  source 1..80: mol_type = other DNA
gtcattcaattcaggcctgcattacttatgaaaataacacctgggtaaatcagacatatgttaacatcagcaacaccaat

SEQ ID NO: 72065 - DNA, 80 bp, synthetic construct
  source 1..80: mol_type = other DNA
aagtttttagaaatgttcagaagcagtagtcaaaatgaattttataatagacgtacattaacttctgatactagacttgt

SEQ ID NO: 72066 - DNA, 80 bp, synthetic construct
  source 1..80: mol_type = other DNA
aaaaaaatgctctttccaacctagaagagaaaagggggtaaaagaatatgcactttttcgtaaacttgatttagaactaa

SEQ ID NO: 72067 - DNA, 80 bp, synthetic construct
  source 1..80: mol_type = other DNA
gctctttcaatataaccacaggcataggaaaacaggtgaggagggaatatgcattttttaataagcttgatgtagtacca

SEQ ID NO: 72068 - DNA, 80 bp, synthetic construct
  source 1..80: mol_type = other DNA
ggggatctagaagttacaacacatagctttaattgtagaggagaatttttctattgtaatacaacaagacttttctctac

SEQ ID NO: 72069 - DNA, 80 bp, synthetic construct
  source 1..80: mol_type = other DNA
tgcttgaggcctcacaaaatcagcaggaacaaaatgaaaaggatttattagctttggacagttggaacaatctgtggaat

SEQ ID NO: 72070 - DNA, 80 bp, synthetic construct
  source 1..80: mol_type = other DNA
gttttctttttttgttaaggactgggctgatcggatcagagaatttatggaaaaagagtgtccttttatcaaaccagagg

SEQ ID NO: 72071 - DNA, 80 bp, synthetic construct
  source 1..80: mol_type = other DNA
cctgtgcacctgatcgatgcccaccaacatgcatttatgttgcagggatggctgagttaggtgcattcttttctatatta

SEQ ID NO: 72072 - DNA, 80 bp, synthetic construct
  source 1..80: mol_type = other DNA
aatcgaaatatatgcattgggtccgtctcattaggactggttgtattcaatgtcctactgcatgtcgtgagcatcatagt

SEQ ID NO: 72073 - DNA, 80 bp, synthetic construct
  source 1..80: mol_type = other DNA
gactgcctggttccctgtttttgggtcgagatgatcaggggcaaaccagaagagaaaacaatctggacttccagcagctc

SEQ ID NO: 72074 - DNA, 80 bp, synthetic construct
  source 1..80: mol_type = other DNA
aaatagggaatatagtatcgttatgggtaacccattcaattcagaccagagaaaaaaaccaccttgaaaagtgcaatcaa

SEQ ID NO: 72075 - DNA, 80 bp, synthetic construct
  source 1..80: mol_type = other DNA
gatccaacaacatttgaggaagtagcttctgcagagaaattggtgataacagatgttgtagatggagttaaccacaaact

SEQ ID NO: 72076 - DNA, 80 bp, synthetic construct
  source 1..80: mol_type = other DNA
ttggaaaagtcgctgtagaaggtggaagatattatgaacatgcaccaatcgaattgatatatgcatgccgatcagctaaa

SEQ ID NO: 72077 - DNA, 80 bp, synthetic construct
  source 1..80: mol_type = other DNA
gagatcatatcaatgttattgtaggacgtgatctctcttttcaagacctgagtgaaacaccctgtcaagtagacttagca

SEQ ID NO: 72078 - DNA, 80 bp, synthetic construct
  source 1..80: mol_type = other DNA
atgaacatccaaattctggtagccatcgcttgtgcactcatcggaactaaagcagacaaaatatgccttgggcatcatgc

SEQ ID NO: 72079 - DNA, 80 bp, synthetic construct
  source 1..80: mol_type = other DNA
agtgcctgattaatgatccctgggttttgcttaatgcatcctggttcaactccttcctcacacatgcactgaagtagttg

SEQ ID NO: 72080 - DNA, 80 bp, synthetic construct
  source 1..80: mol_type = other DNA
cactcagactacctgacggcccaccatgtttccagcgatccaagttcttgttgatggatgctctgaaattgagtattgaa

SEQ ID NO: 72081 - DNA, 80 bp, synthetic construct
  source 1..80: mol_type = other DNA
gacccaagccatgaaggggaggggataccattgtatgatgctatcaaatgcatgaagaccttctttggatggaaagagcc

SEQ ID NO: 72082 - DNA, 80 bp, synthetic construct
  source 1..80: mol_type = other DNA
atctgtcaggcgatcaggtgtctctttggttaccaagtgacacaaataactgacattcaatagatatttgaaccttcttg

SEQ ID NO: 72083 - DNA, 80 bp, synthetic construct
  source 1..80: mol_type = other DNA
gttttcattctttgtcaaggactggccagataagatcgaagagttccttatcaagccttgcccattcttaaggaaacagg

SEQ ID NO: 72084 - DNA, 80 bp, synthetic construct
  source 1..80: mol_type = other DNA
tggaagggctagtttaaaggagagaacaactacccagagggagaagtatgagagtggaactttggcaaccgcctagcaag

SEQ ID NO: 72085 - DNA, 80 bp, synthetic construct
  source 1..80: mol_type = other DNA
gacatcaaccactatgtttatattatccagtagaagctaagaatgaaataaatgatggatcttggacggatacactatct

SEQ ID NO: 72086 - DNA, 80 bp, synthetic construct
  source 1..80: mol_type = other DNA
gggatggatgacaaagagaaagaggtgttaatgtggaagtttgatagccacctagcacggcgtcacgtggcccgagagat

SEQ ID NO: 72087 - DNA, 80 bp, synthetic construct
  source 1..80: mol_type = other DNA
aggtgttaatgtggaagtttgatagccacctagcacggcgtcacgtggcccgagagatgcatccggagtacttcaagaac

SEQ ID NO: 72088 - DNA, 80 bp, synthetic construct
  source 1..80: mol_type = other DNA
tttttcattctttgttaaggactggccagacaagatcgaagagtttcttattaagccctgcccatttttgaagaagcaag

SEQ ID NO: 72089 - DNA, 80 bp, synthetic construct
  source 1..80: mol_type = other DNA
cctgtgcacctgatagatgcccccctacatgcatttatgtggccgggatggcagaactcggtgcattcttttcaatcctc

SEQ ID NO: 72090 - DNA, 80 bp, synthetic construct
  source 1..80: mol_type = other DNA
tgatgcatactttctcgggcgtgagaaggcattgagggaatcacacttgaatgagattgatgatctgattgagcttgcag

SEQ ID NO: 72091 - DNA, 80 bp, synthetic construct
  source 1..80: mol_type = other DNA
tttctcattctttgttaaagactggccagataaaatcgaagagtttcttatcaagccttgcccattcttgaagaaacaag

SEQ ID NO: 72092 - DNA, 80 bp, synthetic construct
  source 1..80: mol_type = other DNA
gcacaggttgtactgcttgtggtgtatatctagataagctccggtctgttggaaaagtttataagattctctctctgaag

SEQ ID NO: 72093 - DNA, 80 bp, synthetic construct
  source 1..80: mol_type = other DNA
tataccaggaaagtctgcatacaactagggactgaacaaacatgcaaaaccattgattcaaatgactgtcttgttacaac

SEQ ID NO: 72094 - DNA, 80 bp, synthetic construct
  source 1..80: mol_type = other DNA
atctatacaatagtagcattagtagtagtgtctgtcttagcaatatttgtgtggactgcagtaggtatagaatataggaa

SEQ ID NO: 72095 - DNA, 80 bp, synthetic construct
  source 1..80: mol_type = other DNA
taatggtactagttgggaatacatggagggaggagaaatgaaaaattgctctttcaatgtcaccacaagcataggaaatg

SEQ ID NO: 72096 - DNA, 80 bp, synthetic construct
  source 1..80: mol_type = other DNA
gtttgctgagatcatgaagatctgttccaccattgaagagctcagacggcaaaagtagtgaatttagcttgtccttcgtg

SEQ ID NO: 72097 - DNA, 80 bp, synthetic construct
  source 1..80: mol_type = other DNA
gacatggagccctacaggaattgctgacatcgagctttctacaagggactttccgctggggactttccgaaatccggacg

SEQ ID NO: 72098 - DNA, 80 bp, synthetic construct
  source 1..80: mol_type = other DNA
agtcgaccccaagagacgtagaggagaacaccaaaggagaaaacacttgcctgttacaccccataagccagcatggccta

SEQ ID NO: 72099 - DNA, 80 bp, synthetic construct
  source 1..80: mol_type = other DNA
cgcaccggggatcctaggctttttggattgcgctttcctttaggtcaactgaggatcgagtttaccttgtggaaggatgg

SEQ ID NO: 72100 - DNA, 80 bp, synthetic construct
  source 1..80: mol_type = other DNA
atctcatgaagatacctacacacagacatataaaaggtggatcatgtccaaaaccgcaccgtttaaccagcaaagggatt

SEQ ID NO: 72101 - DNA, 80 bp, synthetic construct
  source 1..80: mol_type = other DNA
taatcacaagcatcaaagctgtgtataactttgccacttgtgggatattcacactggttagctttctccttctagctggc

SEQ ID NO: 72102 - DNA, 80 bp, synthetic construct
  source 1..80: mol_type = other DNA
agctcagacccacttgaggtggacctgctgacccaggcactggcctgggtgagctggttgcgagcctctcattcgaaagg

SEQ ID NO: 72103 - DNA, 80 bp, synthetic construct
  source 1..80: mol_type = other DNA
aggtcctgtggtatgtacggccttaagggacctgacatttacaagggagtctaccaactcaagtcagtggaatttgacat

SEQ ID NO: 72104 - DNA, 80 bp, synthetic construct
  source 1..80: mol_type = other DNA
tagaactaaccttcaccaatgactccatcatcagtcacaaccactgtaatttgacttctgcctttaacaagaaaaccttt

SEQ ID NO: 72105 - DNA, 80 bp, synthetic construct
  source 1..80: mol_type = other DNA
gatcacacacttatgagcataatttctagcctacatcttagtattaggggaaactctaattacaaggcagtttcctgtga

SEQ ID NO: 72106 - DNA, 80 bp, synthetic construct
  source 1..80: mol_type = other DNA
ggggcagagtgctagacatgtttagaactgccttcggaggaaagtacatgaggagtggttggggctggacaggttcagat

SEQ ID NO: 72107 - DNA, 80 bp, synthetic construct
  source 1..80: mol_type = other DNA
cgcaccggggatcctaggcggtttgttgcgctgtttagtggcctacatctccttcacaagaccaccagagcacagcaagt

SEQ ID NO: 72108 - DNA, 80 bp, synthetic construct
  source 1..80: mol_type = other DNA
attgagagctctagcactccctctgtgtaagtgagcatatagtcccacagatcctttaaagatttaaatgcccttgagtc

SEQ ID NO: 72109 - DNA, 80 bp, synthetic construct
  source 1..80: mol_type = other DNA
tgttagcccttgcttaatcaacatggcagcattgcacacaatatcccccattcggtaagagaaccacccaaacccaaact

SEQ ID NO: 72110 - DNA, 80 bp, synthetic construct
  source 1..80: mol_type = other DNA
cacacacagaccaacacgcacagacggggagccccccagaacacacacacacacatagaagcacacccacacccacacac

SEQ ID NO: 72111 - DNA, 80 bp, synthetic construct
  source 1..80: mol_type = other DNA
tacattttgaagcgttccccctccctctcctttgtttcccttccagcctttcttatactgcattattgtggagctcacct

SEQ ID NO: 72112 - DNA, 80 bp, synthetic construct
  source 1..80: mol_type = other DNA
tgtcttctagagccttaaaaaattttgtttcctctaccccttcaaaaaaacatgcacctgttggttcatcctctggtttc

SEQ ID NO: 72113 - DNA, 80 bp, synthetic construct
  source 1..80: mol_type = other DNA
tctacctctgccctactggtacctatcaccaacttagagaccagctttgaaaccttatactcatagtctgagtggttcaa

SEQ ID NO: 72114 - DNA, 80 bp, synthetic construct
  source 1..80: mol_type = other DNA
agcctctaaattaacacctggggttgttctctgacagtcggcctctttgcttgtgaacttcttcatctgttcgtaaaaaa

SEQ ID NO: 72115 - DNA, 80 bp, synthetic construct
  source 1..80: mol_type = other DNA
ggttaccgactttaatgaaactctcaaattcagtgaatgaaatattgcattcatgcacaaggtgcttagataatccatag

SEQ ID NO: 72116 - DNA, 80 bp, synthetic construct
  source 1..80: mol_type = other DNA
ctttgcttagagttgagatgtcatcgctataagccaaggtctcatatagttcagagtattccttgatcagaccctcaggt

SEQ ID NO: 72117 - DNA, 80 bp, synthetic construct
  source 1..80: mol_type = other DNA
cactagccatgggtcaaggtaaatccaagggggaaagagaaatcagcagtgcgcaaagggctgagattctgccagacacc

SEQ ID NO: 72118 - DNA, 80 bp, synthetic construct
  source 1..80: mol_type = other DNA
actctttcgaaatcaagggatttgatcccatctaacatctttttagagcctattaattcaacctcgagacaatcaccaag

SEQ ID NO: 72119 - DNA, 80 bp, synthetic construct
  source 1..80: mol_type = other DNA
cgcaccggggatcctaggctttttggattgcgcttttctttaggtcaactaagtgtcaaactctgtcccacacaaggatg

SEQ ID NO: 72120 - DNA, 80 bp, synthetic construct
  source 1..80: mol_type = other DNA
tgcaaaaactggtgagaccagtgtcccaaagtgctggcttgtcactaacggttcttacttaaatgagacccactttagtg

SEQ ID NO: 72121 - DNA, 80 bp, synthetic construct
  source 1..80: mol_type = other DNA
taatcaccagtattaaagctgtgtacaattttgccacctgcgggatattcgcattagtcagcttccttctcctagccggt

SEQ ID NO: 72122 - DNA, 80 bp, synthetic construct
  source 1..80: mol_type = other DNA
gacctgctgctccaggcactggcctgggtgagttggttacagatttctcacttgtgagatcgattgttgtgttttcccat

SEQ ID NO: 72123 - DNA, 80 bp, synthetic construct
  source 1..80: mol_type = other DNA
aggtcctgcggtatgtacggtctcaatggacccgacatttacaaagggatttaccagttcaaatcagtggagtttgatat

SEQ ID NO: 72124 - DNA, 80 bp, synthetic construct
  source 1..80: mol_type = other DNA
ggcaaaaccacttggtgcagccagacaagctatcaatatctaatcatacaaaacagaacttgggaaaatcactgcaccta

SEQ ID NO: 72125 - DNA, 80 bp, synthetic construct
  source 1..80: mol_type = other DNA
cgcaccggggatcctaggcgtttagttgcgctactcagttgcacagcctttccctgtgagagtacagaaacaaacctagt

SEQ ID NO: 72126 - DNA, 80 bp, synthetic construct
  source 1..80: mol_type = other DNA
taacctcatccagtattttcctagaacctaccagctcgagttcaatagaatcaccgagtgtcaaaggctcttcaatgtaa

SEQ ID NO: 72127 - DNA, 80 bp, synthetic construct
  source 1..80: mol_type = other DNA
tctcctgtccacctcacctttaaaaaagtgattgcacgaaaggaactcagccacacctggaccctgcagttgacacttta

SEQ ID NO: 72128 - DNA, 80 bp, synthetic construct
  source 1..80: mol_type = other DNA
ttaagagaactaaagaaaatttccttaagcaatcagtgttattttggttgtgcgtgaaatctattgtaactgagaactcc

SEQ ID NO: 72129 - DNA, 80 bp, synthetic construct
  source 1..80: mol_type = other DNA
aatactctctttgtgttgtcaagcatgtagtcccacagatccttcaaagatttaaatgcctttgggtttgttagaccctg

SEQ ID NO: 72130 - DNA, 80 bp, synthetic construct
  source 1..80: mol_type = other DNA
aacacttgagctcccaacatccctcccttttacaggctctgctaggacccaaacacccaactcaaaggagttgttcagcg

SEQ ID NO: 72131 - DNA, 80 bp, synthetic construct
  source 1..80: mol_type = other DNA
cacagacgtacagcataatgccatcgtgtttttgaacccttgtcacatattcatccatggccaggtcctcaagcactttc

SEQ ID NO: 72132 - DNA, 80 bp, synthetic construct
  source 1..80: mol_type = other DNA
aagaggccacacaccgcccaacacacacagacacagcacccaacacaaaccacaaacacacacacaaccacccacaccca

SEQ ID NO: 72133 - DNA, 80 bp, synthetic construct
  source 1..80: mol_type = other DNA
cacagcacccaacacaaaccacaaacacacacacaaccacccacacccacgcgcccccacaccgggaggcgcccccccct

SEQ ID NO: 72134 - DNA, 80 bp, synthetic construct
  source 1..80: mol_type = other DNA
ttttgagttcttccccaccctcctctccattaactttcttaccttgcttataatgtgttattgtagagttaaccttgttt

SEQ ID NO: 72135 - DNA, 80 bp, synthetic construct
  source 1..80: mol_type = other DNA
aacttctgctgtgtcactttctggattccctggctctgcccccttggagccaatgaccaacttagaaaccaattttgaga

SEQ ID NO: 72136 - DNA, 80 bp, synthetic construct
  source 1..80: mol_type = other DNA
ccttatactcataatctgagtggctcagcttatacttctgcttcctcacaaagccctctgtgatttgacttacagcactt

SEQ ID NO: 72137 - DNA, 80 bp, synthetic construct
  source 1..80: mol_type = other DNA
cgcgcccccacaccgggcggcgcccccccctccccccgccgggagcaggcccccggtgatccggaggagagccccgcgag

SEQ ID NO: 72138 - DNA, 80 bp, synthetic construct
  source 1..80: mol_type = other DNA
ggcactgattagtcgatctcctccgtcaccaacgtggagagccagtcatcacaagacttccctttgagtctgaatctacc

SEQ ID NO: 72139 - DNA, 80 bp, synthetic construct
  source 1..80: mol_type = other DNA
gggttccggccttcatgaagttctcgaactcagtaaatggtatgtggcattcatgcacgagggatttagacagtccataa

SEQ ID NO: 72140 - DNA, 80 bp, synthetic construct
  source 1..80: mol_type = other DNA
tcccactactgacagacacttttgaatttttgtgatgaactcactcatggacgttctgaataattcttcaagggacacct

SEQ ID NO: 72141 - DNA, 80 bp, synthetic construct
  source 1..80: mol_type = other DNA
tcctgtgtgcctttgatcttcttctgttcttcaaaagtttgataaattcctcctttgtgctgtgaaagctcaccaaccta

SEQ ID NO: 72142 - DNA, 80 bp, synthetic construct
  source 1..80: mol_type = other DNA
tcattcacgctgctataacagcatcccacccagtgtttgtcattgtttaatcctttaaattttaactgcttgatcagtga

SEQ ID NO: 72143 - DNA, 80 bp, synthetic construct
  source 1..80: mol_type = other DNA
gctgtgatgaacctcatcaaaggacaggattcaactgcctctctacacagtgttaagacatcatcattgtcagtaaggac

SEQ ID NO: 72144 - DNA, 80 bp, synthetic construct
  source 1..80: mol_type = other DNA
ctcatagagcccagagaactccttgaccaagccctcagggttgatcttctgaaactttctctcaagcttcccacttttca

SEQ ID NO: 72145 - DNA, 80 bp, synthetic construct
  source 1..80: mol_type = other DNA
agtctcttctgaatctactaaaaagagagtttataccaaagaccacatcatcacaagtcatattagggttgacaccatca

SEQ ID NO: 72146 - DNA, 80 bp, synthetic construct
  source 1..80: mol_type = other DNA
agtctggtacaagtgacaatggtttcaataaaatagatctgtccatgcataactcttgaagaaccacacctatttctgag

SEQ ID NO: 72147 - DNA, 80 bp, synthetic construct
  source 1..80: mol_type = other DNA
ctcggtaaatgttcaccagttttaaatcgatgcaagaggaggttgccgagaacgccatcaatcctctcatagccctcaag

SEQ ID NO: 72148 - DNA, 80 bp, synthetic construct
  source 1..80: mol_type = other DNA
cattggccatgggtcagggcaagtccaaggagaaaaaagacaccaacatcggagacagagccgagattctgccagacacc

SEQ ID NO: 72149 - DNA, 80 bp, synthetic construct
  source 1..80: mol_type = other DNA
cgcaccggggatcctaggctttttggattgcgctttcctcaggtccatcttgtagaagaatgggccaaatagtgacgatg

SEQ ID NO: 72150 - DNA, 80 bp, synthetic construct
  source 1..80: mol_type = other DNA
tgatcagctttcttttcctggctggcaggtcctgtggtatgtatggtcttagtgggcctgacatctacaagggagtttac

SEQ ID NO: 72151 - DNA, 80 bp, synthetic construct
  source 1..80: mol_type = other DNA
agcttaaacccacttgaggtgggcctgctgctccaggcgctggtctgggtgagttagccataggcctctcatttgtcaga

SEQ ID NO: 72152 - DNA, 80 bp, synthetic construct
  source 1..80: mol_type = other DNA
caatttaagtcagtggagtttgatatgtcccacctcaacctgacgatgcccaatgcatgttcggtgaacaactcccatca

SEQ ID NO: 72153 - DNA, 80 bp, synthetic construct
  source 1..80: mol_type = other DNA
cttctgctttcaacaagaaaacctttgaccacacactcatgagtatagtttcgagcctgcacctcagcattagaggaaac

SEQ ID NO: 72154 - DNA, 80 bp, synthetic construct
  source 1..80: mol_type = other DNA
aaagagcgctctgagccagtgcaggactttcaggggaagagttttggacatgttcagaactgcttttggaggaaaataca

SEQ ID NO: 72155 - DNA, 80 bp, synthetic construct
  source 1..80: mol_type = other DNA
cgcaccggggatcctaggcattttgttgcgctatttggatgcacagtcttcctctgtgaacccattgcaagtgaactaga

SEQ ID NO: 72156 - DNA, 80 bp, synthetic construct
  source 1..80: mol_type = other DNA
agagggacacaaacaaaccaacacacacgcacacaacacccaacgcagaacacacgcacacacatccacacacacaccca

SEQ ID NO: 72157 - DNA, 80 bp, synthetic construct
  source 1..80: mol_type = other DNA
acagtatggtctgaaggtgatgtaatccctttgtacttttaaaccccacctcatcttcaccttcatgggctttcctgcct

SEQ ID NO: 72158 - DNA, 80 bp, synthetic construct
  source 1..80: mol_type = other DNA
ttctcataccactttattgtagaattgaccttgtcttccagatttttgaaaaaacttgtctcttcttctccttcaaaaca

SEQ ID NO: 72159 - DNA, 80 bp, synthetic construct
  source 1..80: mol_type = other DNA
gatatctgtagagttgccttctagttttcctgtttctactcccttggaaccgatgaccaatctagagatcaacttcgaaa

SEQ ID NO: 72160 - DNA, 80 bp, synthetic construct
  source 1..80: mol_type = other DNA
ccttgtactcgtaatctgaatggttcaatttgtacttctgttttctcacgaagctttctgtaatctggctcacagcacta

SEQ ID NO: 72161 - DNA, 80 bp, synthetic construct
  source 1..80: mol_type = other DNA
ggatgggttccagacctcatgaaattttcaaaatcagcgaatgatatatagcattcatgctcgagatgttcagataaccc

SEQ ID NO: 72162 - DNA, 80 bp, synthetic construct
  source 1..80: mol_type = other DNA
atagtgctcaaagctaagccctactattgataggcacctttgaatctttgtaatgaactcttttatagatgttttgaaca

SEQ ID NO: 72163 - DNA, 80 bp, synthetic construct
  source 1..80: mol_type = other DNA
aatcctcaagggatgcctttctgtatgcctttgactttctcctgttccttagaagcttggtgaattcttccttggtacta

SEQ ID NO: 72164 - DNA, 80 bp, synthetic construct
  source 1..80: mol_type = other DNA
ccttgctcaacactaggatgtcatcactgtcagtgagagtctcataaagctcagagaattccttgatcaagccttttggg

SEQ ID NO: 72165 - DNA, 80 bp, synthetic construct
  source 1..80: mol_type = other DNA
gtatcaacagagtggatctatccatgcacaactcttgaagaattgtacctatttctgacccttgcagatgctcaccagtt

SEQ ID NO: 72166 - DNA, 80 bp, synthetic construct
  source 1..80: mol_type = other DNA
ccatcagctatgggtcaaagtaaatctaaggaagagaaaggcattagcggcacgagcagagctgagattttgccagatac

SEQ ID NO: 72167 - DNA, 80 bp, synthetic construct
  source 1..80: mol_type = other DNA
tttcccctaccctattgtgttcctcctggttgtgcgattctaaattgcacggataaaaatttctctggaactggaacatg

SEQ ID NO: 72168 - DNA, 80 bp, synthetic construct
  source 1..80: mol_type = other DNA
taaacatggcactcctgtactttgtacgcatggaattaacccattgctgtcgaccgaattactgctgaatgacagtttat

SEQ ID NO: 72169 - DNA, 80 bp, synthetic construct
  source 1..80: mol_type = other DNA
taaacagcctaatgagattgcggccatggttgggtttttcaaaagtggctgcaatctcattaggctgtttagttctaagg

SEQ ID NO: 72170 - DNA, 80 bp, synthetic construct
  source 1..80: mol_type = other DNA
gatatgtcacacctgcgatggcatccatagtggtcccagttacagggagagaatcagaaagcacccttagagcctgaacg

SEQ ID NO: 72171 - DNA, 80 bp, synthetic construct
  source 1..80: mol_type = other DNA
tcctggcagggacaccatcacgttatccagggtctcagctgcttttgttccttggaccgttcaggctctaagggtgcttt

SEQ ID NO: 72172 - DNA, 80 bp, synthetic construct
  source 1..80: mol_type = other DNA
gatgggttgatggtcttggagaactctagcatgaagagaccatgtgcgtcagcaatggtttcaccagctctattaggcag

SEQ ID NO: 72173 - DNA, 80 bp, synthetic construct
  source 1..80: mol_type = other DNA
tacatctttttgtcttctctggtgaagaatcgtccactcatggcggccatattgggcttttcaaatgtggcagccacttc

SEQ ID NO: 72174 - DNA, 80 bp, synthetic construct
  source 1..80: mol_type = other DNA
ggttctcttctttcaactggtagactgaaatcaggttggccacaatagaagcacccttctctgacatcttcttcatcata

SEQ ID NO: 72175 - DNA, 80 bp, synthetic construct
  source 1..80: mol_type = other DNA
ggcggcctgaaattcccaagccacacaagatgttgtcaaaaatcccaaaagtgctcaggtctgagctacaagtatttcta

SEQ ID NO: 72176 - DNA, 80 bp, synthetic construct
  source 1..80: mol_type = other DNA
aatcagattgagaacagcatagtgagagaggtccagtcaataactttggaacggctagccaccctcaaagccaccagcaa

SEQ ID NO: 72177 - DNA, 80 bp, synthetic construct
  source 1..80: mol_type = other DNA
caagactaagactgctgacacagagatccagagattgctgacatagaagattctaaagggactttccgctggggactttc

SEQ ID NO: 72178 - DNA, 80 bp, synthetic construct
  source 1..80: mol_type = other DNA
ttgttagcagtattgatagtagctttaatagtagcactaataatagcaatagttgtgtggactatagcatttatagaata

SEQ ID NO: 72179 - DNA, 80 bp, synthetic construct
  source 1..80: mol_type = other DNA
aagggactttccgctgggactttccactggaggcggttccagggggagggaacaggggagtggccaaccctcagatgctg

SEQ ID NO: 72180 - DNA, 80 bp, synthetic construct
  source 1..80: mol_type = other DNA
tctttcaatatcaccacaagcacaggaactaaggtaagagactctgcactttttaataagcttgatgtattaccaataga

SEQ ID NO: 72181 - DNA, 80 bp, synthetic construct
  source 1..80: mol_type = other DNA
atgaacggagtgaatcaataattgtagaatctggagatccgaatgcattattgaaacaccgatttgaaataattgaagga

SEQ ID NO: 72182 - DNA, 80 bp, synthetic construct
  source 1..80: mol_type = other DNA
atggaaaaaataggacttctttttgcaatagtcagtcttgtcaaaagtgaccagatttgcattggttaccatgcaaacaa

SEQ ID NO: 72183 - DNA, 80 bp, synthetic construct
  source 1..80: mol_type = other DNA
gaaaaactgctctttcaatatcaccacaagcataaatacgaaggtaaaagactatgcacttttttataaacctgacatag

SEQ ID NO: 72184 - DNA, 80 bp, synthetic construct
  source 1..80: mol_type = other DNA
cacatgcactgagataattgtggcaatgctactatttgctatccatactgtccaaaaaagtaccttgtttctactaatac

SEQ ID NO: 72185 - DNA, 80 bp, synthetic construct
  source 1..80: mol_type = other DNA
agctcccaccttctggtgacattgatatgcctgtaactattgatacttcaccatcagttccccttgtccagactcagccc

SEQ ID NO: 72186 - DNA, 80 bp, synthetic construct
  source 1..80: mol_type = other DNA
ccgacccccggtcgcgtggcgcccccgccagacttggttgatggtggcgctagccctggcctgactagtgtctctgtgga

SEQ ID NO: 72187 - DNA, 80 bp, synthetic construct
  source 1..80: mol_type = other DNA
acccccggcgtctgcgcagcctgtaggccagcccgggccccgtcgacggctgcttcatacctaccccgatggttcgaaag

SEQ ID NO: 72188 - DNA, 80 bp, synthetic construct
  source 1..80: mol_type = other DNA
ggttgtttccttatctggggaaacaatattaaagatagaattatctgcaattcattttaccttgctggattcaggattag

SEQ ID NO: 72189 - DNA, 80 bp, synthetic construct
  source 1..80: mol_type = other DNA
tctggatgtgctccaatgggtctttacaatgcagaatatgtatttaaattaggagttcagagacatgaaaaaaacctttt

SEQ ID NO: 72190 - DNA, 80 bp, synthetic construct
  source 1..80: mol_type = other DNA
gatccacccaatgtacgtctaaacaatacccagactatcagtgccaagtcttcacgggagtctacccatttatgtgggga

SEQ ID NO: 72191 - DNA, 80 bp, synthetic construct
  source 1..80: mol_type = other DNA
gccgacgtctatgtcaacggagagacccctgccaaaataggtgatgctaaactaactataggccctctctcttccgcatg

SEQ ID NO: 72192 - DNA, 80 bp, synthetic construct
  source 1..80: mol_type = other DNA
atcgaggggcaccgctaaacgacgtcgctccttttggatgcaacatagccctggaaccactgcgtgctgagaactgtgcg

SEQ ID NO: 72193 - DNA, 80 bp, synthetic construct
  source 1..80: mol_type = other DNA
gtggggagtatccctctctccatcgacatacccgatgccgcttttaccaggatatcggagacaccgactgtctccgatct

SEQ ID NO: 72194 - DNA, 80 bp, synthetic construct
  source 1..80: mol_type = other DNA
actgagtgcacgtatgcgtcagattttgggggaatagctactatgtcgtataaagctagcaaggcaggaaactgccctat

SEQ ID NO: 72195 - DNA, 80 bp, synthetic construct
  source 1..80: mol_type = other DNA
tcattccccttcgggcattgcagtaattaaagagaacgatgttattctttctggaagcggctcgttcacgttccattttt

SEQ ID NO: 72196 - DNA, 80 bp, synthetic construct
  source 1..80: mol_type = other DNA
agttgggggcacatccgtctttatcattcttgggctaatcgctacagcagtggttgccctggtgctattcacccacaaac

SEQ ID NO: 72197 - DNA, 80 bp, synthetic construct
  source 1..80: mol_type = other DNA
actaatactagcagtaaattaccactatattatatcaacatagttcgatgtacttccgagctatgttgctggtggtgcat

SEQ ID NO: 72198 - DNA, 80 bp, synthetic construct
  source 1..80: mol_type = other DNA
aatgccaccggtgtagagcccgcacccatacactaatcccatcgtagttcgatgtacttccgagctacgatgaaggtggt

SEQ ID NO: 72199 - DNA, 80 bp, synthetic construct
  source 1..80: mol_type = other DNA
gtataacgccaccaaagcagtgcataatgctgccaccacacactacatacaattttacaacactactggcagcgcataat

SEQ ID NO: 72200 - DNA, 80 bp, synthetic construct
  source 1..80: mol_type = other DNA
gctgcctttttacttttcttttataaaaacttatgggcagtgacactgccccctcttttaaaaacttaaaaatttttctt

SEQ ID NO: 72201 - DNA, 80 bp, synthetic construct
  source 1..80: mol_type = other DNA
tgttcaattcatttgtccttccacagctgacaagctatgggttagacataggcttgcgccggagaatcaaactgcttttg

SEQ ID NO: 72202 - DNA, 80 bp, synthetic construct
  source 1..80: mol_type = other DNA
aagccgtggctgaagcggaagctgtaagagcagctttacccccactgcggcctgacattgaaagagaaaccatcgaagct

SEQ ID NO: 72203 - DNA, 80 bp, synthetic construct
  source 1..80: mol_type = other DNA
gtacccaggagaggaggtgataggctcctatgcgatactgtctcctcaggctgttcttaacagcgaaaaactagcctgca

SEQ ID NO: 72204 - DNA, 80 bp, synthetic construct
  source 1..80: mol_type = other DNA
ttcaccccctagctgagcaagtgcttgttatgacccataaagggaggatcggacgatacaaggtagaaccatatcatgga

SEQ ID NO: 72205 - DNA, 80 bp, synthetic construct
  source 1..80: mol_type = other DNA
cgggtcgttgtccccagtggtactgccattccgatcccggactttcagtcactaagtgaaagtgctactatcgtctttaa

SEQ ID NO: 72206 - DNA, 80 bp, synthetic construct
  source 1..80: mol_type = other DNA
gagaattcgttaaccgctacttgcaccacattgccatcaatggtggggcgctgaacaccgacgaagaatactataaagtc

SEQ ID NO: 72207 - DNA, 80 bp, synthetic construct
  source 1..80: mol_type = other DNA
ctcaaaagcagcgaagcagactcagagtacgtcttcgatattgatgccagaaaatgcgtcaaaaagacagacgcaggacc

SEQ ID NO: 72208 - DNA, 80 bp, synthetic construct
  source 1..80: mol_type = other DNA
tatgtgtctggtcggtgagttagttgaccctccttttcacgaattcgcatatgaaagtctgaaaacgcgtccagcagcac

SEQ ID NO: 72209 - DNA, 80 bp, synthetic construct
  source 1..80: mol_type = other DNA
cgcacaaagtgccaaccattggcatttacggagtccccggctcgggcaaatcaggaattataaagagtgcagtcacaaag

SEQ ID NO: 72210 - DNA, 80 bp, synthetic construct
  source 1..80: mol_type = other DNA
aaagatttggtagttagtgcaaaaaaagaaaattgcaccgaaattattaaagatgtcaaacggatgcgtagcatggatat

SEQ ID NO: 72211 - DNA, 80 bp, synthetic construct
  source 1..80: mol_type = other DNA
ctagcacaacaaaaccacagaaggacgacatcatattgacgtgttttagaggatgggtcaaacaattgcaaattgactac

SEQ ID NO: 72212 - DNA, 80 bp, synthetic construct
  source 1..80: mol_type = other DNA
gcacgtgtgttgggcgaaggcactggaaccagttctagccactgccaacataaccctcacaagatcccaatgggacacca

SEQ ID NO: 72213 - DNA, 80 bp, synthetic construct
  source 1..80: mol_type = other DNA
tcggcgtagatatcgacagcggactgttttcggccccgactgttcccctgacgtacaataatgagcactgggacaatagt

SEQ ID NO: 72214 - DNA, 80 bp, synthetic construct
  source 1..80: mol_type = other DNA
tcgacacaggtcgggttgcggacgtgcgtaccaacaccattaaggactatagtcccacaattaatgttgtgccattgaac

SEQ ID NO: 72215 - DNA, 80 bp, synthetic construct
  source 1..80: mol_type = other DNA
cggcgccttccacattccttggtcgtatcacacaggtatgtaggcgatggtaactactcgcagttgctgtcaaaattgac

SEQ ID NO: 72216 - DNA, 80 bp, synthetic construct
  source 1..80: mol_type = other DNA
tggaaaaactgtattggtgatcgggacccccatccaggtccctgggaaaagagtagagacactaggcccgagcccgcagt

SEQ ID NO: 72217 - DNA, 80 bp, synthetic construct
  source 1..80: mol_type = other DNA
ccatacaagcaccaccattatcagcaatgcgaggaccatgccattcatcatagcatgcttaccagaaaagccgtcgacca

SEQ ID NO: 72218 - DNA, 80 bp, synthetic construct
  source 1..80: mol_type = other DNA
gaggtacctgtgttgccctaggctacggaaccgcggatagagcaactgaaaatatcatcgccgcggttgcccgttcattt

SEQ ID NO: 72219 - DNA, 80 bp, synthetic construct
  source 1..80: mol_type = other DNA
tagagcaccagcgtatagggtaattagaggagatatatctaaaagtacggatgaggccatcgtgaacgcagccaacaata

SEQ ID NO: 72220 - DNA, 80 bp, synthetic construct
  source 1..80: mol_type = other DNA
aaggccagccaggagcaggcgtctgtggagcactgtacaagagatggccgggagcttttgataagttaccaatcgcgact

SEQ ID NO: 72221 - DNA, 80 bp, synthetic construct
  source 1..80: mol_type = other DNA
ggaacagcacacttagtgaaacatacaccgaatattatccatgcagtgggacctaatttttcccgagtgtccgaaacgga

SEQ ID NO: 72222 - DNA, 80 bp, synthetic construct
  source 1..80: mol_type = other DNA
aggtaaccaaaaactgtcagaagtttacatggaaattgctaaaattatcaacaaagagagatacaacaaggtgtcaatcc

SEQ ID NO: 72223 - DNA, 80 bp, synthetic construct
  source 1..80: mol_type = other DNA
caacactatgcatgcacacagatgccacctgccggtatcacggcacagttgccatttatcaagatgtatatgccgtgcat

SEQ ID NO: 72224 - DNA, 80 bp, synthetic construct
  source 1..80: mol_type = other DNA
aagtgtggaggagcttgtggaagacgacaagccggttgacatagaactggtccgcgtgcacccgctaagctgtttggtgg

SEQ ID NO: 72225 - DNA, 80 bp, synthetic construct
  source 1..80: mol_type = other DNA
gacggcctggctactccacgaatgaagggaaagtgcattcttatttggaaggtacgcgcttccatcagacggccaaagac

SEQ ID NO: 72226 - DNA, 80 bp, synthetic construct
  source 1..80: mol_type = other DNA
ccatgacagcagagcgcgtttttagactgcgcatggcaaagaatgaacagtttgcagtatgctcttctttccagctacct

SEQ ID NO: 72227 - DNA, 80 bp, synthetic construct
  source 1..80: mol_type = other DNA
aaatataggatatcaggagtgcaaaaaatccagtgcaacaaacctattattttctccggtgtagtacccccggccataca

SEQ ID NO: 72228 - DNA, 80 bp, synthetic construct
  source 1..80: mol_type = other DNA
tccgcgaaaattttccgctgtcgaggagactgcaccggcgatcattccagaacggctcgtcccacgacgtccagccccac

SEQ ID NO: 72229 - DNA, 80 bp, synthetic construct
  source 1..80: mol_type = other DNA
cagtgccagagccagctcgcattcccagcccgcgctgctcccctgcaatcagcatgcaatccctggacggcaacaccgac

SEQ ID NO: 72230 - DNA, 80 bp, synthetic construct
  source 1..80: mol_type = other DNA
acatccgtatctggaactgctcttagcagcgttgcctcggtgaccactattgaagccgaaattcctgattctgactcgga

SEQ ID NO: 72231 - DNA, 80 bp, synthetic construct
  source 1..80: mol_type = other DNA
gtgcagtattccacctatgcctttcgttgtagaagctgaagtgcacgccagcttcggatcacagtggagtatccctagcg

SEQ ID NO: 72232 - DNA, 80 bp, synthetic construct
  source 1..80: mol_type = other DNA
ccaccggatttgacatcccagaagactgcagcgtttcctctgaaggctcaatcagcacccatacatctggggtctcaggt

SEQ ID NO: 72233 - DNA, 80 bp, synthetic construct
  source 1..80: mol_type = other DNA
cactctgtaaacctgattacctttgatagtgtcacagatatttttgaaaacttcaagcaagcacctttccaatttttatc

SEQ ID NO: 72234 - DNA, 80 bp, synthetic construct
  source 1..80: mol_type = other DNA
tgacatacgcccgatccctgcaccacgtcgacacgtggtaacacctgaagacaaccagcagcgcatgagaccaattccga

SEQ ID NO: 72235 - DNA, 80 bp, synthetic construct
  source 1..80: mol_type = other DNA
agcctcgcagtactgtcaggtacagcaagcctccaggagtagctagatcaatctccgaggcggagttggatgagtttatc

SEQ ID NO: 72236 - DNA, 80 bp, synthetic construct
  source 1..80: mol_type = other DNA
tgtgtgcatcagaagggaacaggagtaggtatcaatcacgtaaggttgaaaacatgaaggctcttactgtggaacggctg

SEQ ID NO: 72237 - DNA, 80 bp, synthetic construct
  source 1..80: mol_type = other DNA
ttacaagggataggagcgtacctctcagctgagtcgcaatcagtagagtgctacaaagttaactatcccgtccccatata

SEQ ID NO: 72238 - DNA, 80 bp, synthetic construct
  source 1..80: mol_type = other DNA
gactcagccgcatttaatgtggaatgctttaagaagtacgcttgtaatgatgattactgggagacgttcagagacaatcc

SEQ ID NO: 72239 - DNA, 80 bp, synthetic construct
  source 1..80: mol_type = other DNA
cattagactcactactgaaaacgtcacccagtacgtaactaagctaaaagggccaaaagctgcggcgttgttcgccaaaa

SEQ ID NO: 72240 - DNA, 80 bp, synthetic construct
  source 1..80: mol_type = other DNA
catggctgaatatggaagtcaaaataatagacgcagtagtgggcttaaaagctccgtacttctgtgggggattcatcatc

SEQ ID NO: 72241 - DNA, 80 bp, synthetic construct
  source 1..80: mol_type = other DNA
acggaccgaataactggtactgcctgtagggttgcggaccccttaaagcgactgtttaagttagggaaaccgctcccgtt

SEQ ID NO: 72242 - DNA, 80 bp, synthetic construct
  source 1..80: mol_type = other DNA
acgaactgataaaagcggttgagtcacgctatgaggtacactacatctccttaatcatcactgcattgacgacccttgca

SEQ ID NO: 72243 - DNA, 80 bp, synthetic construct
  source 1..80: mol_type = other DNA
gttgtgttttccgtcggttcaacaatttacacagaagatagggcactcttacgcagctggcatctacctaatgttttcca

SEQ ID NO: 72244 - DNA, 80 bp, synthetic construct
  source 1..80: mol_type = other DNA
cgtaagaaaccggcccctaagcccaagccagctgctccgaagaagaaacggcaaataccccctgcaaagaagcaaaaacg

SEQ ID NO: 72245 - DNA, 80 bp, synthetic construct
  source 1..80: mol_type = other DNA
taaacagaagccaggtaaaaggcaacggatgtgcatgaaactggagtcagacaagaccttccctatcatgctgaatggac

SEQ ID NO: 72246 - DNA, 80 bp, synthetic construct
  source 1..80: mol_type = other DNA
accccgcggagttggaggaaaaggagacagtggtcgacctattctggacaacaaggggcgagtcgtggccattgtgctag

SEQ ID NO: 72247 - DNA, 80 bp, synthetic construct
  source 1..80: mol_type = other DNA
agtgcaatggcagaagaacaagaagggatgtggacgctcactttacccagtataaattagcccgcccgtatatagccgac

SEQ ID NO: 72248 - DNA, 80 bp, synthetic construct
  source 1..80: mol_type = other DNA
tgcccaaattgcggtcatggcagatgtgacagtccgatcgctatcgaggacgtgcgcggagacgcgcacgccggttacat

SEQ ID NO: 72249 - DNA, 80 bp, synthetic construct
  source 1..80: mol_type = other DNA
ggttttaaaagccatcaagattgatagcctgtacgtccgtacatcagcaccttgttctctggtttcttatcacggatact

SEQ ID NO: 72250 - DNA, 80 bp, synthetic construct
  source 1..80: mol_type = other DNA
acctcctcgcgcagtgcccaccaggagatactgtaacagtagggttcctagaaggtacccacaagtatatgtgtacagta

SEQ ID NO: 72251 - DNA, 80 bp, synthetic construct
  source 1..80: mol_type = other DNA
gcgcaccaggtaaaatttaacccggtggggagagagaaatacagacatccaccagaacacggtgttgaactaccctgcaa

SEQ ID NO: 72252 - DNA, 80 bp, synthetic construct
  source 1..80: mol_type = other DNA
gtatggtcgccgaccacactctgttgagcatgagcggcaccaaggtgaaagtcaccgcaccgagcagttcgcaagtgaaa

SEQ ID NO: 72253 - DNA, 80 bp, synthetic construct
  source 1..80: mol_type = other DNA
tattactgcaaatgtccagatcttcaagaaggaactaccagcggtgaacacacaacaacatgtaccgatgttaagcaatg

SEQ ID NO: 72254 - DNA, 80 bp, synthetic construct
  source 1..80: mol_type = other DNA
ccgagcgtatctgattgacaacaggaagtgggtgtacaactcaggaaaattacctagaggagaaggcgaaacctttaaag

SEQ ID NO: 72255 - DNA, 80 bp, synthetic construct
  source 1..80: mol_type = other DNA
ctccatgtaccatttgtacctgttgcggccacctgcacagcgacccttgctccagagcctctcgtcgagcacaagcaccg

SEQ ID NO: 72256 - DNA, 80 bp, synthetic construct
  source 1..80: mol_type = other DNA
ctccctgatcctccacttgcatccagagcaccccacgctattgacaacaagggcgctcggaagtcaagcacaaccgacta

SEQ ID NO: 72257 - DNA, 80 bp, synthetic construct
  source 1..80: mol_type = other DNA
cttttatgccgcacccgtaacctttgcataacaccctacagattggcaccaaatgcccacgtacctctcttagtagcgtt

SEQ ID NO: 72258 - DNA, 80 bp, synthetic construct
  source 1..80: mol_type = other DNA
gctgtgctgcgttaaaccaactagagcagacgacaccttgcaagttctaggatacctatggaaccacaaccagaactttt

SEQ ID NO: 72259 - DNA, 80 bp, synthetic construct
  source 1..80: mol_type = other DNA
tctggatgcagaccttgattcctttggctgctctaatcgtgtgcatgcgcgtactgcggtgctttttgtgctgcggtccg

SEQ ID NO: 72260 - DNA, 80 bp, synthetic construct
  source 1..80: mol_type = other DNA
gttagccctagtcatgcagcaccatggggcagctcataacgatgtttgaggctttacctcacgtcattgatgaagtcatc

SEQ ID NO: 72261 - DNA, 80 bp, synthetic construct
  source 1..80: mol_type = other DNA
cttcacttgtttaagacaacagtgaattccttgatatctgaccaattattgatgagaaatcatttgagggatctgatggg

SEQ ID NO: 72262 - DNA, 80 bp, synthetic construct
  source 1..80: mol_type = other DNA
tgtgccctattgcaactactcaaaattttggtacttggagcatgtaaagacaaaagaaacgagtgtccctaagtgttggt

SEQ ID NO: 72263 - DNA, 80 bp, synthetic construct
  source 1..80: mol_type = other DNA
tggtcactaatggctcatacttgaatgaaacacatttcagtgatcagatagaacaagaggcagacaacatgatcaccgag

SEQ ID NO: 72264 - DNA, 80 bp, synthetic construct
  source 1..80: mol_type = other DNA
atgcttaggaaagattacatcaaaaggcagggaagtacccctctagcactaatggatctcttgatgttttccacatcagc

SEQ ID NO: 72265 - DNA, 80 bp, synthetic construct
  source 1..80: mol_type = other DNA
gtatttaatcagtgtttttcttcatctaatgaagatcccaacacatagacacatcaagggcggcacatgccccaaaccac

SEQ ID NO: 72266 - DNA, 80 bp, synthetic construct
  source 1..80: mol_type = other DNA
atagattgactagcaagggcatctgcagttgtggtgcgtttaaggtgccaggagtcaagacggtttgggagagtcaggga

SEQ ID NO: 72267 - DNA, 80 bp, synthetic construct
  source 1..80: mol_type = other DNA
ggccctcagtgggtttagagggtcacaacacttgggcctctgaagactaggtcatgaggcagtatgttatggacagtttt

SEQ ID NO: 72268 - DNA, 80 bp, synthetic construct
  source 1..80: mol_type = other DNA
catcagcttttgcctcctggctggtagatcatgtgggtcatacggtgtctctgatcctcacattttcaaaggactctacc

SEQ ID NO: 72269 - DNA, 80 bp, synthetic construct
  source 1..80: mol_type = other DNA
cagatctggcagcctggcttttgaggcactctcaaaaatgatgcaatccatgagagcacaatgtggagtgatttccttct

SEQ ID NO: 72270 - DNA, 80 bp, synthetic construct
  source 1..80: mol_type = other DNA
tctttttgtctctgacaattccagtgtgcaatttgcataaccagccgtacttatcccagaccttgtcttcatactctcgt

SEQ ID NO: 72271 - DNA, 80 bp, synthetic construct
  source 1..80: mol_type = other DNA
gaggcctctttgctcatctcaacatcaatcagtttgatgtccctcctgttctgtgagtccaaaagctttcttatatcgtc

SEQ ID NO: 72272 - DNA, 80 bp, synthetic construct
  source 1..80: mol_type = other DNA
tgacccctgacagctaagcaccattccctgtggaagagcaccaatcaccgaagaggtcaaccctggttgtgcattgaaaa

SEQ ID NO: 72273 - DNA, 80 bp, synthetic construct
  source 1..80: mol_type = other DNA
gatcagctaaatccattccatgtgagtattttgaatcctgtttaaattgcttctgatctgtaggttctctataaaaatgt

SEQ ID NO: 72274 - DNA, 80 bp, synthetic construct
  source 1..80: mol_type = other DNA
atgaactgtccattttgtggctgaaatgtggccacctccaccggatcattgaatctgccttcaatgtctatccatgtggg

SEQ ID NO: 72275 - DNA, 80 bp, synthetic construct
  source 1..80: mol_type = other DNA
tgcgtttggatcaattccactcatcagatcttttagcagcatgatttgactgtagctcaaccccacttggggcggccctg

SEQ ID NO: 72276 - DNA, 80 bp, synthetic construct
  source 1..80: mol_type = other DNA
ctgcccccggagagggccttggtgggctaggacacaggcttgtctccagataggtcaattgttgtgttctcccatgccct

SEQ ID NO: 72277 - DNA, 80 bp, synthetic construct
  source 1..80: mol_type = other DNA
acccacaatagatgttctgcaagcaatgtagggccagccttcccctgacaagcagattttgtacaggatgttctcatagg

SEQ ID NO: 72278 - DNA, 80 bp, synthetic construct
  source 1..80: mol_type = other DNA
ggtttctgtctcccacttgatcagatacaaacatgtttagcttgcgcttagccccgagaactgccttcagaagttcttca

SEQ ID NO: 72279 - DNA, 80 bp, synthetic construct
  source 1..80: mol_type = other DNA
attttaggtccgtagagttcaacatgtcacaattgaacctaacaatgcccaatgcatgttcagctaacaactctcaccat

SEQ ID NO: 72280 - DNA, 80 bp, synthetic construct
  source 1..80: mol_type = other DNA
gagttgctaggcttaattaagattgactccaacatattgcccccatctaacagagcagctcctgctttgaccgctgcacc

SEQ ID NO: 72281 - DNA, 80 bp, synthetic construct
  source 1..80: mol_type = other DNA
caaactgaagttgtatccagatatattgatgctagattgttgttcagttatcacacccaaaactgggtgcttgtccttca

SEQ ID NO: 72282 - DNA, 80 bp, synthetic construct
  source 1..80: mol_type = other DNA
cttgtccttcaatgtatcaagatctgataggttggggtatttaacagtataaagcaagccaaggtctgtgagtgcctgca

SEQ ID NO: 72283 - DNA, 80 bp, synthetic construct
  source 1..80: mol_type = other DNA
tacatcagtatggggagatctggtttggaactaacctttactaatgactccatccttcaacacaacttttgcaacctgac

SEQ ID NO: 72284 - DNA, 80 bp, synthetic construct
  source 1..80: mol_type = other DNA
tgatgggttccggaaaaaaaccttcgaccatacgctcatgagtatagtggcaagcttgcaccttagcatcagagggaaca

SEQ ID NO: 72285 - DNA, 80 bp, synthetic construct
  source 1..80: mol_type = other DNA
ccgactataaagctgtgtcctgtgacttcaacaatgggatcactattcaatacaacttgtcattttctgatgcacgaagt

SEQ ID NO: 72286 - DNA, 80 bp, synthetic construct
  source 1..80: mol_type = other DNA
gccattaatcaatgcagaacttttagaggcagagttttagacatgttcagaacagcctttggagggaagtacatgagatc

SEQ ID NO: 72287 - DNA, 80 bp, synthetic construct
  source 1..80: mol_type = other DNA
cggctatggttggaaggactctaacgggaaagcaacttggtgcagtcaaactaattatcaatacctaattatacagaaca

SEQ ID NO: 72288 - DNA, 80 bp, synthetic construct
  source 1..80: mol_type = other DNA
gaacatgggaaaatcactgtgagtatgccggtccttttggcctctcaagaattctctttgctcaagaaaagacaaaattt

SEQ ID NO: 72289 - DNA, 80 bp, synthetic construct
  source 1..80: mol_type = other DNA
aacatcgtcattatagtgcttgttataataacaagcataaaggctgtgtacaattttgccacctgtggcatcattgcact

SEQ ID NO: 72290 - DNA, 80 bp, synthetic construct
  source 1..80: mol_type = other DNA
ctcactaggaggctagcaggaactttcacctggacactgtcagattcctcagggactgaaaccccaggtgggtattgtct

SEQ ID NO: 72291 - DNA, 80 bp, synthetic construct
  source 1..80: mol_type = other DNA
gacaaggtggatgctcatagctgctgatctcaagtgttttggaaacacagcagttgctagatgcaacatcaaccatgatg

SEQ ID NO: 72292 - DNA, 80 bp, synthetic construct
  source 1..80: mol_type = other DNA
aagaattctgtgatatgttgaggctaattgactacaacaaggctgctctgaagaaattcaaagaagacgtagagtctgcc

SEQ ID NO: 72293 - DNA, 80 bp, synthetic construct
  source 1..80: mol_type = other DNA
tgaagcagcgttgctataaaataaagaacaagtggtcaaaaagctggcctgatgtaagagagagaataagaagaactaag

SEQ ID NO: 72294 - DNA, 80 bp, synthetic construct
  source 1..80: mol_type = other DNA
taaactggttaattaataaaataaaaaaaaagcagaaaatagtggcaataagagtaaggaaaataaaaagaaattatcaa

SEQ ID NO: 72295 - DNA, 80 bp, synthetic construct
  source 1..80: mol_type = other DNA
ctgctctttcaatgtcacttcaagtttaaaaaatcaggcgcagaaaaaatatgctctctttgatagacttgatgtagtat

SEQ ID NO: 72296 - DNA, 80 bp, synthetic construct
  source 1..80: mol_type = other DNA
ggttttaattgtggaggggaaattttctactgtaattcaacagagctgtttaatagtacctggcagaataatggtacctg

SEQ ID NO: 72297 - DNA, 80 bp, synthetic construct
  source 1..80: mol_type = other DNA
ttgaaaaattgtaacacctcagtcactacacatgcctgtccaaaggtatcctttggtaatgataagaagttcaatggaac

SEQ ID NO: 72298 - DNA, 80 bp, synthetic construct
  source 1..80: mol_type = other DNA
gacttctggggagcaggggttgggaaatcctcaaatattggtggaatctcctgcagtattggatacaggaactaaagaat

SEQ ID NO: 72299 - DNA, 80 bp, synthetic construct
  source 1..80: mol_type = other DNA
taccaacagataatactaataatactgaatataggttgataagttgtaacacctcagtcattacccaggcctgtccaaaa

SEQ ID NO: 72300 - DNA, 80 bp, synthetic construct
  source 1..80: mol_type = other DNA
ggaaggagaactaaaaaactgcactttcaatgtcaccacgagtgtaagagataagataaagacagaacatgcactttttt

SEQ ID NO: 72301 - DNA, 80 bp, synthetic construct
  source 1..80: mol_type = other DNA
tccaaagaggcgtgacttaggcgaagactaagaatggcgagctctcagatgctgcatataagcagctgctttgcgcctgt

SEQ ID NO: 72302 - DNA, 80 bp, synthetic construct
  source 1..80: mol_type = other DNA
gtatgtccaaaaatacgggcattaatcccagtttttacatagggttgaatatccacatagattgatgaagagacacctcc

SEQ ID NO: 72303 - DNA, 80 bp, synthetic construct
  source 1..80: mol_type = other DNA
tatagggtttgatatatcttagcataacaattgtatagaggggaccacaacccggtcacatcatacaattctaatctaag

SEQ ID NO: 72304 - DNA, 80 bp, synthetic construct
  source 1..80: mol_type = other DNA
atctttaatttcccgctccgctctctttatagaaatataaaaatatcttaaataaaaattgtatggatggggcccacccc

SEQ ID NO: 72305 - DNA, 80 bp, synthetic construct
  source 1..80: mol_type = other DNA
agcagaacagctagtgccagagagctcatgcaacatggacaactaccaatcactctcaacaataaataaattaaccaagg

SEQ ID NO: 72306 - DNA, 80 bp, synthetic construct
  source 1..80: mol_type = other DNA
cttggtccctacagaatttaggttgtctatgaaaggacatactgcactacgggtatattgacagaaggaaaatgctttga

SEQ ID NO: 72307 - DNA, 80 bp, synthetic construct
  source 1..80: mol_type = other DNA
tgtttgtgggctctaccctgcacaaataaaggcaagaaatatggtaagccctgtcatgagtgtggttgggttcttagcac

SEQ ID NO: 72308 - DNA, 80 bp, synthetic construct
  source 1..80: mol_type = other DNA
tcaccatcatcaatatgggtttttgctggggctcctgacagatgcccaccaacatgtttgtttgtcggagggatggcaaa

SEQ ID NO: 72309 - DNA, 80 bp, synthetic construct
  source 1..80: mol_type = other DNA
gaagccagctgaccataacccctgatatcgggcctaggccctgggtaaggggtctatctagtagaataagcatctattgg

SEQ ID NO: 72310 - DNA, 80 bp, synthetic construct
  source 1..80: mol_type = other DNA
tttcaattggccaatacatcattggttttgcattggcaattgttttgaaagcattgtacatgttgtcaactcgtgggagg

SEQ ID NO: 72311 - DNA, 80 bp, synthetic construct
  source 1..80: mol_type = other DNA
tttcaattggtcagtacatcattggatttgcactggccatcgttctgaaagcattatacatgttgtcaactcgtgggagg

SEQ ID NO: 72312 - DNA, 80 bp, synthetic construct
  source 1..80: mol_type = other DNA
aagctgatgagttgacaccaggtaggtttaggacaattgtttgtgggttgtttcccgcccagataatgcacagaaatata

SEQ ID NO: 72313 - DNA, 80 bp, synthetic construct
  source 1..80: mol_type = other DNA
agttaagcaggtagaatcattaaagcttgaaagttcatgcaactttgatctacacacgagcacagcagctcagcaggcat

SEQ ID NO: 72314 - DNA, 80 bp, synthetic construct
  source 1..80: mol_type = other DNA
tcacaaaatggacttgggaggcaaagaatgatttaactgaaagtacacaagcatcttcaacaagctatcagaccaagagc

SEQ ID NO: 72315 - DNA, 80 bp, synthetic construct
  source 1..80: mol_type = other DNA
gttaaggtatgtctcattggaaccatctcaaagtttcagccgtcagatactctattgttcttgggcccattagagcaggg

SEQ ID NO: 72316 - DNA, 80 bp, synthetic construct
  source 1..80: mol_type = other DNA
gccgtcagatactctattgttcttgggcccattagagcaggggggtttgatttttaagcagtggtgcacaacgacatgtc

SEQ ID NO: 72317 - DNA, 80 bp, synthetic construct
  source 1..80: mol_type = other DNA
aatttggagatcctggggacataatgagtactccaataggtatgaaatgtcctgaactgaacgggtcttttaggaagaag

SEQ ID NO: 72318 - DNA, 80 bp, synthetic construct
  source 1..80: mol_type = other DNA
agtgaagtcaatttgaagggattgtgtcttgtcccaactttggtgattgagactgcagcacgcacaaggaaaacaattgc

SEQ ID NO: 72319 - DNA, 80 bp, synthetic construct
  source 1..80: mol_type = other DNA
ctagttcaggtctgaccgcagcagcacctcatcttgaccgtgtcactggttataatcaagcagatagtgataaggtgttt

SEQ ID NO: 72320 - DNA, 80 bp, synthetic construct
  source 1..80: mol_type = other DNA
caattttcttatttgccctatgttgcccaagacgggcaacttataaaaaggaacataagccataacatataactctttca

SEQ ID NO: 72321 - DNA, 80 bp, synthetic construct
  source 1..80: mol_type = other DNA
tcaatatgactgtacatacttgtacaagaattaggtatattaatcccatgtatacacacatttattactgtactgataat

SEQ ID NO: 72322 - DNA, 80 bp, synthetic construct
  source 1..80: mol_type = other DNA
taatctttattactaactcactatatagaaaaaaaactagcactttactaactattatacctcaaaccgatcatgcctgg

SEQ ID NO: 72323 - DNA, 80 bp, synthetic construct
  source 1..80: mol_type = other DNA
caacagtatttctgattgggccaattcaaacttgtataacaacaaaaagctgccttcttggtttaggggatcaacggatt

SEQ ID NO: 72324 - DNA, 80 bp, synthetic construct
  source 1..80: mol_type = other DNA
caacttaaaatggaatgtccacatacaattggtctaggtcagggtttagttgttggttcagtcgaattgccaccagtgcc

SEQ ID NO: 72325 - DNA, 80 bp, synthetic construct
  source 1..80: mol_type = other DNA
gccttattggcagcggatctgaaccgctatatgtccctacccttgatgattataggtcagctgaagtcttgtcaaggatg

SEQ ID NO: 72326 - DNA, 80 bp, synthetic construct
  source 1..80: mol_type = other DNA
ggcctggcgtattttccgtatattgcgagcgtgctgaccgtgctgtttaccctgcataaagcgagcattccgaccatgaa

SEQ ID NO: 72327 - DNA, 80 bp, synthetic construct
  source 1..80: mol_type = other DNA
aaatgattgataaactgaccacccgtgaaattgaacaggtggaactgctgaaacgtatttatgatatgatgattaccaaa

SEQ ID NO: 72328 - DNA, 80 bp, synthetic construct
  source 1..80: mol_type = other DNA
ccggtggataaaattgatatgagccaggaatttaaccagcgtcattttaaaaccctgaacgaatgggcggaaggcgaaaa

SEQ ID NO: 72329 - DNA, 80 bp, synthetic construct
  source 1..80: mol_type = other DNA
aaagcaaagaagtgaccgcgagcctgtaagaagtggaactgccgagcagcgtgtgcggcagcggcggcgtgctgaacagc

SEQ ID NO: 72330 - DNA, 80 bp, synthetic construct
  source 1..80: mol_type = other DNA
aaatatcatcgtacctaataactggtggaaaaaccgcagccggtgattagccgtgtgacctaaagctaaagccgtctgac

SEQ ID NO: 72331 - DNA, 80 bp, synthetic construct
  source 1..80: mol_type = other DNA
aaccgcagccggtgattagccgtgtgacctaaagctaaagccgtctgaccaacccggcgagcgcgggccgttaatggaaa

SEQ ID NO: 72332 - DNA, 80 bp, synthetic construct
  source 1..80: mol_type = other DNA
aattgcgctgaaaaccagccgttgcagctataaagtgattaaatattgcattgtgagcatttttaacaccctgctgaaac

SEQ ID NO: 72333 - DNA, 80 bp, synthetic construct
  source 1..80: mol_type = other DNA
aggacattgtggaccttattgaccatgcagaaattgaatctgcaacattgtttgctgacattgcaacaccacattctgta

SEQ ID NO: 72334 - DNA, 80 bp, synthetic construct
  source 1..80: mol_type = other DNA
agaaatgaaaaattgctcttttaatatcaccacaagcatgcaagataagaagcagaaagtatatgcagctttttatatgt

SEQ ID NO: 72335 - DNA, 80 bp, synthetic construct
  source 1..80: mol_type = other DNA
ctgatatcataccaatagatagtaataataataatactgggaccaattataccagctataggttaacacattgtaacacc

SEQ ID NO: 72336 - DNA, 80 bp, synthetic construct
  source 1..80: mol_type = other DNA
cccgaacagggacttgaaagtgaaagagaaacattttaaaaagaaaggggggatgggggggcttgttgaagggcgagcgg

SEQ ID NO: 72337 - DNA, 80 bp, synthetic construct
  source 1..80: mol_type = other DNA
gtttgacagccgcctagcgttccacaagaactgctgacaccgagctttctacaagggactttccgctggggactttccaa

SEQ ID NO: 72338 - DNA, 80 bp, synthetic construct
  source 1..80: mol_type = other DNA
atggaaataatagcactaatagctatactgttagtaacaacaacgagcaatgcagacaaaatctgcattggctaccaatc

SEQ ID NO: 72339 - DNA, 80 bp, synthetic construct
  source 1..80: mol_type = other DNA
acctgagtaaaggagggaagaatatcgaaaggaccagcagaaagctgtggatgctaacgccaatcactttgtcagcatat

SEQ ID NO: 72340 - DNA, 80 bp, synthetic construct
  source 1..80: mol_type = other DNA
gtgatggtgaatggaaagaatcattatcacaaatgtttcttacaagaggtagggcgactggctcagggattgtgaagagg

SEQ ID NO: 72341 - DNA, 80 bp, synthetic construct
  source 1..80: mol_type = other DNA
cgggtgcacttggccgcttgctgatatcaagtacccctactcaactatatattagaatcagtgacccgaataatggacta

SEQ ID NO: 72342 - DNA, 80 bp, synthetic construct
  source 1..80: mol_type = other DNA
tactggctcaatggacacaccctatacgaactcagcgggggggggaggaattccaaactcgcactttagtgttgtattac

SEQ ID NO: 72343 - DNA, 80 bp, synthetic construct
  source 1..80: mol_type = other DNA
gggggggggaggaattccaaactcgcactttagtgttgtattaccccacctggggcggcaacagaaataaatgataattc

SEQ ID NO: 72344 - DNA, 80 bp, synthetic construct
  source 1..80: mol_type = other DNA
acagaaataaatgataattcatggaaggatactctttctcagctatttttgatcgagggatggccgactgtttcttaatt

SEQ ID NO: 72345 - DNA, 80 bp, synthetic construct
  source 1..80: mol_type = other DNA
ctctagtgcgagcgtatagagttacaatcagtgacccagaataatggactacattatatatagatttttgttgatttctg

SEQ ID NO: 72346 - DNA, 80 bp, synthetic construct
  source 1..80: mol_type = other DNA
aacgttgctactactttctgatatcatgcacccctactcaactatatattataatcagtgacccgaataatggactacat

SEQ ID NO: 72347 - DNA, 80 bp, synthetic construct
  source 1..80: mol_type = other DNA
atgctccacgtcgtcctcgatgtcataccttctactctctagtatattacaatcagtgacccgaataatggactacatta

SEQ ID NO: 72348 - DNA, 80 bp, synthetic construct
  source 1..80: mol_type = other DNA
aactggcgtagggtctatctttctgatatcgaatctcctactcaactatatattagaatcagttgacccgaatgatggga

SEQ ID NO: 72349 - DNA, 80 bp, synthetic construct
  source 1..80: mol_type = other DNA
atggtgaatggaaagactcattatcgcaaatgtttcttacaaaaggttggccgataggctcatcgtgatgttgaaggagg

SEQ ID NO: 72350 - DNA, 80 bp, synthetic construct
  source 1..80: mol_type = other DNA
aggtgttaggtctatctttctgatatcatccctctactcagctatatattagaatcagtgacccgaataatggactacat

SEQ ID NO: 72351 - DNA, 80 bp, synthetic construct
  source 1..80: mol_type = other DNA
tggaaagactcattatcgcgaatgtttcttacaaaaggttggcgacgggcaggggatttgagagaggaccccccggcgcg

SEQ ID NO: 72352 - DNA, 80 bp, synthetic construct
  source 1..80: mol_type = other DNA
tgtgtttggtttgtggggtctaatctatcaaaatggagaaaatagtgcttcttcttgcaatagtcagtcttgttaaaagt

SEQ ID NO: 72353 - DNA, 80 bp, synthetic construct
  source 1..80: mol_type = other DNA
tcaagcggaatgaatgcagcaacctatcgagcaatcaagcagcgccatgcgacccaatcataatagagagaaacacagtg

SEQ ID NO: 72354 - DNA, 80 bp, synthetic construct
  source 1..80: mol_type = other DNA
ccccctcaaagcctaccttgttcatacacttgaagatgtctttgctgggaaaaacacagatcttgaggctctcatggaat

SEQ ID NO: 72355 - DNA, 80 bp, synthetic construct
  source 1..80: mol_type = other DNA
ctacggaaggagtacctgtagcgaaagcaggtagatatcgaaaggaacagcagaagcaggtagatgctgaaggcagtcat

SEQ ID NO: 72356 - DNA, 80 bp, synthetic construct
  source 1..80: mol_type = other DNA
cgtacgttctctctatcatcccgtcaggccccctcaaagccgagatcgcacagagacttgaagatgtatttgcaggaaag

SEQ ID NO: 72357 - DNA, 80 bp, synthetic construct
  source 1..80: mol_type = other DNA
atggagtaccaaagtctatgagggaagaatatcgaaaggaacagcagagttatgtggatgctgacgatggtcattgcagc

SEQ ID NO: 72358 - DNA, 80 bp, synthetic construct
  source 1..80: mol_type = other DNA
ttgtcaagcacatcttggcgctgcatgaagtagatcttatttcttttcaacatctcaatctcttgtgctggtgtccccgg

SEQ ID NO: 72359 - DNA, 80 bp, synthetic construct
  source 1..80: mol_type = other DNA
gaaactgctctttcgatattgacacaaaaataggaaatatacgaaaagaacatgcaatttttaataaacttgatatagta

SEQ ID NO: 72360 - DNA, 80 bp, synthetic construct
  source 1..80: mol_type = other DNA
accaataatgttactactacccttgcgcaggaggagagggaaataaaaaactgcactttcaatatcacaacaggcttaaa

SEQ ID NO: 72361 - DNA, 80 bp, synthetic construct
  source 1..80: mol_type = other DNA
caattgtagtagtaccaatagtactaatagtaccaataatagtagtcgggaagacatgaagggagaaataaaaaaatgtt

SEQ ID NO: 72362 - DNA, 80 bp, synthetic construct
  source 1..80: mol_type = other DNA
aataaaaaactgctctttcaatgtcacaagcatagggaataaggtgcggaaagaacatgcaatttttaataaacttgatg

SEQ ID NO: 72363 - DNA, 80 bp, synthetic construct
  source 1..80: mol_type = other DNA
tcacactcccatgcagaaaaaaactaatcatcaacatgcagcaagaagaagaaaaagcaacgtatgccaatacaattaga

SEQ ID NO: 72364 - DNA, 80 bp, synthetic construct
  source 1..80: mol_type = other DNA
taaatgctatctaattatattgtatgataattattacaatatatactgtgttattgaatttaatgatatcctaatgatag

SEQ ID NO: 72365 - DNA, 80 bp, synthetic construct
  source 1..80: mol_type = other DNA
gcagcaaaatcagattgcggaccttcagcaatattgcaataaattggaagctgacctgcaaaacaaaattaattcactag

SEQ ID NO: 72366 - DNA, 80 bp, synthetic construct
  source 1..80: mol_type = other DNA
ctgaaaagagggccttctacggaaggagtacctgagtctatgagggaagaatatcgaaaggaacagcagaatgctgtgga

SEQ ID NO: 72367 - DNA, 80 bp, synthetic construct
  source 1..80: mol_type = other DNA
gtcaaacgacaaatacagctacttttgaaacagttgctgatagcgaaaaattggcaataattgatgttgtcgacagcgta

SEQ ID NO: 72368 - DNA, 80 bp, synthetic construct
  source 1..80: mol_type = other DNA
aaataaaaaactgcactttcaaaatcagcacaagcttacaagataaagtgaaagactatgcacttttttatacacttgat

SEQ ID NO: 72369 - DNA, 80 bp, synthetic construct
  source 1..80: mol_type = other DNA
gctctttcaaaatcaccacaagcataaatactaaggtgaaagaccatgctcttttctataaagatgatatagtatcaatg

SEQ ID NO: 72370 - DNA, 80 bp, synthetic construct
  source 1..80: mol_type = other DNA
tcaatgggtaggaagaatatgactacaatagataggaagaatatgactaccagatataggctgatacattgtaacaactc

SEQ ID NO: 72371 - DNA, 80 bp, synthetic construct
  source 1..80: mol_type = other DNA
aggagaaataaaaaactgcactttcaaaatcaccacaagcttaaatgataaagtgaaagactctgcacttttttataaac

SEQ ID NO: 72372 - DNA, 80 bp, synthetic construct
  source 1..80: mol_type = other DNA
ttgatctagtaccacttaatgagaaaaaatctagtaggaattctagaaaccctgtgagcagcataagaattctagtaact

SEQ ID NO: 72373 - DNA, 80 bp, synthetic construct
  source 1..80: mol_type = other DNA
tgtgagggagggaggagaaatgaaaaactgctctttcaatatcaccacaagcacaggcgctaaggtgacagactatgcac

SEQ ID NO: 72374 - DNA, 80 bp, synthetic construct
  source 1..80: mol_type = other DNA
atgaagactgtcattgctttaagctacatcttctgtctggtttttggccaagaacttccaggaaagggcaacaacacagc

SEQ ID NO: 72375 - DNA, 80 bp, synthetic construct
  source 1..80: mol_type = other DNA
caagcagcagatcttaaaagtacccaagcagctatcaatcagatcaatggaaaactaaatagagtaatcgagaagacgaa

SEQ ID NO: 72376 - DNA, 80 bp, synthetic construct
  source 1..80: mol_type = other DNA
catcaaatcgaaaaagagttctcagaagtagaaggaaggatccaagacctcgaaagatatgttgaagatactaagataga

SEQ ID NO: 72377 - DNA, 80 bp, synthetic construct
  source 1..80: mol_type = other DNA
tactgaactggtccagaatttctcaatgggtaaaatatgcaacaatcctcatcgaattctcgatggagcaaattgcacac

SEQ ID NO: 72378 - DNA, 80 bp, synthetic construct
  source 1..80: mol_type = other DNA
ggatttataatgtgggcctgccaaaaaggcaacattaggtgcaacatttgcatctgattgcttctgggttgaactaatca

SEQ ID NO: 72379 - DNA, 80 bp, synthetic construct
  source 1..80: mol_type = other DNA
taatggactctctattgggggaccctcattgtgatgggtttcaaaatgagaaatgggatcttttcattgaacgcagcaag

SEQ ID NO: 72380 - DNA, 80 bp, synthetic construct
  source 1..80: mol_type = other DNA
actgctacccttatgatgtgccggagtatacctcccttaggtcactaattgcctcgtcaggcaccttggaatttaccaat

SEQ ID NO: 72381 - DNA, 80 bp, synthetic construct
  source 1..80: mol_type = other DNA
attggactggggtcacccagaatggaggaagcagtgcttgcaagagggggcctaacaacagttttttcagtaaactgaac

SEQ ID NO: 72382 - DNA, 80 bp, synthetic construct
  source 1..80: mol_type = other DNA
tggttgtacaaatcaggtaatacatacccgatgcaaaacgttactatgccaaacagtgacgattttgacaaattgtacat

SEQ ID NO: 72383 - DNA, 80 bp, synthetic construct
  source 1..80: mol_type = other DNA
ttggggggttcatcatccgagcaccgacagagaacaaatcaacctatatgtccaagcatcagggaaaataataatttcta

SEQ ID NO: 72384 - DNA, 80 bp, synthetic construct
  source 1..80: mol_type = other DNA
cctgataatcaacagcaatggaaacctaattgctccccgaggttacttcaaaatgcagactggaaaaagctcagtaatga

SEQ ID NO: 72385 - DNA, 80 bp, synthetic construct
  source 1..80: mol_type = other DNA
aacgctgtgcctaggacatcatgcagtaccaaatggaacactggtgaaaacaatcacggatgatcagatcgaagtaacta

SEQ ID NO: 72386 - DNA, 80 bp, synthetic construct
  source 1..80: mol_type = other DNA
ggagcatgtccaaaatatatcaagcaaaacactctgaagttggcaacagggatgcggaatataccagaaagacaaactag

SEQ ID NO: 72387 - DNA, 80 bp, synthetic construct
  source 1..80: mol_type = other DNA
ttgacaaattgtacatttggagggttcatcatccgagcaccgacagagaacaaatcaacctatatgtccaagcatcaggg

SEQ ID NO: 72388 - DNA, 80 bp, synthetic construct
  source 1..80: mol_type = other DNA
ggtgtcttggaggagatcctaggtgtgcagatctatgcattgacataagggtaggatctctacaatatgtggcacaaact

SEQ ID NO: 72389 - DNA, 80 bp, synthetic construct
  source 1..80: mol_type = other DNA
gtggtgtactactacatgccagtttggtgatcctggggatataatgagtactcctgctggaatgaagtgcccagaattga

SEQ ID NO: 72390 - DNA, 80 bp, synthetic construct
  source 1..80: mol_type = other DNA
actactagtactcctgggaagctcaacagtaaagaagaaataaaaaactgctctttcaatgttaccttaggagtaaaaag

SEQ ID NO: 72391 - DNA, 80 bp, synthetic construct
  source 1..80: mol_type = other DNA
caagtggccaaacagctgactggtatacaattggagtgtatgtgatagggttcacactacctattattttgaaagcccta

SEQ ID NO: 72392 - DNA, 80 bp, synthetic construct
  source 1..80: mol_type = other DNA
ccaatcatagcagaggggcctaaagcagtagactacagaagttggtcaaaaccgcaatgccaaattacgggatttgctcc

SEQ ID NO: 72393 - DNA, 80 bp, synthetic construct
  source 1..80: mol_type = other DNA
gtcatggtggatctagcaaagactatattagagattgaaagtgatcaacgagagaatataactgaaatatggtccacaaa

SEQ ID NO: 72394 - DNA, 80 bp, synthetic construct
  source 1..80: mol_type = other DNA
aaataaacgcagatatgtctaaatggagtgctcaagatgtgttttataaatacttctggctcatagccttagacccaatc

SEQ ID NO: 72395 - DNA, 80 bp, synthetic construct
  source 1..80: mol_type = other DNA
taatcaaacacattgccaaccgactgtttatctaatagcacccgtattaacatgcatgtcaataagaagttgtatggcta

SEQ ID NO: 72396 - DNA, 80 bp, synthetic construct
  source 1..80: mol_type = other DNA
atggaagggtggtacctggttgcgcttggagtctactggacacttacactggcaatgcctaaaaccatttatgaacttaa

SEQ ID NO: 72397 - DNA, 80 bp, synthetic construct
  source 1..80: mol_type = other DNA
caatcaaacacactgccaaccaactgtctacttaattgcacctgtattgacatgcatgtcaatacggagttgtatggcta

SEQ ID NO: 72398 - DNA, 80 bp, synthetic construct
  source 1..80: mol_type = other DNA
atggaagggtggtatctggttgctcttggagtctgctacacgctgacactggcaatgcccaaaaccatttatgagcttaa

SEQ ID NO: 72399 - DNA, 80 bp, synthetic construct
  source 1..80: mol_type = other DNA
caatcagacacattgtcagccaactatttatctgattgcacctgtactgacatgcatgtcaataagaagttgtatggcta

SEQ ID NO: 72400 - DNA, 80 bp, synthetic construct
  source 1..80: mol_type = other DNA
tgttatgatctaacatgcaatcagacacattgtcaaccaactgtttatctgattgcacctgtattgacatgcatgtcaat

SEQ ID NO: 72401 - DNA, 80 bp, synthetic construct
  source 1..80: mol_type = other DNA
ttagtaacaccatctgtaaaggtatgtatagtgggtactgtttcgaagcttcaaccatctgatactctcttgtttctggg

SEQ ID NO: 72402 - DNA, 80 bp, synthetic construct
  source 1..80: mol_type = other DNA
ctaacagagtgtccaagtttcatgacatcgattaaagcatgtgatttggcgatgtgttatggttcaacagtagcaaacct

SEQ ID NO: 72403 - DNA, 80 bp, synthetic construct
  source 1..80: mol_type = other DNA
tgtatagtgggtactgtctcaaagcttcagccatctgacacccttttgttcctggggccattggaacaaggcggaattat

SEQ ID NO: 72404 - DNA, 80 bp, synthetic construct
  source 1..80: mol_type = other DNA
ggggctctggtgtaggctttacactcacatgtagtgttgggctgacagagtgcccaagtttcatgacatcaattaaagca

SEQ ID NO: 72405 - DNA, 80 bp, synthetic construct
  source 1..80: mol_type = other DNA
ttagtaacaccatctgtgaaagtctgcatagtgggcacagtttctaaactccaaccatctgatactcttttgttcttagg

SEQ ID NO: 72406 - DNA, 80 bp, synthetic construct
  source 1..80: mol_type = other DNA
ttaacagagtgcccgagttttatgacatcaattaaggcatgtgatcttgctatgtgttatggatcaacagtggcaaacct

SEQ ID NO: 72407 - DNA, 80 bp, synthetic construct
  source 1..80: mol_type = other DNA
aggtggcttctgaatcctttatgtccactaacaaaatgtatttcctaaacaggcaaaggcaggtcaacgagtccaaggtt

SEQ ID NO: 72408 - DNA, 80 bp, synthetic construct
  source 1..80: mol_type = other DNA
caagatatcgttgatttaatagatcatgctgaaactgagtctgctaccttattcacggagattgcaacaccccattcagt

SEQ ID NO: 72409 - DNA, 80 bp, synthetic construct
  source 1..80: mol_type = other DNA
catccaaatctgtagggactgcagaagaaaagttgaagaaaaaatctgcattttatcaatcttatttgagaaggacgcaa

SEQ ID NO: 72410 - DNA, 80 bp, synthetic construct
  source 1..80: mol_type = other DNA
ttattcgtcttcagggagcaaaagcaggggttataccatagacaaccgaacaaagacaatgaccatcacttttctcatcc

SEQ ID NO: 72411 - DNA, 80 bp, synthetic construct
  source 1..80: mol_type = other DNA
aaggagtgaaattgagcaatatgggggtttatcaaatacttgctatatacgctacagttgcaggctctttgtcactggca

SEQ ID NO: 72412 - DNA, 80 bp, synthetic construct
  source 1..80: mol_type = other DNA
gcaatgcagaatttgcatatgactgtaagtcaatttgtaattaaaaacacccttgtttctactaatacgagacgatataa

SEQ ID NO: 72413 - DNA, 80 bp, synthetic construct
  source 1..80: mol_type = other DNA
tgggggattgcagcattgcaggttggctccttggaaatccggaatgtgaccggctcttaagtgtacctgaatggtcctat

SEQ ID NO: 72414 - DNA, 80 bp, synthetic construct
  source 1..80: mol_type = other DNA
ggtgaatggtctgtgctatccaggcagtttcaatgattatgaggaattgaaacatcttctcaccagtgtgacacactttg

SEQ ID NO: 72415 - DNA, 80 bp, synthetic construct
  source 1..80: mol_type = other DNA
agaaagttaagattctgcccagagatcaatggacccagcacacaacaactggtggttctcgggcctgtgcagtatctgga

SEQ ID NO: 72416 - DNA, 80 bp, synthetic construct
  source 1..80: mol_type = other DNA
acccgtcattctttaggaacatggtttggcttacaaagaaagggtcaaactacccaattgctaaaaggtcatacaacaac

SEQ ID NO: 72417 - DNA, 80 bp, synthetic construct
  source 1..80: mol_type = other DNA
acaagtggggagcaaatgctggtaatatgggggatacatcaccccaatgacgatgcggaacagaggacactgtaccagaa

SEQ ID NO: 72418 - DNA, 80 bp, synthetic construct
  source 1..80: mol_type = other DNA
tgtgggaacatatgtttccgttggaacatcaacactaaataagaggtcaatccctgaaatagcaacaaggcccaaagtca

SEQ ID NO: 72419 - DNA, 80 bp, synthetic construct
  source 1..80: mol_type = other DNA
tggcgtttacttacacactcctcctttcaacgttatggtgcatgtacaaaaaatgaatacccatggcatactgccaagtg

SEQ ID NO: 72420 - DNA, 80 bp, synthetic construct
  source 1..80: mol_type = other DNA
aattgacatgaatgactgctttgtatcaagacatgttaaaatctgtataataggtacagtctctaaattctctcagggta

SEQ ID NO: 72421 - DNA, 80 bp, synthetic construct
  source 1..80: mol_type = other DNA
agaagaacagacaattggagttgatgtgcatgctctaggacactggtttgatggtcgtcttaaccttaaaacatcctttc

SEQ ID NO: 72422 - DNA, 80 bp, synthetic construct
  source 1..80: mol_type = other DNA
ctcaaactcccggtcctgttgcgtccccaccggatttggttgatggtggagctggccctggtttgactagcgcctctgtg

SEQ ID NO: 72423 - DNA, 80 bp, synthetic construct
  source 1..80: mol_type = other DNA
gagcccccggcgtccgtgcagcttgtaacccagcccgggccccgtcgacgactgctccatacttaccccgatggctcaaa

SEQ ID NO: 72424 - DNA, 80 bp, synthetic construct
  source 1..80: mol_type = other DNA
ctgtgaccttggaccaccgtcgggaaccccctcgtccgctggcgacgtctggatactcccaccgccctccgaggggtcgg

SEQ ID NO: 72425 - DNA, 80 bp, synthetic construct
  source 1..80: mol_type = other DNA
aagggcttgcaaagacctagggaactacgccctagatatactcaagctggttatgaagtggttcttccccaagaaggagg

SEQ ID NO: 72426 - DNA, 80 bp, synthetic construct
  source 1..80: mol_type = other DNA
gcaattggctaaaacaattgccggtacgatggcaggagaccagagagttggacttgtcccccgcaatggggttgaccact

SEQ ID NO: 72427 - DNA, 80 bp, synthetic construct
  source 1..80: mol_type = other DNA
acaacgagaaaaaccggtgcagccccccacagtgagcattaatggtgtggaagttgaagtgccacccccccccccaaatg

SEQ ID NO: 72428 - DNA, 80 bp, synthetic construct
  source 1..80: mol_type = other DNA
ccccgtcactctcaattgtgacaggattgagaacaaagggaaaatgttcgacagcgatgtcatcataataaccactaacc

SEQ ID NO: 72429 - DNA, 80 bp, synthetic construct
  source 1..80: mol_type = other DNA
ctggcccctcaaggtgggtttgataagaacggaaacaccccacacggaaaagggacgatgaagactctcacccagggctc

SEQ ID NO: 72430 - DNA, 80 bp, synthetic construct
  source 1..80: mol_type = other DNA
ccttactgctcgtgtagctggcctagtgcacgagaggagggacgagttccagtttcaaggggatgaggtgcaactttaca

SEQ ID NO: 72431 - DNA, 80 bp, synthetic construct
  source 1..80: mol_type = other DNA
actttgatgccaacagagtgtctgcgtttaggaagctagcagctgacaacaaatacagtctcatggaaactatgaaggtt

SEQ ID NO: 72432 - DNA, 80 bp, synthetic construct
  source 1..80: mol_type = other DNA
ggttctgctctcaagaatgtcaaaaccctagaagacctaaaggtcgcactcaggaccgtgaaattcaaggagtgcgaaat

SEQ ID NO: 72433 - DNA, 80 bp, synthetic construct
  source 1..80: mol_type = other DNA
aatatacaaagggtcaaagtaccgtgtctcatctgatggatgtgggaatgtctcagtcaccaaagtgaaagacatgatgt

SEQ ID NO: 72434 - DNA, 80 bp, synthetic construct
  source 1..80: mol_type = other DNA
gacctgatttacacccttatccaggtcgccggtgcttcctttgttgtgcacagaatatcaaggagattctcatgggaacg

SEQ ID NO: 72435 - DNA, 80 bp, synthetic construct
  source 1..80: mol_type = other DNA
gtgaggatgtggtctactacaacagtaaaaacgacaccgttgagggcttgcctgacctgaccacagtccagaatgaacat

SEQ ID NO: 72436 - DNA, 80 bp, synthetic construct
  source 1..80: mol_type = other DNA
gtggatcaaaccctctgaggcccttcctgaggatggccaaatcagtccaacagacagtgctgaaaagtgggaagtcgagc

SEQ ID NO: 72437 - DNA, 80 bp, synthetic construct
  source 1..80: mol_type = other DNA
cgaaagatgccgacccagaaggcaagaaaggtaagaataagaaaggtagaggcaggaagcacacagccttctctagcaag

SEQ ID NO: 72438 - DNA, 80 bp, synthetic construct
  source 1..80: mol_type = other DNA
ttgaggccccacctagtgtctggtcacgtatagttcctctgggcactggctggggcttctgggtctcatcaaatctactc

SEQ ID NO: 72439 - DNA, 80 bp, synthetic construct
  source 1..80: mol_type = other DNA
gaacattccccctacacggtgccccctctaagtgaaagagaacacaaacccgcaatggaaccattaccaggcaccatact

SEQ ID NO: 72440 - DNA, 80 bp, synthetic construct
  source 1..80: mol_type = other DNA
aaggcacagtgtgttcaatcctagtaaagcgacccacaggggagatgatccccctcgctgttagaatggggacacacgct

SEQ ID NO: 72441 - DNA, 80 bp, synthetic construct
  source 1..80: mol_type = other DNA
ccggagcgaacgccaagaacatggacttgggaaccataccaggcgattgtggctgtccatatatttacaaaaggggcaat

SEQ ID NO: 72442 - DNA, 80 bp, synthetic construct
  source 1..80: mol_type = other DNA
agcccagggggaagccgccaaaccccactgtacttgaagaagccaaaaagaccgtcatgaatgttcttgaacaaaccata

SEQ ID NO: 72443 - DNA, 80 bp, synthetic construct
  source 1..80: mol_type = other DNA
gaagaagaacgaccactggaatggagactctttcacaggacccttggctgatcaagcctctaaagctaacctgatgtatg

SEQ ID NO: 72444 - DNA, 80 bp, synthetic construct
  source 1..80: mol_type = other DNA
aacaggcgaaacacgtcagtcctgtttatacggcagccctcaaggatgaactagtcaaaacagacaagatctacaaaaag

SEQ ID NO: 72445 - DNA, 80 bp, synthetic construct
  source 1..80: mol_type = other DNA
ttgcagaagacttgctagcccctagtcagctcgacgttggggattttgtgatctctgtgcaggagggccttccttctggt

SEQ ID NO: 72446 - DNA, 80 bp, synthetic construct
  source 1..80: mol_type = other DNA
gttccttgcacctcacagtggaattcaatagcgcactggatcattaccctaagcgctatggcagaagtgtccggtctttc

SEQ ID NO: 72447 - DNA, 80 bp, synthetic construct
  source 1..80: mol_type = other DNA
tggacaagaggcccaaaccatgagaacccctacgaaagcatggtcccccattcacaacgtgccactcagctcatggccct

SEQ ID NO: 72448 - DNA, 80 bp, synthetic construct
  source 1..80: mol_type = other DNA
cttaggggaggcctctctccatggaccccaattctacaagaaagtcagcaagatggttatcagtgagataaaaagtggtg

SEQ ID NO: 72449 - DNA, 80 bp, synthetic construct
  source 1..80: mol_type = other DNA
ttgaaccagtggctggtgctgctattgctgccccggttgctgggcaacagaatataatagatccctggattagaaataac

SEQ ID NO: 72450 - DNA, 80 bp, synthetic construct
  source 1..80: mol_type = other DNA
tggtggcgagttcactgtttcaccaagaaacgccccgggggaagtacttctaaatttacctctaagccctgatatcaatc

SEQ ID NO: 72451 - DNA, 80 bp, synthetic construct
  source 1..80: mol_type = other DNA
catatttggcccatttgtcccgaatgtacaatggttatgctggaggcgtggaggtggaggtggtcctcgccgggaatgcg

SEQ ID NO: 72452 - DNA, 80 bp, synthetic construct
  source 1..80: mol_type = other DNA
tttgccgcagtgccacccaattttcctcctgagaaccttagtccaagtcaaataacaatgctcccccatatcatagttga

SEQ ID NO: 72453 - DNA, 80 bp, synthetic construct
  source 1..80: mol_type = other DNA
tgtcaggcaattggaaccagtgcgcatacctttaccagatgtgcgcaacaatttctatcattattctagagaaaatgact

SEQ ID NO: 72454 - DNA, 80 bp, synthetic construct
  source 1..80: mol_type = other DNA
gtgcatcctgacacccttaagggtctcgctggagagaagttcccgtacacggcattcagtaacaattgttacaacttctg

SEQ ID NO: 72455 - DNA, 80 bp, synthetic construct
  source 1..80: mol_type = other DNA
tgccacccacagttgaatctaaatctaaacccttcactatcccaatactcactattgaggaaatgaccaattctaggttt

SEQ ID NO: 72456 - DNA, 80 bp, synthetic construct
  source 1..80: mol_type = other DNA
cctgccccgttagagatgatgaccacaggtccgagccacgacattgttgtgcaaccacaaaacgggcgctgcaccattga

SEQ ID NO: 72457 - DNA, 80 bp, synthetic construct
  source 1..80: mol_type = other DNA
tgctccatgaggggtgttcctaccaagcgaaccaatgggactgacaattgctttgtgcaactcgagaacccaaacggttc

SEQ ID NO: 72458 - DNA, 80 bp, synthetic construct
  source 1..80: mol_type = other DNA
agcttatgatccaacagaggacataccagcagtcctggggtcacctgactttgtgggagagttctacgggacaatcaccc

SEQ ID NO: 72459 - DNA, 80 bp, synthetic construct
  source 1..80: mol_type = other DNA
agaggagcccaaataattcaactagagcccaccctttcaccctcaacactggaagccctaggtacactcccaaaattggc

SEQ ID NO: 72460 - DNA, 80 bp, synthetic construct
  source 1..80: mol_type = other DNA
tcagtggacatccacgtcacagacgttgaagacctcaacgatcacgagccagtgaaactcactccagtcggtctctctgg

SEQ ID NO: 72461 - DNA, 80 bp, synthetic construct
  source 1..80: mol_type = other DNA
tagcagtggttcaatccatcagtggcagctgccaaattactcaggagtggcaacccacaatatgcacttggccccatctg

SEQ ID NO: 72462 - DNA, 80 bp, synthetic construct
  source 1..80: mol_type = other DNA
tcgctccattgttccctggtgagcagattcttttcttccggtccacagtccccgggtgtggtggttatccaaacacaaac

SEQ ID NO: 72463 - DNA, 80 bp, synthetic construct
  source 1..80: mol_type = other DNA
atcgactgtttgattcctcaagagtgggtccaacacttctaccaggaaggtgctccagcccgtactgatgtggccctgct

SEQ ID NO: 72464 - DNA, 80 bp, synthetic construct
  source 1..80: mol_type = other DNA
cagatttgtaaaccctgacacgggcagagtgctctttgagtgtaaattgcataagcatggctttattactgtggcttact

SEQ ID NO: 72465 - DNA, 80 bp, synthetic construct
  source 1..80: mol_type = other DNA
ctggaaaccatgatttggttatgcccccaaatggttattttagatttgagtcttgggtgaatcaatttcacactcttgcc

SEQ ID NO: 72466 - DNA, 80 bp, synthetic construct
  source 1..80: mol_type = other DNA
cccatgggaacaggttcgggcagaaggagaatccagtaatggcaggagcatttctagcaaatctggccggtggcgtggca

SEQ ID NO: 72467 - DNA, 80 bp, synthetic construct
  source 1..80: mol_type = other DNA
tcaaacgggattggctctctgatcaacgcaggtgccaacgctatcaatcaaaaagttgagtatgattttaataagcaact

SEQ ID NO: 72468 - DNA, 80 bp, synthetic construct
  source 1..80: mol_type = other DNA
ccagagcgcatcgttcgctcacgataaagagatgctccaggcacaaattcaggcaacaagtcagctccaacgtgacatga

SEQ ID NO: 72469 - DNA, 80 bp, synthetic construct
  source 1..80: mol_type = other DNA
tggccatcaagcaagaggtgttgaccgctggcggcttctctcacgctgatgcagccaggggcgcggttggagcgccaatg

SEQ ID NO: 72470 - DNA, 80 bp, synthetic construct
  source 1..80: mol_type = other DNA
acaaagttgatcgactggagcggcacaagatactgggccccaaattccatgaaaacaacaggctattctggaactttcac

SEQ ID NO: 72471 - DNA, 80 bp, synthetic construct
  source 1..80: mol_type = other DNA
cagccaagctcccccacagtttaccccctattctaagagtgcaggcaaacaatcaccctctggggcagtgtcgccctcaa

SEQ ID NO: 72472 - DNA, 80 bp, synthetic construct
  source 1..80: mol_type = other DNA
tttcttctggctcttctgtgagctctttgagaacacaatcaacttccttgccatctaatcggactatgacaacacaatca

SEQ ID NO: 72473 - DNA, 80 bp, synthetic construct
  source 1..80: mol_type = other DNA
tcaggcctctcttcatcctctcgatctaggacatcagattgggtgcgcagtcaaaacgagagaatgagcccattcatgga

SEQ ID NO: 72474 - DNA, 80 bp, synthetic construct
  source 1..80: mol_type = other DNA
atcatggaataggaaacccctccccacagttgatgatggaaaaatcaagaaagtggccaatgcagtgttgtgtgctcttg

SEQ ID NO: 72475 - DNA, 80 bp, synthetic construct
  source 1..80: mol_type = other DNA
cggggcactccatacagcttttgtgtcccccccatcgagtagggcttctagttctggcacagtctcaaccgtgccaaagg

SEQ ID NO: 72476 - DNA, 80 bp, synthetic construct
  source 1..80: mol_type = other DNA
gatcattgttctcgaaacccattaaagacctgcttggaaagttgaaaccccttaacctgctcaatttattggcatcatgt

SEQ ID NO: 72477 - DNA, 80 bp, synthetic construct
  source 1..80: mol_type = other DNA
caaaaagaggaagtgagtgtattatccaacgtaaaagttgggtttaagaagatgttgggggctgtaccgaaaactccaaa

SEQ ID NO: 72478 - DNA, 80 bp, synthetic construct
  source 1..80: mol_type = other DNA
ccaatcataatagagaggaatataacggagatagtgtatttgaataacactatcatagagaaagagatttgtcctaaggc

SEQ ID NO: 72479 - DNA, 80 bp, synthetic construct
  source 1..80: mol_type = other DNA
attattcattaaagagggggaaatcgtgcatattgtcccaccattaggaagtgctcaggccacagaggaatgttcccgat

SEQ ID NO: 72480 - DNA, 80 bp, synthetic construct
  source 1..80: mol_type = other DNA
acccccgctatccaaatgtcagaggtgtttgcagggacaactggaagggatataataggcctgttatagatataaatatg

SEQ ID NO: 72481 - DNA, 80 bp, synthetic construct
  source 1..80: mol_type = other DNA
cctagcaacgactgtaacactgcatttcaagcaaaatggatgcagtatcccctcaaacaatcaagtagtgccatgtgaac

SEQ ID NO: 72482 - DNA, 80 bp, synthetic construct
  source 1..80: mol_type = other DNA
tactataatagaaaaagagctttgtcctaaagtattagaatacagggattggccgaaaccacagtgtcagattacaggat

SEQ ID NO: 72483 - DNA, 80 bp, synthetic construct
  source 1..80: mol_type = other DNA
tactatcgttgaaaaagaaacttgtcctaaagtgggagaatacagaaattggtcgaaaccacaatgccaaatcacagggt

SEQ ID NO: 72484 - DNA, 80 bp, synthetic construct
  source 1..80: mol_type = other DNA
gttggcgacacaccgaggaacgatgatagctctagcgatagcaattgcaaggaccctaataatgaaagaggaaacccagg

SEQ ID NO: 72485 - DNA, 80 bp, synthetic construct
  source 1..80: mol_type = other DNA
gatgataatgtatgctacaacccatgcttttatgtggaattaattagaggaaggcctgaagaagcaaaatatgtctggtg

SEQ ID NO: 72486 - DNA, 80 bp, synthetic construct
  source 1..80: mol_type = other DNA
agacattaaaatgggaacctctgactggaacggctaaacatatcgaagaatgctcaagttacggggagcgggcagggatt

SEQ ID NO: 72487 - DNA, 80 bp, synthetic construct
  source 1..80: mol_type = other DNA
gtggataggagtcttcctctcctcccaaatcagaaacggaaaatggcgagatcaattgagtcagaagtttgaagagataa

SEQ ID NO: 72488 - DNA, 80 bp, synthetic construct
  source 1..80: mol_type = other DNA
agataacatttatgcaagccttacaactggtgcttgaagtggagcaagagatgagagccttttcgtttcagcgtatttaa

SEQ ID NO: 72489 - DNA, 80 bp, synthetic construct
  source 1..80: mol_type = other DNA
ttacaaatcacatgtacactgattgggtcgggtgggtcaaatcaaatacatagcatttggggtagataagtttactaatc

SEQ ID NO: 72490 - DNA, 80 bp, synthetic construct
  source 1..80: mol_type = other DNA
tgttagtttgttaagtttagtgttaagttttaatgttaagtcattgtttggtgtaaattttattttggtgtaagatttat

SEQ ID NO: 72491 - DNA, 80 bp, synthetic construct
  source 1..80: mol_type = other DNA
tgtaaattttattttggtgtaagatttatttttatattgtgttgttcatttaaacatttattgggcccaataatgtgaac

SEQ ID NO: 72492 - DNA, 80 bp, synthetic construct
  source 1..80: mol_type = other DNA
gcgcaccggggatcctaggctttttggattgcgctttcctctagatcaactgagtgctgaactctgccaagcagagagat

SEQ ID NO: 72493 - DNA, 80 bp, synthetic construct
  source 1..80: mol_type = other DNA
tggtcagcttcctctttctggctggcaagtcttgtgggatgtatggtcttgatggacctgacatttacaaaggggtttat

SEQ ID NO: 72494 - DNA, 80 bp, synthetic construct
  source 1..80: mol_type = other DNA
agctcaagcccacttgaggtgggcccgccgctccaggcactggtctgggtgagttagctacaggtttctcggttgtgaga

SEQ ID NO: 72495 - DNA, 80 bp, synthetic construct
  source 1..80: mol_type = other DNA
tcaattgttgtgttctcccatgcccttcccacaattgacgtcctacaagctatgtaaggccatccctcacctgaaagaca

SEQ ID NO: 72496 - DNA, 80 bp, synthetic construct
  source 1..80: mol_type = other DNA
gtccttcacatcccagaccctcaccactccgtttgcactccgctgaggtctcctcatcccaaccatttgcaagatttgag

SEQ ID NO: 72497 - DNA, 80 bp, synthetic construct
  source 1..80: mol_type = other DNA
caattcaagtcagtagagtttgacatgtcccacttgaacctgactatgcccaatgcatgctcagccaacaactctcacca

SEQ ID NO: 72498 - DNA, 80 bp, synthetic construct
  source 1..80: mol_type = other DNA
ggcaaaaccacttggtgcagtcagacaagctaccagtacctgatcatacaaaatagaacctgggaaaaccactgcacgta

SEQ ID NO: 72499 - DNA, 80 bp, synthetic construct
  source 1..80: mol_type = other DNA
gcgcaccggggatcctaggcattttgttgcgctttttggctgcacagcccctccctgcaagaccatcagaaacgggttga

SEQ ID NO: 72500 - DNA, 80 bp, synthetic construct
  source 1..80: mol_type = other DNA
ccaattcaagagaatcgccgagaatcaaggggtcttccatacaatcttcaaactcctcggacctgatatcaaaaacacca

SEQ ID NO: 72501 - DNA, 80 bp, synthetic construct
  source 1..80: mol_type = other DNA
aactgacatttcactagaaagatcaatgaaaatctcctcaagcactcagtgttgttctggttgtgtgtgaagtccactgt

SEQ ID NO: 72502 - DNA, 80 bp, synthetic construct
  source 1..80: mol_type = other DNA
aaattctctttgtgttaaagagcatatagtcccataagtccttcaaagatttgaacaccttctgatttgtcaagccttgt

SEQ ID NO: 72503 - DNA, 80 bp, synthetic construct
  source 1..80: mol_type = other DNA
ttaattagcaaagcggcattgcacacaacatctcctattcggtaagagaaccacccaaaaccaaactgtaggtcactcct

SEQ ID NO: 72504 - DNA, 80 bp, synthetic construct
  source 1..80: mol_type = other DNA
ccacctatcttggccccctaaactgcaaatcatgttggcaaagattcgacagtttagtcaggtgccatgatcactatctc

SEQ ID NO: 72505 - DNA, 80 bp, synthetic construct
  source 1..80: mol_type = other DNA
aaagtctgaattcttgttacctctcccctctataggctccgctagaacccaaacacccaattcaaaggaattgctcagtg

SEQ ID NO: 72506 - DNA, 80 bp, synthetic construct
  source 1..80: mol_type = other DNA
tattcatccttgactaaatcttcaagcactttcttgatgtataggttttccctgtttttatttcttacgcatctgcttcc

SEQ ID NO: 72507 - DNA, 80 bp, synthetic construct
  source 1..80: mol_type = other DNA
tttgtttcactgggacacagtccctcaatgagtctttggattcggtaacctctagagccatccaaccagtccttcacgtc

SEQ ID NO: 72508 - DNA, 80 bp, synthetic construct
  source 1..80: mol_type = other DNA
aagatatcgacagccccgagttcaccacctccctacgaggagtgacactaccaaaccccgatctccacaaacaacccagc

SEQ ID NO: 72509 - DNA, 80 bp, synthetic construct
  source 1..80: mol_type = other DNA
acaagaagagcacagacacaccagcacagacaagcacaacacccaacacaaaccacacccacacacacatgaacacacac

SEQ ID NO: 72510 - DNA, 80 bp, synthetic construct
  source 1..80: mol_type = other DNA
ttctgagttcttccccaccttctctctcattaattttcttactcctcctataatgtgttattgtagaggtgaccttatct

SEQ ID NO: 72511 - DNA, 80 bp, synthetic construct
  source 1..80: mol_type = other DNA
tccagatttttgaaaaaacttgtttcttcttccccttcaaagcatacatctgctgggtcatcattcacttccccttcttc

SEQ ID NO: 72512 - DNA, 80 bp, synthetic construct
  source 1..80: mol_type = other DNA
tgcctttttggagccgatgaccaatctagagactaactttgagaccttatactcataatctgagtgacttaacttatact

SEQ ID NO: 72513 - DNA, 80 bp, synthetic construct
  source 1..80: mol_type = other DNA
ccacacacacacgccccccacaccgggtggcacccccccggtggacggtccccccggaggcccggccgggctccgcggag

SEQ ID NO: 72514 - DNA, 80 bp, synthetic construct
  source 1..80: mol_type = other DNA
gagttccagccctcataaagctctcaaattcagcgaactgaatatcgcattcacactctaggtgtttggagagtccatag

SEQ ID NO: 72515 - DNA, 80 bp, synthetic construct
  source 1..80: mol_type = other DNA
attcctcaagaggtacctttctgtgcacctttgatttttttctgttcctcaaaagtctaatgaattcttcctttgtactg

SEQ ID NO: 72516 - DNA, 80 bp, synthetic construct
  source 1..80: mol_type = other DNA
aatgcttatcgtttcccaaccctttgagctttgattgtttgattagtgaagaaagacacaagacatctaagttcaacaac

SEQ ID NO: 72517 - DNA, 80 bp, synthetic construct
  source 1..80: mol_type = other DNA
ccgtgctaatttcgcttccctttttttgcccatgagcctctgctgttataaatctcatcaaaggacaagactcaactgcc

SEQ ID NO: 72518 - DNA, 80 bp, synthetic construct
  source 1..80: mol_type = other DNA
taaagcttggaaaattccccaatcaaaccctcagggttgattctctggaagtttcttttaagtttcccactcatcaagtc

SEQ ID NO: 72519 - DNA, 80 bp, synthetic construct
  source 1..80: mol_type = other DNA
gcctccagccatgggccaaggcaaatccaaggagaaaggaagcatcaatgaagcaaacagagctgaaattctaccagaca

SEQ ID NO: 72520 - DNA, 80 bp, synthetic construct
  source 1..80: mol_type = other DNA
gggtgaaaagcctgttgacccgactgggcttgagccggatgatcatctcaaggagagatcgagccttcgatatggaaatg

SEQ ID NO: 72521 - DNA, 80 bp, synthetic construct
  source 1..80: mol_type = other DNA
aataataaactagaacgtgatttgcaaaataaaattggatcccttacttcttcgattgaagcaacctcagctcttgagaa

SEQ ID NO: 72522 - DNA, 80 bp, synthetic construct
  source 1..80: mol_type = other DNA
agggattgggaataacacctgggagattccgcacggcagtatgtgggttatatcctgcacagataaaggcaaggaacatg

SEQ ID NO: 72523 - DNA, 80 bp, synthetic construct
  source 1..80: mol_type = other DNA
tcaccatcgtcaatatgggtgtttgctggggcccctgataggtgtccaccaacatgcttgtttgtcggtggatggcatat

SEQ ID NO: 72524 - DNA, 80 bp, synthetic construct
  source 1..80: mol_type = other DNA
gttgggtttacccttacctgccaggtctctttaactgaatgttcacgctttttgacttccatcaaggcatgtgatatggc

SEQ ID NO: 72525 - DNA, 80 bp, synthetic construct
  source 1..80: mol_type = other DNA
gtcactcttacctgccagatctccttaactgaatgttcacgcttcttgacatccattaaagcatgtgatatggccatttg

SEQ ID NO: 72526 - DNA, 80 bp, synthetic construct
  source 1..80: mol_type = other DNA
tctcagcaaggccttcaggctagtgctccacatctagacaaggttaacggtattgttgaacaggagagcacacaagtata

SEQ ID NO: 72527 - DNA, 80 bp, synthetic construct
  source 1..80: mol_type = other DNA
actcttacctgccaaatctccttgactgagtgttcacgctttttgacatccattaaggcatgtgatatggccatctgcta

SEQ ID NO: 72528 - DNA, 80 bp, synthetic construct
  source 1..80: mol_type = other DNA
tctcagcaagggcttcaagcaagtgctccacatctagacaaggtcaacgggattgctgaacaagagagcacgcaagtgta

SEQ ID NO: 72529 - DNA, 80 bp, synthetic construct
  source 1..80: mol_type = other DNA
aatcttgtctgtactgttagcttaacagagtgttcggcattcttaacttccattaaagcttgtgattctgctatgtgtta

SEQ ID NO: 72530 - DNA, 80 bp, synthetic construct
  source 1..80: mol_type = other DNA
tcaagcacaggcttagttgcagctgcaccacatctagaccgtgttacaggctataatcaggcagatagtgataagatatt

SEQ ID NO: 72531 - DNA, 80 bp, synthetic construct
  source 1..80: mol_type = other DNA
aaaagaggcccaggctgtgagaaaacatgctatagatgctggctgcaatattattgaccacattgatacaccatcatcaa

SEQ ID NO: 72532 - DNA, 80 bp, synthetic construct
  source 1..80: mol_type = other DNA
gaaggaagctcaggccgtaaggaaacatgctatagatgctggttgtaatattattgaccacattgattcaccatcatcat

SEQ ID NO: 72533 - DNA, 80 bp, synthetic construct
  source 1..80: mol_type = other DNA
tcgctcttcagggagcaaaagcaggagtgaaaatgaatccaaatcagaagataataacaattggctccgtctctctaacc

SEQ ID NO: 72534 - DNA, 80 bp, synthetic construct
  source 1..80: mol_type = other DNA
aggggaaacccaggagtgaaaggatgggcctttgacagtggagatgatgtttggatgggtagaacaatcagtagggattc

SEQ ID NO: 72535 - DNA, 80 bp, synthetic construct
  source 1..80: mol_type = other DNA
ggttggaccactgccaattccaaatcacagaccaacagacaagtcatagttgataataacaattggtctggttattctgg

SEQ ID NO: 72536 - DNA, 80 bp, synthetic construct
  source 1..80: mol_type = other DNA
cctagcaatgactgtaacactgcatttcaggcaaaatgaatgcagcatttcagcgaacagtcaggtagtgccatgtgaac

SEQ ID NO: 72537 - DNA, 80 bp, synthetic construct
  source 1..80: mol_type = other DNA
atggggcgaacatcaatttcatgcctatataagctttcgcaattttagaaaaaaactccttgtttctactaatagaagag

SEQ ID NO: 72538 - DNA, 80 bp, synthetic construct
  source 1..80: mol_type = other DNA
caactacagagaaagaggtctgttcgaaagtagtagactatagaagctggtcaaagccgcagtgtcaaattacaggattt

SEQ ID NO: 72539 - DNA, 80 bp, synthetic construct
  source 1..80: mol_type = other DNA
gagacatttggataacaagagagccttatgtgtcgtgtgacaccagcaaatgttatcaatttgcacttggacaggggacc

SEQ ID NO: 72540 - DNA, 80 bp, synthetic construct
  source 1..80: mol_type = other DNA
tgtgtctgcagggacaactggaagggctctaataggcctgttatagacataaacatgacagattatagcatcgactccag

SEQ ID NO: 72541 - DNA, 80 bp, synthetic construct
  source 1..80: mol_type = other DNA
atggtgtttggataggaagaactaaaagtatcagttctagaagtggatttgagatgatttgggatccaaatggatggacg

SEQ ID NO: 72542 - DNA, 80 bp, synthetic construct
  source 1..80: mol_type = other DNA
taaaccattcaattcagactggaaaaagaaaccaccctgaaacatgcagccaaaatgtcattacatatgaaaacaacaca

SEQ ID NO: 72543 - DNA, 80 bp, synthetic construct
  source 1..80: mol_type = other DNA
atggccagacggagctgatttgccattcaccattgacaagtagtttatcaaaaaaactccttgtttctacttatagtgaa

SEQ ID NO: 72544 - DNA, 80 bp, synthetic construct
  source 1..80: mol_type = other DNA
tgggtgaaccaaacttatgtaaacatcagcaataccaacattgttgatggacagggcgtaacttcaataatactagccgg

SEQ ID NO: 72545 - DNA, 80 bp, synthetic construct
  source 1..80: mol_type = other DNA
aagattattaagtcagttgagctggatgcacctaactaccactatgaggaatgctcctgttaccctgatacaggcaaggt

SEQ ID NO: 72546 - DNA, 80 bp, synthetic construct
  source 1..80: mol_type = other DNA
acccgcgttctaatgatgggaaaggcaattgtggcccagtaccttctaatggagcaaatggagtgaaaggattctcattt

SEQ ID NO: 72547 - DNA, 80 bp, synthetic construct
  source 1..80: mol_type = other DNA
gcctgcatggaatggaggacccggagaacgaagtgttaatatggaagtttgacagcagcttagcacgtcaccacaaggcc

SEQ ID NO: 72548 - DNA, 80 bp, synthetic construct
  source 1..80: mol_type = other DNA
gggttaatgctcgtgtgtactgtcagtttgacagaatgttcagcattccttacttcaattaaagcatgtgatgctgcaat

SEQ ID NO: 72549 - DNA, 80 bp, synthetic construct
  source 1..80: mol_type = other DNA
acttacacctggacggttccgtacaatagtatgtggcttattccctacacagatacaagtgcgtaacatcatgagtccag

SEQ ID NO: 72550 - DNA, 80 bp, synthetic construct
  source 1..80: mol_type = other DNA
tccgcgggggagactttcaactagaggagtacaaattgcttcaaatgagaacatggataatatgggatcgagtactcttg

SEQ ID NO: 72551 - DNA, 80 bp, synthetic construct
  source 1..80: mol_type = other DNA
cggggaaagatcctaagaaaactggagggcccatatacaggagagtagatggaaaatggattagggaactcgtcctttat

SEQ ID NO: 72552 - DNA, 80 bp, synthetic construct
  source 1..80: mol_type = other DNA
tggtttgctttcgatgtcatctgcatcgaacggtgaatcacgacaactgaaatttggtcgaaaaaccgtgttttctacaa

SEQ ID NO: 72553 - DNA, 80 bp, synthetic construct
  source 1..80: mol_type = other DNA
ctcaacatgcggttgtcgaaaagatgttaacttatgcaaagcacactagggaatatgctgaattttactcgcagtctaat

SEQ ID NO: 72554 - DNA, 80 bp, synthetic construct
  source 1..80: mol_type = other DNA
cagcttctttcgtacggggacgttaccagatttttatcaaataatgctatggtattatacactgacgtgtctcaatggga

SEQ ID NO: 72555 - DNA, 80 bp, synthetic construct
  source 1..80: mol_type = other DNA
tcacaagttagtttacattatgatgtgattaataataaagggaaaatacttaccgcattatcaacttcatcattaaaacg

SEQ ID NO: 72556 - DNA, 80 bp, synthetic construct
  source 1..80: mol_type = other DNA
agcaaattcagtgtgggttccagtttcttcaaataaaattaaagggtggtgcattgaatgttgtcaactcactgaattga

SEQ ID NO: 72557 - DNA, 80 bp, synthetic construct
  source 1..80: mol_type = other DNA
ttttgaaacgcatgacttaaatctgggaagagtaaaagctgatatttttgagcttggacatcactgtaagccaaattata

SEQ ID NO: 72558 - DNA, 80 bp, synthetic construct
  source 1..80: mol_type = other DNA
tgattggaaagaatggaggaaaatagtcgaattacagactattagtaatcttaatcttgcatatcaatacttagctactg

SEQ ID NO: 72559 - DNA, 80 bp, synthetic construct
  source 1..80: mol_type = other DNA
acgacagaaatacgatcagagttttatttactgttagatatttgggatgtcaacaacaccaaaagatttgtcccgaaagg

SEQ ID NO: 72560 - DNA, 80 bp, synthetic construct
  source 1..80: mol_type = other DNA
agaattatattaataaagtatatagtataacgtatgcagatgatccaaactattttataggtattaaattcgacaacatt

SEQ ID NO: 72561 - DNA, 80 bp, synthetic construct
  source 1..80: mol_type = other DNA
tgaaaataatgaaggatatgaaacgagaactgtttgaaatggatgttacaacaagctatacttatatgctatctgatgga

SEQ ID NO: 72562 - DNA, 80 bp, synthetic construct
  source 1..80: mol_type = other DNA
ttattcttcgaaaaagatatagataaattgaaagacagctctatattatatattgacattaggactgatcggggtagcgt

SEQ ID NO: 72563 - DNA, 80 bp, synthetic construct
  source 1..80: mol_type = other DNA
ttagccatggcaacctttaaagatgcttgctttcattatagaaagatcacaaaactaaacagggaattactgagaattgg

SEQ ID NO: 72564 - DNA, 80 bp, synthetic construct
  source 1..80: mol_type = other DNA
tattgagaaattgttcaatgtaatgaatccagtaaaagtagacggccaacaaatgatcagttttcattggcaaatagatt

SEQ ID NO: 72565 - DNA, 80 bp, synthetic construct
  source 1..80: mol_type = other DNA
ttgcgttatatattcacattaaaatgatacttaaaactgaaactctcccatttgctttcacattaaatcaattcagatct

SEQ ID NO: 72566 - DNA, 80 bp, synthetic construct
  source 1..80: mol_type = other DNA
aattaaagggatcgtgaatcaatggtacgatgttactgaattagactacttgccactctgtacagaacagactgataaat

SEQ ID NO: 72567 - DNA, 80 bp, synthetic construct
  source 1..80: mol_type = other DNA
tggtcaaacttgaagaagaaggtaagatatctgacgagtatgagctcctaatctcagattctgaagacggcgattaatga

SEQ ID NO: 72568 - DNA, 80 bp, synthetic construct
  source 1..80: mol_type = other DNA
ttctgaagacggcgattaatgattaaataaaacactaacgcagtttttgccatcacaagaccttctggactagagtagcg

SEQ ID NO: 72569 - DNA, 80 bp, synthetic construct
  source 1..80: mol_type = other DNA
ttacaatgtattatagatttgtataatctgctttttccaattaatcctggtatcattaataggtttaagaagatagttaa

SEQ ID NO: 72570 - DNA, 80 bp, synthetic construct
  source 1..80: mol_type = other DNA
ccaaaggaagtgtagaaatgaatttgagcgatcatggtataatcaattattatttccaattactttaaatgctgcagtat

SEQ ID NO: 72571 - DNA, 80 bp, synthetic construct
  source 1..80: mol_type = other DNA
tcaaatttcattcgagagaagtttatgtctttggtctctatgaaggatcatcatcgtgtattaatttaccatataggatt

SEQ ID NO: 72572 - DNA, 80 bp, synthetic construct
  source 1..80: mol_type = other DNA
gtaaattgtattgatctgtatgatagattattattggatcaagtaaattttgaaagaatgagttctcttccagctaattt

SEQ ID NO: 72573 - DNA, 80 bp, synthetic construct
  source 1..80: mol_type = other DNA
ataaattgacgactagagaaatagaacaagtagaacttctaaagagaattcatgatatgctaataacgacgtcaattgac

SEQ ID NO: 72574 - DNA, 80 bp, synthetic construct
  source 1..80: mol_type = other DNA
gactggagtggtgcgagagaaatgcaggaaccattaaatcttgggatgaaagctacacggagctgaaagttgaagtccct

SEQ ID NO: 72575 - DNA, 80 bp, synthetic construct
  source 1..80: mol_type = other DNA
caacatggaatggatgatgcagacaaggaagtgctgaagtgggtgtttgacagccacctagcatttcgtcacatggcccg

SEQ ID NO: 72576 - DNA, 80 bp, synthetic construct
  source 1..80: mol_type = other DNA
taattctattaatcatgaggaccattattgttttaagttgttttttctgtctgacaacaagccaagatctcttgggagac

SEQ ID NO: 72577 - DNA, 80 bp, synthetic construct
  source 1..80: mol_type = other DNA
aacaacaacactgcaacactatgcttgggtcatcatgcggtaccgaatggaacaatagtgaagacaataacggatgatca

SEQ ID NO: 72578 - DNA, 80 bp, synthetic construct
  source 1..80: mol_type = other DNA
tcaaaaatggaaagaatagtgcttcttcttgcaatagtcagtcttgtcaaaagtgaccagatttgcattggttaccatgc

SEQ ID NO: 72579 - DNA, 80 bp, synthetic construct
  source 1..80: mol_type = other DNA
tccatatgatgggaagtcctcttttttcaggaatgtggtatggcttatcaaaaagggtaatgcatacccaacaataaaga

SEQ ID NO: 72580 - DNA, 80 bp, synthetic construct
  source 1..80: mol_type = other DNA
tactatcaaaatggaaagaatagtgattgcccttgcaataatcagcgttgtcaaaggtgaccaaatctgcatcggttatc

SEQ ID NO: 72581 - DNA, 80 bp, synthetic construct
  source 1..80: mol_type = other DNA
atgcatacaagatagttaagaagggaaattcagcaatcatgagaagcgaattggagtatggcaactgtgataccaaatgt

SEQ ID NO: 72582 - DNA, 80 bp, synthetic construct
  source 1..80: mol_type = other DNA
gcacagctggaatcgagtctgctgttctaagaggtttcctcattttgggcaaagaagacaagagatatggcccagcattg

SEQ ID NO: 72583 - DNA, 80 bp, synthetic construct
  source 1..80: mol_type = other DNA
agcaaaagcaggggtcacaatgtacaaaacagcactggtacttgcgctccttggagctgtgcatggtcttgataaaatat

SEQ ID NO: 72584 - DNA, 80 bp, synthetic construct
  source 1..80: mol_type = other DNA
aagtactcaaaaaactatagatcaagtaactgggaaattgaacaggctaatagagaagacaaatacggaattcgaatcca

SEQ ID NO: 72585 - DNA, 80 bp, synthetic construct
  source 1..80: mol_type = other DNA
tagaatctgaattcaatgaaatagaatatcagatcggtaatgtgataaattggactaaggattccataacagacatctgg

SEQ ID NO: 72586 - DNA, 80 bp, synthetic construct
  source 1..80: mol_type = other DNA
acatatcaagctgaattgctggtagcaatggaaaatcagcacacaattgacatggctgattcagagatgctaaatctata

SEQ ID NO: 72587 - DNA, 80 bp, synthetic construct
  source 1..80: mol_type = other DNA
tgagagggtgaggaaacaactaaggcaaaatgcagaagaagatgggaaagggtgctttgaaatatatcacaaatgcgacg

SEQ ID NO: 72588 - DNA, 80 bp, synthetic construct
  source 1..80: mol_type = other DNA
ataattgcatggaaagcatcagaaacaacacctatgaccatacacagtatagagaagaggcactcctgaacagactcaac

SEQ ID NO: 72589 - DNA, 80 bp, synthetic construct
  source 1..80: mol_type = other DNA
attaatccggtaaaactctcttctgggtacaaagatgttatattgtggtttagcttcggggcgtcatgctttgtgctttt

SEQ ID NO: 72590 - DNA, 80 bp, synthetic construct
  source 1..80: mol_type = other DNA
gaaacagtggaaagcaaaagcctagacaaactatgcatgaaaggtcggaattacaaagacctaggcaattgccacccaat

SEQ ID NO: 72591 - DNA, 80 bp, synthetic construct
  source 1..80: mol_type = other DNA
ggctgctatcatggggctttttttcttctgtctgaaaaatggaaacatgcgatgcacaatctgtatttagttaaaaacac

SEQ ID NO: 72592 - DNA, 80 bp, synthetic construct
  source 1..80: mol_type = other DNA
tctgtctgaaaaatggaaacatgcgatgcacaatctgtatttagttaaaaacacccttgtttctactctcgaggatccaa

SEQ ID NO: 72593 - DNA, 80 bp, synthetic construct
  source 1..80: mol_type = other DNA
aggaatggtaataggggctccatcctgtgacctgcacctaactggaacatgggacactctaatagaaaggggtagttcta

SEQ ID NO: 72594 - DNA, 80 bp, synthetic construct
  source 1..80: mol_type = other DNA
ttgcctactgttatccgggcgctactgtgaatgaggaagcattaaggcagaaaattatggaaagtggagggattgataaa

SEQ ID NO: 72595 - DNA, 80 bp, synthetic construct
  source 1..80: mol_type = other DNA
ataagcaccgggttcacatatggatcatccatcaattcagctggaactactgaatcatgcatgagaaacggaggaaatag

SEQ ID NO: 72596 - DNA, 80 bp, synthetic construct
  source 1..80: mol_type = other DNA
cttctatgcagaactgaagtggttggtatcaaagactaaaggacaaaatttcccacaaacaacaaacacgtacagaaata

SEQ ID NO: 72597 - DNA, 80 bp, synthetic construct
  source 1..80: mol_type = other DNA
cagactcggcagaacatctcatagtctggggaattcatcacccttcaagtgcacaagagaagaatgatctgtatgggact

SEQ ID NO: 72598 - DNA, 80 bp, synthetic construct
  source 1..80: mol_type = other DNA
caatcgctttccatttcagtgggaagttccacttatcagaacaattttgtgcctgtagtgggagcaagaccacaggtgaa

SEQ ID NO: 72599 - DNA, 80 bp, synthetic construct
  source 1..80: mol_type = other DNA
tggtcaaagtggacggatagatttccattggacattggtacagccaggtgataacataactttttcacacaatggtggac

SEQ ID NO: 72600 - DNA, 80 bp, synthetic construct
  source 1..80: mol_type = other DNA
gccttgggcatcatgcagttcccaatggcaccatcgtaaagactctcacaaacgaaaaggaagaggtgaccaatgctact

SEQ ID NO: 72601 - DNA, 80 bp, synthetic construct
  source 1..80: mol_type = other DNA
taatagcacctagtagagtaagcaaattaagaggacgaggcctaggcatccaatcagaagccttagtggacaacaactgt

SEQ ID NO: 72602 - DNA, 80 bp, synthetic construct
  source 1..80: mol_type = other DNA
gaatcaaaatgtttttggaaaggtggatccattaatactaagcttcctttccaaaatctttcaccgaggactgtgggtca

SEQ ID NO: 72603 - DNA, 80 bp, synthetic construct
  source 1..80: mol_type = other DNA
atgtcccaaatatgtaagcaaaaggagcctgttgcttgcaacaggaatgagaaatgttccggagattgttcaaggaagag

SEQ ID NO: 72604 - DNA, 80 bp, synthetic construct
  source 1..80: mol_type = other DNA
gacacaattaggagatcagatgcagaaagaaagtgcattgttttatacatttgatataacaccactaaaagtttttaatg

SEQ ID NO: 72605 - DNA, 80 bp, synthetic construct
  source 1..80: mol_type = other DNA
attcaatgtcacaggaaatagaggagataaggtacggagagaaaatgcaaatttttataaccttgatatagtatcaatgg

SEQ ID NO: 72606 - DNA, 80 bp, synthetic construct
  source 1..80: mol_type = other DNA
agactaagcctaatatgacaagagaactaaatgaaactatagaagaaataagaaactgctctttcgatatcgccccaata

SEQ ID NO: 72607 - DNA, 80 bp, synthetic construct
  source 1..80: mol_type = other DNA
gatggtttaagaataaaacagggagaaataaagaactgcactttcaacatcaccacaagcacaaatgagaaggtgaaagg

SEQ ID NO: 72608 - DNA, 80 bp, synthetic construct
  source 1..80: mol_type = other DNA
aaagagggagagaaaggagaaataaaaaactgctctttctatatcgacacaggtataaaaggtagggtgcaagaatattc

SEQ ID NO: 72609 - DNA, 80 bp, synthetic construct
  source 1..80: mol_type = other DNA
atgatgtgaccatttctgatttcactgttctactcggctatctattaaaatcaatgacccgaaaaatggactcctttata

SEQ ID NO: 72610 - DNA, 80 bp, synthetic construct
  source 1..80: mol_type = other DNA
tctattttaaaaagaattcaaatattgttgatttctcccctgacccacaattatattgtgattataacttacattaaaat

SEQ ID NO: 72611 - DNA, 80 bp, synthetic construct
  source 1..80: mol_type = other DNA
ggagtactggtcgacctccgaagttgggggggagcaaaagcagggtagataatcactcaccgagtgacatcaacatcatg

SEQ ID NO: 72612 - DNA, 80 bp, synthetic construct
  source 1..80: mol_type = other DNA
gcagttaccggagtactggtcgacctccgaagttgggggggagcaaaagcaggtagatgttgaaagatgagtcttctaac

SEQ ID NO: 72613 - DNA, 80 bp, synthetic construct
  source 1..80: mol_type = other DNA
tggtcattttgtcaacatagaattggagtaaaaactaccttgtttctactaataacccggcggcccaaaatgccgactcg

SEQ ID NO: 72614 - DNA, 80 bp, synthetic construct
  source 1..80: mol_type = other DNA
tctatgagggaagagtatcggcaggaacagcagaatgctgtggatgttgacgatggtcattttgtcaacatagaattgga

SEQ ID NO: 72615 - DNA, 80 bp, synthetic construct
  source 1..80: mol_type = other DNA
ggagtactggtcgacctccgaagttggggggagcgaaagcaggcaaaccattgaatggatgtcaatccgaccttactttt

SEQ ID NO: 72616 - DNA, 80 bp, synthetic construct
  source 1..80: mol_type = other DNA
gctagcagttaaccggagtactggtcgacctccgaagttggggggagcaaaagcagggtgacaaaaacataatggattcc

SEQ ID NO: 72617 - DNA, 80 bp, synthetic construct
  source 1..80: mol_type = other DNA
agggccttctacggaaggagtacctgagtctatgagggaagagtatcggcaggaacagcagaattctgtggatgtagacg

SEQ ID NO: 72618 - DNA, 80 bp, synthetic construct
  source 1..80: mol_type = other DNA
tatattaatatgaccctagaacatcaaaataagaagcagaaggctcatgcactttatcataagcttgttatagtacaagt

SEQ ID NO: 72619 - DNA, 80 bp, synthetic construct
  source 1..80: mol_type = other DNA
aacacaatcaagataattaaaattatgcagctgggagcaggagcagcacatgctgctcctgccaccagcagaagtattag

SEQ ID NO: 72620 - DNA, 80 bp, synthetic construct
  source 1..80: mol_type = other DNA
tcacaaccactcaagatggaagcaaaagcaataattgctgcactgctaatggtaacagcagccaatgctgataaaatctg

SEQ ID NO: 72621 - DNA, 80 bp, synthetic construct
  source 1..80: mol_type = other DNA
agcttaggtcacttttcagttctgcaaaaccttacaaaagaatccaaatctttccagataaaacttggaatgtaacatac

SEQ ID NO: 72622 - DNA, 80 bp, synthetic construct
  source 1..80: mol_type = other DNA
acaagcaatatgaaattattgatcatgaattcagcgagattaataataagattgatgaccaaatacaagacatatgggca

SEQ ID NO: 72623 - DNA, 80 bp, synthetic construct
  source 1..80: mol_type = other DNA
gggtttgctgccttcttgttctgggccatgtccaatggatcttgcagatgcaacatttgtatataattggcaaaaacacc

SEQ ID NO: 72624 - DNA, 80 bp, synthetic construct
  source 1..80: mol_type = other DNA
tgctatgtgcaacaaatctgggacgtcctcttattctagacacctgtaccattgaaggactaatctatggcaacccttct

SEQ ID NO: 72625 - DNA, 80 bp, synthetic construct
  source 1..80: mol_type = other DNA
ggcctcttgtcaatggtctgcaaggaaggattgattattattgggcggtattgaaaccaggtcagacattgcgagtaaga

SEQ ID NO: 72626 - DNA, 80 bp, synthetic construct
  source 1..80: mol_type = other DNA
aactgtgtagtgcaatgtcagactgaaagaggtggcttaaacactacattgcccttccaaaatgtcagtaaatatacatt

SEQ ID NO: 72627 - DNA, 80 bp, synthetic construct
  source 1..80: mol_type = other DNA
cgataaaatgaacaagcaatatgaggtcattgatcatgaattcaatgagcttgagggcaggctgaacatgatcaacaaca

SEQ ID NO: 72628 - DNA, 80 bp, synthetic construct
  source 1..80: mol_type = other DNA
cccttcggtggtgtgattctggtacctagagttccttcagaccttattgttcagttgggaaattctttgccggtggcgcc

SEQ ID NO: 72629 - DNA, 80 bp, synthetic construct
  source 1..80: mol_type = other DNA
ggaccagggccttgaaaaggaaataagaaccggaggacctctctggccccaggactgggcttctggaagcgcccccgcca

SEQ ID NO: 72630 - DNA, 80 bp, synthetic construct
  source 1..80: mol_type = other DNA
agaggtaagaaactgctctttcaatataacaagaggcatgggaggaaaggtgcggaaggactatgccatttttaataaac

SEQ ID NO: 72631 - DNA, 80 bp, synthetic construct
  source 1..80: mol_type = other DNA
gaaaaactgcacttttaatatcaccacaggcataggaggtaagatgaaaaaagaatatgcacttttttatacaggtgata

SEQ ID NO: 72632 - DNA, 80 bp, synthetic construct
  source 1..80: mol_type = other DNA
ttacgttgaagcaaaccttacaactattgcttgaagtggagcaagagataagaactttctcgtttcagcttatttaataa

SEQ ID NO: 72633 - DNA, 80 bp, synthetic construct
  source 1..80: mol_type = other DNA
aaacaatacgcaacgcttcgtttataatggcagactaaaaagacccatatcaaatgttttaatgaaaatagaagctggtg

SEQ ID NO: 72634 - DNA, 80 bp, synthetic construct
  source 1..80: mol_type = other DNA
ttctatgcggcctacataccatgtagcatgaatcacgactgggtttagtccatgcttgcataggggcaaatatgcatgat

SEQ ID NO: 72635 - DNA, 80 bp, synthetic construct
  source 1..80: mol_type = other DNA
aaagcagtgagtattgttaagtgatttatgtaatgtcagaattaaacttgttagcattaggcatagcagcattaatagta

SEQ ID NO: 72636 - DNA, 80 bp, synthetic construct
  source 1..80: mol_type = other DNA
agactgagactgctgacacggagattgctgacttgctgacacagaagaatctaaagggactttccgctgggactttccag

SEQ ID NO: 72637 - DNA, 80 bp, synthetic construct
  source 1..80: mol_type = other DNA
agagagacatccggagttctaccaagactgagactgctgccacgagaactgctgacacagagattgctgacacagaagaa

SEQ ID NO: 72638 - DNA, 80 bp, synthetic construct
  source 1..80: mol_type = other DNA
agaatctaaagggactttccgctggggctttccagagggcgggtcacagggcgtgactggggagtggctcaccttcatct

SEQ ID NO: 72639 - DNA, 80 bp, synthetic construct
  source 1..80: mol_type = other DNA
tctggttcaagccataagaggtctttgcctaggttctacatagattgtgacctggacacctttgattttgaaaaggactg

SEQ ID NO: 72640 - DNA, 80 bp, synthetic construct
  source 1..80: mol_type = other DNA
gttctcatgaagtagtcataagacttggcagcactcattgatagtataccctttgccttagccttcttgtcatctttcct

SEQ ID NO: 72641 - DNA, 80 bp, synthetic construct
  source 1..80: mol_type = other DNA
gcactgagacacatagccagagagagatttccggagttctaccaagatgactgaggccgctgacacagagattgctgaca

SEQ ID NO: 72642 - DNA, 80 bp, synthetic construct
  source 1..80: mol_type = other DNA
gtgacaaagacgtaatggatgtccaacactggggcaaggttccaggtagattggtgtgtgtggcatatccggaaacaggg

SEQ ID NO: 72643 - DNA, 80 bp, synthetic construct
  source 1..80: mol_type = other DNA
gtatttttgtgtaggcatcgaagcagccatgctagttggggagcgggttggtgaaaagattttggaagaagaatttgatg

SEQ ID NO: 72644 - DNA, 80 bp, synthetic construct
  source 1..80: mol_type = other DNA
caaagacataatagattccaaacacggtggcaagtttccaggtagattgcttttctttggcatatccggaaacaaggtgg

SEQ ID NO: 72645 - DNA, 80 bp, synthetic construct
  source 1..80: mol_type = other DNA
gaggaatattttggtttaactttaaaggaagcacccgggtgggagcaaatttttgaaaagtttttgaaaggtggattgga

SEQ ID NO: 72646 - DNA, 80 bp, synthetic construct
  source 1..80: mol_type = other DNA
tggggcattaaaaataccagggtttccacacgtgggttcggatacataactgacatgatattgaggaatggtcaagaaaa

SEQ ID NO: 72647 - DNA, 80 bp, synthetic construct
  source 1..80: mol_type = other DNA
ttttttttttttgtggcggaggagacctacccataaccagcaaggcccctacgaaaaagaaaggttgttgatgtggaagg

SEQ ID NO: 72648 - DNA, 80 bp, synthetic construct
  source 1..80: mol_type = other DNA
gaagaagaacaacagaaaaatgatggtggtaggcagcggcatttttttttgagaatgatgctttctccctacgacaggcg

SEQ ID NO: 72649 - DNA, 80 bp, synthetic construct
  source 1..80: mol_type = other DNA
aatagtagtagtgaaatgaaaaactgctctttcgatgtctacccaatcataaaagataagtatcagagagaatatgcact

SEQ ID NO: 72650 - DNA, 80 bp, synthetic construct
  source 1..80: mol_type = other DNA
cacagacccaaataacacaattaactccagcataaaccaaattataaacatgatgcaccaaggagaaaaagcaggaaaag

SEQ ID NO: 72651 - DNA, 80 bp, synthetic construct
  source 1..80: mol_type = other DNA
aagcaggaaaagcacctcctccccgtggcctcagaagatgatcatgatgttttaccaggatgctctggtcaatagaaggg

SEQ ID NO: 72652 - DNA, 80 bp, synthetic construct
  source 1..80: mol_type = other DNA
cacctcctccccgtggcctcagaagatgatcatgatgttttaccaggatgctctggtcaatagaagggggtgaggggggg

SEQ ID NO: 72653 - DNA, 80 bp, synthetic construct
  source 1..80: mol_type = other DNA
gctaaagcacaagataagccagcagcagatgaagtaagaccagcatctcaagacctagaaaaatatagagcaatcacaag

SEQ ID NO: 72654 - DNA, 80 bp, synthetic construct
  source 1..80: mol_type = other DNA
tgtcctaatattactaataccactgatatgaaaaaaggagaaattaaagaatgctctttcaacgtcatcacaggcataag

SEQ ID NO: 72655 - DNA, 80 bp, synthetic construct
  source 1..80: mol_type = other DNA
ccctcatattaataataccagtactagtagcaagggaaggatgatgcagaacgaagaagtgatccactgctctttcaacg

SEQ ID NO: 72656 - DNA, 80 bp, synthetic construct
  source 1..80: mol_type = other DNA
tcaccaccagcataaaaaacaagatgcagaaaaattatgaacttttttatgacgttgatgtaacacaaatagataatacc

SEQ ID NO: 72657 - DNA, 80 bp, synthetic construct
  source 1..80: mol_type = other DNA
taattgtaacaagaattgtaaaacttctaagacgcagggagtgaaaagctctcaaatatcgttgaagtctcatacaatat

SEQ ID NO: 72658 - DNA, 80 bp, synthetic construct
  source 1..80: mol_type = other DNA
agaagattaagacagggctttgaagcagcattgctataaaatggggaacaagtggtcaaaaagctggcctgcagtaagag

SEQ ID NO: 72659 - DNA, 80 bp, synthetic construct
  source 1..80: mol_type = other DNA
acagaataaaaagaactgatccaagaactgattcagcagcagaaggagtaggagcagcttctcaagacttagataaacat

SEQ ID NO: 72660 - DNA, 80 bp, synthetic construct
  source 1..80: mol_type = other DNA
actgatccaagaactgattcagcagcagaaggagtaggagcagcttctcaagacttagataaacatggggcacttacaag

SEQ ID NO: 72661 - DNA, 80 bp, synthetic construct
  source 1..80: mol_type = other DNA
cagagtcaaatgacactgagtcaattgtcacagacaatataactctccaaatcagaataaagcaaattataaatcagtgg

SEQ ID NO: 72662 - DNA, 80 bp, synthetic construct
  source 1..80: mol_type = other DNA
gaccaccaaattgttgtgcagagttttaattgtggaggggagtatttcttctgctgtactacagggctgttgaattggaa

SEQ ID NO: 72663 - DNA, 80 bp, synthetic construct
  source 1..80: mol_type = other DNA
aattgttgcttctgtggcaaagaagggcgcctaatcaccaataacagcacgcctagtaaaaaagggggttgtaaatgtgg

SEQ ID NO: 72664 - DNA, 80 bp, synthetic construct
  source 1..80: mol_type = other DNA
aaaaaaagaacgccaactgaaagaaggttgtgagagacagcataattttttagggggaatattgccttcttccaacggga

SEQ ID NO: 72665 - DNA, 80 bp, synthetic construct
  source 1..80: mol_type = other DNA
ggccaccgggcttttttcttaacagcccagaaccatcatcacccccaccggagaagatcagctttggggaagaggcgaca

SEQ ID NO: 72666 - DNA, 80 bp, synthetic construct
  source 1..80: mol_type = other DNA
catctgaaagcatcataactccatgcagaataaaacaacttataatcagaagaccgcaagaagtaagaacaacatctgcc

SEQ ID NO: 72667 - DNA, 80 bp, synthetic construct
  source 1..80: mol_type = other DNA
agcaggggactggaaatagcaaaatcagcccctccccccaccggcataagtaaaatttcatgttcttcaacgagtacggg

SEQ ID NO: 72668 - DNA, 80 bp, synthetic construct
  source 1..80: mol_type = other DNA
agaatgagccaagctgagccagcagcagatggggtgggagcagtatctccagccctggaaagacatcgaccaatcacaag

SEQ ID NO: 72669 - DNA, 80 bp, synthetic construct
  source 1..80: mol_type = other DNA
tgacactatcactatcacatgcccaataaggctaagtgtaaacgcgtggcaggaagtaggaatagcaatgtctatctctg

SEQ ID NO: 72670 - DNA, 80 bp, synthetic construct
  source 1..80: mol_type = other DNA
ccctcagaggccgaatcaagagtttatcaacgtttacaggtacaggattaacaagaacaagtggtggcgccaacgaggat

SEQ ID NO: 72671 - DNA, 80 bp, synthetic construct
  source 1..80: mol_type = other DNA
gaaagaatgagaagcacagagccagcagatggagtgggagcagtatctcgagacctgggaaaacatggagcaatcacaag

SEQ ID NO: 72672 - DNA, 80 bp, synthetic construct
  source 1..80: mol_type = other DNA
cacgtccatttaggctaattctaagtatgtggcagaagctgggactagccctatacgcccctccaattgcaggtaaaagt

SEQ ID NO: 72673 - DNA, 80 bp, synthetic construct
  source 1..80: mol_type = other DNA
aaaaaagaaagctgagccaacagcaaagccagcagcagctagggtaaaagcagcatctaaaaatctgaaaaaacatgaag

SEQ ID NO: 72674 - DNA, 80 bp, synthetic construct
  source 1..80: mol_type = other DNA
gctgagccaacagcaaagccagcagcagctagggtaaaagcagcatctaaaaatctgaaaaaacatgaagcaatcacaag

SEQ ID NO: 72675 - DNA, 80 bp, synthetic construct
  source 1..80: mol_type = other DNA
gaaagattaattattttttctgttgcggcgaagaaggcataaccaccagtaacaacaagcccaggaaaaaaaagggttgt

SEQ ID NO: 72676 - DNA, 80 bp, synthetic construct
  source 1..80: mol_type = other DNA
aaataatgaagaaaagaacgacaacaaaaagaagattgtgaaaaacagcaggtttttttagtggggataatccgttcctc

SEQ ID NO: 72677 - DNA, 80 bp, synthetic construct
  source 1..80: mol_type = other DNA
tgaggcaagaagaaaaaagacaatcacctcctgctctgttactaccaacacgaaagagaaaaagaagaatgatgatgcag

SEQ ID NO: 72678 - DNA, 80 bp, synthetic construct
  source 1..80: mol_type = other DNA
atgttttttaacttgatgttgaagcaataaataatgataatactactaataataataataatattactaattctagctgg

SEQ ID NO: 72679 - DNA, 80 bp, synthetic construct
  source 1..80: mol_type = other DNA
aggatgattagcagcaccacctccaccgtcgcctgcgcctccgcatcggtagcatcacttccacttcctcgttgtgcttc

SEQ ID NO: 72680 - DNA, 80 bp, synthetic construct
  source 1..80: mol_type = other DNA
tgctgctgctgctatttttatgtttaatggtaacactaccagagtcagaggaggaggaggcagtggcaacatggcacagg

SEQ ID NO: 72681 - DNA, 80 bp, synthetic construct
  source 1..80: mol_type = other DNA
aggtggggcaagaagtaagaaaagccccttcccccccagccataagaggaataagatgattttcatcaaatatagcagta

SEQ ID NO: 72682 - DNA, 80 bp, synthetic construct
  source 1..80: mol_type = other DNA
agcatgtcctatggcgtcttagtttacctccagtcagagatttattgcacattgtcatgaggaacatggacatttgggga

SEQ ID NO: 72683 - DNA, 80 bp, synthetic construct
  source 1..80: mol_type = other DNA
tttattgcacattgtcatgaggaacatggacatttggggacgcagggcgcgggaaaccctcgaaaaggctcggagtatct

SEQ ID NO: 72684 - DNA, 80 bp, synthetic construct
  source 1..80: mol_type = other DNA
cgcagggcgcgggaaaccctcgaaaaggctcggagtatctgcgagagctgcagtcaggaattaatcttccggggggcctc

SEQ ID NO: 72685 - DNA, 80 bp, synthetic construct
  source 1..80: mol_type = other DNA
ctcgagagtggcctggggggaaccagtcaaaaaaggtacggattgtattatcagcagaaaacatggcattggaagagaaa

SEQ ID NO: 72686 - DNA, 80 bp, synthetic construct
  source 1..80: mol_type = other DNA
gggaaccagtcaaaaaaggtacggattgtattatcagcagaaaacatggcattggaagagaaattctagtcacacctata

SEQ ID NO: 72687 - DNA, 80 bp, synthetic construct
  source 1..80: mol_type = other DNA
ttctagtcacacctataagaataattttttttttggaaacgccttttctatagtatcaagggcaaagggtcaatttgtcg

SEQ ID NO: 72688 - DNA, 80 bp, synthetic construct
  source 1..80: mol_type = other DNA
gggcaaccccagcagtcggacacgggaaacaaccagaagccataataaagcagcagctcaacaggcaccgccatcagtcc

SEQ ID NO: 72689 - DNA, 80 bp, synthetic construct
  source 1..80: mol_type = other DNA
acaaccagaagccataataaagcagcagctcaacaggcaccgccatcagtcctttcgcaacaattcggagcattcacacc

SEQ ID NO: 72690 - DNA, 80 bp, synthetic construct
  source 1..80: mol_type = other DNA
agaggagctgagcctgagccagcagcagatggggtgggagcagtatctcgagacctgcccaaacatggagcaatcacaag

SEQ ID NO: 72691 - DNA, 80 bp, synthetic construct
  source 1..80: mol_type = other DNA
gatagtagaggggaaatgagagagggaggaggctggtataactgcactttcactatcaccacagaaacaaaaaaagaata

SEQ ID NO: 72692 - DNA, 80 bp, synthetic construct
  source 1..80: mol_type = other DNA
tgcatattatgcttcttttgataatctagaaatagaaaatataaatactacctataggttgataagttgtaacacctcaa

SEQ ID NO: 72693 - DNA, 80 bp, synthetic construct
  source 1..80: mol_type = other DNA
gctggggcccgagctgagccagcagcagatggggtgggaccagcatctcgacccccggcaaagtatcgaccaatcacaag

SEQ ID NO: 72694 - DNA, 80 bp, synthetic construct
  source 1..80: mol_type = other DNA
gctgaccctagagttgaggcagcagcagtcggggtgggagcagtctctcgagacctagaaagacatggagcaatcacaag

SEQ ID NO: 72695 - DNA, 80 bp, synthetic construct
  source 1..80: mol_type = other DNA
aggggggcaaaagcgccagtggtaaatgggggaaaaataaatggctgggaaaaaattcggtaaaggccagggggaaaaaa

SEQ ID NO: 72696 - DNA, 80 bp, synthetic construct
  source 1..80: mol_type = other DNA
cagaagggtggtaaacaataatggaacaatttccacccgcttttaataccggatccaaagaactttaattctttttttat

SEQ ID NO: 72697 - DNA, 80 bp, synthetic construct
  source 1..80: mol_type = other DNA
ggcgtaaccacccttttttggggtccttcacggataaaaggaaaaaaaacccaggaagcctttaaataaaaaaaagaaaa

SEQ ID NO: 72698 - DNA, 80 bp, synthetic construct
  source 1..80: mol_type = other DNA
gaaaaaaaaaaacaagccaaaaaaaccacagggagcccctgcccccagaagcaaccacccaaattaccctattatggcaa

SEQ ID NO: 72699 - DNA, 80 bp, synthetic construct
  source 1..80: mol_type = other DNA
aacatattaaataaaaaattttatatggggaaacagggaggtgggaagaattcccctttacccttgcctttttaaaaccg

SEQ ID NO: 72700 - DNA, 80 bp, synthetic construct
  source 1..80: mol_type = other DNA
gcatattggattcttgaactaaaaattagtactattaattttcttgataccataacaataatagtagctgcctggacaga

SEQ ID NO: 72701 - DNA, 80 bp, synthetic construct
  source 1..80: mol_type = other DNA
taagattataaaaataatacaaaacatctgtagacctagataacatcgggggcaactggtcaaaaaaaaaaatagcagga

SEQ ID NO: 72702 - DNA, 80 bp, synthetic construct
  source 1..80: mol_type = other DNA
gacatctgcaacaaattctatttattcatgtcagaatgcgaagtcggcatagcagaattgacattatgcaacccagaaga

SEQ ID NO: 72703 - DNA, 80 bp, synthetic construct
  source 1..80: mol_type = other DNA
gcagaaagggaaagaactgaaccagcaattggggtgggagcagtatctcgagacctgggaagacatggagcaattacaag

SEQ ID NO: 72704 - DNA, 80 bp, synthetic construct
  source 1..80: mol_type = other DNA
aggggggcaaaagctccggattaaacgggggaaaaattaatagaagggaaaaaatttcggtaaaaaccgggggaaaaaaa

SEQ ID NO: 72705 - DNA, 80 bp, synthetic construct
  source 1..80: mol_type = other DNA
caaagggttgatggcaattataaaaacggttccacccttcctttcgaacgggttcaaaaaactttaattcttttttaatg

SEQ ID NO: 72706 - DNA, 80 bp, synthetic construct
  source 1..80: mol_type = other DNA
gcataaccgtccttttttggggaccttcagggaaaaaaataaaaaaaccccaggaaggctttgaccaaattgaggaagaa

SEQ ID NO: 72707 - DNA, 80 bp, synthetic construct
  source 1..80: mol_type = other DNA
gcaaaccaaagttaaaaaaaggccacacaaggcgccactgaaccaggggaaaaaaacccgggccacccccattaccctta

SEQ ID NO: 72708 - DNA, 80 bp, synthetic construct
  source 1..80: mol_type = other DNA
aaattttcccttaaaacttttggatggggaaaccgggaacttaaaacaattccaatttatcctgggctttttaaaacctt

SEQ ID NO: 72709 - DNA, 80 bp, synthetic construct
  source 1..80: mol_type = other DNA
gtgggagcacgagctgaaccagcagcagaaggggtgggagcagtatctagagacttagaaaaacatggagcaatcacaag

SEQ ID NO: 72710 - DNA, 80 bp, synthetic construct
  source 1..80: mol_type = other DNA
caatataactttaccttgcagaataaagctaattataattatgaataagagagtgagactagcacaatcagcccctcccc

SEQ ID NO: 72711 - DNA, 80 bp, synthetic construct
  source 1..80: mol_type = other DNA
tcaaggggagccccaagaattttccccagaattttccagagagctcagcagagccagcagccccaccagcaatgggggaa

SEQ ID NO: 72712 - DNA, 80 bp, synthetic construct
  source 1..80: mol_type = other DNA
gcagagccaacagcagagccagcagcagatggggtgggtgcagcatctcgagacttggagaagcatggggcaatcacaag

SEQ ID NO: 72713 - DNA, 80 bp, synthetic construct
  source 1..80: mol_type = other DNA
tggccctatcattatcccatgcagaatcagactaattataatcatgtggcaggaactaggaaaagcaatatctgcccctc

SEQ ID NO: 72714 - DNA, 80 bp, synthetic construct
  source 1..80: mol_type = other DNA
agtgaaatgaaaaaatgctctttcaatgtctccccaatcataagggataaggtgaagaaagaatatgcacttttttataa

SEQ ID NO: 72715 - DNA, 80 bp, synthetic construct
  source 1..80: mol_type = other DNA
aggggggcaggagcgtcggaattaaccggggaggaattaaataaatggaaaaaaattgggttaaggccaggaggaaaaaa

SEQ ID NO: 72716 - DNA, 80 bp, synthetic construct
  source 1..80: mol_type = other DNA
catccagaataaccccttggggcaaatggttcagggggaaatgtcactccaggcattatacccaggacccttaattgatt

SEQ ID NO: 72717 - DNA, 80 bp, synthetic construct
  source 1..80: mol_type = other DNA
tatcagatggccagtgcaaccgatgatgcacaaaaggactccatctatgcatctgcccttgttgaagcgaccaagttctg

SEQ ID NO: 72718 - DNA, 80 bp, synthetic construct
  source 1..80: mol_type = other DNA
tcagacatgataaggaggaggaacatcatcctcaacagaggcagtgacgagaacccacgaggcccagtaagccatgagca

SEQ ID NO: 72719 - DNA, 80 bp, synthetic construct
  source 1..80: mol_type = other DNA
agggggggaaagggctccgttttaagggggggaaaatttaaaaaaggggaaaaaattcggttaaggccggggggaaaaaa

SEQ ID NO: 72720 - DNA, 80 bp, synthetic construct
  source 1..80: mol_type = other DNA
ggacctattcccaataacccttggcctgttaaaaaaatcaaagggttgaaaacatttaaggggacagttacatccttccc

SEQ ID NO: 72721 - DNA, 80 bp, synthetic construct
  source 1..80: mol_type = other DNA
ccaagaagcctttaaagaaaaaggtggaaaaggaaataaaatttaaaaagtgcatgcaggggcctgttgaaccaggaaaa

SEQ ID NO: 72722 - DNA, 80 bp, synthetic construct
  source 1..80: mol_type = other DNA
atgagaaaggtcagccaaaattaccttttaggaacaactcttccggggcaagaggaaattcgggggatatcacctaaaac

SEQ ID NO: 72723 - DNA, 80 bp, synthetic construct
  source 1..80: mol_type = other DNA
acattttaaattaaaaaattttgatggggaaaggggggaactggacctattcccaataacccttggcctgttaaaaaaat

SEQ ID NO: 72724 - DNA, 80 bp, synthetic construct
  source 1..80: mol_type = other DNA
agaataaagcaagctgaaccagcagcagaagaagtaagagcagtatctcgagacctagagaaacatagagcaatcacaag

SEQ ID NO: 72725 - DNA, 80 bp, synthetic construct
  source 1..80: mol_type = other DNA
tgcaaattaggcttaatagaggaagaggacaaggaaaacgatggaggaaatatcagcacgtttaagtgcagtgcaggaca

SEQ ID NO: 72726 - DNA, 80 bp, synthetic construct
  source 1..80: mol_type = other DNA
tttatgtatgtgttgtctgtttgtttatgtttgtgtatatgttgtatgtgttatgtgtcatgtttgtgtacatgttctat

SEQ ID NO: 72727 - DNA, 80 bp, synthetic construct
  source 1..80: mol_type = other DNA
tttcaacattttatataatactaaactataatgccaaatcttgtaaaaactagggtgtaaccgaaaacggtctgaccgaa

SEQ ID NO: 72728 - DNA, 80 bp, synthetic construct
  source 1..80: mol_type = other DNA
ttactatcaattcctgaaacatgtatgattatcgagccaccaaaattacgaagtcaagcatgtgccttatattggtttag

SEQ ID NO: 72729 - DNA, 80 bp, synthetic construct
  source 1..80: mol_type = other DNA
aggcttaatagaggaagaggacaaggaaaacgatggaggaaatatcagcacgtttaagtgcagtgcaggacaaaatccta

SEQ ID NO: 72730 - DNA, 80 bp, synthetic construct
  source 1..80: mol_type = other DNA
aatgtctttataggtatttttttgttccttgcccccttcatcttgttaatactattctttatgtttgggtggaggatctt

SEQ ID NO: 72731 - DNA, 80 bp, synthetic construct
  source 1..80: mol_type = other DNA
atgctgacacctttggctgcaaccctactacattatcatcacaatatactgcatataatctgcttcattgtatctatgaa

SEQ ID NO: 72732 - DNA, 80 bp, synthetic construct
  source 1..80: mol_type = other DNA
atgctggcatctttagctgcaactccactacattatcatcacaatatactgcatctaaactgcttcattgtatctgcaaa

SEQ ID NO: 72733 - DNA, 80 bp, synthetic construct
  source 1..80: mol_type = other DNA
aatgtttttataggcattttcacatttcttaccccctttatcttgttaatacttttcttcatgttcgggtggaggatcct

SEQ ID NO: 72734 - DNA, 80 bp, synthetic construct
  source 1..80: mol_type = other DNA
atgctaattcctttaattgcatccccaccatattaccatcacaatatgccacatctaagctgcttcattgtatctacaaa

SEQ ID NO: 72735 - DNA, 80 bp, synthetic construct
  source 1..80: mol_type = other DNA
aatgttttcataggggttttcttattcctcgctccttttatcatgctaatacttttcttcatgtttggatggaggatcct

SEQ ID NO: 72736 - DNA, 80 bp, synthetic construct
  source 1..80: mol_type = other DNA
gtgctagcaccactgattgtacctatgtcacactatcattgcaatgagttatatctaacctgtttcatcacattcgcaaa

SEQ ID NO: 72737 - DNA, 80 bp, synthetic construct
  source 1..80: mol_type = other DNA
aatgttttcatagggattttcttattcattgctccttttgtcctgttaatacttttctttatgtttgggtggaggatcct

SEQ ID NO: 72738 - DNA, 80 bp, synthetic construct
  source 1..80: mol_type = other DNA
gtgttaacatcattaattgtgcccacaccatgtcgtcatcgtaatgtgtcatattctacctacttcattatattcgtaat

SEQ ID NO: 72739 - DNA, 80 bp, synthetic construct
  source 1..80: mol_type = other DNA
aatgttttcataggcattttcctattccttgctccctttgcactgctaatactattcttcttctttgggtggaggcttct

SEQ ID NO: 72740 - DNA, 80 bp, synthetic construct
  source 1..80: mol_type = other DNA
acacacataggttaaaagacaagcagaaccctgaccgcaatagcaccccattagtaccattgcctgcccatctcaacaaa

SEQ ID NO: 72741 - DNA, 80 bp, synthetic construct
  source 1..80: mol_type = other DNA
ccatctcaacaaagcgcaccccgaccatcatctccccggccacatctctctgcactaaacccacagcagctgactgcact

SEQ ID NO: 72742 - DNA, 80 bp, synthetic construct
  source 1..80: mol_type = other DNA
gtgatgtctgtcaaagagatgctgtcagacatgattaggagaaggaaccagattctaaacagaggtggtgatgagaatcc

SEQ ID NO: 72743 - DNA, 80 bp, synthetic construct
  source 1..80: mol_type = other DNA
agtgcagaatttgcatttaaacttgtgagttcagattgtagttaaaaacacccttgtttctactaatacgggatcctata

SEQ ID NO: 72744 - DNA, 80 bp, synthetic construct
  source 1..80: mol_type = other DNA
tagcgagaacgggacgaaggtagaagaaataaaaaattgctctttctatgtccccacaaacataaaagataggatgcgaa

SEQ ID NO: 72745 - DNA, 80 bp, synthetic construct
  source 1..80: mol_type = other DNA
aggtatatgcaactttttataaacttgatctagaaccaataggtgatgatagtactagtaatactaatagtagtaatagg

SEQ ID NO: 72746 - DNA, 80 bp, synthetic construct
  source 1..80: mol_type = other DNA
ggaagtttgacagcaccctagcattccttcacatggtccgaaagctgcatccggagtattacaaggactgctgacaccga

SEQ ID NO: 72747 - DNA, 80 bp, synthetic construct
  source 1..80: mol_type = other DNA
agaaatgaagaggtgtgtactgatttgctcctcctctatcacgaccaccgtaaggaaagaggatgcgacaaaatatgctc

SEQ ID NO: 72748 - DNA, 80 bp, synthetic construct
  source 1..80: mol_type = other DNA
atgattattttcatgatgcggatgaaatacataacgatgataatagcagtagctgttacacctcattaagtagtaacgcc

SEQ ID NO: 72749 - DNA, 80 bp, synthetic construct
  source 1..80: mol_type = other DNA
aaaagttgctctttctatgtccgctcaacataaagataggatgcgaaggtatatgcgacttttttataaacttgatctag

SEQ ID NO: 72750 - DNA, 80 bp, synthetic construct
  source 1..80: mol_type = other DNA
cactgccagtagcatagaaggggaaaagggaggagaaatgagaaattgctctttcaatatcaccacaagcatgaaagata

SEQ ID NO: 72751 - DNA, 80 bp, synthetic construct
  source 1..80: mol_type = other DNA
atgtgaaaaaagaacgtgcactcttctataattttgatgtaatgccaatggatgagggaaataatactgctaatgccagc

SEQ ID NO: 72752 - DNA, 80 bp, synthetic construct
  source 1..80: mol_type = other DNA
agaaataaaaaattgctctttctatgtccccacaaacataaaagataggatgcgaaaggtatatgcaactttttataaac

SEQ ID NO: 72753 - DNA, 80 bp, synthetic construct
  source 1..80: mol_type = other DNA
gggggataatgatactcttcttactaatggagaaataaaaaactgctctttctatatagctgcacaagtgaaagataagt

SEQ ID NO: 72754 - DNA, 80 bp, synthetic construct
  source 1..80: mol_type = other DNA
gtaaaaagatgctctttcgatgtcaccacaggcataagagatatagtgcagaaagaatatgctctttattataaactaga

SEQ ID NO: 72755 - DNA, 80 bp, synthetic construct
  source 1..80: mol_type = other DNA
aaagaaaatcagatctttcaatatcaccaccaccataagagataagatgcagagaacatatgcacatttttataaacatg

SEQ ID NO: 72756 - DNA, 80 bp, synthetic construct
  source 1..80: mol_type = other DNA
actggtagtaataatactactaatagtcctccagtctaccctcctactatgaccccagaaaaaataaaatgctgttcctt

SEQ ID NO: 72757 - DNA, 80 bp, synthetic construct
  source 1..80: mol_type = other DNA
tgttgccaccataatagtagaaaagatagagaaaaaacatgcattatttcatagccttgatataggacccatagatgata

SEQ ID NO: 72758 - DNA, 80 bp, synthetic construct
  source 1..80: mol_type = other DNA
taaagaagaaataataaactgctctttcctggtcaccacagacagaaaggataaggagcagaacgagtatgcactgtttt

SEQ ID NO: 72759 - DNA, 80 bp, synthetic construct
  source 1..80: mol_type = other DNA
atagactcgatatatgtaccaataaatcttggctactactagtctatactaataatactgattataggttagatatagtt

SEQ ID NO: 72760 - DNA, 80 bp, synthetic construct
  source 1..80: mol_type = other DNA
gtaacacgtcagtcattaccccgtctggtcccagacgatgtccatgtgaatcaatttccatacatccttgtaccctggat

SEQ ID NO: 72761 - DNA, 80 bp, synthetic construct
  source 1..80: mol_type = other DNA
actagcagtactactagtactcctagtagtctagtctaccctactatgagtacaggagaaataaaaaactgctctttcaa

SEQ ID NO: 72762 - DNA, 80 bp, synthetic construct
  source 1..80: mol_type = other DNA
tatcaccacaggaataggaaaaatggagaaaaactatgaattattatattgtattgatatagtaccaatagatagggatg

SEQ ID NO: 72763 - DNA, 80 bp, synthetic construct
  source 1..80: mol_type = other DNA
aactgctgacatctacaacaactgctgacaccgagctttctacaatgtactttccgctgtttactttccaggatgcctgg

SEQ ID NO: 72764 - DNA, 80 bp, synthetic construct
  source 1..80: mol_type = other DNA
taattgaaccttgcaagcttcttccagatacagcagcagttagcctccttggtggtcctgcaacaaacagggactactta

SEQ ID NO: 72765 - DNA, 80 bp, synthetic construct
  source 1..80: mol_type = other DNA
aggcgagcacattgtaatgttagtggagaagattggaataagactttaagccatgtagttgacaaattaagagaacaatt

SEQ ID NO: 72766 - DNA, 80 bp, synthetic construct
  source 1..80: mol_type = other DNA
caccgtcatcaatatgggtctttgccggggcccctgatcgctgcccaccaacatgcctattcattgcaggtattgctgag

SEQ ID NO: 72767 - DNA, 80 bp, synthetic construct
  source 1..80: mol_type = other DNA
attacacctggcagatatagaacagcaatttgtgggctttatcctgcacaaattaaggcaagacagatgattagtccggt

SEQ ID NO: 72768 - DNA, 80 bp, synthetic construct
  source 1..80: mol_type = other DNA
gtcaccatcatcaatatgggtgtttgctggggcaccagaccgctgtccacctacatgtcttttcattgcaggtattgctg

SEQ ID NO: 72769 - DNA, 80 bp, synthetic construct
  source 1..80: mol_type = other DNA
atgagtccaaatcagaatagaataacgattgtttctctaaccattgcggcaatatgttttctcatgcatattgccatcct

SEQ ID NO: 72770 - DNA, 80 bp, synthetic construct
  source 1..80: mol_type = other DNA
aacttttaccatgaccctacacttcatgcagaccgaatgcaccaacccatcgaataatcaagtggtgccttgtgagccta

SEQ ID NO: 72771 - DNA, 80 bp, synthetic construct
  source 1..80: mol_type = other DNA
aacggggaggacgaaccagtggtttcttacaacgccaagaatggcgtttctggactgcctgagctttccactgtcaggca

SEQ ID NO: 72772 - DNA, 80 bp, synthetic construct
  source 1..80: mol_type = other DNA
ggaagctctgtactccatcattcaaattgcaggggctgcgtttgtcaccacgcgcattgtcaagcgcatgaacatacagg

SEQ ID NO: 72773 - DNA, 80 bp, synthetic construct
  source 1..80: mol_type = other DNA
tctcatccgacgacatcaaggttgagggcaagaaagggaagaacaagactggtcgcggcaagaagcacacagccttctcg

SEQ ID NO: 72774 - DNA, 80 bp, synthetic construct
  source 1..80: mol_type = other DNA
gacgtttgcgcaagcttgcgcgtctcttgacaagaccacctccagtggtcatccacaccacatacggaagaatgaatgct

SEQ ID NO: 72775 - DNA, 80 bp, synthetic construct
  source 1..80: mol_type = other DNA
catggtcaaattctccccagagccacacttagcccagatagttgcagaagaccttctatcccccagcgtgatggacgtgg

SEQ ID NO: 72776 - DNA, 80 bp, synthetic construct
  source 1..80: mol_type = other DNA
gtgatttcaagatttcaatcaacgagggcctcccctctggggtgccttgcacttcacaatggaattctattgcccactgg

SEQ ID NO: 72777 - DNA, 80 bp, synthetic construct
  source 1..80: mol_type = other DNA
ttatgatccaacagaagaaattccagctcccctgggaacaccagactttgtaggaaagatccaaggtttgctcacccaaa

SEQ ID NO: 72778 - DNA, 80 bp, synthetic construct
  source 1..80: mol_type = other DNA
ctttgggggcattacctggaagaatcaatcctagggttcctgcacctgctcggagctcccccagttcactttccaatgct

SEQ ID NO: 72779 - DNA, 80 bp, synthetic construct
  source 1..80: mol_type = other DNA
aacggggagggtgagccagtggtctcttacagtgtcaaagatggcgtttccgggttgcctgagctctccactgtcaggca

SEQ ID NO: 72780 - DNA, 80 bp, synthetic construct
  source 1..80: mol_type = other DNA
atagtgtatggtggcagcacttatacacttgaatctgatggcaagggtggtgtgaaggtcgacagagttcagagtaccac

SEQ ID NO: 72781 - DNA, 80 bp, synthetic construct
  source 1..80: mol_type = other DNA
cgtacagaccaataatgagttagccggcgccctgcaccacctcaggtgcgccaggatcaggtactatgtcaagtgtgtcc

SEQ ID NO: 72782 - DNA, 80 bp, synthetic construct
  source 1..80: mol_type = other DNA
cactgttgggggccaaatgggtatgctcctgacagggtccaatgccaaaagtatggacttgggcaccacacccggcgact

SEQ ID NO: 72783 - DNA, 80 bp, synthetic construct
  source 1..80: mol_type = other DNA
aattctccccagagccacacttagctcaaatagttgcagaagaccttctatcccccagtgtgatggatgtaggtgatttt

SEQ ID NO: 72784 - DNA, 80 bp, synthetic construct
  source 1..80: mol_type = other DNA
ctgagggacctctgattatttctgaggacctaaatggtttaaccttccttcggaggaccgtgacccgcgacccagctggt

SEQ ID NO: 72785 - DNA, 80 bp, synthetic construct
  source 1..80: mol_type = other DNA
cccctagaaatgctccaggtgagatactatggagcgcgcccttgagccctgatttgaacccctatctttctcacctgtcc

SEQ ID NO: 72786 - DNA, 80 bp, synthetic construct
  source 1..80: mol_type = other DNA
atggttatgcaggtggctttgaagtgcaggtaatcctcgcagggaatgcgttcactgccgggaaaatcatatttgcagca

SEQ ID NO: 72787 - DNA, 80 bp, synthetic construct
  source 1..80: mol_type = other DNA
attccaccaaattttccaactgaaggcttaagccctagccaggttacaatgttcccccacataattgtagatgtcaggca

SEQ ID NO: 72788 - DNA, 80 bp, synthetic construct
  source 1..80: mol_type = other DNA
attggaacctgtattaatccccctacctgatgttaggaataatttctatcattataatcaagcacatgattctactctca

SEQ ID NO: 72789 - DNA, 80 bp, synthetic construct
  source 1..80: mol_type = other DNA
tgtaatttcaggggggatgtcacccgtgttgggatcagccatgattacacaatgaatttggtgtcccaaaattggaataa

SEQ ID NO: 72790 - DNA, 80 bp, synthetic construct
  source 1..80: mol_type = other DNA
ctatgatccaacagaggaaatccctgctcccctgggaacaccagactttgtgggtaagatccaaggtctgctcactcaaa

SEQ ID NO: 72791 - DNA, 80 bp, synthetic construct
  source 1..80: mol_type = other DNA
ccacaagagcagacggctcgactcgtgcccacaaagccacagtgagcactgggagcgttcacttcaccccaaagctgggt

SEQ ID NO: 72792 - DNA, 80 bp, synthetic construct
  source 1..80: mol_type = other DNA
agtgtccaattcaccaccgacacaaacaatgactttcaaactggccaaaatacaaaattcaccccagttggtgtcatcca

SEQ ID NO: 72793 - DNA, 80 bp, synthetic construct
  source 1..80: mol_type = other DNA
acatcacagtggctcacactggtccgtatgatttggttattccccccaatggttatttcagatttgattcttgggtcaac

SEQ ID NO: 72794 - DNA, 80 bp, synthetic construct
  source 1..80: mol_type = other DNA
atgccggagccggagcgatcaatcaaagagtggaatttgaaaataataggaaattacagcaagcttccttccaatttagc

SEQ ID NO: 72795 - DNA, 80 bp, synthetic construct
  source 1..80: mol_type = other DNA
atgctactcaaaaattgcagcagggcttaatgcagatcaagcaggcggtgcttctggaaggtgggttttctgcggcagac

SEQ ID NO: 72796 - DNA, 80 bp, synthetic construct
  source 1..80: mol_type = other DNA
caatgcaggccatttctccccttcccagccttctaggacgccgtctgggaggattagttctgtgacttctgcatctgtgc

SEQ ID NO: 72797 - DNA, 80 bp, synthetic construct
  source 1..80: mol_type = other DNA
gaaattcccccagcttatcttctaaatcttctactgctacaactgtgtattctaatcaaactgtttcaacgagacttggt

SEQ ID NO: 72798 - DNA, 80 bp, synthetic construct
  source 1..80: mol_type = other DNA
accaaaacaggagcgtgtcacccttcatgaggggagcactcaacacatcatttgttactcctccatctagcagatcctct

SEQ ID NO: 72799 - DNA, 80 bp, synthetic construct
  source 1..80: mol_type = other DNA
ggggagtgaaggagaggctacacttgaaggcggtgacagtaagggaacctactgtggtgcaccaatcctaggcccaggaa

SEQ ID NO: 72800 - DNA, 80 bp, synthetic construct
  source 1..80: mol_type = other DNA
attgcacggagaatcgttcccctatacagcctttgacaacaattgctatgccttctgttgctgggtcttagacttaaacg

SEQ ID NO: 72801 - DNA, 80 bp, synthetic construct
  source 1..80: mol_type = other DNA
atgctggagctggagccatcaatcaaaaagttgaatttgaaaacaacagaaaattacagcaagcttccttccaattcagt

SEQ ID NO: 72802 - DNA, 80 bp, synthetic construct
  source 1..80: mol_type = other DNA
cttcgggagcattgccaggaagaactaatcccagggttcccgttctctctcggggcccccccagtacactttctaatgct

SEQ ID NO: 72803 - DNA, 80 bp, synthetic construct
  source 1..80: mol_type = other DNA
gatgatgcacaaaaggactccatctatgcatctgcccttgttgaagcaaccaagttctgtgcaccaatatatgagtgtgc

SEQ ID NO: 72804 - DNA, 80 bp, synthetic construct
  source 1..80: mol_type = other DNA
aggaggaggaacatcatccttaacagaggtagtgacgaaaacccacaaggaccagtaagccatgaacacattgagtggtg

SEQ ID NO: 72805 - DNA, 80 bp, synthetic construct
  source 1..80: mol_type = other DNA
cgcaccggggatcctaggcgtttagttgcgcaggttgggcatacacccttcaaagaaacccagagtcgagaaagccaaca

SEQ ID NO: 72806 - DNA, 80 bp, synthetic construct
  source 1..80: mol_type = other DNA
actcaggcccaactctctcaaaatcaatggattttatatcatccaagatttttctagaacctactagctcaagttcaata

SEQ ID NO: 72807 - DNA, 80 bp, synthetic construct
  source 1..80: mol_type = other DNA
gagtcaccaagtatcagagggtccaccatgtagtcctcgagctcatcagacctaatatcaaaaacgttattgttcacctt

SEQ ID NO: 72808 - DNA, 80 bp, synthetic construct
  source 1..80: mol_type = other DNA
gaaagttgagtctgtccttaacaaattgagacattcatctagtaaccttctgtccacctcacccttaaaaaagtgagaac

SEQ ID NO: 72809 - DNA, 80 bp, synthetic construct
  source 1..80: mol_type = other DNA
atgacaaaaatctggccacaccagggctttggagctcactcttcaccacaaggattaaagaaaacttcctcagacagtct

SEQ ID NO: 72810 - DNA, 80 bp, synthetic construct
  source 1..80: mol_type = other DNA
gtgttattttggttgtgtgtaaagtccactgtaactgtgaactctaacacaccactcgtatagttgaggagatagtccca

SEQ ID NO: 72811 - DNA, 80 bp, synthetic construct
  source 1..80: mol_type = other DNA
taactctcttaatgatttaaatgcctttgaactaattagaccctgtttgaccagcaaagcagcattgcacatagcctcac

SEQ ID NO: 72812 - DNA, 80 bp, synthetic construct
  source 1..80: mol_type = other DNA
ccactcgataagaaaaccatccaaatccaaactgcaagtcatctctaaacatgggcctctctacatttttgttcaccact

SEQ ID NO: 72813 - DNA, 80 bp, synthetic construct
  source 1..80: mol_type = other DNA
taccggatgctacatatcttggacctctgaattgcaagtcatgttggcagaaggttgatagcctggttagatgccatgat

SEQ ID NO: 72814 - DNA, 80 bp, synthetic construct
  source 1..80: mol_type = other DNA
tttaacacaaaggattgaaagggacctaaagcctcagcaccgtcctcagaaggcatcatacctctgtgtgggaaccatga

SEQ ID NO: 72815 - DNA, 80 bp, synthetic construct
  source 1..80: mol_type = other DNA
aaaattacctagtgtcctagatgttatgacaaactctctaacaaacgattcaaaatacacctgttttaagaaatttttgc

SEQ ID NO: 72816 - DNA, 80 bp, synthetic construct
  source 1..80: mol_type = other DNA
aaatatcccttgtgctcacaacaaactcatctgtcaggctcgaatcagtccgctgatgtgacttgacaagatcagagaag

SEQ ID NO: 72817 - DNA, 80 bp, synthetic construct
  source 1..80: mol_type = other DNA
aggactgtgtagtgttcatccctcttccacttcacaacgtgtgatataagtgatagagactctgaatttatgtcaatcaa

SEQ ID NO: 72818 - DNA, 80 bp, synthetic construct
  source 1..80: mol_type = other DNA
cacacaaaggtcaaggaattttatccggggactccatctcatactttttgagctcaagtcagacatgaatggaagtaatt

SEQ ID NO: 72819 - DNA, 80 bp, synthetic construct
  source 1..80: mol_type = other DNA
gatcttcaaacaccttgggatataaccttctcacagattggatcacatgattcaaacttaccttgtcttctaataacctt

SEQ ID NO: 72820 - DNA, 80 bp, synthetic construct
  source 1..80: mol_type = other DNA
gaactttcaggctttctagcgacataatcacatgggttcaaatgttttaaaccggtgtccttgagacatttccctttcac

SEQ ID NO: 72821 - DNA, 80 bp, synthetic construct
  source 1..80: mol_type = other DNA
aggttcagccaaaacccaaacacccaactcaaatgaattactcagtgaaatacaaatgtagtcccagagaagaggtctta

SEQ ID NO: 72822 - DNA, 80 bp, synthetic construct
  source 1..80: mol_type = other DNA
aaaggcctacatggtctaggtcaggctcagggtgactcagcttatcacaaatatagagtggtatttcatcctgagtttga

SEQ ID NO: 72823 - DNA, 80 bp, synthetic construct
  source 1..80: mol_type = other DNA
attcttgatatgtttccatcagcagcaacatcctcaagaactctttttatatacaaattttctctattcttgtttctcac

SEQ ID NO: 72824 - DNA, 80 bp, synthetic construct
  source 1..80: mol_type = other DNA
cactacttatgtagacattgtctgaacctcctgctgactgtctcggacagatgccccctatgcaagcatgtgctacccac

SEQ ID NO: 72825 - DNA, 80 bp, synthetic construct
  source 1..80: mol_type = other DNA
acatctgcttcccaatgtcttacacaaacctatgaaaccagatgatatacaactctgaaaagctgatttatttatagctt

SEQ ID NO: 72826 - DNA, 80 bp, synthetic construct
  source 1..80: mol_type = other DNA
ctgataacagcttctgtgctcctcttgtaaatttactgcagagcttgctctgaagcgtctttatcagtgttgggattctt

SEQ ID NO: 72827 - DNA, 80 bp, synthetic construct
  source 1..80: mol_type = other DNA
tcctcttggaaagtcattgtcgatgggtagatgactttctgccttaacaccattctcagcgggaacatttcatttaaatt

SEQ ID NO: 72828 - DNA, 80 bp, synthetic construct
  source 1..80: mol_type = other DNA
caaccagtttatatctgctatacggtttaaatcttcctcaaatttcaagacctcacctagctgaaggatagcttctttct

SEQ ID NO: 72829 - DNA, 80 bp, synthetic construct
  source 1..80: mol_type = other DNA
tctccttattgaacaactctaaaagaaattcttcgttaaattctccattcttgagcttgtggtgtagtctcctgattagt

SEQ ID NO: 72830 - DNA, 80 bp, synthetic construct
  source 1..80: mol_type = other DNA
ttcctaaccgtttttgtctcatttgggcatagcctctcgatgagcctttgaattcgataacctctagatccatccaacca

SEQ ID NO: 72831 - DNA, 80 bp, synthetic construct
  source 1..80: mol_type = other DNA
gtccttcacatcggcatcagcatttaacaagaaggggtctaaaggaaagtttgcgtacttcaaaagatctaatgtccttt

SEQ ID NO: 72832 - DNA, 80 bp, synthetic construct
  source 1..80: mol_type = other DNA
tctgtatggtgttaactagggaaaccggcacaccattagcgacagcctgatctgcaattgtgtctattgtttcacagagt

SEQ ID NO: 72833 - DNA, 80 bp, synthetic construct
  source 1..80: mol_type = other DNA
tgatgtggctctttgcactttacattatgtagagcggcagagacaaatttagtcaacaagggaacctcctcaccccaaac

SEQ ID NO: 72834 - DNA, 80 bp, synthetic construct
  source 1..80: mol_type = other DNA
ataaaaccttgacttgaactctgctgcaaatctcccaaccacacttttgggactgacgaatttgttcaacaaaccactca

SEQ ID NO: 72835 - DNA, 80 bp, synthetic construct
  source 1..80: mol_type = other DNA
caagttgaaggtctcaactgtccccagctcacctcccccctatgaagaataacaacccaagacaggaacaggacagccga

SEQ ID NO: 72836 - DNA, 80 bp, synthetic construct
  source 1..80: mol_type = other DNA
gatgagagtgaaactctaataagagcaagatttcgtctggatcagtgtcgaccatttcacttgatcttctatgaaaaagg

SEQ ID NO: 72837 - DNA, 80 bp, synthetic construct
  source 1..80: mol_type = other DNA
gtgatttgatcatcgctagatgtgtacgcttccggtctttcaccaaatattacaccaatgcagtaattaataaatctttc

SEQ ID NO: 72838 - DNA, 80 bp, synthetic construct
  source 1..80: mol_type = other DNA
actgattaagccatagaaatcagatgcgttatgcaagattccctgacccatgtcaataaggctggagatgtgagatggga

SEQ ID NO: 72839 - DNA, 80 bp, synthetic construct
  source 1..80: mol_type = other DNA
caatccctgcttcaaaataatctctgaatatcctttctgtttcagttgtctgtgtgccgctcaaaagttttagctttgac

SEQ ID NO: 72840 - DNA, 80 bp, synthetic construct
  source 1..80: mol_type = other DNA
ttgacatatgacttcatcatcgcacttacaacaggaaagggaacctcaaccagcttgtgcatgtgccaggttaacagggt

SEQ ID NO: 72841 - DNA, 80 bp, synthetic construct
  source 1..80: mol_type = other DNA
gctgacatgatctttgccagaccgaacatattgatcatcacccaacttgagattttgcagaagcatgaggaacaaaaatg

SEQ ID NO: 72842 - DNA, 80 bp, synthetic construct
  source 1..80: mol_type = other DNA
gacacatcatgggtccccacttactgtgatccatactataattcaggaacccttctcgcacattgatggtcattaacaga

SEQ ID NO: 72843 - DNA, 80 bp, synthetic construct
  source 1..80: mol_type = other DNA
attgcgttctcaaactccttctcgttattcaagcatgagcccgaaaagaaactggtgaatgattcaaaatagtcttccac

SEQ ID NO: 72844 - DNA, 80 bp, synthetic construct
  source 1..80: mol_type = other DNA
taatcttgtaaacatctttgttcttaaatcaccaatatagagttctctatttcccccaacttgttctttgtaggacagcg

SEQ ID NO: 72845 - DNA, 80 bp, synthetic construct
  source 1..80: mol_type = other DNA
cgaatttcagccttccagaatcaggacccactgaagtgtaagaggttggagactcttctgaataaaaacataagtttttt

SEQ ID NO: 72846 - DNA, 80 bp, synthetic construct
  source 1..80: mol_type = other DNA
accaccgcgaagcacaccacacacaagcggaaggcaaggagacaacccccaggcacacaccaacacaggacccacacaca

SEQ ID NO: 72847 - DNA, 80 bp, synthetic construct
  source 1..80: mol_type = other DNA
aaagctgcactcatacattttgtcaatgataaagccttgctcaaagattcagaattactttccctctcgctaatcctcac

SEQ ID NO: 72848 - DNA, 80 bp, synthetic construct
  source 1..80: mol_type = other DNA
ctcctcctccaacctatcccagtcaaacttaaaattcaaaccttgtctttgtacatgcctatactttcctgagtaggcgt

SEQ ID NO: 72849 - DNA, 80 bp, synthetic construct
  source 1..80: mol_type = other DNA
tcgcattcatctgtagtagaatcattttcatacatgagaaccaatcgctgtcagaaaaaaactttctacataaattcctt

SEQ ID NO: 72850 - DNA, 80 bp, synthetic construct
  source 1..80: mol_type = other DNA
gccatttcgtctaaagcacattgatctttaactgttggtgtgaaatacaatgatgacagctctgtggaactttcaatagc

SEQ ID NO: 72851 - DNA, 80 bp, synthetic construct
  source 1..80: mol_type = other DNA
ttcacacaaaaatctcatgtcatcttgactgatgcaagatggatcgaagtcttcaacttgatggaatgatatttcagaaa

SEQ ID NO: 72852 - DNA, 80 bp, synthetic construct
  source 1..80: mol_type = other DNA
ggataatcttccttaagtgactcatgctaccagacagaacagtttggagatgatgcaatcccctcaattctttaacccct

SEQ ID NO: 72853 - DNA, 80 bp, synthetic construct
  source 1..80: mol_type = other DNA
tctacattccgccctccttcacctgccttatccttgctaaaatgtgttattgtagaatttaccctgccctccaattcctt

SEQ ID NO: 72854 - DNA, 80 bp, synthetic construct
  source 1..80: mol_type = other DNA
aaaaaaactggtttcctcttctccctcaaagcatgtactcacagaatcacttccgttcctcattgactctgactctctgg

SEQ ID NO: 72855 - DNA, 80 bp, synthetic construct
  source 1..80: mol_type = other DNA
acccgacgaccagcttagaaaccagttttgacaccttgtactcataatctgagtgacttaatttaaacctctgtttcctt

SEQ ID NO: 72856 - DNA, 80 bp, synthetic construct
  source 1..80: mol_type = other DNA
atgaacgattctgtgatctggctcacagcacttacaagtagtttgttaaagttgtactccaataatcgttctccattcaa

SEQ ID NO: 72857 - DNA, 80 bp, synthetic construct
  source 1..80: mol_type = other DNA
gacaaacacacacaaacacaacaccgagcacacaacaaacaaccacacccacacccaacacgcgccccccgcggggcgcg

SEQ ID NO: 72858 - DNA, 80 bp, synthetic construct
  source 1..80: mol_type = other DNA
atgcttattcacaaccacacttttgttgcttgcaaggtccagtgctgttgcgcagccagagttggtcatgggatccagat

SEQ ID NO: 72859 - DNA, 80 bp, synthetic construct
  source 1..80: mol_type = other DNA
tactaagctttttttcccctttgaatatcaaagtcccgttattgaatgaagaaaccattaaactaaagacctccaggttg

SEQ ID NO: 72860 - DNA, 80 bp, synthetic construct
  source 1..80: mol_type = other DNA
acacctggggttgtctgttgacagtccacctccttgctgacgaatttcttcatctgctcataaaaaacacactcttcttc

SEQ ID NO: 72861 - DNA, 80 bp, synthetic construct
  source 1..80: mol_type = other DNA
aggtgtcattgcttccttggggttaacaaaaaatccaaattgtgtctttggttcaaagaatttctcaaaacattttattt

SEQ ID NO: 72862 - DNA, 80 bp, synthetic construct
  source 1..80: mol_type = other DNA
ggtccgttagtctgtcgggggtctcctttgttatgagatggcacaaatatgagacatttagcataaacttaaattttgca

SEQ ID NO: 72863 - DNA, 80 bp, synthetic construct
  source 1..80: mol_type = other DNA
cttaacaaaaccttctcatcaactccaaagatagtcctcatcaagtacctaagcaacctatataccactttctctgcagg

SEQ ID NO: 72864 - DNA, 80 bp, synthetic construct
  source 1..80: mol_type = other DNA
agtgattagatcctctctcaatttatccattagtcctatacatgaaaaatccgacactacagccattaccaaatacctga

SEQ ID NO: 72865 - DNA, 80 bp, synthetic construct
  source 1..80: mol_type = other DNA
tattttgaacctgtttttgattccttttggttgggttggtgagtaggagcaacaacaaagctttcaaagcgacctcaatg

SEQ ID NO: 72866 - DNA, 80 bp, synthetic construct
  source 1..80: mol_type = other DNA
tctagcaatctctctgaaagatcagggcatgaccttatccacgaaatcatagtatcagtcatgttgtgcagcacttcatc

SEQ ID NO: 72867 - DNA, 80 bp, synthetic construct
  source 1..80: mol_type = other DNA
cgaaaatattggcagaaaaaaccttttaggatctgcatagaaggagaccagatggccctccaacccttgaattgaataac

SEQ ID NO: 72868 - DNA, 80 bp, synthetic construct
  source 1..80: mol_type = other DNA
cgcccccccccatgcgggtggagtgggaggagggagagcggaggagcccccgcagcggcgccgatcagtcgatctccaca

SEQ ID NO: 72869 - DNA, 80 bp, synthetic construct
  source 1..80: mol_type = other DNA
atctagaggactcccctgtcttctgatacaatagatgatactcttctgtgtctaatttaatcacttgacagaaaacctct

SEQ ID NO: 72870 - DNA, 80 bp, synthetic construct
  source 1..80: mol_type = other DNA
ttacattccaccacttggtatctaacagatcctatctgattctgtctcaatctagcaactgagctggtcttcatactatt

SEQ ID NO: 72871 - DNA, 80 bp, synthetic construct
  source 1..80: mol_type = other DNA
tgttagagccaagcaaacagaagacaacctttttaagctttgaatatccctcaaagcttttggattagggcgaaaggtgt

SEQ ID NO: 72872 - DNA, 80 bp, synthetic construct
  source 1..80: mol_type = other DNA
agtcctcaaattttgtgtagtacatgagagggtggtgcccagttttcacaaactcttcaaattctgtcaatgtaacaaaa

SEQ ID NO: 72873 - DNA, 80 bp, synthetic construct
  source 1..80: mol_type = other DNA
cattcactcttaagatcctcagataacccgtaacaaccaaaattgaggccaactactgatagacactttctaattttggt

SEQ ID NO: 72874 - DNA, 80 bp, synthetic construct
  source 1..80: mol_type = other DNA
gacaaactcctttatggacaattcaaacaacccacttaaagacaatttcttaagggccttagatttcttcctatttttca

SEQ ID NO: 72875 - DNA, 80 bp, synthetic construct
  source 1..80: mol_type = other DNA
gaagcctgatgaattcttccttagtgctgtgaaagctcactaatctgtcattcacactgctgtagcagcagccaacccag

SEQ ID NO: 72876 - DNA, 80 bp, synthetic construct
  source 1..80: mol_type = other DNA
ccgcagcggcgccgatcagtcgatctccacaatcgttgccccggcaagccagtcttcacaggacttccccttgagcctaa

SEQ ID NO: 72877 - DNA, 80 bp, synthetic construct
  source 1..80: mol_type = other DNA
tgcttatcattatgtgaccctttaaggttcaattgcttaattaaagcagagaggcataagacatccagattcaacagctg

SEQ ID NO: 72878 - DNA, 80 bp, synthetic construct
  source 1..80: mol_type = other DNA
tcttctccttgtgttcaacaatttcaaactcttgaccttgttcaacattgagagaagtctttcatattcagtactagcct

SEQ ID NO: 72879 - DNA, 80 bp, synthetic construct
  source 1..80: mol_type = other DNA
caattttccgtttgtgacctttagtgtctgctgtgatgaacttcatcaaagggcaggactcaactgcatccttggccagt

SEQ ID NO: 72880 - DNA, 80 bp, synthetic construct
  source 1..80: mol_type = other DNA
atcgttgccccggcaagccagtcttcacaggacttccccttgagcctaaacctccctccaacagtttcaaacatcactgt

SEQ ID NO: 72881 - DNA, 80 bp, synthetic construct
  source 1..80: mol_type = other DNA
gttgatatatcgtcatcatcatcagtagcaccgtagagctgggaaaattcttttatcaggtctttagaatcaatcttccg

SEQ ID NO: 72882 - DNA, 80 bp, synthetic construct
  source 1..80: mol_type = other DNA
aagagtccttttcaacttccttgattccaagtccctcctgaacctgctgtaaagagaatttatgccaagcaccacatcat

SEQ ID NO: 72883 - DNA, 80 bp, synthetic construct
  source 1..80: mol_type = other DNA
cgcaactcatatcgggctttactccatcatggcacattttcatgatttcatcattatgacgtgaccttgcatccttcaga

SEQ ID NO: 72884 - DNA, 80 bp, synthetic construct
  source 1..80: mol_type = other DNA
atcttcatggaatccatcccggaacgcttatccactgtggttttgagtgattcacagagtctgaaatactcggactcttc

SEQ ID NO: 72885 - DNA, 80 bp, synthetic construct
  source 1..80: mol_type = other DNA
gaagaccttttcatcttggctggcatactctagcagcttgaacaacaagtccctgaacttgaagttcacccattctggca

SEQ ID NO: 72886 - DNA, 80 bp, synthetic construct
  source 1..80: mol_type = other DNA
tgaaactattatcataatcacagcggccatctacaatggggactagtgtgatgccagccacagcaaggtcctctttgatg

SEQ ID NO: 72887 - DNA, 80 bp, synthetic construct
  source 1..80: mol_type = other DNA
cttgacaatttgttggtgtcttctataaacttcttttcaaaactagctggagtgcttctaacaaaacactcaagaagaat

SEQ ID NO: 72888 - DNA, 80 bp, synthetic construct
  source 1..80: mol_type = other DNA
gagggagttgtcaatgagtttgtatccatcagggatgattaggggcaacccaggacacacaatgcctgactctatcagga

SEQ ID NO: 72889 - DNA, 80 bp, synthetic construct
  source 1..80: mol_type = other DNA
tggcctcgacagatttgtcatcgtagttgtgtgtgcagccactcttgtcagcactgtctatctcgatacaacgtgatagt

SEQ ID NO: 72890 - DNA, 80 bp, synthetic construct
  source 1..80: mol_type = other DNA
agtttcagtccttcaattagcaccatcctcggctctctctgccccaaaaaatttaatttttgccttgacagcctctcatc

SEQ ID NO: 72891 - DNA, 80 bp, synthetic construct
  source 1..80: mol_type = other DNA
gttcttagtcttactataacagagttcacagtccttaaaagagaaccagtcgggcacatgcatcatgggcaacagcaaga

SEQ ID NO: 72892 - DNA, 80 bp, synthetic construct
  source 1..80: mol_type = other DNA
ctgatctatgtagtttagacaaagctccctcaattctgagattaactcatccattgcgcatcaaaaagcctaggatcctc

SEQ ID NO: 72893 - DNA, 80 bp, synthetic construct
  source 1..80: mol_type = other DNA
gcaagccgaactttcaaccatgggccagggcaagtcaaaggaggagacagctaacagcagtgtcggaagagcagaacttc

SEQ ID NO: 72894 - DNA, 80 bp, synthetic construct
  source 1..80: mol_type = other DNA
cagaccttgacatacacaattctcggaggacccagtcaacctctgagctcattaaatgttcacctgttctaaacctatgg

SEQ ID NO: 72895 - DNA, 80 bp, synthetic construct
  source 1..80: mol_type = other DNA
agaagcaaattgctaagaacatcctcaaatttctcatagccttcaagctctgccaaaaaaactcttaaatcttttgtctc

SEQ ID NO: 72896 - DNA, 80 bp, synthetic construct
  source 1..80: mol_type = other DNA
taatttgacaagaatgttttgaacaaacttcctcccttcataaagagcacccattttaaaggttaatggcacagggtccc

SEQ ID NO: 72897 - DNA, 80 bp, synthetic construct
  source 1..80: mol_type = other DNA
cgcacagtggatcctaggctttattgtttgcgccaccaaagtgcctgatcttggtgtgttttcacaacctgaacctgacc

SEQ ID NO: 72898 - DNA, 80 bp, synthetic construct
  source 1..80: mol_type = other DNA
ttgcatcactcagtattttgtcagacccaatcagctccaactctactgactcgcccagcaccatagggtccaccatgtag

SEQ ID NO: 72899 - DNA, 80 bp, synthetic construct
  source 1..80: mol_type = other DNA
tcctcaaactcatcggatctgataaggaaaacataatccttagacttgaacactgagtctgttcttaagaggcacaagca

SEQ ID NO: 72900 - DNA, 80 bp, synthetic construct
  source 1..80: mol_type = other DNA
ttcatccaaaagccttctatccacttcacccttgaagaggtaggtgcacgacaggaactctgccaaagcttggccaagta

SEQ ID NO: 72901 - DNA, 80 bp, synthetic construct
  source 1..80: mol_type = other DNA
acttgcacttaactataaataacaatgaaaatttccttaaacaatcagtgttgttctggttatgtgtgaaatccacagag

SEQ ID NO: 72902 - DNA, 80 bp, synthetic construct
  source 1..80: mol_type = other DNA
attgtgaattccataataccatcagtgtagttgagagtgtagtcccacaaatcctttaatgcgcgaaaagaccctgggtt

SEQ ID NO: 72903 - DNA, 80 bp, synthetic construct
  source 1..80: mol_type = other DNA
taccaacccctgcctgatcaacatagcagcagtgcagacaacctctcccaatcgataagagaaccaaccgaacccgaatt

SEQ ID NO: 72904 - DNA, 80 bp, synthetic construct
  source 1..80: mol_type = other DNA
gaaggtcagtcttaaacataggtctctcaatgtttttattaaccaccttcagcacaaaggactgaaaaggtcccatagcc

SEQ ID NO: 72905 - DNA, 80 bp, synthetic construct
  source 1..80: mol_type = other DNA
ggcagaaatgctgccagacgctacatatttggggcctctcaactgcaagtcatgttggcaaaagttcgacagcctagtga

SEQ ID NO: 72906 - DNA, 80 bp, synthetic construct
  source 1..80: mol_type = other DNA
tctgcaccatcttcagagggcatcatatctctgtgaggaaaccatgaaaaattaccaagtgtcctcgatgttatgacaaa

SEQ ID NO: 72907 - DNA, 80 bp, synthetic construct
  source 1..80: mol_type = other DNA
ttctctaacaaatgattcaaagtacacctgcttcaaaaagttcttgcacacatctcttgtgctcacaaccaattcatcgg

SEQ ID NO: 72908 - DNA, 80 bp, synthetic construct
  source 1..80: mol_type = other DNA
taaggcttgaatcagaacgttgatgtgagtttacaaggtctgagaaaaggactgtgtagtgctcatctcttttccacttc

SEQ ID NO: 72909 - DNA, 80 bp, synthetic construct
  source 1..80: mol_type = other DNA
acaatatgtgatattagtgataatgattcagaatttatgtcaataagcacacaaaggtcaaggaactttattctagggct

SEQ ID NO: 72910 - DNA, 80 bp, synthetic construct
  source 1..80: mol_type = other DNA
ccatctcatgttcttagagctttggtcagacatgaatggcaaaagctgatcttcaaaaactttaggatacaatcttctga

SEQ ID NO: 72911 - DNA, 80 bp, synthetic construct
  source 1..80: mol_type = other DNA
ctgattgtattacatgattcaagttaatcttatcttcaagcagcctagaactttcaggctttcttgcaacataatcacag

SEQ ID NO: 72912 - DNA, 80 bp, synthetic construct
  source 1..80: mol_type = other DNA
ggatttagatgtttaagcactgtaccacttgtctttctcgcctcttgtggttcagccaagacccagacacccaattcaaa

SEQ ID NO: 72913 - DNA, 80 bp, synthetic construct
  source 1..80: mol_type = other DNA
ggaattactcagagaaacacatgtataatcccaaaggagcggtctcaacaggcttatgtgatcaggttgcgggtcggagt

SEQ ID NO: 72914 - DNA, 80 bp, synthetic construct
  source 1..80: mol_type = other DNA
attttgatctgtcacacacataaagtgttacatcatgacttgtgtgaactctcaccaccttatcatcttttgctaaatcc

SEQ ID NO: 72915 - DNA, 80 bp, synthetic construct
  source 1..80: mol_type = other DNA
tccaacactttcttgatgtacaagttttccctgttcctatttcttacacatctactccctagagttttgcagaggcctat

SEQ ID NO: 72916 - DNA, 80 bp, synthetic construct
  source 1..80: mol_type = other DNA
ggtgccatgatcattacctgtgcagacactgtctgaacctgctgctcacggtgtcagacaggtgccctctctgcaagtat

SEQ ID NO: 72917 - DNA, 80 bp, synthetic construct
  source 1..80: mol_type = other DNA
gaaacctgaagatatgcaactctgaaaggctgacttgtttatagcttctgacaagagcttctgcgcccctctggtgaact

SEQ ID NO: 72918 - DNA, 80 bp, synthetic construct
  source 1..80: mol_type = other DNA
tgctacaaagcttgttttgcaaagtcttgatcaaggaaggcaccctctcctcctgaaagttcattgttgatgggtacacc

SEQ ID NO: 72919 - DNA, 80 bp, synthetic construct
  source 1..80: mol_type = other DNA
actttttgtcttaaaaccatcctaatggggtacagctcattcaggtttagccagttaagattgaccaattcactcatatc

SEQ ID NO: 72920 - DNA, 80 bp, synthetic construct
  source 1..80: mol_type = other DNA
atcttctaagcccaacatttctgcaagctgcaagacggcttcccttttgtctctgttaaacaggtctaaaaagaactctt

SEQ ID NO: 72921 - DNA, 80 bp, synthetic construct
  source 1..80: mol_type = other DNA
cattaaactccccgtttttaagtttatgatgtaacagcctcaccaacttcctgatagtctttgtctcattggggcatagg

SEQ ID NO: 72922 - DNA, 80 bp, synthetic construct
  source 1..80: mol_type = other DNA
tcctcaattaacctttggaccctataccccctggagccatccaaccagtcttttacgtcagtgttggtattgaggaggaa

SEQ ID NO: 72923 - DNA, 80 bp, synthetic construct
  source 1..80: mol_type = other DNA
ggggtccataggaaaatttgcatattttaggagattcaatgtcctcatctgtatggtgttaactaaatggataggaacac

SEQ ID NO: 72924 - DNA, 80 bp, synthetic construct
  source 1..80: mol_type = other DNA
cattggcaacagcttggtctgcaattgtatctattgtttcacagagttggtgaggttctttacacttcacattatgcaat

SEQ ID NO: 72925 - DNA, 80 bp, synthetic construct
  source 1..80: mol_type = other DNA
gcagctgatacaaacttagtaagcagtggaacctcttctccccacacataaaaccttgacttaaactctgctgcgaaccg

SEQ ID NO: 72926 - DNA, 80 bp, synthetic construct
  source 1..80: mol_type = other DNA
acccactacacttttggggcttataaatttattcagaaggccgctcaagtgagagtggaattctagtaagataagaattt

SEQ ID NO: 72927 - DNA, 80 bp, synthetic construct
  source 1..80: mol_type = other DNA
ccactgccaacaagactcaaagtgtcaaccgctccaagctctcctcctccctaccaagagtaaagggcagcccacaggag

SEQ ID NO: 72928 - DNA, 80 bp, synthetic construct
  source 1..80: mol_type = other DNA
cttctggatgactgtccaccatttcacttagcttcttatcgaacagtgtgatttgatcatcacttgaagtgtatgcttct

SEQ ID NO: 72929 - DNA, 80 bp, synthetic construct
  source 1..80: mol_type = other DNA
ggtctttcaccaaaaattacaccaatacaataattaataaatctttcagtaaccagcccataaaaatcggaagcattatg

SEQ ID NO: 72930 - DNA, 80 bp, synthetic construct
  source 1..80: mol_type = other DNA
gaggatcccttgtcccatatcaataagactagatatgtgagatggcacaatgcctcgttcaaaatagtttctgaagatct

SEQ ID NO: 72931 - DNA, 80 bp, synthetic construct
  source 1..80: mol_type = other DNA
cctctgtcacggttgtttgtgaacccctcaagagcttcaacttagccttcacataagacttcatcaacgcgctgacaaca

SEQ ID NO: 72932 - DNA, 80 bp, synthetic construct
  source 1..80: mol_type = other DNA
ggaaagggaacttcaacgagcttatgcatgtgccacgtcagtaaagtgctaacatgatctttcccagacctcacgtattg

SEQ ID NO: 72933 - DNA, 80 bp, synthetic construct
  source 1..80: mol_type = other DNA
atcatcacctaatcgaagattctgcagcaacattaaaaacaggaaagggcacatcattgggccccacttgctgtgatcca

SEQ ID NO: 72934 - DNA, 80 bp, synthetic construct
  source 1..80: mol_type = other DNA
agctataattgaggagtccctctcttacatttatagtcattgatagtattgcattctcgaattctttttcattatttaaa

SEQ ID NO: 72935 - DNA, 80 bp, synthetic construct
  source 1..80: mol_type = other DNA
catgaacctgagaaaaaacttgtgaaagactcaaaataatcttctacaagtcttgtaaacatcttagttctcagatcacc

SEQ ID NO: 72936 - DNA, 80 bp, synthetic construct
  source 1..80: mol_type = other DNA
aatataaagctccctgtttccaccaacctgctctttgtaagaaagcgcaaatttcaatcttccagaatccgggcccactg

SEQ ID NO: 72937 - DNA, 80 bp, synthetic construct
  source 1..80: mol_type = other DNA
aagtgtaagacgtcggagactcctctgaatagaaacataagttttttagggctgcactcatacattttgtcaacgataag

SEQ ID NO: 72938 - DNA, 80 bp, synthetic construct
  source 1..80: mol_type = other DNA
gagaggagaagacccaccacacacaaacacacacagacacccaaacccacacacagggccacagccccagccagcccagc

SEQ ID NO: 72939 - DNA, 80 bp, synthetic construct
  source 1..80: mol_type = other DNA
gccttactaagtgattctgaattgctttctctctcactaatcctgacttcatcttctaacttgtcccagtcaaacttaaa

SEQ ID NO: 72940 - DNA, 80 bp, synthetic construct
  source 1..80: mol_type = other DNA
gttcagaccctgtctttgaacatgcctgtatttgcctgagtatgagttggcattcatttgtaagagtaccattttcatac

SEQ ID NO: 72941 - DNA, 80 bp, synthetic construct
  source 1..80: mol_type = other DNA
aagaaaaccaatcttcttctgaaaagaactttctactgaggtttttggccatttcatcaaggccacactgttccttaaca

SEQ ID NO: 72942 - DNA, 80 bp, synthetic construct
  source 1..80: mol_type = other DNA
tgctgagtgaagtaaatcgcagacaaatttgagtttccttcaaccgcctcacacacatgtctcatctcttcaagtgtcaa

SEQ ID NO: 72943 - DNA, 80 bp, synthetic construct
  source 1..80: mol_type = other DNA
acatgaagggtcaaaatcttcaaccaagtggaatgatatttctgacaaaatcaatttcctcaaatgagcaaggttcccag

SEQ ID NO: 72944 - DNA, 80 bp, synthetic construct
  source 1..80: mol_type = other DNA
tgagggctatctgcaagtggtgcaatccttttgcatcctcaactcctttagaaccttgatgttgtgctatagctgaacta

SEQ ID NO: 72945 - DNA, 80 bp, synthetic construct
  source 1..80: mol_type = other DNA
ccaaacccacacacagggccacagccccagccagcccagcggcccacaggggcgcaggcccaaacagacccacacacaca

SEQ ID NO: 72946 - DNA, 80 bp, synthetic construct
  source 1..80: mol_type = other DNA
ctcttgtaagacgcaatcgtagcattcactctgctttctaactctttaaaaaagttggactcttctacaccctcaaagtg

SEQ ID NO: 72947 - DNA, 80 bp, synthetic construct
  source 1..80: mol_type = other DNA
ggcttgttcaaggctggcattttctttctttgagtgtgcctcagaacccaagaccaacttagagactaacttagaaactt

SEQ ID NO: 72948 - DNA, 80 bp, synthetic construct
  source 1..80: mol_type = other DNA
tgtattcataatcagagtggctcagtttgtacttttgttttctaacaaacccttctgttatttgactaactgcactaaca

SEQ ID NO: 72949 - DNA, 80 bp, synthetic construct
  source 1..80: mol_type = other DNA
agcaacttgttgaaatcatattctaacagacgttctccgttgaggtgcttgtttacaacaacactcttattactcgcaag

SEQ ID NO: 72950 - DNA, 80 bp, synthetic construct
  source 1..80: mol_type = other DNA
ggcccacagaggcgcaggcccaaacagacccacacacacagggcccccctcgggtggccccccccccgggttggcgcccc

SEQ ID NO: 72951 - DNA, 80 bp, synthetic construct
  source 1..80: mol_type = other DNA
gtctagtgcagtagcacagcctgaatttgtcatagggtctaagctgttgagccttttctctcccttataaataagtgtcc

SEQ ID NO: 72952 - DNA, 80 bp, synthetic construct
  source 1..80: mol_type = other DNA
cgttgttgaatgatgataccatgaggctaaaagcttctaaattcacacctggaaccactgcttgacaatctatctctttg

SEQ ID NO: 72953 - DNA, 80 bp, synthetic construct
  source 1..80: mol_type = other DNA
ctaacaaattttctcatctgctcgttgaaaacgtcttcttcctcaggtgtgattgtctcttttggattaacaaagaaccc

SEQ ID NO: 72954 - DNA, 80 bp, synthetic construct
  source 1..80: mol_type = other DNA
aaactgacttttgggttcaaagaacttttcaaaacactttatctgatcggtaagcctgtctggtgtctctttggttatca

SEQ ID NO: 72955 - DNA, 80 bp, synthetic construct
  source 1..80: mol_type = other DNA
agtgacataagtatgatatgttcaacatgaatttgaacttcgcactcaaaagaattttactaccagagttaaagagtgtt

SEQ ID NO: 72956 - DNA, 80 bp, synthetic construct
  source 1..80: mol_type = other DNA
tgttgaggaaaagtcagatacaatagccatcaccaaataccttatgttttgaacctgcttctggttcctctttgttggat

SEQ ID NO: 72957 - DNA, 80 bp, synthetic construct
  source 1..80: mol_type = other DNA
tggtaagcagtaatagtattaatgttcttagtgtaagctcaatgtccgtaatgtgatcaacaaggtctggacacgatcga

SEQ ID NO: 72958 - DNA, 80 bp, synthetic construct
  source 1..80: mol_type = other DNA
atccaagaaatcatgacatcaaccatattgaacagcacttcatgagaaaatatgggcagaaagaatctctttgggtctgc

SEQ ID NO: 72959 - DNA, 80 bp, synthetic construct
  source 1..80: mol_type = other DNA
ataaaacgatattaggtgaccttcagagccttgaatagaatagcatctcgatgactcacctgtcttctgatacaacaaat

SEQ ID NO: 72960 - DNA, 80 bp, synthetic construct
  source 1..80: mol_type = other DNA
cccggggggcgcgtggcgtccccgggaccgctcactcgatgtcctggatctgtgggacagccagccagtcctcgcaggat

SEQ ID NO: 72961 - DNA, 80 bp, synthetic construct
  source 1..80: mol_type = other DNA
ggtactcctcatcatcaaactttatgacctgagaaaagacctctttgcattccaccacttggtatctaatggaccccatt

SEQ ID NO: 72962 - DNA, 80 bp, synthetic construct
  source 1..80: mol_type = other DNA
tgattctgtctcaacctggctactgagcttgttttcatactatttgtcaaggctaaacaaacagatgataacttcttcag

SEQ ID NO: 72963 - DNA, 80 bp, synthetic construct
  source 1..80: mol_type = other DNA
gctcccaatgctcctcaaacactccacatctgcttcaaaactgtagtcctcaaattttgtgtaatacatgagcgggtggt

SEQ ID NO: 72964 - DNA, 80 bp, synthetic construct
  source 1..80: mol_type = other DNA
tcccagcctttctgaatctctcaaattcgtccaatgaaatctgacattcagttgtcagatctttagaaaggccgtagtgt

SEQ ID NO: 72965 - DNA, 80 bp, synthetic construct
  source 1..80: mol_type = other DNA
tcaaagtttaggcccacagctgatagacacttactgatcttagtgacaaattcgaagaaaaactttttaaataaatcatc

SEQ ID NO: 72966 - DNA, 80 bp, synthetic construct
  source 1..80: mol_type = other DNA
taaagtggtacctttatttgtttttgatctcttcctgttccttaaaagcttcacaaactcgtcctttgtactgcagtaac

SEQ ID NO: 72967 - DNA, 80 bp, synthetic construct
  source 1..80: mol_type = other DNA
tcaccaatctgtcattcacactgttgtaacagcaccccacccagtgattgtcatttgtgactcctcccgagctttctagc

SEQ ID NO: 72968 - DNA, 80 bp, synthetic construct
  source 1..80: mol_type = other DNA
ttgatgagagcagaaaggcataagacatccagattcaacagctgccttctcctggtgtttaaaagtttcagacttttaac

SEQ ID NO: 72969 - DNA, 80 bp, synthetic construct
  source 1..80: mol_type = other DNA
tttgttcaatactgataggagtctctcatacaccgtgtttttgtttatgagtcttctatgccctattgtggttgaggcaa

SEQ ID NO: 72970 - DNA, 80 bp, synthetic construct
  source 1..80: mol_type = other DNA
taaacctcattaaagggcaagatttagtagcttccttacataatgtcctgatgtccacctctgttggcatagtttcataa

SEQ ID NO: 72971 - DNA, 80 bp, synthetic construct
  source 1..80: mol_type = other DNA
ctccccttgagcctgaaccttccccctgttgtctcatacataattgtttgctttgacttactataacaaagtctgcaatc

SEQ ID NO: 72972 - DNA, 80 bp, synthetic construct
  source 1..80: mol_type = other DNA
agattcgagaactctccaattaactcattaggacccaccttcctaaaattcttcttcagctttccagcttcaaagtctct

SEQ ID NO: 72973 - DNA, 80 bp, synthetic construct
  source 1..80: mol_type = other DNA
cctaaacctgctaaacaaggaattgatccccaagacaacctcatcactactcatgccagggttgacgccatcatgacaca

SEQ ID NO: 72974 - DNA, 80 bp, synthetic construct
  source 1..80: mol_type = other DNA
ttctcatgatctcctcattgtgagttgaccttgcatcctttaggatcttcattgagtccatacctgatcttttgtccaca

SEQ ID NO: 72975 - DNA, 80 bp, synthetic construct
  source 1..80: mol_type = other DNA
gtagtcttgagtgactcacaaagtcggaaatactctgattcctcaaatactttttcatcctgacttgaaaactcaagtaa

SEQ ID NO: 72976 - DNA, 80 bp, synthetic construct
  source 1..80: mol_type = other DNA
tttgaacaagagatctctgaacttgaagttcacccagtccggcataaaactattgtcataagtgcagcgaccatccacta

SEQ ID NO: 72977 - DNA, 80 bp, synthetic construct
  source 1..80: mol_type = other DNA
tgggcacaagtgttatacctgaaactgcaaggtcttcctttatacttgacagcttgttggtatcctcaataaactttttt

SEQ ID NO: 72978 - DNA, 80 bp, synthetic construct
  source 1..80: mol_type = other DNA
tcaaagtttgcaggactgcttctaacaaaacactcaagaagtattaacgtgttatcaatcaacttgtatccgtctggaac

SEQ ID NO: 72979 - DNA, 80 bp, synthetic construct
  source 1..80: mol_type = other DNA
aatgagaggtagacctgggcagacgacccctgattctatcaagatggtttcaacagatttgtcttcatagttgtgaaggc

SEQ ID NO: 72980 - DNA, 80 bp, synthetic construct
  source 1..80: mol_type = other DNA
agccactcttgtctgcgctgtccacttctatgcatcgagacagaagctttagaccttcaatcagaactaatctgggctct

SEQ ID NO: 72981 - DNA, 80 bp, synthetic construct
  source 1..80: mol_type = other DNA
ctttgaccaaggaagttgagtttctgtctcgacaaacgttcatcttgctcgatgtagtttaaacacaggcttctgagctc

SEQ ID NO: 72982 - DNA, 80 bp, synthetic construct
  source 1..80: mol_type = other DNA
atgtagtttaaacacaggcttctgagctctgttatgatttcttccattgcgcatcaaaatagcctaggatccactgtgcg

SEQ ID NO: 72983 - DNA, 80 bp, synthetic construct
  source 1..80: mol_type = other DNA
tttgaatgaaaaccaatcaggaacactcatcaatggctgcaggagcactgatttgggaatatgtaattcctggagaataa

SEQ ID NO: 72984 - DNA, 80 bp, synthetic construct
  source 1..80: mol_type = other DNA
aattaacgacccagggctgagagaaccatggggcaagcaagatcaaagagttcgaaggaggtccctgacaacatggacag

SEQ ID NO: 72985 - DNA, 80 bp, synthetic construct
  source 1..80: mol_type = other DNA
cgtccaactgtgaattcatgaggtgttcacctgttctatacctgtgcaaaaacaagtgggataggacctcatcaaatctt

SEQ ID NO: 72986 - DNA, 80 bp, synthetic construct
  source 1..80: mol_type = other DNA
aaatatccctcaagctcagcaatgaagacctttaaatctttggtctctaagttcaccataatgttttgaacacagttcct

SEQ ID NO: 72987 - DNA, 80 bp, synthetic construct
  source 1..80: mol_type = other DNA
tccttcataaagaacgccagatctcacagtgagcggcacaggctcccattcaggacccactctgttaaaatcatgggatc

SEQ ID NO: 72988 - DNA, 80 bp, synthetic construct
  source 1..80: mol_type = other DNA
gggaccgctcactcgatgtcctggatctgtgggacagccagccagtcctcgcaggatctccccttgagcctgaaccttcc

SEQ ID NO: 72989 - DNA, 80 bp, synthetic construct
  source 1..80: mol_type = other DNA
cgcacagtggatcctaggcattttgttgcgctattttatagtgcagatttctcttgtaggaccatcataaacaagccaag

SEQ ID NO: 72990 - DNA, 80 bp, synthetic construct
  source 1..80: mol_type = other DNA
tcaaggggtcctccatgtagtcctcaaattcttcagacctaatgtcgaaaacaccatcatttaccttgaagatagggtct

SEQ ID NO: 72991 - DNA, 80 bp, synthetic construct
  source 1..80: mol_type = other DNA
gttctcaataagtggaggcactcatctaacaatctcctgtccacttcgcctttaaaaaggtgagaacaagataagaactt

SEQ ID NO: 72992 - DNA, 80 bp, synthetic construct
  source 1..80: mol_type = other DNA
agccacacctgggctttgcaattgacatcttaccaaaaaaatcaatgaaaactttctcaagcaatcagtattgttctgat

SEQ ID NO: 72993 - DNA, 80 bp, synthetic construct
  source 1..80: mol_type = other DNA
tgtgtgtgaagtccactgtgactgaaaactccaacactccctttgtgttgtttatcatgtagtcccacaaatctcttaaa

SEQ ID NO: 72994 - DNA, 80 bp, synthetic construct
  source 1..80: mol_type = other DNA
gatttgaatgctttcggattcaccaaaccctgtttgattagcatagctgcattgcacacaatgtcccctaagcgataaga

SEQ ID NO: 72995 - DNA, 80 bp, synthetic construct
  source 1..80: mol_type = other DNA
gaaccatccgaagccaaactgcaaatcgttcctaaacataggcctttccacatttttgttcaccactttcaagatgaatg

SEQ ID NO: 72996 - DNA, 80 bp, synthetic construct
  source 1..80: mol_type = other DNA
actgaaagggccccaatgcttcagcaccatcttcagatggcatcatgtctttgtgagggaaccatgagaaacttcctaga

SEQ ID NO: 72997 - DNA, 80 bp, synthetic construct
  source 1..80: mol_type = other DNA
cacctaccttggccctctgaactgcaagtcatgctggcaaagatttgatagtttggttagatgccatgaccactatctct

SEQ ID NO: 72998 - DNA, 80 bp, synthetic construct
  source 1..80: mol_type = other DNA
gtcctggctgttgcaacaaattctcgtacaaaggactcgaaatagacctgttttaaaaagttcttgcagacatcccttgt

SEQ ID NO: 72999 - DNA, 80 bp, synthetic construct
  source 1..80: mol_type = other DNA
gctaacaacaaattcatcaaccaagcttgaatcggaacgttgatgagaacttacaaggtcagaaaataaaacagtgtagt

SEQ ID NO: 73000 - DNA, 80 bp, synthetic construct
  source 1..80: mol_type = other DNA
gttcatccctcttccacttaacaacatgagatatgagtgatagggattctgagttgatatcaattagtacacagagatca

SEQ ID NO: 73001 - DNA, 80 bp, synthetic construct
  source 1..80: mol_type = other DNA
aggaacttgatcctggggctccacctcatattttttgaactcatatcagacataaaaggaagtagctggtcctcatagat

SEQ ID NO: 73002 - DNA, 80 bp, synthetic construct
  source 1..80: mol_type = other DNA
tctgggatacaaacgccttacagattgaattacatggtttaaacttattttatcctccagtagccttgaactctcaggtt

SEQ ID NO: 73003 - DNA, 80 bp, synthetic construct
  source 1..80: mol_type = other DNA
tccttgctacataatcacatggatttaagtgcttaaggcttaaacttacttcattctttccctttataggttctgctaag

SEQ ID NO: 73004 - DNA, 80 bp, synthetic construct
  source 1..80: mol_type = other DNA
acccaaacacccaactcaaatgaattactaagtgaagtgcaaatataatcccaaagaaggggcctcaaaagactaacatg

SEQ ID NO: 73005 - DNA, 80 bp, synthetic construct
  source 1..80: mol_type = other DNA
gctcatccatagctagatcttcaagcacctttctgatgtacagattctctctgcttttatttctcacacatctactcccc

SEQ ID NO: 73006 - DNA, 80 bp, synthetic construct
  source 1..80: mol_type = other DNA
aaagtcttacaaaggcctataaagcctgatgaaatacagctctgaaaagctgatttgttgattgcttctgataacaactt

SEQ ID NO: 73007 - DNA, 80 bp, synthetic construct
  source 1..80: mol_type = other DNA
gcagacactgtctaaatctcctgctgtcagtctctgacagatgccctctctgcaaacatccactgccgaccaaactgcgg

SEQ ID NO: 73008 - DNA, 80 bp, synthetic construct
  source 1..80: mol_type = other DNA
ttgtgcacctcttgtgaacttactgcagagcttattttgtaatgtcttgatcaacgaagggattttctcttcttggaaag

SEQ ID NO: 73009 - DNA, 80 bp, synthetic construct
  source 1..80: mol_type = other DNA
tcatcactgacgggtataccactttctgcctcaaaaccattctcaatgggaacatctcatttaaatttaaccaattgatg

SEQ ID NO: 73010 - DNA, 80 bp, synthetic construct
  source 1..80: mol_type = other DNA
tttgccaactggtccatatcctcctcaaaaccaaggatgtctcccaactgaaggatggcttctttcttgtctctattgaa

SEQ ID NO: 73011 - DNA, 80 bp, synthetic construct
  source 1..80: mol_type = other DNA
aaggtctaagaagaattcctcgttaaactcaccattcttgagtttatgatgtaatcttctcacaagttttctcaccacct

SEQ ID NO: 73012 - DNA, 80 bp, synthetic construct
  source 1..80: mol_type = other DNA
ttgtctcattaggacataactcttcaatgagcctttgaattctataacctctggagccatctagccagtccttaacatca

SEQ ID NO: 73013 - DNA, 80 bp, synthetic construct
  source 1..80: mol_type = other DNA
gtattggtgtttagtaaaaatggatccaaaggaaagttagcgtatctcaagaggtccaatgtcctcctctggatgcagtt

SEQ ID NO: 73014 - DNA, 80 bp, synthetic construct
  source 1..80: mol_type = other DNA
tactaacgaaaccggaacaccattcgcaatggcttgatcagcaatcgtgtctattgtctcacagagttggtgtggctcct

SEQ ID NO: 73015 - DNA, 80 bp, synthetic construct
  source 1..80: mol_type = other DNA
tgcacttaacattatgcaatgctgctgacacaaactttgtgaggagcgggacctcttccccccacacataaaatctagat

SEQ ID NO: 73016 - DNA, 80 bp, synthetic construct
  source 1..80: mol_type = other DNA
ttaaattctgcagcaaaccgccccaccacactctttggactgatgaacttattcagcaaaccactcaaatgagaatgaaa

SEQ ID NO: 73017 - DNA, 80 bp, synthetic construct
  source 1..80: mol_type = other DNA
ctctagcaggacaagaacttcttctgggtcactgtcaactaattcactaattctcttgtcaaacaaggtgatctgatcgt

SEQ ID NO: 73018 - DNA, 80 bp, synthetic construct
  source 1..80: mol_type = other DNA
gtgtcaacagctccgagctcacctcccccctacgaggagtgacacaagagacccacacgcagaccaacacacacacaccc

SEQ ID NO: 73019 - DNA, 80 bp, synthetic construct
  source 1..80: mol_type = other DNA
cacttgatgtgtaagactctggcctttcaccaaaaataacaccaatacaataattaatgaacctctcactgattaagccg

SEQ ID NO: 73020 - DNA, 80 bp, synthetic construct
  source 1..80: mol_type = other DNA
taaaaatcagaagcattgtgcaagattccctgtcccatgtcaatgaggctacttatgtgagaaggcactatccctaattc

SEQ ID NO: 73021 - DNA, 80 bp, synthetic construct
  source 1..80: mol_type = other DNA
aaaatattctcgaaagattctttcagtgatggttgtttctgaccccctgagaagtttcagttttgatttaacatatgact

SEQ ID NO: 73022 - DNA, 80 bp, synthetic construct
  source 1..80: mol_type = other DNA
tcatcattgcattcacaacagggaaaggaacctcaacaagtttatgcatgtgccaggttagcaaggtactaacatgatcc

SEQ ID NO: 73023 - DNA, 80 bp, synthetic construct
  source 1..80: mol_type = other DNA
ttcccagaacgcacatactgatcatcacccagcttaagattctgaaggagcatcagaaataaaaatgggcacatcatcgg

SEQ ID NO: 73024 - DNA, 80 bp, synthetic construct
  source 1..80: mol_type = other DNA
tgacacaagagacccacacgcagaccaacacacacacacccagcacccctcacagaacacgaacacaaacacccaaacac

SEQ ID NO: 73025 - DNA, 80 bp, synthetic construct
  source 1..80: mol_type = other DNA
cccccacttgctatgatccatactgtagttcaataacccttctcgtacattgatagtcatagataggatcgcattttcaa

SEQ ID NO: 73026 - DNA, 80 bp, synthetic construct
  source 1..80: mol_type = other DNA
actctttgtcattgttcaaacatgaacccgagaaaaagctggaaaaggattcaaaataatcctctattagccttgtaaac

SEQ ID NO: 73027 - DNA, 80 bp, synthetic construct
  source 1..80: mol_type = other DNA
atttttgttcttaagtccccaatatagagttccctatttcctcccacttgctccttgtatgacaatgcaaacttcagcct

SEQ ID NO: 73028 - DNA, 80 bp, synthetic construct
  source 1..80: mol_type = other DNA
aggacgttggtgattcctctgaataaaagcacagattttttaaagcagcactcatacattttgtcattgataaagcttta

SEQ ID NO: 73029 - DNA, 80 bp, synthetic construct
  source 1..80: mol_type = other DNA
cttagagactcagaattgctttccctttcactaattctcacgtcttcttctaatttatcccagtcaaatttgaaattaag

SEQ ID NO: 73030 - DNA, 80 bp, synthetic construct
  source 1..80: mol_type = other DNA
agcacccctcacagaacacgaacacaaacacccaaacacacacccacacccacacgcccccaaccagggaggcgcccccc

SEQ ID NO: 73031 - DNA, 80 bp, synthetic construct
  source 1..80: mol_type = other DNA
gccctgcctctgcatgtgtctatacttccctgagtatgcatttgcattcatttgtaacagaatcatcttcatgcacgaaa

SEQ ID NO: 73032 - DNA, 80 bp, synthetic construct
  source 1..80: mol_type = other DNA
accaatcactttctgaaaagaatttcctacaaagattttgtgccatctcatcaagaccacattgccccttgactgtagaa

SEQ ID NO: 73033 - DNA, 80 bp, synthetic construct
  source 1..80: mol_type = other DNA
gtgaagtacaatggtgacagttctgcagaagattcaacagcctcacagataaacctcatatcatcattggtgagacagga

SEQ ID NO: 73034 - DNA, 80 bp, synthetic construct
  source 1..80: mol_type = other DNA
tgggtcaaaatcttctactaggtgaaaagaaatttctgataaaatgacctttctcaaataagccattttgcctgataata

SEQ ID NO: 73035 - DNA, 80 bp, synthetic construct
  source 1..80: mol_type = other DNA
tagtctgaaggtgatgtaatccccttgcatttttaagccccacctcatcctccccttcacagacctttttagtcctttca

SEQ ID NO: 73036 - DNA, 80 bp, synthetic construct
  source 1..80: mol_type = other DNA
caccgaaccaccatccaatttccctgcttctgtctctttggaacccatgaccaatctagatactaactttgaaactttgt

SEQ ID NO: 73037 - DNA, 80 bp, synthetic construct
  source 1..80: mol_type = other DNA
actcataatctaaatggttcaacttgtacttctgctttctcatgaagccttctgtaatctgacttacagcactaacgagt

SEQ ID NO: 73038 - DNA, 80 bp, synthetic construct
  source 1..80: mol_type = other DNA
aacttattgaaatcatattctagaagccgttctccatttagatgcttatttacaaccacacttttgttgctggcaaggtc

SEQ ID NO: 73039 - DNA, 80 bp, synthetic construct
  source 1..80: mol_type = other DNA
taatgctgtcgcacacccagagttagtcatggggtccaggctattgagcctcttctccccttttaaaattaaagtgccat

SEQ ID NO: 73040 - DNA, 80 bp, synthetic construct
  source 1..80: mol_type = other DNA
ccggggtgcggcccccccgggtgcccgggcggagccccacggggagacccatcactcgatctcctgcaccatcatcccag

SEQ ID NO: 73041 - DNA, 80 bp, synthetic construct
  source 1..80: mol_type = other DNA
tgttgaacgaggacaccatcatgctaaaggcctctaagttaacacctggggttgcacgctgacagtttatttctttccca

SEQ ID NO: 73042 - DNA, 80 bp, synthetic construct
  source 1..80: mol_type = other DNA
gtgaatttcttcatttgttcataaaaaatgcactcttcctcgggggtaattgattctttagggtttacaaagaaaccaaa

SEQ ID NO: 73043 - DNA, 80 bp, synthetic construct
  source 1..80: mol_type = other DNA
tgattaaatgacaaaaatatgacacatttaacataaacttaaacctcgcacttaatagcactctttcacttgtcttaaaa

SEQ ID NO: 73044 - DNA, 80 bp, synthetic construct
  source 1..80: mol_type = other DNA
atggttttaaccaaaaaccttaacaatttatacaccactttctcagcaggtgtaattaaattctccttcaacttgtccat

SEQ ID NO: 73045 - DNA, 80 bp, synthetic construct
  source 1..80: mol_type = other DNA
caatgatgtggacgaaaaatctgagacaatagccatcaccaaatacctaatgttttgaacctgtttttgatttctttttg

SEQ ID NO: 73046 - DNA, 80 bp, synthetic construct
  source 1..80: mol_type = other DNA
ccatcactcgatctcctccaccatcatcccagccagccaatcctcacaagacttccccttgagtctgaacctacctccaa

SEQ ID NO: 73047 - DNA, 80 bp, synthetic construct
  source 1..80: mol_type = other DNA
ttgggttggtgagcatgagcaacagtagagttcttaatgcagtttcaatatcagcgatataatccttcaagtcaggacat

SEQ ID NO: 73048 - DNA, 80 bp, synthetic construct
  source 1..80: mol_type = other DNA
gatctgatccatgaaatcatagtgttaatcatgctatgcaacacttcatctgaaaaaattggtaaaaagaacctctttgg

SEQ ID NO: 73049 - DNA, 80 bp, synthetic construct
  source 1..80: mol_type = other DNA
atctgcataaaaggaaatcaagtgaccactagggccttgtatggaataacaccttgaagattctccagtcttttggtata

SEQ ID NO: 73050 - DNA, 80 bp, synthetic construct
  source 1..80: mol_type = other DNA
gcaagtgatactcctcaaagtccaatttcatcacttgacaaaaaacctccttgcattccaccacttgatatcttacagag

SEQ ID NO: 73051 - DNA, 80 bp, synthetic construct
  source 1..80: mol_type = other DNA
ccagccaatcctcacaagacttccccttgagtctgaacctacctccaactgtctcatacattattgtgttttttgatttg

SEQ ID NO: 73052 - DNA, 80 bp, synthetic construct
  source 1..80: mol_type = other DNA
cccaattggttttgtctcaatctggcaactgagcttgtcttcatgctgtttgtcaaagccagacaaacagatgacagttt

SEQ ID NO: 73053 - DNA, 80 bp, synthetic construct
  source 1..80: mol_type = other DNA
cctcaaactttgtacactttttaattgctctgtgttgggctgaaaattgtaatcttcaaactttgtgtaatacattatag

SEQ ID NO: 73054 - DNA, 80 bp, synthetic construct
  source 1..80: mol_type = other DNA
gatgagttcctggcctcataaagccctcgaactcaatgaatggtatatgacattcatgcttgaggagctcggacagtcca

SEQ ID NO: 73055 - DNA, 80 bp, synthetic construct
  source 1..80: mol_type = other DNA
tagtgctcaaagctaagccccaccattgataggcatctccggatttttatgatgaattcattaatagatgtttcaaacaa

SEQ ID NO: 73056 - DNA, 80 bp, synthetic construct
  source 1..80: mol_type = other DNA
atcctcaagcgacactcttctacatgcccttgactttcttctgttccttaggagcctgacgaactcctccttagtgctgt

SEQ ID NO: 73057 - DNA, 80 bp, synthetic construct
  source 1..80: mol_type = other DNA
gaaagctcactagcctatcattcacactgctgtaacaacaaccaacccagtgcttatcgttttctgacctcttggatttg

SEQ ID NO: 73058 - DNA, 80 bp, synthetic construct
  source 1..80: mol_type = other DNA
gactgtttaatcaatgaagaaaggcacaaaacatctaaattcagtaattgtctccttctggtgtttaacagttttaaact

SEQ ID NO: 73059 - DNA, 80 bp, synthetic construct
  source 1..80: mol_type = other DNA
tttgactttatttaacatagagaggagcctctcgtactcagtgctaacgtcgttccctctctcataaccatgagtttctg

SEQ ID NO: 73060 - DNA, 80 bp, synthetic construct
  source 1..80: mol_type = other DNA
ctgttataaacctcatcaagggacaggattcaactgcttctctactcaatgttgaaatgtcatcattgtcatcgagggtc

SEQ ID NO: 73061 - DNA, 80 bp, synthetic construct
  source 1..80: mol_type = other DNA
tcataaagttcagagtattccttaatcagaccctctgggttgaccttctgaaagtttctctcaagtttcccattctctaa

SEQ ID NO: 73062 - DNA, 80 bp, synthetic construct
  source 1..80: mol_type = other DNA
ctaaagcagagtctacagtccttgaaggtgaaccagtctggcacagacgacaatggtactaacagaacagatctgtctat

SEQ ID NO: 73063 - DNA, 80 bp, synthetic construct
  source 1..80: mol_type = other DNA
atctcttctaaatctactaaaaagagagttgatgccaaagaccacatcatcacaactcatatttgggttaacaccatcat

SEQ ID NO: 73064 - DNA, 80 bp, synthetic construct
  source 1..80: mol_type = other DNA
tcaatagtggttttgagagactcacaaagtctaaaatattcagattcctcaaagactttctcatcctgactagagtactc

SEQ ID NO: 73065 - DNA, 80 bp, synthetic construct
  source 1..80: mol_type = other DNA
taaaagtttaaacagaaggtccctaaacttaaagtttacccactctggcatgaaactgttgtcatagtcacatcgaccat

SEQ ID NO: 73066 - DNA, 80 bp, synthetic construct
  source 1..80: mol_type = other DNA
ccactatgggaactagtgtaatgcctgcaatggcaagatcttctttgatgcacgccagcttgttagtgtcctctataaat

SEQ ID NO: 73067 - DNA, 80 bp, synthetic construct
  source 1..80: mol_type = other DNA
ttcttttcaaaactagctggtgtgcttctaacgaagcattcaaggaggatgagagaattgtcaattagcttgtagccatc

SEQ ID NO: 73068 - DNA, 80 bp, synthetic construct
  source 1..80: mol_type = other DNA
tggaatgatcaatggcagtcccgggcatacgattccagactctactaatattgcctcaacagatttgtcatcatgattgt

SEQ ID NO: 73069 - DNA, 80 bp, synthetic construct
  source 1..80: mol_type = other DNA
gtgtgcaaccacacttgtcagcgctgtctatttctatgcaacgtgacagaagttttagtccttcaattaacaccatcctg

SEQ ID NO: 73070 - DNA, 80 bp, synthetic construct
  source 1..80: mol_type = other DNA
ggttctcgttgccctagaaagttgagtttctgcctcgataatctttcgtcctgttctatgtagtttaagcacaactctct

SEQ ID NO: 73071 - DNA, 80 bp, synthetic construct
  source 1..80: mol_type = other DNA
atgtagtttaagcacaactctctcagctctgaaatagtttcttccattgcgcattaaaaagcctaggaatccactgtgcg

SEQ ID NO: 73072 - DNA, 80 bp, synthetic construct
  source 1..80: mol_type = other DNA
gcacaactcttgcaaaattgtgcttatttccgacccctgtagatgctcaccagttctaaatcgatgtagtagaagacttc

SEQ ID NO: 73073 - DNA, 80 bp, synthetic construct
  source 1..80: mol_type = other DNA
ccatcacccatgggccaaggcaagtccaagatggagagggacagcagcaacatgaacagggctgagattctgccggacac

SEQ ID NO: 73074 - DNA, 80 bp, synthetic construct
  source 1..80: mol_type = other DNA
cgaggacgtcaccgattttctcatagccttcaagctctgccaaaaaaactctcatatccttagtctccaatttcacaacg

SEQ ID NO: 73075 - DNA, 80 bp, synthetic construct
  source 1..80: mol_type = other DNA
atgttttggacaaggttccttccctcaaagagagcacccgtcttcacagtcagaggcacaggctcccattcaggcccaat

SEQ ID NO: 73076 - DNA, 80 bp, synthetic construct
  source 1..80: mol_type = other DNA
tctctcaaaatcaagggacttgatcccgtccagtatttttctggagcctgttaactcaagctcaagagagtctccgagta

SEQ ID NO: 73077 - DNA, 80 bp, synthetic construct
  source 1..80: mol_type = other DNA
cgcaccggggatcctaggcgtttagttgcgctttttgctgcacatttcttgtttgtgagattattgggcacaaatcaagc

SEQ ID NO: 73078 - DNA, 80 bp, synthetic construct
  source 1..80: mol_type = other DNA
gacttcgcctatcacagatgtacagcgccacaccatcgtgtttttgaattcttgtaacatgctcatccgttgccaaatct

SEQ ID NO: 73079 - DNA, 80 bp, synthetic construct
  source 1..80: mol_type = other DNA
ttaccagaaaaactggaacgccatttgcaatagcttgatcagcgattgtatctatcgtctcacagagttgatgcggttct

SEQ ID NO: 73080 - DNA, 80 bp, synthetic construct
  source 1..80: mol_type = other DNA
tgaacccagcgttcaccggaggcaagcgaccccacgaaggaagaccaaacccagaccagcacaaacaaacacagcacaca

SEQ ID NO: 73081 - DNA, 80 bp, synthetic construct
  source 1..80: mol_type = other DNA
ttttaagatcaaccccatcttctccttcatttgccttcctgcttctcttatatcgcgttattgtgacatcaaccctgtct

SEQ ID NO: 73082 - DNA, 80 bp, synthetic construct
  source 1..80: mol_type = other DNA
tttaaacccttaaagaaacttgtctcttcttctccttcaaaacacacatctgctgggtcatcccccggtttctctactcc

SEQ ID NO: 73083 - DNA, 80 bp, synthetic construct
  source 1..80: mol_type = other DNA
tcctccattagagccaataaccaatctggaaaccaactttgataccttatactcataatctgagtgattcaacttgtact

SEQ ID NO: 73084 - DNA, 80 bp, synthetic construct
  source 1..80: mol_type = other DNA
cacacgcacacccacacccacacacccccagcgccggtggcgccccccccggggtgcggccccccgggagcccagcggag

SEQ ID NO: 73085 - DNA, 80 bp, synthetic construct
  source 1..80: mol_type = other DNA
gtccttattaaaaatcttagcaatctatacactactctttcagcaggtgtgatcaagtcctccttcaatttatccattaa

SEQ ID NO: 73086 - DNA, 80 bp, synthetic construct
  source 1..80: mol_type = other DNA
atcagcagcaacaaggtccttaatgcaatctcaatgtcactgaggctatcttttaaatcagggcatgatctaatccatga

SEQ ID NO: 73087 - DNA, 80 bp, synthetic construct
  source 1..80: mol_type = other DNA
ccccacggagacgccgatcagtcgatctcctcggccgccgggccagccagccagtcatcacaggacttccccttgagtct

SEQ ID NO: 73088 - DNA, 80 bp, synthetic construct
  source 1..80: mol_type = other DNA
gagtcccgaccctcaagaagctctcaaactcagtgaatgatatatggcactcatgctcgaggtccttagacagcctgtag

SEQ ID NO: 73089 - DNA, 80 bp, synthetic construct
  source 1..80: mol_type = other DNA
tgctcaaaactgagccccactactgacagacacttttgaatcttcgtaataaattcactcatggacaatttgaataactc

SEQ ID NO: 73090 - DNA, 80 bp, synthetic construct
  source 1..80: mol_type = other DNA
ttctaaagatgtcctcctgtgcactttagatttccttctgttcatcaaaagcctaatgaattcctccttggtgctgtgaa

SEQ ID NO: 73091 - DNA, 80 bp, synthetic construct
  source 1..80: mol_type = other DNA
gtttgtcatttcccagtcctttggattttaattgtttaattagtgaagaaagacacaaaacatccaaattcagcaactgt

SEQ ID NO: 73092 - DNA, 80 bp, synthetic construct
  source 1..80: mol_type = other DNA
tacatgatggagttccttgacctactgaaacagagtcgacaatctttaaaggtgaaccaatctggcactgatgacagtgg

SEQ ID NO: 73093 - DNA, 80 bp, synthetic construct
  source 1..80: mol_type = other DNA
caccaaaaggatggacttgtctatacacagttcctgaagaattgcacctatgtctgatcctggcagatgttcaccagttc

SEQ ID NO: 73094 - DNA, 80 bp, synthetic construct
  source 1..80: mol_type = other DNA
tgaatctatgcaggagaagactaccaaggacttcaccaatcttctcataaccttcaagttccgctagaaacactctcata

SEQ ID NO: 73095 - DNA, 80 bp, synthetic construct
  source 1..80: mol_type = other DNA
tccttggtttccagtctcacaaagatattctgaacaaggttcttcccctcaaaaagagcaccgaccctcacagtcagagg

SEQ ID NO: 73096 - DNA, 80 bp, synthetic construct
  source 1..80: mol_type = other DNA
cgcaccggggatcctaggcgtttagttgcgctatttagttgcacaacctttctttgtgaggctattagagacagacagca

SEQ ID NO: 73097 - DNA, 80 bp, synthetic construct
  source 1..80: mol_type = other DNA
ttattagttctgaaaatagggtctgttcttaataagttgagacactcatccaacaatctcctgtctacttcacctttgaa

SEQ ID NO: 73098 - DNA, 80 bp, synthetic construct
  source 1..80: mol_type = other DNA
tcacagatttaaataatcttggatttgtcagaccttgcttaactaacatggcagcgttacacactatatctcccattcgg

SEQ ID NO: 73099 - DNA, 80 bp, synthetic construct
  source 1..80: mol_type = other DNA
atgggttaagatgcctaagacttgaagttttatcactcttccctttcacaggttctgccaagacccaaacacccaattca

SEQ ID NO: 73100 - DNA, 80 bp, synthetic construct
  source 1..80: mol_type = other DNA
ggaaattgacatgatcacggtgagcttctgggtgagtctgtttatcacacatatataacattatgccaccatttttatga

SEQ ID NO: 73101 - DNA, 80 bp, synthetic construct
  source 1..80: mol_type = other DNA
agaaattgtctgaatctcctgctatcggtctctgatagatgtcccctctgcaaacatccactgccaactaaattaagggt

SEQ ID NO: 73102 - DNA, 80 bp, synthetic construct
  source 1..80: mol_type = other DNA
tttttaattcctctccatcttccccctcatcaaccttcttacctcttctgtactgtgttattgtggagttaaccttggtt

SEQ ID NO: 73103 - DNA, 80 bp, synthetic construct
  source 1..80: mol_type = other DNA
acacatctactggatcacattccagtttccctgcctccactcccttggaactgatgaccaatcttgacaccagctttgag

SEQ ID NO: 73104 - DNA, 80 bp, synthetic construct
  source 1..80: mol_type = other DNA
actttgtactcataatcagagtgattcaatttatacttctgcttcctcatgaaaccctctgtaatttgactcacagcact

SEQ ID NO: 73105 - DNA, 80 bp, synthetic construct
  source 1..80: mol_type = other DNA
cccggggggtggcggccccccggaggcccgggcagagccgcacggagacgtcgatcagtcgatctcctcagccatcaacc

SEQ ID NO: 73106 - DNA, 80 bp, synthetic construct
  source 1..80: mol_type = other DNA
taaactttgcactcaatagcactttctctccagtaccgaaaataattttgactagaaacctaagcaatctgtacaccact

SEQ ID NO: 73107 - DNA, 80 bp, synthetic construct
  source 1..80: mol_type = other DNA
atcagtagtagcaaggtcctcaatgcggtctcaatatcatttaaacagtccttcaaatcaggacatgatctaatccatga

SEQ ID NO: 73108 - DNA, 80 bp, synthetic construct
  source 1..80: mol_type = other DNA
ggagacgtcgatcagtcgatctcctcagccatcaacccagtcagccagtcgtcgcaggacttacccttgagtctgaacct

SEQ ID NO: 73109 - DNA, 80 bp, synthetic construct
  source 1..80: mol_type = other DNA
gagttccgactctcatgaaattctcaaactcagcatatgacacacggcattcatgcatgaggtgttcagacaatccgtaa

SEQ ID NO: 73110 - DNA, 80 bp, synthetic construct
  source 1..80: mol_type = other DNA
tgctcaaagctgagtcctactactgatagacatttctgaatctttgtaataaactcatttatggaggttctgaacaattc

SEQ ID NO: 73111 - DNA, 80 bp, synthetic construct
  source 1..80: mol_type = other DNA
ctcaagaggcaccttcctgtatgccttagacttttttctgttccttaaaagccgaatgaattcttccttggtgctatgaa

SEQ ID NO: 73112 - DNA, 80 bp, synthetic construct
  source 1..80: mol_type = other DNA
aatgtttgtcattttttaaatctttggactttgactgtctgattagtgaagaaagacacaggacatctagattcaatagc

SEQ ID NO: 73113 - DNA, 80 bp, synthetic construct
  source 1..80: mol_type = other DNA
tagagctctgaaaactctttgatcaggccctcaggattgaccttttgaaagttccttttgagtttcccgctcaccaaatc

SEQ ID NO: 73114 - DNA, 80 bp, synthetic construct
  source 1..80: mol_type = other DNA
acaatggcatcaataagacggatctatccatgcgcaactcctgaaggatcgtacttatctctgatcccatcaaatgctca

SEQ ID NO: 73115 - DNA, 80 bp, synthetic construct
  source 1..80: mol_type = other DNA
ctatcaattatgggccagggcaaatccaaggagaagagagacaccagtgatgccaatagagctgagattctaccagacac

SEQ ID NO: 73116 - DNA, 80 bp, synthetic construct
  source 1..80: mol_type = other DNA
cgcaccggggatcctaggcgtttagttgcgctattttgttgtgctaatttgttacacaaccctactctgtgaggctgtca

SEQ ID NO: 73117 - DNA, 80 bp, synthetic construct
  source 1..80: mol_type = other DNA
ttcccctggaacccaccagttcaagttcaagagaatcaccaagtgtcaaagagtcctccatataatcctcaaattcatcg

SEQ ID NO: 73118 - DNA, 80 bp, synthetic construct
  source 1..80: mol_type = other DNA
gatctgatatcaaaaactccatcattcatcctaaacacagagtctgtcctcaacagatggagacactcatccaacaacct

SEQ ID NO: 73119 - DNA, 80 bp, synthetic construct
  source 1..80: mol_type = other DNA
cctgtccacctcacctttgaagaaatgggagcaagacaggaactctgctacacctgggctttgtaactggcacttcacta

SEQ ID NO: 73120 - DNA, 80 bp, synthetic construct
  source 1..80: mol_type = other DNA
caaaaatcaatgaaaacttcctcaagcagtcagtattgttctgattgtgtgtaaaatctactgtaattgagaactccaac

SEQ ID NO: 73121 - DNA, 80 bp, synthetic construct
  source 1..80: mol_type = other DNA
accccccttgtgttgttgagcatataatcccatagatctcttaaagatttaaatgcttttggttctgtcaagccctgctt

SEQ ID NO: 73122 - DNA, 80 bp, synthetic construct
  source 1..80: mol_type = other DNA
aattagcatagcagcattacacacaatatctcctactcgataagaaaaccaaccaaaaccaaactgcaagtcattcctaa

SEQ ID NO: 73123 - DNA, 80 bp, synthetic construct
  source 1..80: mol_type = other DNA
acataggcctctctatatttttgttaaccacctttaaaataaatgattggaaaggtcccaatgcttcagcgccgtcctca

SEQ ID NO: 73124 - DNA, 80 bp, synthetic construct
  source 1..80: mol_type = other DNA
tcttgccagatgccacctatcttggccctctaaattgcaaatcatgttggcagaaatttgatagcctagttagatgccat

SEQ ID NO: 73125 - DNA, 80 bp, synthetic construct
  source 1..80: mol_type = other DNA
gatggcatcatgtctctatgaggaaaccatgagaaactgcctaaggttctacttgttgcaacaaattctcgtatgaatga

SEQ ID NO: 73126 - DNA, 80 bp, synthetic construct
  source 1..80: mol_type = other DNA
ttcaaaatatatttgctttagaaagttcttacaaacatcccttgtgctaacaacaaactcatctactaaacttgagtcag

SEQ ID NO: 73127 - DNA, 80 bp, synthetic construct
  source 1..80: mol_type = other DNA
accgttgatgagagttaacgagatcagaaaacagcacagtgtaatgctcgtccctcttccatttgacaacatgagaaatg

SEQ ID NO: 73128 - DNA, 80 bp, synthetic construct
  source 1..80: mol_type = other DNA
agtgacaaagactctgaattgatatcaatcaacacgcaaaggtctaagaatttaatcctgggactccatctcatgttttt

SEQ ID NO: 73129 - DNA, 80 bp, synthetic construct
  source 1..80: mol_type = other DNA
tgagctcacatcagacatgaatgggagcagctggtcctcaaagattttgggatacaatcgcctcacagattggattacat

SEQ ID NO: 73130 - DNA, 80 bp, synthetic construct
  source 1..80: mol_type = other DNA
gattcaaacttactttatcttccaacaatcttgagctttcaggctttcttgccacataatcacatgggtttaagtgttta

SEQ ID NO: 73131 - DNA, 80 bp, synthetic construct
  source 1..80: mol_type = other DNA
acacttaaactcttctcattcttccccttcacaggctctgctagaacccagacacccaattcaaaggaattgctcaatga

SEQ ID NO: 73132 - DNA, 80 bp, synthetic construct
  source 1..80: mol_type = other DNA
gatgcagatatagtcccaaagaagaggcctcaaaaggctgatgtgatcatggtgagcctctgggtgactctgtctgtcca

SEQ ID NO: 73133 - DNA, 80 bp, synthetic construct
  source 1..80: mol_type = other DNA
agatgtataacattataccatcattattctgaacccctacaatatgatcatccatggctaagtcttcaagcactttccta

SEQ ID NO: 73134 - DNA, 80 bp, synthetic construct
  source 1..80: mol_type = other DNA
atatagaggttttccctgtttctgtttctcacacacctgcttcccagagtcttacagaggccaatgaaaccggatgagac

SEQ ID NO: 73135 - DNA, 80 bp, synthetic construct
  source 1..80: mol_type = other DNA
gatcattatctctgcagacactgcctcaacctcctattgtcagtatctgacagatgccctctctgtaaacacccactgcc

SEQ ID NO: 73136 - DNA, 80 bp, synthetic construct
  source 1..80: mol_type = other DNA
acaactctggaaagcagacttgttgattgcttcagacaataatttctgtgcaccccttgtgaatttactgcagagcttat

SEQ ID NO: 73137 - DNA, 80 bp, synthetic construct
  source 1..80: mol_type = other DNA
tctggagtgttttaatcagtgagggtaccttttcttcttgaaaggtcattactgatggataaaccactttttgccttaaa

SEQ ID NO: 73138 - DNA, 80 bp, synthetic construct
  source 1..80: mol_type = other DNA
accatcctcatcgggaacatttcatttaaatttaaccaattgatgtttgccaattgactgaggtcctcttcaagaccaag

SEQ ID NO: 73139 - DNA, 80 bp, synthetic construct
  source 1..80: mol_type = other DNA
aacatctcctaattgaaggatagcttctctcttgtccctattgaaaaggtctagaaaaaattcttcgttgaattcaccat

SEQ ID NO: 73140 - DNA, 80 bp, synthetic construct
  source 1..80: mol_type = other DNA
tcttgagtttatggtgtagtcttcttacaagctttcttatgatctttgtttcactagggcacaattgttcaatgagtctt

SEQ ID NO: 73141 - DNA, 80 bp, synthetic construct
  source 1..80: mol_type = other DNA
tgaatcctataccccctggagccatctaaccagtctttcacatcagtgtgaatgtttaacaaaaatggatctaaagggaa

SEQ ID NO: 73142 - DNA, 80 bp, synthetic construct
  source 1..80: mol_type = other DNA
attggcatatttcaagagatccaatgtcctcttctgaatacaattcactaaagaaactgggactccattcgctatggctt

SEQ ID NO: 73143 - DNA, 80 bp, synthetic construct
  source 1..80: mol_type = other DNA
ggtcagcaatcgtgtctattgtttcacaaagttgatgcggttccttgcacttaacattgtgcaatgctgcagacacaaat

SEQ ID NO: 73144 - DNA, 80 bp, synthetic construct
  source 1..80: mol_type = other DNA
ttggtgagaagagggacttcttccccccatacataaaatctggatttaaattccgcagcaaaccgcccaactacactttt

SEQ ID NO: 73145 - DNA, 80 bp, synthetic construct
  source 1..80: mol_type = other DNA
tggactgatgaatttgttcagtaaaccactcaaatgagaatggaattctagcaagacaagaacttcttctgggtcactat

SEQ ID NO: 73146 - DNA, 80 bp, synthetic construct
  source 1..80: mol_type = other DNA
aaccaaactaagagtgtcagcagctccgagctcaccacctccctacgaggagtgacgccccgagtcccagcaccagcagg

SEQ ID NO: 73147 - DNA, 80 bp, synthetic construct
  source 1..80: mol_type = other DNA
caactaattcactcaattttctgtcaaataaagtgatctgatcatcacttgatgtgtaggcttctggcctctctccgaag

SEQ ID NO: 73148 - DNA, 80 bp, synthetic construct
  source 1..80: mol_type = other DNA
atgacaccaatacaatagttgatgaacctctcactaatcaaaccataaaagtcagaggcattgtgtaggattccctgtcc

SEQ ID NO: 73149 - DNA, 80 bp, synthetic construct
  source 1..80: mol_type = other DNA
catgtcaataagactggatatatgagatggcaccacccccatttcaaaatattctctaaagatcctctcagtaacagttg

SEQ ID NO: 73150 - DNA, 80 bp, synthetic construct
  source 1..80: mol_type = other DNA
tttctgaacccttgagaagcttgagttttgatttaacatatgacttcatcattgcatttacaacaggaaaaggaacctca

SEQ ID NO: 73151 - DNA, 80 bp, synthetic construct
  source 1..80: mol_type = other DNA
acgagtttgtgcatgtgccaagttagcagagtgctaacatgatcctttccagaacgcacatattgatcatcaccaagttt

SEQ ID NO: 73152 - DNA, 80 bp, synthetic construct
  source 1..80: mol_type = other DNA
gagattctgaaggagcattagaaatagaaatggacacatcatcggaccccatttactgtggtccatgctgtaatttaaca

SEQ ID NO: 73153 - DNA, 80 bp, synthetic construct
  source 1..80: mol_type = other DNA
atccttctcgtacgttgatggtcattgacaatattgcattttcaaattctttatcgttgttcaaacaggaacctgagaag

SEQ ID NO: 73154 - DNA, 80 bp, synthetic construct
  source 1..80: mol_type = other DNA
aagctggaaaaagactcaaaataatcctccaccaatcttgtaaacatttttgttctcaagtcaccgatgtaaagctctct

SEQ ID NO: 73155 - DNA, 80 bp, synthetic construct
  source 1..80: mol_type = other DNA
atttcccccaacttgctctttgtaagatagtgcgaactttagtcttccagaatcaggaccaacagaagtgtatgatgtcg

SEQ ID NO: 73156 - DNA, 80 bp, synthetic construct
  source 1..80: mol_type = other DNA
gtgactcttctgagtaaaagcacaggttcttcaaggcagcactcatgcattttgtcaatgacagagccttgcttagagac

SEQ ID NO: 73157 - DNA, 80 bp, synthetic construct
  source 1..80: mol_type = other DNA
cgacccgagacgggagaaccacacacaggccagcacacacaaacacaccacccaccacaggacacacacgcacacacact

SEQ ID NO: 73158 - DNA, 80 bp, synthetic construct
  source 1..80: mol_type = other DNA
tcagaattactctctctttcactaattcttacatcttcttctaatttgtcccaatcgaatttaaagttcaagccctgcct

SEQ ID NO: 73159 - DNA, 80 bp, synthetic construct
  source 1..80: mol_type = other DNA
ttgcatgtgtctgtatttccctgaatatgcatttgcattcatttgtaataaaatcattttcatgcatgaaaaccaatcac

SEQ ID NO: 73160 - DNA, 80 bp, synthetic construct
  source 1..80: mol_type = other DNA
cctctgaaaaaaactttctacaaagattttttgccatctcatccagaccacattgttctttgacagctgaagtgaagtac

SEQ ID NO: 73161 - DNA, 80 bp, synthetic construct
  source 1..80: mol_type = other DNA
aatggtgatagttccgtagaactctcaacagcctcacaaatgtacctcatatcatcactagtaagacaagatgggtcaaa

SEQ ID NO: 73162 - DNA, 80 bp, synthetic construct
  source 1..80: mol_type = other DNA
atcctctactaggtgaaatgatatctctgacaaaattatcttccttaaatgggccattttacctgataggatgacctgaa

SEQ ID NO: 73163 - DNA, 80 bp, synthetic construct
  source 1..80: mol_type = other DNA
ggtggtgcagtcctttagtatctttaagttctctctcaccctgtccctcattgggttttctgccaccatcatatcgtatt

SEQ ID NO: 73164 - DNA, 80 bp, synthetic construct
  source 1..80: mol_type = other DNA
attgtagaattaactttattttctaaatccctaaagaaacttgtctcttcttctccttcaaaacatacatctatcaagtc

SEQ ID NO: 73165 - DNA, 80 bp, synthetic construct
  source 1..80: mol_type = other DNA
accctctgttttttctgtttctgttcctttagaaccaatgactaacctggaaacaagctttgagaccttatactcgtaat

SEQ ID NO: 73166 - DNA, 80 bp, synthetic construct
  source 1..80: mol_type = other DNA
ctgaatgtttcaatttatacttctgttttctcataaaaccttctgtgatttggctcacagcactaacaagtagtttatta

SEQ ID NO: 73167 - DNA, 80 bp, synthetic construct
  source 1..80: mol_type = other DNA
aaatcatattctaaaagccgttctccatttaggtgcttgttgacaaccacacttttattactcgcaagatctaatgctgt

SEQ ID NO: 73168 - DNA, 80 bp, synthetic construct
  source 1..80: mol_type = other DNA
tgcacatccagagttggtcatggggtccaggctattgagctttttctctcctttaaatattagggtgccattgttaaatg

SEQ ID NO: 73169 - DNA, 80 bp, synthetic construct
  source 1..80: mol_type = other DNA
aagacaccatcatactgaaggcctgtaagttaacacccggggttgaatgctgacagtcaatatccttgccggtaaacttc

SEQ ID NO: 73170 - DNA, 80 bp, synthetic construct
  source 1..80: mol_type = other DNA
ttcatttgctcataaaagacacattcttcctcaggagtgattgcttctttggggttaacaaagaagccgaactcactttt

SEQ ID NO: 73171 - DNA, 80 bp, synthetic construct
  source 1..80: mol_type = other DNA
tggctcaaagaatttctcaaaacattttatctgatctgtcaatctatcaggagtctccttagtgatcaaatgacataagt

SEQ ID NO: 73172 - DNA, 80 bp, synthetic construct
  source 1..80: mol_type = other DNA
atgacacattcaacatgaacttgaactttgcactcaataacaccttctcaccagtgtcaaaaattaatttaatcaaaaac

SEQ ID NO: 73173 - DNA, 80 bp, synthetic construct
  source 1..80: mol_type = other DNA
cgaagcaacctgtacaccactttttcagcaggtgtgatcaagtcctcctttaacttattcattaatgatgttgatgagaa

SEQ ID NO: 73174 - DNA, 80 bp, synthetic construct
  source 1..80: mol_type = other DNA
gtctgacacaatggccattactaaatacctaatattttgaacctgtttttgatttctctttgttggattggtgagcaata

SEQ ID NO: 73175 - DNA, 80 bp, synthetic construct
  source 1..80: mol_type = other DNA
acaagagtagggttcttagtgcggtttcaatgtcagtaaggtggtcctttaagtcagggcacgacctaatccatgacatc

SEQ ID NO: 73176 - DNA, 80 bp, synthetic construct
  source 1..80: mol_type = other DNA
atagtatcaaccatgttgtgcagcacctcatctgaaaagattggcaaaaagaaccttttggggtctgcataaaaggaaat

SEQ ID NO: 73177 - DNA, 80 bp, synthetic construct
  source 1..80: mol_type = other DNA
caagtgaccattcgaaccctgtatagagtaacaccttgaagactctccagtcttctgatatagtagatagtactcctcag

SEQ ID NO: 73178 - DNA, 80 bp, synthetic construct
  source 1..80: mol_type = other DNA
ccggcaggagcaccaactagtctatctcctcgaccactggccccgccagccaatcatcacaggacttccccttgagtcta

SEQ ID NO: 73179 - DNA, 80 bp, synthetic construct
  source 1..80: mol_type = other DNA
aatctagtttcatgacctgacaaaacacctccttacattccaccacttggtacctcacagaccctaattgattctgcctt

SEQ ID NO: 73180 - DNA, 80 bp, synthetic construct
  source 1..80: mol_type = other DNA
aacctagcaactgaacttgttttcatgctatttgttagagccaaacaaacagatgacaatttcctcaaactctgagggct

SEQ ID NO: 73181 - DNA, 80 bp, synthetic construct
  source 1..80: mol_type = other DNA
ctttaattgctctatatcggattgaaaagtgtagtcttcaaattttgtataatacattacagggtgagtcccgattttaa

SEQ ID NO: 73182 - DNA, 80 bp, synthetic construct
  source 1..80: mol_type = other DNA
cgaagttctcaaactcagcaaatggtatgtggcactcatgctcgaggcactctgacagtccgtaatgaccaaaactaagt

SEQ ID NO: 73183 - DNA, 80 bp, synthetic construct
  source 1..80: mol_type = other DNA
cccaccattgataagcaccttttgactttcattatgaactcacttacagacactttaaacagctcctcaagagacactct

SEQ ID NO: 73184 - DNA, 80 bp, synthetic construct
  source 1..80: mol_type = other DNA
cttatatacccttgattttcttctgttcctcaaaagcctgatgaattcttctttagtactttgagagctcaccaacctat

SEQ ID NO: 73185 - DNA, 80 bp, synthetic construct
  source 1..80: mol_type = other DNA
cattcacactactgtaacaacaaccaacccagtacttatcattcttcaaacctttgagtctcgactgcttaatgagtgaa

SEQ ID NO: 73186 - DNA, 80 bp, synthetic construct
  source 1..80: mol_type = other DNA
gaaaggcacaagacgtcgagattcaacagctgccttcttctagtgtttaataattttaaacttttcactttgttcaacat

SEQ ID NO: 73187 - DNA, 80 bp, synthetic construct
  source 1..80: mol_type = other DNA
agagagtagtctttcatactcagtgttgacaccactttctttttcatgcccgtgagtctctgctgtgatgaatctcatta

SEQ ID NO: 73188 - DNA, 80 bp, synthetic construct
  source 1..80: mol_type = other DNA
aggggcaggattcaattgcctctctgcttaatgtcgatatgtcatcatcatcaacaaggggctcataaagctcagaaaat

SEQ ID NO: 73189 - DNA, 80 bp, synthetic construct
  source 1..80: mol_type = other DNA
aatctgcccccaactgtctcatacattaccgtgttctttgatttgctgtagcagagtctacaatctttgaaggtaaacca

SEQ ID NO: 73190 - DNA, 80 bp, synthetic construct
  source 1..80: mol_type = other DNA
tccttgattaaacccttagggttgatcttctgaaagtttcttttgagcttcccattcaccaggtctctcctaaacctgct

SEQ ID NO: 73191 - DNA, 80 bp, synthetic construct
  source 1..80: mol_type = other DNA
aaaaagagaatttatgccaaagaccacatcatcacaagtcatgttggggtcaacaccatcatgacacattctcataattt

SEQ ID NO: 73192 - DNA, 80 bp, synthetic construct
  source 1..80: mol_type = other DNA
cttcattatggaatgatcttgcatctttcagaatcttcatagagtccataccagaacgcttatcaatggtggttttgaga

SEQ ID NO: 73193 - DNA, 80 bp, synthetic construct
  source 1..80: mol_type = other DNA
gattcacagagtctaaagtactcagactcttcaaagactttttcatcctgactggaatactccaaaagtttgaataggag

SEQ ID NO: 73194 - DNA, 80 bp, synthetic construct
  source 1..80: mol_type = other DNA
atctctgaacttgaagtttacccactccggcataaaactgttttcatagtcacaacgaccatccactattggaactagtg

SEQ ID NO: 73195 - DNA, 80 bp, synthetic construct
  source 1..80: mol_type = other DNA
tgatgcccgcaacagcaaggtcttctttaatgcttgccaatttgttagtgtcttctatgaacttcctctcaaaactagct

SEQ ID NO: 73196 - DNA, 80 bp, synthetic construct
  source 1..80: mol_type = other DNA
ggtgtgcttctaacgaagcattcaagaagaacaagggaattgtcaatcaacttataaccgtcaggaataataagtggcag

SEQ ID NO: 73197 - DNA, 80 bp, synthetic construct
  source 1..80: mol_type = other DNA
tcccgggcagacaatcccagaatctattaggattgtttcaacagatttgtcctcatggttgtgtatgcagccacttttgt

SEQ ID NO: 73198 - DNA, 80 bp, synthetic construct
  source 1..80: mol_type = other DNA
ctgcactgtctatctctatacaacgagacaataatttgagtccttcgattagaaccattctgggttccctttgtcccaag

SEQ ID NO: 73199 - DNA, 80 bp, synthetic construct
  source 1..80: mol_type = other DNA
aagtttagtttttgccttgacagcctcccatcctggtctatgtagtttagacacaactctctcaattctaaaatggtttc

SEQ ID NO: 73200 - DNA, 80 bp, synthetic construct
  source 1..80: mol_type = other DNA
tatgtagtttagacacaactctctcaattctaaaatggtttcatccattgcgcatcaaaaagcctaggatccactgtgcg

SEQ ID NO: 73201 - DNA, 80 bp, synthetic construct
  source 1..80: mol_type = other DNA
atctggaacaaaagacaatggcctcaacatgatggatttgtccacatgcagctcctgaagaactgcacttatttctgacc

SEQ ID NO: 73202 - DNA, 80 bp, synthetic construct
  source 1..80: mol_type = other DNA
gagatagaccaaaccatcaaccatgggccagggcaagtccaagggagagaaggacaccaacaacgcaaaccgagcagagc

SEQ ID NO: 73203 - DNA, 80 bp, synthetic construct
  source 1..80: mol_type = other DNA
ccaacaagtgctcaccagttctgaatcggtgcaagaaaagattgcccagaacgtcaccaatcttttcatagccttcaagt

SEQ ID NO: 73204 - DNA, 80 bp, synthetic construct
  source 1..80: mol_type = other DNA
tctgccaagaaaaccctcatgtccttggtctccaacttcacaaggacattctgaacaaagtttctcccctcaaaaagagc

SEQ ID NO: 73205 - DNA, 80 bp, synthetic construct
  source 1..80: mol_type = other DNA
gcccatcctcacagtcaaaggcacaggctcccactcaggtccaattctctcaaagtcaatagatctaatctcgttcaata

SEQ ID NO: 73206 - DNA, 80 bp, synthetic construct
  source 1..80: mol_type = other DNA
cgcaccggggatcctaggcgtttagttgcgctgtttgatcgcacggttgtactcgtgagacctccaaaccaggacagact

SEQ ID NO: 73207 - DNA, 80 bp, synthetic construct
  source 1..80: mol_type = other DNA
atcaagggatcctccatataatcctcaaattcctcagatctaacgtcaaaaatgctgtcgttcatcttgaagacagagtc

SEQ ID NO: 73208 - DNA, 80 bp, synthetic construct
  source 1..80: mol_type = other DNA
cgtccttaacaaatgaaggcattcatctaacaacctcctgtccacctcacccttaaagaggtaggaacatgacaagaact

SEQ ID NO: 73209 - DNA, 80 bp, synthetic construct
  source 1..80: mol_type = other DNA
cactccttttgtgttgctgagcatatagtcccacaaatcccccaaagacttgaatgctcctgaatttgtcagaccctgct

SEQ ID NO: 73210 - DNA, 80 bp, synthetic construct
  source 1..80: mol_type = other DNA
tgatcatcattgcagcattacatacagcatctcccacccggtaagagaaccatccgaaaccaaactgtaaatcatccctg

SEQ ID NO: 73211 - DNA, 80 bp, synthetic construct
  source 1..80: mol_type = other DNA
aagacccgaattctgatcacttttccctttcagaggttctgctaagacccacacacctagttcgaaggagttgctcaatg

SEQ ID NO: 73212 - DNA, 80 bp, synthetic construct
  source 1..80: mol_type = other DNA
aagagactgatatgatcacggtgaacttccggatgtcctcgtttatcacaaatgaataacattatgccatcgtgcttatg

SEQ ID NO: 73213 - DNA, 80 bp, synthetic construct
  source 1..80: mol_type = other DNA
gattcttgttacatgctcatccatggccaagtcctcaagcactttcttaatgtataagttttccctattcttatttctaa

SEQ ID NO: 73214 - DNA, 80 bp, synthetic construct
  source 1..80: mol_type = other DNA
aggggattcgctcctcctggaaagtcatcactgatggataaataactttctgtctcaaaaccattctcaacggaaacatc

SEQ ID NO: 73215 - DNA, 80 bp, synthetic construct
  source 1..80: mol_type = other DNA
agcccaacaccaacaggcagcccaccacaagacccagcacaagacacacccacacacaaacacgcacacacacacgcaca

SEQ ID NO: 73216 - DNA, 80 bp, synthetic construct
  source 1..80: mol_type = other DNA
acgggtcaaagtcctcaaccaagtgaaaagatatctccgataaaatgaccttccttaaataagccattttacctgacaga

SEQ ID NO: 73217 - DNA, 80 bp, synthetic construct
  source 1..80: mol_type = other DNA
acagtctgaaggtgatgtaacccttttgcatctctaagtccctctccatccccttccctgtcaaccttcttacctttttt

SEQ ID NO: 73218 - DNA, 80 bp, synthetic construct
  source 1..80: mol_type = other DNA
ataactagttatcgtggaattaaccttgtcttctagaatcttgaaaaattgagtttcttcttctccctcaaaaaacacat

SEQ ID NO: 73219 - DNA, 80 bp, synthetic construct
  source 1..80: mol_type = other DNA
cttcaggttcaccctccagttgttctgcttctgttttcttggaaccaagaaccaatctagagactaattttgagactttg

SEQ ID NO: 73220 - DNA, 80 bp, synthetic construct
  source 1..80: mol_type = other DNA
ttctcggcaggtgtgatcaagtcttccttcaacttgctcatcaatgaagtggatgagaaatccgagacaatggccataac

SEQ ID NO: 73221 - DNA, 80 bp, synthetic construct
  source 1..80: mol_type = other DNA
cagtctcaatatccaaaagacagtcctttaagtctgggcatgatctaatccatgagatcatagtgttaaccatactatgc

SEQ ID NO: 73222 - DNA, 80 bp, synthetic construct
  source 1..80: mol_type = other DNA
gacagaacacctctttacactctactatttgatatctaatagaacctaattgattttgtctcaatctagcaactgaactt

SEQ ID NO: 73223 - DNA, 80 bp, synthetic construct
  source 1..80: mol_type = other DNA
gagttccggctcttgtaaagttttcaaactcagtgaatggcacatgacattcatacacgagatgttcagacaacccatag

SEQ ID NO: 73224 - DNA, 80 bp, synthetic construct
  source 1..80: mol_type = other DNA
tgctcaaaactcagtcccacaactgtcaagcacctctggattttaaggatgaactcatccacagatgttctgaataactc

SEQ ID NO: 73225 - DNA, 80 bp, synthetic construct
  source 1..80: mol_type = other DNA
ctcaagagacattttcctacatgtttttgatctttttctgttcctcaaaagtttaatgaattcttcctttgtgctatgaa

SEQ ID NO: 73226 - DNA, 80 bp, synthetic construct
  source 1..80: mol_type = other DNA
agtgctagcttcatcacctcttttatgtccatgggtctctgctgtgatgaatctcatcaggggacaggattccaccgcct

SEQ ID NO: 73227 - DNA, 80 bp, synthetic construct
  source 1..80: mol_type = other DNA
agtcgggtacaaacgacaatggtgtcagtaggacagatctattcatacatagctcctgaaggattacgtttatttctgat

SEQ ID NO: 73228 - DNA, 80 bp, synthetic construct
  source 1..80: mol_type = other DNA
accagtcatgggtcaaggtaggtccaaagagaagggagaaatcagcaacacagacagggccgagattctgccagacacca

SEQ ID NO: 73229 - DNA, 80 bp, synthetic construct
  source 1..80: mol_type = other DNA
cgcaccggggatcctaggctttttggattgcgctttcctttggctccgtcttataggagaatgggccaactagtgacaat

SEQ ID NO: 73230 - DNA, 80 bp, synthetic construct
  source 1..80: mol_type = other DNA
ttttggtatctgaagcacgtaaagactggtgaaaccagtgttcccaagtgttggcttatcagtaatggttcttacttaaa

SEQ ID NO: 73231 - DNA, 80 bp, synthetic construct
  source 1..80: mol_type = other DNA
ttttgacaacggcattactattcaatacaatctgacactttctaatgcacaggaggctatgagccaatgtaagaccttca

SEQ ID NO: 73232 - DNA, 80 bp, synthetic construct
  source 1..80: mol_type = other DNA
cgcaccggggatcctaggctttagattgcgccttccattgaggacttgtgggagtgagagccattcgccacactgaccat

SEQ ID NO: 73233 - DNA, 80 bp, synthetic construct
  source 1..80: mol_type = other DNA
gatagactacaacaaggctgcactcaccaagttcaaagaggatgttgagtccgctcttcacctatttaaaactacggtaa

SEQ ID NO: 73234 - DNA, 80 bp, synthetic construct
  source 1..80: mol_type = other DNA
actcactgatatctgaccagctgttgatgaggaaccatttgagggacttaatgggggtgccttactgcaactactctagg

SEQ ID NO: 73235 - DNA, 80 bp, synthetic construct
  source 1..80: mol_type = other DNA
ttttggtatttggagcatgcgaaaacaggtgagactagtgtcccgaagtgctggcttataactaacggctcatatctgaa

SEQ ID NO: 73236 - DNA, 80 bp, synthetic construct
  source 1..80: mol_type = other DNA
cgaaacacactttagtgatcagattgaacaagaagcagacaacatgatcacagacatgttaagaaaggactacataaaaa

SEQ ID NO: 73237 - DNA, 80 bp, synthetic construct
  source 1..80: mol_type = other DNA
ggcaagggagcacccctttagcactaatggatttgctaatgttcagcacatcagcttacttgattagcatcttcttacac

SEQ ID NO: 73238 - DNA, 80 bp, synthetic construct
  source 1..80: mol_type = other DNA
ctgctgaaaatccccacacacagacatataaaaggtggcacgtgccccaagccgcaccgcctgaccagcaaaggaatctg

SEQ ID NO: 73239 - DNA, 80 bp, synthetic construct
  source 1..80: mol_type = other DNA
cagctgtggcgcatacaaagtaccaggagtgaagacggtttggaaaagacgctaggctctggcgcctccctggctcccca

SEQ ID NO: 73240 - DNA, 80 bp, synthetic construct
  source 1..80: mol_type = other DNA
tcatcacaagcataaaggctgtctacaactttgccacgtgtggtctcatcacactgatcggctttctcttccttgccggt

SEQ ID NO: 73241 - DNA, 80 bp, synthetic construct
  source 1..80: mol_type = other DNA
cctcgaaggaggtggggagccagggaggccctgagggtctttagagtgtcactacattgggtcccctgaagactaagtca

SEQ ID NO: 73242 - DNA, 80 bp, synthetic construct
  source 1..80: mol_type = other DNA
tgtggtaggatgttgtgaacggtcttcagttctggtagtctagcttttgaagcactctcaaagataatgcagtccatgag

SEQ ID NO: 73243 - DNA, 80 bp, synthetic construct
  source 1..80: mol_type = other DNA
agcacaatgtggggtgatctccttcttctttttgtctttgactatcccagtgtgcatcttacaaagccaaccatacttgt

SEQ ID NO: 73244 - DNA, 80 bp, synthetic construct
  source 1..80: mol_type = other DNA
cccagaccttgtcctcatactctcgagcagcttctttgctcatctccacatcaatcaacttaatatccctccgattctga

SEQ ID NO: 73245 - DNA, 80 bp, synthetic construct
  source 1..80: mol_type = other DNA
gaatcaaggagttttctgatgtcatctgagccttgacagctcaagaccattccctgtggaagcgctccgatcaccgaaga

SEQ ID NO: 73246 - DNA, 80 bp, synthetic construct
  source 1..80: mol_type = other DNA
agtcaaccctggttgcgcattaaaaagatcagcaaggtccatgccatgagaatactttgagtcctgtttgaattgttttt

SEQ ID NO: 73247 - DNA, 80 bp, synthetic construct
  source 1..80: mol_type = other DNA
ggtcagttggctctctgtaaaaatgcacaaactgcccatttcccggttgaaaaatagcaacttctacagggtcgttgaac

SEQ ID NO: 73248 - DNA, 80 bp, synthetic construct
  source 1..80: mol_type = other DNA
ctcccttcgatgtcaatccatgttggtgcatttgggtcaatcccactcattaggtccttcaaaagcatggtctgactgta

SEQ ID NO: 73249 - DNA, 80 bp, synthetic construct
  source 1..80: mol_type = other DNA
acttaggccaacttggggtggtccagcagacccaggcactggccttggtgggttgacacttggtctgtcaccagacaagt

SEQ ID NO: 73250 - DNA, 80 bp, synthetic construct
  source 1..80: mol_type = other DNA
caatggtggtgttttcccacgcccttcccataactgaagtcctacaagcaatgtatggccaaccctctccagatagacaa

SEQ ID NO: 73251 - DNA, 80 bp, synthetic construct
  source 1..80: mol_type = other DNA
agatcttgtggcatgtatggactctctggtccagacatttacaagggtgtttaccagttcaagtctgtggaattcaacat

SEQ ID NO: 73252 - DNA, 80 bp, synthetic construct
  source 1..80: mol_type = other DNA
accttgtacaggatgttctcatatgggtttctatccccaacctggtcagagacaaacatgttcatctttctttttgcgcc

SEQ ID NO: 73253 - DNA, 80 bp, synthetic construct
  source 1..80: mol_type = other DNA
aagaattgcctttagcaactcttcggagttgctaggtttgatcaatatggactccaacatgttgccaccatctagtaagg

SEQ ID NO: 73254 - DNA, 80 bp, synthetic construct
  source 1..80: mol_type = other DNA
ataccagattgctgttctgtaattacactcaaaactggatgtttgtctttcaatctctcaagatcactcaggttagggta

SEQ ID NO: 73255 - DNA, 80 bp, synthetic construct
  source 1..80: mol_type = other DNA
cttcactgtgtagagcaggcctaagtctgttagggcctgcacaacatcattgagtggggtctgtgattgcttggccatgc

SEQ ID NO: 73256 - DNA, 80 bp, synthetic construct
  source 1..80: mol_type = other DNA
atgccattgtcagactgggcatcgtgccaaattggttgttcaagagtgatgagtctttcacatcccacaccctaacaata

SEQ ID NO: 73257 - DNA, 80 bp, synthetic construct
  source 1..80: mol_type = other DNA
ccattggttccttgctgtggtcttctcattcccaccatttgcaagatttcagacctctggtcgagttgttgtgtggtaag

SEQ ID NO: 73258 - DNA, 80 bp, synthetic construct
  source 1..80: mol_type = other DNA
gttccccaaatacaccccagaggtctgtggtcgctctgacctcattatcttggccttcagcttctccagatcggctgcca

SEQ ID NO: 73259 - DNA, 80 bp, synthetic construct
  source 1..80: mol_type = other DNA
gggacataagttcatcagaactgagtctccccacttttaggatgtttttcttggaggtggacttgagttccacaagagag

SEQ ID NO: 73260 - DNA, 80 bp, synthetic construct
  source 1..80: mol_type = other DNA
tgaactgtctggtttagacttctgagtctctgtaggtccttgtcatctctcttgtccttccgcataattctctgtacatt

SEQ ID NO: 73261 - DNA, 80 bp, synthetic construct
  source 1..80: mol_type = other DNA
gctgacttcggagaagtcaagcccgttgagaaggctggttgcatctttgataacagcagctttcacattggatgtgaagc

SEQ ID NO: 73262 - DNA, 80 bp, synthetic construct
  source 1..80: mol_type = other DNA
gtcagtgctcaacttgacaatgcccaatgcttgctcagtcaacaactcccaccattatataagtatggggagttccgggc

SEQ ID NO: 73263 - DNA, 80 bp, synthetic construct
  source 1..80: mol_type = other DNA
cctgtagctccctccttagggcctgcgtccactggaaactcttgatttccttggacagagacatgctgcagcggtgaaat

SEQ ID NO: 73264 - DNA, 80 bp, synthetic construct
  source 1..80: mol_type = other DNA
tccttggacagagacatgctgcagcggtgaaatttggctcagtagaaatgcgcaatcaattgcctaggatccactgtgcg

SEQ ID NO: 73265 - DNA, 80 bp, synthetic construct
  source 1..80: mol_type = other DNA
tggagctcacatttaccaatgactcgatactctctcacaatttttgcaatctgactgacagtttcaaaaaaagttcgttt

SEQ ID NO: 73266 - DNA, 80 bp, synthetic construct
  source 1..80: mol_type = other DNA
gaccacacattgatgagcatagtcacaagcctgcacctcagtatccgaggttttaacaattacaaggctgtgtcctgcga

SEQ ID NO: 73267 - DNA, 80 bp, synthetic construct
  source 1..80: mol_type = other DNA
cttcaacaatggcatcaccatacagtacaatctctccttctctagagcagaggatgctatcagacagtgcagaactttca

SEQ ID NO: 73268 - DNA, 80 bp, synthetic construct
  source 1..80: mol_type = other DNA
gaggtagagttctggatatgttcagaactgcctttggtggaaagcacatgaggagtggctatggttggaaagattctcaa

SEQ ID NO: 73269 - DNA, 80 bp, synthetic construct
  source 1..80: mol_type = other DNA
gggagaaccacttggtgcagtcaaactgattaccaatatttgattattcaaaacaggacttgggagaaccattgtacgta

SEQ ID NO: 73270 - DNA, 80 bp, synthetic construct
  source 1..80: mol_type = other DNA
gggtcagatagtgacaatgttcgaggctctgcctcacatcattgatgaagtcatcaacattgtcatcattgtgcttgtca

SEQ ID NO: 73271 - DNA, 80 bp, synthetic construct
  source 1..80: mol_type = other DNA
tgcaggcccttttggtcttgccagggttctctttgctcaagagaaaacaaaatacctgacaagaagacttgcagggacat

SEQ ID NO: 73272 - DNA, 80 bp, synthetic construct
  source 1..80: mol_type = other DNA
ttacttggacactgtctgattcatcaggtacagagactcctggtggttactgtctaacacggtggatgatacttgctgca

SEQ ID NO: 73273 - DNA, 80 bp, synthetic construct
  source 1..80: mol_type = other DNA
gatttgaaatgctttggaaacactgctgttgccaaatgcaacatgaatcatgatgaggaattctgtgatgtgctcaggct

SEQ ID NO: 73274 - DNA, 80 bp, synthetic construct
  source 1..80: mol_type = other DNA
cgcaccggggatcctaggctttttggattgcgctttcctctggatcaactgagtgttgagctctgtttgatagaggaatg

SEQ ID NO: 73275 - DNA, 80 bp, synthetic construct
  source 1..80: mol_type = other DNA
attgattacaataaggctgccttgagtaaatttaaggaagatgtggagtctgctttacatgtattcaaaacaacagtcaa

SEQ ID NO: 73276 - DNA, 80 bp, synthetic construct
  source 1..80: mol_type = other DNA
ctctctgatctctgatcagctattgatgagaaatcacctaagagatttgatgggggtaccatactgtaattactcaaaat

SEQ ID NO: 73277 - DNA, 80 bp, synthetic construct
  source 1..80: mol_type = other DNA
tttggtatttagagcacgccaaaactggtgagactagtgtacctaaatgttggcttgtcaccaatggttcctatttgaat

SEQ ID NO: 73278 - DNA, 80 bp, synthetic construct
  source 1..80: mol_type = other DNA
gagacccactttagtgatcagatcgagcaagaggcagacaacatgatcacagagatgttaaggaaagattacataaagag

SEQ ID NO: 73279 - DNA, 80 bp, synthetic construct
  source 1..80: mol_type = other DNA
gcaagggagcacccctctggccttgatggactttctaatgttttctacatcagcatatttgatcagcgtttttctgcacc

SEQ ID NO: 73280 - DNA, 80 bp, synthetic construct
  source 1..80: mol_type = other DNA
ttgtgaagataccaacacacagacatgtaaagggtggcacatgtccaaagccacaccgcctaaccaataaaggtatctgc

SEQ ID NO: 73281 - DNA, 80 bp, synthetic construct
  source 1..80: mol_type = other DNA
agctgtggtgcattcaaggtgcccggcgtaaaaaccgtctggaagagacgctgaacaacagcgcctccctgactctccac

SEQ ID NO: 73282 - DNA, 80 bp, synthetic construct
  source 1..80: mol_type = other DNA
aataacgagcattaaagctgtgtataactttgccacatgcgggctatttggcttgctcagcttccttctcttggcaggca

SEQ ID NO: 73283 - DNA, 80 bp, synthetic construct
  source 1..80: mol_type = other DNA
ctcgaaagaggtggagagtcagggaggcccctagggggtcttagagtgttacaacattaggccctctgaagatcaggtca

SEQ ID NO: 73284 - DNA, 80 bp, synthetic construct
  source 1..80: mol_type = other DNA
tgtggtaggatgttgtgaacggcttttaggtcaggaagtcttgccttagaagcactctcaaagatgatgcagtccatgag

SEQ ID NO: 73285 - DNA, 80 bp, synthetic construct
  source 1..80: mol_type = other DNA
tgcacaatgtggggtgatctcctttttcttcttgtccctcactattccagtgtgcatcttgcatagccagccatacttgt

SEQ ID NO: 73286 - DNA, 80 bp, synthetic construct
  source 1..80: mol_type = other DNA
cccacactttgtcttcatattctcttgaagcttcctttgtcatttcgacatcaataagctttatgtcccttctattttgt

SEQ ID NO: 73287 - DNA, 80 bp, synthetic construct
  source 1..80: mol_type = other DNA
gagtccagaagctttctgatatcatcagaaccttgacaacttaaaaccatcccttgtgggagagcacctataactgatga

SEQ ID NO: 73288 - DNA, 80 bp, synthetic construct
  source 1..80: mol_type = other DNA
agtcagcccaggttgcgcattgaaaagatcagcaagatccatgccgtgtgagtacttagagtcttgcttaaattgctttt

SEQ ID NO: 73289 - DNA, 80 bp, synthetic construct
  source 1..80: mol_type = other DNA
gatcagtaggttctctatagaaatgtataaactgtccattttgtggttggaatactgctatctccactgggtcgttaaat

SEQ ID NO: 73290 - DNA, 80 bp, synthetic construct
  source 1..80: mol_type = other DNA
ctaccttcaatgtcaatccacgtgggggcattaggatcaattccccccatgaggtcttttagtagcattgtctgactata

SEQ ID NO: 73291 - DNA, 80 bp, synthetic construct
  source 1..80: mol_type = other DNA
gcttaagcctacctgtggcgggcctgctgccccaggcactggtcttggtgagttggctgcaagtctttcatttgtgaggt

SEQ ID NO: 73292 - DNA, 80 bp, synthetic construct
  source 1..80: mol_type = other DNA
gatcttgtggtatgtacggtcttagtggtcctgatgtttacaaaggggtttatcagttcaaatcgctagaattcgatatg

SEQ ID NO: 73293 - DNA, 80 bp, synthetic construct
  source 1..80: mol_type = other DNA
accttgtagaggatgttttcataagggttcctatccccaacttgatccgagacaaacatattgagctttttcttggcccc

SEQ ID NO: 73294 - DNA, 80 bp, synthetic construct
  source 1..80: mol_type = other DNA
aaggactgcctttaggaggtcttcactattgcttggctttatgaggatggattccagcatgttccctccatctagcagag

SEQ ID NO: 73295 - DNA, 80 bp, synthetic construct
  source 1..80: mol_type = other DNA
ctgcccctgctttcacagcggcaccaagactgaaattgtagccagaaatgttgatgctggactgttgttcagttatgatt

SEQ ID NO: 73296 - DNA, 80 bp, synthetic construct
  source 1..80: mol_type = other DNA
cccaaaactgggtgtttgtctttcagcctctcaagatcactgagatttgggtatttgactgtgtagagcagcccaaggtc

SEQ ID NO: 73297 - DNA, 80 bp, synthetic construct
  source 1..80: mol_type = other DNA
tgtgagtgcctgcacaacatcattgagtggagtctgtgactgttttgccatgcaagccattgttagactcggcattgtgc

SEQ ID NO: 73298 - DNA, 80 bp, synthetic construct
  source 1..80: mol_type = other DNA
caaactgattgttcaggagtgatgagtctttcacatcccaaaccctcaccacaccgtttgcaccctgttgaggctttctc

SEQ ID NO: 73299 - DNA, 80 bp, synthetic construct
  source 1..80: mol_type = other DNA
attccaaccatttgaaggatttgggatctctgatcaagctgttgtgctgttagatttcccatgtaaactccggaagcttg

SEQ ID NO: 73300 - DNA, 80 bp, synthetic construct
  source 1..80: mol_type = other DNA
gggcctctcagatctcatgatcttcgccttcaacttctcaaggtcagctgcaagagacatcagttcctctgcactgagtc

SEQ ID NO: 73301 - DNA, 80 bp, synthetic construct
  source 1..80: mol_type = other DNA
ttcccactttcagaacattcttttttgatgtcgacctcaagtccacaagagaatacacagtctgattgaggctcctgagt

SEQ ID NO: 73302 - DNA, 80 bp, synthetic construct
  source 1..80: mol_type = other DNA
ctctgtagatctttatcatccctcttctcctttctcatgattctctgaacattactgacctcagagaagtccaacccatt

SEQ ID NO: 73303 - DNA, 80 bp, synthetic construct
  source 1..80: mol_type = other DNA
tcccacttaaacctgacaatgcccaatgcatgttcagttaataactctcaccactacattagcatggggacatctggact

SEQ ID NO: 73304 - DNA, 80 bp, synthetic construct
  source 1..80: mol_type = other DNA
cagaagacttgttgcatccttgatgacagcagctttcacatctgatgtgaaactctgcagctctctcctcaacgcctgtg

SEQ ID NO: 73305 - DNA, 80 bp, synthetic construct
  source 1..80: mol_type = other DNA
tccactggaagcttttaacttctttggacaaagacattctgttgctcaatgatttcccaagacaaatgcgcaatcaaatg

SEQ ID NO: 73306 - DNA, 80 bp, synthetic construct
  source 1..80: mol_type = other DNA
cttctttggacaaagacattctgttgctcaatgatttcccaagacaaatgcgcaatcaaatgcctaggatccactgtgcg

SEQ ID NO: 73307 - DNA, 80 bp, synthetic construct
  source 1..80: mol_type = other DNA
ggagctaacttttactaatgattccatcttgcgccataatttctgcaatttgacttctgccttcaataagaggacctttg

SEQ ID NO: 73308 - DNA, 80 bp, synthetic construct
  source 1..80: mol_type = other DNA
accatacactcatgagtatagtttcaagtttacacctcagcatcagagggcacaccgactacaaggcagtgtcctgtgat

SEQ ID NO: 73309 - DNA, 80 bp, synthetic construct
  source 1..80: mol_type = other DNA
ttcaatgacggtattacaattcagtacaatctgacattttcagatgcacagagtgctataaaccaatgtaggacttttag

SEQ ID NO: 73310 - DNA, 80 bp, synthetic construct
  source 1..80: mol_type = other DNA
aggtagggttctggacatgtttaggactgcctttggaggacagcacatgagaagtggctggggctggacaggctcagatg

SEQ ID NO: 73311 - DNA, 80 bp, synthetic construct
  source 1..80: mol_type = other DNA
gtaagactacctggtgcagccagacaagttatcaatacttgatcatacagaatagaacttgggaaaaccattgcagatat

SEQ ID NO: 73312 - DNA, 80 bp, synthetic construct
  source 1..80: mol_type = other DNA
ggtcagattgtgacaatgtttgaggccttgcctcacatcatcgatgaggttatcaacattgtcatcattgtcctcatcat

SEQ ID NO: 73313 - DNA, 80 bp, synthetic construct
  source 1..80: mol_type = other DNA
gcaggcccctttgggatatccagaattctccttgctcaggaaaagacaaaatttctcaccaggagacttgcaggcacatt

SEQ ID NO: 73314 - DNA, 80 bp, synthetic construct
  source 1..80: mol_type = other DNA
cacttggactttgtcagactcctcaggggtggaaaatccgggtggttattgcctaaccaaatggatgattcttgctgcag

SEQ ID NO: 73315 - DNA, 80 bp, synthetic construct
  source 1..80: mol_type = other DNA
aacttaaatgttttggaaacacagctgtcgcaaaatgcaatgtcaatcatgacgaagagttctgtgatatgctccgactg

SEQ ID NO: 73316 - DNA, 80 bp, synthetic construct
  source 1..80: mol_type = other DNA
cgcacagtggatcctaggctttttggattgcgctttcctccaggtcaactgagtgtggggctccgtctcgtcagaggatg

SEQ ID NO: 73317 - DNA, 80 bp, synthetic construct
  source 1..80: mol_type = other DNA
gttcttacttaaatgaaacccattttagtgaccaaatcgagcaggaagcagataacatgatcacagatatgttgagaaag

SEQ ID NO: 73318 - DNA, 80 bp, synthetic construct
  source 1..80: mol_type = other DNA
atcttgtgaaaataccaacacacagacacattaagggtggctcatgcccaaaaccacatcgtttgacgaacaaggggatt

SEQ ID NO: 73319 - DNA, 80 bp, synthetic construct
  source 1..80: mol_type = other DNA
tgtagttgtggtgcttttaaggtacctggtgtaaaaactgtttggaagagacgctaaacaacagcgcctccctgactctc

SEQ ID NO: 73320 - DNA, 80 bp, synthetic construct
  source 1..80: mol_type = other DNA
taattaccagtattaaagcggtgtataactttgccacctgcggagtactggcactgatcagctttctccttttggctgga

SEQ ID NO: 73321 - DNA, 80 bp, synthetic construct
  source 1..80: mol_type = other DNA
agctcaagcccacttgtggtgggcctgccgccccgggtaccggcctgggtgagttagtcgtgggtctctcatttgtgagg

SEQ ID NO: 73322 - DNA, 80 bp, synthetic construct
  source 1..80: mol_type = other DNA
gatttctatctccaacttgatctgacacaaacatgttgagtttctttttaactccaaggactgctttcagaaggtcttca

SEQ ID NO: 73323 - DNA, 80 bp, synthetic construct
  source 1..80: mol_type = other DNA
tggaattgaccttcacgaacgactccatcattgctcacaaccactgcaatctgacttctgctttcaataagaaaaccttt

SEQ ID NO: 73324 - DNA, 80 bp, synthetic construct
  source 1..80: mol_type = other DNA
gatcacacacttatgagcattgtctccagcctgcacctcagtatacgaggaaactccaactacaaggcagtgtcttgtga

SEQ ID NO: 73325 - DNA, 80 bp, synthetic construct
  source 1..80: mol_type = other DNA
tgctcttagtcagtgcagaacctttagaggaagagtcttggacatgttcagaactgcctttggtggaaagtttatgagga

SEQ ID NO: 73326 - DNA, 80 bp, synthetic construct
  source 1..80: mol_type = other DNA
cgcaccggggatcctaggctttttggattgcgctttcctccaggtcagctaagagctgaataccgacccacaaaggaatg

SEQ ID NO: 73327 - DNA, 80 bp, synthetic construct
  source 1..80: mol_type = other DNA
catcgcctgaccaacaaaggaatctgtagttgtggtgcattcaaagtgcctggtgttaagactgtttggaagagacgcta

SEQ ID NO: 73328 - DNA, 80 bp, synthetic construct
  source 1..80: mol_type = other DNA
aactcaagccaacttgaggtgggcctgctgccccaggtactggtttgggtgaattggccacgaatttctcgtttgaaagg

SEQ ID NO: 73329 - DNA, 80 bp, synthetic construct
  source 1..80: mol_type = other DNA
aggtcttgcgccatgtatggccttagtggacctgacatttataagggggtctaccagttcaaatcagtcgagtttgacat

SEQ ID NO: 73330 - DNA, 80 bp, synthetic construct
  source 1..80: mol_type = other DNA
ccaaattgattatttaatagtgatgagtccttgacgtcccaaactctaaccacaccacttatgccttgctgaggtcttct

SEQ ID NO: 73331 - DNA, 80 bp, synthetic construct
  source 1..80: mol_type = other DNA
cgcaccggggatcctaggcttgtggattgcgctttcctttagatcaactgagtgcgagatctcacccagtagaaggatgg

SEQ ID NO: 73332 - DNA, 80 bp, synthetic construct
  source 1..80: mol_type = other DNA
ggcctgatgcaccaggcactggcttgggcgagtttgccgcagatctttcatttgtgagatcaattgttgtattctcccat

SEQ ID NO: 73333 - DNA, 80 bp, synthetic construct
  source 1..80: mol_type = other DNA
ctccatcatctctcatggtttttgtaatttgacctctgccttcaacaagaaaacttttgatcacacgctcatgagcatag

SEQ ID NO: 73334 - DNA, 80 bp, synthetic construct
  source 1..80: mol_type = other DNA
tttcaacaatggcattactattcagtataatttgacgttctcaaatgcacaagatgctctaaatcagtgcaggactttta

SEQ ID NO: 73335 - DNA, 80 bp, synthetic construct
  source 1..80: mol_type = other DNA
aatggacctcttactgttttctacatcggcatatctgatcagtatctttctacatcttgtgaagataccgacacacaggc

SEQ ID NO: 73336 - DNA, 80 bp, synthetic construct
  source 1..80: mol_type = other DNA
ggcccgctgctcctggcactggtctgggtgaattagcaacaggcttttcatttgtaagatcaattgttgtattttcccat

SEQ ID NO: 73337 - DNA, 80 bp, synthetic construct
  source 1..80: mol_type = other DNA
caaggactgctttcagaagatcctcgctgttacttggcttaatcaagatagactccaacatattacccccatccaacaag

SEQ ID NO: 73338 - DNA, 80 bp, synthetic construct
  source 1..80: mol_type = other DNA
ctacaccatttgcgccctgctggggtctcctcatcccaaccatctgtaagatttgagatctttgatcaagctgttgtgct

SEQ ID NO: 73339 - DNA, 80 bp, synthetic construct
  source 1..80: mol_type = other DNA
cagttcaagtcagtggagtttgacatgtctcacttaaacttgacaatgcccaatgcatgttcagtcaacaattcccacca

SEQ ID NO: 73340 - DNA, 80 bp, synthetic construct
  source 1..80: mol_type = other DNA
tgctctgagtcagtgtaggacctttagagggagagtcctagatatgttcagaactgcttttggaggaaaatacatgagaa

SEQ ID NO: 73341 - DNA, 80 bp, synthetic construct
  source 1..80: mol_type = other DNA
cgcaccggggatcctaggcttattggattgcgctttcctttagatcaactgagtgtcatcctccattcagtagagaaatg

SEQ ID NO: 73342 - DNA, 80 bp, synthetic construct
  source 1..80: mol_type = other DNA
taataacgagcatcaaggcagtgtacaattttgccacttgcggggtactttcactgctcagcttcctcattctggctggt

SEQ ID NO: 73343 - DNA, 80 bp, synthetic construct
  source 1..80: mol_type = other DNA
gaagatcagatcgtgtggcagaatattgtgaacagtttttagatcaggaagccttgccttggatgcactctcgaagatga

SEQ ID NO: 73344 - DNA, 80 bp, synthetic construct
  source 1..80: mol_type = other DNA
agcttaagcccacttgaggtggacctgctgctccgagtgctggtctgggtgtgttggctgcagatctctcacttgtaagg

SEQ ID NO: 73345 - DNA, 80 bp, synthetic construct
  source 1..80: mol_type = other DNA
aggtcctgtgccttgtatggtctcagtgggcctgacatttacaaaggggtttatcaattcaaatcagtggaatttgacat

SEQ ID NO: 73346 - DNA, 80 bp, synthetic construct
  source 1..80: mol_type = other DNA
acttcaataatggcatcaccattcaatataatctcacattctcggatgcacaagacgctctgaggcagtgtaaaaccttt

SEQ ID NO: 73347 - DNA, 80 bp, synthetic construct
  source 1..80: mol_type = other DNA
agtggtagggttctggacatgttcagaactgcttttggaggacagcatatgaggagtggctggggctggactggctcaga

SEQ ID NO: 73348 - DNA, 80 bp, synthetic construct
  source 1..80: mol_type = other DNA
gatgacttctttcaaaagagaatagaagaattcttcatgactggtgagggctacttcaatgaagtcttacaatttaaaac

SEQ ID NO: 73349 - DNA, 80 bp, synthetic construct
  source 1..80: mol_type = other DNA
taatagtagtgggaagggaacaatagaaggaggagagatgaaaaattgttctttcaatatcaccacccaaacggaggaga

SEQ ID NO: 73350 - DNA, 80 bp, synthetic construct
  source 1..80: mol_type = other DNA
gaaggaaagaatatgcacttttttataaacttgatgtaatgcaatcaggattaggcaatactagctataggttgataaat

SEQ ID NO: 73351 - DNA, 80 bp, synthetic construct
  source 1..80: mol_type = other DNA
gcatgaagactattattgtcctaagctacattttttgcctggctttgggccaagagtactcaagaaatggcgacagcatg

SEQ ID NO: 73352 - DNA, 80 bp, synthetic construct
  source 1..80: mol_type = other DNA
ggcaagcagcagatctcaaaagcactcaagcagtcatcgatcaaatcagtgggaaattgaacagaataatcgagaaaaca

SEQ ID NO: 73353 - DNA, 80 bp, synthetic construct
  source 1..80: mol_type = other DNA
aaaggtatcgatttgaagtcaggatacaaagagtgggttctatggatttcctttgccatatcgtgcttcatgctctgtgt

SEQ ID NO: 73354 - DNA, 80 bp, synthetic construct
  source 1..80: mol_type = other DNA
ctctgtgttgttctgctggggttcataatgtgggcctgccaaaagggcaacattaagtgcaacatttgcatctgagcata

SEQ ID NO: 73355 - DNA, 80 bp, synthetic construct
  source 1..80: mol_type = other DNA
tactgaaatggttcagagttcctcaacaggggaaatatgcaataatccccatcgagttctcgacggaatggactgcacgc

SEQ ID NO: 73356 - DNA, 80 bp, synthetic construct
  source 1..80: mol_type = other DNA
taatagatgctctattgggagaccctcattgtgatagccttcagaatgagacatgggacctcttcattgagcgcagcgaa

SEQ ID NO: 73357 - DNA, 80 bp, synthetic construct
  source 1..80: mol_type = other DNA
actgttacccttatgatgtgccaggttatgcttcacttaggtcaatagttgcttcgtccggcactctggaatttatcaat

SEQ ID NO: 73358 - DNA, 80 bp, synthetic construct
  source 1..80: mol_type = other DNA
attgggccggggtcactcaaaatggaggaagtagtgcttgcaaaaggggatccgataacagtttttttagtcgactgaat

SEQ ID NO: 73359 - DNA, 80 bp, synthetic construct
  source 1..80: mol_type = other DNA
tggttgtacaaatcaggaaacacatatccaatgctgaatgtgaccaagcccaacaatgacaactttgacaaactatatgt

SEQ ID NO: 73360 - DNA, 80 bp, synthetic construct
  source 1..80: mol_type = other DNA
ttgggggattcatcaccctagtacgaaccaagagcaaacccgcctatatgctcaagagtcagggaggatcacagtctcca

SEQ ID NO: 73361 - DNA, 80 bp, synthetic construct
  source 1..80: mol_type = other DNA
caaatgtcgggcctagaccctggataaggggactatctagtaggataagcatctattggacaatagttaaatctggtgat

SEQ ID NO: 73362 - DNA, 80 bp, synthetic construct
  source 1..80: mol_type = other DNA
atagtaacgggaacctaattgctcctcggggttatttcagattgcgcgctggtaaaagttcaataataagatctgatgca

SEQ ID NO: 73363 - DNA, 80 bp, synthetic construct
  source 1..80: mol_type = other DNA
gcaacactgtgcctggggcatcatgcagtgcaaaatgggacactggtgaaaacaatcacaaatgatcaagttgaagtgac

SEQ ID NO: 73364 - DNA, 80 bp, synthetic construct
  source 1..80: mol_type = other DNA
ggggcatgtcccaagtatgttaagcaaaacactctgaaactggcaacagggatgcggaacagaccagagaaacagaccag

SEQ ID NO: 73365 - DNA, 80 bp, synthetic construct
  source 1..80: mol_type = other DNA
gagtgaaaggatgggcctttgacgatgggaatgatgtgtggatgggaagaacgatcaaagaggattcacgttcaggttat

SEQ ID NO: 73366 - DNA, 80 bp, synthetic construct
  source 1..80: mol_type = other DNA
agtattggcacaacccccccacgaacagccaaatgatatgtgaaccaattatagtggaaaggaacataacagagatagta

SEQ ID NO: 73367 - DNA, 80 bp, synthetic construct
  source 1..80: mol_type = other DNA
acaccccgtcagtcagcatggaatggaggacgaagatagagaagtgctggtctggagatttgacagcagcctggcattca

SEQ ID NO: 73368 - DNA, 80 bp, synthetic construct
  source 1..80: mol_type = other DNA
gtaccataaatgtacatattaggaataggaataggagcgctaatagtagcaggtatcttatgtataatagtgtggactat

SEQ ID NO: 73369 - DNA, 80 bp, synthetic construct
  source 1..80: mol_type = other DNA
cagttaaagtgtgtttgataggaaccatctcaaagtttcaaccttccgacacccttttattccttggtcctctccaacaa

SEQ ID NO: 73370 - DNA, 80 bp, synthetic construct
  source 1..80: mol_type = other DNA
gtgcaggcaatgcgactgatacaagctgacatcaatttcgtaagagaacatttagtgaagaatgaggaacgaggtgctct

SEQ ID NO: 73371 - DNA, 80 bp, synthetic construct
  source 1..80: mol_type = other DNA
tgcttcagatcaatatgatactcggttagcatgtaatgaagtcttaaagaattatcctgaaacaccactgcagcttctcg

SEQ ID NO: 73372 - DNA, 80 bp, synthetic construct
  source 1..80: mol_type = other DNA
cgaagcaatgtttaatttgaaattccatgtcacaggtcctaaagtacgaacatttgatattcctaactatagacctcaag

SEQ ID NO: 73373 - DNA, 80 bp, synthetic construct
  source 1..80: mol_type = other DNA
tctcctgtgttcaactacaataaaagcaccaagagactcacaatcttaggaaaagatgcgggtgctttgagtgaagaccc

SEQ ID NO: 73374 - DNA, 80 bp, synthetic construct
  source 1..80: mol_type = other DNA
ccgaaagtctataggacttattttgaaaaagttgaaagattaaaacatgggacttttggtcctgttcatttcagaaacca

SEQ ID NO: 73375 - DNA, 80 bp, synthetic construct
  source 1..80: mol_type = other DNA
tcttaatcttggacaaaaggagcacacgaagacttcttattggtgggacggtctccaatcgtctgatgattttgctctga

SEQ ID NO: 73376 - DNA, 80 bp, synthetic construct
  source 1..80: mol_type = other DNA
tccggccaaaaccatggaatatgacgcggtagccacaacgcattcctgggtacccaggaaaaaccgatccatcttgaaca

SEQ ID NO: 73377 - DNA, 80 bp, synthetic construct
  source 1..80: mol_type = other DNA
caagccagagagggatacttgaagacgagcagatgtaccaaaaatgctgcaacctttttgaaaagttctttcccagcagc

SEQ ID NO: 73378 - DNA, 80 bp, synthetic construct
  source 1..80: mol_type = other DNA
tacgacaatacttcaacccgatgatcgttgaacttgcagaaaaaacaatgaaagaatacggggagaacccaaagatcgaa

SEQ ID NO: 73379 - DNA, 80 bp, synthetic construct
  source 1..80: mol_type = other DNA
agataaagtctgaagagacgcatattcatattttctcgtttacaggagaagaaatggcaacaaaggccgactacacactg

SEQ ID NO: 73380 - DNA, 80 bp, synthetic construct
  source 1..80: mol_type = other DNA
cacttaggttgccatgtggacctccttgttttcaaaggtccaaatttcttctaatggatgctctgaaattaagcattgag

SEQ ID NO: 73381 - DNA, 80 bp, synthetic construct
  source 1..80: mol_type = other DNA
tctgtttgatagttggaatagttagtctattactgcagataggaaatatagtctcgttatggataaaccattcaattcaa

SEQ ID NO: 73382 - DNA, 80 bp, synthetic construct
  source 1..80: mol_type = other DNA
gaagcagtatttctttctgtggagtagacagtgaaactgtaagctggtcatggccagacggagctgatctgccattcacc

SEQ ID NO: 73383 - DNA, 80 bp, synthetic construct
  source 1..80: mol_type = other DNA
atgaaggcaatactattgatcttgctgtgcacatttacagcagcaaacgcagacacactatgtgtaggctatcatgcaaa

SEQ ID NO: 73384 - DNA, 80 bp, synthetic construct
  source 1..80: mol_type = other DNA
agccgccgccctcaagtggcatcgaagcacctgctgttgttgatacttcaccactggtcccccctgtgcaggctcagccc

SEQ ID NO: 73385 - DNA, 80 bp, synthetic construct
  source 1..80: mol_type = other DNA
ccaacccccgaccaggtagcgcctccgtcagacttggttgatggtggtgtccgccttgacctgactagcgcctctgcgga

SEQ ID NO: 73386 - DNA, 80 bp, synthetic construct
  source 1..80: mol_type = other DNA
gcccccggcgcccgtgcagtctgtaacccagcccggaccccgtcggcgactgctccatacctaccctgacggctcgaagg

SEQ ID NO: 73387 - DNA, 80 bp, synthetic construct
  source 1..80: mol_type = other DNA
cgttggagctggatgcggctactgaggtcggccgggcatgcgctggctgtcgggttgaacccggtgtagtccattatcag

SEQ ID NO: 73388 - DNA, 80 bp, synthetic construct
  source 1..80: mol_type = other DNA
gagcaggggataataaactgctgttttttcatgatgaccacagaagtaaaagataagatgatgaaagttgctgttttttt

SEQ ID NO: 73389 - DNA, 80 bp, synthetic construct
  source 1..80: mol_type = other DNA
gtagcaataggcatagcagcattaatagtagcactaataatagcaatagttgtgtggattatagcatatatagaatatag

SEQ ID NO: 73390 - DNA, 80 bp, synthetic construct
  source 1..80: mol_type = other DNA
atgaagaccatcattattgttctgagctgcattttctgtctggcttttggccaggactattttggtaatggaaacaacac

SEQ ID NO: 73391 - DNA, 80 bp, synthetic construct
  source 1..80: mol_type = other DNA
ggagaagccagcagaccatcatctcaaacattggatctagaccttgggtgaggggtcaatctggcagaataagcatatat

SEQ ID NO: 73392 - DNA, 80 bp, synthetic construct
  source 1..80: mol_type = other DNA
cggtttgaaaagagggccttctacggaaggagtgcctgagtctatgagggcagaacaacgaagcggtgagttgagtgctg

SEQ ID NO: 73393 - DNA, 80 bp, synthetic construct
  source 1..80: mol_type = other DNA
cggtgctgaattgccatttaccattgacaagtaatttgttcaaaaaaactccttgtttctactaatacgagaccatataa

SEQ ID NO: 73394 - DNA, 80 bp, synthetic construct
  source 1..80: mol_type = other DNA
agagggataagaatcagcaaaatgggggtggatgagtattccagtacggagagggtagtggtaagcattgaccgcttttt

SEQ ID NO: 73395 - DNA, 80 bp, synthetic construct
  source 1..80: mol_type = other DNA
agatgaaggaacagctggagtggaatctgctgtcttgagaggattccttattttgggcagagaggacaagagatatgggc

SEQ ID NO: 73396 - DNA, 80 bp, synthetic construct
  source 1..80: mol_type = other DNA
ggcaccaaacgatcatatgaacaaatggagactggtggggaacgccaggatgctacagaaataagagcatcagtaggaag

SEQ ID NO: 73397 - DNA, 80 bp, synthetic construct
  source 1..80: mol_type = other DNA
gattggtggaacaagaatggtagatattctcaaccagaatccaacagaggaacaagcagtggatatatgcaaggctgcaa

SEQ ID NO: 73398 - DNA, 80 bp, synthetic construct
  source 1..80: mol_type = other DNA
ttcaacccaatgatcgttgaacttgcagaaaaaacaatgaaagaatacggggagaacccaaaaatcgaaacaaacaaatt

SEQ ID NO: 73399 - DNA, 80 bp, synthetic construct
  source 1..80: mol_type = other DNA
gcctgattaatgatccctgggttttgctcaatgcatcttggttcaactccttcctcacacatgcactaagattcctttga

SEQ ID NO: 73400 - DNA, 80 bp, synthetic construct
  source 1..80: mol_type = other DNA
atgaatacaaaccaaagaataataaccattgggacagtctgtctgatagttggaatagttagtttattactgcagatagg

SEQ ID NO: 73401 - DNA, 80 bp, synthetic construct
  source 1..80: mol_type = other DNA
gtgcgacaatgcttcaacccgatgattgttgaacttgcagaaaaagcaatgaaagagtatggagaggacctgaaaatcga

SEQ ID NO: 73402 - DNA, 80 bp, synthetic construct
  source 1..80: mol_type = other DNA
gctctgtttccctcaccattgcaataatatgcttccttatgcaaatcgccctcctggtaactactgtgacattgcatttt

SEQ ID NO: 73403 - DNA, 80 bp, synthetic construct
  source 1..80: mol_type = other DNA
actttccgcggggactttccaggaggcgtgacatgggcgggacctgggcgggaccggggagtggcgagccctcagattgc

SEQ ID NO: 73404 - DNA, 80 bp, synthetic construct
  source 1..80: mol_type = other DNA
aaactgctctttcaatatcacctcaagagtaggaaagggattgcagaaagagtatgcactcttttataaagtggatatag

SEQ ID NO: 73405 - DNA, 80 bp, synthetic construct
  source 1..80: mol_type = other DNA
ccatttccacaatatgcttcttcatgcaaattgccatcttgataactactgtaacattgcatttcaagcaatatgaattc

SEQ ID NO: 73406 - DNA, 80 bp, synthetic construct
  source 1..80: mol_type = other DNA
ctgcatcaatcggtgcttttatgtggagttgataaggggaagaaaagaggaaactgaagtcttgtggacctcaaacagta

SEQ ID NO: 73407 - DNA, 80 bp, synthetic construct
  source 1..80: mol_type = other DNA
ggatcctaggctttttggattgcgctattcaagaaaccattaaaaggtcgcatgggtcaaatcgtgacactctttgaggc

SEQ ID NO: 73408 - DNA, 80 bp, synthetic construct
  source 1..80: mol_type = other DNA
taaattcaaagaagatgttgagtctgctttgcatctttttaagatgacaatcaattcattgatttcagatcagctgttaa

SEQ ID NO: 73409 - DNA, 80 bp, synthetic construct
  source 1..80: mol_type = other DNA
tgaggaaccatctgagggacttgatgggagtgccttattgcaattactcaaagttttggtacctccagcatagtaaatca

SEQ ID NO: 73410 - DNA, 80 bp, synthetic construct
  source 1..80: mol_type = other DNA
aatgagacaagcacgcctaagtgctggcttgtaagtaatggaacttatctgaatgagactcatttcagtgatcaaattga

SEQ ID NO: 73411 - DNA, 80 bp, synthetic construct
  source 1..80: mol_type = other DNA
gcaagaagcagacaacatgatcacagagatgctcagaaaggactacttcagaagacaaggggctactcctttagcattag

SEQ ID NO: 73412 - DNA, 80 bp, synthetic construct
  source 1..80: mol_type = other DNA
tggacattttgatgttcacaacatcagcctacctaatgactgtttttttgcatctaatgaggataccaacacacagacat

SEQ ID NO: 73413 - DNA, 80 bp, synthetic construct
  source 1..80: mol_type = other DNA
ataaaagggggctcttgcccaaaaccacatcgattaactagtatgggcatttgctcctgtggtgcattcaagacaccagg

SEQ ID NO: 73414 - DNA, 80 bp, synthetic construct
  source 1..80: mol_type = other DNA
agtgaaaacagtatggaagagacggtgagctgcaccgcctccctgactctccacctcaaagaggtggagagtcagggagg

SEQ ID NO: 73415 - DNA, 80 bp, synthetic construct
  source 1..80: mol_type = other DNA
attttgccacctgtggcatcattgcgttgattggcttcctcctcttagctggtaggtcttgtggctcgaccaccaatgtc

SEQ ID NO: 73416 - DNA, 80 bp, synthetic construct
  source 1..80: mol_type = other DNA
ctccctggggagacttagagcaccactgtgttcgggcctctaaagatcaggtcatgtggcaggatgttatgaattgactt

SEQ ID NO: 73417 - DNA, 80 bp, synthetic construct
  source 1..80: mol_type = other DNA
caaatctggcagcctagcctttgaggcactctcaaagatgatgcagtccataagagcacagtggagggtgatttctttct

SEQ ID NO: 73418 - DNA, 80 bp, synthetic construct
  source 1..80: mol_type = other DNA
tctttttgtccctcactatccctgtgtgcattttacacaaccagccatatttgtcccatactttgtcttcatattccctt

SEQ ID NO: 73419 - DNA, 80 bp, synthetic construct
  source 1..80: mol_type = other DNA
gatgcctctttgctcatctctatatcaatcaacttaatgtcccttctattttgagactcaagaagcatttttatgtcttc

SEQ ID NO: 73420 - DNA, 80 bp, synthetic construct
  source 1..80: mol_type = other DNA
tgagccttggcagctgaggaccattccttgtggaagagcaccaattactgacgatgtcaggcctggctgaacgttgaaaa

SEQ ID NO: 73421 - DNA, 80 bp, synthetic construct
  source 1..80: mol_type = other DNA
ggtctgcaaggtccatgccatgtgagaattttgagtcctgtttaaattgtttttgatcaactggttctcgataaaagtgg

SEQ ID NO: 73422 - DNA, 80 bp, synthetic construct
  source 1..80: mol_type = other DNA
atatattgcccagtctctggttgaaatatagcaatttctacagggtcattgaacctaccttcaatgtcaatccaagtggg

SEQ ID NO: 73423 - DNA, 80 bp, synthetic construct
  source 1..80: mol_type = other DNA
tgcattgggatcaataccattcatcaagtccttcagcagcattgtttgactgtaactcaatcctacctgaggtggccctg

SEQ ID NO: 73424 - DNA, 80 bp, synthetic construct
  source 1..80: mol_type = other DNA
ctgcccctggcactggtctagatgaatgaattaccggtttgttgtcagacaggtcaatgatggtgttctcccatgctctc

SEQ ID NO: 73425 - DNA, 80 bp, synthetic construct
  source 1..80: mol_type = other DNA
cccactatagatgatgtgcaggctatgtatggccatccttcacctgataaacagactttgtacaggatattttcataagg

SEQ ID NO: 73426 - DNA, 80 bp, synthetic construct
  source 1..80: mol_type = other DNA
aacacccacctctacaaagggctttatgagttcaaatccttggaattcaatttatctcacttgaatttgacaatgcccaa

SEQ ID NO: 73427 - DNA, 80 bp, synthetic construct
  source 1..80: mol_type = other DNA
gttcctgtcccccacttgatcagacacaaacatgttcaacttcttttttgcaccaagaacagctttcaaaagatcctcag

SEQ ID NO: 73428 - DNA, 80 bp, synthetic construct
  source 1..80: mol_type = other DNA
tgttgctgggtttgatgtaaattgactccaacatgttgcctccgtccagcagcgcagcacctgccttcaccgcagcactt

SEQ ID NO: 73429 - DNA, 80 bp, synthetic construct
  source 1..80: mol_type = other DNA
aaactgagattgtaaccagaaatattgatgctggactgctgttctgttataacacccaacactggatgcttgtctttaag

SEQ ID NO: 73430 - DNA, 80 bp, synthetic construct
  source 1..80: mol_type = other DNA
gttctcaagatcagatagatttgggtattttactgtgtagagtaagcctaaatctgtgagcgcttgcacaacatcattga

SEQ ID NO: 73431 - DNA, 80 bp, synthetic construct
  source 1..80: mol_type = other DNA
gtggtgtttgtgactgcttagtcatgcaggccatggtaaggctgggcattgttccaaagtgattgttaaggagtgatgag

SEQ ID NO: 73432 - DNA, 80 bp, synthetic construct
  source 1..80: mol_type = other DNA
tctttcacatcccacaccctcacaacaccgttattgccttgttgagggcgtctcatccctaccatctgcagaatctggga

SEQ ID NO: 73433 - DNA, 80 bp, synthetic construct
  source 1..80: mol_type = other DNA
tctttgatcaagttgctgagctgttaggttgcccatgtagacaccagatgctcggggcccttcagacctcattatcttgg

SEQ ID NO: 73434 - DNA, 80 bp, synthetic construct
  source 1..80: mol_type = other DNA
cttttagtttttctaaatcagccgcaagagacatcagctcgtcagcactcaacctacccacctttagaacattcttcttt

SEQ ID NO: 73435 - DNA, 80 bp, synthetic construct
  source 1..80: mol_type = other DNA
ggagttgatttcagttccacaagggagtgaacggtttggttgaggcttcgaagcctttgcaagtctttatcatccctctt

SEQ ID NO: 73436 - DNA, 80 bp, synthetic construct
  source 1..80: mol_type = other DNA
atctttcctcataattctctgaacattgctaacttcagagaagtctaatccatttaaaaggctcgttgcgtctttaatga

SEQ ID NO: 73437 - DNA, 80 bp, synthetic construct
  source 1..80: mol_type = other DNA
tgcgtgttctttgaacaattctcaccattacattaatatgggcaaatccggtctggaacttacattcacaaatgattcga

SEQ ID NO: 73438 - DNA, 80 bp, synthetic construct
  source 1..80: mol_type = other DNA
cagcagcctttgtgttggaggtgaagctttgcagctctcttcttagtgcctgcgtccattggaagcttttgacctccttg

SEQ ID NO: 73439 - DNA, 80 bp, synthetic construct
  source 1..80: mol_type = other DNA
gaaagagacatcttgttgtagagcactgagacctaaaacaaattgacacacaaaagcgcaatcaaatgcctaggatccac

SEQ ID NO: 73440 - DNA, 80 bp, synthetic construct
  source 1..80: mol_type = other DNA
ttctctctcataaacattgtaacctcaccgatgccttcaaaaaggacacttttgaccacaccattatgagcataataagc

SEQ ID NO: 73441 - DNA, 80 bp, synthetic construct
  source 1..80: mol_type = other DNA
agtttacatcttagtgttaggggccatactgagtacaaagctgtgtcatgcgacttcaacaacgggatcaccatccaata

SEQ ID NO: 73442 - DNA, 80 bp, synthetic construct
  source 1..80: mol_type = other DNA
taacttgacattgcgtagttcaggtgaggctgtcaatgagtgtaggaccttcaggggaagagttctagacatgttcagaa

SEQ ID NO: 73443 - DNA, 80 bp, synthetic construct
  source 1..80: mol_type = other DNA
cagcttttggcgggaagtatatgaggagtcatatagggtggacagatggccagggaaaaacaacttggtgtagtcaaacg

SEQ ID NO: 73444 - DNA, 80 bp, synthetic construct
  source 1..80: mol_type = other DNA
gattacaattatctaatcatacagaatcgcacatgggaaaatcattgtgaatatgcaagtccatttgggtttaccagagt

SEQ ID NO: 73445 - DNA, 80 bp, synthetic construct
  source 1..80: mol_type = other DNA
tttgcctcatgtgattgacgaggccatcaatattgcaattatggtcttgataatcatcacaagtgtcaaagctgtgtaca

SEQ ID NO: 73446 - DNA, 80 bp, synthetic construct
  source 1..80: mol_type = other DNA
ccttcttgctcaagaaaaaacaaaattcattacaaggagacttgcagggacattcacctggaccttatcagattcttctg

SEQ ID NO: 73447 - DNA, 80 bp, synthetic construct
  source 1..80: mol_type = other DNA
gaaatgagaaccctggtggttattgcctcacaagatggatgctgattgctgcagatctcaagtgctttgacaatacagca

SEQ ID NO: 73448 - DNA, 80 bp, synthetic construct
  source 1..80: mol_type = other DNA
attgctaaatgcaaccttaaccacaatgaggaattctgtgacatgcttagactaatagactataataaagcagctctgca

SEQ ID NO: 73449 - DNA, 80 bp, synthetic construct
  source 1..80: mol_type = other DNA
ggatcctaggctttttggattgcgctttcctctgattggagagtgtggtgcatccatgggccagcttgtgacaatgtttg

SEQ ID NO: 73450 - DNA, 80 bp, synthetic construct
  source 1..80: mol_type = other DNA
tacataaatttaaggaagatgtcgagtctgccttgcatcttttcaagatcacagtgaattcattgatctctgatcagctt

SEQ ID NO: 73451 - DNA, 80 bp, synthetic construct
  source 1..80: mol_type = other DNA
ttaatgaggaatcatttaagagatttgatgggagtaccttactgtaactattcaaaattttggtacctagaacatagcag

SEQ ID NO: 73452 - DNA, 80 bp, synthetic construct
  source 1..80: mol_type = other DNA
gacaggtgagtctagcacccctaaatgttggcttgtttcaaccgggtcctatctgaatgagactcattttagtgatcaaa

SEQ ID NO: 73453 - DNA, 80 bp, synthetic construct
  source 1..80: mol_type = other DNA
tcgagcaagaagcagataatatgattacagaaatgcttaggaaagattatctcaaaaggcagggaagcacccccttagca

SEQ ID NO: 73454 - DNA, 80 bp, synthetic construct
  source 1..80: mol_type = other DNA
ctagtggacatcttgatgttcaccacgtcagcctatctggtcagcattttcttgcatttgatcagaatccccacacacag

SEQ ID NO: 73455 - DNA, 80 bp, synthetic construct
  source 1..80: mol_type = other DNA
acatataaaggggggttcatgcccaaaaccacacaggctgaccggcatgggtgtctgtagctgtggtgcatttaatgtac

SEQ ID NO: 73456 - DNA, 80 bp, synthetic construct
  source 1..80: mol_type = other DNA
caggtgtaaagacggtgtggaagagacgctgagtggcagcgcctccctgactccccatctcaagagagatggggagtcag

SEQ ID NO: 73457 - DNA, 80 bp, synthetic construct
  source 1..80: mol_type = other DNA
tacaactttgccacttgtggcattattgcactagtgggcttccttttcttggctggcagatcctgtggatcaagcgttca

SEQ ID NO: 73458 - DNA, 80 bp, synthetic construct
  source 1..80: mol_type = other DNA
ggaggccctgtgagggtcttagagtgtcacagtgtttgggcctctaaagatgaggtcgtgtggcaggatgttgtggatgg

SEQ ID NO: 73459 - DNA, 80 bp, synthetic construct
  source 1..80: mol_type = other DNA
cctttagctctggtagccttgcctttgaggcactctcaaaaatgatgcagtccataagagcacagtgtggggtgatttcc

SEQ ID NO: 73460 - DNA, 80 bp, synthetic construct
  source 1..80: mol_type = other DNA
ttcttttttttgtccctcactattcctgtgtgcatcttacacagccaaccatacttgtcccaaaccttgtcttcgtattc

SEQ ID NO: 73461 - DNA, 80 bp, synthetic construct
  source 1..80: mol_type = other DNA
cctggaggcctccttgctcatctcaatgtctattaatttaatatctctcctgttttgagactcaaggagctttttgatgt

SEQ ID NO: 73462 - DNA, 80 bp, synthetic construct
  source 1..80: mol_type = other DNA
catctgacccctgacagctgaggaccataccttgagggagagcgccgattacagaagaggttagtcccggctgaacgtta

SEQ ID NO: 73463 - DNA, 80 bp, synthetic construct
  source 1..80: mol_type = other DNA
aaaaggtcagtaaggtccatcccatgtgaatgttttgcgtcctgtttgaactgcttctggtccgttggttctctgtaaaa

SEQ ID NO: 73464 - DNA, 80 bp, synthetic construct
  source 1..80: mol_type = other DNA
atgaatgtattgcccagtctctggttggaatatggcaacctccacaggatcattatacctgccttcaatgtcaatccatg

SEQ ID NO: 73465 - DNA, 80 bp, synthetic construct
  source 1..80: mol_type = other DNA
tgggagcattaggatcaatcccgttcatcaaatccttcagcaacattgtttgactgtaacttagtcccacctgaggtggt

SEQ ID NO: 73466 - DNA, 80 bp, synthetic construct
  source 1..80: mol_type = other DNA
cctgctgctcctggcactggtctggataaatgagctgccggcctgttgtcagataagtcaatgatggtgttttcccatgc

SEQ ID NO: 73467 - DNA, 80 bp, synthetic construct
  source 1..80: mol_type = other DNA
tctccccactatggatgtcctacatgcgatgtagggccacccttcacctgaaagacacaccttgtataaaatattttcat

SEQ ID NO: 73468 - DNA, 80 bp, synthetic construct
  source 1..80: mol_type = other DNA
ttcaaatccccacttgtacaaagggatttaccaattcaagtccttggaattcaatttatcacatctaaatctgacaatgc

SEQ ID NO: 73469 - DNA, 80 bp, synthetic construct
  source 1..80: mol_type = other DNA
atgggtttctatccccaacttggtcagatacaaacatattcatttttctccttgcattaagaacggctttcaaaaggtcc

SEQ ID NO: 73470 - DNA, 80 bp, synthetic construct
  source 1..80: mol_type = other DNA
tcagaattgctaggcttgataaaaattgactccagcatattgcctccgtccaacagtgatgctccagctttcacagcagc

SEQ ID NO: 73471 - DNA, 80 bp, synthetic construct
  source 1..80: mol_type = other DNA
actcagactaaagttgtacccagagatgttgatactggattgctgttctgttattgtgttgagaactgggtgtttgtctt

SEQ ID NO: 73472 - DNA, 80 bp, synthetic construct
  source 1..80: mol_type = other DNA
tcaggctctcaagatcatttaaatttggatacttaactgtgtaaagcaaccccaagtctgttaatgcttgaactacatca

SEQ ID NO: 73473 - DNA, 80 bp, synthetic construct
  source 1..80: mol_type = other DNA
ttaaggggagtttgcgactgtttagccatgcatgccatagttaagctgggcattgtgccaaattggttgttcaaaagaga

SEQ ID NO: 73474 - DNA, 80 bp, synthetic construct
  source 1..80: mol_type = other DNA
tgagtctttcacatcccagactctcacgacaccattgttcccctgttggggtctcctcatcccaaccatttgtagaatct

SEQ ID NO: 73475 - DNA, 80 bp, synthetic construct
  source 1..80: mol_type = other DNA
gggatctctgatcaagttgttgtgcagttaggttgcccatatagattccggaagcctgtggcctctcagacctcattatt

SEQ ID NO: 73476 - DNA, 80 bp, synthetic construct
  source 1..80: mol_type = other DNA
ttagcctttaatttttccagatcagctgcaagaatcatcaattcgtctgcactgagtcttcctacctttaatacattctt

SEQ ID NO: 73477 - DNA, 80 bp, synthetic construct
  source 1..80: mol_type = other DNA
ctttgatgttgattttaactccacaagagaatgtacagtttggttgaggctccttagtctctgtaagtctttgtcatccc

SEQ ID NO: 73478 - DNA, 80 bp, synthetic construct
  source 1..80: mol_type = other DNA
ttttgtccttcctcatgattctctggacattactcacctcagaaaaatcaagtccattcaaaaggctggttgcatccttg

SEQ ID NO: 73479 - DNA, 80 bp, synthetic construct
  source 1..80: mol_type = other DNA
ccaacgcatgctcccttaacaactcccatcattacatcagtatgggcagaactggcttggaactaactttcacaaatgac

SEQ ID NO: 73480 - DNA, 80 bp, synthetic construct
  source 1..80: mol_type = other DNA
atgacagcagcctttgtgttcaaggtaaagctctgcagttcccttctcaatgtctgcgtccactgaaagctcttgacttc

SEQ ID NO: 73481 - DNA, 80 bp, synthetic construct
  source 1..80: mol_type = other DNA
cttggacagggacatcctgtggggaagcactggcacccagacaaaagcgcaatcaaatgcctaggatccactgtgcggga

SEQ ID NO: 73482 - DNA, 80 bp, synthetic construct
  source 1..80: mol_type = other DNA
tcaatactcaaccacaatttctgtaacctgactgatgccttcaagaagagcaccttcgaccacacactcatgagtataat

SEQ ID NO: 73483 - DNA, 80 bp, synthetic construct
  source 1..80: mol_type = other DNA
aggaagtttacatctcagtgtcaggggtcacactgactacagggctgtgtcatgtgatttcaacagtggcattactatac

SEQ ID NO: 73484 - DNA, 80 bp, synthetic construct
  source 1..80: mol_type = other DNA
agtacaatttgagtctccacacaatggaggatgccatcaatcagtgtagaacttttaagggtagagtccttgatatgttc

SEQ ID NO: 73485 - DNA, 80 bp, synthetic construct
  source 1..80: mol_type = other DNA
agaacagcctttggagggaagtacatgaggagcggcgtgggttggacagatgcacagggtaagacaacatggtgcagcca

SEQ ID NO: 73486 - DNA, 80 bp, synthetic construct
  source 1..80: mol_type = other DNA
gacagactataattatcttatcatacagaacaggacgtgggagaatcactgtgagtatgcaggcccttttggaatctcca

SEQ ID NO: 73487 - DNA, 80 bp, synthetic construct
  source 1..80: mol_type = other DNA
aggctttgcctcatgtgatcgacgaagccatcaatattgtgatggttgcgctcatcattgtcactagtataaaggctgtt

SEQ ID NO: 73488 - DNA, 80 bp, synthetic construct
  source 1..80: mol_type = other DNA
gaatccttctctcccaagaaaaaacaaaatttctgacaaggagacttgcggggacatttacttggactctgacagactct

SEQ ID NO: 73489 - DNA, 80 bp, synthetic construct
  source 1..80: mol_type = other DNA
tcaggggaagacactccaggaggctattgcctcaccaagtggatgctggttgctgcagatatgaaatgctttggcaacac

SEQ ID NO: 73490 - DNA, 80 bp, synthetic construct
  source 1..80: mol_type = other DNA
agcagttgcaaaatgcaatctcaaccatgatgaagaattttgtgacatgctaaggctgatagattataataaagctgcat

SEQ ID NO: 73491 - DNA, 80 bp, synthetic construct
  source 1..80: mol_type = other DNA
aaccacacaggctgaccggcatgggtgtctgtagctgtggtgcatttaatgtaccaggtgtaaagacggtgtggaagaga

SEQ ID NO: 73492 - DNA, 80 bp, synthetic construct
  source 1..80: mol_type = other DNA
gcttatgagaaatcacttgagagacttgatgggggtgccttattgtaattactcaagattctggtatttacagcatagta

SEQ ID NO: 73493 - DNA, 80 bp, synthetic construct
  source 1..80: mol_type = other DNA
agacaaatgagacaagcacacctaaatgctggctcgtgaccaatggaacttatttgaatgagactcacttcagtgatcaa

SEQ ID NO: 73494 - DNA, 80 bp, synthetic construct
  source 1..80: mol_type = other DNA
acaatttgacatttcacagttcaaatgaggtcatcaatgagtgcaggacttttagaggaagagttttggatatgttcagg

SEQ ID NO: 73495 - DNA, 80 bp, synthetic construct
  source 1..80: mol_type = other DNA
cttggtagtaatatcaatagtagcattagtagtaccactaataatagcaatagttgtgtggactatagcatttatagaat

SEQ ID NO: 73496 - DNA, 80 bp, synthetic construct
  source 1..80: mol_type = other DNA
tattacacctgagccccccccctccccccccgtccgtaagccacctacaccaccaccggcccgcacccgccggctacttt

SEQ ID NO: 73497 - DNA, 80 bp, synthetic construct
  source 1..80: mol_type = other DNA
aacagcatagaataaaaatagaggagttaagggttcacctactgaactgggggtttactacaccagacaaaaagcatcag

SEQ ID NO: 73498 - DNA, 80 bp, synthetic construct
  source 1..80: mol_type = other DNA
taaagcatctgtgcagactcctcaggggagccaaagcactaacagatatagtaacactgactgaggaagcagaattggaa

SEQ ID NO: 73499 - DNA, 80 bp, synthetic construct
  source 1..80: mol_type = other DNA
ttggaagaaaacagggaaattctaaaagaacctgtgcatggagtgtattatgacccatcaaaagacttaatagcagaaat

SEQ ID NO: 73500 - DNA, 80 bp, synthetic construct
  source 1..80: mol_type = other DNA
ttggggataagggaggagatgacctcctctctgaagcaggaacagggaaacaaggaccagtctcctcccttaatttccct

SEQ ID NO: 73501 - DNA, 80 bp, synthetic construct
  source 1..80: mol_type = other DNA
gaaaaaaggctgctcacactaatgatgtaaggcaattgacagatatggtgcaaaagatagccatggaaagcatagtaatt

SEQ ID NO: 73502 - DNA, 80 bp, synthetic construct
  source 1..80: mol_type = other DNA
tggggaagggtccctaaattcagactacccatacaaagagaaacatgggaaacatggtggacggagtattggcaggctac

SEQ ID NO: 73503 - DNA, 80 bp, synthetic construct
  source 1..80: mol_type = other DNA
ataaagaaaaaggacagcactaaatggagaaaattagtagacttcagagagctcaataaaagaacccaggacttctggga

SEQ ID NO: 73504 - DNA, 80 bp, synthetic construct
  source 1..80: mol_type = other DNA
agttcagttagggataccgcatccagcgggtttaaaaaagaaaaaatcagtaacagtactggatgtgggggatgcatatt

SEQ ID NO: 73505 - DNA, 80 bp, synthetic construct
  source 1..80: mol_type = other DNA
ttagaacaaaaaatccaggaatagttatataccaatacatggatgatttgtatgtagggtctgacttagaaatagggcaa

SEQ ID NO: 73506 - DNA, 80 bp, synthetic construct
  source 1..80: mol_type = other DNA
aatttatgcaaactccttaggggagcaaaggcactaacagacatagtaacactaactgcagaagcagaattagaattggc

SEQ ID NO: 73507 - DNA, 80 bp, synthetic construct
  source 1..80: mol_type = other DNA
agagaacagggagattctaaaagagccagtgcatggggtatattatgacccatcaaaagacttaatagcagaaatacaga

SEQ ID NO: 73508 - DNA, 80 bp, synthetic construct
  source 1..80: mol_type = other DNA
agcaggggcaaggccaatggacatatcaaatatatcaagagccacataaaaatctgaaaacaggaaagtatgcaagaaca

SEQ ID NO: 73509 - DNA, 80 bp, synthetic construct
  source 1..80: mol_type = other DNA
gaggagggaagagacaaccccctctccgaagcaggagcagaagggcggggatcagtcccctccttcagtttccctcaaat

SEQ ID NO: 73510 - DNA, 80 bp, synthetic construct
  source 1..80: mol_type = other DNA
aggtctgcccacactaatgatataaaacagttaacagaagcagtgcagaaaatatccatggaaagcatagtaatatgggg

SEQ ID NO: 73511 - DNA, 80 bp, synthetic construct
  source 1..80: mol_type = other DNA
aaagactcctaaatttagactacccatacaaaaggaaacatgggagacatggtggatagaatattggcaagccacctgga

SEQ ID NO: 73512 - DNA, 80 bp, synthetic construct
  source 1..80: mol_type = other DNA
cactctttggcaacgacctgttgtcatagtaaaaatagagggacagttaaaagaagctctattagacacaggagcagatg

SEQ ID NO: 73513 - DNA, 80 bp, synthetic construct
  source 1..80: mol_type = other DNA
agacaatatgatcagatacttatagaaatttgtggaaaaagggctataggtacagtattggtaggacctacaccagtcaa

SEQ ID NO: 73514 - DNA, 80 bp, synthetic construct
  source 1..80: mol_type = other DNA
tgtacagaaatggaaaaggaaggaaagatttcgagagttgggcctgaaaatccatacaatactccagtatttgccataaa

SEQ ID NO: 73515 - DNA, 80 bp, synthetic construct
  source 1..80: mol_type = other DNA
gaagaaagacagtactaaatggagaaaattagtggattttagagaacttaataaaagaactcaagatttttgggaagttc

SEQ ID NO: 73516 - DNA, 80 bp, synthetic construct
  source 1..80: mol_type = other DNA
tggccttccagcaagggaaggccagggaattttcctcagagcagaccggagccatcagccccaccagcagaggacttttg

SEQ ID NO: 73517 - DNA, 80 bp, synthetic construct
  source 1..80: mol_type = other DNA
gtccctttagatgaagatttcaggaagtatactgcattcaccatacccagcagcaataatgagacaccgggggttagata

SEQ ID NO: 73518 - DNA, 80 bp, synthetic construct
  source 1..80: mol_type = other DNA
ctttagaaagcaaaatccagaagtagttatctatcaatacatggatgatttgtatgtaggatctgatttagagatagggc

SEQ ID NO: 73519 - DNA, 80 bp, synthetic construct
  source 1..80: mol_type = other DNA
agcatagggcaaaaatagagaagttaagagatcatctgttgaagtggggacttaccacaccagacaaaaaacatcagaaa

SEQ ID NO: 73520 - DNA, 80 bp, synthetic construct
  source 1..80: mol_type = other DNA
gaacctccattcctttggatgggttatgaactccatcctgataaatggacagtacagcctataacactgccagacaaaga

SEQ ID NO: 73521 - DNA, 80 bp, synthetic construct
  source 1..80: mol_type = other DNA
aagctggactgtcaatgatatacagaagttagtgggaaaattaaattgggcaagccagatttattcaggaattaaggtaa

SEQ ID NO: 73522 - DNA, 80 bp, synthetic construct
  source 1..80: mol_type = other DNA
agcaattatgtaaactccttaagggagctaaagcactaacagaagtagtaccactaacagaagaagcagaattagaactg

SEQ ID NO: 73523 - DNA, 80 bp, synthetic construct
  source 1..80: mol_type = other DNA
gcagaaaacagggagattctaaaagaaccagtacatggagtgtattatgacccatcaaaagacttaatagcagaattaca

SEQ ID NO: 73524 - DNA, 80 bp, synthetic construct
  source 1..80: mol_type = other DNA
gaaacaagggcaaggccagtggacatatcaaatttatcaggatccatttaaaaatctgaaaacaggaaagtatgcaagag

SEQ ID NO: 73525 - DNA, 80 bp, synthetic construct
  source 1..80: mol_type = other DNA
ctacccatacagaaggaaacatgggaagcatggtggacagattattggcaagccacctggattcctgagtgggagtttgt

SEQ ID NO: 73526 - DNA, 80 bp, synthetic construct
  source 1..80: mol_type = other DNA
tttggggaggagataaccccctctcagaaacaggagcagaaggacaaagacaaggaactgtatcctttagcttccctcaa

SEQ ID NO: 73527 - DNA, 80 bp, synthetic construct
  source 1..80: mol_type = other DNA
ggaaagattcctaaatttagactacccatacagaaggaaacatgggaagcatggtggacagattattggcaagccacctg

SEQ ID NO: 73528 - DNA, 80 bp, synthetic construct
  source 1..80: mol_type = other DNA
atcactctttggcaacgaccccttgtcaacataaagatagggggacagataaaagaagctctattagatacaggagcaga

SEQ ID NO: 73529 - DNA, 80 bp, synthetic construct
  source 1..80: mol_type = other DNA
tgatacagtaatagaagaaataaatttgccaggaaaatggaaacctaaaatgatagggggaattggaggttttatcaaag

SEQ ID NO: 73530 - DNA, 80 bp, synthetic construct
  source 1..80: mol_type = other DNA
ttagacaatatgatcacatactcatagaaatctgtggacaaaaggctataggtacagtgttagtaggacctacacctatc

SEQ ID NO: 73531 - DNA, 80 bp, synthetic construct
  source 1..80: mol_type = other DNA
aacataattgggagaaattttttgacccagattggctgcactctaaattttccaattagtactattgacactgtaccagt

SEQ ID NO: 73532 - DNA, 80 bp, synthetic construct
  source 1..80: mol_type = other DNA
aaaattgaagccaggaatggatggtccaaaagttaaacaatggccattaacagaagagaaaataaaagcattaacagaaa

SEQ ID NO: 73533 - DNA, 80 bp, synthetic construct
  source 1..80: mol_type = other DNA
ggccttcccacaaggggaggccgggaaattttcttcagagcagaccagagccaacagccccaccagcagagagcttcggg

SEQ ID NO: 73534 - DNA, 80 bp, synthetic construct
  source 1..80: mol_type = other DNA
tcaattaggaataccacatcctgcagggttaaaaaagaaaaaatcagtatcagtactggatgtgggtgatgcatattttt

SEQ ID NO: 73535 - DNA, 80 bp, synthetic construct
  source 1..80: mol_type = other DNA
caattcccttatgtgaagattttagaaagtatactgcatttaccatacctagtgtaaacaatgagacaccaggggttaga

SEQ ID NO: 73536 - DNA, 80 bp, synthetic construct
  source 1..80: mol_type = other DNA
aaagcaattatgtaaactccttaggggagcaaaagcactaacagacatagttgtcctaactgcagaagcagaattagaat

SEQ ID NO: 73537 - DNA, 80 bp, synthetic construct
  source 1..80: mol_type = other DNA
gacatggtggacagattactggcaagccacctggatccctgaatgggagtttgttaatacccctcccctggtaaaactat

SEQ ID NO: 73538 - DNA, 80 bp, synthetic construct
  source 1..80: mol_type = other DNA
ctccaccagcggaggaggtaacctcttctccgaagcaagagcagaaggacagggagcagccccctcctttagtttccctc

SEQ ID NO: 73539 - DNA, 80 bp, synthetic construct
  source 1..80: mol_type = other DNA
aataaagtctgcccacactaatgatgtaaaacaattaacagatgcagtgcaaaagatagccctagaaagcatagtaatat

SEQ ID NO: 73540 - DNA, 80 bp, synthetic construct
  source 1..80: mol_type = other DNA
aaatcactctttggcaacgaccaatggtcacagtaaaaataggagggcagctagtagaagctctattagatacaggagca

SEQ ID NO: 73541 - DNA, 80 bp, synthetic construct
  source 1..80: mol_type = other DNA
taaagaaaaaagacagtactaaatggagaaaattagtagatttcagagaacttaacaaaagaactcaagatttttgggaa

SEQ ID NO: 73542 - DNA, 80 bp, synthetic construct
  source 1..80: mol_type = other DNA
gttcaattaggaataccacatcctgctgggttgaagaagaaaaaatcagtaacagtattggatgtgggagatgcatattt

SEQ ID NO: 73543 - DNA, 80 bp, synthetic construct
  source 1..80: mol_type = other DNA
ttcaatcccgttacatgaagatttcaggaagtatactgcattcactatacctagtattaataatgagacaccaggaatta

SEQ ID NO: 73544 - DNA, 80 bp, synthetic construct
  source 1..80: mol_type = other DNA
ttagtgggaaaactaaattgggcaagtcagatttatccagggattagggtaaagaacttatgtaaactcctcaggggagc

SEQ ID NO: 73545 - DNA, 80 bp, synthetic construct
  source 1..80: mol_type = other DNA
aaattttcctcagagcagaccggaaccaactgccccaccagcagagatctttgggacggaggaagagacaacctcctccc

SEQ ID NO: 73546 - DNA, 80 bp, synthetic construct
  source 1..80: mol_type = other DNA
tgaaacaggagccgagggacaagggattatatcctcctttgacttccctcaaatcactctttggcaacgacccttagttg

SEQ ID NO: 73547 - DNA, 80 bp, synthetic construct
  source 1..80: mol_type = other DNA
aaggttaaacaatggccattaacagaagaaaaaataaaagcattgacagatatttgtacagagatggaaaatgaagggaa

SEQ ID NO: 73548 - DNA, 80 bp, synthetic construct
  source 1..80: mol_type = other DNA
aatacatggatgatttgtatgtaggatctgacttagaaataggacaacatagagaaaaaatagaagagttgagagctcat

SEQ ID NO: 73549 - DNA, 80 bp, synthetic construct
  source 1..80: mol_type = other DNA
tcctgacaaatggacagttcagcctatacagataccaaacaaggagagctggactgtcaatgatatacagaagttagtgg

SEQ ID NO: 73550 - DNA, 80 bp, synthetic construct
  source 1..80: mol_type = other DNA
gaaaactaaattgggcaagtcaaatttatgcaggaattaaggtaaagcaattatgtaaactcctgaggggagccaaagcc

SEQ ID NO: 73551 - DNA, 80 bp, synthetic construct
  source 1..80: mol_type = other DNA
ttaacacaggtagtagaactgacagaagaagcagaattagaattggcagaaaatagggagattttaaaagaacctgtaca

SEQ ID NO: 73552 - DNA, 80 bp, synthetic construct
  source 1..80: mol_type = other DNA
tggagtctattatgacccagcaaaggacctaatagtagagatacagaaacaggggcatgaccaatggacatatcaaattt

SEQ ID NO: 73553 - DNA, 80 bp, synthetic construct
  source 1..80: mol_type = other DNA
atcaagagccattcaaaaatctgaaaacaggaaaatatgcgaaaagggggtctgcccacaccaatgatgtgagacagtta

SEQ ID NO: 73554 - DNA, 80 bp, synthetic construct
  source 1..80: mol_type = other DNA
accgaagcaggagccaaaggagctatatcctttgacctccctcaaatcactctttggcagcgacccctagtcacagtaag

SEQ ID NO: 73555 - DNA, 80 bp, synthetic construct
  source 1..80: mol_type = other DNA
gcagaggtagtgcaaaaagtgtccacagaaagcatagtaatatggggaaagattcctaaatttaagctgcctatacgaaa

SEQ ID NO: 73556 - DNA, 80 bp, synthetic construct
  source 1..80: mol_type = other DNA
cagagcagaccagagccaacagccccaccagcagagagcttcgggttcggggaggagatagcccactccccgaagcagga

SEQ ID NO: 73557 - DNA, 80 bp, synthetic construct
  source 1..80: mol_type = other DNA
agaaaaaatcagtaacagtgatagatgtgggggatgcatatttttcagtccctttacatgaagatttcagaaaatataca

SEQ ID NO: 73558 - DNA, 80 bp, synthetic construct
  source 1..80: mol_type = other DNA
gcatttactatacctagtgtaaataatgagaagccagggataagatatcagtataatgtgcttccacagggatggaaagg

SEQ ID NO: 73559 - DNA, 80 bp, synthetic construct
  source 1..80: mol_type = other DNA
ggatggaagggatcaccagcaatattccagtgtagcatgacaaaaatcttagagccttttagaacaaaaaatccagaact

SEQ ID NO: 73560 - DNA, 80 bp, synthetic construct
  source 1..80: mol_type = other DNA
agttatctaccagtacatggatgacttgtatgtgggatctgacttagaaatagaacagcatagaattaaaataggggagt

SEQ ID NO: 73561 - DNA, 80 bp, synthetic construct
  source 1..80: mol_type = other DNA
taaggaaccatctcttgaaatggggattcaccacaccagacaaaaaacatcagaaagaacctccattcctttggatggga

SEQ ID NO: 73562 - DNA, 80 bp, synthetic construct
  source 1..80: mol_type = other DNA
aaagttagtgggaaaactaaattgggccagtcagatttatccagggattcaagtaaaaaacctatgtaaactccttaggg

SEQ ID NO: 73563 - DNA, 80 bp, synthetic construct
  source 1..80: mol_type = other DNA
gagcctgtacacggggtatattatgacccatcaaaagacttaatagcagaagtacaaaaacaagggctagaccaatggac

SEQ ID NO: 73564 - DNA, 80 bp, synthetic construct
  source 1..80: mol_type = other DNA
tatggggaaaaattcctaaatttagattacccatacaaaaggaaacatgggagatatggtggacagactattggcaggcc

SEQ ID NO: 73565 - DNA, 80 bp, synthetic construct
  source 1..80: mol_type = other DNA
ggccaggaaactttcttcagaacaggccagagccaacagccccacccgccgagagtgtcaggttaggggaggagatagcc

SEQ ID NO: 73566 - DNA, 80 bp, synthetic construct
  source 1..80: mol_type = other DNA
taaaacaattagcagaagtagtgcaaaaaatatctgtagaaagcatagtaatatggggaaaaattcctaaatttagatta

SEQ ID NO: 73567 - DNA, 80 bp, synthetic construct
  source 1..80: mol_type = other DNA
ccctccccgaagcaggagccgaaggaaaaggagttatatcctttaacttccctcaaatcactctttggcagcgaccctta

SEQ ID NO: 73568 - DNA, 80 bp, synthetic construct
  source 1..80: mol_type = other DNA
tttaccaggaaaatggaaaccaaaaatgatagggggaattggaggttttatcaaagtaagacagtatgatgaggtaccca

SEQ ID NO: 73569 - DNA, 80 bp, synthetic construct
  source 1..80: mol_type = other DNA
tagaaattgagggaaaaaaggctataggtacagtattagtaggaccaacacctgtcaatataattgggagaaacttattg

SEQ ID NO: 73570 - DNA, 80 bp, synthetic construct
  source 1..80: mol_type = other DNA
aaggaaaggacaccaaatgaaagactgcacagagagacaggctaattttttagggaaaatttggccttccaacaagggga

SEQ ID NO: 73571 - DNA, 80 bp, synthetic construct
  source 1..80: mol_type = other DNA
ggaagtacactgcattcactatacctagtataaacaatgagacaccaggagtcagataccagtacaatgtgctaccacag

SEQ ID NO: 73572 - DNA, 80 bp, synthetic construct
  source 1..80: mol_type = other DNA
cctttagagaaagaaatccagaaatagttatataccaatacatggatgatttgtatgtaggatctgacttagaaacagga

SEQ ID NO: 73573 - DNA, 80 bp, synthetic construct
  source 1..80: mol_type = other DNA
gcaactatgtaaactccttaggggggccaaagcgctaacagacatagtagcattaactgcagaagcagagatggaattgg

SEQ ID NO: 73574 - DNA, 80 bp, synthetic construct
  source 1..80: mol_type = other DNA
ggcagaaaacagagaaattctaaaagagccagtacatggagtatattatgacccagcaaaagatttaatagcagaagtac

SEQ ID NO: 73575 - DNA, 80 bp, synthetic construct
  source 1..80: mol_type = other DNA
aaaaacaagggcacgaccaatggtcatatcaaatttatcaagagccattcaaaaacctgaaaacagggaaatatgcaaaa

SEQ ID NO: 73576 - DNA, 80 bp, synthetic construct
  source 1..80: mol_type = other DNA
cgggaggacagaggaaatgacctcctctccgaaacaagaaccgagggaaaaggaactatatcctcccttaacttccctca

SEQ ID NO: 73577 - DNA, 80 bp, synthetic construct
  source 1..80: mol_type = other DNA
aatcactctttggcagcgacccataaccacagtaaaaatagggggacagctaatagaagccttattagacacaggagcag

SEQ ID NO: 73578 - DNA, 80 bp, synthetic construct
  source 1..80: mol_type = other DNA
tatcattaaagccaggaatggatggcccaaaggttaaacaatggccattgacaaaagagaaaatagaagcattgacagaa

SEQ ID NO: 73579 - DNA, 80 bp, synthetic construct
  source 1..80: mol_type = other DNA
atttgcaatgaaatggaaaaggaaggaaaaatttcaaaaattgggcctgaaaatccatataacactccaatatttgccat

SEQ ID NO: 73580 - DNA, 80 bp, synthetic construct
  source 1..80: mol_type = other DNA
atttggccttccagcaaggggaggccaggaaattttcctcagagcagaccagagccaacagccccaccagcagagagctt

SEQ ID NO: 73581 - DNA, 80 bp, synthetic construct
  source 1..80: mol_type = other DNA
tgttgtcgtagtaaaaatagggggacagctaaaagaagctctattagacacaggagcagatgatacagtattagaagaac

SEQ ID NO: 73582 - DNA, 80 bp, synthetic construct
  source 1..80: mol_type = other DNA
cccccccccgaagcaggagcagagggacagggaacagtcccttccttcagtttccctcaaatcactctttggcaacgacc

SEQ ID NO: 73583 - DNA, 80 bp, synthetic construct
  source 1..80: mol_type = other DNA
ttcagaaagtatactgcattcaccatacctagcattaataatgagactccagggattaggtatcagtacaatgtgctacc

SEQ ID NO: 73584 - DNA, 80 bp, synthetic construct
  source 1..80: mol_type = other DNA
acagggatggaagggatccccatcaatattccagagtagcatgacaaaaatcttagaaccatttagagaaagaaatccag

SEQ ID NO: 73585 - DNA, 80 bp, synthetic construct
  source 1..80: mol_type = other DNA
aaatagttatataccagtatatggatgatttgtacgtagggtctgacttagaaatagggcaacacagagcaaaaatagag

SEQ ID NO: 73586 - DNA, 80 bp, synthetic construct
  source 1..80: mol_type = other DNA
ttgggcaagtcagatttatccagggataaaagtaaagcagctgtgtaaactcctcaggggagccaaagcactaacagagg

SEQ ID NO: 73587 - DNA, 80 bp, synthetic construct
  source 1..80: mol_type = other DNA
tagtaccactaactgaggaagcagaattagaattggcagagaacagagagattctaaaagaccctgtgcatggagtatat

SEQ ID NO: 73588 - DNA, 80 bp, synthetic construct
  source 1..80: mol_type = other DNA
atttaagaatctaaaaacaggaaaatatgcaagaaggaggtctgctcacactaatgatgtaaaacaattaacagaagtgg

SEQ ID NO: 73589 - DNA, 80 bp, synthetic construct
  source 1..80: mol_type = other DNA
cagagggaccagcctcctccctcaatttccctcaaatcactctttggcaacgacccattgttgccgtaaaaataggagga

SEQ ID NO: 73590 - DNA, 80 bp, synthetic construct
  source 1..80: mol_type = other DNA
tgcaaaaaatggcacaagaaagtatagtgatatggggaaaaattcctaaatttaaactacccatacaaaaagatacatgg

SEQ ID NO: 73591 - DNA, 80 bp, synthetic construct
  source 1..80: mol_type = other DNA
cagataagagaagctctattagatacaggagcagatgatacagtattagaagaaatagatttgccaggaaaatggaagcc

SEQ ID NO: 73592 - DNA, 80 bp, synthetic construct
  source 1..80: mol_type = other DNA
agagcagaccggagccatcagccccaccagcagagatcttgggggtgggggaagagacagcctcctctcagaaacaggag

SEQ ID NO: 73593 - DNA, 80 bp, synthetic construct
  source 1..80: mol_type = other DNA
tacctagtataaacaatgagacacctggaattaggtatcagtacaatgtgcttccacagggatggaaagggtcaccatca

SEQ ID NO: 73594 - DNA, 80 bp, synthetic construct
  source 1..80: mol_type = other DNA
agcaatatttcaaagtagcatgacaagaatcttagagccctatagagcaaaaaatccagaactagtgatctatcaatata

SEQ ID NO: 73595 - DNA, 80 bp, synthetic construct
  source 1..80: mol_type = other DNA
taaattgggcaagtcaaatttatccagggattaaagtaagacaactatgtaaactccttagggggactaaggctctaaca

SEQ ID NO: 73596 - DNA, 80 bp, synthetic construct
  source 1..80: mol_type = other DNA
gacatagtaccactgactacagaagcagaattggaattagctgagaacagggaaattctaaaagaaccagtacatggggt

SEQ ID NO: 73597 - DNA, 80 bp, synthetic construct
  source 1..80: mol_type = other DNA
atactatgacccatcaaaagacttaatagcagaggtacagaaacaagggctagaccaatggacatatcaaatatatcaag

SEQ ID NO: 73598 - DNA, 80 bp, synthetic construct
  source 1..80: mol_type = other DNA
tcctaaatttaggttacccatacaaagggaaacatgggagacatggtggacagattattggcaggcctcctggattccga

SEQ ID NO: 73599 - DNA, 80 bp, synthetic construct
  source 1..80: mol_type = other DNA
cagaacaggacagagccaacagccccacccgcagagagcttcgagataaaagaggagacaccctcctctcagaagcagga

SEQ ID NO: 73600 - DNA, 80 bp, synthetic construct
  source 1..80: mol_type = other DNA
agccattcaaaaacctgaaaacaggaaaatatgcaaaaaggagggctgctcacactaatgatgtaaaacaattagcagaa

SEQ ID NO: 73601 - DNA, 80 bp, synthetic construct
  source 1..80: mol_type = other DNA
ctggtacaaaaaatatctgcagaaagcatagtgatatggggaaagactcctaaatttaggttacccatacaaagggaaac

SEQ ID NO: 73602 - DNA, 80 bp, synthetic construct
  source 1..80: mol_type = other DNA
accgagggacaaggaactatatcctatggcttccctcaaatcactctttggcagcgacccctagtcacagtaaggatagg

SEQ ID NO: 73603 - DNA, 80 bp, synthetic construct
  source 1..80: mol_type = other DNA
aaggctatagggacagtattagtaggacctacacctattaacataattgggagaaatatgttgactcagattggttgtac

SEQ ID NO: 73604 - DNA, 80 bp, synthetic construct
  source 1..80: mol_type = other DNA
aatcagtaacagtgctagatgtaggggatgcatatttttcagtccccttacatgaagactttagaaagtatacagcattc

SEQ ID NO: 73605 - DNA, 80 bp, synthetic construct
  source 1..80: mol_type = other DNA
agggatggaaaggatcaccagcaatattccagagtagcatgacaaaaattttagagcccttcagaaaacgcaatcctgaa

SEQ ID NO: 73606 - DNA, 80 bp, synthetic construct
  source 1..80: mol_type = other DNA
ttaattatttaccaatacatggatgatttgtatgtagggtctgacttagagatagggcaacatagagcaaaaatagagga

SEQ ID NO: 73607 - DNA, 80 bp, synthetic construct
  source 1..80: mol_type = other DNA
gttaagagatcatctgttgaagtggggattcaccacaccagacaagaaacatcagaaagaacccccatttctttggatag

SEQ ID NO: 73608 - DNA, 80 bp, synthetic construct
  source 1..80: mol_type = other DNA
gggagccaaagcactaacagacatagtaccactaactgaagaagcagaactagaattggcagagaacagggagatactga

SEQ ID NO: 73609 - DNA, 80 bp, synthetic construct
  source 1..80: mol_type = other DNA
ggttctgcccacactaatgatgtaaaacaattaacagaagtagtgcaaaaagtggccacagagagcataataatatgggg

SEQ ID NO: 73610 - DNA, 80 bp, synthetic construct
  source 1..80: mol_type = other DNA
aagaaccagtacatggagtatactatgatccagcaaaagacttaatagcagaaatacaaaagcaagggctagaccaatgg

SEQ ID NO: 73611 - DNA, 80 bp, synthetic construct
  source 1..80: mol_type = other DNA
gccagggaactttctccagagcagaccagagccaacagccccaccagcagagagcttcgagacgagagaggaagtgacct

SEQ ID NO: 73612 - DNA, 80 bp, synthetic construct
  source 1..80: mol_type = other DNA
ggagaaaattagtagacttcagagagctcaataaaagaactcaggatttttgggaagttcagttaggaatacctcaccca

SEQ ID NO: 73613 - DNA, 80 bp, synthetic construct
  source 1..80: mol_type = other DNA
gcagggttaaaaaagaagaaatcagtaacagtactagatgtgggggatgcatatttttcagttcccttacatgaagattt

SEQ ID NO: 73614 - DNA, 80 bp, synthetic construct
  source 1..80: mol_type = other DNA
tagaaaatatactgcattcactatccccagtgtaaataatgagacgccagggattagatatcagtataatgtgcttccac

SEQ ID NO: 73615 - DNA, 80 bp, synthetic construct
  source 1..80: mol_type = other DNA
cagcatagagcaaaaatagaggagttgagagatcatctgttgcgctggggatttactacaccagacaaaaagcatcagaa

SEQ ID NO: 73616 - DNA, 80 bp, synthetic construct
  source 1..80: mol_type = other DNA
aagaggtctgctcacactaatgatgtaagacaattagcagaagcagtgcagaaaatagccacagaaagcatagtaatatg

SEQ ID NO: 73617 - DNA, 80 bp, synthetic construct
  source 1..80: mol_type = other DNA
atttgtaaagagatggaaaaagaaggaaaaattacaaaaattgggcctgaaaatccatacaatactcccatatttgctat

SEQ ID NO: 73618 - DNA, 80 bp, synthetic construct
  source 1..80: mol_type = other DNA
gaggacagaggaaatagcctcctctccgaagcaggaaccgagggacaaggaaccactataccctcccttaacttccctca

SEQ ID NO: 73619 - DNA, 80 bp, synthetic construct
  source 1..80: mol_type = other DNA
tcagttcccctagatgaaggctttagaaagtatactgcattcaccatacctagtataaacaatgagacaccaggaatcag

SEQ ID NO: 73620 - DNA, 80 bp, synthetic construct
  source 1..80: mol_type = other DNA
atagtaacactgactaaggaagcagaattagaattagcagagaacagggagattctaaaagaacctgtgcatggagccta

SEQ ID NO: 73621 - DNA, 80 bp, synthetic construct
  source 1..80: mol_type = other DNA
catttaagaatctaaaaacaggaaagtatgcaagaaagaggtctgctcacaccaatgatgtaagacaattggcagaagca

SEQ ID NO: 73622 - DNA, 80 bp, synthetic construct
  source 1..80: mol_type = other DNA
gtgcagaaaataaccatggaaagcatagtaatatggggaaagacccctaaatttagactacccatacaaagagaaacatg

SEQ ID NO: 73623 - DNA, 80 bp, synthetic construct
  source 1..80: mol_type = other DNA
caaggaaccattatatcctcctttaacttccctcaaatcactctttggcagcgacccctcgttacagtaaaaatagaggg

SEQ ID NO: 73624 - DNA, 80 bp, synthetic construct
  source 1..80: mol_type = other DNA
ccagagccaacagccccaccagcagagatcctcgagaggacagaggaaatgacatcctctccgaagcaggaaccgaggga

SEQ ID NO: 73625 - DNA, 80 bp, synthetic construct
  source 1..80: mol_type = other DNA
atacctagtacaaacaatgagacaccagggattaggtatcagtacaatgtgctccctcagggatggaaagggtcaccggc

SEQ ID NO: 73626 - DNA, 80 bp, synthetic construct
  source 1..80: mol_type = other DNA
atgatttatatgtaggatctgacctagaaataggccagcatagaacaaaaatagaggaactgagagaacatctgttgaaa

SEQ ID NO: 73627 - DNA, 80 bp, synthetic construct
  source 1..80: mol_type = other DNA
aggaacccccattcctttggatgggatatgagctccatcctgacaaatggacggtacagcctataaagttgccagagaag

SEQ ID NO: 73628 - DNA, 80 bp, synthetic construct
  source 1..80: mol_type = other DNA
ggggaaagattcctaaatttagactaccgatacgaaaagaaacatgggatgcatggtggacagaatattggcaggccacc

SEQ ID NO: 73629 - DNA, 80 bp, synthetic construct
  source 1..80: mol_type = other DNA
agtaagacaatatgatgaaatacctattgaaattgagggaaaaaaggctatagggacagtattagtaggacctacaccta

SEQ ID NO: 73630 - DNA, 80 bp, synthetic construct
  source 1..80: mol_type = other DNA
gctttgggttcggggaggagatagcccctgcccagaagccggagccgaaggaaaaggagctatatcccttagcttccctc

SEQ ID NO: 73631 - DNA, 80 bp, synthetic construct
  source 1..80: mol_type = other DNA
gcaaaaatagaggaattaagagaacatctattgaagtggggatttaccacaccagacaaaaaacaccagaaagaacctcc

SEQ ID NO: 73632 - DNA, 80 bp, synthetic construct
  source 1..80: mol_type = other DNA
ggccagaccagtggacatatcaaatttatcaagaaccatttaaaaatctgaaaacaggaaagtatgcaagaaagaggggt

SEQ ID NO: 73633 - DNA, 80 bp, synthetic construct
  source 1..80: mol_type = other DNA
tatgatcagatacccatagaaatttgtggacaaaaagctataggcacagtgttaataggacctacacctgtcaacataat

SEQ ID NO: 73634 - DNA, 80 bp, synthetic construct
  source 1..80: mol_type = other DNA
tggaagaaatttgttgactcagataggatgcactttaaatttcccaattagtcctattgacactgtaccagtacaattaa

SEQ ID NO: 73635 - DNA, 80 bp, synthetic construct
  source 1..80: mol_type = other DNA
gaatacctcatcctgcagggctaaaaaagaaaaaatcagtaacagtactagatgtaggtgatgcatatttttcagttcct

SEQ ID NO: 73636 - DNA, 80 bp, synthetic construct
  source 1..80: mol_type = other DNA
ggagatagccccctcacagaaacaggacctgcaagacaagaacaaggaactatatcctacagcctccctcagatcactct

SEQ ID NO: 73637 - DNA, 80 bp, synthetic construct
  source 1..80: mol_type = other DNA
ttatatgaaggctttagaaagtatactgcatttaccatacctagtataaacaatgagacaccagggattagatatcagta

SEQ ID NO: 73638 - DNA, 80 bp, synthetic construct
  source 1..80: mol_type = other DNA
atagggcagcatagagcaaaaatagaggagttaagagaacatctattggcatggggatttaccacgccagacaaaaaaca

SEQ ID NO: 73639 - DNA, 80 bp, synthetic construct
  source 1..80: mol_type = other DNA
aaagtgaagcaattatgtaagctccttaggggagccaaggcattaacagacatagtaccactgactgaagaagcagagtt

SEQ ID NO: 73640 - DNA, 80 bp, synthetic construct
  source 1..80: mol_type = other DNA
gagcttcgggttcggagaggaggtagccccctctccgaagcaggagcagaaagagaagggactgtatcctcctttggatt

SEQ ID NO: 73641 - DNA, 80 bp, synthetic construct
  source 1..80: mol_type = other DNA
attaaagtaagacagtatgatcaagtggccatagaaatctgtggacacaaggccataggtacagtattagtaggacctac

SEQ ID NO: 73642 - DNA, 80 bp, synthetic construct
  source 1..80: mol_type = other DNA
acagaaatatgtttggaaatggaaaaagaaggaaaaattacaaaaattgggcctgaaaatccatacaataccccagtatt

SEQ ID NO: 73643 - DNA, 80 bp, synthetic construct
  source 1..80: mol_type = other DNA
gggagaatttggccttccaacaaggggaggccagggaacttccttcagagcagaccagagccgacagccccaccagcaga

SEQ ID NO: 73644 - DNA, 80 bp, synthetic construct
  source 1..80: mol_type = other DNA
tatttctcagttcccttagataaggagttcaggaagtacactgcattcactatacctagtatcaacaatgagactccagg

SEQ ID NO: 73645 - DNA, 80 bp, synthetic construct
  source 1..80: mol_type = other DNA
gtacatggatgacttgtatgtaggatctgatttaaaaatagagcagcatagagcaaaaatagagcagttaagagctcatt

SEQ ID NO: 73646 - DNA, 80 bp, synthetic construct
  source 1..80: mol_type = other DNA
agagcagaccagagccaacagccccaccagcagagagcttcgagaagacggaggaaataacctcccctcagaagcaggaa

SEQ ID NO: 73647 - DNA, 80 bp, synthetic construct
  source 1..80: mol_type = other DNA
tcaccagcaatattccaggatagcatgacaaaaatcttagagccctttagatcacagaatccagacatggttatctatca

SEQ ID NO: 73648 - DNA, 80 bp, synthetic construct
  source 1..80: mol_type = other DNA
taagacaacatctgttgagctggggatttaccacaccagataaaaaacatcagaaagaacccccattcctttggatggga

SEQ ID NO: 73649 - DNA, 80 bp, synthetic construct
  source 1..80: mol_type = other DNA
taaaacaattagcagaagtagtgcaaaaattagcaacagagagcatagtaatatggggaaagactcctaaattcagacta

SEQ ID NO: 73650 - DNA, 80 bp, synthetic construct
  source 1..80: mol_type = other DNA
cctatacgaaaggaaacatgggagacatggtggacagactattggcaggccacctggattcctgattgggagtttgtcaa

SEQ ID NO: 73651 - DNA, 80 bp, synthetic construct
  source 1..80: mol_type = other DNA
cagaagcaagagcagaaggagaaagagaaggagctataccccttagcctccctcaaatcactctttggcagcgaccctta

SEQ ID NO: 73652 - DNA, 80 bp, synthetic construct
  source 1..80: mol_type = other DNA
gtcacagtaaaaatagggggacagctaatagaagccctattagacacaggggcagatgatacagtattggaagatataaa

SEQ ID NO: 73653 - DNA, 80 bp, synthetic construct
  source 1..80: mol_type = other DNA
tagaaatttgtgggaaaaaggctatagggacagtattagtaggacctacacctatcaacataattgggagaaatatgttg

SEQ ID NO: 73654 - DNA, 80 bp, synthetic construct
  source 1..80: mol_type = other DNA
agaaagttagtagatttcagagaactcaataaaagaactcaagatttctgggaagtccaattaggaatacctcatcccgc

SEQ ID NO: 73655 - DNA, 80 bp, synthetic construct
  source 1..80: mol_type = other DNA
tttaaaaatttaaaaacaggaaaatatgcaggaaaagggtctactcacactaatgatgtaagacaattaacagcagcagt

SEQ ID NO: 73656 - DNA, 80 bp, synthetic construct
  source 1..80: mol_type = other DNA
acaaaaggtatccatggaaagcatagtaatatgggggaggatccctagatttaaattacccatacaaaaggtaacatggg

SEQ ID NO: 73657 - DNA, 80 bp, synthetic construct
  source 1..80: mol_type = other DNA
tataggtacagtattggtagggcctacccctgtcaacataattgggagaaatatgttgactcagattggctgtactttaa

SEQ ID NO: 73658 - DNA, 80 bp, synthetic construct
  source 1..80: mol_type = other DNA
acaaggaacaaccccctcctttagtttccctcaaatcactctttggcaacgacctgttgtcacagtaaaagtagcaggac

SEQ ID NO: 73659 - DNA, 80 bp, synthetic construct
  source 1..80: mol_type = other DNA
tattccagagtagcatgacaaaaatcttagagccctttagacaaaaaatcccagacatattatctatcaaatacatggat

SEQ ID NO: 73660 - DNA, 80 bp, synthetic construct
  source 1..80: mol_type = other DNA
atttgtagtcagaatctgaatttagaaatagggcagcatagagccaaagtagaggagttgagagcctcctctttgagatg

SEQ ID NO: 73661 - DNA, 80 bp, synthetic construct
  source 1..80: mol_type = other DNA
gtaaggcaattatgtaagctccttaggggggccaaagcactaacagacatagtaccactgagtaaagaagcagaattgga

SEQ ID NO: 73662 - DNA, 80 bp, synthetic construct
  source 1..80: mol_type = other DNA
caagtcagatttatcaagggattaaagtaaggcaattatgtaagctccttaggggggccaaagcactaacagacatagta

SEQ ID NO: 73663 - DNA, 80 bp, synthetic construct
  source 1..80: mol_type = other DNA
ccactgagtaaagaagcagaattggaattggaagaaaacagagagattctgaaagaaccagtacatggggtatattatga

SEQ ID NO: 73664 - DNA, 80 bp, synthetic construct
  source 1..80: mol_type = other DNA
gaagccggaacctcccttagcctccctcaaatcactctttggcagcgacccttagtcacagtaaaaatagggggacagct

SEQ ID NO: 73665 - DNA, 80 bp, synthetic construct
  source 1..80: mol_type = other DNA
aaaatatctacagaaagcataataatatggggaaagattcctaaatttaaactacctatacgaaaggaaacatgggaagt

SEQ ID NO: 73666 - DNA, 80 bp, synthetic construct
  source 1..80: mol_type = other DNA
aaaaatcttagagccctttagaaaacaaaatcctgaaatggttatttaccagtatatggatgatttgtatgtaggatctg

SEQ ID NO: 73667 - DNA, 80 bp, synthetic construct
  source 1..80: mol_type = other DNA
acttagagatagggcaacatagaacaaaaatagaggagttaagagctcatttgcttaagtggggatttactacaccagat

SEQ ID NO: 73668 - DNA, 80 bp, synthetic construct
  source 1..80: mol_type = other DNA
cagggattaaaacaaggcaactatgtaaactcattaggggaaccaaagcactaacagacatagtaccattgactagagaa

SEQ ID NO: 73669 - DNA, 80 bp, synthetic construct
  source 1..80: mol_type = other DNA
gcagaattagaattggaagaaaacagggagattcttagagagccagtacatggagtatattatgatccatcaaaagaatt

SEQ ID NO: 73670 - DNA, 80 bp, synthetic construct
  source 1..80: mol_type = other DNA
aatagcagaaatacagaagcaaggagaaggccaatggacatatcaaatttatcaagagccattcaaaaatttgaagacag

SEQ ID NO: 73671 - DNA, 80 bp, synthetic construct
  source 1..80: mol_type = other DNA
ggacagagcattggcaagccacatggattcctgagtgggagtttgttaacaccccttatctagtaaaattatggtatcag

SEQ ID NO: 73672 - DNA, 80 bp, synthetic construct
  source 1..80: mol_type = other DNA
cccgcagagagcttcgggttcagagaggagacagcccacgcccagaagccggagccaaaggagaaggagctatatccctt

SEQ ID NO: 73673 - DNA, 80 bp, synthetic construct
  source 1..80: mol_type = other DNA
cattaacagaaatttgtacagaaatggaaaaagaaggaaaaatttcaagagttgggcctgacaatccatacaaaactcca

SEQ ID NO: 73674 - DNA, 80 bp, synthetic construct
  source 1..80: mol_type = other DNA
atatttgctataaagaaaaaagaaagtactaaatggagaaaattagtagatttcagagagctcattaaaaaaagaactca

SEQ ID NO: 73675 - DNA, 80 bp, synthetic construct
  source 1..80: mol_type = other DNA
agacttttgggaggtccaattaggaatacctcatcctgcagggttaaaacagaaaaaatcagtaacagtactagatgtag

SEQ ID NO: 73676 - DNA, 80 bp, synthetic construct
  source 1..80: mol_type = other DNA
caatacatggatgatttatatgtaggatcagacttagaaataggccaacatagagcaaaaatagaggagttaagagatca

SEQ ID NO: 73677 - DNA, 80 bp, synthetic construct
  source 1..80: mol_type = other DNA
tttactgaaatggggatttaccacaccagacaaaaaacatcagaaagaacctccatcccaaagacctccgttcctttgga

SEQ ID NO: 73678 - DNA, 80 bp, synthetic construct
  source 1..80: mol_type = other DNA
tgggatatgagctccatcctgacaaatggacagtacaacctatacagttgccagataaagaaagttggactgtcaatgat

SEQ ID NO: 73679 - DNA, 80 bp, synthetic construct
  source 1..80: mol_type = other DNA
atacagaagttagtgggaaaactaaattgggcaagtcaaatttatccaggaattaaagtaaagcaattatgtaaactcct

SEQ ID NO: 73680 - DNA, 80 bp, synthetic construct
  source 1..80: mol_type = other DNA
tagggggaccaaagcactaacagacatagtaccactgactgcagaagcagaattagaactggcagagaacagagaaattc

SEQ ID NO: 73681 - DNA, 80 bp, synthetic construct
  source 1..80: mol_type = other DNA
aaaaggagccgaaggaaaaggagctatatcccttagcctccctcaaatcactctttggcagcgacccctagtcacagtaa

SEQ ID NO: 73682 - DNA, 80 bp, synthetic construct
  source 1..80: mol_type = other DNA
tgatgtaaggcaattaacagaagcagtgcagaaaatagccacagaaagcataataatatggggaaagattcctaaattta

SEQ ID NO: 73683 - DNA, 80 bp, synthetic construct
  source 1..80: mol_type = other DNA
aactgcctataagaaaagaaacatgggatgtatggtggacagagtactggcaggccacctggattcctgagtgggaattt

SEQ ID NO: 73684 - DNA, 80 bp, synthetic construct
  source 1..80: mol_type = other DNA
accagagccaacagccccacccgcggagagcttcgggttcggagaggagatagcccctgccccgaagcaggagccgaggg

SEQ ID NO: 73685 - DNA, 80 bp, synthetic construct
  source 1..80: mol_type = other DNA
gatcaccagcaatatttcagtgcagcatgacgaaaatcttagagccctttagaacacaaaatccagaattggaaatctac

SEQ ID NO: 73686 - DNA, 80 bp, synthetic construct
  source 1..80: mol_type = other DNA
aaagcaactgtgtagactcctcaggggaaccaaagcactaacagacatagtaccactgactgcagaagcagaattggaat

SEQ ID NO: 73687 - DNA, 80 bp, synthetic construct
  source 1..80: mol_type = other DNA
tcttcgagaagtcagaggcagcctccccaccgaagcaggaacagagggacgagggactatatcctcctttaacttccctc

SEQ ID NO: 73688 - DNA, 80 bp, synthetic construct
  source 1..80: mol_type = other DNA
aaatcactctttggcaacgaccaatgatgtcagtaagaataggagggcaattaatagaagccctattagacacaggagca

SEQ ID NO: 73689 - DNA, 80 bp, synthetic construct
  source 1..80: mol_type = other DNA
gaaaatctggccttccagcaagggaaggccagggaattttcctcagagcagaccagagccatcagccccaccagcagaga

SEQ ID NO: 73690 - DNA, 80 bp, synthetic construct
  source 1..80: mol_type = other DNA
aaaaatccggagatagttatctaccagtacatggatgatttatatgtaggatctgacttagaaataggggaacatagggc

SEQ ID NO: 73691 - DNA, 80 bp, synthetic construct
  source 1..80: mol_type = other DNA
gtcaatgatatacagaaattagtgggaaaactaaattgggcaagtcagatttattcaggaattcaagtaaaacaactgtg

SEQ ID NO: 73692 - DNA, 80 bp, synthetic construct
  source 1..80: mol_type = other DNA
taagctcctcagagggaccaaagcattaacagaagtagtaccaatgactgaggaagcagaattagaattggcagagaaca

SEQ ID NO: 73693 - DNA, 80 bp, synthetic construct
  source 1..80: mol_type = other DNA
gggagattctaaaaaaccctgtacatggagtatattatgacccagcaaaagaattaatagcagaaatacaaaaacaaggg

SEQ ID NO: 73694 - DNA, 80 bp, synthetic construct
  source 1..80: mol_type = other DNA
caggaccaatggacatatcaaatttatcaggaaccatttaaaaatctaaaaacaggaaagtatgcaaaaaagaggtctgc

SEQ ID NO: 73695 - DNA, 80 bp, synthetic construct
  source 1..80: mol_type = other DNA
tgaaagaggacatgacctcctctctgaagcaggaatcgagggagctatatcctcccttaccttgcctcaaatcactcttt

SEQ ID NO: 73696 - DNA, 80 bp, synthetic construct
  source 1..80: mol_type = other DNA
tcacactaatgatgtaagacaattagcagaagtagtgcaaaaagtatgcacagaaagcatagtaatatggggaaagaccc

SEQ ID NO: 73697 - DNA, 80 bp, synthetic construct
  source 1..80: mol_type = other DNA
ggcagcgacccctaatcacagtaagaatagggggacaggtaatagaagccctattagacacaggagcagatgatacagta

SEQ ID NO: 73698 - DNA, 80 bp, synthetic construct
  source 1..80: mol_type = other DNA
gaagaaatatattgactcagattggttgtactttaaattttccaattagttctattgaaactgtaccagtggtattaaag

SEQ ID NO: 73699 - DNA, 80 bp, synthetic construct
  source 1..80: mol_type = other DNA
acagcactaaatggaggaaattagtagatttcagagaactcaataaaagaactcaggacttctgggaagttcaattagga

SEQ ID NO: 73700 - DNA, 80 bp, synthetic construct
  source 1..80: mol_type = other DNA
attccacatccagcgggtttaaaaaagaaaaaatcagtaacagtactagatgtgggggacgcatatttttcagttccttt

SEQ ID NO: 73701 - DNA, 80 bp, synthetic construct
  source 1..80: mol_type = other DNA
agatgagggctttagaaagtatactgcattcaccatacctagtataaacaatgagacaccaggaatcaggtatcagtaca

SEQ ID NO: 73702 - DNA, 80 bp, synthetic construct
  source 1..80: mol_type = other DNA
atgtactacctcagggatggaaagggtcaccggcaatattccaggctagtatgacaaaaattttagagccctttagaaca

SEQ ID NO: 73703 - DNA, 80 bp, synthetic construct
  source 1..80: mol_type = other DNA
ggaattaaagtcagacaattatgtaaactcctcaggggagccaaggcactgacagaagtaataccactgacaaaagaagc

SEQ ID NO: 73704 - DNA, 80 bp, synthetic construct
  source 1..80: mol_type = other DNA
tagcagagctacagaaacaagggcaagaccaatggacatatcaaatatatcaagaaccatttaaaaacctgaaaacagga

SEQ ID NO: 73705 - DNA, 80 bp, synthetic construct
  source 1..80: mol_type = other DNA
tgtcttccctcaaatcactctttggcaacgaccccttgtcacagtaaaaatagggggacagttaaaagaagctctattag

SEQ ID NO: 73706 - DNA, 80 bp, synthetic construct
  source 1..80: mol_type = other DNA
gggtttatcaaagtaagacagtatgatcaagtacccatagaaatctgtggacataaagctataggtacagtattggtagg

SEQ ID NO: 73707 - DNA, 80 bp, synthetic construct
  source 1..80: mol_type = other DNA
aaactgtaccagtaaagttaaagccagggatggatggcccaaaagttaaacaatggccattgacagaggaaaaaataaaa

SEQ ID NO: 73708 - DNA, 80 bp, synthetic construct
  source 1..80: mol_type = other DNA
atctatcaatacatggatgatttgtatgtaggatctgacttagaaatagcacagcatagaacaaaaatagaggaactaag

SEQ ID NO: 73709 - DNA, 80 bp, synthetic construct
  source 1..80: mol_type = other DNA
aactccatcctgataaatggacagtacagcctataaaactgccagaaaaggaaagctggactgtcaatgatatacagaag

SEQ ID NO: 73710 - DNA, 80 bp, synthetic construct
  source 1..80: mol_type = other DNA
caaagcactgacagaagtagtaccattgacaaaagaagcagaattagaactggcagaaaacagggagattctaaaagaac

SEQ ID NO: 73711 - DNA, 80 bp, synthetic construct
  source 1..80: mol_type = other DNA
gaacttcctccagagcagaccagaaccaacagccccaccagcagagagcttcgggtttggggaggagataaccaaacaga

SEQ ID NO: 73712 - DNA, 80 bp, synthetic construct
  source 1..80: mol_type = other DNA
caaatatatcaagaaccatttaaaaatctaaaaacaggaaagtatgcaaaaatgaggggtgcccacacgaatgatgtaaa

SEQ ID NO: 73713 - DNA, 80 bp, synthetic construct
  source 1..80: mol_type = other DNA
tccaaaaggaaacctgggaagcatggtggacagactattggcaagccacatggatccttgagtgggagtttgtcaatacc

SEQ ID NO: 73714 - DNA, 80 bp, synthetic construct
  source 1..80: mol_type = other DNA
aacaggaggaaaaggaaaaggacaaggacctgtatcctttagattccctcaaattactctttggcaacgaccccttgtca

SEQ ID NO: 73715 - DNA, 80 bp, synthetic construct
  source 1..80: mol_type = other DNA
aatttcaagaattgggcctgaaaatccatacaatacaccaatatttgccataaagaaaaaagacagtactaagtggagaa

SEQ ID NO: 73716 - DNA, 80 bp, synthetic construct
  source 1..80: mol_type = other DNA
aattagtagatttcagagaacttaataagaggactcaagacttctgggaagttcagctaggaataccgcatcctgcaggg

SEQ ID NO: 73717 - DNA, 80 bp, synthetic construct
  source 1..80: mol_type = other DNA
aaaggatcaccagcaatattccagtgtagcatgacaaaaattttagaaccttttagaacaaaaaaccaagacatagttat

SEQ ID NO: 73718 - DNA, 80 bp, synthetic construct
  source 1..80: mol_type = other DNA
ttaccagtacatggatgacttgtatgtgggatctgacttagaaatagaacagcatagaataaaaatagaggagctgaggg

SEQ ID NO: 73719 - DNA, 80 bp, synthetic construct
  source 1..80: mol_type = other DNA
aacatctattgaagtggggacttaccacaccagataaaaagcaccagaaagaacctccatttctttggatgggatatgag

SEQ ID NO: 73720 - DNA, 80 bp, synthetic construct
  source 1..80: mol_type = other DNA
agtgggaaaactaaattgggcaagtcagatttatccaggaattaaagtgaagcagctatgtaaactccttaggggggcta

SEQ ID NO: 73721 - DNA, 80 bp, synthetic construct
  source 1..80: mol_type = other DNA
aatcactaacagaaatagtaccattgactaaagaagcagaattggaactggcagaaaacaaagagattctaaaagatcca

SEQ ID NO: 73722 - DNA, 80 bp, synthetic construct
  source 1..80: mol_type = other DNA
gtacatggagcatattatgactcaggaaaagaattaatagcagaagtgcagaaacaagggctagaccaatggacatatca

SEQ ID NO: 73723 - DNA, 80 bp, synthetic construct
  source 1..80: mol_type = other DNA
aatttaccaggagccatttaaaaacttgaaaacagggaaatatgcaaaaaggaggggtgcccacactaatgatataaaac

SEQ ID NO: 73724 - DNA, 80 bp, synthetic construct
  source 1..80: mol_type = other DNA
aattaacagagctagtgcaaaaaatagccttagaaagcatagtgatatggggaaagactcctaaatttagactacccata

SEQ ID NO: 73725 - DNA, 80 bp, synthetic construct
  source 1..80: mol_type = other DNA
tccccgaaacaggagccgaaggaggaactgtatcctctaacttccctcaaatcactctttggcagcgacccctcgtcaca

SEQ ID NO: 73726 - DNA, 80 bp, synthetic construct
  source 1..80: mol_type = other DNA
gtaaaagtaggggggcagctgagggaagctctattagatacaggagcagatgatacagtattagaagaaatagatttgcc

SEQ ID NO: 73727 - DNA, 80 bp, synthetic construct
  source 1..80: mol_type = other DNA
agttaaacaatggccattgtcagaagaaaaaataaaggcattaacaaaaatttgtgcagaaatggaaaaggaaggaaaaa

SEQ ID NO: 73728 - DNA, 80 bp, synthetic construct
  source 1..80: mol_type = other DNA
ttagtggattttagagaactcaataaaagaacccaagacttctgggaagttcaattaggaataccacatccagcagggtt

SEQ ID NO: 73729 - DNA, 80 bp, synthetic construct
  source 1..80: mol_type = other DNA
aaaaaagaaaaaatcagtcacagtactggatgtgggggatgcatatttttcagtccctttatatgaagacttcagaaagt

SEQ ID NO: 73730 - DNA, 80 bp, synthetic construct
  source 1..80: mol_type = other DNA
acactgcattcactatacctagtacaaacaatgcgacaccagggatcagatatcagtacaacgtgctaccacagggatgg

SEQ ID NO: 73731 - DNA, 80 bp, synthetic construct
  source 1..80: mol_type = other DNA
ggtgatctatcaatatatggatgatctatatgtaggatctgacttagagatagggcaacatagagcaaagatagaggagt

SEQ ID NO: 73732 - DNA, 80 bp, synthetic construct
  source 1..80: mol_type = other DNA
gaacctgcacatggagtctattatgacccagcaaaagacttaatagcagaaatacagaaacaagggcaaggccaatggac

SEQ ID NO: 73733 - DNA, 80 bp, synthetic construct
  source 1..80: mol_type = other DNA
ggctggaaaggatcaccagcaatatttcaggctagcatgacaaaaatcttagacccatttagaacaaaaaatccagacat

SEQ ID NO: 73734 - DNA, 80 bp, synthetic construct
  source 1..80: mol_type = other DNA
attcctctggatggggtatgaactccatcctgataaatggacagtgcaggctatacgattgccagaaaaggacagctgga

SEQ ID NO: 73735 - DNA, 80 bp, synthetic construct
  source 1..80: mol_type = other DNA
ctgtcaatgatatacagaagttagtaggaaatttaaattgggcaagtcagatttatccaggaattaaagtaaggcagtta

SEQ ID NO: 73736 - DNA, 80 bp, synthetic construct
  source 1..80: mol_type = other DNA
tgtaaactccttaggggagccaaagcactaacagaagtagtaccattaacagaagaggcagaattagaactggcagaaaa

SEQ ID NO: 73737 - DNA, 80 bp, synthetic construct
  source 1..80: mol_type = other DNA
ggcaaggacaatggacatatcaaatttatcaagaaccctttaaaaatctgaaaacaggaaaatatgcaagggcgaggggt

SEQ ID NO: 73738 - DNA, 80 bp, synthetic construct
  source 1..80: mol_type = other DNA
ggacacatggtggacagaatattggcaagccacctggattcctgagtgggaatttgttaatacccctcctttagtaaaat

SEQ ID NO: 73739 - DNA, 80 bp, synthetic construct
  source 1..80: mol_type = other DNA
ttggcaacgacccattgtcacaataaagataggagggcagctaaaggaagctctattagatacaggagcagatgatacag

SEQ ID NO: 73740 - DNA, 80 bp, synthetic construct
  source 1..80: mol_type = other DNA
tatgatcaagtatgcatagagatttgtggacagaaaactataggtacagtattaataggacctacacctgtcaacataat

SEQ ID NO: 73741 - DNA, 80 bp, synthetic construct
  source 1..80: mol_type = other DNA
gaataccacatcctgcagggttaaaaaagaaaaagtcagtaacagtattggatgtgggggatgcatatttttcagttccc

SEQ ID NO: 73742 - DNA, 80 bp, synthetic construct
  source 1..80: mol_type = other DNA
agaggagataaaggaatcttcgaaacagcaacagaagaacgagggacagttccctcctttagcttccctcaaatcactct

SEQ ID NO: 73743 - DNA, 80 bp, synthetic construct
  source 1..80: mol_type = other DNA
ttagataaggagttcaggaagtacactgcatttaccatacctagtataaacaatgagacaccagggattagatatcagta

SEQ ID NO: 73744 - DNA, 80 bp, synthetic construct
  source 1..80: mol_type = other DNA
caatgtgctcccacagggatggaaaggatcaccggcaatattccaaagcagcatgacaagaatcttagagcctttcagaa

SEQ ID NO: 73745 - DNA, 80 bp, synthetic construct
  source 1..80: mol_type = other DNA
agcatagagcaaaaatagaggagctaagaagacatctactggaatggggatttactacaccagataaaaaacatcagaaa

SEQ ID NO: 73746 - DNA, 80 bp, synthetic construct
  source 1..80: mol_type = other DNA
ggaaagtatgcaagaaagaggtctgctcacactaatgatgtaaggcaattaacagaagtggtgcagaaaatagccacaga

SEQ ID NO: 73747 - DNA, 80 bp, synthetic construct
  source 1..80: mol_type = other DNA
gagaagacagaggaaataacctctcctctgaagccggaaccgagggaaaaggagctataccctcctttaacttccctcaa

SEQ ID NO: 73748 - DNA, 80 bp, synthetic construct
  source 1..80: mol_type = other DNA
aacataattggacgaaatatgttgactcagattggttgcactttaaattttccaattagtcctatccaaactgtaccagt

SEQ ID NO: 73749 - DNA, 80 bp, synthetic construct
  source 1..80: mol_type = other DNA
ccagttaggaatacctcatcccgcgggattaaaaaagaaaaaatcagtaacagtactagatgtgggggacgcgtattttt

SEQ ID NO: 73750 - DNA, 80 bp, synthetic construct
  source 1..80: mol_type = other DNA
cagttcctttagatgaaaactttagaaagtatactgcgttcaccatacctagtacaaacaatgagacaccaggaattaga

SEQ ID NO: 73751 - DNA, 80 bp, synthetic construct
  source 1..80: mol_type = other DNA
tatcagtacaatgtgcttcctcagggatggaaagggtcaccggcaatattccagtgtagtatgacaaaaatcttagagcc

SEQ ID NO: 73752 - DNA, 80 bp, synthetic construct
  source 1..80: mol_type = other DNA
gcacagcatagaacaaaaatagaggaactaagggaacatctattgaagtggggatttaccacaccagacaaaaaacatca

SEQ ID NO: 73753 - DNA, 80 bp, synthetic construct
  source 1..80: mol_type = other DNA
gtaaaacaattatgtagactcctcaggggagccaaagcactgacagaagtagtaccattgacaaaagaagcagaattaga

SEQ ID NO: 73754 - DNA, 80 bp, synthetic construct
  source 1..80: mol_type = other DNA
agcagagagcttcgggtttggagaggagataaccccctctcagaaacaggagcggaaggacctgtatccttcggattccc

SEQ ID NO: 73755 - DNA, 80 bp, synthetic construct
  source 1..80: mol_type = other DNA
aaaatgaggggtgcccacacgaatgatgtaaaacaattaacagaggcagtgcaaaaaatggccacagaaagcatagtgat

SEQ ID NO: 73756 - DNA, 80 bp, synthetic construct
  source 1..80: mol_type = other DNA
tgtcaacataattggaagaaatctgttgactcagattggatgcactttaaattttccaattagtcctattaaaactgtac

SEQ ID NO: 73757 - DNA, 80 bp, synthetic construct
  source 1..80: mol_type = other DNA
tttttagggaaaacctggcctttccacaagggaaggccagggaacttcctccagagcagaccagaaccaacagccccacc

SEQ ID NO: 73758 - DNA, 80 bp, synthetic construct
  source 1..80: mol_type = other DNA
aagtgcagctaggaataccgcatcctgcagggctaaaaaagaaaaaatcagtaacagtactggatgtgggtgatgcatat

SEQ ID NO: 73759 - DNA, 80 bp, synthetic construct
  source 1..80: mol_type = other DNA
tagatatcagtacaatgtgcttccacagggatggaaaggatcaccggcaatattccaaagtagcatgacaaaaatattgg

SEQ ID NO: 73760 - DNA, 80 bp, synthetic construct
  source 1..80: mol_type = other DNA
caccagcaatatttcagagcagcatgacaaaaatcttagagccctttagaacaaaaaatccagaaatggtgatctgtcaa

SEQ ID NO: 73761 - DNA, 80 bp, synthetic construct
  source 1..80: mol_type = other DNA
actgaaatggggattttacacaccagataagaaacatcagaaagaacctccattccgttggatgggatatgagctccatc

SEQ ID NO: 73762 - DNA, 80 bp, synthetic construct
  source 1..80: mol_type = other DNA
ctgacaaatggacggtacaacctatacagttgccagaaaaggaaagctggactgtcaatgatatacaaaagttagtggga

SEQ ID NO: 73763 - DNA, 80 bp, synthetic construct
  source 1..80: mol_type = other DNA
aaattaaattgggcaagtcagatttatccaggaattaaagtaaagcaactatgtaaactcattagagggaccaaagcatt

SEQ ID NO: 73764 - DNA, 80 bp, synthetic construct
  source 1..80: mol_type = other DNA
gggtttattataacccatcaaaagaattaatagcagaagtacagaaacaagggctagaccagtggacatatcaaatttat

SEQ ID NO: 73765 - DNA, 80 bp, synthetic construct
  source 1..80: mol_type = other DNA
gaattttcttcagaacaggccagagccaacagccccaccagcagagagcttcgggttcggagaggaagtagcccccaccc

SEQ ID NO: 73766 - DNA, 80 bp, synthetic construct
  source 1..80: mol_type = other DNA
acctggattcctgattgggagtttgtcaatacccctcctctagtaaaattatggtataggttagaaacagaacctatatt

SEQ ID NO: 73767 - DNA, 80 bp, synthetic construct
  source 1..80: mol_type = other DNA
agatgtggtacaaaaaatagccatggaaagcatagtaatatggggaaaaattcctaaatttagactacccatacgaaaag

SEQ ID NO: 73768 - DNA, 80 bp, synthetic construct
  source 1..80: mol_type = other DNA
aaacatgggatgtatggtggacagactattggcaggctacctggattcctgattgggagtttgtcaatacccctcctcta

SEQ ID NO: 73769 - DNA, 80 bp, synthetic construct
  source 1..80: mol_type = other DNA
cgaagcaggagccaaaggagaaggagctatatccctccctcaaatcactctttggcaacgaccccttgtcacagtaaaag

SEQ ID NO: 73770 - DNA, 80 bp, synthetic construct
  source 1..80: mol_type = other DNA
cagtggccattgacagaagaaaaaataaaagcattaacagaaatttgtacagaattggaaaaggaaggaaaaatttcgag

SEQ ID NO: 73771 - DNA, 80 bp, synthetic construct
  source 1..80: mol_type = other DNA
agtagggccagaaaatccatacaacactccaatatttgctataaagaaaaaagatagtactaaatggagaaaattagtag

SEQ ID NO: 73772 - DNA, 80 bp, synthetic construct
  source 1..80: mol_type = other DNA
atttcagagagctcaataaaagaactcaagacttctgggaggtccaattaggaatacctcatcccgcggggttaaaacag

SEQ ID NO: 73773 - DNA, 80 bp, synthetic construct
  source 1..80: mol_type = other DNA
caaagtagtatgacaaaaatcttagagcccttcagagaacaaaatccagatatagaaatctatcaatacatggatgattt

SEQ ID NO: 73774 - DNA, 80 bp, synthetic construct
  source 1..80: mol_type = other DNA
gtatgtaggatctgacttagaaatagggcaacataggacaaaaatagaagacttaaggaatcatctattgaagtggggat

SEQ ID NO: 73775 - DNA, 80 bp, synthetic construct
  source 1..80: mol_type = other DNA
gtacagcctataaaactgccagaaaaagaaagctggactgtcaatgatatacagaagttagtggggaaattgaattgggc

SEQ ID NO: 73776 - DNA, 80 bp, synthetic construct
  source 1..80: mol_type = other DNA
aagccagatttatccaggaattagagtaagacaattatgtaaactccttaggggagctaaagcactgacagaagtagtac

SEQ ID NO: 73777 - DNA, 80 bp, synthetic construct
  source 1..80: mol_type = other DNA
aactaacaaaagaagcagaattagaactggcagaaaacagggagattctaaaagaaccagtacatggagtgtattatgat

SEQ ID NO: 73778 - DNA, 80 bp, synthetic construct
  source 1..80: mol_type = other DNA
ccatcaaaagacttaatagcagaaatacaaaaacaagggctagatcaatggacatatcaaatctatcaagaaccatttaa

SEQ ID NO: 73779 - DNA, 80 bp, synthetic construct
  source 1..80: mol_type = other DNA
agccaacagccccgccagcagagatctttgggtttggagaagacataaccccctctccgaaacaagagcagaagaacgag

SEQ ID NO: 73780 - DNA, 80 bp, synthetic construct
  source 1..80: mol_type = other DNA
aaatagctacagagagcatagtgatatggggaaaaactcctaaatttagactacccatacaaaaagaaacatgggaaaca

SEQ ID NO: 73781 - DNA, 80 bp, synthetic construct
  source 1..80: mol_type = other DNA
ggacagtatcctcccttaacttccctcaaatcactctttggcaacgaccccttgtcacaataaagatagggggacagcta

SEQ ID NO: 73782 - DNA, 80 bp, synthetic construct
  source 1..80: mol_type = other DNA
gatagggggaattggaggttttatcaaagtaagacagtatgatcaaatacctatagaaatctgtggacagaaagctatcg

SEQ ID NO: 73783 - DNA, 80 bp, synthetic construct
  source 1..80: mol_type = other DNA
atccatataatactccagtattcgccataaagaaaaaagacagtactaagtggagaaaactagtagattttagagaactt

SEQ ID NO: 73784 - DNA, 80 bp, synthetic construct
  source 1..80: mol_type = other DNA
cagcaatatttcagagtagcatgacaaaaatcttagaaccatttaggacacaaaacccagaaatagttatctatcaatac

SEQ ID NO: 73785 - DNA, 80 bp, synthetic construct
  source 1..80: mol_type = other DNA
atggatgacttgtatgtgggatctgacttagaaatagggcagcatagaaaaaaggtagaggaattgaggcagcatctatt

SEQ ID NO: 73786 - DNA, 80 bp, synthetic construct
  source 1..80: mol_type = other DNA
acaaatggacggtgcaacctatacagctgccagaaaagacagactggactgtgaatgatatacaaaagttagtgggaaaa

SEQ ID NO: 73787 - DNA, 80 bp, synthetic construct
  source 1..80: mol_type = other DNA
gtaaactactcaggggggccaaagcactaacagacatagtaccactaactgcagaagcagaattagagttggcagagaac

SEQ ID NO: 73788 - DNA, 80 bp, synthetic construct
  source 1..80: mol_type = other DNA
ctaaattgggcaagtcagatttatgcaggaattcaagtaaggcaactatgtaaactactcaggggggccaaagcactaac

SEQ ID NO: 73789 - DNA, 80 bp, synthetic construct
  source 1..80: mol_type = other DNA
agacatagtaccactaactgcagaagcagaattagagttggcagagaacagggaaattctaaaagaacctgtgcatggag

SEQ ID NO: 73790 - DNA, 80 bp, synthetic construct
  source 1..80: mol_type = other DNA
cccacactaatgatgtaaaacaattaacagaagcagtgcaaaaagtggccatagagagcatagtaatctggggaaagatt

SEQ ID NO: 73791 - DNA, 80 bp, synthetic construct
  source 1..80: mol_type = other DNA
tctattatgacccaggaaaagaattaatagcagacatacagaaacaaggggaaggacaatggacatatcaaatttatcaa

SEQ ID NO: 73792 - DNA, 80 bp, synthetic construct
  source 1..80: mol_type = other DNA
gggaacacctaatagaagccctattagatacaggagcagatgatacagtactaaaagaaatagaattatcaggaagatgg

SEQ ID NO: 73793 - DNA, 80 bp, synthetic construct
  source 1..80: mol_type = other DNA
aaaccaaaaatgatagggggaattggaggttttatcaaagtaaaacagtatgaggaagtgctcttagaaattgagggaaa

SEQ ID NO: 73794 - DNA, 80 bp, synthetic construct
  source 1..80: mol_type = other DNA
tgggcctgaaaatccatataacactccagtgtttgctataaagaaaaaagacagtactaaatggagaaaattagttgatt

SEQ ID NO: 73795 - DNA, 80 bp, synthetic construct
  source 1..80: mol_type = other DNA
acagtacaacctatacagctgccagaaaaggaagactggactgtcaatgacatacaaaagttagtaggaaaattaaattg

SEQ ID NO: 73796 - DNA, 80 bp, synthetic construct
  source 1..80: mol_type = other DNA
tgccaatgactgcagaagcagaattggaattggcagaaaacagggaaattctgagagagccagtacatggagtctattat

SEQ ID NO: 73797 - DNA, 80 bp, synthetic construct
  source 1..80: mol_type = other DNA
cagaattagaattggcagagaacagggagattctaaaagagccagtgcatggggtatattatgacccctcaaaagaatta

SEQ ID NO: 73798 - DNA, 80 bp, synthetic construct
  source 1..80: mol_type = other DNA
atagcagacatacagaagcaagagggaggccaatggacatatcaaatataccaagagcaatataaaaatctgaaaacagg

SEQ ID NO: 73799 - DNA, 80 bp, synthetic construct
  source 1..80: mol_type = other DNA
cagcagaggactttgggatgaaggaggggatgatctccgctccgaagcaggagcagaaggacagggagcggccccctcct

SEQ ID NO: 73800 - DNA, 80 bp, synthetic construct
  source 1..80: mol_type = other DNA
gaagtatgcaagaacaaggtctgcccacactaatgatataagacaattaacagaagcagtgcaaaaaatagcacaggaga

SEQ ID NO: 73801 - DNA, 80 bp, synthetic construct
  source 1..80: mol_type = other DNA
ttagtttccctcaaatcactctttggcaacgaccagttgtcacagtaagagtagaaggacaactaaaagaagccctatta

SEQ ID NO: 73802 - DNA, 80 bp, synthetic construct
  source 1..80: mol_type = other DNA
caatatttgctataaagaaaaaagacagcgctaagtggagaaaattagtagatttcagagaacttaataaaaggactcaa

SEQ ID NO: 73803 - DNA, 80 bp, synthetic construct
  source 1..80: mol_type = other DNA
ttttttagggaaaatctggccttcccacaaggggaggccagggaactttcctcagagcagaccggaaccatcagccccac

SEQ ID NO: 73804 - DNA, 80 bp, synthetic construct
  source 1..80: mol_type = other DNA
gcataggacaaaaatagaggagttaagagaacatctactgaaatggggatttactacaccagataaaaagcatcagaaag

SEQ ID NO: 73805 - DNA, 80 bp, synthetic construct
  source 1..80: mol_type = other DNA
aacccccatttctctggatggggtatgaactccatcctgacaaatggacagtgcagcccatacaattgccagacaaagac

SEQ ID NO: 73806 - DNA, 80 bp, synthetic construct
  source 1..80: mol_type = other DNA
acaattatgcagactccttaggggagcaaaagcactaacagacgtagtgccactgactgcagaagcagaattagaattgg

SEQ ID NO: 73807 - DNA, 80 bp, synthetic construct
  source 1..80: mol_type = other DNA
acaaaaagaaacatgggaaacatggtggacggaatattggcaggccacctggatccctgagtgggaatttgtcaacaccc

SEQ ID NO: 73808 - DNA, 80 bp, synthetic construct
  source 1..80: mol_type = other DNA
tcgggttcggggaggagaaaaccccctccccgaagcaggagatgacaggcaaagaacatcctcccttaacctccctcaga

SEQ ID NO: 73809 - DNA, 80 bp, synthetic construct
  source 1..80: mol_type = other DNA
tcactctttggcaacgaccaataatcacagtaaaagtagaagggcaactaagggaggctctattagacacaggggcagat

SEQ ID NO: 73810 - DNA, 80 bp, synthetic construct
  source 1..80: mol_type = other DNA
aagacagtatgatcaagtaaccatagaaatttatggacaaaaggctataggtacagtattagtaggacctacacctgtta

SEQ ID NO: 73811 - DNA, 80 bp, synthetic construct
  source 1..80: mol_type = other DNA
aatttggccttcccacaaggggaggccaggaaattttcttcagaacaggccagagccatcagctccaccagcagagctct

SEQ ID NO: 73812 - DNA, 80 bp, synthetic construct
  source 1..80: mol_type = other DNA
agttccattagatgaagatttcaagaagtacactgcattcaccatacctagtattaacaatgagacaccaggggttagat

SEQ ID NO: 73813 - DNA, 80 bp, synthetic construct
  source 1..80: mol_type = other DNA
tgtaggatcagatttagaaatagggcagcatagagcaaaaatagagaaattgagggaacatctgttaaagtggggactaa

SEQ ID NO: 73814 - DNA, 80 bp, synthetic construct
  source 1..80: mol_type = other DNA
taacagaagaagcagaattagaactggcagaaaacagggaaattctaaaggaaccagtacatggggtatattatgaccca

SEQ ID NO: 73815 - DNA, 80 bp, synthetic construct
  source 1..80: mol_type = other DNA
tcaaaagaattaatagcagaattacagaaacaagggcaaggccaatggacatatcaaatttatcaagaaccatttaaaaa

SEQ ID NO: 73816 - DNA, 80 bp, synthetic construct
  source 1..80: mol_type = other DNA
ccccaccagcagagagcttcgggtttggggaggagataaccccctctcagaaacaggagcagcagaagaaagacaaggag

SEQ ID NO: 73817 - DNA, 80 bp, synthetic construct
  source 1..80: mol_type = other DNA
agctacctggattcctgagtgggagtttgtcaatacccctcctttagtaaaattatggtaccagttagagaaggaaccca

SEQ ID NO: 73818 - DNA, 80 bp, synthetic construct
  source 1..80: mol_type = other DNA
tagcccaagaaagcatagtgatatggggaaagacccctaagtttagactacccatacaaaaggaaacatgggaagcatgg

SEQ ID NO: 73819 - DNA, 80 bp, synthetic construct
  source 1..80: mol_type = other DNA
gagctgtatcccttagcttccctcaaatcactctttggcagcgaccccttgtcacagtaaagatagggggacagctaaaa

SEQ ID NO: 73820 - DNA, 80 bp, synthetic construct
  source 1..80: mol_type = other DNA
gaagccctattagatacaggggcagatgatacagtattagaagaaataaatttgccaggaaagtggaaaccaaaaatgat

SEQ ID NO: 73821 - DNA, 80 bp, synthetic construct
  source 1..80: mol_type = other DNA
agggggaattggaggttttatcaaagtaagacagtatgacaacatacccatagaaatctgtggacataaggctataggta

SEQ ID NO: 73822 - DNA, 80 bp, synthetic construct
  source 1..80: mol_type = other DNA
agaaaaaataaaagcgttaacagaaatttgtacagacatggaaaaggaagggaaaatttcaagggttgggcctgaaaatc

SEQ ID NO: 73823 - DNA, 80 bp, synthetic construct
  source 1..80: mol_type = other DNA
ggccatttttttagggaaaatttggccttcccacaagggaaggcctgggaactttcttcagagcagaccagagccgacag

SEQ ID NO: 73824 - DNA, 80 bp, synthetic construct
  source 1..80: mol_type = other DNA
gctagatgtgggtgatgcatatttttcagttcccttatatgaagactttaggaagtatactgcatttaccatacctagta

SEQ ID NO: 73825 - DNA, 80 bp, synthetic construct
  source 1..80: mol_type = other DNA
aaaacaaaatccagaaatagtgatctatcaatacatggatgatttatatgtaggctctgacttagaaatagggcagcata

SEQ ID NO: 73826 - DNA, 80 bp, synthetic construct
  source 1..80: mol_type = other DNA
ccattcctttggatggggtatgagctccatcctgacaaatggactgttcaacctatacagctaccagacaaagaaagctg

SEQ ID NO: 73827 - DNA, 80 bp, synthetic construct
  source 1..80: mol_type = other DNA
tatgtaaactccttaggggggccaaagcactaacagacatagtaccactgacagcagaagcagaaatggaattagcagag

SEQ ID NO: 73828 - DNA, 80 bp, synthetic construct
  source 1..80: mol_type = other DNA
aggactagaccaatggacatatcaaatttatcaagagccatacaaaaatctgaagacaggaaaatatgcaaaaagggggt

SEQ ID NO: 73829 - DNA, 80 bp, synthetic construct
  source 1..80: mol_type = other DNA
ggagaggagatagccccctccccgaagcaggagctgaaagagaaggagccgctgtatcctacagcctccctcaaatcact

SEQ ID NO: 73830 - DNA, 80 bp, synthetic construct
  source 1..80: mol_type = other DNA
attcctaaatttagactacctatacgaaaggaaacatgggaagtatggtggacagaatgttggcaagccacctggattcc

SEQ ID NO: 73831 - DNA, 80 bp, synthetic construct
  source 1..80: mol_type = other DNA
aatatgatcaaataactttagaaatttgtggacacaaggctacagggacagtattagtaggacctacacctatcaacata

SEQ ID NO: 73832 - DNA, 80 bp, synthetic construct
  source 1..80: mol_type = other DNA
atgacatggaaaaggaaggaaaaatttcaagaattgggcctgaaaacccatacaacactccaatatttgccataaagaaa

SEQ ID NO: 73833 - DNA, 80 bp, synthetic construct
  source 1..80: mol_type = other DNA
aaagacagtactaaatggagaaaattggtagatttcagggagcttaataaaagaactcaagacttctgggaggtccaatt

SEQ ID NO: 73834 - DNA, 80 bp, synthetic construct
  source 1..80: mol_type = other DNA
cttccaacaaaggaaggccggggaattttcttcagaacaggccagagccaacagccccacccgcagagagcttcagcttc

SEQ ID NO: 73835 - DNA, 80 bp, synthetic construct
  source 1..80: mol_type = other DNA
ccttagatcaagactttagaaagtacactgcattcactatacctagtataaataatgagacaccaggagttagataccag

SEQ ID NO: 73836 - DNA, 80 bp, synthetic construct
  source 1..80: mol_type = other DNA
catcctgataaatggacagtacaggccattaaactgccagaaaaagaaagctggactgtcaatgatatacagaagttagt

SEQ ID NO: 73837 - DNA, 80 bp, synthetic construct
  source 1..80: mol_type = other DNA
ggggaaattaaattgggcaagccagatttatgcaggaattaaagtaaaacaattatgtaaactccttaggggagccaaag

SEQ ID NO: 73838 - DNA, 80 bp, synthetic construct
  source 1..80: mol_type = other DNA
cactgacagaagtagtaacactaacaaaagaagcagaattagaactggcagaaaacagggagattctaagagaaccagta

SEQ ID NO: 73839 - DNA, 80 bp, synthetic construct
  source 1..80: mol_type = other DNA
gcaaaaatgaggagtgcccacactaatgatgtaaaacaattaacagatgcagttcaaaagataacccaggaatgcatagt

SEQ ID NO: 73840 - DNA, 80 bp, synthetic construct
  source 1..80: mol_type = other DNA
catggagtgtattatgatccctcaaaagacttaatagcagaaatacagaaacaagggcaaggccaatggacatatcaaat

SEQ ID NO: 73841 - DNA, 80 bp, synthetic construct
  source 1..80: mol_type = other DNA
aaacaagggcagaaagacaaggaactgtatcccataacttccctcaaatcactctttggcaacgaccccttgtctcaata

SEQ ID NO: 73842 - DNA, 80 bp, synthetic construct
  source 1..80: mol_type = other DNA
aaggtagggggacaaataaaggaagctctattggatacaggagcagatgatacagtactagaagaaataaatctgccagg

SEQ ID NO: 73843 - DNA, 80 bp, synthetic construct
  source 1..80: mol_type = other DNA
gtggacataaagctataggtacagtattggtaggacctacacctgtcaacataattggaagaaatctgttgactcagatt

SEQ ID NO: 73844 - DNA, 80 bp, synthetic construct
  source 1..80: mol_type = other DNA
ggctgcactttaaattttccaattagtcctattgagactgtaccagtaaagttaaagccagggatggatggcccaagagt

SEQ ID NO: 73845 - DNA, 80 bp, synthetic construct
  source 1..80: mol_type = other DNA
acaccaaatgaaagattgcactgaaagacaggctaattttttagggaaggtctggccttcccacaatggaaggccgggaa

SEQ ID NO: 73846 - DNA, 80 bp, synthetic construct
  source 1..80: mol_type = other DNA
gtagatttcagagaacttaataagagaactcaagacttttgtgaagttcaattaggaataccacaccctgcagggctgaa

SEQ ID NO: 73847 - DNA, 80 bp, synthetic construct
  source 1..80: mol_type = other DNA
gaagaaaaaatcagtaacagtactggatgttggtgatgcatatttctcagttcccttagatgaaaactttagaaagtata

SEQ ID NO: 73848 - DNA, 80 bp, synthetic construct
  source 1..80: mol_type = other DNA
taggatctgacttagaaatagggcaacatagaatgaaaatagaggagttaagagatcatttactgaaatggggatttacc

SEQ ID NO: 73849 - DNA, 80 bp, synthetic construct
  source 1..80: mol_type = other DNA
atctatacagttgccagataaggaaagctggactgtcaatgatatacaaaagttagtgggaaaactaaattgggcaagtc

SEQ ID NO: 73850 - DNA, 80 bp, synthetic construct
  source 1..80: mol_type = other DNA
acagccccacccgcagagagcttcgggttcagagaagagatagcccctgccccgaagcaggagacaaaggaaaaggagga

SEQ ID NO: 73851 - DNA, 80 bp, synthetic construct
  source 1..80: mol_type = other DNA
gccacagagagcatagtaatatggggaaagattcctaaatttagactgcctatacgaaaagaaacatgggatgtatggtg

SEQ ID NO: 73852 - DNA, 80 bp, synthetic construct
  source 1..80: mol_type = other DNA
ggggaattggaggctttatcaaagtaagacaatatgatcaaatacttatagagattgagggaaaaagggctatagggaca

SEQ ID NO: 73853 - DNA, 80 bp, synthetic construct
  source 1..80: mol_type = other DNA
gtattagtaggacctacacctatcaacataattgggagaaatatgttgactcaaattggttgtacattaaattttccaat

SEQ ID NO: 73854 - DNA, 80 bp, synthetic construct
  source 1..80: mol_type = other DNA
gacaggctaattttttagggaaaatctggccttccaacaaggggaggccagggaattttcttcagaacagaccagagcca

SEQ ID NO: 73855 - DNA, 80 bp, synthetic construct
  source 1..80: mol_type = other DNA
caccagcaatatttcagagtagcatgacaaaaatcttagagccctttagaaaacaaaatcctgaaatggttatttaccaa

SEQ ID NO: 73856 - DNA, 80 bp, synthetic construct
  source 1..80: mol_type = other DNA
ctgacaaatggacagtgcaggctgtaaaattgccagaacaagacagctggactgtcaatgatatacagaaactagtggga

SEQ ID NO: 73857 - DNA, 80 bp, synthetic construct
  source 1..80: mol_type = other DNA
aaactgaactgggcaagtcagatctacccagggattaaagtaaaacaactatgtaaactccttagggggaccaaagcact

SEQ ID NO: 73858 - DNA, 80 bp, synthetic construct
  source 1..80: mol_type = other DNA
aacagacatagtgccactgactagagaggcagaattggaattggcagaaaacagggaaattctgagagaaccagtacatg

SEQ ID NO: 73859 - DNA, 80 bp, synthetic construct
  source 1..80: mol_type = other DNA
cccacactaatgatataaaacaattaacagaagcagtacagaaaatatctacagaaggcgtaataatatggggaaaaatt

SEQ ID NO: 73860 - DNA, 80 bp, synthetic construct
  source 1..80: mol_type = other DNA
tttcctccagaaaaggccagagccaacagccccaccagcagagagcttcgggttcggagaggagataaccccctctccga

SEQ ID NO: 73861 - DNA, 80 bp, synthetic construct
  source 1..80: mol_type = other DNA
caagagccattcaaaaatctgaagacaggaaaatatgcaagaacgaggtctgcccacactaatgatataaaacaattaac

SEQ ID NO: 73862 - DNA, 80 bp, synthetic construct
  source 1..80: mol_type = other DNA
ggcaggagcagaaagaccaggaacctcccttaacttccctcaaatcactctttggcaacgaccccttgttgcagtaaaaa

SEQ ID NO: 73863 - DNA, 80 bp, synthetic construct
  source 1..80: mol_type = other DNA
tagagggacagttgaaggaggctctattagatacaggagcagatgatacagtattagaagatataaatttgccaggaaaa

SEQ ID NO: 73864 - DNA, 80 bp, synthetic construct
  source 1..80: mol_type = other DNA
tggaaaccaaaaatgataggaggaattggaggctttatcaaagtaaaacagtatgagcaagtagccatagaaatctgtgg

SEQ ID NO: 73865 - DNA, 80 bp, synthetic construct
  source 1..80: mol_type = other DNA
aaaaaaggctgtgggtacagtattagtaggacctacacctgtcaatataattggaaggaatatattgactcaaattggtt

SEQ ID NO: 73866 - DNA, 80 bp, synthetic construct
  source 1..80: mol_type = other DNA
caccaaatgaaagactgcacaggaagacaggctaattttttagggaagatctggccttccagcaaagggaggccagggaa

SEQ ID NO: 73867 - DNA, 80 bp, synthetic construct
  source 1..80: mol_type = other DNA
aaaaaatcagtatcagtactagatgtgggggatgcatatttttcagtccctttagatgaaaacttcaggaagtatactgc

SEQ ID NO: 73868 - DNA, 80 bp, synthetic construct
  source 1..80: mol_type = other DNA
ttaaggtaaaacaattatgtaaactcattaggggaaccaaggcactaacagacatagtaccactgactgcagaagcagaa

SEQ ID NO: 73869 - DNA, 80 bp, synthetic construct
  source 1..80: mol_type = other DNA
agaagtacagaaacaaggacaggaccaatggacatatcaaatttatcaggagccatataaaaatctgaaaacaggaaaat

SEQ ID NO: 73870 - DNA, 80 bp, synthetic construct
  source 1..80: mol_type = other DNA
atgcaaaaagggggtctgcccacactaatgatgtaagacaattaacagaagtagtacagaaaatagctagggagagcata

SEQ ID NO: 73871 - DNA, 80 bp, synthetic construct
  source 1..80: mol_type = other DNA
aggagcagatgacaccgtattagaagatataaatttaccagggagatggaaaccaaaaatgatagggggaattggaggct

SEQ ID NO: 73872 - DNA, 80 bp, synthetic construct
  source 1..80: mol_type = other DNA
catatttttcagttcccttagatgagagctttagaaagtacactgcattcactatacctagtataaataatgaaacacca

SEQ ID NO: 73873 - DNA, 80 bp, synthetic construct
  source 1..80: mol_type = other DNA
gaacagggaaattctgaaagaacctgtgcatggggtatattatgacccatcaaaagacttagtggcagaaatacagaaac

SEQ ID NO: 73874 - DNA, 80 bp, synthetic construct
  source 1..80: mol_type = other DNA
aagggcatgaccagtggacatatcaaatttatcaagagccatttaaaaacctaaaaacagggaaatatgcaaaaaggaag

SEQ ID NO: 73875 - DNA, 80 bp, synthetic construct
  source 1..80: mol_type = other DNA
caagaagccatagtaatatggggaaagacccctaaattcaaactacccatacagaaagaaacatgggagacatggtggac

SEQ ID NO: 73876 - DNA, 80 bp, synthetic construct
  source 1..80: mol_type = other DNA
tctgctcacactaatgatgtaaaacaattagtagaggtggtgcaaaagatagcccaagaagccatagtaatatggggaaa

SEQ ID NO: 73877 - DNA, 80 bp, synthetic construct
  source 1..80: mol_type = other DNA
tattagaagaaaatttaaatttaccaggaaaatggaaaccaaaaatgatagggggaattggaggttttatcaaagtaaga

SEQ ID NO: 73878 - DNA, 80 bp, synthetic construct
  source 1..80: mol_type = other DNA
taaagccaggaatggatggcccaagggttaaacaatggccattgacagaagaaaaaataaaagcctttacagagatatgt

SEQ ID NO: 73879 - DNA, 80 bp, synthetic construct
  source 1..80: mol_type = other DNA
acagatatggaaaaggacggaaaaatttcaagacttgggcctgacaacccatacaacaccccaatatttgccataaagaa

SEQ ID NO: 73880 - DNA, 80 bp, synthetic construct
  source 1..80: mol_type = other DNA
tagggataccacatcctgctgggttgaaaaagaaaaaatcagtaacagtattagatgtgggggatgcatatttttcaatt

SEQ ID NO: 73881 - DNA, 80 bp, synthetic construct
  source 1..80: mol_type = other DNA
cccttagatccagatttcaggaagtacactgcattcactatacccagtatcaacaatgagacaccaggaattagatatca

SEQ ID NO: 73882 - DNA, 80 bp, synthetic construct
  source 1..80: mol_type = other DNA
ttggcagcgacccctagtcacagtaaagatagggggacagttaatagaagccgtattagatacaggagcagatgatacag

SEQ ID NO: 73883 - DNA, 80 bp, synthetic construct
  source 1..80: mol_type = other DNA
gtacaatgtgcttccacagggatggaaaggatcaccagcaatattccaatctagcatgacaaaaattttagagtccttca

SEQ ID NO: 73884 - DNA, 80 bp, synthetic construct
  source 1..80: mol_type = other DNA
gagcaaaaaacccagaaatagttatataccagtacatggatgatttatatgtagggtctgacttagaattagggcaacat

SEQ ID NO: 73885 - DNA, 80 bp, synthetic construct
  source 1..80: mol_type = other DNA
agagcaaaaatagaagagctaagaaaacatctattggaatggggacttaccacaccagacaaaaagcatcagaaagaacc

SEQ ID NO: 73886 - DNA, 80 bp, synthetic construct
  source 1..80: mol_type = other DNA
tggaaagggtcaccggcaatattccagtgtagcatgacaaagatcttagagccctttagatcacaaaatccagatatagt

SEQ ID NO: 73887 - DNA, 80 bp, synthetic construct
  source 1..80: mol_type = other DNA
gagctcacctattgagctggggatttactacaccagacaaaaagcatcagaaagaacccccatttcagtggatgggatat

SEQ ID NO: 73888 - DNA, 80 bp, synthetic construct
  source 1..80: mol_type = other DNA
ccaaagcgttaacagatgtagtagcactgactaaggaagcagaactagaattggcagagaacagggagattctaaaagaa

SEQ ID NO: 73889 - DNA, 80 bp, synthetic construct
  source 1..80: mol_type = other DNA
tacccatacaaaaggaaacatgggaaacatggtggatggagtattggcaagctacctggattcctgaatgggtgtttgtc

SEQ ID NO: 73890 - DNA, 80 bp, synthetic construct
  source 1..80: mol_type = other DNA
atttccctcagagcagaccagagccaacagccccaccagccgagagcttcgagaagacagaggagatgacctcctctcag

SEQ ID NO: 73891 - DNA, 80 bp, synthetic construct
  source 1..80: mol_type = other DNA
gacaattaacagaagcagtgcagaaaatagccacagaaagcatagtaatatggggaaagacccctaaatttagactaccc

SEQ ID NO: 73892 - DNA, 80 bp, synthetic construct
  source 1..80: mol_type = other DNA
aagcaggaaccgagggaaagggaaccactatatcctcccttaacttccctcaaatcactctttggcaacgacccctagtc

SEQ ID NO: 73893 - DNA, 80 bp, synthetic construct
  source 1..80: mol_type = other DNA
aaatttcaaaaattgggcctgaaaatccatacaatactccagtatttgctataaagaaaaaggacagcactaaatggagg

SEQ ID NO: 73894 - DNA, 80 bp, synthetic construct
  source 1..80: mol_type = other DNA
aaattagtggatttcagagagctcaataagagaactcaggatttctgggaagttcaattaggaataccacatccagcggg

SEQ ID NO: 73895 - DNA, 80 bp, synthetic construct
  source 1..80: mol_type = other DNA
agtatactgcgttcaccatacctagtataaataatgagacaccaggaatcaggtatcaatacaatgtgctgccacaggga

SEQ ID NO: 73896 - DNA, 80 bp, synthetic construct
  source 1..80: mol_type = other DNA
aagttagtgggaaaattaaattgggcaagtcaaatttatccagggattagaataaagcagctatgtaaactcattagggg

SEQ ID NO: 73897 - DNA, 80 bp, synthetic construct
  source 1..80: mol_type = other DNA
aaccaaagcgctaacagacatagtaccattaactgcagaagcagaattggaactggcagagaacagggagattctgaaag

SEQ ID NO: 73898 - DNA, 80 bp, synthetic construct
  source 1..80: mol_type = other DNA
tatcaaatttatcaagaaccatttaaaaacctgaagacaggaaaatatgcaaaaaggaggactgcccacactaatgatgt

SEQ ID NO: 73899 - DNA, 80 bp, synthetic construct
  source 1..80: mol_type = other DNA
tcacaataaagatagggggacagctgagggaagctctattagatacaggagcagatgatacagtattagaagacatagat

SEQ ID NO: 73900 - DNA, 80 bp, synthetic construct
  source 1..80: mol_type = other DNA
ctcagcttggatgtactttaaattttccaattagtcctattgaaactgtaccagtaaaacttaagccagggatggatggc

SEQ ID NO: 73901 - DNA, 80 bp, synthetic construct
  source 1..80: mol_type = other DNA
ccaaagattaagcaatggccattgacagaagaaaaaataaaagcattaacacaaatttgtgatgaaatggaaaaggaagg

SEQ ID NO: 73902 - DNA, 80 bp, synthetic construct
  source 1..80: mol_type = other DNA
ccccctccccgaaacaggagccgaagggggaactgtatcctttagcttccctcaaatcactctttggcagcgacccatcg

SEQ ID NO: 73903 - DNA, 80 bp, synthetic construct
  source 1..80: mol_type = other DNA
ggaagggatcaccagcaatattccagagtagcatgacaaaaatcttagagccctttagattagcaaacccagaaatagtt

SEQ ID NO: 73904 - DNA, 80 bp, synthetic construct
  source 1..80: mol_type = other DNA
atctatcaatacatggatgacttgtatgtaggatctgatttagaaatagggcaacacagagcaaaaatagaggagttaag

SEQ ID NO: 73905 - DNA, 80 bp, synthetic construct
  source 1..80: mol_type = other DNA
agagtggcccaagaaagcatagtaatatggggaaagacccctaaatttaaattacccatacaaagagaaacatgggaggc

SEQ ID NO: 73906 - DNA, 80 bp, synthetic construct
  source 1..80: mol_type = other DNA
gaggccagggaattttctccaggagagaccagagccaacagccccaccagcggagagtctcgggttcagggaggagatag

SEQ ID NO: 73907 - DNA, 80 bp, synthetic construct
  source 1..80: mol_type = other DNA
acaattggcagaagcagtacaaagagtggcccaagaaagcatagtaatatggggaaagacccctaaatttaaattaccca

SEQ ID NO: 73908 - DNA, 80 bp, synthetic construct
  source 1..80: mol_type = other DNA
ccccctccccgaagaaagagaaggaggagctatatcctgtagcttccctcaaatcactctttggcagcgacccttagtca

SEQ ID NO: 73909 - DNA, 80 bp, synthetic construct
  source 1..80: mol_type = other DNA
aatttgtggaaaaaaggctatcggtacagtattaataggacctacacctgtcaacataattggcagaaatatgttgaccc

SEQ ID NO: 73910 - DNA, 80 bp, synthetic construct
  source 1..80: mol_type = other DNA
ttaaaaaagaaaaaatcagtaacagtactagatgtgggggatgcatatttttcagttcctttagacaaaagctttagaaa

SEQ ID NO: 73911 - DNA, 80 bp, synthetic construct
  source 1..80: mol_type = other DNA
cagaaaaaaaacatcagaaagagcctccattcctttggatgggataggagctccatccggacaaatggacggtacaacct

SEQ ID NO: 73912 - DNA, 80 bp, synthetic construct
  source 1..80: mol_type = other DNA
atacagctgccagacaaggaagactggactgtcaacgatatacaaaaatatggggaaactaaattgggcaagtcagattt

SEQ ID NO: 73913 - DNA, 80 bp, synthetic construct
  source 1..80: mol_type = other DNA
gaagcagaaatggagttggcagagaacagagaaattctaaaagaacctgtgcatggggtctattatgacccatcaaaaga

SEQ ID NO: 73914 - DNA, 80 bp, synthetic construct
  source 1..80: mol_type = other DNA
cttaatagcagaagtacagaaacaagagctaggacaatggacatatcaaatttatcaagagccatacaaaaatctaaaaa

SEQ ID NO: 73915 - DNA, 80 bp, synthetic construct
  source 1..80: mol_type = other DNA
caggaaaatatgcaaaaagggggtctgcccacactaatgatgtaaaacaattaacagaagtagtgcaaaaagtagccaca

SEQ ID NO: 73916 - DNA, 80 bp, synthetic construct
  source 1..80: mol_type = other DNA
gagggcataataatatggggaaaattcctaaatttaaactacctatacgaaagaaacatgggatgtatggtggacagaat

SEQ ID NO: 73917 - DNA, 80 bp, synthetic construct
  source 1..80: mol_type = other DNA
aagaaataaaagcattaacagaaatttgtgcagaatggaaaaggaaggaaatttcaaaaattgggcctgaaaatccatat

SEQ ID NO: 73918 - DNA, 80 bp, synthetic construct
  source 1..80: mol_type = other DNA
catgacaaaaatcttacagccctttagaacaaaaaatccagagatggtcatataccagtacatggatgatttatatgtgg

SEQ ID NO: 73919 - DNA, 80 bp, synthetic construct
  source 1..80: mol_type = other DNA
gctaagagctcatctgttgagctggggatttactacaccagacaaaaagcatcagaaagaacctccattcctttggaatg

SEQ ID NO: 73920 - DNA, 80 bp, synthetic construct
  source 1..80: mol_type = other DNA
gatatgaactccatcttgataaatggacagtccagcctatagaactaccagaaaaggaaagctggactgtcaatgatata

SEQ ID NO: 73921 - DNA, 80 bp, synthetic construct
  source 1..80: mol_type = other DNA
gggagccaaggcatttacagacatagtaacactgactgaggaagcagaactagaattggcagagaacagggagattctta

SEQ ID NO: 73922 - DNA, 80 bp, synthetic construct
  source 1..80: mol_type = other DNA
acatatcaaatttatcaagagccatttaaaaatctgaaaacaggaaaatatgcaagaaaaaggtctgctcacaccaatga

SEQ ID NO: 73923 - DNA, 80 bp, synthetic construct
  source 1..80: mol_type = other DNA
tgtaagacaattaacagaagtggtgcaaaaggtgaccacagaaagcatagtaatatggggaaaaacccctaaatttagac

SEQ ID NO: 73924 - DNA, 80 bp, synthetic construct
  source 1..80: mol_type = other DNA
tggtcaaagtaaaagtgggagggcagataatagaagctctgttagatacaggagcagatgatacagtattagaggacata

SEQ ID NO: 73925 - DNA, 80 bp, synthetic construct
  source 1..80: mol_type = other DNA
tatagaaatttgtggacagaaggctataggtacagtattaataggacctacacctgtcaacataattggacgaaatatgt

SEQ ID NO: 73926 - DNA, 80 bp, synthetic construct
  source 1..80: mol_type = other DNA
tgactcagattggttgtactttaaatttcccaattagtcctgttgagactgtaccagtaaaattaaagccagggatggat

SEQ ID NO: 73927 - DNA, 80 bp, synthetic construct
  source 1..80: mol_type = other DNA
aggaaaaatctcaaaaattggacctgaaaatccatataatactccaatatttgctataaagaaaaaggacagcactaaat

SEQ ID NO: 73928 - DNA, 80 bp, synthetic construct
  source 1..80: mol_type = other DNA
ggagaaaactagtagatttcagagagctcaataaaagaactcaggacttttgggaagtccaattagggataccgcatcca

SEQ ID NO: 73929 - DNA, 80 bp, synthetic construct
  source 1..80: mol_type = other DNA
gcgggtttaaaaaagaaaaaatcagtaacagtactggatgtgggggacgcatatttttcagttcctttagatgaaagctt

SEQ ID NO: 73930 - DNA, 80 bp, synthetic construct
  source 1..80: mol_type = other DNA
gatgactcccccgtctgaagcaggagcagaaagacaaccctcccttagtttccctcaaatcactctttggcaacgaccca

SEQ ID NO: 73931 - DNA, 80 bp, synthetic construct
  source 1..80: mol_type = other DNA
tagaaagtatactgcgttcaccatacctagtataaacaatgagacaccaggagttaggtatcagtacaatgtgcttccac

SEQ ID NO: 73932 - DNA, 80 bp, synthetic construct
  source 1..80: mol_type = other DNA
atagttatctatcaatacatggatgacttgtatgtgggatctgatttagaaatagagcaacatagagcaaaaatagagga

SEQ ID NO: 73933 - DNA, 80 bp, synthetic construct
  source 1..80: mol_type = other DNA
cagccccaccagcagagagcttcaggttcgaggagacaacccccactccgcagaaagacagggaacccttaacttccctc

SEQ ID NO: 73934 - DNA, 80 bp, synthetic construct
  source 1..80: mol_type = other DNA
aaatcactctttggcagcgacccctagttgcaataaaaatagggggccagacaaaggaggctctcttagatacaggagca

SEQ ID NO: 73935 - DNA, 80 bp, synthetic construct
  source 1..80: mol_type = other DNA
ggagatttggccttcccacaaggggaggccaggaaatttccttcaaagcagaccagaaccaacagccccaccagagccaa

SEQ ID NO: 73936 - DNA, 80 bp, synthetic construct
  source 1..80: mol_type = other DNA
ttctgttcctttagatgaggatttcagaaaatataccgcattcaccatacctagtgtaaacaatgaaacaccagggatta

SEQ ID NO: 73937 - DNA, 80 bp, synthetic construct
  source 1..80: mol_type = other DNA
gagcaggccagagccaacagccccaccagcagagagcttcaaatttgaggagacaaccccccctccccagaaagacaggg

SEQ ID NO: 73938 - DNA, 80 bp, synthetic construct
  source 1..80: mol_type = other DNA
aagaagcagaattagagttggcagagaatagggaaattctaaaagaaccagtacatggagtgtattatgacccatcaaaa

SEQ ID NO: 73939 - DNA, 80 bp, synthetic construct
  source 1..80: mol_type = other DNA
cagccagactagagccaacagccccaccagcggagagcttcaagttcgaggagacaacccccactccacagaaagacagg

SEQ ID NO: 73940 - DNA, 80 bp, synthetic construct
  source 1..80: mol_type = other DNA
ctcttagatacaggagcagatgatacagtattagaagaattaagtttgccagggagatggaaaccaaaaatgataggagg

SEQ ID NO: 73941 - DNA, 80 bp, synthetic construct
  source 1..80: mol_type = other DNA
agcattaacagaaatttgtttagagatggaaaaagaaggaaaaatttcaagaattgggcctgaaaatccatacaatactc

SEQ ID NO: 73942 - DNA, 80 bp, synthetic construct
  source 1..80: mol_type = other DNA
atagcagaaatacagaagcaggagatgggccaatggtcatatcaaatctatcaagagccatttaaaaatctgaaaacagg

SEQ ID NO: 73943 - DNA, 80 bp, synthetic construct
  source 1..80: mol_type = other DNA
cacctggattcctgactgggagtttgtcaatacccctcccttagtgaaattatggtaccagttagaaaaagatccaaagc

SEQ ID NO: 73944 - DNA, 80 bp, synthetic construct
  source 1..80: mol_type = other DNA
aggttttatcaaagtaagacagtatgatcaggtacctatagaaatttgtggacataaagctataggcacagtcttagtag

SEQ ID NO: 73945 - DNA, 80 bp, synthetic construct
  source 1..80: mol_type = other DNA
ctcctaaatttagattacccatccaaaaagaagtatgggaaacatggtggacagactattggcaagccacctggattcct

SEQ ID NO: 73946 - DNA, 80 bp, synthetic construct
  source 1..80: mol_type = other DNA
aagccaggaatggatggcccaaaagttaaacaatggccattgtcagaagaaaaaataaaggcattaacagcaatttgtga

SEQ ID NO: 73947 - DNA, 80 bp, synthetic construct
  source 1..80: mol_type = other DNA
cttagaaatagggcaacatagagcaaaaatagaagaattaagaggacatctactgagatggggatttactacaccagaca

SEQ ID NO: 73948 - DNA, 80 bp, synthetic construct
  source 1..80: mol_type = other DNA
agatgcatatttttcagttcctttatatgaagattttagaaagtacacagcattcactatacctagtgtaaataatgaaa

SEQ ID NO: 73949 - DNA, 80 bp, synthetic construct
  source 1..80: mol_type = other DNA
gaaatatgcaaaaaagaggtctgcccacactaatgatgtaaaacaattaacagaggcagtgcagaaaatagccacagaaa

SEQ ID NO: 73950 - DNA, 80 bp, synthetic construct
  source 1..80: mol_type = other DNA
ttaacttcccccaaatcactctttggcaacgacccttatgcacagtaagaatagggggacagccaatagaagccctatta

SEQ ID NO: 73951 - DNA, 80 bp, synthetic construct
  source 1..80: mol_type = other DNA
ccctttagaacaaaaaatccagaaatggtgatctaccagtacatggatgatttatatgtaggatctgatttagaaatagg

SEQ ID NO: 73952 - DNA, 80 bp, synthetic construct
  source 1..80: mol_type = other DNA
gcagcatagagcaaaaatagaagagttaagagaacatctactaagatggggatttaccacaccagataaaaaacatcaga

SEQ ID NO: 73953 - DNA, 80 bp, synthetic construct
  source 1..80: mol_type = other DNA
aaagcaactatgtagactccttaggggggccaaagcactaacagacatagtaccactgactaaagaagcagaattagaac

SEQ ID NO: 73954 - DNA, 80 bp, synthetic construct
  source 1..80: mol_type = other DNA
gcttcgggttcggagaggaaatagccccctccccgaagcaggagccaagggaaaaggaaacacctccattaacctccctc

SEQ ID NO: 73955 - DNA, 80 bp, synthetic construct
  source 1..80: mol_type = other DNA
aagggggtctgcccacactaatgatgtaaaacaattaacagaggcagtgcaaaaaatagccacagagagcatagtaatat

SEQ ID NO: 73956 - DNA, 80 bp, synthetic construct
  source 1..80: mol_type = other DNA
agtaaagcagtatgatcaaatacttatggaaattgaaggaaaaaaggctatagggacagtactagtagggcctacaccta

SEQ ID NO: 73957 - DNA, 80 bp, synthetic construct
  source 1..80: mol_type = other DNA
gtaaaattaaagccaggaatggatggcccaaagattaaacaatggccattgacagaagaaaaaataaaagcattaacaga

SEQ ID NO: 73958 - DNA, 80 bp, synthetic construct
  source 1..80: mol_type = other DNA
ggaaaatttggccttccaacaaggggaggccagggaactttcttagaacagaccagaaccaacagccccacccgcagaga

SEQ ID NO: 73959 - DNA, 80 bp, synthetic construct
  source 1..80: mol_type = other DNA
ttcagttcccttagatgaaagctttagaaagtatacagcatttactatacctagtataaataatgagacaccaggaatta

SEQ ID NO: 73960 - DNA, 80 bp, synthetic construct
  source 1..80: mol_type = other DNA
atcttagaaccctttagaacaaaaaatccagatatggtgatctaccagtacatggatgatttatatgtaggatctgactt

SEQ ID NO: 73961 - DNA, 80 bp, synthetic construct
  source 1..80: mol_type = other DNA
agaaatagggcagcatagagcaaaaatagaagagttaagagaacatctactgagatggggatttaccacaccagataaaa

SEQ ID NO: 73962 - DNA, 80 bp, synthetic construct
  source 1..80: mol_type = other DNA
gattaaagtaaagcaactatgtaaactccttaggggggccaaagcactaacagacatagtaccactgactaaagaagcag

SEQ ID NO: 73963 - DNA, 80 bp, synthetic construct
  source 1..80: mol_type = other DNA
ccgcagagagcttcgggttcggagaggaaatagctccctccccgaagcaggagtcgaaggaaaaagaaacacctccatta

SEQ ID NO: 73964 - DNA, 80 bp, synthetic construct
  source 1..80: mol_type = other DNA
atacgcaaaaagggggtctgcccacaccaatgatgtaaaacaattaacagaggcagtgcaaaaaatagccacagagagca

SEQ ID NO: 73965 - DNA, 80 bp, synthetic construct
  source 1..80: mol_type = other DNA
attcctgaatgggagtttgtcaatacccctcccctagtaaagttatggtatcgattagaaacagaacccaaccagagcag

SEQ ID NO: 73966 - DNA, 80 bp, synthetic construct
  source 1..80: mol_type = other DNA
caggccacctggattcctgaatgggagtttgtcaatacccctcccctagtaaagttatggtatcgattagaaacagaacc

SEQ ID NO: 73967 - DNA, 80 bp, synthetic construct
  source 1..80: mol_type = other DNA
atttatcaaagtaaaacagtatgatcaaatacttatggaaattgaaggaaaaaaggctatagggacagtactagtagggc

SEQ ID NO: 73968 - DNA, 80 bp, synthetic construct
  source 1..80: mol_type = other DNA
ttctgggaggtccaattaggcatacctcaccccgcggggttaaaaaagaaaaaatcagtaacagtactggatgtaggaga

SEQ ID NO: 73969 - DNA, 80 bp, synthetic construct
  source 1..80: mol_type = other DNA
attttagagccctttagaacaaaaaatccagaattggtgatctatcaatacatggatgatttatatataggatcagactt

SEQ ID NO: 73970 - DNA, 80 bp, synthetic construct
  source 1..80: mol_type = other DNA
agaaatagggcaacatagagcaaaaatagaggaactaagagaacatctattgaaatgggggtttactacaccagacaaaa

SEQ ID NO: 73971 - DNA, 80 bp, synthetic construct
  source 1..80: mol_type = other DNA
cagcagagagcttcagagtcggagaggagacagcctcctccccgaagcaggggccgcaggagaaggagctatatccctta

SEQ ID NO: 73972 - DNA, 80 bp, synthetic construct
  source 1..80: mol_type = other DNA
atcctagagccctttagggcacaaaacccagaaatagtcatctatcaatatatggatgacttatatgtaggatctgattt

SEQ ID NO: 73973 - DNA, 80 bp, synthetic construct
  source 1..80: mol_type = other DNA
agaaataatgcaacatagagcaaaagtagaggagttaagagaacacttattgagatggggatttaccacaccagacaaga

SEQ ID NO: 73974 - DNA, 80 bp, synthetic construct
  source 1..80: mol_type = other DNA
gattaaggtaaagcaactgtgtaaacttcttagaggaaccaaagcattaacagacgtaataccactgactgaagaagcag

SEQ ID NO: 73975 - DNA, 80 bp, synthetic construct
  source 1..80: mol_type = other DNA
gctgaaatacagaaacaagggcatgaccaatggacatatcaaatttatcaagaaccattcaaaaatctgaaaacaggaaa

SEQ ID NO: 73976 - DNA, 80 bp, synthetic construct
  source 1..80: mol_type = other DNA
cagcgccatcagccccaccagcagagagcttcaagttcgaggagacaacccccactctgcagaaagacagggaaccctta

SEQ ID NO: 73977 - DNA, 80 bp, synthetic construct
  source 1..80: mol_type = other DNA
gtatgcaagaatgaggactgcccacactaatgatgtaaaacagttaacagaggcagtgcaaaaaatagccatggaaagcg

SEQ ID NO: 73978 - DNA, 80 bp, synthetic construct
  source 1..80: mol_type = other DNA
acttccctcaaatcactctttggcagcgacccctagtttcaataaaaatagggggccagataaaagaggctctattagat

SEQ ID NO: 73979 - DNA, 80 bp, synthetic construct
  source 1..80: mol_type = other DNA
ctgcagagagcttcatgttcggagaggagatagccccctccccgaagcaggagccaaagaaggaggagctatatccctta

SEQ ID NO: 73980 - DNA, 80 bp, synthetic construct
  source 1..80: mol_type = other DNA
taataatatggggaaaaccccctaaatttagactacccatacagaaggaaacatgggagacatggtggacagaatattgg

SEQ ID NO: 73981 - DNA, 80 bp, synthetic construct
  source 1..80: mol_type = other DNA
ttttgggaagttcaattaggaataccacatcctgctgggttgaagaagaaaaaatcagtaacagtattggacgtggggga

SEQ ID NO: 73982 - DNA, 80 bp, synthetic construct
  source 1..80: mol_type = other DNA
gtgggaaaattaaactgggcaagtcagatttacccagggattaaagtaaggcaactgtgtaaactccttaggggagccaa

SEQ ID NO: 73983 - DNA, 80 bp, synthetic construct
  source 1..80: mol_type = other DNA
agcactaacagatgtagtaccattgactgaagaagcagaattagagttggcagagaacagggaaattctaaaagaaccag

SEQ ID NO: 73984 - DNA, 80 bp, synthetic construct
  source 1..80: mol_type = other DNA
atttaccaagaaccattcaaaaatctgaaaacaggaaagtatgcaaaaatgaggactgcccacactaatgatgtaagaca

SEQ ID NO: 73985 - DNA, 80 bp, synthetic construct
  source 1..80: mol_type = other DNA
gttaacagaggcagtgcaaaaaatagccacagaaagcatagtaatatggggaaagactcctaaatttagattacccatcc

SEQ ID NO: 73986 - DNA, 80 bp, synthetic construct
  source 1..80: mol_type = other DNA
ttggatgcacactaaattttccaattagccctattgaaactgtgccagtaaaattaaagccaggaatggatggcccaaag

SEQ ID NO: 73987 - DNA, 80 bp, synthetic construct
  source 1..80: mol_type = other DNA
tacaaaaattggacctgaaaatccatataacactccagtatttgctataaaaaagaaggacagcactaagtggagaaaat

SEQ ID NO: 73988 - DNA, 80 bp, synthetic construct
  source 1..80: mol_type = other DNA
taaaaatagggggccagataaaggaggctctcttagatacaggagcagatgatacagtattagaagaaataaatttgcca

SEQ ID NO: 73989 - DNA, 80 bp, synthetic construct
  source 1..80: mol_type = other DNA
aaggatcaccagcaatatttcagagtagcatgacaaaaatcctagagccctttagggcacaaaacccagaaatagttatt

SEQ ID NO: 73990 - DNA, 80 bp, synthetic construct
  source 1..80: mol_type = other DNA
tatcaatatatggatgatttatatgtaggatctgatttagaaataacacaacatagaacaaaagtagaggagttaagaga

SEQ ID NO: 73991 - DNA, 80 bp, synthetic construct
  source 1..80: mol_type = other DNA
tgcatatttttcagtgcccttagatgaaagctttagaaagtatacagcattcactatacctagtgtaaataatgagacac

SEQ ID NO: 73992 - DNA, 80 bp, synthetic construct
  source 1..80: mol_type = other DNA
ccagacaaggacagctggactgtcaatgatatacaaaaattagtgggaaaattaaattgggcaagccagatttatccagg

SEQ ID NO: 73993 - DNA, 80 bp, synthetic construct
  source 1..80: mol_type = other DNA
ccgcagagagcttcgggttcggagaggaaatagccctctccccgaaccagaagccaaaggaaaaggagacaactccatta

SEQ ID NO: 73994 - DNA, 80 bp, synthetic construct
  source 1..80: mol_type = other DNA
tggcaggctacctttattcctgaatgggagtttgtcaatacccctcctctagtaaaattatggtaccagttagagaaaga

SEQ ID NO: 73995 - DNA, 80 bp, synthetic construct
  source 1..80: mol_type = other DNA
ttaacttccctcagatcactctttggcaacgaccagtagtcacagtaaaaatagaaggacagccaatagaagccctgtta

SEQ ID NO: 73996 - DNA, 80 bp, synthetic construct
  source 1..80: mol_type = other DNA
ttttttagggaagatttggccttccaacaaaggaaggccagggaattttcctcagagcagaacggagccaacagccccac

SEQ ID NO: 73997 - DNA, 80 bp, synthetic construct
  source 1..80: mol_type = other DNA
gacttctgggaggtccagttaggaatacctcatcccgcaggattaaaggagaaaaaatcagtaacagtactagatgtggg

SEQ ID NO: 73998 - DNA, 80 bp, synthetic construct
  source 1..80: mol_type = other DNA
atctccctcaaatcactctttggcagcgaccagtagttacaataaaaatagagggccagataaaggaggctctcttagat

SEQ ID NO: 73999 - DNA, 80 bp, synthetic construct
  source 1..80: mol_type = other DNA
ctacacctgtcaacataattggaagaaatctgttgactcagcttggatgtacactaaattttccaattagccctgttgaa

SEQ ID NO: 74000 - DNA, 80 bp, synthetic construct
  source 1..80: mol_type = other DNA
attaacagcaatttgtgaggaaatggagaaagaaggaaaaattacaaaaattggacctgaaaatccatataacactccag

SEQ ID NO: 74001 - DNA, 80 bp, synthetic construct
  source 1..80: mol_type = other DNA
aaaggaaggaaaaatttcaaaaattgggcctgaaaatccatataatactgcaatatttgctataagaaaaaaggacagca

SEQ ID NO: 74002 - DNA, 80 bp, synthetic construct
  source 1..80: mol_type = other DNA
ggacttcaggaagtatactgcattcactatacctagtactaataatgcaacaccagggattagatatcagtacaatgtgt

SEQ ID NO: 74003 - DNA, 80 bp, synthetic construct
  source 1..80: mol_type = other DNA
gtatgcaaaaatgaggactgcccacaccaatgatataaaacagttaacagaggcagtgcaaaaaatagctcaagaaagca

SEQ ID NO: 74004 - DNA, 80 bp, synthetic construct
  source 1..80: mol_type = other DNA
ttaaattgcccatacaaaaagaaacatgggaaacatggtgggcagagtactggcaggctacctggattcctgaatgggag

SEQ ID NO: 74005 - DNA, 80 bp, synthetic construct
  source 1..80: mol_type = other DNA
acatgttgactcaaatcggttgcactttaaattttccaattagtcctattgaaactgtaccagtaaaattaaagccagga

SEQ ID NO: 74006 - DNA, 80 bp, synthetic construct
  source 1..80: mol_type = other DNA
cagcagaaccaacagccccaccggcagaaagctttgggatgggggaagagataacctcccctccgaagcaggaaccgagg

SEQ ID NO: 74007 - DNA, 80 bp, synthetic construct
  source 1..80: mol_type = other DNA
caggtgatagaagccctattagacacaggagcagatgatacagtcttagaagaaataaatttaccaggaagatggaaacc

SEQ ID NO: 74008 - DNA, 80 bp, synthetic construct
  source 1..80: mol_type = other DNA
aagatcctagagccctttaggaaacaaaacccagaagtagttatttatcaatatatggatgacttatatgtaggatctga

SEQ ID NO: 74009 - DNA, 80 bp, synthetic construct
  source 1..80: mol_type = other DNA
cagtagagccaacagccccaccagcagagaatttcaggttcgaggagacaacctccactctgcagaaagagagggaaccc

SEQ ID NO: 74010 - DNA, 80 bp, synthetic construct
  source 1..80: mol_type = other DNA
ttaatttccctcaaatcactctttggcagcgacccctagttacaataaaaatagggggccagacaaaggaggctctctta

SEQ ID NO: 74011 - DNA, 80 bp, synthetic construct
  source 1..80: mol_type = other DNA
atgacaaaaatcctaaagccttttagggaacaaaatccagaaatagttatttatcaatatatggatgacttatatgtagg

SEQ ID NO: 74012 - DNA, 80 bp, synthetic construct
  source 1..80: mol_type = other DNA
gtctgatttagacataatgcaacatagagcaaaagtagaggagttaagagaacacttattaaaatgggggtttaccacac

SEQ ID NO: 74013 - DNA, 80 bp, synthetic construct
  source 1..80: mol_type = other DNA
ataaagctgccagaaaaggagagctggactgtcaatgatatacaaaagatagtgggaaaattaaactgggccagtcaaat

SEQ ID NO: 74014 - DNA, 80 bp, synthetic construct
  source 1..80: mol_type = other DNA
ttacccagggattaaagtaaggcaactatgtaaactccttaggggagccaaagcgctaacagacgtagtaacactgactg

SEQ ID NO: 74015 - DNA, 80 bp, synthetic construct
  source 1..80: mol_type = other DNA
caccaacggtggagccaacagccccaccagcagagaacttcaggttcgaagagacaacccccactctgcagaaagacagg

SEQ ID NO: 74016 - DNA, 80 bp, synthetic construct
  source 1..80: mol_type = other DNA
cctgattgggagtttgttaatacccctcccctagtaaagttatggtaccagttggagaaagaccccaaaagagcagaatc

SEQ ID NO: 74017 - DNA, 80 bp, synthetic construct
  source 1..80: mol_type = other DNA
gaacccttaacttccctcaaatcactctttggcagcgacccttagttacaataaaaatagggggccaggtaaaggaggct

SEQ ID NO: 74018 - DNA, 80 bp, synthetic construct
  source 1..80: mol_type = other DNA
aattggaggatttatcaaagtaagacagtatgatcaaataggtatagaaatttgtggaaaaaaggctataggtacagtat

SEQ ID NO: 74019 - DNA, 80 bp, synthetic construct
  source 1..80: mol_type = other DNA
tagtaggacctacacctgtcaacataattggaagaaatatgttgactcagctaggatgcacactaaattttccaattagc

SEQ ID NO: 74020 - DNA, 80 bp, synthetic construct
  source 1..80: mol_type = other DNA
aataaaagcattaacagcgatttgtgaagaaatggagaaggaaggaaaaattacaagaattggacctgaaaatccatata

SEQ ID NO: 74021 - DNA, 80 bp, synthetic construct
  source 1..80: mol_type = other DNA
acactccagtatttgctataaaaaagaaggacagcactaagtggagaaaattagtagatttcagggaactcaataaaaga

SEQ ID NO: 74022 - DNA, 80 bp, synthetic construct
  source 1..80: mol_type = other DNA
actcaagacttttgggaagttcaattaggaataccacacccagcagggttaaaaaagaagaaatcagtgacagtactgga

SEQ ID NO: 74023 - DNA, 80 bp, synthetic construct
  source 1..80: mol_type = other DNA
tgtgggggatgcatatttttcagttcctttagatgaaaacttcaggaaatataccgcattcaccatacctagtgtgaaca

SEQ ID NO: 74024 - DNA, 80 bp, synthetic construct
  source 1..80: mol_type = other DNA
gggaggagacaacaactccctctcagagacaggagccaatagacaaggagcagtatcctttctcttccctcaaatcactc

SEQ ID NO: 74025 - DNA, 80 bp, synthetic construct
  source 1..80: mol_type = other DNA
cctaatagcagaaatacaaaagcagggggaaggccaatggacatatcaaatttatcaagagccatttaaaaatctgaaaa

SEQ ID NO: 74026 - DNA, 80 bp, synthetic construct
  source 1..80: mol_type = other DNA
ccatcaaaagacctaatagcagaaatacaaaagcagggggaaggccaatggacatatcaaatttatcaagagccatttaa

SEQ ID NO: 74027 - DNA, 80 bp, synthetic construct
  source 1..80: mol_type = other DNA
agccaacagccccaccagaagagagcttcaggtttggggaggagacaacaactccctctcagagacaggagccaatagac

SEQ ID NO: 74028 - DNA, 80 bp, synthetic construct
  source 1..80: mol_type = other DNA
aaggagcagtatcctttctcttccctcaaatcactctttggcaacgacccctcgtcacaataaagataggggggcaacta

SEQ ID NO: 74029 - DNA, 80 bp, synthetic construct
  source 1..80: mol_type = other DNA
gtacagtactagtaggacccacacctgtcaacataattggtagaaatctgttgactcagattggttgcactctaaatttt

SEQ ID NO: 74030 - DNA, 80 bp, synthetic construct
  source 1..80: mol_type = other DNA
tggcaagccacctggatccctgacggcgtttgtcaatacccctcccttagtaaaattatggtaccagttagaaaaagaac

SEQ ID NO: 74031 - DNA, 80 bp, synthetic construct
  source 1..80: mol_type = other DNA
gagacagtaccagtaaaattaaagccaggaatggatggtccaaaaattaaacaatggccattgacagaagaaaaaataag

SEQ ID NO: 74032 - DNA, 80 bp, synthetic construct
  source 1..80: mol_type = other DNA
ttttttagggaaaatctggccttcccacaaaggggggaggccagggaattcacagaacagattagagccaacagccccac

SEQ ID NO: 74033 - DNA, 80 bp, synthetic construct
  source 1..80: mol_type = other DNA
gacttctgggaaattcaatttccaataccacatcccgcggggttaaagaagaaaaaatcagtaacagtactggatgtggg

SEQ ID NO: 74034 - DNA, 80 bp, synthetic construct
  source 1..80: mol_type = other DNA
aattagaattggcagaggacagggaaattctaagagaacctgtacatggagtctactatgacccatcaaaagaattaata

SEQ ID NO: 74035 - DNA, 80 bp, synthetic construct
  source 1..80: mol_type = other DNA
cctcccttcaaatcactctttggcaactacccctagtcacagtaagaatagggggacagttaatagaagctctattagac

SEQ ID NO: 74036 - DNA, 80 bp, synthetic construct
  source 1..80: mol_type = other DNA
attaacagaaatttgtacagaaatggaaaaggaaggaaaaatttcaaagattgggcctgaaaacccatacaacactccaa

SEQ ID NO: 74037 - DNA, 80 bp, synthetic construct
  source 1..80: mol_type = other DNA
aaaatcttagcaccctttagaacagaaaatccagagatggtgatctaccaatatatggatgatttatatgtagggtcaga

SEQ ID NO: 74038 - DNA, 80 bp, synthetic construct
  source 1..80: mol_type = other DNA
cttagagatagagcagcatagagcaaaaatagaaaagttgagagaacatttattaaggtggggatttaccacaccagaca

SEQ ID NO: 74039 - DNA, 80 bp, synthetic construct
  source 1..80: mol_type = other DNA
atagcagaaatacagaaacaaggacaagaccaatggacatatcaaatctatcaagagccatttaaaaatttaaaaacagg

SEQ ID NO: 74040 - DNA, 80 bp, synthetic construct
  source 1..80: mol_type = other DNA
caatggagagcttcggggtgggggaagagacaacctcctctgtgaaacaggaaccgaaggacaagggactataccctcct

SEQ ID NO: 74041 - DNA, 80 bp, synthetic construct
  source 1..80: mol_type = other DNA
gtattagaagaactaagtttgccaggaaaatggaaaccaaaaatgataggaggaattggaggatttatcaaagtaagaca

SEQ ID NO: 74042 - DNA, 80 bp, synthetic construct
  source 1..80: mol_type = other DNA
aacatcagaaagaacctccatttctttggatggggtacgaactccatcctgacaagtggacagtacagcctatacagctg

SEQ ID NO: 74043 - DNA, 80 bp, synthetic construct
  source 1..80: mol_type = other DNA
atttatcaaagtaaggcagtatgatcaaataactatagaaatttgtgggaaaaaggccataggctcagtattagtaggac

SEQ ID NO: 74044 - DNA, 80 bp, synthetic construct
  source 1..80: mol_type = other DNA
cttagaaataaaacagcatagaacaaaaatagaggagctaagacagcatctattgaagtggggatttaccacaccagaca

SEQ ID NO: 74045 - DNA, 80 bp, synthetic construct
  source 1..80: mol_type = other DNA
cagcagagagcttcaggtttggggaagaaacagcagctccctctcagaagcaggagctgatagacaaggacctgtatcct

SEQ ID NO: 74046 - DNA, 80 bp, synthetic construct
  source 1..80: mol_type = other DNA
cagcagagagccttggaatgggggaagagacaacctcccctccgaagcaggaatcgagggacaaggaactatatcctcct

SEQ ID NO: 74047 - DNA, 80 bp, synthetic construct
  source 1..80: mol_type = other DNA
gcatagtaatatgggggaaggttcctaaatttagactacccatacaaaaagaaacatgggaatcatggtggacagattat

SEQ ID NO: 74048 - DNA, 80 bp, synthetic construct
  source 1..80: mol_type = other DNA
tcagtttccctcagatcactctttggcagcgacccgttgtcacaataaaagtagaggggcaactaaaggaagctctatta

SEQ ID NO: 74049 - DNA, 80 bp, synthetic construct
  source 1..80: mol_type = other DNA
ctgccagaaaaagacagctggactgtcaatgatatacagaaattagtgggaaaattaaattgggcaagccaaatttatgc

SEQ ID NO: 74050 - DNA, 80 bp, synthetic construct
  source 1..80: mol_type = other DNA
cagcagagaacttggggatgggagaagagatagcctcctccccgaagcaggaacagagggacaagggactatatcctccc

SEQ ID NO: 74051 - DNA, 80 bp, synthetic construct
  source 1..80: mol_type = other DNA
tggcaggctacttggatacctgaatgggagtttgtcaacacccctcccctagtaaaattatggtaccagtggagaaagat

SEQ ID NO: 74052 - DNA, 80 bp, synthetic construct
  source 1..80: mol_type = other DNA
atcttagagccctttagagcaaaaaatccagaggtagtaatctaccaatatatggatgatttatatgtaggatcagactt

SEQ ID NO: 74053 - DNA, 80 bp, synthetic construct
  source 1..80: mol_type = other DNA
agagatagggaagcatagagcaaaagtagaggagttgagagaacatctattgaaatggggatttaccacaccagacaaaa

SEQ ID NO: 74054 - DNA, 80 bp, synthetic construct
  source 1..80: mol_type = other DNA
ccagcaatattccaaagtagcatgacaaaaatcttagagccttttagaaagcaaaatccagacctggttatctatcaata

SEQ ID NO: 74055 - DNA, 80 bp, synthetic construct
  source 1..80: mol_type = other DNA
catggatgatttatatgtaggatctgacttagaaacaggggagcatagaacaaaaatagaggaactaagacaacatctat

SEQ ID NO: 74056 - DNA, 80 bp, synthetic construct
  source 1..80: mol_type = other DNA
gataaatggacagtgcagcctatagtgctgccagaaaaagacagctggactgtcaatgatatacagaagttagtgggaaa

SEQ ID NO: 74057 - DNA, 80 bp, synthetic construct
  source 1..80: mol_type = other DNA
attaaattgggcaagtcagatttacccagggatcaaaacaaagcagttatgtaaactcattaggggaaccaaagcactaa

SEQ ID NO: 74058 - DNA, 80 bp, synthetic construct
  source 1..80: mol_type = other DNA
gtatattatgacccatcaaaagacttaatagcagaaatacagaagcaggggtatggccaatggtcatatcagatctatca

SEQ ID NO: 74059 - DNA, 80 bp, synthetic construct
  source 1..80: mol_type = other DNA
agagcaggacagagccaacagccccactagaggagagcttcaggtttggggaggagacagcaactccccctcagaagcag

SEQ ID NO: 74060 - DNA, 80 bp, synthetic construct
  source 1..80: mol_type = other DNA
agaaccatttaaaaatctgaaaacaggaaagtatgcaagaacaaggggtgcccacactaatgatgtaaaacaattaacag

SEQ ID NO: 74061 - DNA, 80 bp, synthetic construct
  source 1..80: mol_type = other DNA
ggagggcaactaaaggaagctctattagatacaggagcggatgatacagtattagaagaaatgaatttgccaggaaaatg

SEQ ID NO: 74062 - DNA, 80 bp, synthetic construct
  source 1..80: mol_type = other DNA
ataaagctatgggtacagtcttaataggacctacacctgtcaacataattggaagaaacctgttgactcaaattggttgc

SEQ ID NO: 74063 - DNA, 80 bp, synthetic construct
  source 1..80: mol_type = other DNA
actttaaattttcctattagtcctattgaaacagtaccagtaaaattaaaaccaggaatggatggcccaaaagttaaaca

SEQ ID NO: 74064 - DNA, 80 bp, synthetic construct
  source 1..80: mol_type = other DNA
atggccattgacagaagaaaaaataaaagcattagtagaaatttgtacagaaatggaaaaggaagggaaaatttcaaaaa

SEQ ID NO: 74065 - DNA, 80 bp, synthetic construct
  source 1..80: mol_type = other DNA
ttttttagggaaaatctggccttcctacaaggggaggccaggaaactttattcagagcaggccagaaccaacagcccctc

SEQ ID NO: 74066 - DNA, 80 bp, synthetic construct
  source 1..80: mol_type = other DNA
aaagtcagtaacagtactggatgtgggtgatgcatatttttcagttcccttagacaaagaattcaggaagtatactgcat

SEQ ID NO: 74067 - DNA, 80 bp, synthetic construct
  source 1..80: mol_type = other DNA
cttagagatagggcaacatagggcaaaaatagaggagctaagagaacatctgctgagatgggggtttaccacgccagaca

SEQ ID NO: 74068 - DNA, 80 bp, synthetic construct
  source 1..80: mol_type = other DNA
ccagaaaaggagagctggactgtcaatgatatacagaagatagtgggaaaattaaactgggcaagtcagatttacccagg

SEQ ID NO: 74069 - DNA, 80 bp, synthetic construct
  source 1..80: mol_type = other DNA
tagtaatatggggaaagactcctaaatttagattacccatccaaaaagaaacatgggagacatggtggacagactattgg

SEQ ID NO: 74070 - DNA, 80 bp, synthetic construct
  source 1..80: mol_type = other DNA
tgcatatttttcagttcctttacatgaagactttaggaaatatactgcattcaccatacctagtacaaacaatgaaacac

SEQ ID NO: 74071 - DNA, 80 bp, synthetic construct
  source 1..80: mol_type = other DNA
gatgatttgtatgtaggatctgacttagaaataggacagcatagaacaaaaatagaggagctgagacaacatctgtggag

SEQ ID NO: 74072 - DNA, 80 bp, synthetic construct
  source 1..80: mol_type = other DNA
gtggggatttgacacaccagacaaaaaacatcagaaagaacctccattcctttggatgggttatgaactccatcctgata

SEQ ID NO: 74073 - DNA, 80 bp, synthetic construct
  source 1..80: mol_type = other DNA
aattgggcaagccagatttacccaggcataaaagtaaaacaattatgtaaactccttaggggaaccaaagcactaacaga

SEQ ID NO: 74074 - DNA, 80 bp, synthetic construct
  source 1..80: mol_type = other DNA
aataataccactaacagcagaagcagagctagaactggcagaaaacagggaaattctaaaagaaccagtacatggagtgt

SEQ ID NO: 74075 - DNA, 80 bp, synthetic construct
  source 1..80: mol_type = other DNA
attatgacccatcaaaggacttagtagcagaaatacagaagcaggggtacggccaatggacatatcaaatttatcaagag

SEQ ID NO: 74076 - DNA, 80 bp, synthetic construct
  source 1..80: mol_type = other DNA
ccatttaaaaatctgaaaacaggaaaatatgcaagaacgaggagtgcccacactaatgatgtaagacaattaacagaggc

SEQ ID NO: 74077 - DNA, 80 bp, synthetic construct
  source 1..80: mol_type = other DNA
agccgaaggaggagctgtatcctttaacctccctcaaatcactctttggcagcgacccctcgtcacaataaagatagggg

SEQ ID NO: 74078 - DNA, 80 bp, synthetic construct
  source 1..80: mol_type = other DNA
gagcagaccagagccaacagccccaccagaagagagcttcaggtttggggaggagacaacaacaagctctccgaagcagg

SEQ ID NO: 74079 - DNA, 80 bp, synthetic construct
  source 1..80: mol_type = other DNA
ggagccgatagacaaggatctgtatcctttagcttccctcagatcactctttggcaacgacccctcgtcgcagtaaaggt

SEQ ID NO: 74080 - DNA, 80 bp, synthetic construct
  source 1..80: mol_type = other DNA
ttagcttccctcagatcactctttggcaacgacccctcgtcgcagtaaaggtcggggggcagctaaaggaagctctatta

SEQ ID NO: 74081 - DNA, 80 bp, synthetic construct
  source 1..80: mol_type = other DNA
gacttctgggaaattcagttaggaataccacatcctgcaggattaaaaaagaagaagtcagtgacagtgctagatgtggg

SEQ ID NO: 74082 - DNA, 80 bp, synthetic construct
  source 1..80: mol_type = other DNA
atatgatcaaataatgatagaaatttgtggaaaaaaggcagtaggtacagtattggtaggacctacacctgtcaacataa

SEQ ID NO: 74083 - DNA, 80 bp, synthetic construct
  source 1..80: mol_type = other DNA
gcacaaaatccagaaatagttatttatcaatatatggatgacttatatgtaggatctgatttagaaataaagcaacatag

SEQ ID NO: 74084 - DNA, 80 bp, synthetic construct
  source 1..80: mol_type = other DNA
agcaaaagtagaggagttaagagaacacttattaaaatggggatttaccacaccagacaagaaacatcagaaagaacccc

SEQ ID NO: 74085 - DNA, 80 bp, synthetic construct
  source 1..80: mol_type = other DNA
actgtcaatgatatacaaaagatagtgggaaaattaaactgggcaagtcaaatttacccaggaattaaagtaaggcaact

SEQ ID NO: 74086 - DNA, 80 bp, synthetic construct
  source 1..80: mol_type = other DNA
gtgtaaactccttaggggagccaaagcattaacagacatagtaccactgactgaagaagcagaattagagttagcagaga

SEQ ID NO: 74087 - DNA, 80 bp, synthetic construct
  source 1..80: mol_type = other DNA
acagggaaattctaaaagaaccagtacatggagtatattatgacccatcaaaagaattaatagctgaaatacagaaacag

SEQ ID NO: 74088 - DNA, 80 bp, synthetic construct
  source 1..80: mol_type = other DNA
gggcatgaccagtggacatatcaaatttaccaagaaccattcaaaaatctgaaaacaggaaagtatgcaaaaatgaggac

SEQ ID NO: 74089 - DNA, 80 bp, synthetic construct
  source 1..80: mol_type = other DNA
cagcagagagcttcaagttcgaggagacaacccccactccgcagaaggacagggaacccttaacttccctcaaatcactc

SEQ ID NO: 74090 - DNA, 80 bp, synthetic construct
  source 1..80: mol_type = other DNA
tgcccacactaatgatataaaacagttaacagaggcagtgcaaaaaatagccacagaaagcatagtaatatggggaaaga

SEQ ID NO: 74091 - DNA, 80 bp, synthetic construct
  source 1..80: mol_type = other DNA
ctcctaaattcagactgcctatccaaaaagaaacatgggagacatggtggacagaatattggcaagccacctggattcct

SEQ ID NO: 74092 - DNA, 80 bp, synthetic construct
  source 1..80: mol_type = other DNA
tttggcaacgacccctagttacaataaaaatagggggccagataaaggaggctctcttagatacaggagcagatgataca

SEQ ID NO: 74093 - DNA, 80 bp, synthetic construct
  source 1..80: mol_type = other DNA
ttggaagaaatatgttgactcagcttggatgcacactaaattttccaattagtcctattgaaactgtaccagtaaaacta

SEQ ID NO: 74094 - DNA, 80 bp, synthetic construct
  source 1..80: mol_type = other DNA
agaaatggaaaaggaaggaaaaatttcaaaaattgggcctgaaaatccatataacactccagtatttgctataaaaaaga

SEQ ID NO: 74095 - DNA, 80 bp, synthetic construct
  source 1..80: mol_type = other DNA
aggacagtactaagtggagaaaattagtagacttcagggaacttaataaaagaactcaagacttttgggaagttcaatta

SEQ ID NO: 74096 - DNA, 80 bp, synthetic construct
  source 1..80: mol_type = other DNA
ggaataccacacccagcagggttaaaaaagaaaaaatcagtgacagtactagacgtgggggatgcatatttttcagttcc

SEQ ID NO: 74097 - DNA, 80 bp, synthetic construct
  source 1..80: mol_type = other DNA
tttagatgaaggcttcaggaaatatactgcattcaccatacctagtataaataatgaaacaccagggattagatatcaat

SEQ ID NO: 74098 - DNA, 80 bp, synthetic construct
  source 1..80: mol_type = other DNA
ataatgtgctaccgcagggatggaaaggatcaccagcaatatttcagagtagcatgacaaaaatcctagagccctttagg

SEQ ID NO: 74099 - DNA, 80 bp, synthetic construct
  source 1..80: mol_type = other DNA
ccagacataattatataccaatacatggatgatttgtatgtagggtctgacttagaaatagggcaacatagagcaaaagt

SEQ ID NO: 74100 - DNA, 80 bp, synthetic construct
  source 1..80: mol_type = other DNA
agaggaactaagagaacatctattgaaatggggatttactacaccagacaaaaagcatcagaaagaacctccatttcttt

SEQ ID NO: 74101 - DNA, 80 bp, synthetic construct
  source 1..80: mol_type = other DNA
cagcagagagcttgaggataggggagaaggaaggggaacagccccctcctttagtttccctcaaatcactctttggcaac

SEQ ID NO: 74102 - DNA, 80 bp, synthetic construct
  source 1..80: mol_type = other DNA
aaatgatataagacagttaacagaaatggtgcaaaaaataagcacagaaagcgtagtaatctggggaaagacccctaaat

SEQ ID NO: 74103 - DNA, 80 bp, synthetic construct
  source 1..80: mol_type = other DNA
tttgtcaacaccccgcctttagtaaaattatggtaccagttagaaaaggaccccatagtagaagcagagactttctatgt

SEQ ID NO: 74104 - DNA, 80 bp, synthetic construct
  source 1..80: mol_type = other DNA
gaccaattgttacagtaaagataggaggacagctaagggaagctctgttagacacaggagcagatgatacagtattagag

SEQ ID NO: 74105 - DNA, 80 bp, synthetic construct
  source 1..80: mol_type = other DNA
taccacagggatggaaaggatcaccagcaatattccagagtaccatgacaaaaatcttagagccctttagaaagaaaaat

SEQ ID NO: 74106 - DNA, 80 bp, synthetic construct
  source 1..80: mol_type = other DNA
gagacaattccctctcagaagcaggagccgctagacaaggaactgtatccttcgactgccctcaaatcactctttggcaa

SEQ ID NO: 74107 - DNA, 80 bp, synthetic construct
  source 1..80: mol_type = other DNA
agggattaaaacaaagcaattatgtaaactccttaggggaactaaatcattaacagaagtagtaccactaacagaagaag

SEQ ID NO: 74108 - DNA, 80 bp, synthetic construct
  source 1..80: mol_type = other DNA
caccagaagagagcttcaggtttgggggggagacaattccctctcagaagcaggagccgctagacaaggaactgtatcct

SEQ ID NO: 74109 - DNA, 80 bp, synthetic construct
  source 1..80: mol_type = other DNA
aaaatatgcaagaacaaggggtgcccacactaatgatgtaaaacaattaacagatgcagtacagaaaatagccacagaaa

SEQ ID NO: 74110 - DNA, 80 bp, synthetic construct
  source 1..80: mol_type = other DNA
tggcaagccacctggattcctgaatgggaatttgtcaatacccctcccttagtgaaattatggtaccagttagagaaaga

SEQ ID NO: 74111 - DNA, 80 bp, synthetic construct
  source 1..80: mol_type = other DNA
aggttttatcaaagtaaaacagtatgatcaggtagacatagaaatttgtggacataaagtttcaggtacagtcttaatag

SEQ ID NO: 74112 - DNA, 80 bp, synthetic construct
  source 1..80: mol_type = other DNA
ttggattccctcaaatcactctttggcaacgacccttagtcacagtaagaatagggggtcaggtaatagaagccctatta

SEQ ID NO: 74113 - DNA, 80 bp, synthetic construct
  source 1..80: mol_type = other DNA
ggacgcatatttttcagttcccttagatcaagactttagaaaatatactgcattcactatacctagtacaaataatgcaa

SEQ ID NO: 74114 - DNA, 80 bp, synthetic construct
  source 1..80: mol_type = other DNA
ttagagccttttagaaaacaaaatcaagacatggttatctatcaatacatggatgacttgtatgtaggatctgacttaga

SEQ ID NO: 74115 - DNA, 80 bp, synthetic construct
  source 1..80: mol_type = other DNA
aatagggcagcatagaacaaaaatagaggagctgagacaacatctattgaagtggggatttaccacaccagacaaaaaac

SEQ ID NO: 74116 - DNA, 80 bp, synthetic construct
  source 1..80: mol_type = other DNA
taaaacaaagcaattatgtaaactccttaggggaaccaaagcactaacagaagtagtaccactaacagaagaagcagagc

SEQ ID NO: 74117 - DNA, 80 bp, synthetic construct
  source 1..80: mol_type = other DNA
tgcaagaacgaggggtgcccacactaatgatgtaaagcaattaacagaggcagtacagaaaatagccacagaaagcatag

SEQ ID NO: 74118 - DNA, 80 bp, synthetic construct
  source 1..80: mol_type = other DNA
tccctcagatcactctttggcaacgacccctcgtcacagtaaaagtaggggggcagctaaaggaagctctattagataca

SEQ ID NO: 74119 - DNA, 80 bp, synthetic construct
  source 1..80: mol_type = other DNA
tatcaaagtgaaacagtatgatcaaatactcatagaaatctgtggacataaagctataggcacagtcttagtaggaccta

SEQ ID NO: 74120 - DNA, 80 bp, synthetic construct
  source 1..80: mol_type = other DNA
ttgccataaagaaaaaagacagtactaaatggagaaaattagtagatttcagagaacttaataagaaaactcaagacttt

SEQ ID NO: 74121 - DNA, 80 bp, synthetic construct
  source 1..80: mol_type = other DNA
atatttttcagttcccttagataaagatttcaggaagtatactgcattcaccatacctagtacaaacaacgagacaccgg

SEQ ID NO: 74122 - DNA, 80 bp, synthetic construct
  source 1..80: mol_type = other DNA
ctcaaaacagaccggagccgacagccccaccagcagagagccttgggatgggggaagagataacctcctctctgaagcag

SEQ ID NO: 74123 - DNA, 80 bp, synthetic construct
  source 1..80: mol_type = other DNA
cagaggtagtgcaaaaagcatctacagaaagtatagtaatatggggaaagacccctaaatttagactacccatacaaaga

SEQ ID NO: 74124 - DNA, 80 bp, synthetic construct
  source 1..80: mol_type = other DNA
ttttttagggaaaatttggccttccagcaaagggaggccaggaaactttcctcagagcagaacggagccaggaaaccctc

SEQ ID NO: 74125 - DNA, 80 bp, synthetic construct
  source 1..80: mol_type = other DNA
cagcagagagctttgggatggaggaagaggcaacctcccctccgaagcaggaaccgagggacaagggactataccctccc

SEQ ID NO: 74126 - DNA, 80 bp, synthetic construct
  source 1..80: mol_type = other DNA
cagtatttgccataaagaaaaaagatagtactaagtggagaaaattagtagatttcagagagctcaataagagaactcaa

SEQ ID NO: 74127 - DNA, 80 bp, synthetic construct
  source 1..80: mol_type = other DNA
ggatgcatatttttcagtccccttagataaggacttcagaaagtatactgcattcactatacctagtgtaaataatgaaa

SEQ ID NO: 74128 - DNA, 80 bp, synthetic construct
  source 1..80: mol_type = other DNA
aaaattttagagccttttagaaaacaaaacccagaagtggttatctatcaatacatggatgacttatatgtaggatctga

SEQ ID NO: 74129 - DNA, 80 bp, synthetic construct
  source 1..80: mol_type = other DNA
cagaagagagcttcaggtttggggaggaaacaacaactccctctcagaaacaggagccgatagacaaggaacggtatcct

SEQ ID NO: 74130 - DNA, 80 bp, synthetic construct
  source 1..80: mol_type = other DNA
ttttttagggaagatctggtcttcccacaagggaaggccaggaaattttcttcagagcagaccagagccaacggccccac

SEQ ID NO: 74131 - DNA, 80 bp, synthetic construct
  source 1..80: mol_type = other DNA
aggaatcaaggtaaagcaattgtgtagactcctcaggggagccaaagcactaacagatgtaataacactaactgaggaag

SEQ ID NO: 74132 - DNA, 80 bp, synthetic construct
  source 1..80: mol_type = other DNA
cagcagagagcttgggaatgggggaagagataacctcccctctgaagcaggaaacgggggacaagggactataccctccc

SEQ ID NO: 74133 - DNA, 80 bp, synthetic construct
  source 1..80: mol_type = other DNA
aaaatatgcaaaaaagaagtctgcccacactaatgatgtaaaacaattaacagaggtagtacaaaaggtggctagagaaa

SEQ ID NO: 74134 - DNA, 80 bp, synthetic construct
  source 1..80: mol_type = other DNA
catttctttggatggggtatgaactccatcctgacaaatggacagtacagcctatacagcttccagagaaggaacactgg

SEQ ID NO: 74135 - DNA, 80 bp, synthetic construct
  source 1..80: mol_type = other DNA
ccctttagagccagaaatccagaaatagtcatctatcaatacatggatgacttgtatgtaggatctgatttagaaatagg

SEQ ID NO: 74136 - DNA, 80 bp, synthetic construct
  source 1..80: mol_type = other DNA
gcaacacagagcaaaaatagaggagttaagaggacatctattaaggtggggatttaccacaccagacaagaaacatcaga

SEQ ID NO: 74137 - DNA, 80 bp, synthetic construct
  source 1..80: mol_type = other DNA
cagaaacagggggatggccaatggacgtatcaaatttaccaagaaccattcaaaaatctaaaaacagggaagtatgcaaa

SEQ ID NO: 74138 - DNA, 80 bp, synthetic construct
  source 1..80: mol_type = other DNA
ggggaaagactcctaaatttagactacccatccaaaaggaaacgtgggagacatggtggacagactattggcaagccacc

SEQ ID NO: 74139 - DNA, 80 bp, synthetic construct
  source 1..80: mol_type = other DNA
gatgacacagtattggaagaaataaatttgtcaggaaaatggaaaccaaaaatgataggaggaattggaggttttatcaa

SEQ ID NO: 74140 - DNA, 80 bp, synthetic construct
  source 1..80: mol_type = other DNA
agtaagacagtatgaacaagtatctatagaaatttgtggaaaaaaggccataggtacagtattagtagggcctacacctg

SEQ ID NO: 74141 - DNA, 80 bp, synthetic construct
  source 1..80: mol_type = other DNA
gttcaattaggaataccacacccagcagggttaaaaaagaaaaaatcagtgacagtgctggatgtgggggatgcatattt

SEQ ID NO: 74142 - DNA, 80 bp, synthetic construct
  source 1..80: mol_type = other DNA
gcaatattccagtgtagcatgactaaaatactagagccctttagagcaaaaaatccagaaatagtcatctatcaatatat

SEQ ID NO: 74143 - DNA, 80 bp, synthetic construct
  source 1..80: mol_type = other DNA
ggatgacttgtatgtaggatctgatttagaaatagggcaacatagagcaaaaatagaggagttaagagaacatctattaa

SEQ ID NO: 74144 - DNA, 80 bp, synthetic construct
  source 1..80: mol_type = other DNA
aaactgggcaagtcagatttacccagggattaaaacaaagcaactttgtagactccttaggggggccaaagcactaacag

SEQ ID NO: 74145 - DNA, 80 bp, synthetic construct
  source 1..80: mol_type = other DNA
acatagtaccactaactgaagaagcagaattagaattggcagagaacagagagattctaaaagagccagtacatggaaca

SEQ ID NO: 74146 - DNA, 80 bp, synthetic construct
  source 1..80: mol_type = other DNA
tattatgacccgtcaaaagaattgatagctgaaatacagaaacagggggatggtcaatggacgtatcaaatttaccaaga

SEQ ID NO: 74147 - DNA, 80 bp, synthetic construct
  source 1..80: mol_type = other DNA
cagcggagagcttcagaccagagccaacagccccgccagcggagagcttcaaattcgaggaggcaacccccactccgaag

SEQ ID NO: 74148 - DNA, 80 bp, synthetic construct
  source 1..80: mol_type = other DNA
aggccataggtacagtattagtagggcctacacctgtcaacataattggaagaaacatgttgactcagcttggatgcaca

SEQ ID NO: 74149 - DNA, 80 bp, synthetic construct
  source 1..80: mol_type = other DNA
ggcctgaaaacccatataacactccagtatttgccataaaaaagaaagacagtagtaagtggagaaaattagtagatttc

SEQ ID NO: 74150 - DNA, 80 bp, synthetic construct
  source 1..80: mol_type = other DNA
atcagtgacagtactggatgtgggggatgcatatttttcagttcctttagatgaaagtttcaggaaatacactgcattca

SEQ ID NO: 74151 - DNA, 80 bp, synthetic construct
  source 1..80: mol_type = other DNA
ccatacctagtataaacaatgagacaccaggaattagatatcaatataatgtactcccacaaggatggaaaggatcacca

SEQ ID NO: 74152 - DNA, 80 bp, synthetic construct
  source 1..80: mol_type = other DNA
cagagctagaactggcggagaacagggaacttctaaaagaaccagtacatggggtgtactatgacccatcaaaagactta

SEQ ID NO: 74153 - DNA, 80 bp, synthetic construct
  source 1..80: mol_type = other DNA
tgtagcatgacaaaaatcttagagccttttagaaaacaaaatccagacatagttatctatcaatacatggatgatttgta

SEQ ID NO: 74154 - DNA, 80 bp, synthetic construct
  source 1..80: mol_type = other DNA
cagcctatagtgctgccagaaaaggacagctggactgtcaatgacatacagaagttagtgggaaagttgaattgggcaag

SEQ ID NO: 74155 - DNA, 80 bp, synthetic construct
  source 1..80: mol_type = other DNA
tcagatttatgcagggattaaggtaaaggaattatgtaaactccttaggggaaccaaagcactaacagaagtaataccac

SEQ ID NO: 74156 - DNA, 80 bp, synthetic construct
  source 1..80: mol_type = other DNA
cccagaagcaggagccggaagtatatcctttagcctccctcagatcactctttggcaacgaccccttgtcacaataaaga

SEQ ID NO: 74157 - DNA, 80 bp, synthetic construct
  source 1..80: mol_type = other DNA
taacaaaagaagcagagctagaactggcggagaacagggaacttctgaaagaaccagtacatggggtgtactatgaccca

SEQ ID NO: 74158 - DNA, 80 bp, synthetic construct
  source 1..80: mol_type = other DNA
tcaaaagacttaatagcagaaatacagaagcaggggctaggccaatggacataccaaatttatcaagagcaatataaaaa

SEQ ID NO: 74159 - DNA, 80 bp, synthetic construct
  source 1..80: mol_type = other DNA
cagaggagagcttcaggtttggggaggagacaacaactccaccccagaagcaggagcctccaccccagaagcaggagccg

SEQ ID NO: 74160 - DNA, 80 bp, synthetic construct
  source 1..80: mol_type = other DNA
tctgaaaacaggaaaatatgcaagaatgaggggtgcccacactaatgatgtaaaacaattaacagaggcagtgcaaaaaa

SEQ ID NO: 74161 - DNA, 80 bp, synthetic construct
  source 1..80: mol_type = other DNA
tggacagagtattggcaagccacctggattcctgagtgggagtttaccaacacccctcccttagtaaaattatggtatca

SEQ ID NO: 74162 - DNA, 80 bp, synthetic construct
  source 1..80: mol_type = other DNA
gaagtatatcctttagcctccctcagatcactctttggcaacgaccccttgtcacaataaagataggggggcaattaaag

SEQ ID NO: 74163 - DNA, 80 bp, synthetic construct
  source 1..80: mol_type = other DNA
agggggaattggaggttttatcaaagtaagacagtatgatcaggtacccatagaaatctgcggacacaagactgaaggta

SEQ ID NO: 74164 - DNA, 80 bp, synthetic construct
  source 1..80: mol_type = other DNA
cagtattaataggacctacacctgtcaacataattggaagaaatctgttgactcagcttggttgcactttaaattttccc

SEQ ID NO: 74165 - DNA, 80 bp, synthetic construct
  source 1..80: mol_type = other DNA
aaaagaactcaagacttctgggaagttcaattaggaataccacatcccgcagggttaaaaaagaaaaaatctgtaacagt

SEQ ID NO: 74166 - DNA, 80 bp, synthetic construct
  source 1..80: mol_type = other DNA
cttggatgtgggtgatgcatatttctcagtccctctagataaagacttcaggaagtatactgcatttaccatacccagta

SEQ ID NO: 74167 - DNA, 80 bp, synthetic construct
  source 1..80: mol_type = other DNA
aaaatcttagaaccttttagaaaacaaaatccagacatagttatctatcaatatatggatgatttgtatgtaggatctga

SEQ ID NO: 74168 - DNA, 80 bp, synthetic construct
  source 1..80: mol_type = other DNA
tttggaaatagggcagcatagagcaaaagtagaggaactgagacaacatctgttgaaatggggatttaccacaccagaca

SEQ ID NO: 74169 - DNA, 80 bp, synthetic construct
  source 1..80: mol_type = other DNA
ctgccagaaaaggaaagctggactgtcaatgacatacagaagttagtggggaagttgaattgggcaagtcagatttatgc

SEQ ID NO: 74170 - DNA, 80 bp, synthetic construct
  source 1..80: mol_type = other DNA
agggattaaggtaagggaattatgtaaactccttaggggaaccaaagcactaacagaagtaataccactaacagaagaag

SEQ ID NO: 74171 - DNA, 80 bp, synthetic construct
  source 1..80: mol_type = other DNA
atagcagaaatacaaaagcaggggctaggccaatggacataccaaatttatcaggagccatataaaaatctgaaaacagg

SEQ ID NO: 74172 - DNA, 80 bp, synthetic construct
  source 1..80: mol_type = other DNA
cagaggagagcttcaggtttggagaagagacaacagctccatctcagaagcaggagccgatagacaaggaactatatcct

SEQ ID NO: 74173 - DNA, 80 bp, synthetic construct
  source 1..80: mol_type = other DNA
ttcctgagtgggagtttaccaatacccctcccttagtaaaattatggtaccagttagagaaagaacccatagaaagagca

SEQ ID NO: 74174 - DNA, 80 bp, synthetic construct
  source 1..80: mol_type = other DNA
ttagcctccctcaaatcactctttggcaacgacccctcgtcacaataaagataggggggcaattaaaggaagctctatta

SEQ ID NO: 74175 - DNA, 80 bp, synthetic construct
  source 1..80: mol_type = other DNA
aggttttatcaaagtaagacagtatgagcaggtacccatagaaatctgcggacacaaggctgtaggtacagtattaatag

SEQ ID NO: 74176 - DNA, 80 bp, synthetic construct
  source 1..80: mol_type = other DNA
tgatgcatatttctcagtccctttagataaagacttcaggaagtatactgcatttaccatacctagtataaacaatgaga

SEQ ID NO: 74177 - DNA, 80 bp, synthetic construct
  source 1..80: mol_type = other DNA
gatttctgggaagttcaattaggaataccacatcccgcagggttaaaaaagaaaaaatccgtaaccgtcctggatgtggg

SEQ ID NO: 74178 - DNA, 80 bp, synthetic construct
  source 1..80: mol_type = other DNA
taacagcagaagcagagctagaactggcggaaaacagggaaattctgaaagaagcagtacatggagcgtattatgaccca

SEQ ID NO: 74179 - DNA, 80 bp, synthetic construct
  source 1..80: mol_type = other DNA
caacagccccaccagaggagagcttcaggtttggggaagagacaacaaccccatctcagaagcaggagccgatagacaag

SEQ ID NO: 74180 - DNA, 80 bp, synthetic construct
  source 1..80: mol_type = other DNA
gaactgggcaagtcagatttatgcagggattaaagtaaaggaattatgtaaactcattaggggaaccaaagcactaacag

SEQ ID NO: 74181 - DNA, 80 bp, synthetic construct
  source 1..80: mol_type = other DNA
aagtagtaccactaacacaggaagcagagctagaactggcagaaaacagggaaattctgaaagaaacagtacatggagtg

SEQ ID NO: 74182 - DNA, 80 bp, synthetic construct
  source 1..80: mol_type = other DNA
tactatgacccatcaaaagacttagtagcagaaatacagaagcagggattaggtcaatggacataccaaatttatcaaga

SEQ ID NO: 74183 - DNA, 80 bp, synthetic construct
  source 1..80: mol_type = other DNA
gccatataaaaatctgaaaacaggaaagtatgcaaaaaagaggggtacccacactaatgatgtaaaacaattaacagagg

SEQ ID NO: 74184 - DNA, 80 bp, synthetic construct
  source 1..80: mol_type = other DNA
cagtgcaaaaaatagccacagaaagcatagtaatatgggggaagactcctaaatttaaactacccatacaaaaggaaaca

SEQ ID NO: 74185 - DNA, 80 bp, synthetic construct
  source 1..80: mol_type = other DNA
tgggaagcatggtggacagagtattggcaagccacctggattcccgagtgggagtttgtcaatacccctcccttagtaaa

SEQ ID NO: 74186 - DNA, 80 bp, synthetic construct
  source 1..80: mol_type = other DNA
agccaacagtcccaacagccccaccagaggagagcttcaaatttggggaagagacaacaaccccatctcagaagcaggag

SEQ ID NO: 74187 - DNA, 80 bp, synthetic construct
  source 1..80: mol_type = other DNA
accaaaaatgatagggggaattggaggttttatcaaagtaagacagtatgatcagatacccatagaaatttgcggacaca

SEQ ID NO: 74188 - DNA, 80 bp, synthetic construct
  source 1..80: mol_type = other DNA
aggctgtaggtacagtattaataggaccgacccctgtcaacataattggaagaaatctgttgactcagattggttgcact

SEQ ID NO: 74189 - DNA, 80 bp, synthetic construct
  source 1..80: mol_type = other DNA
agggaacttaataaaagaacccaagacttctgggaagttcaattagggataccacatcccgcagggttaaaaaagaaaaa

SEQ ID NO: 74190 - DNA, 80 bp, synthetic construct
  source 1..80: mol_type = other DNA
ttttttagggaagatctggccttcccacaaggggaggccagggaatttccttcagagcagaccagagcagagcagaccag

SEQ ID NO: 74191 - DNA, 80 bp, synthetic construct
  source 1..80: mol_type = other DNA
cttagaaatagggcaacatagaacaaaaatagaggaactaagacaacatctgttgaggtggggattaaccacaccagaca

SEQ ID NO: 74192 - DNA, 80 bp, synthetic construct
  source 1..80: mol_type = other DNA
ctgccagagagggacagctggacggtcaatgacatacagaagttagtaggaaaattaaattgggcaagtcaaatttatgc

SEQ ID NO: 74193 - DNA, 80 bp, synthetic construct
  source 1..80: mol_type = other DNA
cagagctagaactggcagaaaacagggagattctaagagaaccagtacatggagtgtattatgacccatcaaaagattta

SEQ ID NO: 74194 - DNA, 80 bp, synthetic construct
  source 1..80: mol_type = other DNA
cggcagagagcttcgggtttggggaggagacaacaacccccccgcagaagcaggagccgatagacaaggaactgtatcct

SEQ ID NO: 74195 - DNA, 80 bp, synthetic construct
  source 1..80: mol_type = other DNA
aaagtatgcaagaatgaggggtgcccacactaatgatgtaaaacaattaacagaagcagtgcaaaagataaccacggaaa

SEQ ID NO: 74196 - DNA, 80 bp, synthetic construct
  source 1..80: mol_type = other DNA
gcatagtaatatggggaaagattcctaaatttaaattacccatacaaaaggaaacatgggaaacatggtggatagagtat

SEQ ID NO: 74197 - DNA, 80 bp, synthetic construct
  source 1..80: mol_type = other DNA
agcattagtagaaatttgtacagaaatggaaaaggaaggaaaaatttcaaaaattgggcctgaaaatccctacaatactc

SEQ ID NO: 74198 - DNA, 80 bp, synthetic construct
  source 1..80: mol_type = other DNA
gagccctttagaataaaaaatccagaaatggttatttatcaatacatggatgacttgtatgtaggatctgatttagaaat

SEQ ID NO: 74199 - DNA, 80 bp, synthetic construct
  source 1..80: mol_type = other DNA
agggcagcacagaataaaaatagaggagctgagagctcatctattgagctggggatttactacaccagataaaaagcatc

SEQ ID NO: 74200 - DNA, 80 bp, synthetic construct
  source 1..80: mol_type = other DNA
agcgggaacctccattcctttggatgggatatgaactccatcctgacagatggacagtccagcctatagaactgccagaa

SEQ ID NO: 74201 - DNA, 80 bp, synthetic construct
  source 1..80: mol_type = other DNA
gataaagcaactgtgtaaactcctcaggggagctaaaacactaacagacatagtaccattgactgaagaagcagaattag

SEQ ID NO: 74202 - DNA, 80 bp, synthetic construct
  source 1..80: mol_type = other DNA
cagcagaaaactgggggatgggggaggacttactgaagcaggagcagaaagacaaggaacatcgtcctccttcaatttcc

SEQ ID NO: 74203 - DNA, 80 bp, synthetic construct
  source 1..80: mol_type = other DNA
cagaaaaaggtctgctcacactaatgatgtaagacaattaacagaagtggtgcaaaaaatagccacagaaagcatagtaa

SEQ ID NO: 74204 - DNA, 80 bp, synthetic construct
  source 1..80: mol_type = other DNA
ctcaaatcactctttggcaacgaccccttgtcacaataaaaataggaggacagataaaagaagctctattagatacagga

SEQ ID NO: 74205 - DNA, 80 bp, synthetic construct
  source 1..80: mol_type = other DNA
taaggtaaggcaatatgatcagatacttatagaaatttgtgggaaaaaggctataggtacagtattagtaggacccacgc

SEQ ID NO: 74206 - DNA, 80 bp, synthetic construct
  source 1..80: mol_type = other DNA
ctataaagaaaaaggacagcaccaaatggaggaaattagtagatttcagagagcttaataaaagaactcaggatttttgg

SEQ ID NO: 74207 - DNA, 80 bp, synthetic construct
  source 1..80: mol_type = other DNA
gaagttcaattaggaataccacacccggcaggtttaaaaaagaaaaaatcagtaacagtactagatgtgggagatgcata

SEQ ID NO: 74208 - DNA, 80 bp, synthetic construct
  source 1..80: mol_type = other DNA
tttttcagttcctttagatgaaagttttagaaagtatactgcattcaccatacctagtataaataatgagacaccaggaa

SEQ ID NO: 74209 - DNA, 80 bp, synthetic construct
  source 1..80: mol_type = other DNA
aataaatctgtagaaattaattgtacaagacccaacaacaatacaagaaaaagtatacacataggaccagggcaagcatg

SEQ ID NO: 74210 - DNA, 80 bp, synthetic construct
  source 1..80: mol_type = other DNA
gtatacaacaggagaaataataggagatataagacaagcacattgtaaccttagtagaacagactggaataacactttaa

SEQ ID NO: 74211 - DNA, 80 bp, synthetic construct
  source 1..80: mol_type = other DNA
aacagatagctgaaaaattaagagaacaatttgggaacaacaaaaccataatctttaatccatcttcaggaggggaccca

SEQ ID NO: 74212 - DNA, 80 bp, synthetic construct
  source 1..80: mol_type = other DNA
gagattgtaatgcacagttttaattgtggaggggaatttttctactgtgatacatcacaactgtttaatagtacttggat

SEQ ID NO: 74213 - DNA, 80 bp, synthetic construct
  source 1..80: mol_type = other DNA
aaataatggaactagtaatataaatgaaactacagaaaagatcacgctcccttgcagaataaaacaaattataaacatgt

SEQ ID NO: 74214 - DNA, 80 bp, synthetic construct
  source 1..80: mol_type = other DNA
ggcaggaagtagggaaagcaatgtatgcccctcccattagaggacaaattaactgtacatcaaatattacagggttgcta

SEQ ID NO: 74215 - DNA, 80 bp, synthetic construct
  source 1..80: mol_type = other DNA
ctaacaagagatggtggtactaaaaataccaccaacaccaacgagaccttcagacctggaggaggagacatgagggacaa

SEQ ID NO: 74216 - DNA, 80 bp, synthetic construct
  source 1..80: mol_type = other DNA
atggcagtctagcagaagaagagatagtaattagatctagcaatttctcggacaatgctaaagtcataatagtacagctg

SEQ ID NO: 74217 - DNA, 80 bp, synthetic construct
  source 1..80: mol_type = other DNA
ccctcaggaggagatctagaaattacaatgcatcactttaattgtaaaggggaatttttctattgcgatacaagccaact

SEQ ID NO: 74218 - DNA, 80 bp, synthetic construct
  source 1..80: mol_type = other DNA
tggaggagtaaataggacaaatgagacagagaaagaagagatattcagacctggaggaggaaatatgagggacaattgga

SEQ ID NO: 74219 - DNA, 80 bp, synthetic construct
  source 1..80: mol_type = other DNA
ttgcaatacaagcaaactgtttaatattagttacacagaaaatggaaccgcagaaaatgaaaccacaaaggtggagaatg

SEQ ID NO: 74220 - DNA, 80 bp, synthetic construct
  source 1..80: mol_type = other DNA
gaattggcagagaacagggaaattataaaagaacctgtacatggagtatattatgacccaacaaaagacttagtagcaga

SEQ ID NO: 74221 - DNA, 80 bp, synthetic construct
  source 1..80: mol_type = other DNA
cagagatttgtgcagagatggaagaggaaggaaaaatttcaaaaattgggcctgaaaatccatataacactccagtattt

SEQ ID NO: 74222 - DNA, 80 bp, synthetic construct
  source 1..80: mol_type = other DNA
ggaggttcaattgggaatacctcatcccgcgggattaaaaaagaaaaaatcagtaacagtactagatgtgggagatgcat

SEQ ID NO: 74223 - DNA, 80 bp, synthetic construct
  source 1..80: mol_type = other DNA
atttttcagttcccttagatgaagaatttagaaagtatactgcattcactatacctagtgtaaataatgcaacaccaggg

SEQ ID NO: 74224 - DNA, 80 bp, synthetic construct
  source 1..80: mol_type = other DNA
cctcaaatcactctttggcaacgaccaatagtcgctgtaagagtagagggacagttaatagaagccctattagacacagg

SEQ ID NO: 74225 - DNA, 80 bp, synthetic construct
  source 1..80: mol_type = other DNA
agagccctttagaacaaaaaatccagaaattgtgatctaccaatatatggatgatttgtatgtaggatcagacttagaga

SEQ ID NO: 74226 - DNA, 80 bp, synthetic construct
  source 1..80: mol_type = other DNA
cctggccttttagaaacaggggaaggatgtcaacaaataatggaacagttacaaccagctcttaagacaggaacagagga

SEQ ID NO: 74227 - DNA, 80 bp, synthetic construct
  source 1..80: mol_type = other DNA
gattaaatcattatttaatgcagtagcagtcctcttctgtgtacatcaaaggatagaggtaaaagacaccaaggaagctt

SEQ ID NO: 74228 - DNA, 80 bp, synthetic construct
  source 1..80: mol_type = other DNA
tggataaagtagaggaaatacaaaacaaaaagaaacagcaggtagcagctggcacaggaaacaacagcacaggaaacaac

SEQ ID NO: 74229 - DNA, 80 bp, synthetic construct
  source 1..80: mol_type = other DNA
agtaaggtcagtcaaaattatcctatagtgcaaaatgcacaagggcagatgatacaccaggccatatcacctaggacttt

SEQ ID NO: 74230 - DNA, 80 bp, synthetic construct
  source 1..80: mol_type = other DNA
aaatgcgtgggtaaaagtgatagaagaaaaggccttcagcccagaagtaatacccatgtttacagcattagcagaaggag

SEQ ID NO: 74231 - DNA, 80 bp, synthetic construct
  source 1..80: mol_type = other DNA
ccaccccacatgatttaaatactatgctgaacacagtggggggacatcaagcagctatgcaaatgttaaaagataccatc

SEQ ID NO: 74232 - DNA, 80 bp, synthetic construct
  source 1..80: mol_type = other DNA
aatgaggaagctgcagagtgggataggctacatccagtacatgcagggcccattccaccaggccagatgagggaaccaag

SEQ ID NO: 74233 - DNA, 80 bp, synthetic construct
  source 1..80: mol_type = other DNA
tggcagtgctacacaccagggccaggggttagatacccactaacatttggatggtgcttcaagctagtaccagtagatcc

SEQ ID NO: 74234 - DNA, 80 bp, synthetic construct
  source 1..80: mol_type = other DNA
gggaagtgacatagcaggaactaccagtacccttcaggaacaaataggatggataaccagcaacccacctatcccagtgg

SEQ ID NO: 74235 - DNA, 80 bp, synthetic construct
  source 1..80: mol_type = other DNA
gagaaatttataaaaggtggataattctggggctaaataaaatagtaagaatgtatagccctgttagcattttggacata

SEQ ID NO: 74236 - DNA, 80 bp, synthetic construct
  source 1..80: mol_type = other DNA
aaacaagggccaaaggaaccctttagagactatgtagatagattttttaaaactcttagagctgagcaagctacacagga

SEQ ID NO: 74237 - DNA, 80 bp, synthetic construct
  source 1..80: mol_type = other DNA
tgtaaaaaactggatgacagacaccttgttggtccaaaatgcgaatccagattgtaagatcattttaagaggattaggac

SEQ ID NO: 74238 - DNA, 80 bp, synthetic construct
  source 1..80: mol_type = other DNA
aaggggcttcattggaagaaatgatgacagcgtgtcagggagtgggaggacccggccataaagcaagagtgttggctgaa

SEQ ID NO: 74239 - DNA, 80 bp, synthetic construct
  source 1..80: mol_type = other DNA
gcaatgagccaagcacaaaatacaaacataatgatgcagaggggcaattttagaggacagaaaagaacaattaaatgttt

SEQ ID NO: 74240 - DNA, 80 bp, synthetic construct
  source 1..80: mol_type = other DNA
caactgtggcaaggaaggacacctagccagaaattgcagggctcctaggaaaaaaggctgttggaaatgtggaaaggaag

SEQ ID NO: 74241 - DNA, 80 bp, synthetic construct
  source 1..80: mol_type = other DNA
gacaccaaatgaaagactgcactgagagacaggctaattttttagggaaaatctggccttcccacaaggggaggccaggg

SEQ ID NO: 74242 - DNA, 80 bp, synthetic construct
  source 1..80: mol_type = other DNA
aactttcctcagaacaggttagagccaacagccccaccagcagacagctttgggacgggggaagggataaccccctcccc

SEQ ID NO: 74243 - DNA, 80 bp, synthetic construct
  source 1..80: mol_type = other DNA
gaagcaggagatgaaagagagggaacagtctcctctagtttccctcaaatcactctttggcaacgaccccttgtcacaat

SEQ ID NO: 74244 - DNA, 80 bp, synthetic construct
  source 1..80: mol_type = other DNA
agatgaagtagaagaaggctaataagggagagaacaacagcctattgcaccctatgagcctacatgggatggatgatagc

SEQ ID NO: 74245 - DNA, 80 bp, synthetic construct
  source 1..80: mol_type = other DNA
aaaaatagaaggacagctaagagaggctctattagatacaggagcagatgatccagtattagaagatataaatttatcag

SEQ ID NO: 74246 - DNA, 80 bp, synthetic construct
  source 1..80: mol_type = other DNA
gaaaatggagaccaaaaatgatagggggaattggaggttttatcaaagtaagacagtatgatcaagtaaccatagacatc

SEQ ID NO: 74247 - DNA, 80 bp, synthetic construct
  source 1..80: mol_type = other DNA
tgtggaaaaaaggctataggttcagtattagtaggacctacacctgtcaacataattggaaggaatatgttgactcagat

SEQ ID NO: 74248 - DNA, 80 bp, synthetic construct
  source 1..80: mol_type = other DNA
aagaaaagacatccttgatctgtgggtctataacacacaaggcatcttccctgactggcagtgctacacaccagggccag

SEQ ID NO: 74249 - DNA, 80 bp, synthetic construct
  source 1..80: mol_type = other DNA
tggctgtactttaaattttccaattagtcccattgaaactgtaccagtaaaattaaagccaggtatggacggcccaaagg

SEQ ID NO: 74250 - DNA, 80 bp, synthetic construct
  source 1..80: mol_type = other DNA
ttaaacaatggccattgacagaagaaaaaataaaagcattaacagagatatgtaaggagatggaaaaggaaggaaaaatt

SEQ ID NO: 74251 - DNA, 80 bp, synthetic construct
  source 1..80: mol_type = other DNA
tcaaaaattgggccagaaaatccatacaacactccagtattcgctataaagaaaaaagacagtactaaatggaggaaatt

SEQ ID NO: 74252 - DNA, 80 bp, synthetic construct
  source 1..80: mol_type = other DNA
agtagatttcagagagctcaataaaagaactcaagatttctgggaagttcaattaggaataccacatccagcaggtttaa

SEQ ID NO: 74253 - DNA, 80 bp, synthetic construct
  source 1..80: mol_type = other DNA
aaaagaaaaaatcagtaacagtgctagatgtgggtgatgcatacttttcagttcccttagacaaagaatttagaaagtat

SEQ ID NO: 74254 - DNA, 80 bp, synthetic construct
  source 1..80: mol_type = other DNA
actgcatttaccatacctagtataaacaatgagacaccagggattaggtatcagtacaatgtgctgccacagggatggaa

SEQ ID NO: 74255 - DNA, 80 bp, synthetic construct
  source 1..80: mol_type = other DNA
gggatcaccatcaatatttcagagtagcatgacaaaaatcttagagcccttcaggtcacagaatccagaaatagttatct

SEQ ID NO: 74256 - DNA, 80 bp, synthetic construct
  source 1..80: mol_type = other DNA
gagggagaagtgttaaaatggcagtttgacagtaagctggcactgaaacacttggcccgagagcaacacccggagttact

SEQ ID NO: 74257 - DNA, 80 bp, synthetic construct
  source 1..80: mol_type = other DNA
accaatacatggatgacttgtatgtaggatctgacttagaaataggacagcatagaacaaaaatagaggagttgagagct

SEQ ID NO: 74258 - DNA, 80 bp, synthetic construct
  source 1..80: mol_type = other DNA
catctattaaaatggggatttacaacaccagataaaaaacatcagaaagaacctccatttctttggatgggatatgaact

SEQ ID NO: 74259 - DNA, 80 bp, synthetic construct
  source 1..80: mol_type = other DNA
ccatcctgacaaatggacagtccagcctatacaactaccagaaaaagacaactggactgtcaatgatatacagaaattag

SEQ ID NO: 74260 - DNA, 80 bp, synthetic construct
  source 1..80: mol_type = other DNA
taggaaaactaaattgggccagtcagatttatgcaggcataaaggtaaagcaactgtgtaaactcctcaggggagccaaa

SEQ ID NO: 74261 - DNA, 80 bp, synthetic construct
  source 1..80: mol_type = other DNA
gcactaacagacatagtcccactgactgaggaagcagaattagaattggcagagaacagagagattctgaagaaccctgt

SEQ ID NO: 74262 - DNA, 80 bp, synthetic construct
  source 1..80: mol_type = other DNA
acatggggtatattatgatccatcaaaagaattaatagcagaaatacaaaaacagggacatgaacaatggacatatcaaa

SEQ ID NO: 74263 - DNA, 80 bp, synthetic construct
  source 1..80: mol_type = other DNA
tttatcaagaaccatttaaaaatctgaaaacagggaaatatgcaaaaaggaggtctgcccacactaatgatgtaaaacaa

SEQ ID NO: 74264 - DNA, 80 bp, synthetic construct
  source 1..80: mol_type = other DNA
ttaacagaagtagtgcaaagagtggccacagagagcatagtaatctggggaaagactcctaaatttaaactacccataca

SEQ ID NO: 74265 - DNA, 80 bp, synthetic construct
  source 1..80: mol_type = other DNA
aaaggaaacatgggatgcatggtggacggagtattggcaagccacctggattcctgagtgggagtttgtcaatacccctc

SEQ ID NO: 74266 - DNA, 80 bp, synthetic construct
  source 1..80: mol_type = other DNA
ctttagtaaaactatggtaccagttagaaaaagaacccataataggagcagaaactttctatgtagatggggcagctaat

SEQ ID NO: 74267 - DNA, 80 bp, synthetic construct
  source 1..80: mol_type = other DNA
acaaagactgctgacaaggacttctacagactgctgacggggacttttcgccagggactttccgagggaggtgtggttgg

SEQ ID NO: 74268 - DNA, 80 bp, synthetic construct
  source 1..80: mol_type = other DNA
agggagactaaactaggaaaggcaggatatgtcactgacagagggagacaaaaaattatctccctaacggagacaaccaa

SEQ ID NO: 74269 - DNA, 80 bp, synthetic construct
  source 1..80: mol_type = other DNA
tcaaaagactgaattacatgcaatatatctagccttgcaggattcaggatcagaagtaaatgtagtaacagactcacagt

SEQ ID NO: 74270 - DNA, 80 bp, synthetic construct
  source 1..80: mol_type = other DNA
atgcattggggattattcaggcacaaccagacagaagtgaatcagaggtagtcaatcaaataatagaaaaattaatagaa

SEQ ID NO: 74271 - DNA, 80 bp, synthetic construct
  source 1..80: mol_type = other DNA
aaggaaagggtatacttgtcatgggtaccagcacacaaagggattggaggaaatgagcaaatagataaattagtcagtag

SEQ ID NO: 74272 - DNA, 80 bp, synthetic construct
  source 1..80: mol_type = other DNA
tggaatcagaagagtgctatttttagatggaatagataaggctcaagaagaccatgaaaaatatcacagtaattggagag

SEQ ID NO: 74273 - DNA, 80 bp, synthetic construct
  source 1..80: mol_type = other DNA
caatggctaatgattttaatctgccacccatagtagccaaagaaatagtagccagctgtgataaatgtcagctaaaaggg

SEQ ID NO: 74274 - DNA, 80 bp, synthetic construct
  source 1..80: mol_type = other DNA
gaagccatgcatggacaagtagactgtagtccaggggtgtggcaattagattgcacacatttagaagggaaagttatcct

SEQ ID NO: 74275 - DNA, 80 bp, synthetic construct
  source 1..80: mol_type = other DNA
ggtagcagttcatgtagccagtggctatatagaagcagaagttatcccagcagaaacaggacaggaaacagcatacttca

SEQ ID NO: 74276 - DNA, 80 bp, synthetic construct
  source 1..80: mol_type = other DNA
tactaaaattagcaggaagatggccagtaaaagtaatacatacagacaatggcagcaatttcaccagcgctacagtcaag

SEQ ID NO: 74277 - DNA, 80 bp, synthetic construct
  source 1..80: mol_type = other DNA
gcagcctgttggtgggcaaatatccaacaggaatttggaattccctacaatccccaaagtcagggagtagtagaatctat

SEQ ID NO: 74278 - DNA, 80 bp, synthetic construct
  source 1..80: mol_type = other DNA
ggcggagttggggagtggctaaccctcagatgctgcatataagcagctgcttctcgcctgtactgggtctctcttggtag

SEQ ID NO: 74279 - DNA, 80 bp, synthetic construct
  source 1..80: mol_type = other DNA
gaataaagaattaaagaaaatcatagggcaagtaagagagcaagctgaacaccttaagacagcagtacaaatggcagtat

SEQ ID NO: 74280 - DNA, 80 bp, synthetic construct
  source 1..80: mol_type = other DNA
gggtacagtgcaggggaaagaatagtagatataatagcaacagacatacaatctaaagaattacaaaaacacattacaaa

SEQ ID NO: 74281 - DNA, 80 bp, synthetic construct
  source 1..80: mol_type = other DNA
tcattcacaattttaaaagaaaaggggggattggggggtacagtgcaggggaaagaatagtagatataatagcaacagac

SEQ ID NO: 74282 - DNA, 80 bp, synthetic construct
  source 1..80: mol_type = other DNA
atacaatctaaagaattacaaaaacacattacaaaacttcaaaattttcgggtttattacagggacagcagagacccaat

SEQ ID NO: 74283 - DNA, 80 bp, synthetic construct
  source 1..80: mol_type = other DNA
ttggaaaggacctgcaaaactactttggaaaggtgaaggggcagtagtaatacaagacaatagtgatataaaggtagtac

SEQ ID NO: 74284 - DNA, 80 bp, synthetic construct
  source 1..80: mol_type = other DNA
caagaagaaaagcaaagatcattcgggattatggaaaacagatggcaggtgatgattgtgtggcaggtagacagaatgag

SEQ ID NO: 74285 - DNA, 80 bp, synthetic construct
  source 1..80: mol_type = other DNA
gattagaacatggcacagtttagtaaaacatcatatacatgtttcaaagaaagccaggtggtattatagacatcactatg

SEQ ID NO: 74286 - DNA, 80 bp, synthetic construct
  source 1..80: mol_type = other DNA
aaagtaggcatccaaaagtaagttcagaagtacacatcccactaggggacgctagattaataatcagaacatattggggt

SEQ ID NO: 74287 - DNA, 80 bp, synthetic construct
  source 1..80: mol_type = other DNA
ctgcatacaggagaaaaagattggcatttgggtcatggggtctctatagaatggaaacagagaagatatagtacacaagt

SEQ ID NO: 74288 - DNA, 80 bp, synthetic construct
  source 1..80: mol_type = other DNA
agaccctggctcagcagaccgattaattcatctgcaatattttgactgtttttcagaatctgccataaggaaagccatat

SEQ ID NO: 74289 - DNA, 80 bp, synthetic construct
  source 1..80: mol_type = other DNA
taggacaaataattattcatagttgtgaatatcaagcaggacataataaggtagggtctctgcaatatttggcactgaaa

SEQ ID NO: 74290 - DNA, 80 bp, synthetic construct
  source 1..80: mol_type = other DNA
gcattagtagcaccaaaaagaacaaggccacctttgcctagtgttaggaaattaacagaggatagatggaacaagcccca

SEQ ID NO: 74291 - DNA, 80 bp, synthetic construct
  source 1..80: mol_type = other DNA
gaagaccaagggccacagagagagccatacaatgaatggatgttagaattgttagaggagcttaagcatgaagctgttag

SEQ ID NO: 74292 - DNA, 80 bp, synthetic construct
  source 1..80: mol_type = other DNA
acattttcctagaccatggctccatggcttaggacaacatatctatgaaacctatggggacacttgggaaggagttgaag

SEQ ID NO: 74293 - DNA, 80 bp, synthetic construct
  source 1..80: mol_type = other DNA
ctataataagaattttgcaacaactactgtttgttcatttcagaattggttgcaatcatagcagaataggcattctcaga

SEQ ID NO: 74294 - DNA, 80 bp, synthetic construct
  source 1..80: mol_type = other DNA
aggagaagaggcagggatggatccggtagaccctaacctagagccttggaaccacccgggaagtcagcctaaaactgctt

SEQ ID NO: 74295 - DNA, 80 bp, synthetic construct
  source 1..80: mol_type = other DNA
gtaacaagtgctattgtaaaaagtgctgctatcattgtccagtttgctttgtaaacaaaggcttaggcatatcctatggc

SEQ ID NO: 74296 - DNA, 80 bp, synthetic construct
  source 1..80: mol_type = other DNA
aggaagaagtggagacagcgacgaggcgcttctcgaagcaataaagatcatcaaaatcctatacaaaagcagtaagtatc

SEQ ID NO: 74297 - DNA, 80 bp, synthetic construct
  source 1..80: mol_type = other DNA
atatgtaatgacacctttggaaatttctgcaatagtaggactagtagtagcagcaatcatagcaatagttgtgtgggcta

SEQ ID NO: 74298 - DNA, 80 bp, synthetic construct
  source 1..80: mol_type = other DNA
tagtaatagtagaatataggaagatactaaagcaaaggaaaatagacaggttacttgatagaataagagaaagagcagaa

SEQ ID NO: 74299 - DNA, 80 bp, synthetic construct
  source 1..80: mol_type = other DNA
gacagtggcaatgagagtgatggggacgcagaggaactgtcagcacttgtggaaatgggggaccataatccttggggtta

SEQ ID NO: 74300 - DNA, 80 bp, synthetic construct
  source 1..80: mol_type = other DNA
aagtagtgtgtgcccgtctgttgtgtgactctggtaactagagatccctcagaccactctaggtagtgtaaaaatctcta

SEQ ID NO: 74301 - DNA, 80 bp, synthetic construct
  source 1..80: mol_type = other DNA
taatgttttgtaatgccaaagaaaatttgtgggtcacagtctattatggggtacctgtgtggagagatgcagaaaccacc

SEQ ID NO: 74302 - DNA, 80 bp, synthetic construct
  source 1..80: mol_type = other DNA
ctattctgtgcatcagatgctaaggcatatgatacagaagtgcataatgtctgggctactcatgcctgtgtacccacaaa

SEQ ID NO: 74303 - DNA, 80 bp, synthetic construct
  source 1..80: mol_type = other DNA
ccccgacccacaagagatagccctgattaatgtgacagaatattttaacatgtggaaaaataacatggtagagcagatgc

SEQ ID NO: 74304 - DNA, 80 bp, synthetic construct
  source 1..80: mol_type = other DNA
atacagatataatcagcttatgggatcaaagcctaaagccatgtgtaaagttaacccctctctgtgtcactttaaactgt

SEQ ID NO: 74305 - DNA, 80 bp, synthetic construct
  source 1..80: mol_type = other DNA
accaactacaagaacaagacccaaactgtagggaccacagcagagaacataacagacataaaaaactgttctttcaatat

SEQ ID NO: 74306 - DNA, 80 bp, synthetic construct
  source 1..80: mol_type = other DNA
gaccacagtactaaaagataagaaagaaaaggtacatgctcttttttatagactagatatagtaccaattaatgataatg

SEQ ID NO: 74307 - DNA, 80 bp, synthetic construct
  source 1..80: mol_type = other DNA
ataatgatagtcatagtaatagtagtagtatgtatagactgataaattgtaatacctcagccattacacaggcttgtcca

SEQ ID NO: 74308 - DNA, 80 bp, synthetic construct
  source 1..80: mol_type = other DNA
aaggtatcctttgatccaattcctatacattattgtgccccagctggttttgcaattctaaagtgcaaagatgaaaactt

SEQ ID NO: 74309 - DNA, 80 bp, synthetic construct
  source 1..80: mol_type = other DNA
caatggatcggagctatgccaaaatgtcagcacagtacaatgcacacatggaattaggccagtggtatcaactcaactgc

SEQ ID NO: 74310 - DNA, 80 bp, synthetic construct
  source 1..80: mol_type = other DNA
tgttgaatggcagtctagcaaaagaaggggtaaaagttaggtctgagaatttcacagacaatgccaaaaacataatagta

SEQ ID NO: 74311 - DNA, 80 bp, synthetic construct
  source 1..80: mol_type = other DNA
gcagtggcgcccgaacagggacttgaaagcgaaagtaaaagggactcgaaagcggaagttccagagaagttctcttgacg

SEQ ID NO: 74312 - DNA, 80 bp, synthetic construct
  source 1..80: mol_type = other DNA
cagcttgctcagcctgtaagaatcaactgtaccagacccaacaacaatacaaggaaaagtatacgtataggaccaggaca

SEQ ID NO: 74313 - DNA, 80 bp, synthetic construct
  source 1..80: mol_type = other DNA
atcattctatgcaacaggtgaagtaataggaaacataaggcaagctcattgcaacattagtagaacagagtggaacaaaa

SEQ ID NO: 74314 - DNA, 80 bp, synthetic construct
  source 1..80: mol_type = other DNA
ctttgcaccagatagctaaacaattaaggaaacacttctctaataaaacgataatctttaatccatcctcaggaggggac

SEQ ID NO: 74315 - DNA, 80 bp, synthetic construct
  source 1..80: mol_type = other DNA
ctagaaattacaatgcatagtttcaattgtagaggagagtttttctattgtaatacaacaaaactgtttaatagcacttg

SEQ ID NO: 74316 - DNA, 80 bp, synthetic construct
  source 1..80: mol_type = other DNA
gcttaatagcacttggaatgacacgacccaggcaaataatacaaatgaaaacataacactcccatgcaggataaaacaaa

SEQ ID NO: 74317 - DNA, 80 bp, synthetic construct
  source 1..80: mol_type = other DNA
ttgtaaacatgtggcagggagtaggacaagcaatgtatgcccctcctatcgcaggaatgatacagtgtgtatcaaatatt

SEQ ID NO: 74318 - DNA, 80 bp, synthetic construct
  source 1..80: mol_type = other DNA
acaggactgatattgacaagagatgggggagacaatagtagtaataatgagaccttcaggcctggaggaggaaatatgaa

SEQ ID NO: 74319 - DNA, 80 bp, synthetic construct
  source 1..80: mol_type = other DNA
ggacaactggagaagtgaattatataaatataaagtagtacaaattgaaccactaggggtagcacccaacaaggcaaaga

SEQ ID NO: 74320 - DNA, 80 bp, synthetic construct
  source 1..80: mol_type = other DNA
gaagagtggtggagagagaaaaaagagcagttggaataggagctatgttccttgggttcttaggaacagcaggaagcact

SEQ ID NO: 74321 - DNA, 80 bp, synthetic construct
  source 1..80: mol_type = other DNA
atgggcgcggcgtcaataacgctgacggtacaggccaggcaattattgtctggcatagtgcaacagcaaagcaatttgct

SEQ ID NO: 74322 - DNA, 80 bp, synthetic construct
  source 1..80: mol_type = other DNA
tggatgggctaatttactcccagaaaagaaaagacatccttgatctgtgggtctataacacacaaggcatcttccctgac

SEQ ID NO: 74323 - DNA, 80 bp, synthetic construct
  source 1..80: mol_type = other DNA
caggactcggcttgctgagtgcacacagcaagaggcgaggagcggcgactggtgagtacgccaaaattttttgactagcg

SEQ ID NO: 74324 - DNA, 80 bp, synthetic construct
  source 1..80: mol_type = other DNA
gagggctatagaggctcaacagcatctgttgaagctcacagtctggggtattaaacaactccaggcaagagtccttgctg

SEQ ID NO: 74325 - DNA, 80 bp, synthetic construct
  source 1..80: mol_type = other DNA
tggaaaagtacctgaaggatcagcagctcctaggaatttggggctgctctggaaaactcatctgcaccactactgtgcct

SEQ ID NO: 74326 - DNA, 80 bp, synthetic construct
  source 1..80: mol_type = other DNA
tggaactctagttggagtaataaatcttggagtgagatttgggacaacatgacctggttgcaatgggataaagaaattag

SEQ ID NO: 74327 - DNA, 80 bp, synthetic construct
  source 1..80: mol_type = other DNA
taattacactgagacaatatatgatctgcttgaaattgcacaaatccagcaggaaaagaatgagcaagacttattggcat

SEQ ID NO: 74328 - DNA, 80 bp, synthetic construct
  source 1..80: mol_type = other DNA
tggacaagtgggcaagcctgtggaattggtttgacatatcaaattggctatggtatataagagcatttataatggtggta

SEQ ID NO: 74329 - DNA, 80 bp, synthetic construct
  source 1..80: mol_type = other DNA
ggaggcttgataggcttaagaataatttttgctgtaattgctgtagtgaatagagttaggcagggatactcacctttgtc

SEQ ID NO: 74330 - DNA, 80 bp, synthetic construct
  source 1..80: mol_type = other DNA
attccagacccctaccccaagcccagagggactcgacaggcccgaaggaatcgaagaagaaggtggaaagcaaggcagaa

SEQ ID NO: 74331 - DNA, 80 bp, synthetic construct
  source 1..80: mol_type = other DNA
acagatcgattcgattagtgaacgggttcttagcacttttctgggaggacctccggaacctgtgcctcttcagctaccac

SEQ ID NO: 74332 - DNA, 80 bp, synthetic construct
  source 1..80: mol_type = other DNA
cgcttgagagacttcatcttgattgcagcgaggactgtggaacttctgggacacagcagcctcaagggactgagactggg

SEQ ID NO: 74333 - DNA, 80 bp, synthetic construct
  source 1..80: mol_type = other DNA
gtgggaaggcctcaaatatctgaagaatctcctggcctattggggtcaggaactgaagaagagtgccattagcttgcttg

SEQ ID NO: 74334 - DNA, 80 bp, synthetic construct
  source 1..80: mol_type = other DNA
gggttatagaagtagtacgaagagcttgggcagcttttattcacatacctaggagaataagacagggcttagaaagggct

SEQ ID NO: 74335 - DNA, 80 bp, synthetic construct
  source 1..80: mol_type = other DNA
gaggctagaagaagagaagatgggtgcgagagcgtcagtattaagtgggggaaaattagatgcatgggagaaaattaggt

SEQ ID NO: 74336 - DNA, 80 bp, synthetic construct
  source 1..80: mol_type = other DNA
atgccacagcagtagcagtagctgagtggacagatagggttatagaagtagtacgaagagcttgggcagcttttattcac

SEQ ID NO: 74337 - DNA, 80 bp, synthetic construct
  source 1..80: mol_type = other DNA
atacctaggagaataagacagggcttagaaagggctttgctataaaatggggggaaagtggtcaaaaagcagcatagtgg

SEQ ID NO: 74338 - DNA, 80 bp, synthetic construct
  source 1..80: mol_type = other DNA
gatggcctgaggtcagggaaagattaagacggactactccagcagcagaaggagtgggagcagtgtctaaagatttagag

SEQ ID NO: 74339 - DNA, 80 bp, synthetic construct
  source 1..80: mol_type = other DNA
aaacatggggcaatcacaagcagtaatacatcattcaccaatcctgattgtgcctgggtggaagcacaagaggaggggga

SEQ ID NO: 74340 - DNA, 80 bp, synthetic construct
  source 1..80: mol_type = other DNA
taaaagaaaaggggggactggatgggctaatttactcccagaaaagaaaagacatccttgatctgtgggtctataacaca

SEQ ID NO: 74341 - DNA, 80 bp, synthetic construct
  source 1..80: mol_type = other DNA
caaggcatcttccctgactggcagtgctacacaccagggccaggggttagatacccactaacatttggatggtgcttcaa

SEQ ID NO: 74342 - DNA, 80 bp, synthetic construct
  source 1..80: mol_type = other DNA
gctagtaccagtagatccagatgaagtagaagaagctaataagggagagaacaacagcctattgcaccctatgagcctac

SEQ ID NO: 74343 - DNA, 80 bp, synthetic construct
  source 1..80: mol_type = other DNA
atgggatggatgatagcgagggagaagtgttaaaatggcagtttgacagtaagctggcactgaaacacttggcccgagag

SEQ ID NO: 74344 - DNA, 80 bp, synthetic construct
  source 1..80: mol_type = other DNA
caacacccggagttctacaaagactgctgacaaggacttctacagactgctgacggggacttttcgccagggactttccg

SEQ ID NO: 74345 - DNA, 80 bp, synthetic construct
  source 1..80: mol_type = other DNA
taaggccagggggaaagaaaaaatataggataaaacatttagtatgggcaagcagggagctggaaagatttgcacttaac

SEQ ID NO: 74346 - DNA, 80 bp, synthetic construct
  source 1..80: mol_type = other DNA
agggaggtgtggttggggcggagttggggagtggctaaccctcagatgctgcatataagcagctgcttctcgcctgtact

SEQ ID NO: 74347 - DNA, 80 bp, synthetic construct
  source 1..80: mol_type = other DNA
gggtctctcttggtagaccagatcgagcctgggagctctctggctaacaggagaacccactgcttaagcctcaataaagc

SEQ ID NO: 74348 - DNA, 80 bp, synthetic construct
  source 1..80: mol_type = other DNA
ttgccttgagtgcttcaagtagtgtgtgcccgtctgttgtgtgactctggtaactagagatccctcagaccactctaggt

SEQ ID NO: 74349 - DNA, 80 bp, synthetic construct
  source 1..80: mol_type = other DNA
tagaaacaccagaaggatgtcaacaaatactagaacagttacaaccagctgttaagacaggaacagaagagcttaaatca

SEQ ID NO: 74350 - DNA, 80 bp, synthetic construct
  source 1..80: mol_type = other DNA
ttatttaatacaatagcaaccctctactgtgtacatcaaaagatagatgtaaaagacaccaaggaagctgtggagaaagt

SEQ ID NO: 74351 - DNA, 80 bp, synthetic construct
  source 1..80: mol_type = other DNA
tgaggaactacaaaacaaaaagacacagcaggcagtggctgacacagcaaacaacagtcaagtcagtcataattacccta

SEQ ID NO: 74352 - DNA, 80 bp, synthetic construct
  source 1..80: mol_type = other DNA
tagtgcaaaatgcacaagggcagatggtacatcaggccatatcacccaggactttgaatgcatgggtaaaagtgatagag

SEQ ID NO: 74353 - DNA, 80 bp, synthetic construct
  source 1..80: mol_type = other DNA
gataccattaatgatgaagctgcagaatgggacaggctacatccagtacatgcagggcccattccaccaggccaaatgag

SEQ ID NO: 74354 - DNA, 80 bp, synthetic construct
  source 1..80: mol_type = other DNA
gctgaacacagtggggggacatcaagcagccatgcaaatgttaaaagataccattaatgatgaagctgcagaatgggaca

SEQ ID NO: 74355 - DNA, 80 bp, synthetic construct
  source 1..80: mol_type = other DNA
ggctacatccagtacatgcagggcccattccaccaggccaaatgagggaaccaaggggaagtgacatagcaggaaccacc

SEQ ID NO: 74356 - DNA, 80 bp, synthetic construct
  source 1..80: mol_type = other DNA
tggcagaattacacaccagggccagggactagatacccactaacgtttggatggtgctacaagctagtaccagttgatcc

SEQ ID NO: 74357 - DNA, 80 bp, synthetic construct
  source 1..80: mol_type = other DNA
agtacccttcaggaacaaataggatggatgaccagcaacccacctatcccagtgggagaaatttataaaaggtggataat

SEQ ID NO: 74358 - DNA, 80 bp, synthetic construct
  source 1..80: mol_type = other DNA
tctggggttaaataaaatagtaagaatgtatagccctgttagcattttggacataagacaagggccaaaagaacccttta

SEQ ID NO: 74359 - DNA, 80 bp, synthetic construct
  source 1..80: mol_type = other DNA
gagactatgtagatagattctttaaaactcttagagctgagcaagctacacaggaagtaaaaaactggatgacagaaacc

SEQ ID NO: 74360 - DNA, 80 bp, synthetic construct
  source 1..80: mol_type = other DNA
ttgttggtccaaaatgcgaatccagattgtaagaccattttaagaggattaggacaaggggcttcattggaagaaatgat

SEQ ID NO: 74361 - DNA, 80 bp, synthetic construct
  source 1..80: mol_type = other DNA
gacagcgtgtcagggagtgggaggacccggccataaagcaagagttttggctgaagcaatgagccaagttcaaaatacaa

SEQ ID NO: 74362 - DNA, 80 bp, synthetic construct
  source 1..80: mol_type = other DNA
acataatgatgcagagaggcaactttagaggccagaaaaaagtaattaaatgtttcaactgtggcaaagaaggacaccta

SEQ ID NO: 74363 - DNA, 80 bp, synthetic construct
  source 1..80: mol_type = other DNA
gctagaaattgcagggctcctagaaaaaagggctgttggaaatgtggaagggaaggacaccaaatgaaagactgcactga

SEQ ID NO: 74364 - DNA, 80 bp, synthetic construct
  source 1..80: mol_type = other DNA
gagacaggctaattttttagggaaaatctggccttcctacaaggggaggccaggaaactttcctcagaacaggttagagc

SEQ ID NO: 74365 - DNA, 80 bp, synthetic construct
  source 1..80: mol_type = other DNA
caacagccccaccagcagagaactttgggatgggggaagggataaccccctccccgaagcaggagttgaaagagagggat

SEQ ID NO: 74366 - DNA, 80 bp, synthetic construct
  source 1..80: mol_type = other DNA
cctcctttagtttccctcaaatcactctttggcaacgaccccttgtcacagtaaaaatagaaggacagctaagagaggct

SEQ ID NO: 74367 - DNA, 80 bp, synthetic construct
  source 1..80: mol_type = other DNA
agatgaggtagaagaagctaataaggaagagaacaacagtctattgcaccctatgagcctacatggaatggataccgagg

SEQ ID NO: 74368 - DNA, 80 bp, synthetic construct
  source 1..80: mol_type = other DNA
ctattagatacaggagcagatgatacagtgctagaagacataaatttggcaggaaaatggaaaccaaaaatgataggggg

SEQ ID NO: 74369 - DNA, 80 bp, synthetic construct
  source 1..80: mol_type = other DNA
aattggaggctttatcaaagtaagacaatatgatcaagttaccatagacatctgtgggaaaaaggctataggtacagtgt

SEQ ID NO: 74370 - DNA, 80 bp, synthetic construct
  source 1..80: mol_type = other DNA
tagtgggacctacacctatcaacataattggcagaaatatgttgactcagattggctgtactttaaattttccaattagt

SEQ ID NO: 74371 - DNA, 80 bp, synthetic construct
  source 1..80: mol_type = other DNA
cccattgaaactgtaccagtaaaattaaagccaggaatggatggcccaaaggttaaacaatggccattgacagaagaaaa

SEQ ID NO: 74372 - DNA, 80 bp, synthetic construct
  source 1..80: mol_type = other DNA
aataaaagcattaacagaaatatgtaatgagatggaaaaggaaggaaaaatttgcaaaattggaccggaaaatccataca

SEQ ID NO: 74373 - DNA, 80 bp, synthetic construct
  source 1..80: mol_type = other DNA
acactccaatatttgctataaggaaaaaagacagcactaaatggagaaaattagtagattgcagagaacttaataaaaga

SEQ ID NO: 74374 - DNA, 80 bp, synthetic construct
  source 1..80: mol_type = other DNA
actcaagatttctgggaagttcaattaggaataccacatccagcaggtttaaaaaagaaaaaatcagtaacagtgctaga

SEQ ID NO: 74375 - DNA, 80 bp, synthetic construct
  source 1..80: mol_type = other DNA
tgtaggcgatgcatacctttcagttcccttagacaaagactttagaaagtatactgcattcaccatacctagtacaaaca

SEQ ID NO: 74376 - DNA, 80 bp, synthetic construct
  source 1..80: mol_type = other DNA
atgcaacaccagggattaggtatcactacaatgtgcttccacaaggatggaaaggatcaccagcaatatttcagagtagc

SEQ ID NO: 74377 - DNA, 80 bp, synthetic construct
  source 1..80: mol_type = other DNA
atgacaaaaatcctagaaccctttaggtcacagaatccagaaatagtgatctaccaatacatggatgacttatatgtagg

SEQ ID NO: 74378 - DNA, 80 bp, synthetic construct
  source 1..80: mol_type = other DNA
gagaagtgttaaagtggcagtttgacagtcagctagcactgaaacacagagcccgagagctgcatccggagttctacaaa

SEQ ID NO: 74379 - DNA, 80 bp, synthetic construct
  source 1..80: mol_type = other DNA
atctgacttagaaatagggcaacatagaacaaaaatagaggagttgagagcccatctattgagatggggatttacaacac

SEQ ID NO: 74380 - DNA, 80 bp, synthetic construct
  source 1..80: mol_type = other DNA
cagataaaaagcatcagaaggaacctccatttctttggatgggatatgaactccatcctgacaaatggacagtccagcct

SEQ ID NO: 74381 - DNA, 80 bp, synthetic construct
  source 1..80: mol_type = other DNA
atacagctgccagacaaagaaagctggactgtcaatgatatacagaaattagtgggaaaactaaattgggcaagtcagat

SEQ ID NO: 74382 - DNA, 80 bp, synthetic construct
  source 1..80: mol_type = other DNA
ttatccaggaataaaggtaaagcaactgtgtagacttctcaggggagccaaagcactaacagacatagtcacactgacta

SEQ ID NO: 74383 - DNA, 80 bp, synthetic construct
  source 1..80: mol_type = other DNA
aggaagcagaattagaattggcagagaacagagagattctgaaagaccctgtacatggggtatattatgacccatcaaaa

SEQ ID NO: 74384 - DNA, 80 bp, synthetic construct
  source 1..80: mol_type = other DNA
gacttaatagctgagatacagaaacagggacatgaccaatggacatatcaaatttatcaagaaccattcaaaaacctgaa

SEQ ID NO: 74385 - DNA, 80 bp, synthetic construct
  source 1..80: mol_type = other DNA
aacagggaagtatgcaaaaatgaggactgcccacactaatgatgtaaaacaattaacagaggcagtacaaaaaatagcca

SEQ ID NO: 74386 - DNA, 80 bp, synthetic construct
  source 1..80: mol_type = other DNA
tagagagcatagtaatatgggggaagactcctaagtttagactacccatccaaaaggaaacatgggagacatggtggaca

SEQ ID NO: 74387 - DNA, 80 bp, synthetic construct
  source 1..80: mol_type = other DNA
gactattggcaagccacctggattcctgagtgggagtttgttaatacccctcccctagtaaaactatggtaccagctgga

SEQ ID NO: 74388 - DNA, 80 bp, synthetic construct
  source 1..80: mol_type = other DNA
gaaagaacccatagtaggagcagaaactttctatgtagatggagcagctaatagggaaactaaaataggaaaagcaggat

SEQ ID NO: 74389 - DNA, 80 bp, synthetic construct
  source 1..80: mol_type = other DNA
gactgctgacacagaagttgctgacagggactttccgccgggactttccaggggaggtgtggtttgggcggagttgggga

SEQ ID NO: 74390 - DNA, 80 bp, synthetic construct
  source 1..80: mol_type = other DNA
atgttactgacaggggaaggcagaaaattgtctctctaactgaaacaacaaatcagaagactgaattacaagcaattcac

SEQ ID NO: 74391 - DNA, 80 bp, synthetic construct
  source 1..80: mol_type = other DNA
ctagctttgcaggactcaggatcagaagtaaacatagtaacagactcacaatatgcattaggaattattcaagcacaacc

SEQ ID NO: 74392 - DNA, 80 bp, synthetic construct
  source 1..80: mol_type = other DNA
agataagagtgaatcagagttagtcaaccaaataatagaacagttaataaaaaaggagagggtctacctgtcatgggtac

SEQ ID NO: 74393 - DNA, 80 bp, synthetic construct
  source 1..80: mol_type = other DNA
cagcacataaaggaattggaggaaatgaacaagtagataaattagtgagtaatggaattagaaaagtgctgtttctagat

SEQ ID NO: 74394 - DNA, 80 bp, synthetic construct
  source 1..80: mol_type = other DNA
ggaatagataaggctcaagaagaccatgaaaaatatcacagtaattggagagcaatggctagtgattttaatctgccacc

SEQ ID NO: 74395 - DNA, 80 bp, synthetic construct
  source 1..80: mol_type = other DNA
tatagtagctaaagaaatagtagccagctgtgataaatgtcagctaaaaggggaagccatacatggacaagtagactgta

SEQ ID NO: 74396 - DNA, 80 bp, synthetic construct
  source 1..80: mol_type = other DNA
gtccaggggtatggcaattagattgcacacatttagaagggaaagttatcctggtagcagtccatgtagccagtggatat

SEQ ID NO: 74397 - DNA, 80 bp, synthetic construct
  source 1..80: mol_type = other DNA
atagaagcagaggttatcccagcagaaacaggatcagagacagcatacttcatactaaaattagcaggaagatggccagt

SEQ ID NO: 74398 - DNA, 80 bp, synthetic construct
  source 1..80: mol_type = other DNA
aaaagtaatacatacagacaatggcagcaatttcaccagcactacagtcaaagcagcctgttggtgggcaagtatccaac

SEQ ID NO: 74399 - DNA, 80 bp, synthetic construct
  source 1..80: mol_type = other DNA
aggaatttggaattccctacaatccccaaagtcaaggagtagtggaatctatgaataaagaattaaagaaaatcataggg

SEQ ID NO: 74400 - DNA, 80 bp, synthetic construct
  source 1..80: mol_type = other DNA
gtggctaacccctcagatgctgcatataagcagctgcttctcgcctgtactgggtctctcttgttagaccagatcgagcc

SEQ ID NO: 74401 - DNA, 80 bp, synthetic construct
  source 1..80: mol_type = other DNA
caagtaagagaacaagctgaacaccttaagacagcagtacaaatggcagtattcattcacaattttaaaagaaaaggggg

SEQ ID NO: 74402 - DNA, 80 bp, synthetic construct
  source 1..80: mol_type = other DNA
gattggggggtacagtgcaggggaaagaatagtagacataatagcaacagacatacaaactaaagagttacaaaaacaaa

SEQ ID NO: 74403 - DNA, 80 bp, synthetic construct
  source 1..80: mol_type = other DNA
ttttaaaagttcaaaattttcgggcttattacagggacagcagagacccaatttggaaaggaccggcaaaactactttgg

SEQ ID NO: 74404 - DNA, 80 bp, synthetic construct
  source 1..80: mol_type = other DNA
aaaggtgaaggggcagtagtaatacaagacaatagtgatataaaggtaataccaagaagaaaagtaaaaatcatcagaga

SEQ ID NO: 74405 - DNA, 80 bp, synthetic construct
  source 1..80: mol_type = other DNA
ttatggaaaacagatggcaggtgatgattgtgtggcaggtagacaggatgaggattagaacatggcatagtttagtaaaa

SEQ ID NO: 74406 - DNA, 80 bp, synthetic construct
  source 1..80: mol_type = other DNA
tatcatatgtatgtttcaaggaaagccaaagggtggttttatagacatcactatgagagcaggcatccaaaagtaagttc

SEQ ID NO: 74407 - DNA, 80 bp, synthetic construct
  source 1..80: mol_type = other DNA
agaagtacacattccaatagaggaggctagattaataatcagaacatattggggtctacagacagaagaaaaagattggc

SEQ ID NO: 74408 - DNA, 80 bp, synthetic construct
  source 1..80: mol_type = other DNA
agttgggccatggagtctctgtagaatggagtcaaggaagatacaggacacaaatagaccctgacctagcagaccaacta

SEQ ID NO: 74409 - DNA, 80 bp, synthetic construct
  source 1..80: mol_type = other DNA
attcatctgcaatattttgactgtttttcagaatctgccataaggaaggccatattaggacagataatttatcataagtg

SEQ ID NO: 74410 - DNA, 80 bp, synthetic construct
  source 1..80: mol_type = other DNA
tgaatatcaagcaggacataagcaggtagggtctctgcaatatttggcattgagagcattagtagcaccaaaaagaagaa

SEQ ID NO: 74411 - DNA, 80 bp, synthetic construct
  source 1..80: mol_type = other DNA
tgggagctctctgactagcaagggaacccactgcttaaagcctcaataaagcttgccttgagtgcttcaagtagtgtgtg

SEQ ID NO: 74412 - DNA, 80 bp, synthetic construct
  source 1..80: mol_type = other DNA
agccacctttgcctagtgttaagaaactaacagaggatagatggaacaagccccagaagaccaagggccacagagagaac

SEQ ID NO: 74413 - DNA, 80 bp, synthetic construct
  source 1..80: mol_type = other DNA
catacaatgaatggatgttagaactgttagaggagcttaagcatgaagctgttagacattttcctagaccatggcttcat

SEQ ID NO: 74414 - DNA, 80 bp, synthetic construct
  source 1..80: mol_type = other DNA
ggcttaggacaacatatctatgaaacctatggggacacttgggaaggagttgaagctataataagaatgttgcagcaatt

SEQ ID NO: 74415 - DNA, 80 bp, synthetic construct
  source 1..80: mol_type = other DNA
actgtttgttcatttcagaattggttgccagcatagcagaataggcattctccaaaggagaagagggagaagaggcaggg

SEQ ID NO: 74416 - DNA, 80 bp, synthetic construct
  source 1..80: mol_type = other DNA
atggacccggtagatcctaacctagagccctggaaccatccgggaagccagcctaaaactgcttgtaacaaatgctactg

SEQ ID NO: 74417 - DNA, 80 bp, synthetic construct
  source 1..80: mol_type = other DNA
taaaagatgttgctatcattgccagctttgcttcataaccaagggcttaggcatatcctatggcaggaagaagcggagac

SEQ ID NO: 74418 - DNA, 80 bp, synthetic construct
  source 1..80: mol_type = other DNA
cccgacgaggaccttctcaaagcaataaggatcatcaaaatcctgtaccaaagcagtaagtagcatagctaatgtcacct

SEQ ID NO: 74419 - DNA, 80 bp, synthetic construct
  source 1..80: mol_type = other DNA
ttggaaatctctgcaataacaggactagtagtagcactaatcatagcaatagttgtatggtctatagtaataatagaata

SEQ ID NO: 74420 - DNA, 80 bp, synthetic construct
  source 1..80: mol_type = other DNA
tagaaaaatactaaagcaaaggaaaatagataggttacttgatagaataagagacagagcagaagacagtggcaatgaga

SEQ ID NO: 74421 - DNA, 80 bp, synthetic construct
  source 1..80: mol_type = other DNA
gtgatggggatgcagaggaactgtcagcactggtggaaatgggggatcataatccttggggttataatgttttgtaatgc

SEQ ID NO: 74422 - DNA, 80 bp, synthetic construct
  source 1..80: mol_type = other DNA
cccgtctgttatgtgactctggtaactagagatcccttagaccactctaggcagtgtgaaaaatctctagcagtggcgcc

SEQ ID NO: 74423 - DNA, 80 bp, synthetic construct
  source 1..80: mol_type = other DNA
caatttgtgggtcacagtctattatggggtacctgtgtggagagatgcaaaaaccaccttattctgtgcatcagatgcta

SEQ ID NO: 74424 - DNA, 80 bp, synthetic construct
  source 1..80: mol_type = other DNA
aggcatatgacccagaagtgcataatgtctgggctactcatgcctgtgtacccacaaaccccgacccacaagagataccc

SEQ ID NO: 74425 - DNA, 80 bp, synthetic construct
  source 1..80: mol_type = other DNA
ctgcataatgtgacagaatattttaacatgtggaaaaataacatggtagagcagatgcatgaagacataatcagcttatg

SEQ ID NO: 74426 - DNA, 80 bp, synthetic construct
  source 1..80: mol_type = other DNA
ggatcaaagcttaaagccatgtctaaagttaacccctctctgtgtcactttaaactgtgccaacatcaagagcaacaata

SEQ ID NO: 74427 - DNA, 80 bp, synthetic construct
  source 1..80: mol_type = other DNA
acagtagcaacagcagtgaaacaacagcagaggacatgggaagagaaataaaaaactgctcttttaatatgaccacaata

SEQ ID NO: 74428 - DNA, 80 bp, synthetic construct
  source 1..80: mol_type = other DNA
ctaaaagataagaaagagaaggtacatgcgcttttttataggctagatatagtaccaattgaaggtaagagtaatagtag

SEQ ID NO: 74429 - DNA, 80 bp, synthetic construct
  source 1..80: mol_type = other DNA
tgagtatagactaataaattgtaatacctcagccattacacaggcttgtccaaaggtaacctttgatccaattcccatac

SEQ ID NO: 74430 - DNA, 80 bp, synthetic construct
  source 1..80: mol_type = other DNA
attattgtgccccagctggttttgcaattctaaagtgtaaagatgaggaattcaatggaacggggccatgcaaaaatgtc

SEQ ID NO: 74431 - DNA, 80 bp, synthetic construct
  source 1..80: mol_type = other DNA
agctcagtacaatgcacacatggaattaagccagtggtatcaactcaactgttgttaaatggcagcctagcaaaagaaaa

SEQ ID NO: 74432 - DNA, 80 bp, synthetic construct
  source 1..80: mol_type = other DNA
ggtaatggttaggtctaaaaatttcaccgacaataccgacaacataatagtacagcttgctgagcctgtagtaattaact

SEQ ID NO: 74433 - DNA, 80 bp, synthetic construct
  source 1..80: mol_type = other DNA
cgaacagggacttgaaagcgaaagtaaaagggactcgaaagcggaagttccagagaaggttctctcgacgcaggactcgg

SEQ ID NO: 74434 - DNA, 80 bp, synthetic construct
  source 1..80: mol_type = other DNA
gtactagacccaataacaacacaagaaaaagtatacgtattggaccagggcaatcattctatgcaacaggtgacataata

SEQ ID NO: 74435 - DNA, 80 bp, synthetic construct
  source 1..80: mol_type = other DNA
ggagacataagacaagctcattgcaacattagtaaaggacaatggagcaaaactttgtcccatgtagctgaacaattaaa

SEQ ID NO: 74436 - DNA, 80 bp, synthetic construct
  source 1..80: mol_type = other DNA
gatacacttccctaataaaacaatagcctttaatcaatcctcaggaggggacctagaaattacaatgcatagtttcaatt

SEQ ID NO: 74437 - DNA, 80 bp, synthetic construct
  source 1..80: mol_type = other DNA
gtagaggagaatttttctattgtaatacatcaggactgtttaatagcacttggctggttaatagcactagggagaatggc

SEQ ID NO: 74438 - DNA, 80 bp, synthetic construct
  source 1..80: mol_type = other DNA
acgagcaccatgggaaacataacactcccatgcaggataaaacaaattgtaaacatgtggcagggagtaggacaagcaat

SEQ ID NO: 74439 - DNA, 80 bp, synthetic construct
  source 1..80: mol_type = other DNA
gtatgcccctcctgtcgcaggaatgatacagtgtgtatcaaatattacaggactaatattaacaagagatgggggaagta

SEQ ID NO: 74440 - DNA, 80 bp, synthetic construct
  source 1..80: mol_type = other DNA
atgataatagtactgataataatactgagaccttcagacctacaggaggaaatatgaaagacaattggagaagtgaatta

SEQ ID NO: 74441 - DNA, 80 bp, synthetic construct
  source 1..80: mol_type = other DNA
tacaaatataaagtagtacaacttgaaccactaggattagcacccaccgaggcaaaaagaagagtggtggagagagaaaa

SEQ ID NO: 74442 - DNA, 80 bp, synthetic construct
  source 1..80: mol_type = other DNA
aagagcagttggaatgggagctcttttccttgggtttttaggaacagcaggaagcactatgggcgcggtgtcaatgacgc

SEQ ID NO: 74443 - DNA, 80 bp, synthetic construct
  source 1..80: mol_type = other DNA
taacggtacaggccagacaattattgtctggcatagtgcaacagcaaagcaatttgctgagggctatagaggctcaacag

SEQ ID NO: 74444 - DNA, 80 bp, synthetic construct
  source 1..80: mol_type = other DNA
cttgctgagtgcacacagcaagaggcgaggagcagcgactggtgagtacgcaaaaaattttttgactagcggaggctaga

SEQ ID NO: 74445 - DNA, 80 bp, synthetic construct
  source 1..80: mol_type = other DNA
catatgttgaaactcacagtctggggcattaaacagctccaggcaagagtcctggctgtggaaaaatacctaaaggatca

SEQ ID NO: 74446 - DNA, 80 bp, synthetic construct
  source 1..80: mol_type = other DNA
gcagctcctaggaatttggggctgctctggaaaactcatctgcaccactactgtgccttggaactctagttggagtaaca

SEQ ID NO: 74447 - DNA, 80 bp, synthetic construct
  source 1..80: mol_type = other DNA
aatctttgggtgagatttgggacaacatgacctggttgcaatgggataaagaaattaacaattacacagagacaatatat

SEQ ID NO: 74448 - DNA, 80 bp, synthetic construct
  source 1..80: mol_type = other DNA
gggctgcttgaaattgcacaaatccagcaggaaaagaatgaacaagacttattgtcattggacaagtgggcaagcctgtg

SEQ ID NO: 74449 - DNA, 80 bp, synthetic construct
  source 1..80: mol_type = other DNA
gaattggtttgacatatcaaattggctttggtatataagaatatttataatgatagtaggaggcttgataggcttaagaa

SEQ ID NO: 74450 - DNA, 80 bp, synthetic construct
  source 1..80: mol_type = other DNA
tagtttttgctgtgattgctgtagtaaatagagttaggcagggatactcacctttgtcattccagacccctgccccaagc

SEQ ID NO: 74451 - DNA, 80 bp, synthetic construct
  source 1..80: mol_type = other DNA
ccagagggagtcgccaggcccggaggaatcgaagaagaaggtggagagctaggcagaaccagatcgattcgattagtcaa

SEQ ID NO: 74452 - DNA, 80 bp, synthetic construct
  source 1..80: mol_type = other DNA
cggattcttagcgcttgcgtgggaggatctgcggaacctgtgcctcttcagctaccaccgcttgagagacttcatctcga

SEQ ID NO: 74453 - DNA, 80 bp, synthetic construct
  source 1..80: mol_type = other DNA
ttgcagcgaggactgtggaacttctgggacacagcagtctcaagggactgagactggggtgggaaggcctcaaatatctg

SEQ ID NO: 74454 - DNA, 80 bp, synthetic construct
  source 1..80: mol_type = other DNA
tggaatctcctggcctattggggtcaggaactgaagaatagtgctgttagcttgcttgataccacagcagtagcagtagc

SEQ ID NO: 74455 - DNA, 80 bp, synthetic construct
  source 1..80: mol_type = other DNA
aggagagagatgggtgcgagagcgtcagtattacgcgggggacaattagatgcatgggagagaattcggttaaggccagg

SEQ ID NO: 74456 - DNA, 80 bp, synthetic construct
  source 1..80: mol_type = other DNA
tgagtggacagatagggttatagaagtagcacaaagagcttgtagagctattctccacatacctagaaggataagacagg

SEQ ID NO: 74457 - DNA, 80 bp, synthetic construct
  source 1..80: mol_type = other DNA
gcctagaaagagctttgctataaaatgggtggcaagtggtcaaaaagcagcatagtgggatggcctgaggtcagggaaag

SEQ ID NO: 74458 - DNA, 80 bp, synthetic construct
  source 1..80: mol_type = other DNA
aatgagaagggctaggccagccagggaaagaatgagaagtagttcagcagcagaaggagtgggagcagcgtctaaagatt

SEQ ID NO: 74459 - DNA, 80 bp, synthetic construct
  source 1..80: mol_type = other DNA
tagaaaaatatggggcactcacaagtagtaatacaccttcaactaatcctgactgtgcctgggtagcagcacaagaggag

SEQ ID NO: 74460 - DNA, 80 bp, synthetic construct
  source 1..80: mol_type = other DNA
gaagaggaggtaggcttcccagtcagaccacaagtgcctttaagaccaatgacctataaggcagcctttgatcttggcta

SEQ ID NO: 74461 - DNA, 80 bp, synthetic construct
  source 1..80: mol_type = other DNA
acacacaaggctttttccctgactggcagaattacacaccagggccagggactagatacccactaacgtttggatggtgc

SEQ ID NO: 74462 - DNA, 80 bp, synthetic construct
  source 1..80: mol_type = other DNA
tacaagctagtaccagttgatccagatgaggtagaagaagctaataaggaagagaacaacagtctattgcaccctatgag

SEQ ID NO: 74463 - DNA, 80 bp, synthetic construct
  source 1..80: mol_type = other DNA
cctacatggaatggataccgagggagaagtgttaaagtggcagtttgacagtcagctagcactgaaacacagagcccgag

SEQ ID NO: 74464 - DNA, 80 bp, synthetic construct
  source 1..80: mol_type = other DNA
agctgcatccggagttctacaaagactgctgacacagaagttgctgacagggactttccgccgggactttccaggggagg

SEQ ID NO: 74465 - DNA, 80 bp, synthetic construct
  source 1..80: mol_type = other DNA
gggaaagaaaaaatataggctaaaacatttagtatgggcaagcagggagctggaaagattcgcacttaaccctggccttt

SEQ ID NO: 74466 - DNA, 80 bp, synthetic construct
  source 1..80: mol_type = other DNA
tgtggtttgggcggagttggggagtggctaacccctcagatgctgcatataagcagctgcttctcgcctgtactgggtct

SEQ ID NO: 74467 - DNA, 80 bp, synthetic construct
  source 1..80: mol_type = other DNA
ctcttgttagaccagatcgagcctgggagctctctgactagcaagggaacccactgcttaaagcctcaataaagcttgcc

SEQ ID NO: 74468 - DNA, 80 bp, synthetic construct
  source 1..80: mol_type = other DNA
ttgagtgcttcaagtagtgtgtgcccgtctgttatgtgactctggtaactagagatcccttagaccactctaggcagtgt

SEQ ID NO: 74469 - DNA, 80 bp, synthetic construct
  source 1..80: mol_type = other DNA
gaaacatcagaaggatgtcaacaaataatgaaacagctacaaccagctattaagacaggaacagaagagcttagatcatt

SEQ ID NO: 74470 - DNA, 80 bp, synthetic construct
  source 1..80: mol_type = other DNA
gtataatacagtagcaactctctactgtgtacatcaacagataaaggtagatgacaccaaagaagctctggataaagtag

SEQ ID NO: 74471 - DNA, 80 bp, synthetic construct
  source 1..80: mol_type = other DNA
aggaaatacaaaacaaaaagacagagcaggcagcagctgacacaggaagcagcaggagtgtcagccaaaattatcctata

SEQ ID NO: 74472 - DNA, 80 bp, synthetic construct
  source 1..80: mol_type = other DNA
tggcaaaactacacaccagggccagggatcagatatccactgacctttggatggccatacaagctagtgccagttgatcc

SEQ ID NO: 74473 - DNA, 80 bp, synthetic construct
  source 1..80: mol_type = other DNA
gtaatgatgcagaggggcaattttagaggccagaaaagaataattaaatgtttcaactgtggtaaggagggacacttagc

SEQ ID NO: 74474 - DNA, 80 bp, synthetic construct
  source 1..80: mol_type = other DNA
acagcaccaccagcagaggaccttgggatgggggaaggaataaccccctccctgaagcaggagccgaaggaaaggacaca

SEQ ID NO: 74475 - DNA, 80 bp, synthetic construct
  source 1..80: mol_type = other DNA
aagggaagtagaaaaggccaatgaaggagagaacaactgtttgctacatcctatgagccagcatggaatggaggatgagg

SEQ ID NO: 74476 - DNA, 80 bp, synthetic construct
  source 1..80: mol_type = other DNA
ggggaattggaggttttatcaaagtaagacagtatgatcaagtaaccatagacatctgtggaaaaaaggctataggctca

SEQ ID NO: 74477 - DNA, 80 bp, synthetic construct
  source 1..80: mol_type = other DNA
aaaaaataaaagcattatcagaaatatgtacagagatggaaaaagaaggaaaaatttcaaaaattgggccagaaaatcca

SEQ ID NO: 74478 - DNA, 80 bp, synthetic construct
  source 1..80: mol_type = other DNA
tggatgtgggggatgcatacttttcagttcccttagacaaagaatttaggaaatatactgcattcaccatacctagtata

SEQ ID NO: 74479 - DNA, 80 bp, synthetic construct
  source 1..80: mol_type = other DNA
aacaatgaaacaccagggattagatatcaatataatgtgcttccacagggatggaaaggatcaccagcaatatttcagag

SEQ ID NO: 74480 - DNA, 80 bp, synthetic construct
  source 1..80: mol_type = other DNA
tagcatgacaaaaatcttagagcccttcaggtcacagaacccagagatagttatctaccaatacatggatgatttgtatg

SEQ ID NO: 74481 - DNA, 80 bp, synthetic construct
  source 1..80: mol_type = other DNA
agagagaagtgctaaaatgggtgtttgacagcagcctagcacgggaacacgtagcccacaagctgcatccggagtactac

SEQ ID NO: 74482 - DNA, 80 bp, synthetic construct
  source 1..80: mol_type = other DNA
taggatctgacttagaaatagggcaacatagaacaaaaatagaggagttgagggctcatctgttgaaatggggatttacc

SEQ ID NO: 74483 - DNA, 80 bp, synthetic construct
  source 1..80: mol_type = other DNA
acaccagacaagaagcatcagaaagaacctccatttctttggatggggtatgaactccatcctgacaaatggacagtaca

SEQ ID NO: 74484 - DNA, 80 bp, synthetic construct
  source 1..80: mol_type = other DNA
gcctatacagctgccagaaaaggatagctggacggtcaatgatatacagaagttagtgggaaaattaaactgggcaagtc

SEQ ID NO: 74485 - DNA, 80 bp, synthetic construct
  source 1..80: mol_type = other DNA
agatttatccaggaattaaggtaaagcagctgtgtaagctccttaggggagccaaggcactaacagacatagtaccactg

SEQ ID NO: 74486 - DNA, 80 bp, synthetic construct
  source 1..80: mol_type = other DNA
actgaagaagcagaattagaattggcagagaacagggaaattttaaaagaaccagtacatggagtatattatgacccatc

SEQ ID NO: 74487 - DNA, 80 bp, synthetic construct
  source 1..80: mol_type = other DNA
aaaagatctaatagctgaaatacagaaacaaggaaatgaccaatggacatatcaaatttaccaggaaccattcaaaaatc

SEQ ID NO: 74488 - DNA, 80 bp, synthetic construct
  source 1..80: mol_type = other DNA
tgaaaacagggaaatatgcaaaaaggaagtctgcccacactaatgatgtaaaacaattaacagaggcagtacaaaagata

SEQ ID NO: 74489 - DNA, 80 bp, synthetic construct
  source 1..80: mol_type = other DNA
gccctggaaagcatagtaatatggggaaagactcctaaatttagactacccatacaaaaggaaacatgggatgcatggtg

SEQ ID NO: 74490 - DNA, 80 bp, synthetic construct
  source 1..80: mol_type = other DNA
gatggagtattggcaagccacctggattcctgagtgggagtttgtcaatacccctcccttagtaaaactatggtatcagt

SEQ ID NO: 74491 - DNA, 80 bp, synthetic construct
  source 1..80: mol_type = other DNA
tagaaaaagaccccatagtgggagcagaaacttactatgtagatggggcggctaatagggagactaaactaggaaaggca

SEQ ID NO: 74492 - DNA, 80 bp, synthetic construct
  source 1..80: mol_type = other DNA
aaagactgctgacacagaagctgctgacagggactttctgtcgggactttccaggggaggcgtgttttgggtggagttgg

SEQ ID NO: 74493 - DNA, 80 bp, synthetic construct
  source 1..80: mol_type = other DNA
ggatatgtcactgacagaggaaaacaaaaaattatccccctaactgagacaaccaatcaaaagactgaattacatgcaat

SEQ ID NO: 74494 - DNA, 80 bp, synthetic construct
  source 1..80: mol_type = other DNA
atatctggctttgcaagattcgggaccagaagtaaacatagtaacagactcacagtatgccttaggaatcattcaagcac

SEQ ID NO: 74495 - DNA, 80 bp, synthetic construct
  source 1..80: mol_type = other DNA
agccagataagagtgaatcagagctagtcaatcaaataatagaacagttaataaaaaaggaaagggtccacctgacatgg

SEQ ID NO: 74496 - DNA, 80 bp, synthetic construct
  source 1..80: mol_type = other DNA
gtaccagcacataaaggaattggaggaaatgaacaagtagataaattagtaagtagtggaatcaggaaagtactgtttct

SEQ ID NO: 74497 - DNA, 80 bp, synthetic construct
  source 1..80: mol_type = other DNA
agatggaatagataaagctcaagaagagcatgaaagatatcacagtaattggagagcaatggctaatgattttaatctgc

SEQ ID NO: 74498 - DNA, 80 bp, synthetic construct
  source 1..80: mol_type = other DNA
ctatatagaagcagaagttattccagcagaaacaggacaagagacagcgtacttcatactaaaattagcaggaagatggc

SEQ ID NO: 74499 - DNA, 80 bp, synthetic construct
  source 1..80: mol_type = other DNA
cagtaaaagtaatacatacagacaatggcagcaatttcaccagtgctacagtcaaggcagcctgttggtgggcaggtatc

SEQ ID NO: 74500 - DNA, 80 bp, synthetic construct
  source 1..80: mol_type = other DNA
gggggattgggggatacagtgcaggggaaagaatagtagatataatagcaacagacatacagactagagaattacaaaaa

SEQ ID NO: 74501 - DNA, 80 bp, synthetic construct
  source 1..80: mol_type = other DNA
caaattacaaaaattcaaaattttcgggtctattacagggacagcagagacccaatttggaaaggaccggcaaaactact

SEQ ID NO: 74502 - DNA, 80 bp, synthetic construct
  source 1..80: mol_type = other DNA
ttggaaaggtgaaggggcagtagtgatacaagacaatagtgacataaaggtagtaccaagaagaaaagcaaagattatta

SEQ ID NO: 74503 - DNA, 80 bp, synthetic construct
  source 1..80: mol_type = other DNA
aaaacatcatatgtacagatcaaagaaagcaaaaggatggttttatagacatcactatgaaagcaggcatccaaaagtat

SEQ ID NO: 74504 - DNA, 80 bp, synthetic construct
  source 1..80: mol_type = other DNA
gttcagaagtacatatcccaatagaggaagctagattagtaattagaacatattggggtttacaaccaggagaaaaagct

SEQ ID NO: 74505 - DNA, 80 bp, synthetic construct
  source 1..80: mol_type = other DNA
tggcatttgggtcatggggtctctatagaatggagccagggaaaatatagcacacaagtagaccctgacctagcagacca

SEQ ID NO: 74506 - DNA, 80 bp, synthetic construct
  source 1..80: mol_type = other DNA
actaattcatctgcaatattttgattgtttttcagaatctaccataaggaaagccatattaggacatagaattattcata

SEQ ID NO: 74507 - DNA, 80 bp, synthetic construct
  source 1..80: mol_type = other DNA
ggtgtgaatatcaagcaggacatagtaaggtagggtctctgcaatatttggctctgaaaacattagtagaaccaagagga

SEQ ID NO: 74508 - DNA, 80 bp, synthetic construct
  source 1..80: mol_type = other DNA
acaaagccacctttgcctagtgttaggaaattaacagaggatagatggaacgagccccagaagaccaggggccgcagagg

SEQ ID NO: 74509 - DNA, 80 bp, synthetic construct
  source 1..80: mol_type = other DNA
gaaccattcaatgaatggacactagagcttttagaggagctcaagcatgaagctgttagacattttcctagaccatggct

SEQ ID NO: 74510 - DNA, 80 bp, synthetic construct
  source 1..80: mol_type = other DNA
ccatggtttaggacaacatatctatgaaacctatggggacacttgggcaggagttgaagctataataaggatattacaac

SEQ ID NO: 74511 - DNA, 80 bp, synthetic construct
  source 1..80: mol_type = other DNA
aattactgtttgttcatttcagaattggttgcaatcatagcagaataggcattctccgaaggagaagaggcagggatgga

SEQ ID NO: 74512 - DNA, 80 bp, synthetic construct
  source 1..80: mol_type = other DNA
gctggtagatcctaaactagagccctggaaccatccgggaagtcagcctgacacggcttgtaaccagtgttattgtaaaa

SEQ ID NO: 74513 - DNA, 80 bp, synthetic construct
  source 1..80: mol_type = other DNA
aatgttgctatcattgccagctttgctttatcaagaaaggcttaggcatatcctatggcaggaagaagcggagaccccga

SEQ ID NO: 74514 - DNA, 80 bp, synthetic construct
  source 1..80: mol_type = other DNA
cgaggaacttctcaaagcagtaaggatcatcaaactcctataccaaagcagtaagtattgcatgtaatgaaaccaccttt

SEQ ID NO: 74515 - DNA, 80 bp, synthetic construct
  source 1..80: mol_type = other DNA
agtattctccaccatagtagtaatagtagcagcaatcatcccaacaatagtggtgtggtttgtagtaataatagattata

SEQ ID NO: 74516 - DNA, 80 bp, synthetic construct
  source 1..80: mol_type = other DNA
ggataataatacaacgaaggataatcgactggcttcttaaaataataaataatacagcagacagcagcaacaatgagagt

SEQ ID NO: 74517 - DNA, 80 bp, synthetic construct
  source 1..80: mol_type = other DNA
gatggcaccacagaggagttgtctgcagtggagaaaaggggtcatcatcatccgggggataataatgtttagtgatgcag

SEQ ID NO: 74518 - DNA, 80 bp, synthetic construct
  source 1..80: mol_type = other DNA
aaggcatatgagacagaaatacataatgtctgggctactcatgcctgtgtacccacagaccccgacccacaagagatggc

SEQ ID NO: 74519 - DNA, 80 bp, synthetic construct
  source 1..80: mol_type = other DNA
tctacctaatgtgacagaaaattttaacatgtggaaaaataacatggtagagcagatgcatacagatataatcagcctat

SEQ ID NO: 74520 - DNA, 80 bp, synthetic construct
  source 1..80: mol_type = other DNA
gggatcaaggcctaaagccatgtgtaaagttaactcctctctgtgtcactttaaactgtaccaacgtcaacattaccaac

SEQ ID NO: 74521 - DNA, 80 bp, synthetic construct
  source 1..80: mol_type = other DNA
atcaacaataccaacatcaacaatcaaacagtcaacaatcaaacaataggggacgcaacacaagacatgaaaaactgctc

SEQ ID NO: 74522 - DNA, 80 bp, synthetic construct
  source 1..80: mol_type = other DNA
tttcaatatgaccacaattctaacagacaagaaagagaaggtacaggctcttttttataagttagatatagtaccaatta

SEQ ID NO: 74523 - DNA, 80 bp, synthetic construct
  source 1..80: mol_type = other DNA
atggtaatggtagtgatagcaataatagtgagtatagattgataaattgtaatacctcaaccattgcacaggcttgtcca

SEQ ID NO: 74524 - DNA, 80 bp, synthetic construct
  source 1..80: mol_type = other DNA
aagataacctttgaaccaattcccatacattattgtgccccagctggttttgcaattctaaagtgtagagataagaattt

SEQ ID NO: 74525 - DNA, 80 bp, synthetic construct
  source 1..80: mol_type = other DNA
caatggaacggggccatgcaaaaatgtcagctcagtacaatgcacacatggaattaagccagtagtgtcaactcaattgc

SEQ ID NO: 74526 - DNA, 80 bp, synthetic construct
  source 1..80: mol_type = other DNA
tgttaaatggcagtctagcggaagaagaggtaaagattaggtctgaaaatttcacagacaataccaaaaacataatagtg

SEQ ID NO: 74527 - DNA, 80 bp, synthetic construct
  source 1..80: mol_type = other DNA
cagtttgctaagtctgtacagattaactgtaccagacccggcaacaatacaaggaaaagtatacgtataggaccaggaca

SEQ ID NO: 74528 - DNA, 80 bp, synthetic construct
  source 1..80: mol_type = other DNA
agcattctatgcaacaggtgaagtaacaggagacataaggcaagctcattgcaacatcagtacacaagattggaataaca

SEQ ID NO: 74529 - DNA, 80 bp, synthetic construct
  source 1..80: mol_type = other DNA
ctttgcacctggtggttgtacaattagaaaaacactaccctaataaaactatagtctttaagcaaccctcaggaggggac

SEQ ID NO: 74530 - DNA, 80 bp, synthetic construct
  source 1..80: mol_type = other DNA
ctagaagttacaatgcatagtttcaattgcagaggagaatttttctattgtaatacatcaagcctgtttaatagcacgta

SEQ ID NO: 74531 - DNA, 80 bp, synthetic construct
  source 1..80: mol_type = other DNA
cttgaatataacaaagggaaacataacaatgctcccatgcaggataaaacaaattgtaaacatgtggcagggagtaggac

SEQ ID NO: 74532 - DNA, 80 bp, synthetic construct
  source 1..80: mol_type = other DNA
gagcaatatatgcccctcctattgcaggaaagatacagtgtgtatctaatataacaggactaatattgacaagagatggg

SEQ ID NO: 74533 - DNA, 80 bp, synthetic construct
  source 1..80: mol_type = other DNA
ggaaatgaagataataatactgaaaccttcagacctggaggaggaaatatgaaagacaattggagaagtgaattatataa

SEQ ID NO: 74534 - DNA, 80 bp, synthetic construct
  source 1..80: mol_type = other DNA
cagttggactgggagctcttttctttgggttcttaggagcagcaggaagcactatgggcgcagcgtcaataacgctgacg

SEQ ID NO: 74535 - DNA, 80 bp, synthetic construct
  source 1..80: mol_type = other DNA
tggaagggctaatttactccaagaaaaggcaagagatccttgatttgtgggtctaccacacacaaggcttcttccctgac

SEQ ID NO: 74536 - DNA, 80 bp, synthetic construct
  source 1..80: mol_type = other DNA
tggaatgagatttgggataacatgacctggttgcaatgggataaagaaattaacaattacacagaaacaatatataatct

SEQ ID NO: 74537 - DNA, 80 bp, synthetic construct
  source 1..80: mol_type = other DNA
gcttgaaaatgcgcagaaccagcaggaaaagaatgaacaagacttattgtcattggacaagtgggcaagcctgtggaatt

SEQ ID NO: 74538 - DNA, 80 bp, synthetic construct
  source 1..80: mol_type = other DNA
ggtttgacataacaaaatggctgtggtatataaaaatattcataatgatagtaggaggcttaataggtttaagaataatt

SEQ ID NO: 74539 - DNA, 80 bp, synthetic construct
  source 1..80: mol_type = other DNA
tttgctgtgctctctatagtgaatagggttaggcagggatactcacctttatcattccagacccttgtcccaagcccaga

SEQ ID NO: 74540 - DNA, 80 bp, synthetic construct
  source 1..80: mol_type = other DNA
gggagtcgacaggcccggaggaatcgaagaagaaggtggagagcaagacagaaccagatcgattcgattagtgaacggat

SEQ ID NO: 74541 - DNA, 80 bp, synthetic construct
  source 1..80: mol_type = other DNA
tcttagcacttgcctgggaggacctccggaacctgtgcctcttcagctaccaccgcttgagagactgcatattgattgca

SEQ ID NO: 74542 - DNA, 80 bp, synthetic construct
  source 1..80: mol_type = other DNA
gggaggacattggaacttctgggacacagcagtctcaagggactgagactggggtgggagggcctcaaatacctgtggaa

SEQ ID NO: 74543 - DNA, 80 bp, synthetic construct
  source 1..80: mol_type = other DNA
tctactggtttattggggacaggaactgaaaaatagtgctattagatcgcttgatatcatagcaatagcagcagctgagt

SEQ ID NO: 74544 - DNA, 80 bp, synthetic construct
  source 1..80: mol_type = other DNA
gagagagatgggtgcgagagcgtcagtattaaccgggggaaaattagattcatgggagaaaattaggttaaggccagggg

SEQ ID NO: 74545 - DNA, 80 bp, synthetic construct
  source 1..80: mol_type = other DNA
gaaagagctttgctataaaatgggtggcaaatggtcaaaaagcagcatagtgggatggcctgatgttagggaaagaatga

SEQ ID NO: 74546 - DNA, 80 bp, synthetic construct
  source 1..80: mol_type = other DNA
gacgggctagtccagcagcagaaggagtgggagcagcgtctaaagatttagataaatttggagcaatcacaagtagtaat

SEQ ID NO: 74547 - DNA, 80 bp, synthetic construct
  source 1..80: mol_type = other DNA
ttggaagcacaagaagaggaaggaggggtaggcttcccagtcagacctcaggtacctttaaggccaatgacttataaggg

SEQ ID NO: 74548 - DNA, 80 bp, synthetic construct
  source 1..80: mol_type = other DNA
acaccaagtactaatgctgattgtgcctggttggaagcacaagaagaggaaggaggggtaggcttcccagtcagacctca

SEQ ID NO: 74549 - DNA, 80 bp, synthetic construct
  source 1..80: mol_type = other DNA
ggtacctttaaggccaatgacttataagggagcattcgatctcggcttctttttaaaagaaaaggggggactggatgggt

SEQ ID NO: 74550 - DNA, 80 bp, synthetic construct
  source 1..80: mol_type = other DNA
taatttactccaagaaaaggcaagagatccttgatttgtgggtctaccacacacaaggcttcttccctgactggcaaaac

SEQ ID NO: 74551 - DNA, 80 bp, synthetic construct
  source 1..80: mol_type = other DNA
tacacaccagggccagggatcagatatccactgacctttggatggccatacaagctagtgccagttgatccaagggaagt

SEQ ID NO: 74552 - DNA, 80 bp, synthetic construct
  source 1..80: mol_type = other DNA
agaaaaggccaatgaaggagagaacaactgtttgctacatcctatgagccagcatggaatggaggatgaggagagagaag

SEQ ID NO: 74553 - DNA, 80 bp, synthetic construct
  source 1..80: mol_type = other DNA
tgctaaaatgggtgtttgacagcagcctagcacgggaacacgtagcccacaagctgcatccggagtactacaaagactgc

SEQ ID NO: 74554 - DNA, 80 bp, synthetic construct
  source 1..80: mol_type = other DNA
tgacacagaagctgctgacagggactttctgtcgggactttccaggggaggcgtgttttgggtggagttggggagtggct

SEQ ID NO: 74555 - DNA, 80 bp, synthetic construct
  source 1..80: mol_type = other DNA
agtgtgtgcccgtctgttgtttgactctggtaactagagatccctcagaccattctaggcagagtaaaaatctctagcag

SEQ ID NO: 74556 - DNA, 80 bp, synthetic construct
  source 1..80: mol_type = other DNA
ggccagatgagggaaccaaggggaagtgatatagcaggaacaaccagtacccttcaggaacaaataggatggatgaccaa

SEQ ID NO: 74557 - DNA, 80 bp, synthetic construct
  source 1..80: mol_type = other DNA
caatccacctatcccagtgggagaaatttataaaaggtggataatcctgggattaaataaaatagtaaggatgtatagcc

SEQ ID NO: 74558 - DNA, 80 bp, synthetic construct
  source 1..80: mol_type = other DNA
ctgttagcattttggacataaaacaagggccaaaagaaccctttagagactatgtagatagattctttaaaactcttaga

SEQ ID NO: 74559 - DNA, 80 bp, synthetic construct
  source 1..80: mol_type = other DNA
gctgagcaatgtacacaggatgtaaaaaactggatgacagacaccttgttggtccaaaatgcaaacccagattgtaagac

SEQ ID NO: 74560 - DNA, 80 bp, synthetic construct
  source 1..80: mol_type = other DNA
cattttaagaggattaggacaaggggcttcgctggaagaaatgatgacagcgtgtcagggagtgggaggacccggccata

SEQ ID NO: 74561 - DNA, 80 bp, synthetic construct
  source 1..80: mol_type = other DNA
aagcaagagttttggctgaggcaatgagccaagtacaatcacaagctacaagcataatggtgcagaggggcaattttaaa

SEQ ID NO: 74562 - DNA, 80 bp, synthetic construct
  source 1..80: mol_type = other DNA
ggtcagaaaagaataaaatgtttcaactgtggcaaagaaggacacctagccagaaattgcagggcccccagaaaaaaggg

SEQ ID NO: 74563 - DNA, 80 bp, synthetic construct
  source 1..80: mol_type = other DNA
ccctcagactactgaaggtagtataaaaaatctttaccaggggcgcccaaccagggcctttaaagcgaaagtaaaaggga

SEQ ID NO: 74564 - DNA, 80 bp, synthetic construct
  source 1..80: mol_type = other DNA
ctgttggaaatgtggaaaggaaggacaccaaatgaaagactgcactgagagacaggctaattttttagggaaaatctggc

SEQ ID NO: 74565 - DNA, 80 bp, synthetic construct
  source 1..80: mol_type = other DNA
cttccaacaaagggaggccaggaaactttccccagaacaggatagagccaacagccccaccagcagagaactttgggatg

SEQ ID NO: 74566 - DNA, 80 bp, synthetic construct
  source 1..80: mol_type = other DNA
ggggaagggataaccccctccccgaagcaggagctgaaagagagggaacctttagtttccctcaaatcactctttggcaa

SEQ ID NO: 74567 - DNA, 80 bp, synthetic construct
  source 1..80: mol_type = other DNA
cgaccccttgtcacaataaaaatagaaggacagctaagggaggctctattagatacaggagcagatgatacagtattaga

SEQ ID NO: 74568 - DNA, 80 bp, synthetic construct
  source 1..80: mol_type = other DNA
agacataaatttgccaggaaaatggaaaccaaaaatgatagggggaattggaggttttatcaaagtaagacagtatgatc

SEQ ID NO: 74569 - DNA, 80 bp, synthetic construct
  source 1..80: mol_type = other DNA
aagtaaccatagacatctgtggaaaaaaggctataggtacagttttagtaggacctacacctgtcaacataattggaagg

SEQ ID NO: 74570 - DNA, 80 bp, synthetic construct
  source 1..80: mol_type = other DNA
aatatgttgactcagattggctgtactttaaattttccaattagtcccattgaaactgtaccagtaaaactaaagccagg

SEQ ID NO: 74571 - DNA, 80 bp, synthetic construct
  source 1..80: mol_type = other DNA
aatggatggcccaagggttaaacaatggccattgacagaagaaaaaataaaagcattaacagaaatatgtaaagatatgg

SEQ ID NO: 74572 - DNA, 80 bp, synthetic construct
  source 1..80: mol_type = other DNA
aaaaggaaggaaaaatttcaaaaattgggccagaaaatccatacaacactccaatatttgctataaagaaaaaagacagc

SEQ ID NO: 74573 - DNA, 80 bp, synthetic construct
  source 1..80: mol_type = other DNA
actaagtggagaaaattagtagatttcagagagctcaataaaagaactcaagatttctgggaagttcaattaggaatacc

SEQ ID NO: 74574 - DNA, 80 bp, synthetic construct
  source 1..80: mol_type = other DNA
ctcgaaagcggaagttccagagaagttctctcgacgcaggactcggcttgctgagtgcacacagcaagaggcgaggagcg

SEQ ID NO: 74575 - DNA, 80 bp, synthetic construct
  source 1..80: mol_type = other DNA
acatccagcaggtttaaaaaagaaaaaatcagtaacagtactagatgtgggcgatgcatacttttcagttcccttacaca

SEQ ID NO: 74576 - DNA, 80 bp, synthetic construct
  source 1..80: mol_type = other DNA
aagactttagaaagtacactgcattcaccatacctagcataaacaatgagacaccaggggttagatatcaatacaatgtg

SEQ ID NO: 74577 - DNA, 80 bp, synthetic construct
  source 1..80: mol_type = other DNA
cttccacaaggatggaaaggatcaccagcaatatttcagagtagcatgataaaaatcttagagccctttaggtcacagaa

SEQ ID NO: 74578 - DNA, 80 bp, synthetic construct
  source 1..80: mol_type = other DNA
tccagaaatagttatctaccaatatatggatgacttgtatgtaggatctgacttagaaatagagcaacatagaacaaaaa

SEQ ID NO: 74579 - DNA, 80 bp, synthetic construct
  source 1..80: mol_type = other DNA
tagaggagttgagagctcatctattgagatggggatttacaacaccagataaaaagcatcaaaaggaacctccatttctt

SEQ ID NO: 74580 - DNA, 80 bp, synthetic construct
  source 1..80: mol_type = other DNA
tggatgggatatgaactccatcctgacaaatggacagtccagcctatagaactgccagaaaaagaaatctggactgtcaa

SEQ ID NO: 74581 - DNA, 80 bp, synthetic construct
  source 1..80: mol_type = other DNA
tgatatacagaaattagtgggaaaactaaattgggcaagtcagatttatccagggataaaggtaaagcaactgtgtaaac

SEQ ID NO: 74582 - DNA, 80 bp, synthetic construct
  source 1..80: mol_type = other DNA
tcctcaggggagccaaagcactaacagacatagttacactgtctaaggaagcagaattagaattggcagagaacagagag

SEQ ID NO: 74583 - DNA, 80 bp, synthetic construct
  source 1..80: mol_type = other DNA
attctaaaagaccctgtacatggagtatattatgacccatcaaaagacttaatagcagaaatacaaaaacagggacaggg

SEQ ID NO: 74584 - DNA, 80 bp, synthetic construct
  source 1..80: mol_type = other DNA
acagtggacatatcaaatttatcaagagccatttaaaaatctgaaaacagggaaatatgcaagaaggaggtctgcccaca

SEQ ID NO: 74585 - DNA, 80 bp, synthetic construct
  source 1..80: mol_type = other DNA
gcgactggtgagtacgccaaaaagttttgactagcggaggctaaaaggaaagagatgggtgcgagagcgtcagtattaag

SEQ ID NO: 74586 - DNA, 80 bp, synthetic construct
  source 1..80: mol_type = other DNA
ctaatgatgtaaaacaattaacagaagtagtgcaaaaggtggtcacagagagtatagtaatatggggaaagactcctaaa

SEQ ID NO: 74587 - DNA, 80 bp, synthetic construct
  source 1..80: mol_type = other DNA
tttagactacccatacagaaggaaacatgggatacatggtggatggagtattggcaggctacctggattcctgagtggga

SEQ ID NO: 74588 - DNA, 80 bp, synthetic construct
  source 1..80: mol_type = other DNA
atttgtcaatacccctcctttagtaaaactatggtatcagttagaaaaagaacccataatgggagcagaaacttactatg

SEQ ID NO: 74589 - DNA, 80 bp, synthetic construct
  source 1..80: mol_type = other DNA
tagatggggcagctaacagggagactaaactaggaaaggcaggatatgtcactgacaggggaagacaaaaaattatctcc

SEQ ID NO: 74590 - DNA, 80 bp, synthetic construct
  source 1..80: mol_type = other DNA
ctaactgagacaaccaatcaaaaaactgaattacatgcaatacatttagccttgcaagattcaggagcagaagtaaatat

SEQ ID NO: 74591 - DNA, 80 bp, synthetic construct
  source 1..80: mol_type = other DNA
agtaacagactcacagtatgcattaggaatcattcaggcacaaccagacaggagtgaatcagagttagtcaatcaaataa

SEQ ID NO: 74592 - DNA, 80 bp, synthetic construct
  source 1..80: mol_type = other DNA
tagaaaaattaatagaaaaagaaaaagtatacctgtcatgggtaccggcacataaagggattggaggaaatgaacaagta

SEQ ID NO: 74593 - DNA, 80 bp, synthetic construct
  source 1..80: mol_type = other DNA
gataaattagtcagtaatggaatcagaaaagtgctatttttagatggaatagataaggctcaagaggaccatgaaaaata

SEQ ID NO: 74594 - DNA, 80 bp, synthetic construct
  source 1..80: mol_type = other DNA
tcacagcaattggagagcaatggctcatgatttcaatctgccacctgtaatagctaaagaaatagtagccagctgtaata

SEQ ID NO: 74595 - DNA, 80 bp, synthetic construct
  source 1..80: mol_type = other DNA
aatgtcagctaaaaggggaagccatacatggacaagtagactgtagtccaggagtatggcaattagattgcacacattta

SEQ ID NO: 74596 - DNA, 80 bp, synthetic construct
  source 1..80: mol_type = other DNA
cgggggaaaattagatgcatgggagaaaattaagttacggccagggggaaagaaaaaatataagatgaaacatttagtat

SEQ ID NO: 74597 - DNA, 80 bp, synthetic construct
  source 1..80: mol_type = other DNA
gaagggaaagttatcttggtagcagtccatgtagccagtggctatatagaagcagaagttatcccagcagaaacaggaca

SEQ ID NO: 74598 - DNA, 80 bp, synthetic construct
  source 1..80: mol_type = other DNA
agagactgcatacttcatactaaaattagcaggaagatggccagtaaaaataatacatacagacaatggcagcaatctca

SEQ ID NO: 74599 - DNA, 80 bp, synthetic construct
  source 1..80: mol_type = other DNA
ccagcgctacagtcaaggcagcctgttggtgggcagatatccaacaggaatttggaattccctacaatccccaaagtcaa

SEQ ID NO: 74600 - DNA, 80 bp, synthetic construct
  source 1..80: mol_type = other DNA
aagaaaatcatagggcaagtaagagaacaagctgaacaccttaagacagcagtacaaatggcagtattcattcacaattt

SEQ ID NO: 74601 - DNA, 80 bp, synthetic construct
  source 1..80: mol_type = other DNA
ggagtagtggaatctatgaataaagaattaaagaaaatcatagggcaagtaagagaacaagctgaacaccttaagacagc

SEQ ID NO: 74602 - DNA, 80 bp, synthetic construct
  source 1..80: mol_type = other DNA
agtacaaatggcagtattcattcacaattttaaaagaaaaggggggattggggggtacagtgcaggggaaagaatagtag

SEQ ID NO: 74603 - DNA, 80 bp, synthetic construct
  source 1..80: mol_type = other DNA
acatgatagcaacagacatacagactaaagaattacaaaagcaaattataaaaattcaaaattttcgggtttattacagg

SEQ ID NO: 74604 - DNA, 80 bp, synthetic construct
  source 1..80: mol_type = other DNA
gacagcagagacccaatttggaaaggacctgctaaactactttggaaaggtgaaggggcagtagtaatacaagacaatag

SEQ ID NO: 74605 - DNA, 80 bp, synthetic construct
  source 1..80: mol_type = other DNA
tgatataaaggtagtaccaagaaggaaagcaaagatcattcgggattatggaaaacagatggcaggtgatgattgtgtgg

SEQ ID NO: 74606 - DNA, 80 bp, synthetic construct
  source 1..80: mol_type = other DNA
caggtagacaggatgaggattaggacatggcacagtttagtaaaacatcatatgtatatttccaggaaagccaaagggtg

SEQ ID NO: 74607 - DNA, 80 bp, synthetic construct
  source 1..80: mol_type = other DNA
gttttataaacatcactatgaaagcaggcatccaaaagtaagttcagaagtacatattccaataaatgaggctagattaa

SEQ ID NO: 74608 - DNA, 80 bp, synthetic construct
  source 1..80: mol_type = other DNA
gggcaagcagggagttggaaagattcgcacttaacccagaccttttagaaacatcagaaggatgtctacaaatattagca

SEQ ID NO: 74609 - DNA, 80 bp, synthetic construct
  source 1..80: mol_type = other DNA
taataagaacatattggggtctacagacaggagaaaaagattggcatttgggtcatggggtctctgtagaatggagacaa

SEQ ID NO: 74610 - DNA, 80 bp, synthetic construct
  source 1..80: mol_type = other DNA
agaagatacagcacacaagtagaccctgacctagcagatcaactaattcatctgcaatattttgactgtttttcagaatc

SEQ ID NO: 74611 - DNA, 80 bp, synthetic construct
  source 1..80: mol_type = other DNA
tgccataaggaaagccatattaggacaaaaaattattcataggtgtgaatatcaaacaggacataagaaggtagggtctc

SEQ ID NO: 74612 - DNA, 80 bp, synthetic construct
  source 1..80: mol_type = other DNA
tgcaatatctggcgctgaaagcgttagtagcaccaaaaggagcaaagccacctttgcctagtgttaggaaactaacagag

SEQ ID NO: 74613 - DNA, 80 bp, synthetic construct
  source 1..80: mol_type = other DNA
gatagatggaacaagccccagaagaccaagggccacagagagagccatacaatgaatggatgttagaactgttagatgag

SEQ ID NO: 74614 - DNA, 80 bp, synthetic construct
  source 1..80: mol_type = other DNA
cttaagcatgaagctgttagacattttcctagaccatggctacatggcttaggacaatatatctatgaaacctatggaga

SEQ ID NO: 74615 - DNA, 80 bp, synthetic construct
  source 1..80: mol_type = other DNA
cacttgggcaggagttgaagctataataagaatattgcaacatttactgtttgttcatttcagaattggatgcaatcata

SEQ ID NO: 74616 - DNA, 80 bp, synthetic construct
  source 1..80: mol_type = other DNA
gcagaataggtattactctccaagggagaagaggcagggatggagccggtagatcctagcctagagccatggaaccatcc

SEQ ID NO: 74617 - DNA, 80 bp, synthetic construct
  source 1..80: mol_type = other DNA
gggaagtcagcctaaaactccttgtaacaagtgctattgcaaaaggtgctgctatcattgccagtgttgctttataacca

SEQ ID NO: 74618 - DNA, 80 bp, synthetic construct
  source 1..80: mol_type = other DNA
aaggcttaggcatatcctatggcaggaagaagcggagaccccgacgaggaacttctcagagcagtaaggatcatcaaaat

SEQ ID NO: 74619 - DNA, 80 bp, synthetic construct
  source 1..80: mol_type = other DNA
cagatacaaccagcaattaagacaggaacagaagagcttaaatcattatataatgcagtagcagtcctctgctgtgtgca

SEQ ID NO: 74620 - DNA, 80 bp, synthetic construct
  source 1..80: mol_type = other DNA
cctgtaccaaagcagtaagtatcattaggtaatgttatctttgaaaatcgctgcaatagtaggactagtagtagcaataa

SEQ ID NO: 74621 - DNA, 80 bp, synthetic construct
  source 1..80: mol_type = other DNA
tcttagcaatagttgtgtggtcaatagtaataatagaatatagaaaaatactgaagcaaaagaaaatagacaggttactt

SEQ ID NO: 74622 - DNA, 80 bp, synthetic construct
  source 1..80: mol_type = other DNA
gatagaataagagacagagcagaagacagtggcaatgagagtgatggggatgaagaagaactgtcagcaattgtggaaat

SEQ ID NO: 74623 - DNA, 80 bp, synthetic construct
  source 1..80: mol_type = other DNA
ggggaattttaatccttggggttataatgttttctaatgccacagacaagttgtgggtcacagtctattatggggtgcct

SEQ ID NO: 74624 - DNA, 80 bp, synthetic construct
  source 1..80: mol_type = other DNA
gtgtggagagatgcagaaactaccctattctgtgcatcggatgctaaggcacatgatccagaagtgcataatgtctgggc

SEQ ID NO: 74625 - DNA, 80 bp, synthetic construct
  source 1..80: mol_type = other DNA
tactcatgcctgtgtacccacaaaccccgatccacaagagatagacctacataatgtgacagaatattttaacatgtgga

SEQ ID NO: 74626 - DNA, 80 bp, synthetic construct
  source 1..80: mol_type = other DNA
aaaataacatggtagagcagatgcatacagatataatcagcttatgggatcaaagcctaaagccatgtgtaaagttaacc

SEQ ID NO: 74627 - DNA, 80 bp, synthetic construct
  source 1..80: mol_type = other DNA
cctctctgtgtcactttaagatgtaccaactacaataatacagcctacaataatacaggctacaataatacagacgaaat

SEQ ID NO: 74628 - DNA, 80 bp, synthetic construct
  source 1..80: mol_type = other DNA
aaaaaattgcactttcaatatgaccacagtactaagagataagaaagaaaaggtacatgctcttttttatagactagatg

SEQ ID NO: 74629 - DNA, 80 bp, synthetic construct
  source 1..80: mol_type = other DNA
tagtaccaatcaatggtgataataatgggagtgatgagtatagactaataaattgtaatacctcagccattacacaggct

SEQ ID NO: 74630 - DNA, 80 bp, synthetic construct
  source 1..80: mol_type = other DNA
tcaaaaaataaatgtaaaagacaccaaggaagctttggatgaaatagagaaaatacaaaacaaaaagacacagcaggcag

SEQ ID NO: 74631 - DNA, 80 bp, synthetic construct
  source 1..80: mol_type = other DNA
tgtccaaaggtaacctttgaaccaattcccatacattattgtgccccagctggttttgcaattctaaagtgtaaagatga

SEQ ID NO: 74632 - DNA, 80 bp, synthetic construct
  source 1..80: mol_type = other DNA
ggaattcaatggaacagggccatgcaaaaatgttagttcagtacaatgcacacatggaattaagccagtggtatcaactc

SEQ ID NO: 74633 - DNA, 80 bp, synthetic construct
  source 1..80: mol_type = other DNA
aactgctgttaaacggcagtctagcaaaaggtgaggtaaagattaggtctgaaaatctcacagacaatgtcaaaaacata

SEQ ID NO: 74634 - DNA, 80 bp, synthetic construct
  source 1..80: mol_type = other DNA
atagtacagcttaatgagtctgtagcgattaactgtaccagactcggcaacaacacaagaagaagtatccgtataggacc

SEQ ID NO: 74635 - DNA, 80 bp, synthetic construct
  source 1..80: mol_type = other DNA
aggacaatcattccatgcaacaggtgcgataataggaaacataaggcaagctcattgcaacatcagtagcctagcttgga

SEQ ID NO: 74636 - DNA, 80 bp, synthetic construct
  source 1..80: mol_type = other DNA
acagaactctgaccctggtagctaaacaattagaaaaacacttccgtaataagacaataacctttaatcaatcctcagga

SEQ ID NO: 74637 - DNA, 80 bp, synthetic construct
  source 1..80: mol_type = other DNA
ggggacttagaaattacaatgcatagtttcaattgtaaaggagagtttttctattgtaatacatcaggcctgtttaatag

SEQ ID NO: 74638 - DNA, 80 bp, synthetic construct
  source 1..80: mol_type = other DNA
cacttggaaaaatggagtttgggaaaggggcaggatgaaccagacaaatgacacgaatgaaaacataacactcccatgca

SEQ ID NO: 74639 - DNA, 80 bp, synthetic construct
  source 1..80: mol_type = other DNA
ggataaaacaaattgtaaacatatggcaggaagtaggacaagcaatgtatgcccctccagttgcaggagagatacagtgt

SEQ ID NO: 74640 - DNA, 80 bp, synthetic construct
  source 1..80: mol_type = other DNA
gtaacaaacattacaggaataatattgacaagagatgggggaattaataatgagactactgagaccttcagacctggagg

SEQ ID NO: 74641 - DNA, 80 bp, synthetic construct
  source 1..80: mol_type = other DNA
cagctgacacaggaaacaacaatcaggtcagtcggaattatcctatagtgcaaaatgcacaagggcagatggtgcaccag

SEQ ID NO: 74642 - DNA, 80 bp, synthetic construct
  source 1..80: mol_type = other DNA
aggaaatatgaaggacaattggagaagtgagttatacaaatataaagtagtaaaacttgaaccactaggagtagcacccg

SEQ ID NO: 74643 - DNA, 80 bp, synthetic construct
  source 1..80: mol_type = other DNA
acaaggcaaagagaagagtggtggagagagaaaaaagagcagttggactgggagctcttttccttgggttcttaggaaca

SEQ ID NO: 74644 - DNA, 80 bp, synthetic construct
  source 1..80: mol_type = other DNA
gcaggaagcactatgggcgcggcgtcaataacgctgacggtacaggccagacaattattgtctggcatagtgcaacagca

SEQ ID NO: 74645 - DNA, 80 bp, synthetic construct
  source 1..80: mol_type = other DNA
aagcaatttgctgagggctatagaggctcaacagcatgtgttgaagctcaccgtctggggcattaaacagcttcaggcaa

SEQ ID NO: 74646 - DNA, 80 bp, synthetic construct
  source 1..80: mol_type = other DNA
gagtcctagctgtggagagatacctaaaggatcagcagctcctaggactttggggctgctctggaaaactcatctgcacc

SEQ ID NO: 74647 - DNA, 80 bp, synthetic construct
  source 1..80: mol_type = other DNA
actactgtgccttggaattctagttggagtaataaaacttggaatgacatttgggacaacatgacctggttgcaatggga

SEQ ID NO: 74648 - DNA, 80 bp, synthetic construct
  source 1..80: mol_type = other DNA
taaagaaattagcaattacacagatacaatatataatctgcttgaaattgcgcagaaccagcaggaaaagaatgaacaag

SEQ ID NO: 74649 - DNA, 80 bp, synthetic construct
  source 1..80: mol_type = other DNA
ggcattcagcccagaagtaatacccatgtttacagcattatcagagggagccaccccacaagatttaaatactatgctga

SEQ ID NO: 74650 - DNA, 80 bp, synthetic construct
  source 1..80: mol_type = other DNA
acttattggcactaaacaaatgggacagcctgttgaattggttcgatatatcaagatggctttggtatataaaaatattt

SEQ ID NO: 74651 - DNA, 80 bp, synthetic construct
  source 1..80: mol_type = other DNA
ataatgatagtaggaggcctaataggattaagaatagtctttgctgtggttgctgtagtaggtagagttaggcagggtta

SEQ ID NO: 74652 - DNA, 80 bp, synthetic construct
  source 1..80: mol_type = other DNA
ctcacctttgtcattccagacccctatcccaagcccagagggagtcgccaggcccggaggaatcgaagaagaaggtggag

SEQ ID NO: 74653 - DNA, 80 bp, synthetic construct
  source 1..80: mol_type = other DNA
tccatatcacccaggactttgaatgcatgggtaaaagtaatagaggaaaaggcattcagcccagaagtaatacccatgtt

SEQ ID NO: 74654 - DNA, 80 bp, synthetic construct
  source 1..80: mol_type = other DNA
agcaaggcagaaccagatcgattcgattagtcaacggattcttagcacttgcctgggaggacctccggaacctgtgcctc

SEQ ID NO: 74655 - DNA, 80 bp, synthetic construct
  source 1..80: mol_type = other DNA
ttcagctaccaccaattgagagacttcatcttgattgcagcgaggactgtggaacttctgggacacagcattctcaaggg

SEQ ID NO: 74656 - DNA, 80 bp, synthetic construct
  source 1..80: mol_type = other DNA
actgagactggggtgggaaggcctcaaatatctgtggaatctcctggtctattggggtcaggaactgaagaagagtgctg

SEQ ID NO: 74657 - DNA, 80 bp, synthetic construct
  source 1..80: mol_type = other DNA
gggacagataggattatagaaggaatacaaatagctggtagagctattctccacatacctagaagaataagacagggctt

SEQ ID NO: 74658 - DNA, 80 bp, synthetic construct
  source 1..80: mol_type = other DNA
ttagcttgcttgacaccacagcaatagtagtagctggggggacagataggattatagaaggaatacaaatagctggtaga

SEQ ID NO: 74659 - DNA, 80 bp, synthetic construct
  source 1..80: mol_type = other DNA
gctattctccacatacctagaagaataagacagggctttgaaagggctttgctataaaatgggtggcaagtggtcaaaaa

SEQ ID NO: 74660 - DNA, 80 bp, synthetic construct
  source 1..80: mol_type = other DNA
gcagcatagtgggatggcctactgtcagggaaagaatgagaagggctaggccagcagcagaaggagtgggagcagcagaa

SEQ ID NO: 74661 - DNA, 80 bp, synthetic construct
  source 1..80: mol_type = other DNA
ggagtgggagcagcgtctagagatttagataaacatggggcactcacaagtagtaatacaccaactaccaatcctgattg

SEQ ID NO: 74662 - DNA, 80 bp, synthetic construct
  source 1..80: mol_type = other DNA
cgaagtaggcttcccagtcagaccacaggtgcctcaaagaccaatgacttacaaggcagccgttgatctcagccactttt

SEQ ID NO: 74663 - DNA, 80 bp, synthetic construct
  source 1..80: mol_type = other DNA
tgcctggttggaagcacaagaggaggagaacgaagtaggcttcccagtcagaccacaggtgcctcaaagaccaatgactt

SEQ ID NO: 74664 - DNA, 80 bp, synthetic construct
  source 1..80: mol_type = other DNA
acaaggcagccgttgatctcagccactttttaaaagaaaaggggggactggaagggttaatttactcccagaaaagaaaa

SEQ ID NO: 74665 - DNA, 80 bp, synthetic construct
  source 1..80: mol_type = other DNA
tacagcattatcagagggagccaccccacaagatttaaatactatgctgaacacagtggggggacatcaagcagctatgc

SEQ ID NO: 74666 - DNA, 80 bp, synthetic construct
  source 1..80: mol_type = other DNA
atacccactaacatttgggtggtgcttcaagctagtaccagttgatccagctgaagtagaagaagagaataaggaagaga

SEQ ID NO: 74667 - DNA, 80 bp, synthetic construct
  source 1..80: mol_type = other DNA
acaacagcctattgcaccctatgagcctacatgggatggaggacagtgagggagaagtgctaatgtggaagtttgacagt

SEQ ID NO: 74668 - DNA, 80 bp, synthetic construct
  source 1..80: mol_type = other DNA
ctcctagcatataaacacatagcccgagagatgcatccggagtactacaaggactaagaactgctgacatagaagttgct

SEQ ID NO: 74669 - DNA, 80 bp, synthetic construct
  source 1..80: mol_type = other DNA
aaatgttaaaagataccatcaatgacgaagctgcagaatgggacaggttacatccagtacatgcagggcccattgcacca

SEQ ID NO: 74670 - DNA, 80 bp, synthetic construct
  source 1..80: mol_type = other DNA
cattatataatacagtagcaactctctactgtgtacatcaaaggatagatgtaaaagatacaaaggaagcattggataaa

SEQ ID NO: 74671 - DNA, 80 bp, synthetic construct
  source 1..80: mol_type = other DNA
atagaggaactacaaaacaaaaggacacagcaggcaacagctgccacaggaagcagcagtcaaaattaccccatagtaca

SEQ ID NO: 74672 - DNA, 80 bp, synthetic construct
  source 1..80: mol_type = other DNA
aaatgcacaggggcagatggtacaccaggccatatcacctagaactttaaatgcatgggtaaaagtgatagaggaaaagg

SEQ ID NO: 74673 - DNA, 80 bp, synthetic construct
  source 1..80: mol_type = other DNA
aaagataccatcaatgatgaagctgcagaatgggacaggctacatccagtacaagcaggacccgttccaccaggccagat

SEQ ID NO: 74674 - DNA, 80 bp, synthetic construct
  source 1..80: mol_type = other DNA
acagtgggggggcatcaggcagctatgcagatgttaaaagataccatcaatgatgaagctgcagaatgggacaggctaca

SEQ ID NO: 74675 - DNA, 80 bp, synthetic construct
  source 1..80: mol_type = other DNA
tccagtacaagcaggacccgttccaccaggccagatgagggaaccaaggggaagtgacataccaggatccaccagtaccc

SEQ ID NO: 74676 - DNA, 80 bp, synthetic construct
  source 1..80: mol_type = other DNA
ttcaggaacagatagggtggatgaccagcaacccacctatcccagtgggagaaatttataaaaggtggataattttgggg

SEQ ID NO: 74677 - DNA, 80 bp, synthetic construct
  source 1..80: mol_type = other DNA
ctaaataagatagtaagaatgtatagccctgttagcattttggatataagacaagggccaaaagaaccctttagagatta

SEQ ID NO: 74678 - DNA, 80 bp, synthetic construct
  source 1..80: mol_type = other DNA
tgtagatagattctttaaagctcttagagctgagcaagctacacaggatgtaaaaaattggatgacagaaaccttgttgg

SEQ ID NO: 74679 - DNA, 80 bp, synthetic construct
  source 1..80: mol_type = other DNA
tccaaaatgcgaatccagattgtaagaccattttaaaaggattaggacaaggggcttcattggaagaaatgatgacagca

SEQ ID NO: 74680 - DNA, 80 bp, synthetic construct
  source 1..80: mol_type = other DNA
tgtcagggagtgggaggacccggacataaagcaagagttttggctgaagcaatgagccaagtacagaatacaaatgtaat

SEQ ID NO: 74681 - DNA, 80 bp, synthetic construct
  source 1..80: mol_type = other DNA
gatgcagagaggcaattttagaggcccaaaaagagtaattaaatgttttaactgtggcaaagaaggacacttagccagaa

SEQ ID NO: 74682 - DNA, 80 bp, synthetic construct
  source 1..80: mol_type = other DNA
attgcagagcccctagaaaaaagggctgttggaaatgtggacaggaaggacaccaaatgaaagactgcactgaaagacag

SEQ ID NO: 74683 - DNA, 80 bp, synthetic construct
  source 1..80: mol_type = other DNA
gctaattttttagggaaaatctggccttcccacaaggggaggccaggaaactttcctcagaacaggatagagccaacagc

SEQ ID NO: 74684 - DNA, 80 bp, synthetic construct
  source 1..80: mol_type = other DNA
tccaccagcagagaactatgggatgggagaagggacaaccccctccccgaagcaggagccaagagagagggaacagaatc

SEQ ID NO: 74685 - DNA, 80 bp, synthetic construct
  source 1..80: mol_type = other DNA
aactgaggtagaagaagccaataaaggagagaacaacagcctgctacaccctctgagcctacatggaatggatgatagcg

SEQ ID NO: 74686 - DNA, 80 bp, synthetic construct
  source 1..80: mol_type = other DNA
attggaggttttatcaaagtaagacagtatgatcaagtaaccatagacatctgtggacatagggctataggtacagtatt

SEQ ID NO: 74687 - DNA, 80 bp, synthetic construct
  source 1..80: mol_type = other DNA
ataaaagcattaacagagatatgcaacgagatggaaaaggaaggaaaaatttcaaaaattgggccagaaaatccatacaa

SEQ ID NO: 74688 - DNA, 80 bp, synthetic construct
  source 1..80: mol_type = other DNA
gtgggtgatgcctacttttcagttcccttagacaaagaatttaggaagtatactgcattcaccatacccagtataaacaa

SEQ ID NO: 74689 - DNA, 80 bp, synthetic construct
  source 1..80: mol_type = other DNA
tgagacaccaggggttaggtatcagtataatgtgcttccacaaggatggaaaggatcaccgtcaatatttcaggctagca

SEQ ID NO: 74690 - DNA, 80 bp, synthetic construct
  source 1..80: mol_type = other DNA
agggagaagtattaatgtggaagtttgacagttcactagcaagaagacatgtagcaagagagctgcatccggagttctac

SEQ ID NO: 74691 - DNA, 80 bp, synthetic construct
  source 1..80: mol_type = other DNA
tctgatttagagatagggcaacataggacaaaaatagaggagttgagagatcatttattaaaatggggatttacaacacc

SEQ ID NO: 74692 - DNA, 80 bp, synthetic construct
  source 1..80: mol_type = other DNA
acagggaaatatgcaaaaaagaggtctacccacactaatgatgtaagacaattaacagaagtagtgcaaaaagtggtcac

SEQ ID NO: 74693 - DNA, 80 bp, synthetic construct
  source 1..80: mol_type = other DNA
agagagcatagtaatatggggaaagactcctaaatttagactacccatacagaaagaaacatgggatacatggtggacgg

SEQ ID NO: 74694 - DNA, 80 bp, synthetic construct
  source 1..80: mol_type = other DNA
aaggaacccatagcaggagcagaaacttactatgtagatggagctgctaatagggagagtaaattgggaaaggcaggata

SEQ ID NO: 74695 - DNA, 80 bp, synthetic construct
  source 1..80: mol_type = other DNA
cgtcactgacagaggaagacaaaaaattatctccctaactgatacaactaatcaaaagactgaattacatgcaatatatc

SEQ ID NO: 74696 - DNA, 80 bp, synthetic construct
  source 1..80: mol_type = other DNA
gacaggagtgagtcagagttagtcaatcagataatagaaaaattaatagaaaaggaaaaggtgtacctgtcatgggtgcc

SEQ ID NO: 74697 - DNA, 80 bp, synthetic construct
  source 1..80: mol_type = other DNA
aaggtgaaggggcagtagtaatacaggacaatagtgagataaaggtagtaccaagaagaaaagcaaagatcattcggaat

SEQ ID NO: 74698 - DNA, 80 bp, synthetic construct
  source 1..80: mol_type = other DNA
atcatatgtatatttcaaagaaagcccaaggatggttttatagacatcattatgaaagtaggcatccaaaagtaagttca

SEQ ID NO: 74699 - DNA, 80 bp, synthetic construct
  source 1..80: mol_type = other DNA
gaagtacatatcccaatacaggatggtagattaatagttagaacatactggggtctacagccaggagaaaaggaatggca

SEQ ID NO: 74700 - DNA, 80 bp, synthetic construct
  source 1..80: mol_type = other DNA
gttgggtcatggggtcgctatagaatggagacagagaaaatatagcacacaagtagaccctgacctagctgaccaactaa

SEQ ID NO: 74701 - DNA, 80 bp, synthetic construct
  source 1..80: mol_type = other DNA
gaatatcaaacaggacataataaggtagggtctctgcaatatttggcattgaaagcattagtagaaccaagaagagtaaa

SEQ ID NO: 74702 - DNA, 80 bp, synthetic construct
  source 1..80: mol_type = other DNA
gcttaggacaacatatctatggaacctatggggacacttgggtaggagttgaagctatagtgagaattttgcaacaacta

SEQ ID NO: 74703 - DNA, 80 bp, synthetic construct
  source 1..80: mol_type = other DNA
tagatcctaaactagagccctggaaccatccgggaagtcagcctaaaactgcttgcaacaagtgccattgtaaagtatgt

SEQ ID NO: 74704 - DNA, 80 bp, synthetic construct
  source 1..80: mol_type = other DNA
tgctatcattgccaagtgtgctttattaccaaaggcttaggcatatcctatggcaggaagaagcggagatcccgacgagg

SEQ ID NO: 74705 - DNA, 80 bp, synthetic construct
  source 1..80: mol_type = other DNA
aacttctcagaacaataaggatcatcaaaatcctgtaccagagcagtaagtagctatcatatgtaatgccacctttggac

SEQ ID NO: 74706 - DNA, 80 bp, synthetic construct
  source 1..80: mol_type = other DNA
atcgctgcaatagtaggattaatagtagcattaattttagcaataattgtgtggtctatagtattaatagaatatagaaa

SEQ ID NO: 74707 - DNA, 80 bp, synthetic construct
  source 1..80: mol_type = other DNA
gggacacagaggaactgtcagcacttgtggaaatggggaatcataatccttggggttataatgttttctagtgccaactt

SEQ ID NO: 74708 - DNA, 80 bp, synthetic construct
  source 1..80: mol_type = other DNA
tgcccgtctgttgtttgactctggtaactagagatccctcagatcacttttaggcagagtaaaaatctctagcagtggcg

SEQ ID NO: 74709 - DNA, 80 bp, synthetic construct
  source 1..80: mol_type = other DNA
atgatacagaagtgcataatgtctgggctacccatgcctgtgtacccacagaccctaacccacaagaagtaaatttgcct

SEQ ID NO: 74710 - DNA, 80 bp, synthetic construct
  source 1..80: mol_type = other DNA
aatgtgacagaaaattttaacatgtggaaaaataatatggtagagcagatgcatacagatataatcagcttatgggatca

SEQ ID NO: 74711 - DNA, 80 bp, synthetic construct
  source 1..80: mol_type = other DNA
aagcctaaagccatgtgtaaagttaacccctctctgtgtcactttaaattgtaacaactacggcaacacaaccgcaaccg

SEQ ID NO: 74712 - DNA, 80 bp, synthetic construct
  source 1..80: mol_type = other DNA
aaatgaatggagaaataaaaaactgctctttcagtatgaccacagtactaagagataagaaagagaaggtacatgctctt

SEQ ID NO: 74713 - DNA, 80 bp, synthetic construct
  source 1..80: mol_type = other DNA
ttttataaagtagatatagtgtcaattgatggtaaaaataatgctaatggtagtggtgagtatagactaataaattgtaa

SEQ ID NO: 74714 - DNA, 80 bp, synthetic construct
  source 1..80: mol_type = other DNA
tacctcagccattacacaggcttgtccaaaggtatcctttgacccaattcccatacattattgtgcaccagctggctttg

SEQ ID NO: 74715 - DNA, 80 bp, synthetic construct
  source 1..80: mol_type = other DNA
caattctaaagtgtaacgatgagaattacaatggaacagggcaatgcagaaatgtcagctcagtacaatgcacacatgga

SEQ ID NO: 74716 - DNA, 80 bp, synthetic construct
  source 1..80: mol_type = other DNA
atcaagccagtggtatcaactcaactgctgctaaatggcagtctagcagaaaaagaggtaaaggttaggtctgagaattt

SEQ ID NO: 74717 - DNA, 80 bp, synthetic construct
  source 1..80: mol_type = other DNA
cacaaacaatgccaaaaacataatagtacagcttgataagcctgtaaatattacctgtaccagaccaggcaacaatagaa

SEQ ID NO: 74718 - DNA, 80 bp, synthetic construct
  source 1..80: mol_type = other DNA
ggaagagtatacatttggcacaagggcaaacatggtatgcaacaggtgcaataacaggagatataagaagagctcattgt

SEQ ID NO: 74719 - DNA, 80 bp, synthetic construct
  source 1..80: mol_type = other DNA
aacatcagtaaaacagattggaacatgactttgcaaaaggtagctacagaattaagaaaacacttccctaataaaacaat

SEQ ID NO: 74720 - DNA, 80 bp, synthetic construct
  source 1..80: mol_type = other DNA
tacctttactcagtcctcaggaggggacccagaaattacaatgcatagtttcaattgtagaggagagtttttctattgtg

SEQ ID NO: 74721 - DNA, 80 bp, synthetic construct
  source 1..80: mol_type = other DNA
atacatcaggactgtttaatagcagttggccaattaatagcagctggccaactaataacagtgagacaaatgaaacaata

SEQ ID NO: 74722 - DNA, 80 bp, synthetic construct
  source 1..80: mol_type = other DNA
acactcccatgcaggataaaacaaattgtaaacatgtggcaaggagtaggacaagcaatgtatgcccctcctatcgaagg

SEQ ID NO: 74723 - DNA, 80 bp, synthetic construct
  source 1..80: mol_type = other DNA
agagatacagtgtatatcaaatattacaggaataatattgacaagagatgggggaaataacagtaacactgaaatcttca

SEQ ID NO: 74724 - DNA, 80 bp, synthetic construct
  source 1..80: mol_type = other DNA
gacctggaggaggaaatatgaaggacaattggagaagtgaattatataagtataaggtagttcaaattgaaccgctggga

SEQ ID NO: 74725 - DNA, 80 bp, synthetic construct
  source 1..80: mol_type = other DNA
gtagcacccagcgaggcaaggagaagagtggtgcagagagaaaaaagagcagtaggaatggcaactcttttccttgggtt

SEQ ID NO: 74726 - DNA, 80 bp, synthetic construct
  source 1..80: mol_type = other DNA
cttgggaacagcaggaagcactatgggcgcagcgtcaataacgctgacggtacaggccagaaaattattgtctggcatag

SEQ ID NO: 74727 - DNA, 80 bp, synthetic construct
  source 1..80: mol_type = other DNA
tgcaacagcaaagcaatttgctgaaggctatagaagctcaacagcatatgttgaagctcacagtctggggcattaaacag

SEQ ID NO: 74728 - DNA, 80 bp, synthetic construct
  source 1..80: mol_type = other DNA
ctccaggcaagagtcctggctgtggaaagatacctaagggaccagcaactcctgggaatttggggctgctctggaaaact

SEQ ID NO: 74729 - DNA, 80 bp, synthetic construct
  source 1..80: mol_type = other DNA
catctgcaccactaatgtaccttggaactctagttggagtaacaaatcttttgatgatatttggggaaacatgacctggt

SEQ ID NO: 74730 - DNA, 80 bp, synthetic construct
  source 1..80: mol_type = other DNA
tgcaatgggacaaagaaattagcaattacacagagacaatctataggctgcttgaaacagcgcagaaccagcaagaaaag

SEQ ID NO: 74731 - DNA, 80 bp, synthetic construct
  source 1..80: mol_type = other DNA
aatgaacaagacttattggcattggaccaatgggcaagcctgtggaattggtttagcatatcaaattggctttggtatat

SEQ ID NO: 74732 - DNA, 80 bp, synthetic construct
  source 1..80: mol_type = other DNA
aaaaatatttataatgatagtaggaggcttgataggcttaagaatagtttgtgctataatgactgtagtaaatagagtta

SEQ ID NO: 74733 - DNA, 80 bp, synthetic construct
  source 1..80: mol_type = other DNA
ggcagggatactcacctttgtctttccagacccctaccccatacccagaggaagtcgccaggcccggaggaatcgaagaa

SEQ ID NO: 74734 - DNA, 80 bp, synthetic construct
  source 1..80: mol_type = other DNA
ggcggtggagagcaaggcagaaacagatcgattcgattagtgaacggattcttagcgctcatctgggaggacctccggaa

SEQ ID NO: 74735 - DNA, 80 bp, synthetic construct
  source 1..80: mol_type = other DNA
cctgtgcctcttcagttaccaccgcttgagagactcactcttgattgcagcgaggactgtggaacttctgggacaataca

SEQ ID NO: 74736 - DNA, 80 bp, synthetic construct
  source 1..80: mol_type = other DNA
gcctcaagggactgagactggggtgggaaggcctcaaatacctgtggaatctcctgatctactggggtcaggaactaaag

SEQ ID NO: 74737 - DNA, 80 bp, synthetic construct
  source 1..80: mol_type = other DNA
aagagtgctgttagcttgcttgataccacagcagtagcagtagctgagtggacagatagggttatagaattagcacaaag

SEQ ID NO: 74738 - DNA, 80 bp, synthetic construct
  source 1..80: mol_type = other DNA
ggaggagagagatgggtgcgagagcgtcagtattaagtgggggaaaattagattcatgggagaaaattcggctaaggcca

SEQ ID NO: 74739 - DNA, 80 bp, synthetic construct
  source 1..80: mol_type = other DNA
agtttttagagctgttatccacatacctaggagaataagacagggcttcgaaagggctttgctataaaatgggaggcaaa

SEQ ID NO: 74740 - DNA, 80 bp, synthetic construct
  source 1..80: mol_type = other DNA
tggtcaaaaagcagcatagtgggatggcctgctgtcagggaaagaatgagaagagctattccagcaccagcagcagaagg

SEQ ID NO: 74741 - DNA, 80 bp, synthetic construct
  source 1..80: mol_type = other DNA
agtgggagcagtgtctagagatttagagaaacatggagcaatcacaagcagtaatacaccagatactaatcctgattgtg

SEQ ID NO: 74742 - DNA, 80 bp, synthetic construct
  source 1..80: mol_type = other DNA
ggtaggcttcccagtcagaccacaggtacctgtgagaccaatgacctataaggcagcctttgatcttggcttctttttaa

SEQ ID NO: 74743 - DNA, 80 bp, synthetic construct
  source 1..80: mol_type = other DNA
cctgggtacaagcacaagaggaggaggaggaggtaggcttcccagtcagaccacaggtacctgtgagaccaatgacctat

SEQ ID NO: 74744 - DNA, 80 bp, synthetic construct
  source 1..80: mol_type = other DNA
aaggcagcctttgatcttggcttctttttaaaagaaaaggggggactggatgggttaatttactctcagaaaaggaaaga

SEQ ID NO: 74745 - DNA, 80 bp, synthetic construct
  source 1..80: mol_type = other DNA
catccttgacctgtgggtctataacacacaaggattcttccctgactggcagaattacacaccagggccaggggttagat

SEQ ID NO: 74746 - DNA, 80 bp, synthetic construct
  source 1..80: mol_type = other DNA
acccactaacatttggatggtgcttcaagctagtaccagttgatccaactgaggtagaagaagccaataaaggagagaac

SEQ ID NO: 74747 - DNA, 80 bp, synthetic construct
  source 1..80: mol_type = other DNA
aacagcctgctacaccctctgagcctacatggaatggatgatagcgagggagaagtattaatgtggaagtttgacagttc

SEQ ID NO: 74748 - DNA, 80 bp, synthetic construct
  source 1..80: mol_type = other DNA
actagcaagaagacatgtagcaagagagctgcatccggagttctacaaagactgctgacacagaagttgctgacagggac

SEQ ID NO: 74749 - DNA, 80 bp, synthetic construct
  source 1..80: mol_type = other DNA
tttccgctggggactttccaggggaggtgtggtttgggcggagttggggagtggctaaccctcagaagctgcatataagc

SEQ ID NO: 74750 - DNA, 80 bp, synthetic construct
  source 1..80: mol_type = other DNA
gggggaaagaaacagtataggatgaaacatttagtatgggcaagcagggagctggacagattcgcacttaaccccagcct

SEQ ID NO: 74751 - DNA, 80 bp, synthetic construct
  source 1..80: mol_type = other DNA
agctgcttctcgcctgtactgggtctctcttgttagatcaggtcgagcctgggagctctctgactagcaagggaacccac

SEQ ID NO: 74752 - DNA, 80 bp, synthetic construct
  source 1..80: mol_type = other DNA
tgcttaagcctcaataaagcttgccttgagtgcttaaagtagtgtgtgcccgtctgttgtttgactctggtaactagaga

SEQ ID NO: 74753 - DNA, 80 bp, synthetic construct
  source 1..80: mol_type = other DNA
agaggaaatgcaaaacaaaaaagcacagcaggcagcagataacacaggaagcagcagtaaggtcagtcaaaattatccta

SEQ ID NO: 74754 - DNA, 80 bp, synthetic construct
  source 1..80: mol_type = other DNA
acatattggtgcagggaggcaattttaaaggccagagaggaaaaattattaaatgtttcaactgtggcaaagaaggacac

SEQ ID NO: 74755 - DNA, 80 bp, synthetic construct
  source 1..80: mol_type = other DNA
ctagccagaaattgcaaggcccccagaaagaagggctgttggaaatgtggaagggaaggacaccaaatgaaagattgcac

SEQ ID NO: 74756 - DNA, 80 bp, synthetic construct
  source 1..80: mol_type = other DNA
tgagagacaggctaattttttagggagattctggcctcccaacaaggggaggccagggaattttcctcagagcaggttag

SEQ ID NO: 74757 - DNA, 80 bp, synthetic construct
  source 1..80: mol_type = other DNA
tgccaacagctccaccagcagagaacttgggaatggaagaggggacaaccccctccccgaaacagaaagagggagaacag

SEQ ID NO: 74758 - DNA, 80 bp, synthetic construct
  source 1..80: mol_type = other DNA
tctcctcctctaatttccctcaaatcactctttggcaacgacccctcgtcacaataaaaatagaaggacaactaagagaa

SEQ ID NO: 74759 - DNA, 80 bp, synthetic construct
  source 1..80: mol_type = other DNA
agctgaggtagaagaagctaataagggagaaaacaacagcctactgcatgctatgagcctacatggaatggaggatagtg

SEQ ID NO: 74760 - DNA, 80 bp, synthetic construct
  source 1..80: mol_type = other DNA
agtcctgttgaaactgtaccagtaaaactaaagccagggatggatggcccaaaggttaaacaatggccactgacagaaga

SEQ ID NO: 74761 - DNA, 80 bp, synthetic construct
  source 1..80: mol_type = other DNA
aaaaataaaagcaataacagaaatatgtaatgaaatggaaaaggaaggaaaaatttcaaaagttgggccagaaaatccat

SEQ ID NO: 74762 - DNA, 80 bp, synthetic construct
  source 1..80: mol_type = other DNA
acaacactccaatatttgctataaagaaaaaagacagcactaaatggagaaaattagtagattttagagagctcaataaa

SEQ ID NO: 74763 - DNA, 80 bp, synthetic construct
  source 1..80: mol_type = other DNA
aaggagaagtgctcatgtggaagtttgacagtcaactagcacggaagcacacagcccgcgagctgcatccggagtactac

SEQ ID NO: 74764 - DNA, 80 bp, synthetic construct
  source 1..80: mol_type = other DNA
cctataaaactgccagaaaaagaaaactggactgtcaatgatattcagaaattagtaggaaaactaaattgggcaagtca

SEQ ID NO: 74765 - DNA, 80 bp, synthetic construct
  source 1..80: mol_type = other DNA
aaagacttaatagcagaaatacaaaaacagggacagggacaatggacatatcaaatttatcaagagccatttaaaaatct

SEQ ID NO: 74766 - DNA, 80 bp, synthetic construct
  source 1..80: mol_type = other DNA
gaaaacagggaaatatgcaaaaaggaagtctgctcacactaatgatgttaaacaattagcagaagtggtgcaaaaagtga

SEQ ID NO: 74767 - DNA, 80 bp, synthetic construct
  source 1..80: mol_type = other DNA
ggtatgttactgacaaaggaagacaaaaggttgtcaccttaactgagacaaccaatcaaaagactgaattacatgcaata

SEQ ID NO: 74768 - DNA, 80 bp, synthetic construct
  source 1..80: mol_type = other DNA
tatctagctttgcaagattcaggactagaagtaaatatagtaacagactcacagtatgcattaggaattattcaggcaca

SEQ ID NO: 74769 - DNA, 80 bp, synthetic construct
  source 1..80: mol_type = other DNA
accagacaggagtgaatcagaaatagttaatcaaataatagaaaaattaatagagaaggaaaaagtgtacctgtcatggg

SEQ ID NO: 74770 - DNA, 80 bp, synthetic construct
  source 1..80: mol_type = other DNA
taccagcacataaagggattggaggaaatgaacaaatagataaattagtcagtagtggaatcagaaaagtgctattttta

SEQ ID NO: 74771 - DNA, 80 bp, synthetic construct
  source 1..80: mol_type = other DNA
agtaagggtggtacatacagacaatggcagcaatttcaccagcgctgcagtcaaggcagcctgttggtgggcaaatatcc

SEQ ID NO: 74772 - DNA, 80 bp, synthetic construct
  source 1..80: mol_type = other DNA
aaatatcatatgtataggtcaaagaaagccaaagggtggctgtatagacatcactatgaaagcaggcatccaaaagtaag

SEQ ID NO: 74773 - DNA, 80 bp, synthetic construct
  source 1..80: mol_type = other DNA
ttcagaagtacacatcccactaggggatgctagactagtaatcagaacatattgggggctacagacaggagaaagagaat

SEQ ID NO: 74774 - DNA, 80 bp, synthetic construct
  source 1..80: mol_type = other DNA
ggcatttgggtcatggggtctctatagaatggagactaagaagatatagcacacaagtagatcctggcctagcagaccaa

SEQ ID NO: 74775 - DNA, 80 bp, synthetic construct
  source 1..80: mol_type = other DNA
ctaattcacctgcaatattttgaatgtttttcagactctgccataaggaaagccatagtaggacagataattattcataa

SEQ ID NO: 74776 - DNA, 80 bp, synthetic construct
  source 1..80: mol_type = other DNA
ccggtagaccgtaacatagacccctggaaccatccgggaagtcagcctaaaactccttgtaacaaatgctattgtaaaca

SEQ ID NO: 74777 - DNA, 80 bp, synthetic construct
  source 1..80: mol_type = other DNA
gaggcacttctcggagcaatcaggatcatcaaaatcctctaccaaagcagtaagtagtattgtaatgacccccttacaaa

SEQ ID NO: 74778 - DNA, 80 bp, synthetic construct
  source 1..80: mol_type = other DNA
tctatgcaatagtaggactaatagtagcactaatcctagcaatagttgtgtggtctatagtgttagtagaatataagaag

SEQ ID NO: 74779 - DNA, 80 bp, synthetic construct
  source 1..80: mol_type = other DNA
atactaaagcaaaggaagatagacaggttacttgatagaataagagacagagcagaagacagtggcaatgagagtgatgg

SEQ ID NO: 74780 - DNA, 80 bp, synthetic construct
  source 1..80: mol_type = other DNA
ggacacggaagaactgtcagcacttgttgaaatgggggaccataatccttggggttataatgttttgtaatgctgcagac

SEQ ID NO: 74781 - DNA, 80 bp, synthetic construct
  source 1..80: mol_type = other DNA
gatcaaagcttaaagccatgtgtaaagttaacccctctctgtgtcactttaaactgtactgacatcacgactaatagaac

SEQ ID NO: 74782 - DNA, 80 bp, synthetic construct
  source 1..80: mol_type = other DNA
tagcagaaaccatactgacataaacagggaaatgagaaactgctctttcaatatgaccacagtactaagagataagcaag

SEQ ID NO: 74783 - DNA, 80 bp, synthetic construct
  source 1..80: mol_type = other DNA
agaaagtacatgctcttttttatagattagatatagtactaatgaatggtaatgatagtaagaatagtagtggggaatat

SEQ ID NO: 74784 - DNA, 80 bp, synthetic construct
  source 1..80: mol_type = other DNA
agattgataaattgtaatacctcagccataacacaggcttgtccaaaggtatcctttgaaccaattcccatacattattg

SEQ ID NO: 74785 - DNA, 80 bp, synthetic construct
  source 1..80: mol_type = other DNA
tgccccagcaggttttgcaattctaaagtgtagagataaggattttaatggaacggggctatgcacaaatgtcagcacag

SEQ ID NO: 74786 - DNA, 80 bp, synthetic construct
  source 1..80: mol_type = other DNA
tacaatgcacacatgggattaagccagtggtatcaactcaactgctattaaatggcagtctagcagaaggaggagtaaag

SEQ ID NO: 74787 - DNA, 80 bp, synthetic construct
  source 1..80: mol_type = other DNA
gttaggtctgaaaatttcacaaacaatgccaaaaacataatagtacagtttgataaggctgtagtaattaactgtagcag

SEQ ID NO: 74788 - DNA, 80 bp, synthetic construct
  source 1..80: mol_type = other DNA
acccaacaacaatacaagaaaaagtatacatctaggaccaggacaatcattctatgcaacaggtgatataataggagaca

SEQ ID NO: 74789 - DNA, 80 bp, synthetic construct
  source 1..80: mol_type = other DNA
taagacaagctgcttgcaacatcagtagaaaagattgggataaagctttgagcaaggtagctaaacagttaagtgatcac

SEQ ID NO: 74790 - DNA, 80 bp, synthetic construct
  source 1..80: mol_type = other DNA
ttccctaataaaagtatagcctttaatcaatcctcaggaggggacctagaaattacaatgcatagtttcaattgcagagg

SEQ ID NO: 74791 - DNA, 80 bp, synthetic construct
  source 1..80: mol_type = other DNA
agagtttttctattgtaacacatcaggcctgtttaatagaacttggaaagatggcaattggaccacccaggaaaatggga

SEQ ID NO: 74792 - DNA, 80 bp, synthetic construct
  source 1..80: mol_type = other DNA
cgcatgtggcaagaagtaggacaagcaatgtatgcccctcctgtcgcaggaatgatacagtgtatatcaaatattacagg

SEQ ID NO: 74793 - DNA, 80 bp, synthetic construct
  source 1..80: mol_type = other DNA
caaatgaaaacataacactcccatgcaggataaaacaaattgtacgcatgtggcaagaagtaggacaagcaatgtatgcc

SEQ ID NO: 74794 - DNA, 80 bp, synthetic construct
  source 1..80: mol_type = other DNA
cctcctgtcgcaggaatgatacagtgtatatcaaatattacaggattaatattgacaagagatggggggaaagataagaa

SEQ ID NO: 74795 - DNA, 80 bp, synthetic construct
  source 1..80: mol_type = other DNA
tgatactgagatcttcagacctggaggaggaaatatgaaagacaattggagaagtgaattatataagtataaagtagtac

SEQ ID NO: 74796 - DNA, 80 bp, synthetic construct
  source 1..80: mol_type = other DNA
aaattgagccactaggattagcacctaccaaggcaaggagaagagtggtggagagagaaaaaagagcagttggaatggga

SEQ ID NO: 74797 - DNA, 80 bp, synthetic construct
  source 1..80: mol_type = other DNA
gctcttttccttgggttcttgggagcagccggaagcactatgggcgcggcgtcaataacgctgacggtacaggccagaca

SEQ ID NO: 74798 - DNA, 80 bp, synthetic construct
  source 1..80: mol_type = other DNA
attgctgtctggcatagtgcaacagcaaagcaatttgctgagggctatagaagctcaacagcatatgttgaagctcacag

SEQ ID NO: 74799 - DNA, 80 bp, synthetic construct
  source 1..80: mol_type = other DNA
tctggggcattaaacagctccaggcaagagtcctggctgtggaaagatacctaaaggatcagcagctcctagggatttgg

SEQ ID NO: 74800 - DNA, 80 bp, synthetic construct
  source 1..80: mol_type = other DNA
ggctgctctgggaaaatcatctgcaccactaatgtgccttggaacactagttggagtaataaatcttggaatgaaatttg

SEQ ID NO: 74801 - DNA, 80 bp, synthetic construct
  source 1..80: mol_type = other DNA
ggacaacatgacctggttgcagtgggataaagaaattaacaattacacaaacacaatatataatctgcttgaagttgcgc

SEQ ID NO: 74802 - DNA, 80 bp, synthetic construct
  source 1..80: mol_type = other DNA
agaaccaacaagaaaagaatgaacaagacttattggcattggatgagtgggcaagcctgtggaattggtttagcatatca

SEQ ID NO: 74803 - DNA, 80 bp, synthetic construct
  source 1..80: mol_type = other DNA
aaatggctgtggtatataaaaatattcataatgatagtaggaggcttaataggcttaagaatagctcttgctgtaataac

SEQ ID NO: 74804 - DNA, 80 bp, synthetic construct
  source 1..80: mol_type = other DNA
tatagtaaatagagttaggcagggatactcacctttgtcgttccagaccctcttcccaagcccagagggagtcgccaggc

SEQ ID NO: 74805 - DNA, 80 bp, synthetic construct
  source 1..80: mol_type = other DNA
ccggaggaatcgaagaagaaggtggagagcaagacagaacaagatcgattcgattagtgaacggattcttagcacttgcc

SEQ ID NO: 74806 - DNA, 80 bp, synthetic construct
  source 1..80: mol_type = other DNA
tgggaggacctccggaacctgtgcctctgcagctaccaccacttgagagactttctcttgattgcagcgaggactttgga

SEQ ID NO: 74807 - DNA, 80 bp, synthetic construct
  source 1..80: mol_type = other DNA
aattctgggacacagcagcctcaagggactgagacgggggtgggaaggcctcaaatatctgtggaatctcctggcctatt

SEQ ID NO: 74808 - DNA, 80 bp, synthetic construct
  source 1..80: mol_type = other DNA
gggggcaggaactgaagaatagtgctattaacttgcttaataccatagcagtagcagtagctgagtgcacagatagggtt

SEQ ID NO: 74809 - DNA, 80 bp, synthetic construct
  source 1..80: mol_type = other DNA
aggagagagatgggtgcgagagcgtcaatattaagcggaggacaattagatagatgggagaaaattaggctaagaccagg

SEQ ID NO: 74810 - DNA, 80 bp, synthetic construct
  source 1..80: mol_type = other DNA
atagaaatagcacaaagaggtggtagagctattctccacatacctagaagaataagacagggcttagagagggctttgca

SEQ ID NO: 74811 - DNA, 80 bp, synthetic construct
  source 1..80: mol_type = other DNA
gatggcctgaagtcagggaaagaatgagaaggactcctccagcagcaacaggagtgggagcagtgtctagagatttagat

SEQ ID NO: 74812 - DNA, 80 bp, synthetic construct
  source 1..80: mol_type = other DNA
ataaaatggggggcaagtggtcaaaaagcagcgtagtgggatggcctgaagtcagggaaagaatgagaaggactcctcca

SEQ ID NO: 74813 - DNA, 80 bp, synthetic construct
  source 1..80: mol_type = other DNA
gcagcaacaggagtgggagcagtgtctagagatttagataaacatggagcagtcacaagcagtaatacatcttttactaa

SEQ ID NO: 74814 - DNA, 80 bp, synthetic construct
  source 1..80: mol_type = other DNA
gggaggtaggctttccagtcagaccacaggtacctttaagaccaatgacttataaggcagcctttgatctcggcttcttt

SEQ ID NO: 74815 - DNA, 80 bp, synthetic construct
  source 1..80: mol_type = other DNA
tcctgattgtgcttggttagaagcacaagaggaagagggggaggtaggctttccagtcagaccacaggtacctttaagac

SEQ ID NO: 74816 - DNA, 80 bp, synthetic construct
  source 1..80: mol_type = other DNA
caatgacttataaggcagcctttgatctcggcttctttttaaaagaaaaggggggactggatgggctaatttactcccag

SEQ ID NO: 74817 - DNA, 80 bp, synthetic construct
  source 1..80: mol_type = other DNA
caaagaaaagacatccttgacctgtgggtctataatacacaaggcttcttccctgactggcagaattacacaccagggcc

SEQ ID NO: 74818 - DNA, 80 bp, synthetic construct
  source 1..80: mol_type = other DNA
agggattagatacccactaacatttgggtggtgcttcaagctagtaccagttgatccagctgaggtagaagaagctaata

SEQ ID NO: 74819 - DNA, 80 bp, synthetic construct
  source 1..80: mol_type = other DNA
agggagaaaacaacagcctactgcatgctatgagcctacatggaatggaggatagtgaaggagaagtgctcatgtggaag

SEQ ID NO: 74820 - DNA, 80 bp, synthetic construct
  source 1..80: mol_type = other DNA
tttgacagtcaactagcacggaagcacacagcccgcgagctgcatccggagtactacaaagactgctgacacagaagttg

SEQ ID NO: 74821 - DNA, 80 bp, synthetic construct
  source 1..80: mol_type = other DNA
ctgacagggactttccgcctgggactttccaggggaggtgtggtttgggcggagttggggagtggctaaccctcagatgc

SEQ ID NO: 74822 - DNA, 80 bp, synthetic construct
  source 1..80: mol_type = other DNA
tgcatataagcagctgcttctcgcctgtactgggtctctcttgttagaccagatcgagcctgggagctctctgactagca

SEQ ID NO: 74823 - DNA, 80 bp, synthetic construct
  source 1..80: mol_type = other DNA
agggaacccactgcttaagcctcaataaagcttgccttgagtgcttcaagtggtgtgtgcccgtctgttgtgtgactctg

SEQ ID NO: 74824 - DNA, 80 bp, synthetic construct
  source 1..80: mol_type = other DNA
gccttttagaaacagcagaaggatgtcaacaaatactaatacagttacaaccagctattcagacaggaacagaagagatt

SEQ ID NO: 74825 - DNA, 80 bp, synthetic construct
  source 1..80: mol_type = other DNA
aaatcattatttaatacaatagcaaccctctactgtgtacatcaaaggatagaggtaaaagacaccaaggaagctttgga

SEQ ID NO: 74826 - DNA, 80 bp, synthetic construct
  source 1..80: mol_type = other DNA
taaaatagaggaaatacaaaacaaaaagaaacagcaggcagcagctgacccagggaacagcagtaaggtcagtcaaaatt

SEQ ID NO: 74827 - DNA, 80 bp, synthetic construct
  source 1..80: mol_type = other DNA
accctatagtgcagaatgcacaagggcagatggtacaccaagccatatcacctaggactttaaatgcatgggtaaaagtg

SEQ ID NO: 74828 - DNA, 80 bp, synthetic construct
  source 1..80: mol_type = other DNA
atagaggaaaaggccttcagcccagaggtgatacccatgtttacagcattatcagaaggagccaccccacaagatttaaa

SEQ ID NO: 74829 - DNA, 80 bp, synthetic construct
  source 1..80: mol_type = other DNA
tactatgctaaacacagtggggggacatcaagcagctatgcaaatgttaaaagataccatcaatgaggaagctgcagaat

SEQ ID NO: 74830 - DNA, 80 bp, synthetic construct
  source 1..80: mol_type = other DNA
gggataggctacatccagcacaggcagggcccattccaccaggccagatgagggaaccaaggggaagtgacatagcagga

SEQ ID NO: 74831 - DNA, 80 bp, synthetic construct
  source 1..80: mol_type = other DNA
gccaccagtacccttcaggaacaaataggatggatgaccagtaatccacctatcccagtgggagaaatttataaaagatg

SEQ ID NO: 74832 - DNA, 80 bp, synthetic construct
  source 1..80: mol_type = other DNA
cctttagagactatgtggatagattctttaaaactcttagagctgagcaagctacacaggaagtaaaaagctggatgaca

SEQ ID NO: 74833 - DNA, 80 bp, synthetic construct
  source 1..80: mol_type = other DNA
gggacccggccataaagcaagagttttggctgaagcaatgagccaagtacaaaatacaaacataatgatgcagagaggca

SEQ ID NO: 74834 - DNA, 80 bp, synthetic construct
  source 1..80: mol_type = other DNA
gatgatgacagcatgccagggagtggggggacccggccataaagcaagagttttggctgaagcaatgagccaagtacaaa

SEQ ID NO: 74835 - DNA, 80 bp, synthetic construct
  source 1..80: mol_type = other DNA
atacaaacataatgatgcagagaggcaattttaagggccagagaagaacaattaaatgtttcaactgtggcaaagaagga

SEQ ID NO: 74836 - DNA, 80 bp, synthetic construct
  source 1..80: mol_type = other DNA
cacctagccagaaattgcagggcccctagaaaaaagggctgttggaaatgtggacaggaaggacaccaaatgaaagattg

SEQ ID NO: 74837 - DNA, 80 bp, synthetic construct
  source 1..80: mol_type = other DNA
cactgaaagacaggctaattttttagggaaaatttggccttcccacaaggggaggccaggaaattttcctcagaacaggt

SEQ ID NO: 74838 - DNA, 80 bp, synthetic construct
  source 1..80: mol_type = other DNA
tagagccaacagccccaccagcagagaactttgggatgggggaagggataaccccctccccaaagccggagctgagagag

SEQ ID NO: 74839 - DNA, 80 bp, synthetic construct
  source 1..80: mol_type = other DNA
agggaacagaatcctccgctagtttccctcaaatcactctttggcaacgacccattgtcacagtaaaaatagaaggacag

SEQ ID NO: 74840 - DNA, 80 bp, synthetic construct
  source 1..80: mol_type = other DNA
acttgatgtagaagaagcttattaagggagagaacaacagcctattgcaccctatgagcctgcatggaatggaggacagt

SEQ ID NO: 74841 - DNA, 80 bp, synthetic construct
  source 1..80: mol_type = other DNA
ctaagagaggctctattagatacaggagcagatgatacagtactagaagacataaatttgacaggaaaatggaaaccaaa

SEQ ID NO: 74842 - DNA, 80 bp, synthetic construct
  source 1..80: mol_type = other DNA
agtaatagggggaattggaggttttatcaaagtaagacagtatgatcaagtaaccatagacatctgtggaaaaaaggcta

SEQ ID NO: 74843 - DNA, 80 bp, synthetic construct
  source 1..80: mol_type = other DNA
taggtacagtattagtgggacctacacctgtcaacataattggaaggaatatgttgactcagattggctgtactttaaat

SEQ ID NO: 74844 - DNA, 80 bp, synthetic construct
  source 1..80: mol_type = other DNA
tttccaattagtcccattgaaactgtaccagtaaaattaaagccaggaatggatgggccaaaggttaaacaatggccatt

SEQ ID NO: 74845 - DNA, 80 bp, synthetic construct
  source 1..80: mol_type = other DNA
gacagaagaaaaaataaaagcattgacagaaatatgtaaagagatggaaaaggaaggaaaaatttcaaaaattgggccag

SEQ ID NO: 74846 - DNA, 80 bp, synthetic construct
  source 1..80: mol_type = other DNA
aaaatccatacaacactccaatatttgctataaagaaaaaagacagcactaaatggagaaaattagtagatttcagagaa

SEQ ID NO: 74847 - DNA, 80 bp, synthetic construct
  source 1..80: mol_type = other DNA
ctcaataaaagaactcaagatttctgggaagttcaattaggaataccacatccagcaggtttaaaaaagaaaaaatcagt

SEQ ID NO: 74848 - DNA, 80 bp, synthetic construct
  source 1..80: mol_type = other DNA
aacagtgctggatgtgggtgatgcatacttttcagttcccttagacaaagaatttagaaagtatactgcattcaccatac

SEQ ID NO: 74849 - DNA, 80 bp, synthetic construct
  source 1..80: mol_type = other DNA
ctagtataaacaatgagacaccaggggtaaggtaccagtacaatgtgcctccacaaggatggaaaggatcaccagcaata

SEQ ID NO: 74850 - DNA, 80 bp, synthetic construct
  source 1..80: mol_type = other DNA
tttcagagtagcatgacaaaaatcttagagcccttcaggtcacagaatccagaaatagttatctaccaatacatggatga

SEQ ID NO: 74851 - DNA, 80 bp, synthetic construct
  source 1..80: mol_type = other DNA
gagggagaagtgttaatgtggaagtttgacagtagcctggcacgtagacatgttgcatatgagctgcatccggagtttta

SEQ ID NO: 74852 - DNA, 80 bp, synthetic construct
  source 1..80: mol_type = other DNA
cttgtatgtaggatctgacttagaaatagggcagcataggaaaaagatagaggagttgagagctcatctattgagctggg

SEQ ID NO: 74853 - DNA, 80 bp, synthetic construct
  source 1..80: mol_type = other DNA
gatttacaacaccagataaaaagcatcagaaggaacctccatttctttggatggggtatgaactccatcctgacaaatgg

SEQ ID NO: 74854 - DNA, 80 bp, synthetic construct
  source 1..80: mol_type = other DNA
acagtccagcctatagtactgccagaaaaagaacactggactgtcaatgatatacagaaattagtgggaaaactcaattg

SEQ ID NO: 74855 - DNA, 80 bp, synthetic construct
  source 1..80: mol_type = other DNA
ggcaagtcagatttatgcagggataaaggtaaggcaactgtgtaaactcctcaggggagccaaagctctaacagacatag

SEQ ID NO: 74856 - DNA, 80 bp, synthetic construct
  source 1..80: mol_type = other DNA
tcacactgactgaagaagcagaattagaattggcagagaacagagagattctaaaagaaccagtacatggggtatattat

SEQ ID NO: 74857 - DNA, 80 bp, synthetic construct
  source 1..80: mol_type = other DNA
gacccatcaaaagacttagtagctgaaatacaaaaacagggaaatgaccagtggacatatcaaatttatcaagagccatt

SEQ ID NO: 74858 - DNA, 80 bp, synthetic construct
  source 1..80: mol_type = other DNA
taaaaatctgaaaacaggaaaatatgcaaaaataaggtctgcccacactaatgatgtaaagcagttaacagaagcagtac

SEQ ID NO: 74859 - DNA, 80 bp, synthetic construct
  source 1..80: mol_type = other DNA
aaaaaatagccatggagtgcatagtaatatggggaaagactcctaaatttagactacccatccaaaaagaaacatgggag

SEQ ID NO: 74860 - DNA, 80 bp, synthetic construct
  source 1..80: mol_type = other DNA
acatggtggatggagtattggcaagccacctggattcctgagtgggagtttgtcaatacccctcctttagtaaaactatg

SEQ ID NO: 74861 - DNA, 80 bp, synthetic construct
  source 1..80: mol_type = other DNA
gtaccagttagaaaaagaacccatagtaggagcagaaactttttatgtagatggggcagctaatagggagactaaactgg

SEQ ID NO: 74862 - DNA, 80 bp, synthetic construct
  source 1..80: mol_type = other DNA
caagaactgaagactgctgacacagaagttgctgacagggactttccacggggactttccaggggaggtgtggtttgggc

SEQ ID NO: 74863 - DNA, 80 bp, synthetic construct
  source 1..80: mol_type = other DNA
gaaaggcaggatacgtcactgatagaggaagacaaaaaattatctccctaactgagacaaccaatcaaaagactgaatta

SEQ ID NO: 74864 - DNA, 80 bp, synthetic construct
  source 1..80: mol_type = other DNA
catgcaatatatctagccttgcaggattcaggatcagaagtaaatgtagtaacagactcacagtatgcattaggaatcat

SEQ ID NO: 74865 - DNA, 80 bp, synthetic construct
  source 1..80: mol_type = other DNA
tcaggcacaaccagacaggagtgagtcagagatagtcaatcaaataatagaaaaactaatagaaaaggaaaaagtatacc

SEQ ID NO: 74866 - DNA, 80 bp, synthetic construct
  source 1..80: mol_type = other DNA
tgtcatgggtacccgcacacaaagggattggaggaaatgaacaaatagataaattagtcagtagtggaatcaggaaagtg

SEQ ID NO: 74867 - DNA, 80 bp, synthetic construct
  source 1..80: mol_type = other DNA
ctatttttagatgggatagataaggctcaagaagaacatgaaagatatcacagtaattggagagcaatggccaatgattt

SEQ ID NO: 74868 - DNA, 80 bp, synthetic construct
  source 1..80: mol_type = other DNA
taatctgccacctgtggtagctaaagaaatagtagccagctgtgataaatgtcagctaaaaggggaagccatgcatggac

SEQ ID NO: 74869 - DNA, 80 bp, synthetic construct
  source 1..80: mol_type = other DNA
aagtagactgtagtccaggggtatggcaactagattgcacacatttagaagggaaagttattctggtagcagcccatgta

SEQ ID NO: 74870 - DNA, 80 bp, synthetic construct
  source 1..80: mol_type = other DNA
gccagtggctatatagaagcagaagttatcccagcagaaacaggacaagagacagcatacttcatattaaaattagcagg

SEQ ID NO: 74871 - DNA, 80 bp, synthetic construct
  source 1..80: mol_type = other DNA
aagatggccagtaacagtaatacatacagacaatggcagcaatttcactagcgctacagtcaaggcagcctgttggtggg

SEQ ID NO: 74872 - DNA, 80 bp, synthetic construct
  source 1..80: mol_type = other DNA
caaatatccaacaggaatttggtattccctacaatccccaaagtcaaggagtagtggaatctatgaataaagaattaaag

SEQ ID NO: 74873 - DNA, 80 bp, synthetic construct
  source 1..80: mol_type = other DNA
aagaaaaggggggattggggggtacagtgcaggggaaagaatagtagacataatagcaacagacatacaaaccaaacaat

SEQ ID NO: 74874 - DNA, 80 bp, synthetic construct
  source 1..80: mol_type = other DNA
tacaaaaacaaattacaaaaattcaaaattttcgggtttattacagggacagcagagacccaatttggaaaggaccggca

SEQ ID NO: 74875 - DNA, 80 bp, synthetic construct
  source 1..80: mol_type = other DNA
aaactactttggaaaggtgaaggggcagtagtaatacaagacaatagtgatataaaggtagtaccaagaagaaaagcaaa

SEQ ID NO: 74876 - DNA, 80 bp, synthetic construct
  source 1..80: mol_type = other DNA
gatcattagggattatggaaaacagatggcaggtgatgattgtgtggcaggtagacaggatgaggattagaacatggcac

SEQ ID NO: 74877 - DNA, 80 bp, synthetic construct
  source 1..80: mol_type = other DNA
agtctagtaaaacatcatatgtatatttcaaagaaagccacaggatggtggtataggcatcactatgaaagcagacatcc

SEQ ID NO: 74878 - DNA, 80 bp, synthetic construct
  source 1..80: mol_type = other DNA
aaaagtatgttcagaagtacacatcccaatagagaatgctagattagtaattagaacatattggggtctacagacaggag

SEQ ID NO: 74879 - DNA, 80 bp, synthetic construct
  source 1..80: mol_type = other DNA
aaaaagagtggcatttgggtcatggggtctcgatagaatggagacagggaagatatagcacacaagtagaccctgaccta

SEQ ID NO: 74880 - DNA, 80 bp, synthetic construct
  source 1..80: mol_type = other DNA
gcagaccaactaattcatctgcaatattttgactgtttttcaggctctgccataaggaaagccatattaggacagataat

SEQ ID NO: 74881 - DNA, 80 bp, synthetic construct
  source 1..80: mol_type = other DNA
ttattataggtgtgaatatccatcaggacatactaaggtagggtctctgcaatatttggcactaaaagcattagtagaac

SEQ ID NO: 74882 - DNA, 80 bp, synthetic construct
  source 1..80: mol_type = other DNA
agatcgagcctgggagctctctgactagcaagggaacccactgcttaagcctcaataaagcttgccttgagtgcttcaag

SEQ ID NO: 74883 - DNA, 80 bp, synthetic construct
  source 1..80: mol_type = other DNA
caaaaagagcaaagccacctttgcctagtgttaggaaactaacagaggatagatggaacaagccccagaagaccaagggc

SEQ ID NO: 74884 - DNA, 80 bp, synthetic construct
  source 1..80: mol_type = other DNA
cacagagagagccatacaatgaatggatgttagaactgttagaagagcttaaacatgaagctgttagacacttccctaga

SEQ ID NO: 74885 - DNA, 80 bp, synthetic construct
  source 1..80: mol_type = other DNA
ccgtggctccatggcttaggacaacatatctatgaaacctatggggacacctgggaaggagttgaagctataataagaat

SEQ ID NO: 74886 - DNA, 80 bp, synthetic construct
  source 1..80: mol_type = other DNA
tttgcaacaactactgttcattcatttcagaattgggtgtcaacatagcagaataggcattactctacagagaagagcaa

SEQ ID NO: 74887 - DNA, 80 bp, synthetic construct
  source 1..80: mol_type = other DNA
gaaatggatccagtagatcctaacctaaagccctggaaccatccgggaagtcagcctaaaacagcttgtaacaagtgcta

SEQ ID NO: 74888 - DNA, 80 bp, synthetic construct
  source 1..80: mol_type = other DNA
ttgtaaagtgtgttgctatcattgccagctttgctttactaccaaaggcttaggcatatcctatggcaggaagaagtgga

SEQ ID NO: 74889 - DNA, 80 bp, synthetic construct
  source 1..80: mol_type = other DNA
gaccccgacgaggaactcctaagaacagtaaggatcatcaagatcctgtaccaaagcagtaagtaataaatagtatatgt

SEQ ID NO: 74890 - DNA, 80 bp, synthetic construct
  source 1..80: mol_type = other DNA
aatgaattatttgataataacaatagtagcatatgtagtagcaataatcatagcaatagttgtgtggaccatagcattta

SEQ ID NO: 74891 - DNA, 80 bp, synthetic construct
  source 1..80: mol_type = other DNA
tagaatataagaagtggttaaaacaaaaaagaatagactgcttagtggatagaataagggaaagagcagaagacagtggc

SEQ ID NO: 74892 - DNA, 80 bp, synthetic construct
  source 1..80: mol_type = other DNA
aatgacagtgaaggggatacagaggaattatcaacactggtggaaatggggaatcttaggcttttggataattataatta

SEQ ID NO: 74893 - DNA, 80 bp, synthetic construct
  source 1..80: mol_type = other DNA
gtaaggttgtgggggagaacttgtgggttacagtctattatggggtacctgtgtggaaagaagcaaaaactactctattc

SEQ ID NO: 74894 - DNA, 80 bp, synthetic construct
  source 1..80: mol_type = other DNA
tgtgcatcagatgctaaggcatatgagacagaagtgcataatgtctgggctacacatgcctgtgtacccacagaccccaa

SEQ ID NO: 74895 - DNA, 80 bp, synthetic construct
  source 1..80: mol_type = other DNA
cccacaagagatggttttagtaaatgtaacagaaaattttaacatgtggaaaaatgacatggtggatcagatgaatgagg

SEQ ID NO: 74896 - DNA, 80 bp, synthetic construct
  source 1..80: mol_type = other DNA
acataatcagtttatgggatgaaagcctaaaaccatgtgtaaaactaaccccactttgtgttaccttaaactgcggcaat

SEQ ID NO: 74897 - DNA, 80 bp, synthetic construct
  source 1..80: mol_type = other DNA
gcaaatgtaagtctaaccaacaccaatacaactgtggatatgaagcaagaagaaatacaaaactgttctttcaatgcaac

SEQ ID NO: 74898 - DNA, 80 bp, synthetic construct
  source 1..80: mol_type = other DNA
cacagaaataagggacaaagtaaagaaagtacatgcacttttttatagaattgatatggtgccaattgatggtaataata

SEQ ID NO: 74899 - DNA, 80 bp, synthetic construct
  source 1..80: mol_type = other DNA
atagtagtgagtatagtaataatagtagtgagtataggctaataaattgtaatacctcaaccatgacacaagcctgtcca

SEQ ID NO: 74900 - DNA, 80 bp, synthetic construct
  source 1..80: mol_type = other DNA
aaggtctcctttgatccaattcctatacattattgtgcccctgctggttatgcgattctaaaatgtaatgatgagacatt

SEQ ID NO: 74901 - DNA, 80 bp, synthetic construct
  source 1..80: mol_type = other DNA
caatggaacaggaccatgcaaaaatgtcagctcagtacaatgtacccatggaattaagccagtggtgtcaacccaactac

SEQ ID NO: 74902 - DNA, 80 bp, synthetic construct
  source 1..80: mol_type = other DNA
tgttaaatggcagcctagcagaaaaagggataataattagatctgagaacctgacagacaatgctaaaacaataatagta

SEQ ID NO: 74903 - DNA, 80 bp, synthetic construct
  source 1..80: mol_type = other DNA
cagctcaatgagtctgtaacaattgagtgtataagaccaggcaacaatacaagacaaagtatacgtataggaccaggaca

SEQ ID NO: 74904 - DNA, 80 bp, synthetic construct
  source 1..80: mol_type = other DNA
aacattctatgcaacagatataataggagacataagacaagcacattgcaacatcagtataaaaagctggaatgaaacca

SEQ ID NO: 74905 - DNA, 80 bp, synthetic construct
  source 1..80: mol_type = other DNA
tgaacctggtagctaaggaattagagaaacacttccctaataaaacaatagactttcagcaatcctcaggaggggactta

SEQ ID NO: 74906 - DNA, 80 bp, synthetic construct
  source 1..80: mol_type = other DNA
gaaataacaatgcatagttttaattgtagaggagagtttttctattgtaatacatcaggcctgtttaataacgagtggaa

SEQ ID NO: 74907 - DNA, 80 bp, synthetic construct
  source 1..80: mol_type = other DNA
tagcacttggaagaatagcacttgggaaaatggcaccataacactcccatgcaggataaaacaaatagtaaatatgtggc

SEQ ID NO: 74908 - DNA, 80 bp, synthetic construct
  source 1..80: mol_type = other DNA
agggagtaggacaagcaatgtatgcccctcctgtcgcaggaatgatacagtgtgcatcaaatattacaggactaatattg

SEQ ID NO: 74909 - DNA, 80 bp, synthetic construct
  source 1..80: mol_type = other DNA
acaagagatgggggagagaataatagtagtaaggagaccttcagacctggaggaggagatatgaaggacaattggagaag

SEQ ID NO: 74910 - DNA, 80 bp, synthetic construct
  source 1..80: mol_type = other DNA
tgaattatataagtacaaagtagtacaacttgaaccattaggagtagcacccaccaaggcaaaaagaagagtggtggaga

SEQ ID NO: 74911 - DNA, 80 bp, synthetic construct
  source 1..80: mol_type = other DNA
gagaaaaaagagcaatgggaatggcagctatgttccttgggttcttaggagcagcaggaagcactatgggcgcggcgtca

SEQ ID NO: 74912 - DNA, 80 bp, synthetic construct
  source 1..80: mol_type = other DNA
ataacgctgactgtacaggtcagacaattattgtctggaatagtgcaacagcaaagcaatttgctgagagctatagaggc

SEQ ID NO: 74913 - DNA, 80 bp, synthetic construct
  source 1..80: mol_type = other DNA
tcaacagcatatgttgcagctcacagtctggggcattaagcagctccaggcaagagtcctggctgtggaaagatacctac

SEQ ID NO: 74914 - DNA, 80 bp, synthetic construct
  source 1..80: mol_type = other DNA
aggatcaacagctcctagggatttggggctgctctggaaaactcatctgcaccactactgtgccttggaacattagttgg

SEQ ID NO: 74915 - DNA, 80 bp, synthetic construct
  source 1..80: mol_type = other DNA
agtaataaatctcaaaatgatatttgggataacatgacctggatgcagtgggatacagaaattgacaattacacaaaaac

SEQ ID NO: 74916 - DNA, 80 bp, synthetic construct
  source 1..80: mol_type = other DNA
aatataccagttgcttgaggaagcgcagaaccagcaggacaaaaatgaacaagacttattggcattggacagttgggcaa

SEQ ID NO: 74917 - DNA, 80 bp, synthetic construct
  source 1..80: mol_type = other DNA
atttgtggaattggtttaacatatcaaattggctgtggtatataaaaatattcataatgatagtaggaggcttaataggt

SEQ ID NO: 74918 - DNA, 80 bp, synthetic construct
  source 1..80: mol_type = other DNA
ttaagaataatttttgctgtgattgctgtagtaaatagagttaggcagggctactcacctttgtcattccagacccctac

SEQ ID NO: 74919 - DNA, 80 bp, synthetic construct
  source 1..80: mol_type = other DNA
cccgagcccagagggagtcgccaggcccggaggaatcgaagaagacggtggagagcaaggcagaaccagatcgattcgat

SEQ ID NO: 74920 - DNA, 80 bp, synthetic construct
  source 1..80: mol_type = other DNA
tagtgaacggattcttggcgcttgcctgggaggacctccggaacctgtgcctcttcagctaccaccgcttgagagactta

SEQ ID NO: 74921 - DNA, 80 bp, synthetic construct
  source 1..80: mol_type = other DNA
atatctgtggaacctcctggcctattggggtcaggaactgaagaaaagtgctgttagtctacttgataccacagcagtag

SEQ ID NO: 74922 - DNA, 80 bp, synthetic construct
  source 1..80: mol_type = other DNA
gctagaaggagagagatgggtgcgagagtgtcagtattaagcgggggaaaattagatgcatgggagaaaattcggttaag

SEQ ID NO: 74923 - DNA, 80 bp, synthetic construct
  source 1..80: mol_type = other DNA
cagtagctgagtggacagatagggttatagaagtagcacaaagagcttttagagcttttcttcacatacctaggagagta

SEQ ID NO: 74924 - DNA, 80 bp, synthetic construct
  source 1..80: mol_type = other DNA
agacagggcttagaaagggctttgctataaaatgggtggcaagtggtcaaaaagcagcatagtgggatggcctgaaatca

SEQ ID NO: 74925 - DNA, 80 bp, synthetic construct
  source 1..80: mol_type = other DNA
gggagagaatgaacaggactcctccagcagcagaaggagtgggagcagtgtctaaagatttagataaacatggagcaatc

SEQ ID NO: 74926 - DNA, 80 bp, synthetic construct
  source 1..80: mol_type = other DNA
actagcagtaatacatcacagactaatcctgattgtgcctggttggaagcacaggaggaagaggaggaggtaggcttccc

SEQ ID NO: 74927 - DNA, 80 bp, synthetic construct
  source 1..80: mol_type = other DNA
agtcagaccacaggcgcctctaagaccaatgacttataaggcagcctttgatctcggcttctttttaaaagaaaaggggg

SEQ ID NO: 74928 - DNA, 80 bp, synthetic construct
  source 1..80: mol_type = other DNA
gactggcagaattacacaccagggccagggattagatacccactaacatttggatggcccttcaagctagtaccagttga

SEQ ID NO: 74929 - DNA, 80 bp, synthetic construct
  source 1..80: mol_type = other DNA
gccagggggaaagaaacaatataggataaaacatttggtatgggcaagcagggagctggagagattcgcacttaaccccg

SEQ ID NO: 74930 - DNA, 80 bp, synthetic construct
  source 1..80: mol_type = other DNA
tgtcagggagtaggaggacccagccataaagcaagggttttggctgaggcaatgagccacgtacaaaatacaaacataat

SEQ ID NO: 74931 - DNA, 80 bp, synthetic construct
  source 1..80: mol_type = other DNA
gatgcagaggggcaattttaagggccagaaaagaattaagtgtttcaactgtggcaaagaagggcacatagcccgaaatt

SEQ ID NO: 74932 - DNA, 80 bp, synthetic construct
  source 1..80: mol_type = other DNA
gcagggctcctaggaaaaagggctgttggaaatgtgggaaggagggacaccaaatgaaagactgcactgagagacaggct

SEQ ID NO: 74933 - DNA, 80 bp, synthetic construct
  source 1..80: mol_type = other DNA
aattttttagggaaaatttggccttctcaaaaggggaggccagggaactttcctcagagcaggttagagccaacagcccc

SEQ ID NO: 74934 - DNA, 80 bp, synthetic construct
  source 1..80: mol_type = other DNA
taatctcctccccgaagcaggagcagaaggacagggaacagcctcctcctttaatttccctcaaatcactctttggcaac

SEQ ID NO: 74935 - DNA, 80 bp, synthetic construct
  source 1..80: mol_type = other DNA
gccagcagagagctttgggaggggggaagagataatctcctccccgaagcaggagcagaaggacagggaacagcctcctc

SEQ ID NO: 74936 - DNA, 80 bp, synthetic construct
  source 1..80: mol_type = other DNA
ctttaatttccctcaaatcactctttggcaacgacccctgatcacagcaaaaataggaggacagctaaaagaagtcctat

SEQ ID NO: 74937 - DNA, 80 bp, synthetic construct
  source 1..80: mol_type = other DNA
aagaaaaaatatagactgaaacatctagtatgggcaggcagggagctggaaagattcgcacttaaccctggccttttaga

SEQ ID NO: 74938 - DNA, 80 bp, synthetic construct
  source 1..80: mol_type = other DNA
tagatacaggagcagatgacacagtattagaagacctaaatttaccaggaaaatggaaaccaagaatgatagggggaatt

SEQ ID NO: 74939 - DNA, 80 bp, synthetic construct
  source 1..80: mol_type = other DNA
gggggatttatcaaagtaaaacagtatgatcaaatacccatagaaatctgtgggaaaaaggctataggtacagtattagt

SEQ ID NO: 74940 - DNA, 80 bp, synthetic construct
  source 1..80: mol_type = other DNA
aggacctacacctgtcaacataattggaagaaatatattgactcagattggttgtactttaaatttccccattagtccta

SEQ ID NO: 74941 - DNA, 80 bp, synthetic construct
  source 1..80: mol_type = other DNA
ttgagactgtaccagtaaatttaaaaccgggaatggatggcccaaaggttaaacaatggccattgacagaagagaaaata

SEQ ID NO: 74942 - DNA, 80 bp, synthetic construct
  source 1..80: mol_type = other DNA
aaagcattaacagaaatttgtaaagaaatggaaaaagaagggaaaatttcaaaagttggacctgaaaatccatataacac

SEQ ID NO: 74943 - DNA, 80 bp, synthetic construct
  source 1..80: mol_type = other DNA
tccagtatttgccataaagaaaaaggacggcactaaatggagaaaattagtagatttcagagagctcaataaaagaactc

SEQ ID NO: 74944 - DNA, 80 bp, synthetic construct
  source 1..80: mol_type = other DNA
aagacttctgggaagtccaattaggaataccacatccagcggggttaaaaaagaaaaaatcagtaacagtactagatgtg

SEQ ID NO: 74945 - DNA, 80 bp, synthetic construct
  source 1..80: mol_type = other DNA
ggggatgcatatttttcagtacccttagatgaaaactttagaaagtatactgcattcaccatacctagtataaataatga

SEQ ID NO: 74946 - DNA, 80 bp, synthetic construct
  source 1..80: mol_type = other DNA
gacaccaggaataaggtatcagtacaatgtgcttccacaaggctggaaaggatcaccatcaatattccagagtagcatga

SEQ ID NO: 74947 - DNA, 80 bp, synthetic construct
  source 1..80: mol_type = other DNA
caaaaatcttagagccctttagagcacaaaatccagaaatagttatttatcaatacatggatgacttgtatgttggatct

SEQ ID NO: 74948 - DNA, 80 bp, synthetic construct
  source 1..80: mol_type = other DNA
aacaccagaaggatgtcaacaaatcatggaacagttacaaccagctatcaaaacaggaacagaagaactcaaatccctat

SEQ ID NO: 74949 - DNA, 80 bp, synthetic construct
  source 1..80: mol_type = other DNA
gacttagaaataggacagcatagagcaaaaatagagcagttgagagatcatctattaaaatggggattcaccacaccaga

SEQ ID NO: 74950 - DNA, 80 bp, synthetic construct
  source 1..80: mol_type = other DNA
caaaaaacaccagaaagaacctccatttctatggatgggatatgaactccatcctgataaatggacagtccagcctataa

SEQ ID NO: 74951 - DNA, 80 bp, synthetic construct
  source 1..80: mol_type = other DNA
agctgccagaaaaagaaagttggactgtcaatgatatacagaagttggtgggaaaactaaattgggcaagtcagatttat

SEQ ID NO: 74952 - DNA, 80 bp, synthetic construct
  source 1..80: mol_type = other DNA
gcagggattaaagtaaagcagctgtgtaaacttcttagaggagccaaggcactaacagacgtagtaacactgactaagga

SEQ ID NO: 74953 - DNA, 80 bp, synthetic construct
  source 1..80: mol_type = other DNA
agcagaattagaattggcagagaacagggaaattctgaaagaccccgtacatggggtatactatgacccatcaaaagact

SEQ ID NO: 74954 - DNA, 80 bp, synthetic construct
  source 1..80: mol_type = other DNA
tagtagcagaaatacagaaacaagggcaagaccaatggacatatcaaatttatcaagacccatttaaaaatctaaagaca

SEQ ID NO: 74955 - DNA, 80 bp, synthetic construct
  source 1..80: mol_type = other DNA
gggaaatatgcaaaaaggaggtctgcccatactaatgatgtaaaacaattgactgaagtagtgcaaagagtggtcacaga

SEQ ID NO: 74956 - DNA, 80 bp, synthetic construct
  source 1..80: mol_type = other DNA
aagcatagtaatatggggaagaactcccaaatttagactacctatacaaaaagaaacatgggatacatggtggacagagt

SEQ ID NO: 74957 - DNA, 80 bp, synthetic construct
  source 1..80: mol_type = other DNA
attggcaagccacctggattcctgagtgggagtttgtcaatacccctcctttagtaaaattatggtaccaattagaaaaa

SEQ ID NO: 74958 - DNA, 80 bp, synthetic construct
  source 1..80: mol_type = other DNA
gaccccatagtaggagcagaaactttctatgtagatggggcatctagtagagagactaaaatgggaaaggcagggtatgt

SEQ ID NO: 74959 - DNA, 80 bp, synthetic construct
  source 1..80: mol_type = other DNA
ataatacagtagcaaccctctattgtgtacatcgaaagatagatgtaagaaacacccaagaagctttagataaagtagag

SEQ ID NO: 74960 - DNA, 80 bp, synthetic construct
  source 1..80: mol_type = other DNA
cactgacagaggaaagcagaagattgtttccctaactgggacaacaaatcaaaaagctgaattacatgcaatccttcttg

SEQ ID NO: 74961 - DNA, 80 bp, synthetic construct
  source 1..80: mol_type = other DNA
ctctgcaggattcaggattagaagtaaacatagtaacagactcacagtatgcactaggaatcattcaggcacaaccagac

SEQ ID NO: 74962 - DNA, 80 bp, synthetic construct
  source 1..80: mol_type = other DNA
aggagtgaatcagagttagtcaatcaaataatagagcagctgataggaaaagaaaaggtctacctgtcatgggtaccagc

SEQ ID NO: 74963 - DNA, 80 bp, synthetic construct
  source 1..80: mol_type = other DNA
acacaaaggaattggaggaaatgaacaagtagataaattagtcagttctggaatcagaaaggtgctatttctagatggga

SEQ ID NO: 74964 - DNA, 80 bp, synthetic construct
  source 1..80: mol_type = other DNA
tagataaggcccaagaagaacatgaaaagtatcacagtaattggagagcaatggctaatgattttaatttgccacctgta

SEQ ID NO: 74965 - DNA, 80 bp, synthetic construct
  source 1..80: mol_type = other DNA
gtggcaaaagaaatagtggccagctgtgataaatgtcagttaaagggagaagccatgcatggacaggtagactgtagtcc

SEQ ID NO: 74966 - DNA, 80 bp, synthetic construct
  source 1..80: mol_type = other DNA
agggatatggcaattagattgtactcatctagaaggaaaaatcattctggtagcagtccatgtagccagtggctatatag

SEQ ID NO: 74967 - DNA, 80 bp, synthetic construct
  source 1..80: mol_type = other DNA
aagcagaagttattccagcagaaacaggacaggaggcagcatactttatattaaaattagcagcaagatggccagtgaaa

SEQ ID NO: 74968 - DNA, 80 bp, synthetic construct
  source 1..80: mol_type = other DNA
gttgtacatacagacaatggcaccaatttcaccagtgcagcagttaaggcagcctgttggtgggcagatatccaccagga

SEQ ID NO: 74969 - DNA, 80 bp, synthetic construct
  source 1..80: mol_type = other DNA
gaaataccaaacaaaagcaagcaggcagctgctggcacagaaaacagcagcaaggtcagtcaaaattaccccatagtaca

SEQ ID NO: 74970 - DNA, 80 bp, synthetic construct
  source 1..80: mol_type = other DNA
gtgaaggggcagtagtgatacaagacaatagtgatataaaggtagtaccaagaagaaaagcaaagatcatcagggattat

SEQ ID NO: 74971 - DNA, 80 bp, synthetic construct
  source 1..80: mol_type = other DNA
atatgtatgtttcaaggaaagctggaggttggttttatagacaccactatgaaagtaggcatccaagaataagttcagaa

SEQ ID NO: 74972 - DNA, 80 bp, synthetic construct
  source 1..80: mol_type = other DNA
gtacatatcccactaggggatgcaagagtaatagtaagaacatattggggtctgcatacaggagagaaagactggcaatt

SEQ ID NO: 74973 - DNA, 80 bp, synthetic construct
  source 1..80: mol_type = other DNA
gggtcatggggtctccatagaatggagacagagaaagtatagcacacaaatagaccctgatctggcagaccaactaattc

SEQ ID NO: 74974 - DNA, 80 bp, synthetic construct
  source 1..80: mol_type = other DNA
atctgcattattttgactgtttttcagactctgccataagacaagccctattaggacaagtagttaggactaggtgtgaa

SEQ ID NO: 74975 - DNA, 80 bp, synthetic construct
  source 1..80: mol_type = other DNA
tatcaagcaggacataacaaggtaggatctctacaatatttggcattgaaagcattagtaacaccaacaaggagaaagcc

SEQ ID NO: 74976 - DNA, 80 bp, synthetic construct
  source 1..80: mol_type = other DNA
aaatgcacaaggacaaatggtataccagtccctatcacctaggactttgaatgcgtgggtgaaagtaatagaagaaaagg

SEQ ID NO: 74977 - DNA, 80 bp, synthetic construct
  source 1..80: mol_type = other DNA
acctttgcctagtgttaggaaattagtagaggatagatggaacaagccccagaagaccaagggccacaaagggagccgca

SEQ ID NO: 74978 - DNA, 80 bp, synthetic construct
  source 1..80: mol_type = other DNA
caatgaatgggccttagaactgttagaggagcttaagagtgaagctgttagacatttccctaggccatggcttcatggcc

SEQ ID NO: 74979 - DNA, 80 bp, synthetic construct
  source 1..80: mol_type = other DNA
tgggacaatatatctataacaactatggggatacttgggaaggagttgaagctataataagaagcttgcaacaactgctg

SEQ ID NO: 74980 - DNA, 80 bp, synthetic construct
  source 1..80: mol_type = other DNA
tttattcatttcagaattgggtgccatcatagcagaataggcgttattcgaaggagaagaggcagggatggatccggtcg

SEQ ID NO: 74981 - DNA, 80 bp, synthetic construct
  source 1..80: mol_type = other DNA
atcctaacctagagccctggaaccatccgggaagtcagccaaaaactgcttgtaacaaatgctattgcaaaaagtgttgc

SEQ ID NO: 74982 - DNA, 80 bp, synthetic construct
  source 1..80: mol_type = other DNA
tatcattgcccaaggtgttttctaaacaaaggcttaggcatctcctatggcaggaagaagcggagacgccgacgaggacc

SEQ ID NO: 74983 - DNA, 80 bp, synthetic construct
  source 1..80: mol_type = other DNA
tcctcagagtagtaaggatcatcaaaatcctataccaaagcagtaagtagtattaattaagtattagtaataagcatatg

SEQ ID NO: 74984 - DNA, 80 bp, synthetic construct
  source 1..80: mol_type = other DNA
taatgaatattttacaaatagcttcaatagtaggactggtagtagtatcaatcatagcaataattgtatgggctatagta

SEQ ID NO: 74985 - DNA, 80 bp, synthetic construct
  source 1..80: mol_type = other DNA
tttatagagtataagaaactgctaaagcaaaggaaaatagactggttagtgaatagaataaaagaaagagcagaggacag

SEQ ID NO: 74986 - DNA, 80 bp, synthetic construct
  source 1..80: mol_type = other DNA
tggcaatgagagcgagggggatacagaggaattatcaacacttgtggaaatgggggaccctgatttttgggatgttaatg

SEQ ID NO: 74987 - DNA, 80 bp, synthetic construct
  source 1..80: mol_type = other DNA
atttgtaatgctgtagataacttgtgggtcacagtctattatggggtacctgtgtggagagaggcaaaaaccaccctgtt

SEQ ID NO: 74988 - DNA, 80 bp, synthetic construct
  source 1..80: mol_type = other DNA
ttgtgcatcagatgctaaaacatatgatcaagaagtacataatgtctgggccacacatgcctgtgtgcccacagaccccg

SEQ ID NO: 74989 - DNA, 80 bp, synthetic construct
  source 1..80: mol_type = other DNA
acccacaagaaatagacctgagaaatgtgacagagaaatttaatatgtggaaaaatgacatggtagagcagatgcataca

SEQ ID NO: 74990 - DNA, 80 bp, synthetic construct
  source 1..80: mol_type = other DNA
gatataatcagtctgcgggaccaaagcctacagccatgtgtaaagttaacccctctctgtgtcactttaaactgtactaa

SEQ ID NO: 74991 - DNA, 80 bp, synthetic construct
  source 1..80: mol_type = other DNA
cattactaacattagcaacaacacaaatactgacagcagaaacatcacccatagtgaggacccggcagaaatgagaaact

SEQ ID NO: 74992 - DNA, 80 bp, synthetic construct
  source 1..80: mol_type = other DNA
gctctttcaatgtagccacaggcataagagataggaaaaagaaagtgtattcacttttttatagacttgatataacacca

SEQ ID NO: 74993 - DNA, 80 bp, synthetic construct
  source 1..80: mol_type = other DNA
attaatggaagtgatgatagtaagagtggtggtcagtatatactaataaattgtaatacctcaaccataacacaggcttg

SEQ ID NO: 74994 - DNA, 80 bp, synthetic construct
  source 1..80: mol_type = other DNA
tccaaaggtgtcctttgagccaattcccatacattattgtgccccagctggttttgcgattttaaagtgtaaggataaac

SEQ ID NO: 74995 - DNA, 80 bp, synthetic construct
  source 1..80: mol_type = other DNA
agttcaatggaacagggacatgcaacaatgccagcacagtgcaatgcacacatgggattaagccagtggtgtccactcag

SEQ ID NO: 74996 - DNA, 80 bp, synthetic construct
  source 1..80: mol_type = other DNA
ctgttgctaaatggcagtctagcaggaggaggggtaataattagatctggaaatatcacagacaatgccaaaacaataat

SEQ ID NO: 74997 - DNA, 80 bp, synthetic construct
  source 1..80: mol_type = other DNA
acagtagggggacatcaagcagctatgcaaatgttaaaagatactatcaatgaagaagctgcagagtgggacagaacaca

SEQ ID NO: 74998 - DNA, 80 bp, synthetic construct
  source 1..80: mol_type = other DNA
agtacagcttgatgagcctgtgagaatcaattgtaccagacccaacaccaacacaagtataggtatacatataggaccgg

SEQ ID NO: 74999 - DNA, 80 bp, synthetic construct
  source 1..80: mol_type = other DNA
gaggagcattctacgcaacaggagaagtagtaggaaacataagacatgcatggtgtgaagttaatggaacagcctgggaa

SEQ ID NO: 75000 - DNA, 80 bp, synthetic construct
  source 1..80: mol_type = other DNA
gaagctttaagaaaagtagttacaaaattaagagagcacttcaaaaataaaacaatagcctttcagccatcatcaggagg

SEQ ID NO: 75001 - DNA, 80 bp, synthetic construct
  source 1..80: mol_type = other DNA
ggacctggaaattaccacacacagttttaattgtagaggagaatttttctattgcaatacctcaggtctgtttaatagca

SEQ ID NO: 75002 - DNA, 80 bp, synthetic construct
  source 1..80: mol_type = other DNA
cttggaatggaactacaagtgggtcaaatgtcaatacaactggcaatataacactaccatgcaaaataaaacaaattata

SEQ ID NO: 75003 - DNA, 80 bp, synthetic construct
  source 1..80: mol_type = other DNA
aacatgtggcagagagtaggacaagcaatgtatgctcctcccatcccaggaataatacagtgtatatcaaatattacagg

SEQ ID NO: 75004 - DNA, 80 bp, synthetic construct
  source 1..80: mol_type = other DNA
gttattaataacaagagatggtggaaataatgcaactaatgaaacggagatcttcagacctggaggaggagatatgaggg

SEQ ID NO: 75005 - DNA, 80 bp, synthetic construct
  source 1..80: mol_type = other DNA
agggtggtgcagagagaaaaaagagcagtaggaataggagctgtgttccttgggttcctaggagcagcaggaagcactat

SEQ ID NO: 75006 - DNA, 80 bp, synthetic construct
  source 1..80: mol_type = other DNA
gggcgcggcgtcaatgacgctgacggtacaggccagacaactattgtcgggcatagtgcaacagaaaaacaactttctga

SEQ ID NO: 75007 - DNA, 80 bp, synthetic construct
  source 1..80: mol_type = other DNA
aggctatagaggctcaacagcacctgttgaaactcacggtcgggggcattagacagctccaggggagagtcctggctgtg

SEQ ID NO: 75008 - DNA, 80 bp, synthetic construct
  source 1..80: mol_type = other DNA
gaaaggtacctaaaggatcaacagctcctaggaatatggggctgctctggaaagctcatctgcaccactactgtgccatg

SEQ ID NO: 75009 - DNA, 80 bp, synthetic construct
  source 1..80: mol_type = other DNA
gaatactacgtggagtaacaaaactctgacggacatttgggataacatgacctggttagaatgggataaagaaattagca

SEQ ID NO: 75010 - DNA, 80 bp, synthetic construct
  source 1..80: mol_type = other DNA
agtacacaggcataatataccacctaattgaagaatcgcagaaccagcaggaaaagaatgaacaagacctactggcattg

SEQ ID NO: 75011 - DNA, 80 bp, synthetic construct
  source 1..80: mol_type = other DNA
gacaagtgggcaactctgtggagttggtttgacatatcaaattggctatggtatataaggctatttataatgataatagg

SEQ ID NO: 75012 - DNA, 80 bp, synthetic construct
  source 1..80: mol_type = other DNA
aggcttaataggattaagaatagtttttgctgtgttttctatagtaaagaaagctaggcagggatactcacccttgtcgt

SEQ ID NO: 75013 - DNA, 80 bp, synthetic construct
  source 1..80: mol_type = other DNA
tgcagatccttggcccaaccccagggggtccagacaggcccgaaagaatcaaagaagaaggtggagagcaaggcagagac

SEQ ID NO: 75014 - DNA, 80 bp, synthetic construct
  source 1..80: mol_type = other DNA
agatcgattcgattgtcgagcggattgttagcacttgtatgggacgatctgcggagcctggggatcttcagctaccaccg

SEQ ID NO: 75015 - DNA, 80 bp, synthetic construct
  source 1..80: mol_type = other DNA
cttgagagacttcgtcttgattgcaacgagggctgtggaacttctgggacgcaacagtctcaagggactgagactggggt

SEQ ID NO: 75016 - DNA, 80 bp, synthetic construct
  source 1..80: mol_type = other DNA
gggaaggcctcaaatatctgtggaatcttctgcaatattggagccaggagctaaagaatagtgctattagtctacttggt

SEQ ID NO: 75017 - DNA, 80 bp, synthetic construct
  source 1..80: mol_type = other DNA
gagagatgggtgcgagagcgtcagtattaagcgggagaaaattagataaatgggagcaaattcggttaaggccaggggga

SEQ ID NO: 75018 - DNA, 80 bp, synthetic construct
  source 1..80: mol_type = other DNA
ttcaggaacaaataggatggatgaccagcaatccacccgtcccagtgggagaaatctataaaagatggataattctggga

SEQ ID NO: 75019 - DNA, 80 bp, synthetic construct
  source 1..80: mol_type = other DNA
gccatagcaatagcagtagctgagggaacagatagggttgtaacagtaggacaaagaatttgtagagctattctcaatat

SEQ ID NO: 75020 - DNA, 80 bp, synthetic construct
  source 1..80: mol_type = other DNA
acctagaagaataagacagggctttgaaagagctttgctataaagtgggtggcaagtggtcaaaaagaaacatagtggga

SEQ ID NO: 75021 - DNA, 80 bp, synthetic construct
  source 1..80: mol_type = other DNA
tggccggctgttagggaaagaataagaagaaccccaccagcagcagaaggagtgggagcagcagaaggagtgggagcagt

SEQ ID NO: 75022 - DNA, 80 bp, synthetic construct
  source 1..80: mol_type = other DNA
gtctagagatttagataaacatggggcagtcacaagcagtaatacatcaactactaaccctgattgtgcctgggtagaag

SEQ ID NO: 75023 - DNA, 80 bp, synthetic construct
  source 1..80: mol_type = other DNA
cacaagaggatggggaagaggtaggcttcccagtcagaccacaggtgcctgtaagaccaatgacttataaagcagctttt

SEQ ID NO: 75024 - DNA, 80 bp, synthetic construct
  source 1..80: mol_type = other DNA
gggactggatgggttaattcactcccagaaaagacaagacatccttgatttgtgggtatataacacacaaggctacttcc

SEQ ID NO: 75025 - DNA, 80 bp, synthetic construct
  source 1..80: mol_type = other DNA
gatctcagccattttttaaaagaaaaggggggactggatgggttaattcactcccagaaaagacaagacatccttgattt

SEQ ID NO: 75026 - DNA, 80 bp, synthetic construct
  source 1..80: mol_type = other DNA
gtgggtatataacacacaaggctacttccctgattggcagaattacacaccagggccaggggtcagattcccactaacat

SEQ ID NO: 75027 - DNA, 80 bp, synthetic construct
  source 1..80: mol_type = other DNA
ttggatggtgcttcaagctagtaccaatggatccagaggaggtagaagaggctaataaaggagagaacaacagcctatta

SEQ ID NO: 75028 - DNA, 80 bp, synthetic construct
  source 1..80: mol_type = other DNA
catcccatatgccaacatggaatggatgatactgagagagaagtgttaatatggaagtttgacagtcagctggcactgag

SEQ ID NO: 75029 - DNA, 80 bp, synthetic construct
  source 1..80: mol_type = other DNA
acacctagcccgcgagctgcatccggagtattacaaagactgctgagacagaagttgctgacaaggactttctgctgggg

SEQ ID NO: 75030 - DNA, 80 bp, synthetic construct
  source 1..80: mol_type = other DNA
gtcctgggtctctcttgttagaccagattgagcctgggagctctctggcttactagagaaccatgcttaagcctcataaa

SEQ ID NO: 75031 - DNA, 80 bp, synthetic construct
  source 1..80: mol_type = other DNA
actttccaggctggggactttccaggatggtgtggtttgggcggagttggggagtggctaaccctcagatgctgcttata

SEQ ID NO: 75032 - DNA, 80 bp, synthetic construct
  source 1..80: mol_type = other DNA
agcagctgcttctcgcttgtcctgggtctctcttgttagaccagattgagcctgggagctctctggcttactagagaacc

SEQ ID NO: 75033 - DNA, 80 bp, synthetic construct
  source 1..80: mol_type = other DNA
tgtagacaggttttttaaatgtctcagagctgagcaagctacacaggaagtgaaaaattggatgacagaaaccttgttgg

SEQ ID NO: 75034 - DNA, 80 bp, synthetic construct
  source 1..80: mol_type = other DNA
atgcagggcctattgcaccaggccagatgagagaaccaagaggaagtgacatagcagggactactagtactcttcaggaa

SEQ ID NO: 75035 - DNA, 80 bp, synthetic construct
  source 1..80: mol_type = other DNA
gggacaccaggcagcaatgcaaatgttaaaagagaccatcaatgaggaagctgcagaatgggatagattgcatccagtgc

SEQ ID NO: 75036 - DNA, 80 bp, synthetic construct
  source 1..80: mol_type = other DNA
caaataggatggatgacaaataatccacctatcccagtaggagaaatctataaaagatggataattctgggattaaataa

SEQ ID NO: 75037 - DNA, 80 bp, synthetic construct
  source 1..80: mol_type = other DNA
aatagtaaggatgtatagccccaccagcattctggacataaaacaaggaccaaaggaagcaccctttagagactatgtag

SEQ ID NO: 75038 - DNA, 80 bp, synthetic construct
  source 1..80: mol_type = other DNA
accggttctataaaactctaagagccgagcaagcctcacaggaagtaaaaaattggatgacagaaaccttgttggtccaa

SEQ ID NO: 75039 - DNA, 80 bp, synthetic construct
  source 1..80: mol_type = other DNA
ggtagtaaaaatgtatagccctaccagcattttggacataagacaaggaccaaaggaaccctttagagactatgtagacc

SEQ ID NO: 75040 - DNA, 80 bp, synthetic construct
  source 1..80: mol_type = other DNA
tcgaacccagattgtaagactattttaaaagcattaggaccaggagctacattagaagaaatgatgacagcatgtcaggg

SEQ ID NO: 75041 - DNA, 80 bp, synthetic construct
  source 1..80: mol_type = other DNA
ccagaagtaatacccatgttttcagcattatcagaaggagccaccccacaggacttaaataccatgttaaacacagtggg

SEQ ID NO: 75042 - DNA, 80 bp, synthetic construct
  source 1..80: mol_type = other DNA
caaatagcatggatgacaggtaacccagctatcccagtaggagacatctataaaagatggataattttagggttaaataa

SEQ ID NO: 75043 - DNA, 80 bp, synthetic construct
  source 1..80: mol_type = other DNA
aatagtaaggatgtatagtcctaccagcattttggacataaaacaaggaccaaaggaaccttttagagactatgtggacc

SEQ ID NO: 75044 - DNA, 80 bp, synthetic construct
  source 1..80: mol_type = other DNA
aatagtaagaatgtatagccctgttagcattttggacataaggcaagggccaaaagaacccttcagagactatgtagata

SEQ ID NO: 75045 - DNA, 80 bp, synthetic construct
  source 1..80: mol_type = other DNA
ggttctataaaaccctcagagcagaacaagctacacaggaggtaaaaaactggatgacagaaaccttgctagtccaaaat

SEQ ID NO: 75046 - DNA, 80 bp, synthetic construct
  source 1..80: mol_type = other DNA
ccagaagtaatacccatgttctcagcattatcagagggagccaccccacaagatttaaatatgatgctaaacatagtggg

SEQ ID NO: 75047 - DNA, 80 bp, synthetic construct
  source 1..80: mol_type = other DNA
gcgaatccagactgtaagtccatcttaaaagcattaggaacaggagctacattagaagaaatgatgacagcatgccaggg

SEQ ID NO: 75048 - DNA, 80 bp, synthetic construct
  source 1..80: mol_type = other DNA
gggacatcaagcagccatgcaaatgttaaaagagaccatcaatgaggaagctgcagaatgggataggctacacccagcgc

SEQ ID NO: 75049 - DNA, 80 bp, synthetic construct
  source 1..80: mol_type = other DNA
caaatagcgtggatgacacataatccaccggtcccagtaggagaaatttataaaacatggataatcctgggattaaataa

SEQ ID NO: 75050 - DNA, 80 bp, synthetic construct
  source 1..80: mol_type = other DNA
aatagtaaggatgtatagccctgtcagcattctggacataagacaaggaccaaaggaaccctttagagattatgtagacc

SEQ ID NO: 75051 - DNA, 80 bp, synthetic construct
  source 1..80: mol_type = other DNA
ggttctataaaactttaagagctgagcaagctacacaggaagtaaaaaattggatgacagaaaccttgttggtccagaat

SEQ ID NO: 75052 - DNA, 80 bp, synthetic construct
  source 1..80: mol_type = other DNA
aactttcctcagagcagaccggaaccaacagccccaccagcagagaactttggaatgggggaagagataacctcctctca

SEQ ID NO: 75053 - DNA, 80 bp, synthetic construct
  source 1..80: mol_type = other DNA
aggttaaacaatggccattgacagaagaaaagataaaagcgttagtagacatttgtacagagatggaaaaggaaggaaaa

SEQ ID NO: 75054 - DNA, 80 bp, synthetic construct
  source 1..80: mol_type = other DNA
ggtggtcacagaaagcatagtaatatgggcaaacacccctaagtttagactacccatacaaaaagaaacatgggaagcat

SEQ ID NO: 75055 - DNA, 80 bp, synthetic construct
  source 1..80: mol_type = other DNA
tcaaaacaatactccagtgtttgccataaagaaaaaagatagtactaaatggagaaagttagtagatttcagagaactca

SEQ ID NO: 75056 - DNA, 80 bp, synthetic construct
  source 1..80: mol_type = other DNA
ttatatgtaggatctgacttagaaatagggaatcacagggcaaaagtagaggagttaagaaatcacctattgaagtgggg

SEQ ID NO: 75057 - DNA, 80 bp, synthetic construct
  source 1..80: mol_type = other DNA
cagtgcagcctatacaactgccagacaaggatagctggactgtcaatgatatacagaaactggtgggaaaactaaactgg

SEQ ID NO: 75058 - DNA, 80 bp, synthetic construct
  source 1..80: mol_type = other DNA
aaaaacttgaagacaggaaagtatgcaagaatgaggtctgcccacactaatgatataaaacaattaacagaagcagtgca

SEQ ID NO: 75059 - DNA, 80 bp, synthetic construct
  source 1..80: mol_type = other DNA
cgaaggaactatatcccttagcttccctcaaatcactctttggcagcgaccccttgtcacagtaagagtagaaggacagc

SEQ ID NO: 75060 - DNA, 80 bp, synthetic construct
  source 1..80: mol_type = other DNA
acagaagaaaaaataagggcattaacagaaatttgtacagacatggaaaaggaaggaaagatttcaaaaattgggcctga

SEQ ID NO: 75061 - DNA, 80 bp, synthetic construct
  source 1..80: mol_type = other DNA
ttaataaaagaactcaagatttttgggaagttcaattaggaataccacatcctgctgggttgaagaagaaaaaatcagta

SEQ ID NO: 75062 - DNA, 80 bp, synthetic construct
  source 1..80: mol_type = other DNA
tacaatgtacttccacagggatggaaagggtcaccagcaatatttcaggcaagcatgataaaaatcttagagccctttag

SEQ ID NO: 75063 - DNA, 80 bp, synthetic construct
  source 1..80: mol_type = other DNA
aacaaacaatccagagatagtgatctaccaatatatggatgatttatatgtaggatctgacttagagatagggcaacata

SEQ ID NO: 75064 - DNA, 80 bp, synthetic construct
  source 1..80: mol_type = other DNA
gagcaaaaatagaggagttgagggaacatctcctgaaatggggatttaccacaccagacaaaaagcatcagaaagaacct

SEQ ID NO: 75065 - DNA, 80 bp, synthetic construct
  source 1..80: mol_type = other DNA
tgtgtaaactccttaggggagccaaagcactaacagatatagtaacactgactgaggaagcagagctagaattggcagag

SEQ ID NO: 75066 - DNA, 80 bp, synthetic construct
  source 1..80: mol_type = other DNA
aacagggaggttctaaaagaaacagtacatggagtatattatgacccagcaaaggacttagtagcagaaatacagaagca

SEQ ID NO: 75067 - DNA, 80 bp, synthetic construct
  source 1..80: mol_type = other DNA
gaaattttcctcaaagcagaccggcaccaacagccccaccagcagagccaacagcccctccagcagagagccttgggatg

SEQ ID NO: 75068 - DNA, 80 bp, synthetic construct
  source 1..80: mol_type = other DNA
gggacaagaccaatggacatatcaaatttatcaagagccatttaaaaatctaaaaacaggaaaatatgcaaaaaagaggt

SEQ ID NO: 75069 - DNA, 80 bp, synthetic construct
  source 1..80: mol_type = other DNA
ctgcccacactaatgatgtaaaacaattaacagaggtagtgcagaaggtggctgtagaaagcatagtgatatggggaaag

SEQ ID NO: 75070 - DNA, 80 bp, synthetic construct
  source 1..80: mol_type = other DNA
ggggaggagataacctcccctccgaagcaggaaccgagggacaaggggttatatcctcccttagcttccctcaaatcact

SEQ ID NO: 75071 - DNA, 80 bp, synthetic construct
  source 1..80: mol_type = other DNA
ctttggcaacgacccgtagtcacagtaaaaatagggggacagccaatagaggccctattagacacgggagcagatgatac

SEQ ID NO: 75072 - DNA, 80 bp, synthetic construct
  source 1..80: mol_type = other DNA
agtatgatcacatacttatagaaatttgtggaaaaaaggccataggtacagtattagtaggacctacacctgtcaacata

SEQ ID NO: 75073 - DNA, 80 bp, synthetic construct
  source 1..80: mol_type = other DNA
aggaatacctcatcccgcaggattaaaaaggaaaaaatcagtaacagtactagatgtgggggatgcatatttttcagttc

SEQ ID NO: 75074 - DNA, 80 bp, synthetic construct
  source 1..80: mol_type = other DNA
ggaattttcctcagagcagaccggaaccaacagccccaccagcagagagtgttgggatgggggaagagatagcctcccct

SEQ ID NO: 75075 - DNA, 80 bp, synthetic construct
  source 1..80: mol_type = other DNA
gacaattagtagaggcagtacaaaaagtatgtacagaaagcatagtaatatggggaaagacccctaaatttagactaccc

SEQ ID NO: 75076 - DNA, 80 bp, synthetic construct
  source 1..80: mol_type = other DNA
atacaaaaagaaacatgggaagcatggtggatggagtattggcaggctacctggattctattatgggagtttgtcaatac

SEQ ID NO: 75077 - DNA, 80 bp, synthetic construct
  source 1..80: mol_type = other DNA
ccgaagcaggaatcaagggacacgggactatatcctcccttaacttccctcaaatcactctttggcagcgacccttagtc

SEQ ID NO: 75078 - DNA, 80 bp, synthetic construct
  source 1..80: mol_type = other DNA
aaaagttaaacaatggccattgacagaagaaaaaataaaagcattaacagaaatttgtacagacatggaaaaggaaggaa

SEQ ID NO: 75079 - DNA, 80 bp, synthetic construct
  source 1..80: mol_type = other DNA
actaaaaaagaaaaaatcagtaacagtactggatgtgggggatgcatatttttcagtacccttagatccagactttagaa

SEQ ID NO: 75080 - DNA, 80 bp, synthetic construct
  source 1..80: mol_type = other DNA
atatttcagagcactatgataaaaatcttagagccctttagaaaaaacaatccagaaatagtgatctatcaatacatgga

SEQ ID NO: 75081 - DNA, 80 bp, synthetic construct
  source 1..80: mol_type = other DNA
tggacagtgcaacctatacagctgccagacaaggaggactggactgtcaatgatatacaaaaattggtgggaaaactgaa

SEQ ID NO: 75082 - DNA, 80 bp, synthetic construct
  source 1..80: mol_type = other DNA
ccccacctgcagagagcttcagcttcggggaggaaacagccccctcccagaagcaggagccgaaggggaaggaggagccg

SEQ ID NO: 75083 - DNA, 80 bp, synthetic construct
  source 1..80: mol_type = other DNA
aaggagaaggagctataccccttagcttccctcaaatcactctttggcagcgacccctagtcagagtaagaatagaggga

SEQ ID NO: 75084 - DNA, 80 bp, synthetic construct
  source 1..80: mol_type = other DNA
taaataaaagaactcaagacttctgggaagttcaattagggataccgcatccagcgggtttgaaaaagaaaaagtcagta

SEQ ID NO: 75085 - DNA, 80 bp, synthetic construct
  source 1..80: mol_type = other DNA
acagtactggatgtgggggacgcatacttttcagttcctttagataaaagctttagaaagtatactgcgttcaccatacc

SEQ ID NO: 75086 - DNA, 80 bp, synthetic construct
  source 1..80: mol_type = other DNA
accagagccaacagccccaacagcagacctccttgggatgggagaggagatgacctcccctccgaagcaggagcagaaaa

SEQ ID NO: 75087 - DNA, 80 bp, synthetic construct
  source 1..80: mol_type = other DNA
tccagtatagcatgacaaaaattttagagcccttcagatcacaaaatccagaaataataatctatcaatacatggatgac

SEQ ID NO: 75088 - DNA, 80 bp, synthetic construct
  source 1..80: mol_type = other DNA
caacagctccaccagcagagagtgtggggatgggggaagaaatagcctcctccccaaaacaggaaccgagggacaaggga

SEQ ID NO: 75089 - DNA, 80 bp, synthetic construct
  source 1..80: mol_type = other DNA
tatatgtaggatctgacttagagatagggcagcatagagcaaaagtagaagagttgagaaaacatctactggaatgggga

SEQ ID NO: 75090 - DNA, 80 bp, synthetic construct
  source 1..80: mol_type = other DNA
agtgcaacctatacaactaccagataaggagagctggactgtcaatgatatacaaaaattgataggaaaactaaattggg

SEQ ID NO: 75091 - DNA, 80 bp, synthetic construct
  source 1..80: mol_type = other DNA
caagtcagatttatccagggattcaagtaaagcaactatgtaaacttctcaggggagcaaaagcactaacagacatagta

SEQ ID NO: 75092 - DNA, 80 bp, synthetic construct
  source 1..80: mol_type = other DNA
ccaacagccccacctgcagagagcttcagtttcggagaggagatagccccctccccgaagcaggagccgaaggagaagga

SEQ ID NO: 75093 - DNA, 80 bp, synthetic construct
  source 1..80: mol_type = other DNA
aagatagccctagaaagcatagtaatatggggaaagactcctaaatttaaactacccatacaaaaggaaacatgggagac

SEQ ID NO: 75094 - DNA, 80 bp, synthetic construct
  source 1..80: mol_type = other DNA
gaaggagctatatcccttagcctccctcaaatcactctttggcaacgacccctagtcgcagtaagaatagggggacagat

SEQ ID NO: 75095 - DNA, 80 bp, synthetic construct
  source 1..80: mol_type = other DNA
cagaagaaaaaataaaagcgttaacagaaatttgtgaagaattggaaagagaaggaaaaatttcaaaaattggccccgaa

SEQ ID NO: 75096 - DNA, 80 bp, synthetic construct
  source 1..80: mol_type = other DNA
ttatccaggaattaaagtaaagcaactgtgcagactccttaggggagccaaagcactaacagatatagtaccactgactg

SEQ ID NO: 75097 - DNA, 80 bp, synthetic construct
  source 1..80: mol_type = other DNA
ccccaccagcggagagctttggggtgggggaagagataccctcctctccgaggcaggaaccgagggacaaggggctatac

SEQ ID NO: 75098 - DNA, 80 bp, synthetic construct
  source 1..80: mol_type = other DNA
gacaggaaaatatgcaagaaagagatctgcccacactaatgatgtaagacaattaacagaggtagtacaaaaagtggctt

SEQ ID NO: 75099 - DNA, 80 bp, synthetic construct
  source 1..80: mol_type = other DNA
tggaaaggatcaccagcaatattccaggcaagcatgacaaaaatcttacagccctttagaacagcaaacccagagttggt

SEQ ID NO: 75100 - DNA, 80 bp, synthetic construct
  source 1..80: mol_type = other DNA
gacaattaacagaggtagtgcaaaaaatagctatggaaagcatagtgatatggggaaagacccctaaatttaggctaccc

SEQ ID NO: 75101 - DNA, 80 bp, synthetic construct
  source 1..80: mol_type = other DNA
atacaaagagaaacatgggaaacatggtggatggaatattggcaggctacctggattcctgagtgggagtttgtcaatac

SEQ ID NO: 75102 - DNA, 80 bp, synthetic construct
  source 1..80: mol_type = other DNA
ccgaagcaggaacaggagagcaagggactatatcctcccttaacttccctcaaatcactctttggcaacgacccttagtc

SEQ ID NO: 75103 - DNA, 80 bp, synthetic construct
  source 1..80: mol_type = other DNA
accaggaagatggaaaccaaaaatgatagggggaattggaggttttatcaaagtaagacaatatgatcagatacctctgg

SEQ ID NO: 75104 - DNA, 80 bp, synthetic construct
  source 1..80: mol_type = other DNA
gagttaccagaaaaggacagctggactgtcaatgatatacagaaattagtgggaaaactaaattgggcaagtcagattta

SEQ ID NO: 75105 - DNA, 80 bp, synthetic construct
  source 1..80: mol_type = other DNA
ttagtagcagaaatacagaaacagggacaagaccaatggacatatcaaatctatcaagagccatttaagaatctgaaaac

SEQ ID NO: 75106 - DNA, 80 bp, synthetic construct
  source 1..80: mol_type = other DNA
ccccaccagcagatctcctggggataagagaagagatagcctcctctccgaagcaggagcagagggacagggaccaacct

SEQ ID NO: 75107 - DNA, 80 bp, synthetic construct
  source 1..80: mol_type = other DNA
tggaggttttattaaagtaagacagtatgatcagatatctatggaaatttgtggaaaaaaggctgtaggtacagtgttaa

SEQ ID NO: 75108 - DNA, 80 bp, synthetic construct
  source 1..80: mol_type = other DNA
gggggatgcatacttttcagttcctttagataaagaatttagaaaatatactgcgttcaccatacctagtacaaataatg

SEQ ID NO: 75109 - DNA, 80 bp, synthetic construct
  source 1..80: mol_type = other DNA
acaaaaatcttagagccttttagaacaaaaaatccagaaataattatctatcaatacatggatgacttatatgtaggatc

SEQ ID NO: 75110 - DNA, 80 bp, synthetic construct
  source 1..80: mol_type = other DNA
ggggacttaccacaccagataaaaaacatcagaaagaacctccattcctttggatgggatatgagctccatcctgataaa

SEQ ID NO: 75111 - DNA, 80 bp, synthetic construct
  source 1..80: mol_type = other DNA
tggacggtacaacctatacagctgcctgacaaagatagatggactgtcaatgatatacaaaagttagtgggaaaactaaa

SEQ ID NO: 75112 - DNA, 80 bp, synthetic construct
  source 1..80: mol_type = other DNA
tagtacccctgacgacagaagcagaaatggagttggcagagaacagggaaattctaaaagaacctgtacatggagtctat

SEQ ID NO: 75113 - DNA, 80 bp, synthetic construct
  source 1..80: mol_type = other DNA
acaggctagagccaacagccccaccaacagagagcttcagattcggagaggagatagccccctccccgaagcaggagccg

SEQ ID NO: 75114 - DNA, 80 bp, synthetic construct
  source 1..80: mol_type = other DNA
atacaaaaatctaaaaacaggaaagtatgcaaaaagggggtcgactcacactaatgatgtaaaacaattaacagaagtag

SEQ ID NO: 75115 - DNA, 80 bp, synthetic construct
  source 1..80: mol_type = other DNA
tgcaaaaggtagccacagagagcatagtaatatggggaaaggttcctaaatttaaactacctattcggaaagaaacatgg

SEQ ID NO: 75116 - DNA, 80 bp, synthetic construct
  source 1..80: mol_type = other DNA
ctatagggacagtattagtaggacctacaccgatcaacataattgggagaaatatgttgacccagattggctgtacttta

SEQ ID NO: 75117 - DNA, 80 bp, synthetic construct
  source 1..80: mol_type = other DNA
agtaacagtactagatgtaggagatgcatacttttcagtgcctttatatgaagactttagaaaatacactgcattcacta

SEQ ID NO: 75118 - DNA, 80 bp, synthetic construct
  source 1..80: mol_type = other DNA
ggctaatttttaagggaaaatctggccttccaacaaggggtggccaggaaattttcctcagagcagaccggaaccaacag

SEQ ID NO: 75119 - DNA, 80 bp, synthetic construct
  source 1..80: mol_type = other DNA
gtcagatttattccggaattaaagtaaagcaactgtgtaaactcctcaggggagacaaagcactaacagatatagtacca

SEQ ID NO: 75120 - DNA, 80 bp, synthetic construct
  source 1..80: mol_type = other DNA
atctaaaaacaggaaaatatgcaaaaaagaggtctgcccacactaatgatgtaaaacaattagtagaagcagtgcaaaaa

SEQ ID NO: 75121 - DNA, 80 bp, synthetic construct
  source 1..80: mol_type = other DNA
gagagacggctaattttttagggaaaatttggccttccagcaaggggaggccaggaaattttcctcagagcagactggaa

SEQ ID NO: 75122 - DNA, 80 bp, synthetic construct
  source 1..80: mol_type = other DNA
atatacagaaattagtgggaaaactaaattgggcaagtcagatatatccaggaattaaaataaggcaactgtgtaaactt

SEQ ID NO: 75123 - DNA, 80 bp, synthetic construct
  source 1..80: mol_type = other DNA
gggtagccaggaaattttccccagagcaggacagagccaacagccccaccagcagagagtgtgggaatgggggtggagat

SEQ ID NO: 75124 - DNA, 80 bp, synthetic construct
  source 1..80: mol_type = other DNA
gcatgacaaaaatcttagagccctttagatcagcaaatccagatataattatctatcaatacatggatgacttgtatgta

SEQ ID NO: 75125 - DNA, 80 bp, synthetic construct
  source 1..80: mol_type = other DNA
atttattcagggattaaagtaaggcaattgtgtagactcctcaggggagccaaagcactaacagatatagtaacattgac

SEQ ID NO: 75126 - DNA, 80 bp, synthetic construct
  source 1..80: mol_type = other DNA
tagggaagcagagttagaattgacagagaacagggagattctaaaagaacctgcgcatggggtatattatgacccctcaa

SEQ ID NO: 75127 - DNA, 80 bp, synthetic construct
  source 1..80: mol_type = other DNA
aacagccccacccgcagagagcttcaagttcggagaggagatagccccctccccgaactcggagccgaaggaaaaggaac

SEQ ID NO: 75128 - DNA, 80 bp, synthetic construct
  source 1..80: mol_type = other DNA
aagacaggaaaatatgcaagaaagaggtctgctcacactaatgatgtaaaacaattggtagaagtagtgcaaaaagtggt

SEQ ID NO: 75129 - DNA, 80 bp, synthetic construct
  source 1..80: mol_type = other DNA
ggaattgggggttttatcaaagtaagacagtatgatcaaatacttatagaaattgaaggaagaaaggctataggaacagt

SEQ ID NO: 75130 - DNA, 80 bp, synthetic construct
  source 1..80: mol_type = other DNA
taatgagacaccggggattaggtatcagtacaatgtgcttccacagggatggaaaggatcaccagcaatatttcagtata

SEQ ID NO: 75131 - DNA, 80 bp, synthetic construct
  source 1..80: mol_type = other DNA
taggacagcacagagcaaaaatagaggaattaagagagcatctactgaaatggggatttaccacaccagataaaaaacat

SEQ ID NO: 75132 - DNA, 80 bp, synthetic construct
  source 1..80: mol_type = other DNA
aagtaaagcatctatgtagactccttaggggggctaaagcactaacagacatagtaccattgacagcagaagcagaaatg

SEQ ID NO: 75133 - DNA, 80 bp, synthetic construct
  source 1..80: mol_type = other DNA
ccaacagccccaccagcagaggagatagccccctccctgaagcaggagccgaaggaaaaggagctgtatcccttaacttc

SEQ ID NO: 75134 - DNA, 80 bp, synthetic construct
  source 1..80: mol_type = other DNA
caaaaagggggtctacccacactaatgatgtaaaacaattaacagaggtagtacaaaaaatagccacagagagcatagtg

SEQ ID NO: 75135 - DNA, 80 bp, synthetic construct
  source 1..80: mol_type = other DNA
cctcagatcactctttggcagcgacccctagtcaaagtaaaaatagggggacagctaatagaagccctattagacacagg

SEQ ID NO: 75136 - DNA, 80 bp, synthetic construct
  source 1..80: mol_type = other DNA
tgtaggatctgacttggagataggacagcatagagcaaaaatagaggagttgagaaaccatctactgacatggggattta

SEQ ID NO: 75137 - DNA, 80 bp, synthetic construct
  source 1..80: mol_type = other DNA
tcagatttatccaggaattaaagtaaagcaactatgtaaactcattaggggaaccaaagcactaacagaggtagtaccac

SEQ ID NO: 75138 - DNA, 80 bp, synthetic construct
  source 1..80: mol_type = other DNA
caacagctccaccagcagagagcttggggatggaagaagagaaagctgcctctccgcagcaggaacagagagaccaggga

SEQ ID NO: 75139 - DNA, 80 bp, synthetic construct
  source 1..80: mol_type = other DNA
ataaaaaacatcagaaagaacctccattcctttggatgggatatgagctccatcctgacaagtggacggtacaacctata

SEQ ID NO: 75140 - DNA, 80 bp, synthetic construct
  source 1..80: mol_type = other DNA
tccagggattaaagtaaggcacctatgtagactccttaggggggccaaagcactaacagacatagtacccctgacagcag

SEQ ID NO: 75141 - DNA, 80 bp, synthetic construct
  source 1..80: mol_type = other DNA
aggaaaatatgcaaagagggggtctgcccacactaatgatgtaaaacagctaacagaagcagtgcaaaaaatagccttag

SEQ ID NO: 75142 - DNA, 80 bp, synthetic construct
  source 1..80: mol_type = other DNA
aggccatagtaatatggggaaaaattcccaaatttaaactacctataaaaaaagaaacatgggaattatggtggacagag

SEQ ID NO: 75143 - DNA, 80 bp, synthetic construct
  source 1..80: mol_type = other DNA
aggaggttttatcaaagtaagacagtatgatcaaatacttctagaaattagtggaaaaaaggctatagggacagtattag

SEQ ID NO: 75144 - DNA, 80 bp, synthetic construct
  source 1..80: mol_type = other DNA
taggacctacacctatcaacataattgggagaaatatgttgactcagattggatgtactctaaattttccaataagtcct

SEQ ID NO: 75145 - DNA, 80 bp, synthetic construct
  source 1..80: mol_type = other DNA
aaaagcattaacagaaatatgtacagacatggaaaaggaagggaaaatttcaaaaattgggcctgaaaatccatacaaca

SEQ ID NO: 75146 - DNA, 80 bp, synthetic construct
  source 1..80: mol_type = other DNA
gggagatgcatacttttcagttcccttacatgaagactttagaaagtatactgcatttactatacctagtgcaaataatg

SEQ ID NO: 75147 - DNA, 80 bp, synthetic construct
  source 1..80: mol_type = other DNA
ttatccaggaattaaagtaaagcaattatgtaggctcctcaggggagccaaggcactaacagatatagtaacattgactg

SEQ ID NO: 75148 - DNA, 80 bp, synthetic construct
  source 1..80: mol_type = other DNA
gacttagtagcagaaatacagaaacaagggcaagaccaatggacatatcagatttatcaagagccctttaagaatctgaa

SEQ ID NO: 75149 - DNA, 80 bp, synthetic construct
  source 1..80: mol_type = other DNA
cctcctctaacttccctcaaatcactctttggcaacgacccttagtcacaataagaatagagggacagataaaagaagct

SEQ ID NO: 75150 - DNA, 80 bp, synthetic construct
  source 1..80: mol_type = other DNA
tgtgggggacgcatatttttcagttcctttagatgaaagctttagaaagtatactgcgttcaccatacctagtataaaca

SEQ ID NO: 75151 - DNA, 80 bp, synthetic construct
  source 1..80: mol_type = other DNA
atctgatttagaaatagggcagcatagggcaaaaatagaggatctgagagctcatctattaacatggggatttaccacac

SEQ ID NO: 75152 - DNA, 80 bp, synthetic construct
  source 1..80: mol_type = other DNA
gtagcatgataaaaatcttagagccctttagaaaagaaaacccagaaatagtgatctaccaatacatggatgatttatat

SEQ ID NO: 75153 - DNA, 80 bp, synthetic construct
  source 1..80: mol_type = other DNA
gtaggatctgatttagaaatagggcaacacagagcaaaaatagaggagttaagagaacatctgttgaaatggggatttac

SEQ ID NO: 75154 - DNA, 80 bp, synthetic construct
  source 1..80: mol_type = other DNA
agcctatacaactgccagacaaggagagctggactgtcaatgatatacaaaaactggtgggaaaactaaattgggcaagt

SEQ ID NO: 75155 - DNA, 80 bp, synthetic construct
  source 1..80: mol_type = other DNA
cagatttattcagggattcaagtaaggcaattatgtaaactccttaggggagcaaaagcactgacagacatagtaccact

SEQ ID NO: 75156 - DNA, 80 bp, synthetic construct
  source 1..80: mol_type = other DNA
gaaagacaggctaattttttagggagaatttggccttcccacaaggggaggccgggaaattttcttcagaacaagacaga

SEQ ID NO: 75157 - DNA, 80 bp, synthetic construct
  source 1..80: mol_type = other DNA
aaagaactcaagacttttgggaagttcagttaggaataccacatcctgctgggttgaagaagaaaaaatcagtaacagta

SEQ ID NO: 75158 - DNA, 80 bp, synthetic construct
  source 1..80: mol_type = other DNA
ttatgcaggaattaaaataaagcaattgtgtaaactcctcaggggagccagagcactaacagatgtagtagcactgacca

SEQ ID NO: 75159 - DNA, 80 bp, synthetic construct
  source 1..80: mol_type = other DNA
atgaggcaccagggattagatatcagtacaatgtgcttccacagggatggaaaggatcaccatcaatatttcaggcaagc

SEQ ID NO: 75160 - DNA, 80 bp, synthetic construct
  source 1..80: mol_type = other DNA
ggatggaaaggatcaccagcaatatttcagagtagcatgacaagaatcttagatccctttagagcaaaaaatccagaaat

SEQ ID NO: 75161 - DNA, 80 bp, synthetic construct
  source 1..80: mol_type = other DNA
caggaaattttcctcagagcagactagagccaacagccccaccagcagagagccttgggatgggggaagagataacctcc

SEQ ID NO: 75162 - DNA, 80 bp, synthetic construct
  source 1..80: mol_type = other DNA
taaaacaactaacagaggtagtgcaaaaagtggctgtagaaagcatagtaatatggggaaagactcctaaatttagacta

SEQ ID NO: 75163 - DNA, 80 bp, synthetic construct
  source 1..80: mol_type = other DNA
cccatacagaaagaaacatgggaagcatggtggatggagtattggcaggctacctggattcctgaatgggaatttgtcaa

SEQ ID NO: 75164 - DNA, 80 bp, synthetic construct
  source 1..80: mol_type = other DNA
tctccgcagcaggaaccgagggacaaggagctatatcctcctttagcctccctcaaatcactctttggcagcgaccccta

SEQ ID NO: 75165 - DNA, 80 bp, synthetic construct
  source 1..80: mol_type = other DNA
gtccaagtaaagatagggggacagctaatagaggctctattagacacaggagcagatgatacagtattagaagaaataaa

SEQ ID NO: 75166 - DNA, 80 bp, synthetic construct
  source 1..80: mol_type = other DNA
cccaagggttaaacaatggccattgacagaagagaaaataaaagcattaacggaaatttgtaatgaaatggaaaaggaag

SEQ ID NO: 75167 - DNA, 80 bp, synthetic construct
  source 1..80: mol_type = other DNA
gaaaaatttcaaaaattgggcctgaaaatccatacaacactccaatatttgccataaagaaaaaagacagtactaaatgg

SEQ ID NO: 75168 - DNA, 80 bp, synthetic construct
  source 1..80: mol_type = other DNA
ggaaggacaccaaatgaaagaatgtactgagagacaggctaattttttagggaaaatttggccttccagcaagggaaggc

SEQ ID NO: 75169 - DNA, 80 bp, synthetic construct
  source 1..80: mol_type = other DNA
ggggttaaaaaagaaaaaatcagtaacagtactggatgtgggggatgcatacttttcagtacccttagatgaagacttta

SEQ ID NO: 75170 - DNA, 80 bp, synthetic construct
  source 1..80: mol_type = other DNA
ttatatgtaggatctgatttagaaataggacagcacagagcaaaagtagaggagttaagagaacatctattgagatgggg

SEQ ID NO: 75171 - DNA, 80 bp, synthetic construct
  source 1..80: mol_type = other DNA
accaacagccccaccagcagagagctttgggatgggggaagagataaccacctctcctccgcagcaggagccgagggaca

SEQ ID NO: 75172 - DNA, 80 bp, synthetic construct
  source 1..80: mol_type = other DNA
aaaagtggctatagaaagcataataatatggggaaagacccctaaatttagactacccatacaaagggaaacatgggaca

SEQ ID NO: 75173 - DNA, 80 bp, synthetic construct
  source 1..80: mol_type = other DNA
acagtactagatgtgggggatgcatatttttcagttcccctagatgaaaactttagaaagtatactgcattcactatacc

SEQ ID NO: 75174 - DNA, 80 bp, synthetic construct
  source 1..80: mol_type = other DNA
gtcagatttatgcaggaattaaagtaaaacagctgtgtagactcctcagaggggccaaagccctaacagatatagtacca

SEQ ID NO: 75175 - DNA, 80 bp, synthetic construct
  source 1..80: mol_type = other DNA
ccaacagccccaccagcagagagccttgggatggggaaagagataaccccctctcaggagcaagaaccgagggacaaggg

SEQ ID NO: 75176 - DNA, 80 bp, synthetic construct
  source 1..80: mol_type = other DNA
aggatctgacttagaaatagggcagcatagagcaaaaatagagaagttaagagaccatctgctgaaatggggatttacca

SEQ ID NO: 75177 - DNA, 80 bp, synthetic construct
  source 1..80: mol_type = other DNA
aatttatgcaggaattaaagtaaagcaactgtgtagactcctcaggggagccaaggcactaacagatatagtaccactaa

SEQ ID NO: 75178 - DNA, 80 bp, synthetic construct
  source 1..80: mol_type = other DNA
cagccccaccaatagagagctttgggatgggggaagagataacctcctccccgaagcaggaaccgagggacaagggacta

SEQ ID NO: 75179 - DNA, 80 bp, synthetic construct
  source 1..80: mol_type = other DNA
ctatagaaagtatagtaatatggggaaaaacccctaaatttagactacccatacaaaaagaaacatgggatgcatggtgg

SEQ ID NO: 75180 - DNA, 80 bp, synthetic construct
  source 1..80: mol_type = other DNA
tatcctcctttagcttccctcaaatcactctttggcaacgacccttagtcacagcaagaatagggggacagccaatagaa

SEQ ID NO: 75181 - DNA, 80 bp, synthetic construct
  source 1..80: mol_type = other DNA
tattggcaggctacccacattcctgaatgggagtttgtcaataccccacctctagtaaaattatggtaccagttagaaaa

SEQ ID NO: 75182 - DNA, 80 bp, synthetic construct
  source 1..80: mol_type = other DNA
taggacctacacctgtcaacataattggaaggaacatgttgactcagattggctgtactttaaattttccaattagttct

SEQ ID NO: 75183 - DNA, 80 bp, synthetic construct
  source 1..80: mol_type = other DNA
caggacttctgggaagttcaattaggaataccgcatccagcgggtttgaaaaagaagaaatcaataacagtactggatgt

SEQ ID NO: 75184 - DNA, 80 bp, synthetic construct
  source 1..80: mol_type = other DNA
gggggatgcatatttttcaattcctttagataaaaattttagaaagtatactgcattcactatacctagtataaacaatg

SEQ ID NO: 75185 - DNA, 80 bp, synthetic construct
  source 1..80: mol_type = other DNA
tatacaaaagttagtgggaaaactaaattgggcaagtcagatttttccagggattaaagtaaagcacctatgtagactcc

SEQ ID NO: 75186 - DNA, 80 bp, synthetic construct
  source 1..80: mol_type = other DNA
ttaggggggccaaatcattaacagacatagtacccctgacggcagaagcagaaatggagttggcagagaacagggaaatt

SEQ ID NO: 75187 - DNA, 80 bp, synthetic construct
  source 1..80: mol_type = other DNA
aggggaggccaggaaattttcttcagaacagaccagagccaacagccccaccagcagagagcttcggattcggagaggag

SEQ ID NO: 75188 - DNA, 80 bp, synthetic construct
  source 1..80: mol_type = other DNA
gtggacatatcaaatttatcaggagccatataaaaatctaaagacaggaaaatatgcaaaaagggggtctgcccacacta

SEQ ID NO: 75189 - DNA, 80 bp, synthetic construct
  source 1..80: mol_type = other DNA
ctacctggattcctgagtgggagtttgtcaatacccctcctctagtaaaattatggtatcaatggaaacagaacccatac

SEQ ID NO: 75190 - DNA, 80 bp, synthetic construct
  source 1..80: mol_type = other DNA
atagccccctcccagaagcaggagacagagaaaaaggagctatatcccgtagcttccctcaaatcactctttggcagcga

SEQ ID NO: 75191 - DNA, 80 bp, synthetic construct
  source 1..80: mol_type = other DNA
ccccgcggggttaaaaaagaaaagatcagtgacagtattagatgtaggagatgcatatttttcagttcccttatatgaag

SEQ ID NO: 75192 - DNA, 80 bp, synthetic construct
  source 1..80: mol_type = other DNA
gagcccttcagaacaagaaatccagaaatggtaatctaccaatacatggatgatttatatgtaggatctgacttagaaat

SEQ ID NO: 75193 - DNA, 80 bp, synthetic construct
  source 1..80: mol_type = other DNA
agaaagaacctccattcctttggatgggatatgagctccatcctgacaaatggacggtgcaacctatacagctgccagac

SEQ ID NO: 75194 - DNA, 80 bp, synthetic construct
  source 1..80: mol_type = other DNA
gtacagaaacaagggttagatcaatggacatatcaaatttatcaagagccatacaaaaatctaaaaacaggaaagtatgc

SEQ ID NO: 75195 - DNA, 80 bp, synthetic construct
  source 1..80: mol_type = other DNA
aaaaaggggatctgcccacactaatgatgtaaaacaattaacagaagtagtgcaaaaaatagctacagaaagcatagtaa

SEQ ID NO: 75196 - DNA, 80 bp, synthetic construct
  source 1..80: mol_type = other DNA
cagcagagagcttcagagaggagatagccccctccctgaagcaggagccgaaggaaaaggagctatatcccttagcttcc

SEQ ID NO: 75197 - DNA, 80 bp, synthetic construct
  source 1..80: mol_type = other DNA
tctggggaaaagttcctaaatttaaactacctataaggaaagaaacatgggaagtatggtggacagagtattggcaagcc

SEQ ID NO: 75198 - DNA, 80 bp, synthetic construct
  source 1..80: mol_type = other DNA
acctggattcctgagtgggagtttatcaatacccctcctctagtcaagttgtggtatcagctagaaacagaacccatacc

SEQ ID NO: 75199 - DNA, 80 bp, synthetic construct
  source 1..80: mol_type = other DNA
caaagtaagacagtatgatcaaatacttatagaaattagtggaaaaaaggctatagggacagtattagtaggacctacac

SEQ ID NO: 75200 - DNA, 80 bp, synthetic construct
  source 1..80: mol_type = other DNA
ctatcaatataattgggagaaacatgttgcctccgattggatgtactttaaactttccaataagtcctattgaaactgta

SEQ ID NO: 75201 - DNA, 80 bp, synthetic construct
  source 1..80: mol_type = other DNA
agagatctgtcaagacatggaaaaagaaggaaaaatttcaaaaattgggcctgaaaatccatacaacactccaatatttg

SEQ ID NO: 75202 - DNA, 80 bp, synthetic construct
  source 1..80: mol_type = other DNA
ccataaagaaaaaagacagtactaaatggagaaaattggtagatttcagagaactcaataaaagaactcaagacttctgg

SEQ ID NO: 75203 - DNA, 80 bp, synthetic construct
  source 1..80: mol_type = other DNA
ttagatatcagtacaatgtgcttccacagggatggaaaggatcaccagcaatatttcagaatagcatgacaagaatctta

SEQ ID NO: 75204 - DNA, 80 bp, synthetic construct
  source 1..80: mol_type = other DNA
atatgtgggatcagacttagagatagggcagcatagagcaaagatagaggagttgagacaacatctattgaaatggggat

SEQ ID NO: 75205 - DNA, 80 bp, synthetic construct
  source 1..80: mol_type = other DNA
aagtcaaatttatgcaggaattaaagtaaagcaactgtgtaaactcctcaggggtgccaaagcactaacagacatagtaa

SEQ ID NO: 75206 - DNA, 80 bp, synthetic construct
  source 1..80: mol_type = other DNA
aaatttaaaaacaggaaaatatgcaagaagaaggtctgcccacactaatgatgtaaaacaattagcagaggtagtgcaaa

SEQ ID NO: 75207 - DNA, 80 bp, synthetic construct
  source 1..80: mol_type = other DNA
aaccaacagctccgccagcggagagctttgggatgggggaagagataaccccctctccgaagcaggatcagaaggacaag

SEQ ID NO: 75208 - DNA, 80 bp, synthetic construct
  source 1..80: mol_type = other DNA
aagtagttacagaaagcatagtaatatggggaaaggcccctaagtttagactacccatacaaagagaaacatgggaaaca

SEQ ID NO: 75209 - DNA, 80 bp, synthetic construct
  source 1..80: mol_type = other DNA
aaaagaaaaaatagaagcattaacagacatttgtacagagatggaaaaggaaggaaaaatttcaaaaattgggcctgaaa

SEQ ID NO: 75210 - DNA, 80 bp, synthetic construct
  source 1..80: mol_type = other DNA
aaaatggggatttactacaccagacaaaaagcatcagaaggaacctccatttctgtggatgggatatgaactccatcctg

SEQ ID NO: 75211 - DNA, 80 bp, synthetic construct
  source 1..80: mol_type = other DNA
tatattatgacccatcaaaagacttagtagcagaaatacagaaacaaggacaagaccaatggacatatcaaatctatcaa

SEQ ID NO: 75212 - DNA, 80 bp, synthetic construct
  source 1..80: mol_type = other DNA
gagccatttaagaatctgaaaacaggaaaatatgcaaaaaagaggtctgctcacactaatgatgtaagacaattagtaga

SEQ ID NO: 75213 - DNA, 80 bp, synthetic construct
  source 1..80: mol_type = other DNA
agtagtgcaaaaagtggtcacagaaagcatagtaatatggggaaagacccctaaatttaaactacccatacaaaaagaaa

SEQ ID NO: 75214 - DNA, 80 bp, synthetic construct
  source 1..80: mol_type = other DNA
aaattttcctcagagcagaccagagccaacagccccaccagcagagctcctggggatgggagaagagatagtctcccctc

SEQ ID NO: 75215 - DNA, 80 bp, synthetic construct
  source 1..80: mol_type = other DNA
catgggaaacatggtggatggaatattggcaggccacccatattcctgaatgggagtttgtcaatacccctcctctagta

SEQ ID NO: 75216 - DNA, 80 bp, synthetic construct
  source 1..80: mol_type = other DNA
cgaagcaggagcagagggaacctcctttagtttccctcaaatcactctttggcaacgaccagttgtcacagtaaaaatag

SEQ ID NO: 75217 - DNA, 80 bp, synthetic construct
  source 1..80: mol_type = other DNA
aaaccaaaaatgatagggggaattggaggttttattaaagtaaaacagtatgatcagatacttatagaaatttgtggaaa

SEQ ID NO: 75218 - DNA, 80 bp, synthetic construct
  source 1..80: mol_type = other DNA
aaaggctataggtacagtattgataggacctacacctgtcaacataattggaaggaacatgttgactcagattggttgta

SEQ ID NO: 75219 - DNA, 80 bp, synthetic construct
  source 1..80: mol_type = other DNA
tggccattgtcagaagaaaaaataaaagcattgacagaaatttgtaaagagatggaagaggaaggaaaaatttcaaaaat

SEQ ID NO: 75220 - DNA, 80 bp, synthetic construct
  source 1..80: mol_type = other DNA
tcagagagctcaataaaaggactcaggacttctgggaagttcaattgggaataccgcatccagcaggtttgaaacagaaa

SEQ ID NO: 75221 - DNA, 80 bp, synthetic construct
  source 1..80: mol_type = other DNA
cagcaatattccagtatagcatgacaaaaatcttagagccctttagagcaaaaaatccggagataattatctatcaatac

SEQ ID NO: 75222 - DNA, 80 bp, synthetic construct
  source 1..80: mol_type = other DNA
ctaccaatacatggatgatttatatgtagggtctgacttagaaatagggcagcacagagcaaaaatagaggagttaagag

SEQ ID NO: 75223 - DNA, 80 bp, synthetic construct
  source 1..80: mol_type = other DNA
ctccatcctgacaaatggacggtacaacctatacagctgccagacaaggacagctggactgtcaatgatatacaaaagtt

SEQ ID NO: 75224 - DNA, 80 bp, synthetic construct
  source 1..80: mol_type = other DNA
ggtgggaaagctaaattgggcaagtcagatttatccagggattaaagtaaggcacctatgtagactccttaggggggcca

SEQ ID NO: 75225 - DNA, 80 bp, synthetic construct
  source 1..80: mol_type = other DNA
aagcactaacagacatagtttccctgacggcagaagcagaaatggaattggcagagaacagggaaattctaaaagaacct

SEQ ID NO: 75226 - DNA, 80 bp, synthetic construct
  source 1..80: mol_type = other DNA
gtacatggagtctattatgacccatcaaaagacttaatagcagaagtacagaaacaagggttagatcaatggacatatca

SEQ ID NO: 75227 - DNA, 80 bp, synthetic construct
  source 1..80: mol_type = other DNA
aatttatcaagagccatataaaaacctaaaaacaggaaaatatgcaaagagggggtctgcccacactaatgatgtaaaac

SEQ ID NO: 75228 - DNA, 80 bp, synthetic construct
  source 1..80: mol_type = other DNA
aattaacagaagtagtacaaaaaatagccacagagagcataataatatggggaaagattcctaaatttaaattacctata

SEQ ID NO: 75229 - DNA, 80 bp, synthetic construct
  source 1..80: mol_type = other DNA
ctgaagcaggagccgaaggaaaaggagctatatcccttaatttccctcaaatcactctttggcagcgacccctcgtccca

SEQ ID NO: 75230 - DNA, 80 bp, synthetic construct
  source 1..80: mol_type = other DNA
ttagtggaaaaaaggctatagggacagtattagtaggacctacacctatcaacataattgggagaaatatgttaactcag

SEQ ID NO: 75231 - DNA, 80 bp, synthetic construct
  source 1..80: mol_type = other DNA
aggacaccaaatgaaagaatgcacagagagaccggctaattttttagggaaaatttggccttccaacaaaggaaggccag

SEQ ID NO: 75232 - DNA, 80 bp, synthetic construct
  source 1..80: mol_type = other DNA
tatgtaggatctgacttagaaatagggcagcacagagcaaaaatagaggaattaagagagcatctactgaaatggggatt

SEQ ID NO: 75233 - DNA, 80 bp, synthetic construct
  source 1..80: mol_type = other DNA
tacagcctatacagctgccagaaaaggaaaattggactgtcaatgatatacaaaagttagtgggaaaactaaattgggca

SEQ ID NO: 75234 - DNA, 80 bp, synthetic construct
  source 1..80: mol_type = other DNA
cctgacagcagaagcagagatggaattggcagagaacagggaaattctaaaagaacctgtacatggagtctattatgacc

SEQ ID NO: 75235 - DNA, 80 bp, synthetic construct
  source 1..80: mol_type = other DNA
catcaaaagacttaatagcagaagtacagaaacaaggggtagatcaatggacatatcaaatttatcaagagccatacaaa

SEQ ID NO: 75236 - DNA, 80 bp, synthetic construct
  source 1..80: mol_type = other DNA
agagccaacagcccctccagcagagagcctcggcttcagagaggagatagccccctccccgaagcaggagccgaaggaaa

SEQ ID NO: 75237 - DNA, 80 bp, synthetic construct
  source 1..80: mol_type = other DNA
aatagccacagagggcatagtgatatgggggaaggttcctaaatttaaactgcctataagaaaagaaacatgggaggtat

SEQ ID NO: 75238 - DNA, 80 bp, synthetic construct
  source 1..80: mol_type = other DNA
gacagtattagtaggacccacacctatcaacataattggaagaaatatgttgactcagattggctgtactttaaactttc

SEQ ID NO: 75239 - DNA, 80 bp, synthetic construct
  source 1..80: mol_type = other DNA
ctgacaaatggacagttcagcctatacagctgccagaaaaagaaagctggactgtcaatgatatacagaaattagtgggt

SEQ ID NO: 75240 - DNA, 80 bp, synthetic construct
  source 1..80: mol_type = other DNA
aaactaaattgggcaagtcagatttatgcaggaattaaagtaaagcaactgtgtagactcctcagaggagccaaggcact

SEQ ID NO: 75241 - DNA, 80 bp, synthetic construct
  source 1..80: mol_type = other DNA
aacagatatagtaacactgactgaggaagcagaattagaattggcagagaacagggaaattctaaaagaacctgtacatg

SEQ ID NO: 75242 - DNA, 80 bp, synthetic construct
  source 1..80: mol_type = other DNA
gggtatattatgacccaacaaaagacttaatagcagaaatacagaaacaagggcaagaccaatggacatatcagatttat

SEQ ID NO: 75243 - DNA, 80 bp, synthetic construct
  source 1..80: mol_type = other DNA
caagagccatttaagaatctaaaaacaggaaagtatgcaaaaaggaggtctgcccacactaatgatgtaaaacaattaac

SEQ ID NO: 75244 - DNA, 80 bp, synthetic construct
  source 1..80: mol_type = other DNA
agagctagtgcaaaaagtggctacagaaggcatagtaatatggggaaagacccctaaatttagactgcccatacaaaaag

SEQ ID NO: 75245 - DNA, 80 bp, synthetic construct
  source 1..80: mol_type = other DNA
agacatgggaaacatggtggatggagtactggcaagctacctggattcctgaatgggagtttgtcaatacccctccccta

SEQ ID NO: 75246 - DNA, 80 bp, synthetic construct
  source 1..80: mol_type = other DNA
caatggccattaacagaagaaaaaataaaagcattggtagagatttgtgcagagatggaaaaggaaggaaaaattgaaaa

SEQ ID NO: 75247 - DNA, 80 bp, synthetic construct
  source 1..80: mol_type = other DNA
tctgagagaccggctaattttttagggaaaatttggccttccaacaaagggaggccagggaattttcctcagagcagacc

SEQ ID NO: 75248 - DNA, 80 bp, synthetic construct
  source 1..80: mol_type = other DNA
caccagcaatctttcaggcaagcatgacaaaaatattagaaccctttagaacaaaaaatccagagatagtgatataccaa

SEQ ID NO: 75249 - DNA, 80 bp, synthetic construct
  source 1..80: mol_type = other DNA
tatatggatgatttatatgtaggatcagacttagagctagggcagcacagagcaaagatagaggagttaagagaacatct

SEQ ID NO: 75250 - DNA, 80 bp, synthetic construct
  source 1..80: mol_type = other DNA
actgaaatggggattcaccacaccagacaaaaagcatcagaaagaacctccagttctttggatgggatatgaactccatc

SEQ ID NO: 75251 - DNA, 80 bp, synthetic construct
  source 1..80: mol_type = other DNA
accctcccctccgaagcaggagccgcaggacaaggggatatatcctcccttaacttccctcaaatcactctttggcaacg

SEQ ID NO: 75252 - DNA, 80 bp, synthetic construct
  source 1..80: mol_type = other DNA
aggaattaaaataaggcaactatgtaaactcatcaggggagccaaagcactaacagatatagtaacactgactgaggaag

SEQ ID NO: 75253 - DNA, 80 bp, synthetic construct
  source 1..80: mol_type = other DNA
ttaacttccctcaaatcactctttggcagcgacccttaatcaaagcaagagtagggggacagctaatagaagccctatta

SEQ ID NO: 75254 - DNA, 80 bp, synthetic construct
  source 1..80: mol_type = other DNA
gatatacaaaaattggtgggaaaactaaattgggcaagtcagatttatccaggaattaaagtaaagcaattatgcaaact

SEQ ID NO: 75255 - DNA, 80 bp, synthetic construct
  source 1..80: mol_type = other DNA
ttctaaaagagccagtgcatggggtatactatgacccatcaaaagacttaatagcagaaatacagaagcaggggcaaggc

SEQ ID NO: 75256 - DNA, 80 bp, synthetic construct
  source 1..80: mol_type = other DNA
caatggacatatcaaatatatcaggagccacataaaaacctgaaaacaggaaaatatgcaagaatgaagtctgcccacac

SEQ ID NO: 75257 - DNA, 80 bp, synthetic construct
  source 1..80: mol_type = other DNA
agagccaacagccccaccagcagagtgcttcgggttcggagaggagatagccccctctccgaagcaggagataaccccct

SEQ ID NO: 75258 - DNA, 80 bp, synthetic construct
  source 1..80: mol_type = other DNA
taatgatgtaaaacaattaacagaagcagtgcaaaagatagccatggaaagcatagtaatatggggaaagactcctaagt

SEQ ID NO: 75259 - DNA, 80 bp, synthetic construct
  source 1..80: mol_type = other DNA
cacctggatccctgaatgggaatttgtcaatacccctcccctagtaaaactatggtaccagttagaaacagagcccataa

SEQ ID NO: 75260 - DNA, 80 bp, synthetic construct
  source 1..80: mol_type = other DNA
ttagactacccatacaaaaagaaacatgggagacatggtgggcagaatattggcaagccacctggatccctgaatgggaa

SEQ ID NO: 75261 - DNA, 80 bp, synthetic construct
  source 1..80: mol_type = other DNA
ccccgaggcaggagcagaagcaggagccaaaggagaaggagctatatcccttagcttccctcaaatcactctttggcaac

SEQ ID NO: 75262 - DNA, 80 bp, synthetic construct
  source 1..80: mol_type = other DNA
ttccacagggatggaaagggtcaccagcaatatttcagagtagcatgataaaaattttagagccctttagaaaaaacaat

SEQ ID NO: 75263 - DNA, 80 bp, synthetic construct
  source 1..80: mol_type = other DNA
tttatccaggggttaaagtaaagcacctgtgtaggctccttaggggggccaaagcactaacagacatagtacccctgacg

SEQ ID NO: 75264 - DNA, 80 bp, synthetic construct
  source 1..80: mol_type = other DNA
gcagaagcagaaatggaattggcagagaatagggaaattctaagagaacctgtacatggagtttattatgacccatcaaa

SEQ ID NO: 75265 - DNA, 80 bp, synthetic construct
  source 1..80: mol_type = other DNA
agacttaatagcagaagtacagaagcaagggctagaccagtggacatatcaagtttatcaagaaccatacaaaaatctaa

SEQ ID NO: 75266 - DNA, 80 bp, synthetic construct
  source 1..80: mol_type = other DNA
agacaggaaaatatgcaaagaggggttctgcccatactaatgatgtaaaacagttaacagaagtagtgcaaaaaatagcc

SEQ ID NO: 75267 - DNA, 80 bp, synthetic construct
  source 1..80: mol_type = other DNA
gtatcccgtaacttccctcaaatcactctttggcagcgacccctcgttacagtaaaagtagggggacagctgatagaagc

SEQ ID NO: 75268 - DNA, 80 bp, synthetic construct
  source 1..80: mol_type = other DNA
acagaaagcatagtaatatggggaaagattcctaaatttaaactacctatacgaaaagacacatgggaagtatggtggac

SEQ ID NO: 75269 - DNA, 80 bp, synthetic construct
  source 1..80: mol_type = other DNA
cctgttagacacaggagcagatgacacagtattagaagaaatagatttaccaggaaaatggaaaccaaaaatgataggag

SEQ ID NO: 75270 - DNA, 80 bp, synthetic construct
  source 1..80: mol_type = other DNA
ttagtaggacctacacctgtcaacataattgggagaaatatgatgactcagattggatgtactttaaactttccaataag

SEQ ID NO: 75271 - DNA, 80 bp, synthetic construct
  source 1..80: mol_type = other DNA
aacactccaatatttgccataaagaaaaaagacagtactaaatggagaaaattggtggatttcagggaactcaataaaag

SEQ ID NO: 75272 - DNA, 80 bp, synthetic construct
  source 1..80: mol_type = other DNA
aactcaagacttctgggaggtccaattaggaatacctcatcccgcggggttaaaaaagaaaagatcagtaacagtactag

SEQ ID NO: 75273 - DNA, 80 bp, synthetic construct
  source 1..80: mol_type = other DNA
atgtgggagatgcatacttttcagttcccttatatgaagagtttagaaagtatactgcattcactatacctagtataaat

SEQ ID NO: 75274 - DNA, 80 bp, synthetic construct
  source 1..80: mol_type = other DNA
aacaaaagacttagtagcagaaatacagaagcaggagcatggacagtggtcatatcaaatatatcaggagccacataaaa

SEQ ID NO: 75275 - DNA, 80 bp, synthetic construct
  source 1..80: mol_type = other DNA
gagccaacagccccacctgcagagagcttcagcttcggggaggagacagccccctcccagaagccggagtcgaaggaaaa

SEQ ID NO: 75276 - DNA, 80 bp, synthetic construct
  source 1..80: mol_type = other DNA
acctgaaaacagggaagtatgcaaaaaggaagtctgcacacaccaatgatgtaagacaattaacagaagcagtgcaaaag

SEQ ID NO: 75277 - DNA, 80 bp, synthetic construct
  source 1..80: mol_type = other DNA
ggagctgtatcccttagcttccctcaaatcactctttggcaacgacccctcgtcgcagtaagaatagagggacagctaat

SEQ ID NO: 75278 - DNA, 80 bp, synthetic construct
  source 1..80: mol_type = other DNA
tacgagagacggctaattttttagggaaaatctggccttccaacaaggggaggccagggaattttcttcagaacaggcca

SEQ ID NO: 75279 - DNA, 80 bp, synthetic construct
  source 1..80: mol_type = other DNA
cttagagatagggcagcatagagcaaaaatagaggagctgagagaacatctattgagatggggatttacaacaccagaca

SEQ ID NO: 75280 - DNA, 80 bp, synthetic construct
  source 1..80: mol_type = other DNA
aggaattaaagtaaagcaactgtgcaaactcctcaggggagccaaagcattaacagatatagttccactgactgaggaag

SEQ ID NO: 75281 - DNA, 80 bp, synthetic construct
  source 1..80: mol_type = other DNA
aaaatatgcaaaaaggaggtctgcccacactaatgatgtaaaacaattaacagaggtagtgcaaaaagtggctttggaat

SEQ ID NO: 75282 - DNA, 80 bp, synthetic construct
  source 1..80: mol_type = other DNA
cagcagagaactttggaatgagggaagagataacctcccctccgaaacaggaaccggaggacaagggactatatcctccc

SEQ ID NO: 75283 - DNA, 80 bp, synthetic construct
  source 1..80: mol_type = other DNA
gcatagtaatatggggaaagacccctaaatttagactacccatacaaagagaaacatgggaagcatggtggatggagtat

SEQ ID NO: 75284 - DNA, 80 bp, synthetic construct
  source 1..80: mol_type = other DNA
cctctagtaaaattatggtaccagttagagaaagaccccatagtaggagcagagactttctatgtagatggggcagccta

SEQ ID NO: 75285 - DNA, 80 bp, synthetic construct
  source 1..80: mol_type = other DNA
ggatgcatatttctcagttcctctagatgaaaactttagaaagtatactgcattcactatacctagtgtaaataatgaga

SEQ ID NO: 75286 - DNA, 80 bp, synthetic construct
  source 1..80: mol_type = other DNA
ctagagcactaacagaaacagtgacattaactgaggaagcagaattagaattggcagagaacagggaaattttaaaggaa

SEQ ID NO: 75287 - DNA, 80 bp, synthetic construct
  source 1..80: mol_type = other DNA
aacagttaacagagttagtacaaaaagtggctacagaaagcatagtaatatggggaaagacccctaaatttagactaccc

SEQ ID NO: 75288 - DNA, 80 bp, synthetic construct
  source 1..80: mol_type = other DNA
aaattagtagatttcagagaacttaataagagaactcaagacttctgggaggttcaattaggaatacctcatcccgcggg

SEQ ID NO: 75289 - DNA, 80 bp, synthetic construct
  source 1..80: mol_type = other DNA
gatttaccacaccagacaaaaaacatcagaaagagcctccgttcctttggatggggtatgagctccatcctgacaaatgg

SEQ ID NO: 75290 - DNA, 80 bp, synthetic construct
  source 1..80: mol_type = other DNA
ggcaagtcagatttatgcaggaattaaagtaaagcaactgtgtagactcctcaggggagccaaagcattaacagatatag

SEQ ID NO: 75291 - DNA, 80 bp, synthetic construct
  source 1..80: mol_type = other DNA
aaaaagcagctacagaaagcataataatatggggaaaaacccctaaatttagactacccatacaaagagagacatgggaa

SEQ ID NO: 75292 - DNA, 80 bp, synthetic construct
  source 1..80: mol_type = other DNA
tgatttagaaataggggagcatagagcaaaaatagaggagctgagagctcatctattgagatgggggtttactacaccag

SEQ ID NO: 75293 - DNA, 80 bp, synthetic construct
  source 1..80: mol_type = other DNA
tccgaagcaggagcagaaggagagggaacagcctcctttaatttccctcaaatcactctttggcaacgacccattgtcac

SEQ ID NO: 75294 - DNA, 80 bp, synthetic construct
  source 1..80: mol_type = other DNA
tgcagggatcaaagtaaagcaactgtgtaaactcctcaggggagccaaagcactaacagatgtagtaacattgactgagg

SEQ ID NO: 75295 - DNA, 80 bp, synthetic construct
  source 1..80: mol_type = other DNA
ccccaccagcagagctcctggggatggggggagagataacctcccctccgaagcaggagcagaaggagagggaacagcct

SEQ ID NO: 75296 - DNA, 80 bp, synthetic construct
  source 1..80: mol_type = other DNA
aggaaaatatgcaagaaagaggtctgctcacactaatgatgtaagacaattagtagaagtagtgcaaaaagtgaccacag

SEQ ID NO: 75297 - DNA, 80 bp, synthetic construct
  source 1..80: mol_type = other DNA
aaagcatagtaatatggggaaagacccctaaatttaaactgcccatacaaaaagagacatgggaaacatggtggatggag

SEQ ID NO: 75298 - DNA, 80 bp, synthetic construct
  source 1..80: mol_type = other DNA
cctttaatttccctcaaatcactctttggcaacgacccgttgtcacagtaagagtaggaggacagctaaaagaagctcta

SEQ ID NO: 75299 - DNA, 80 bp, synthetic construct
  source 1..80: mol_type = other DNA
aaaagcattgacagcaatttgtaaagagatggaggaggaaggaaaaatttcaaaaattgggcctgacaatccatacaata

SEQ ID NO: 75300 - DNA, 80 bp, synthetic construct
  source 1..80: mol_type = other DNA
agacaccaggagtcagatatcagtacaatgtgctaccacagggatggaaaggatcaccagcaatattccagcatagcatg

SEQ ID NO: 75301 - DNA, 80 bp, synthetic construct
  source 1..80: mol_type = other DNA
atttatccaggcattaaagtaaggcgactgtgtaaactcctcaggggagccaaagcgctaacagatatagtagtactaga

SEQ ID NO: 75302 - DNA, 80 bp, synthetic construct
  source 1..80: mol_type = other DNA
agccccaccagcagagaaccttgggatgggggaagaaataaccccccctccgaaacaggaaccgggggacaagggactgt

SEQ ID NO: 75303 - DNA, 80 bp, synthetic construct
  source 1..80: mol_type = other DNA
ggaattggagggtttattaaagtaagacagtatgatcaaatatctatagaaatttatgacaaaagggccataggtacggt

SEQ ID NO: 75304 - DNA, 80 bp, synthetic construct
  source 1..80: mol_type = other DNA
gatgtgggggatgcatatttttcagttccattagatccagaatttagaaagtatacggcattcactatacctagtacaaa

SEQ ID NO: 75305 - DNA, 80 bp, synthetic construct
  source 1..80: mol_type = other DNA
ggggaaacttaattgggcaagtcagatctatgcaggaattaaaataaagcaactgtgtaaacttcttaggggagccaaag

SEQ ID NO: 75306 - DNA, 80 bp, synthetic construct
  source 1..80: mol_type = other DNA
ctttaacagatatagtaacactgactgaagaagcagaattagaactggcagaaaacagagaaattctaaaagaacctgta

SEQ ID NO: 75307 - DNA, 80 bp, synthetic construct
  source 1..80: mol_type = other DNA
ctcagagcagaccggaaccaacagctccaccagcagagagctttgggatgggggaagagataaccccctctccgaagcag

SEQ ID NO: 75308 - DNA, 80 bp, synthetic construct
  source 1..80: mol_type = other DNA
taacagaggtagtgcaaaaagtgtctcaagaaagcatagtaatatggggaaagacccctaaatttaggctacctatacaa

SEQ ID NO: 75309 - DNA, 80 bp, synthetic construct
  source 1..80: mol_type = other DNA
gaaccgagggacaaggaacaactataccctcctttaacctccctcaaatcactctttggcagcgacccttagtcacagta

SEQ ID NO: 75310 - DNA, 80 bp, synthetic construct
  source 1..80: mol_type = other DNA
ctgcattcactatacctagtacaaataatgaaacaccaggggttagatatcagtacaatgtgcttccacagggatggaaa

SEQ ID NO: 75311 - DNA, 80 bp, synthetic construct
  source 1..80: mol_type = other DNA
gccaacagccccaccagcagagatcttggggatggaggaagagacagcctcctctccgaggcaggaaccgagggacaagg

SEQ ID NO: 75312 - DNA, 80 bp, synthetic construct
  source 1..80: mol_type = other DNA
ccatcagccccaccagcagagagcgtggggatgggggaagagatagctccctctccgcagcaggaaccgagggacaaggg

SEQ ID NO: 75313 - DNA, 80 bp, synthetic construct
  source 1..80: mol_type = other DNA
agaagctctattagacacaggagcagatgatacagtactagaagaaataaatttatcaggaagatggaaaccaaaaatga

SEQ ID NO: 75314 - DNA, 80 bp, synthetic construct
  source 1..80: mol_type = other DNA
aaagaccggctaattttttagggaaaatttggccttcccacaaggggaggccaggaaacttcccacagagcagaccagaa

SEQ ID NO: 75315 - DNA, 80 bp, synthetic construct
  source 1..80: mol_type = other DNA
acaaaaatcttagagccctttagagcaagaaatccagagttggtgatctaccaatatatggatgatttatatgtaggatc

SEQ ID NO: 75316 - DNA, 80 bp, synthetic construct
  source 1..80: mol_type = other DNA
tccaggaattaaagtaaggcaactgtgtaaactcatcaggggagccaaatcactaacagatatagtaacaatgtctgagg

SEQ ID NO: 75317 - DNA, 80 bp, synthetic construct
  source 1..80: mol_type = other DNA
aagcagagttagaattggcagaaaacagggaaattctaaaagaacctgtacatggagtatattatgatccaacaaaagac

SEQ ID NO: 75318 - DNA, 80 bp, synthetic construct
  source 1..80: mol_type = other DNA
caccagcagagagcttggggatgggggaagagataacctcctctccgaagcaggaaccgagggacaagggactatatcct

SEQ ID NO: 75319 - DNA, 80 bp, synthetic construct
  source 1..80: mol_type = other DNA
cctttaacctccctcaaatcactctttggcagcgaccaatagtcacagtaagaatagggggacagccaatagaagcccta

SEQ ID NO: 75320 - DNA, 80 bp, synthetic construct
  source 1..80: mol_type = other DNA
tggaggttttatcaaagtaaggcagtatgatcagatacctatagaaatttgtgggaaaaaggccataggtacagtattag

SEQ ID NO: 75321 - DNA, 80 bp, synthetic construct
  source 1..80: mol_type = other DNA
taattttttagggaaaatttggccttccagcaaagggaggccaggaaattctcctcagagcagaccagaaccaacagccc

SEQ ID NO: 75322 - DNA, 80 bp, synthetic construct
  source 1..80: mol_type = other DNA
gtaggatctgacttagagatagagcagcatagagcgaaaatagaggagttgagacaacatctactgagatggggatttac

SEQ ID NO: 75323 - DNA, 80 bp, synthetic construct
  source 1..80: mol_type = other DNA
caaatctatgcaggaattaaagtaaagcaactgtgtaaactcctcagaggagccaaagcactaacagatatagtgacatt

SEQ ID NO: 75324 - DNA, 80 bp, synthetic construct
  source 1..80: mol_type = other DNA
ctaaaaacaggaaaatatgcaaaaagggggtctgcccacactaatgatgtaaaacaattagcagcggtggtgcaaaaagt

SEQ ID NO: 75325 - DNA, 80 bp, synthetic construct
  source 1..80: mol_type = other DNA
gtctacagaaagcatagtaatatggggaaagatccctaaatttagactacccatacaaagagaaacatgggaaacatggt

SEQ ID NO: 75326 - DNA, 80 bp, synthetic construct
  source 1..80: mol_type = other DNA
gaaaagataaaagcattagtagaaatctgtacagagatggaaaaggaagggaaaatttcaaaaattgggcctgaaaaccc

SEQ ID NO: 75327 - DNA, 80 bp, synthetic construct
  source 1..80: mol_type = other DNA
ctagatgtgggagatgcatatttttcagttcccttagatccagactttagaaaatatactgcattcactatacctagttt

SEQ ID NO: 75328 - DNA, 80 bp, synthetic construct
  source 1..80: mol_type = other DNA
aaaattttagagccctttagagcaaaaaatccagagatggtgatctatcaatatatggatgatctctatgtaggatctga

SEQ ID NO: 75329 - DNA, 80 bp, synthetic construct
  source 1..80: mol_type = other DNA
agggattaaagtaaagaacttatgtaaactcctcaggggagccaaagcactaacagacatagtaccgctaactgcagatg

SEQ ID NO: 75330 - DNA, 80 bp, synthetic construct
  source 1..80: mol_type = other DNA
cagaagagatctttggaatgggggaggggataacctcctctcagaagcaggaaccgggggacaagggactatatcctcct

SEQ ID NO: 75331 - DNA, 80 bp, synthetic construct
  source 1..80: mol_type = other DNA
aaaatatgcaaaaaagcggtccgcccacactaatgatgtaaaacagttaacagaagtagtgcaaaagataactacagaaa

SEQ ID NO: 75332 - DNA, 80 bp, synthetic construct
  source 1..80: mol_type = other DNA
aaacatttactagcatgggggtttaccacaccagataaaaaacatcagaaagaacctccattcctgtggatgggatatga

SEQ ID NO: 75333 - DNA, 80 bp, synthetic construct
  source 1..80: mol_type = other DNA
gctccatcctgacaaatggacagtacagcctatacagctaccagacaaagaagactggactgtcaatgatatacaaaagt

SEQ ID NO: 75334 - DNA, 80 bp, synthetic construct
  source 1..80: mol_type = other DNA
agcaggacagaaccaacagccccaccagcagagagcttcggattcggggaggagatagccccttccccgaagcaggagca

SEQ ID NO: 75335 - DNA, 80 bp, synthetic construct
  source 1..80: mol_type = other DNA
caattaacagaagtagtgcaaaaagtagccacagagggcatagtaatctggggaaagattcctaagtttaaactgcccat

SEQ ID NO: 75336 - DNA, 80 bp, synthetic construct
  source 1..80: mol_type = other DNA
acgaaaagaaacatgggatgtatggtggacagagtattggcaagctacctggattcctgagtgggagtttatcaataccc

SEQ ID NO: 75337 - DNA, 80 bp, synthetic construct
  source 1..80: mol_type = other DNA
agagaagcaggagcaagagaaaaaggaggtatatcccttagcctccctcaaatcactctttggcagcgacccttagtcac

SEQ ID NO: 75338 - DNA, 80 bp, synthetic construct
  source 1..80: mol_type = other DNA
gggatatgagctccatcctgacaaatggacggtacaacccatacagctgccagacaaggacagctggactgtcaatgata

SEQ ID NO: 75339 - DNA, 80 bp, synthetic construct
  source 1..80: mol_type = other DNA
tacaaaagttagtgggaaaactaaattgggcaagtcagatttatgcagggattcaagtaaagcagttatgtaaacttctc

SEQ ID NO: 75340 - DNA, 80 bp, synthetic construct
  source 1..80: mol_type = other DNA
aaaagaacctgtacatggagtatattatgacccatcaaaagacttaatagcagaagtacagaaacagggactaggccaat

SEQ ID NO: 75341 - DNA, 80 bp, synthetic construct
  source 1..80: mol_type = other DNA
aacaggccagagccaacagccccacagccaacagccccaccagcagagagcttcggagaggagatagccccctccccgaa

SEQ ID NO: 75342 - DNA, 80 bp, synthetic construct
  source 1..80: mol_type = other DNA
gatgtaaagcaattgacagaagtagtgcaaaaaatagccacagagggcatagtaatatggggaaaggttcctaaatttag

SEQ ID NO: 75343 - DNA, 80 bp, synthetic construct
  source 1..80: mol_type = other DNA
gcaggagccgagggagaaggagccgagggaaaaggaactatatcccttagcttccctcagatcactctttggcaacgacc

SEQ ID NO: 75344 - DNA, 80 bp, synthetic construct
  source 1..80: mol_type = other DNA
aagaatgcacagagagacaggctaattttttagggaaaatttggccttcccacaaggggaggccagggaattttctccag

SEQ ID NO: 75345 - DNA, 80 bp, synthetic construct
  source 1..80: mol_type = other DNA
ctgctgggttgaagaagaaaaaatcagtaacagtattggatgtgggggacgcctatttttcagttcccttacatgaaagc

SEQ ID NO: 75346 - DNA, 80 bp, synthetic construct
  source 1..80: mol_type = other DNA
aggcaagcatgacaaaaatcttagagcccttcagaagagaaaatccagagatagtgatctaccaatatatggatgattta

SEQ ID NO: 75347 - DNA, 80 bp, synthetic construct
  source 1..80: mol_type = other DNA
tatgtaggatcagacttagagatagggcaccatagagcaaaagtagaggagttgagagaacatctactacaatggggatt

SEQ ID NO: 75348 - DNA, 80 bp, synthetic construct
  source 1..80: mol_type = other DNA
taccacaccagacaaaaagcatcaaaaagaacctccatttctttggatgggatatgaactccatcctgataaatggacag

SEQ ID NO: 75349 - DNA, 80 bp, synthetic construct
  source 1..80: mol_type = other DNA
tccagcctatacagctgccagacaaagacagctggactgtcaatgatatacagaaattagtgggaaaactaaattgggca

SEQ ID NO: 75350 - DNA, 80 bp, synthetic construct
  source 1..80: mol_type = other DNA
agtcagatttatccagggattaaggtaaggcagttatgtaaactcctcaggggagcaaaagcactaacagagatagtacc

SEQ ID NO: 75351 - DNA, 80 bp, synthetic construct
  source 1..80: mol_type = other DNA
actaactgcagaagcagaattagaattggcagagaacagggaaattctaaaagagccagtgcatggggtatattatgacc

SEQ ID NO: 75352 - DNA, 80 bp, synthetic construct
  source 1..80: mol_type = other DNA
catcaaaagacttagtagcagaaatacagaagcaggggctaggccaatggacatatcaaatatatcaggagccacataaa

SEQ ID NO: 75353 - DNA, 80 bp, synthetic construct
  source 1..80: mol_type = other DNA
accaacagccccaccagcagagagcttcgggatgggggaagagataacctcccctccgaagcaggaaccgggggacaagg

SEQ ID NO: 75354 - DNA, 80 bp, synthetic construct
  source 1..80: mol_type = other DNA
aacctgaaaacaggaaagtatgcaagaatgaagtctgcccacactaatgatgtaaaacaattaacagaagcagtacaaaa

SEQ ID NO: 75355 - DNA, 80 bp, synthetic construct
  source 1..80: mol_type = other DNA
ggtggacagagtattggcaagccacctggattcctgaatgggagtttgtcaatacccctcccctagtaaaattatggtac

SEQ ID NO: 75356 - DNA, 80 bp, synthetic construct
  source 1..80: mol_type = other DNA
gactatatcctcccttagcttccctcaaatcactctttggcaacgacccttagtcacagtaagaatagggggacagctaa

SEQ ID NO: 75357 - DNA, 80 bp, synthetic construct
  source 1..80: mol_type = other DNA
tagaagccctattagacacaggagcagatgatacagtattagaaaatatagatttacctggaaaatggaaaccaaaaatg

SEQ ID NO: 75358 - DNA, 80 bp, synthetic construct
  source 1..80: mol_type = other DNA
atagggggaattggaggttttatcaaagtaagacagtatgatcagatacttatagaaatttgtggaaaaagggctatagg

SEQ ID NO: 75359 - DNA, 80 bp, synthetic construct
  source 1..80: mol_type = other DNA
gaagagaaaataaaagcattaacagaaatttgtgcagaattggaaaaggaaggaaaaatttcaaaaattgggcctgaaaa

SEQ ID NO: 75360 - DNA, 80 bp, synthetic construct
  source 1..80: mol_type = other DNA
ataagagaactcaagacttctgggaggtccaattaggaatacctcatcccgcgggattaaaaaagaaaaaatcagtaaca

SEQ ID NO: 75361 - DNA, 80 bp, synthetic construct
  source 1..80: mol_type = other DNA
gtgttagatgtgggggatgcatatttttcagttcccttggatgaagactttagaaagtatactgcattcactatacctag

SEQ ID NO: 75362 - DNA, 80 bp, synthetic construct
  source 1..80: mol_type = other DNA
tataaataatgagacaccagggattagatatcagtacaatgtgcttccacagggatggaaaggatcaccagcaatatttc

SEQ ID NO: 75363 - DNA, 80 bp, synthetic construct
  source 1..80: mol_type = other DNA
ttccgcagggatggaagggatcaccagcaatatttcaggcaagtatgacaaaaatcttggagccctttagaacaaaaaat

SEQ ID NO: 75364 - DNA, 80 bp, synthetic construct
  source 1..80: mol_type = other DNA
ccagaggtggtgatctaccaatatatggatgatttatatgtaggatcagacttagaaatagggcagcatagagcaaaaat

SEQ ID NO: 75365 - DNA, 80 bp, synthetic construct
  source 1..80: mol_type = other DNA
agaggaactgagagaacatctactaaaatggggactcaccacaccagacaaaaaacatcagaaggaacctccatttcttt

SEQ ID NO: 75366 - DNA, 80 bp, synthetic construct
  source 1..80: mol_type = other DNA
ggatgggatatgaactccatcctgacaaatggacagtccagcctatacagttaccaaacaaagatagctggactgtcaat

SEQ ID NO: 75367 - DNA, 80 bp, synthetic construct
  source 1..80: mol_type = other DNA
cctcagaggagccaaagcactaacagatatagtaacattgactgaggaggcagaattagaattggcagagaacagggaaa

SEQ ID NO: 75368 - DNA, 80 bp, synthetic construct
  source 1..80: mol_type = other DNA
ttctaaaagagcctgtgcatggagtatattatgacccagcaaaagacttagtagcagaaatacagaaacaagggcaagac

SEQ ID NO: 75369 - DNA, 80 bp, synthetic construct
  source 1..80: mol_type = other DNA
agggaggccaggaaattttcctcagagcagaccggaaccaacagctccaccagcagagagctttgggatgggggaagaga

SEQ ID NO: 75370 - DNA, 80 bp, synthetic construct
  source 1..80: mol_type = other DNA
caatggacatatcaaatttatcaagaaccatttaaaaatctaaaaacaggaaaatatgcaaaaaagaggtctgctcacac

SEQ ID NO: 75371 - DNA, 80 bp, synthetic construct
  source 1..80: mol_type = other DNA
taatgatgtaagacaattagtagaggtagtgcaaaaagtggctacagaaagcatagtaatatggggaaagacccctaaat

SEQ ID NO: 75372 - DNA, 80 bp, synthetic construct
  source 1..80: mol_type = other DNA
tgtgtcaatacccctcctctagtaaaattatggtatcagctggaaaaagaccccataatgggagcagaaactttctatgt

SEQ ID NO: 75373 - DNA, 80 bp, synthetic construct
  source 1..80: mol_type = other DNA
tagcctcctctccaaagcaggaaccgagggacaaggaactatatcctcctttaacttccctcaaatcactctttggcaac

SEQ ID NO: 75374 - DNA, 80 bp, synthetic construct
  source 1..80: mol_type = other DNA
gacccttagtcacagtaagaatagggggacagctaatagaagccctattagacacaggagcagatgatacagtattagaa

SEQ ID NO: 75375 - DNA, 80 bp, synthetic construct
  source 1..80: mol_type = other DNA
gatacttatagaaatttgtggaaaaaaggctataggtacagtattagtaggacctacacctgtcaacataattggacgaa

SEQ ID NO: 75376 - DNA, 80 bp, synthetic construct
  source 1..80: mol_type = other DNA
atggatggcccaaaggtcaagcaatggccattgacagaagaaaaaataaaagcattaacagacatctgtacagaaatgga

SEQ ID NO: 75377 - DNA, 80 bp, synthetic construct
  source 1..80: mol_type = other DNA
ctaaatggaggaaattagtagatttcagagaactcaataggagaactcaagacttctgggaggtccaattaggaatacct

SEQ ID NO: 75378 - DNA, 80 bp, synthetic construct
  source 1..80: mol_type = other DNA
catcccgcgggattaaaaaagaaaaaatcagtgacagtactagatgtaggggatgcatatttttcagttcccttagataa

SEQ ID NO: 75379 - DNA, 80 bp, synthetic construct
  source 1..80: mol_type = other DNA
agaatttagaaagtatactgcattcactatacctagtgtaaataatgagacaccagggattagatatcagtacaatgtgc

SEQ ID NO: 75380 - DNA, 80 bp, synthetic construct
  source 1..80: mol_type = other DNA
aggatcaccagcaatatttcagagtagcatgacaaaaatcttagagcccttcagaaaagaaaatccagaaatagtgatct

SEQ ID NO: 75381 - DNA, 80 bp, synthetic construct
  source 1..80: mol_type = other DNA
accaatacatggatgacctatatgtaggatctgacttagaaatagggcagcatagagcaaaaatagaagagttaagacaa

SEQ ID NO: 75382 - DNA, 80 bp, synthetic construct
  source 1..80: mol_type = other DNA
acatggagtctattatgacccatcaaaagatttagtagcagaagtacagaagcaagggctggaccaatggacatatcaaa

SEQ ID NO: 75383 - DNA, 80 bp, synthetic construct
  source 1..80: mol_type = other DNA
aacttttttcagaacaggccagagccaacagccccaccagcagagagcttcgggtttggagaggagatagccccctctca

SEQ ID NO: 75384 - DNA, 80 bp, synthetic construct
  source 1..80: mol_type = other DNA
agccacctggattcctgagtgggagtttgtcaatacccctcctctggtaaaattgtggtatcagttagaaacagaaccca

SEQ ID NO: 75385 - DNA, 80 bp, synthetic construct
  source 1..80: mol_type = other DNA
gaagcaggagacaaagaaagaggagctatatcccttagcttccctcaaatcactctttggcagcgacccctagtcacagt

SEQ ID NO: 75386 - DNA, 80 bp, synthetic construct
  source 1..80: mol_type = other DNA
aaaagaaaaaatcagtaactgtactggatgtaggagatgcatacttttcagttcccttgtatgaagactttagaaagtat

SEQ ID NO: 75387 - DNA, 80 bp, synthetic construct
  source 1..80: mol_type = other DNA
aacactgactgaagaagcagaattagagttggcagagaacagggaaattctaaaggaacctgtacatggagtatattatg

SEQ ID NO: 75388 - DNA, 80 bp, synthetic construct
  source 1..80: mol_type = other DNA
acccaacaaaggacttagtagcagaaatacagaaacaagggcaagaccaatggacatatcaaatttatcaagagccattt

SEQ ID NO: 75389 - DNA, 80 bp, synthetic construct
  source 1..80: mol_type = other DNA
ggagccaacagccccaccagcagagagcctaggaatgggggaagagatagcctcctccccgaatcaggaaccgagggaca

SEQ ID NO: 75390 - DNA, 80 bp, synthetic construct
  source 1..80: mol_type = other DNA
aaaagtttctatggaaagcatagtaatatggggaaagacccctaaatttagactacccatacaaaaagacacatgggaag

SEQ ID NO: 75391 - DNA, 80 bp, synthetic construct
  source 1..80: mol_type = other DNA
tgaatgggagtttgtcaatacccctcctctagtaaagttatggtaccagttagaaaaagaacccataatgaagcagaatc

SEQ ID NO: 75392 - DNA, 80 bp, synthetic construct
  source 1..80: mol_type = other DNA
taatagaagtcctattagacacaggagcagatgatacagtattagaagaaataaatttgccaggaaaatggaaaccaaaa

SEQ ID NO: 75393 - DNA, 80 bp, synthetic construct
  source 1..80: mol_type = other DNA
ttcaggcgagcatgacaaaaatcttagagccctttagaacaaaaaatccagagatggtgatctaccaatatatggatgat

SEQ ID NO: 75394 - DNA, 80 bp, synthetic construct
  source 1..80: mol_type = other DNA
agtatgacaaagatcttagaacccttcagaacaaaaaatccagaaatagtcatataccaatacatggatgatttgtatgt

SEQ ID NO: 75395 - DNA, 80 bp, synthetic construct
  source 1..80: mol_type = other DNA
aggatctgatttagaaatagggcaacatagaacaaaaatagatgaactaagagaacatctattgaaatggggattcacca

SEQ ID NO: 75396 - DNA, 80 bp, synthetic construct
  source 1..80: mol_type = other DNA
cctatacaattgccagagaaagaagactggactgtcaatgatatacagaagttagtgggaaagttaaattgggcaagtca

SEQ ID NO: 75397 - DNA, 80 bp, synthetic construct
  source 1..80: mol_type = other DNA
gatttatgcagggattaaagtaaagcaattatgtaaactccttaggggagccaaatcgctgacagaaatagtaccactaa

SEQ ID NO: 75398 - DNA, 80 bp, synthetic construct
  source 1..80: mol_type = other DNA
caacagccccaccagcagagagcttcgggttcggagaggagatgaccccctccctgaagcaggagccaaaggagaaggag

SEQ ID NO: 75399 - DNA, 80 bp, synthetic construct
  source 1..80: mol_type = other DNA
aaaaacaggaaagtatgcaagagaaaagtctgcccacactaatgatgtaaaacaattaacaggggcagtgcaaaaaataa

SEQ ID NO: 75400 - DNA, 80 bp, synthetic construct
  source 1..80: mol_type = other DNA
ctatggaatgcatagtgatatggggaaagacccctaaatttagactacccatacaaagggaaacatgggagacatggtgg

SEQ ID NO: 75401 - DNA, 80 bp, synthetic construct
  source 1..80: mol_type = other DNA
ctatatcctgtagcttccctcaaatcactctttggcaacgacccctagttacagtaaaaatagggggacagctaatagaa

SEQ ID NO: 75402 - DNA, 80 bp, synthetic construct
  source 1..80: mol_type = other DNA
gctctattagacacaggagcagatgatacagtattagaaggaataagtttatcaggaaaatggaaaccaaaaatgatagg

SEQ ID NO: 75403 - DNA, 80 bp, synthetic construct
  source 1..80: mol_type = other DNA
tattaataggacctacacctgtcaacataattggacgaaatatgttgactcagattggctgtactttaaatttccccatt

SEQ ID NO: 75404 - DNA, 80 bp, synthetic construct
  source 1..80: mol_type = other DNA
gaaaataaaagcattaacagagatttgtaatgacatggaaaaggaaggaaaaatttcaaaaattgggcctgacaatccat

SEQ ID NO: 75405 - DNA, 80 bp, synthetic construct
  source 1..80: mol_type = other DNA
agagaaggctaattttttagggagaatttggccttccagcaagggaaggccaggaaatttccctcagagcagaccagagc

SEQ ID NO: 75406 - DNA, 80 bp, synthetic construct
  source 1..80: mol_type = other DNA
agatgtgggggacgcatatttttcagtccctctagatgaggagtttagaaaatacactgcattcactatacccagcataa

SEQ ID NO: 75407 - DNA, 80 bp, synthetic construct
  source 1..80: mol_type = other DNA
tggaaaggatcaccagcaatattccaaagtagcatgacaaaaatcttagagcccttcagaaaacaaaatccagaaatggt

SEQ ID NO: 75408 - DNA, 80 bp, synthetic construct
  source 1..80: mol_type = other DNA
gagatcacctactgaaatggggatttacaacaccagacaaaaaacatcagaaagaacctccattcctctggatggggtat

SEQ ID NO: 75409 - DNA, 80 bp, synthetic construct
  source 1..80: mol_type = other DNA
gaactccaccctgataaatggacagtgcaacctatacagttgccaaacaaggacagctggactgtcaatgatatacagaa

SEQ ID NO: 75410 - DNA, 80 bp, synthetic construct
  source 1..80: mol_type = other DNA
ctaaggcactaacagaaataataccactaacagaagaagcagaattagaactggcagaaaatagggaaattctaaaagaa

SEQ ID NO: 75411 - DNA, 80 bp, synthetic construct
  source 1..80: mol_type = other DNA
ccagtacatggggtatattatgacccatcaaaagacttaatagcagaactacagaaacaaggacaagggcaatggacata

SEQ ID NO: 75412 - DNA, 80 bp, synthetic construct
  source 1..80: mol_type = other DNA
ggaactttctccagagcagaccagagccaacagccccaccagcggagagcttcgggttcggagaggagatagcctcctct

SEQ ID NO: 75413 - DNA, 80 bp, synthetic construct
  source 1..80: mol_type = other DNA
tcaaatttaccaagaaccatttaaaaatctgaaaacaggaaagtatgcaaggacgaggggtgcccacaccaatgatgtaa

SEQ ID NO: 75414 - DNA, 80 bp, synthetic construct
  source 1..80: mol_type = other DNA
aacaattagcaaaggcagtgcaaaaaatagccacagaaagcatagtgatatggggaaagactcctaaatttagactcccc

SEQ ID NO: 75415 - DNA, 80 bp, synthetic construct
  source 1..80: mol_type = other DNA
ctacaaaaggaaacatgggaaaaatgggggaaagattatttggaagccccctggattcctgagtgggaattttttaatac

SEQ ID NO: 75416 - DNA, 80 bp, synthetic construct
  source 1..80: mol_type = other DNA
ccgaagcaggagcagaaggaggagggactataccctcccttagcttccctcaaatcactctttggcaacgacccgttgtt

SEQ ID NO: 75417 - DNA, 80 bp, synthetic construct
  source 1..80: mol_type = other DNA
acaataaaaatagagggacagctaaaagaagctctattagatacaggagcagatgatacagtattagaagacataaattt

SEQ ID NO: 75418 - DNA, 80 bp, synthetic construct
  source 1..80: mol_type = other DNA
aaatctgtggacataaagctgtaggtacagtattagtaggacctacacctgtcaacataattggaagaaatatgttgacc

SEQ ID NO: 75419 - DNA, 80 bp, synthetic construct
  source 1..80: mol_type = other DNA
gttaaaaaagaaaaaatcagtaacagtactggatgtaggggatgcatatttttcagttcccttagatagggagttcagga

SEQ ID NO: 75420 - DNA, 80 bp, synthetic construct
  source 1..80: mol_type = other DNA
agtacactgcatttaccatacctagtataaacaatgagacaccaggggttagatatcagtacaatgtgcttccacaggga

SEQ ID NO: 75421 - DNA, 80 bp, synthetic construct
  source 1..80: mol_type = other DNA
aaaggatcaccagcaatattccagcatagcatgacaaaaatcctagagccctttagatcaaaaaatccagaaataattat

SEQ ID NO: 75422 - DNA, 80 bp, synthetic construct
  source 1..80: mol_type = other DNA
ctcatctattgagatggggatttaccacaccagacaaaaagcatcagaaggaacctccatttctttggatgggatatgaa

SEQ ID NO: 75423 - DNA, 80 bp, synthetic construct
  source 1..80: mol_type = other DNA
agtgggaaaactaaattgggcaagtcagatttatccagggattaaagtaaaacaactgtgtagactcctcaggggagcca

SEQ ID NO: 75424 - DNA, 80 bp, synthetic construct
  source 1..80: mol_type = other DNA
aagcactaacagatatagtaccattgactgaggaagcagagttagaattggcagagaacagggagattctaaaagaccct

SEQ ID NO: 75425 - DNA, 80 bp, synthetic construct
  source 1..80: mol_type = other DNA
gtgcatggggtatattatgacccctcaaaagaattaatagcagaaatacagaaacaagggcaagaccaatggacatatca

SEQ ID NO: 75426 - DNA, 80 bp, synthetic construct
  source 1..80: mol_type = other DNA
ggaattttcttcagagcaggccagagccaacagccccacctgcagagagcttcgggtttggagaggagacagccccctcc

SEQ ID NO: 75427 - DNA, 80 bp, synthetic construct
  source 1..80: mol_type = other DNA
gatctatcaagagccatttaagaatctgaaaacaggaaaatatgcaagaaagaggtctgctcacactaatgatgtaaaac

SEQ ID NO: 75428 - DNA, 80 bp, synthetic construct
  source 1..80: mol_type = other DNA
caaaaagaaacatgggaaacatggtggacggagtattggcaggccacctatattcctgaatgggagtttgtcaatacccc

SEQ ID NO: 75429 - DNA, 80 bp, synthetic construct
  source 1..80: mol_type = other DNA
tcccctagtaaaattatggtaccagttagagaaggaccccataatgggagcagaaactttctatgtagatggggcagcta

SEQ ID NO: 75430 - DNA, 80 bp, synthetic construct
  source 1..80: mol_type = other DNA
ccgaacccggagccgaaggaaaaggagctatatcccttagcttccctcaaatcactctttggcaacgacccctagtcaca

SEQ ID NO: 75431 - DNA, 80 bp, synthetic construct
  source 1..80: mol_type = other DNA
gtaagaatagggggacagctaatagaagccctattagacacaggagcagatgatacagtattagaagatataaatttacc

SEQ ID NO: 75432 - DNA, 80 bp, synthetic construct
  source 1..80: mol_type = other DNA
aggaaaatggaaaccaaaaatgatagggggaattggaggttttatcaaagtaagacagtatgaacagatacctatagaaa

SEQ ID NO: 75433 - DNA, 80 bp, synthetic construct
  source 1..80: mol_type = other DNA
attggttgtactttaaattttccaattagtcctattgaaactgtaccagtaaaattaaagccaggaatggatggcccacg

SEQ ID NO: 75434 - DNA, 80 bp, synthetic construct
  source 1..80: mol_type = other DNA
ggttaaacaatggcctttgacagaagagaaaataaaagcattaacagaaatttgtatggaaatggaaaaggaaggaaaaa

SEQ ID NO: 75435 - DNA, 80 bp, synthetic construct
  source 1..80: mol_type = other DNA
ttagtagattttagagagctcaataaaagaactcaagacttctgggaggtccaattaggaatacctcatcccgcggggtt

SEQ ID NO: 75436 - DNA, 80 bp, synthetic construct
  source 1..80: mol_type = other DNA
aaaaaagaagaaatcagtaacagtgctagatgtgggggacgcatatttttcagttcccttagatcaagactttaggaaat

SEQ ID NO: 75437 - DNA, 80 bp, synthetic construct
  source 1..80: mol_type = other DNA
atactgcattcactatacctagtgtaaataatgagacaccagggattagatatcagtacaatgtgctcccacagggatgg

SEQ ID NO: 75438 - DNA, 80 bp, synthetic construct
  source 1..80: mol_type = other DNA
aaagcattaacagaagtagtaacactgactgaggaagcagaattagaactggcagagaacagggaaattctaaaagaacc

SEQ ID NO: 75439 - DNA, 80 bp, synthetic construct
  source 1..80: mol_type = other DNA
tgtgcatggagtatactatgacccaacaaaagacttagtagcagaaatacagaaacaagggcaaggccaatggacatatc

SEQ ID NO: 75440 - DNA, 80 bp, synthetic construct
  source 1..80: mol_type = other DNA
aattttcctcagagcagaccagaaccaacagccccaccagcagagagcttcgggatgggggaagagatatcctcctcccc

SEQ ID NO: 75441 - DNA, 80 bp, synthetic construct
  source 1..80: mol_type = other DNA
caattaacagaggtagtgcaaaaggtggctctagaaagcatagtaatatggggaaagacccctaaatttaggctacccat

SEQ ID NO: 75442 - DNA, 80 bp, synthetic construct
  source 1..80: mol_type = other DNA
gaagcaggaaccgagggacaagggactataccctcctttaacttccctcaaatcactctttggcaacgacccctagtcac

SEQ ID NO: 75443 - DNA, 80 bp, synthetic construct
  source 1..80: mol_type = other DNA
taaaaaagaaaaaatcagtaacagtattagatgtgggagatgcatatttttcagttcccttagataaagattttagaaag

SEQ ID NO: 75444 - DNA, 80 bp, synthetic construct
  source 1..80: mol_type = other DNA
tcagatttatgcaggaattaaagtaaggcaactgtgtaaactcctcaggggagccaaagcactaacagaagtagtagcac

SEQ ID NO: 75445 - DNA, 80 bp, synthetic construct
  source 1..80: mol_type = other DNA
acaaaagacttagtagcagaaatacagaaacaggggcacgatcaatggacatatcaaatttatcaagagccatttaaaaa

SEQ ID NO: 75446 - DNA, 80 bp, synthetic construct
  source 1..80: mol_type = other DNA
cctaaaaacaggaaaatatgcaaaaaggaggtctgctcacacgaatgatgtaaaacaattaacagaggtagtgcaaaaaa

SEQ ID NO: 75447 - DNA, 80 bp, synthetic construct
  source 1..80: mol_type = other DNA
tagctacagagagcatagtaatatggggaaagacccctaaatttagattacccatacaaaaggaaacatgggaagcttgg

SEQ ID NO: 75448 - DNA, 80 bp, synthetic construct
  source 1..80: mol_type = other DNA
tggatggagtattggcaggctacctggattcctgaatgggagtttgtcaatacccctcctctagtaaaactatggtacca

SEQ ID NO: 75449 - DNA, 80 bp, synthetic construct
  source 1..80: mol_type = other DNA
ctataccctcctttagcttccctcaaatcactctttggcaacgaccagtaatcacagtaaaaatagagggacagccaata

SEQ ID NO: 75450 - DNA, 80 bp, synthetic construct
  source 1..80: mol_type = other DNA
agggggaattggaggttttatcaaagtaagacagtatgatcagatatctatagaaatttgtggtaaaaaggccgtaggta

SEQ ID NO: 75451 - DNA, 80 bp, synthetic construct
  source 1..80: mol_type = other DNA
attagtcctattgaaactgtaccagtaaaattaaagccaggaatggatggcccaagggttaaacaatggccattgacaga

SEQ ID NO: 75452 - DNA, 80 bp, synthetic construct
  source 1..80: mol_type = other DNA
catacaatactccaatatttgccataaagaagaaagacagtactaaatggagaaaattagtagatttcagagaactcaat

SEQ ID NO: 75453 - DNA, 80 bp, synthetic construct
  source 1..80: mol_type = other DNA
actagatgtgggggatgcatatttttcagtccccttagataaagattttagaaagtatactgcattcactatacctagtg

SEQ ID NO: 75454 - DNA, 80 bp, synthetic construct
  source 1..80: mol_type = other DNA
atatgtaggatctgacttagagatagggcagcacagaacaaaaatagaagagttaagggaacatttactgaaatggggat

SEQ ID NO: 75455 - DNA, 80 bp, synthetic construct
  source 1..80: mol_type = other DNA
cactgactgaggaagcagaactagaattggcagagaacagggaaattctaagagaacccgtacatggagtatattatgac

SEQ ID NO: 75456 - DNA, 80 bp, synthetic construct
  source 1..80: mol_type = other DNA
agcccacagccccaccagcagagagctttgggatgaaggaagagataacatcctctccgaagcaggaacagagggaaaag

SEQ ID NO: 75457 - DNA, 80 bp, synthetic construct
  source 1..80: mol_type = other DNA
tgaatgggagtttgtcaatacccctcctttagtaaaattatggtatcaactggaaaaggaccccatagtaggagcagaat

SEQ ID NO: 75458 - DNA, 80 bp, synthetic construct
  source 1..80: mol_type = other DNA
aggcggctacagaaagcataataatatggggaaaggtccctaaatttagactacccatacaaagagaaacatgggaagca

SEQ ID NO: 75459 - DNA, 80 bp, synthetic construct
  source 1..80: mol_type = other DNA
gaactatatcctcctttaacttccctcaaatcactctttggcaacgaccagtagtcacagcaagagtggggggacagcta

SEQ ID NO: 75460 - DNA, 80 bp, synthetic construct
  source 1..80: mol_type = other DNA
atagaagccctattagacacaggagcagatgatacagtattggaagaaataactttacaaggaaaatggaagccaaaaat

SEQ ID NO: 75461 - DNA, 80 bp, synthetic construct
  source 1..80: mol_type = other DNA
ttcaccacaccagacaaaaaacatcagaaagaacctccatttctttggatgggatatgagcttcatcctgacaaatggac

SEQ ID NO: 75462 - DNA, 80 bp, synthetic construct
  source 1..80: mol_type = other DNA
cagttctagatgtgggggatgcatatttttcagtgcccttagataaagaatttagaaagtatacagcattcactatacct

SEQ ID NO: 75463 - DNA, 80 bp, synthetic construct
  source 1..80: mol_type = other DNA
tatatgtaggatcagatttagagatagggcagcatagagcaaaaatagagaagttgagagaacatctactgagatgggga

SEQ ID NO: 75464 - DNA, 80 bp, synthetic construct
  source 1..80: mol_type = other DNA
ccagcaatatttcaggcaagcatgacaaaaatcttagagccctttagaacaaaaaatccagagatggtgatctaccagta

SEQ ID NO: 75465 - DNA, 80 bp, synthetic construct
  source 1..80: mol_type = other DNA
tatggatgatttatatgtagggtctgatttagagatagagcagcatagagcaaaaatagaggagctgagagaacatctac

SEQ ID NO: 75466 - DNA, 80 bp, synthetic construct
  source 1..80: mol_type = other DNA
cggaaccctcagccccaccagcagagagctttgggatgggagaagagataacctcccctccgaagcaggaaccgagggac

SEQ ID NO: 75467 - DNA, 80 bp, synthetic construct
  source 1..80: mol_type = other DNA
aggtagtgcaaaaggtggctacagaaagtatagtcatatggggaaagacccccaaatttagactacccatacagaaagaa

SEQ ID NO: 75468 - DNA, 80 bp, synthetic construct
  source 1..80: mol_type = other DNA
aaggaacacaaggaactatatcctcctttaacctccctcaaatcactctttggcaacgaccaatagtcacagtaagaata

SEQ ID NO: 75469 - DNA, 80 bp, synthetic construct
  source 1..80: mol_type = other DNA
gggggacagccaatagaagccctattagacacaggagcagatgatacagtattagaagaaataaatttaccaggaaaatg

SEQ ID NO: 75470 - DNA, 80 bp, synthetic construct
  source 1..80: mol_type = other DNA
atggccattgacagaagaaaaaataaaagccttaaccgagatttgtacagagatggagaaggaaggaaaaatttcaaaaa

SEQ ID NO: 75471 - DNA, 80 bp, synthetic construct
  source 1..80: mol_type = other DNA
tcactatacctagtgtaaataatgaaacaccaggggttagatatcagtacaatgtgcttccacagggatggaaaggatca

SEQ ID NO: 75472 - DNA, 80 bp, synthetic construct
  source 1..80: mol_type = other DNA
gcatggtggatggagtattggcaggctacctggattcctgaatgggagtttgtcaatacccctcccctagttaaattatg

SEQ ID NO: 75473 - DNA, 80 bp, synthetic construct
  source 1..80: mol_type = other DNA
aacagaagaaaaaataaaagcattaacagatatttgttctgagatggaaaaggaaggaaaaatttcaaaaattgggcctg

SEQ ID NO: 75474 - DNA, 80 bp, synthetic construct
  source 1..80: mol_type = other DNA
tatatgtagggtctgacttagagatagggcagcacagagaaaaaatagaggagttgagagaacatctattgaaatgggga

SEQ ID NO: 75475 - DNA, 80 bp, synthetic construct
  source 1..80: mol_type = other DNA
gaaccaacagccccaccagcagagaactttgggatgggggaagagatagcctcatctccgaagcaggagccgaaggaaaa

SEQ ID NO: 75476 - DNA, 80 bp, synthetic construct
  source 1..80: mol_type = other DNA
ggaactatatcctcctttaacttccctcaaatcactctttggcagcgacccttagtcgcagtaagaatagagggacagct

SEQ ID NO: 75477 - DNA, 80 bp, synthetic construct
  source 1..80: mol_type = other DNA
gatcaccagcaatatttcaggcaagcatgacaaaaattttagagccctttagaacaaaaaatccagagatagagatctac

SEQ ID NO: 75478 - DNA, 80 bp, synthetic construct
  source 1..80: mol_type = other DNA
ggaaaactaaattgggcaagtcagatttatccagggattaaagtaaagagcttatgtaaactcctcaggggagcaaaagc

SEQ ID NO: 75479 - DNA, 80 bp, synthetic construct
  source 1..80: mol_type = other DNA
actaacagacatagtgccactaactgcagaagcagaattagaattggcagagaacagggaaattctgaaagaacctgtac

SEQ ID NO: 75480 - DNA, 80 bp, synthetic construct
  source 1..80: mol_type = other DNA
accaacagctccaccagcagagctctttggagtggaggaagagacagccccctctcagaagcaggaactgagggagaagc

SEQ ID NO: 75481 - DNA, 80 bp, synthetic construct
  source 1..80: mol_type = other DNA
gaatgggagtttgtcaatacccctcctctagtaaaattatggtatcagttagaaaaagaccccataatagggcagaaaca

SEQ ID NO: 75482 - DNA, 80 bp, synthetic construct
  source 1..80: mol_type = other DNA
aacagaggtagtgcaaaaaatagctgtagaaagcatagtaatatggggaaagacccctaaatttagactacccatacaaa

SEQ ID NO: 75483 - DNA, 80 bp, synthetic construct
  source 1..80: mol_type = other DNA
aggaaacatgggaagcatggtggatggaatattggcaggctacctggattcctgaatgggagtttgtcaatacccctcct

SEQ ID NO: 75484 - DNA, 80 bp, synthetic construct
  source 1..80: mol_type = other DNA
tggaaaaaaggccataggtacagtgttagtaggacctacacctgtcaacataattggacgaaacatgttgacccagattg

SEQ ID NO: 75485 - DNA, 80 bp, synthetic construct
  source 1..80: mol_type = other DNA
aaacaatggccattgacagaagaaaaaataaaagcaataacagacatatgttcagaaatggaaaaggaaggaaaaatttc

SEQ ID NO: 75486 - DNA, 80 bp, synthetic construct
  source 1..80: mol_type = other DNA
tagatttcagggaacttaataagagaactcaagacttctgggaggtccaattaggaatacctcaccccgcaggattaaaa

SEQ ID NO: 75487 - DNA, 80 bp, synthetic construct
  source 1..80: mol_type = other DNA
aagaaaaaatcagtaacagtactagatgtgggggatgcatatttttcagttcccttagataaagactttagaaaatatac

SEQ ID NO: 75488 - DNA, 80 bp, synthetic construct
  source 1..80: mol_type = other DNA
ccaatgtagcatgacaaaaatcttagagccctttagaacaaaaaatccagaaatagttatataccaatacatggatgatt

SEQ ID NO: 75489 - DNA, 80 bp, synthetic construct
  source 1..80: mol_type = other DNA
agtgcagcctataaccctgccagaaaaggaaagctggactgtcaatgatatacagaaattagtaggaaaactaaattggg

SEQ ID NO: 75490 - DNA, 80 bp, synthetic construct
  source 1..80: mol_type = other DNA
caagtcagatttatgcagggattaaggtaaggcagctgtgtaaactcctcagaggagctaaagcactaacagatatagta

SEQ ID NO: 75491 - DNA, 80 bp, synthetic construct
  source 1..80: mol_type = other DNA
acactgactgaggaggcagaactagaattggcagaaaacagggagattctaaaagagcctgtgcatggggtatattatga

SEQ ID NO: 75492 - DNA, 80 bp, synthetic construct
  source 1..80: mol_type = other DNA
aaagtggctacagaaagcatagtagtatggggaaagacccctaaattcagactacccatacaaaaagaaacatgggaagc

SEQ ID NO: 75493 - DNA, 80 bp, synthetic construct
  source 1..80: mol_type = other DNA
ggtacagtgctagtaggacctacacctgtcaacataattggacgaaatatgttgactcagattggttgtactttaaattt

SEQ ID NO: 75494 - DNA, 80 bp, synthetic construct
  source 1..80: mol_type = other DNA
cagtactggatgtgggagatgcatatttttcagtccctttagataaggaattcaggaagtatactgcattcactatacct

SEQ ID NO: 75495 - DNA, 80 bp, synthetic construct
  source 1..80: mol_type = other DNA
gatgggatatgaactccatcctgacaaatggacagtccaacctatacagctgccagaaaaggacagctggactgtcaatg

SEQ ID NO: 75496 - DNA, 80 bp, synthetic construct
  source 1..80: mol_type = other DNA
atatacagaaattagtgggaaaactgaattgggcaagtcaaatttatgcaggaattaaagtaaagcaactgtgtagactc

SEQ ID NO: 75497 - DNA, 80 bp, synthetic construct
  source 1..80: mol_type = other DNA
ctcaggggagccaaagcattaacagatgtagtaccactaactgaggaagcagaattagaattggcagagaacagggaaat

SEQ ID NO: 75498 - DNA, 80 bp, synthetic construct
  source 1..80: mol_type = other DNA
tctaaaagaacctgtacatggaatctattatgatccaacaaaagacttaatagcagaaatacagaaacaggggcaagacc

SEQ ID NO: 75499 - DNA, 80 bp, synthetic construct
  source 1..80: mol_type = other DNA
accctcctctccgaagcaggaacagaaggacaagggactataccctcctttaacctccctcaaatcactctttggcaacg

SEQ ID NO: 75500 - DNA, 80 bp, synthetic construct
  source 1..80: mol_type = other DNA
aatgatgtaaagcaattaacagaggtagtgcaaaaagtggttacagaaagcatagtaatatggggaaggccccctaaatt

SEQ ID NO: 75501 - DNA, 80 bp, synthetic construct
  source 1..80: mol_type = other DNA
ttgtcaatacccctcctctagtaaaattatggtaccaattagagaaagaccccatagtgggagcagaaactttctatgta

SEQ ID NO: 75502 - DNA, 80 bp, synthetic construct
  source 1..80: mol_type = other DNA
tggatggcccgaaggttaaacaatggccattgacagaagaaaagataaaagcattaacagaaatttgtacagagatggaa

SEQ ID NO: 75503 - DNA, 80 bp, synthetic construct
  source 1..80: mol_type = other DNA
aaggaaggaaaaatttcaaaaattgggcctgaaaatccatacaatactccagtttttgctataaagaaaaaagatagtac

SEQ ID NO: 75504 - DNA, 80 bp, synthetic construct
  source 1..80: mol_type = other DNA
gccacagggatggaaagggtcaccagcaatatttcaggcaagcatgacaaaaatcctagagccctttagaataaaaaatc

SEQ ID NO: 75505 - DNA, 80 bp, synthetic construct
  source 1..80: mol_type = other DNA
gtctgatttagaaatagggcaacatagagcaaaaatagaggaactaagagaacatctattgaaatggggatttgctacac

SEQ ID NO: 75506 - DNA, 80 bp, synthetic construct
  source 1..80: mol_type = other DNA
cagacaagaaacatcagaaagaacccccgtttctttggatggggtatgaactccatcctgacaaatggacagtgcagcct

SEQ ID NO: 75507 - DNA, 80 bp, synthetic construct
  source 1..80: mol_type = other DNA
ttatccagggattaaagtaaggcaattatgtaaactcattaagggaaccaaagcactgacagatatagtaccactaactg

SEQ ID NO: 75508 - DNA, 80 bp, synthetic construct
  source 1..80: mol_type = other DNA
cagaagcagaactagaattggcagagaacagggagattctaaaagagccagtgcatggggtatattatgactcatcaaaa

SEQ ID NO: 75509 - DNA, 80 bp, synthetic construct
  source 1..80: mol_type = other DNA
cagccccaccagcagagagcttcgggttcggagaggagatagccccctccccgaagcaggagcaaaaggacaaggaacta

SEQ ID NO: 75510 - DNA, 80 bp, synthetic construct
  source 1..80: mol_type = other DNA
aacaggaaaatatgcaaaaaggaggtctgcccacactaatgatgtaaaacagctaacagaggtagtacaaaaagtgtcta

SEQ ID NO: 75511 - DNA, 80 bp, synthetic construct
  source 1..80: mol_type = other DNA
tggaatgcatagtaatatggggaaagacccctaaatttagattacccatacaaaaggaaacatgggaagcatggtggatg

SEQ ID NO: 75512 - DNA, 80 bp, synthetic construct
  source 1..80: mol_type = other DNA
gagtattggcaggctacctggatacctgaatgggagtttgtcaatacccctcctctagtaaaattatggtaccagttaga

SEQ ID NO: 75513 - DNA, 80 bp, synthetic construct
  source 1..80: mol_type = other DNA
tatcctttaactgccctcaaatccctctttgggaccgaccagtagtcgcagtaagaatagagggacagctaatagaagct

SEQ ID NO: 75514 - DNA, 80 bp, synthetic construct
  source 1..80: mol_type = other DNA
aattggaggttttatcaaagtaaaacaatatgatcagatacatatagaaatttgtgggaaaaaggctataggtacagtac

SEQ ID NO: 75515 - DNA, 80 bp, synthetic construct
  source 1..80: mol_type = other DNA
tagtaggatctacgcctgtcaacataattggacgaaatatgttgactcagattggttgtactttaaatttcccaattagt

SEQ ID NO: 75516 - DNA, 80 bp, synthetic construct
  source 1..80: mol_type = other DNA
atactccaatatttgccataaagaaaaaagatagttctaaatggagaaaattagtagatttcagagagctcaataaaaga

SEQ ID NO: 75517 - DNA, 80 bp, synthetic construct
  source 1..80: mol_type = other DNA
ggctaattttttagggagaatttggccttccaacagcaagggaaggccagggaattttcctcagagcagaccggagccaa

SEQ ID NO: 75518 - DNA, 80 bp, synthetic construct
  source 1..80: mol_type = other DNA
tgtgggggacgcatatttttcagtccctttagatgaaaactttagaaaatacacagcattcactatacctagtgtaaaca

SEQ ID NO: 75519 - DNA, 80 bp, synthetic construct
  source 1..80: mol_type = other DNA
cagcttaagaatcctgtaaacattacatgcaccagacccaataacaacacaagaaaaagcatacattttggaccagggca

SEQ ID NO: 75520 - DNA, 80 bp, synthetic construct
  source 1..80: mol_type = other DNA
agcgttctatgcaacaggtgaaatagtaggagatataagacaagcttattgcattgttaagagcatggattggaataata

SEQ ID NO: 75521 - DNA, 80 bp, synthetic construct
  source 1..80: mol_type = other DNA
cgttagagaatgtgactaaaaaactagaaggcatctttgaaaacaaaaccatcatctttaattcatctacaggaggggac

SEQ ID NO: 75522 - DNA, 80 bp, synthetic construct
  source 1..80: mol_type = other DNA
ctagaaattacaacacatagttttaattgtggaggagaatttttctattgtgatacaacaggactgtttaataataatat

SEQ ID NO: 75523 - DNA, 80 bp, synthetic construct
  source 1..80: mol_type = other DNA
aacaagagatgggggtaataataccaataacagtgaaatcttcagacctgaaggaggagatatgagggacaattggagaa

SEQ ID NO: 75524 - DNA, 80 bp, synthetic construct
  source 1..80: mol_type = other DNA
atcaaatagtgagaatgagaccatcacactctcatgtaggataaaacaaattgtaagaatgtggcagagagtgggacaag

SEQ ID NO: 75525 - DNA, 80 bp, synthetic construct
  source 1..80: mol_type = other DNA
caatgtatgcccctcccattgaaggaaacattacatgtacatcaaacattacaggactactactaacaagagatgggggt

SEQ ID NO: 75526 - DNA, 80 bp, synthetic construct
  source 1..80: mol_type = other DNA
acctaacaacaatacaagaagaggtatacatattggaccaggacaagcgttctatgcaacaggtgacataataggagaca

SEQ ID NO: 75527 - DNA, 80 bp, synthetic construct
  source 1..80: mol_type = other DNA
taagacaagcacattgtaatgttagtaaaacaaaatggaaggagatgttacagaaggttaaagtacaactacaaggtatc

SEQ ID NO: 75528 - DNA, 80 bp, synthetic construct
  source 1..80: mol_type = other DNA
tataataatactagcataacctttgataatgccacaggaggggacctagaaattacaacacatagtttcaattgtaaagg

SEQ ID NO: 75529 - DNA, 80 bp, synthetic construct
  source 1..80: mol_type = other DNA
agaatttttttattgtaatacaacaagactgtttaatgaaagtatacttaatagtacatcagagaatgggaatatcacac

SEQ ID NO: 75530 - DNA, 80 bp, synthetic construct
  source 1..80: mol_type = other DNA
tcccctgtaggataaaacaaattgtaagaatgtggcagaaagtgggacaagcaatgtatgcccctcccattgcaggaaaa

SEQ ID NO: 75531 - DNA, 80 bp, synthetic construct
  source 1..80: mol_type = other DNA
attgaatgtagatcaaacattacaggaataatattgacaagagatggtgggaatactagtagtggaaggaaaccgtcaga

SEQ ID NO: 75532 - DNA, 80 bp, synthetic construct
  source 1..80: mol_type = other DNA
attagatcaaaaaatttttcagacaacaccaaggtcataatagtgcagcttaatgagactatagaaattaattgtaccag

SEQ ID NO: 75533 - DNA, 80 bp, synthetic construct
  source 1..80: mol_type = other DNA
caatttaataaaaccgtaacaattaattgtactagacccaacaataatacaaggaaaagtataacattcggaccaggaca

SEQ ID NO: 75534 - DNA, 80 bp, synthetic construct
  source 1..80: mol_type = other DNA
aacactctatgcaacaggtcaaataataggagatataagacaagcatcttgtaatgttaatagaacagagtggactaaga

SEQ ID NO: 75535 - DNA, 80 bp, synthetic construct
  source 1..80: mol_type = other DNA
taatggagaaggtagaagcaaaactaaaagaaacctacaattataagaacataacatttgggccacactcaggaggagac

SEQ ID NO: 75536 - DNA, 80 bp, synthetic construct
  source 1..80: mol_type = other DNA
ctagaaattacaacacatagttttaattgtagaggagaattcttctattgtaatacatcagagctatttaatgggagtta

SEQ ID NO: 75537 - DNA, 80 bp, synthetic construct
  source 1..80: mol_type = other DNA
tctaagtaatgagagtcatcagaataataatgagagtaacataactctcccatgtaagataaaacaaattgtgagattgt

SEQ ID NO: 75538 - DNA, 80 bp, synthetic construct
  source 1..80: mol_type = other DNA
tagtactactaatggtagtactactaatgataccttcagacctggaggaggagatatgagggacaattggagaagtgaat

SEQ ID NO: 75539 - DNA, 80 bp, synthetic construct
  source 1..80: mol_type = other DNA
ggcagagagtgggacaagcaatgtatgcccctcccattaaaggaaaaattacatgtgtatcaaacattacaggactatta

SEQ ID NO: 75540 - DNA, 80 bp, synthetic construct
  source 1..80: mol_type = other DNA
ttaacaagagatggtgggagtagtactactaatggtagtactactaatgataccttcagacctggaggaggagatatgag

SEQ ID NO: 75541 - DNA, 80 bp, synthetic construct
  source 1..80: mol_type = other DNA
tttcagaaaaatataacttttactaattcctcaggaggagatgtagaaattacaacacatagctttaattgtggaggaga

SEQ ID NO: 75542 - DNA, 80 bp, synthetic construct
  source 1..80: mol_type = other DNA
atttttctattgcaatacatcaggcctatttaatagtacttggaattggaatggcactgccattaatactacgatatcaa

SEQ ID NO: 75543 - DNA, 80 bp, synthetic construct
  source 1..80: mol_type = other DNA
atgacactagtcctatagtactcccatgcagaataaaacaaattgtacgtatgtggcagggagtcggacaagcaatgtat

SEQ ID NO: 75544 - DNA, 80 bp, synthetic construct
  source 1..80: mol_type = other DNA
cattacagggatactgttaacaagagatggtggaaataataatagtactaatggcacagaaaccttcagaccggaggagg

SEQ ID NO: 75545 - DNA, 80 bp, synthetic construct
  source 1..80: mol_type = other DNA
gcccctcccattcaaggaaaaataacctgtatatcaaacattacagggatactgttaacaagagatggtggaaataataa

SEQ ID NO: 75546 - DNA, 80 bp, synthetic construct
  source 1..80: mol_type = other DNA
gatagatctgaaaacctcacaaacaatgccaaaactataatagtacagcttgctaggcctgtaaaaattaattgtaccag

SEQ ID NO: 75547 - DNA, 80 bp, synthetic construct
  source 1..80: mol_type = other DNA
cagttaaacaaaactgtacaaattaattgtaccagacctagcaacaatacaaggagaagtataagtttcggaccagggcg

SEQ ID NO: 75548 - DNA, 80 bp, synthetic construct
  source 1..80: mol_type = other DNA
agcaatctatgcaacaggtgatatagtaggggatataagacaagcacattgtaatatcagtaaaaaagattggagtgaca

SEQ ID NO: 75549 - DNA, 80 bp, synthetic construct
  source 1..80: mol_type = other DNA
ctttacaaaaagtggccaataaattcggggaatactttaacaaatcaagattaatctttactaatgcctcaggaggggat

SEQ ID NO: 75550 - DNA, 80 bp, synthetic construct
  source 1..80: mol_type = other DNA
ttagaaattacaacacatagttttaactgtggaggagaatttttctactgcaatacaacagcactatttaatagcacttg

SEQ ID NO: 75551 - DNA, 80 bp, synthetic construct
  source 1..80: mol_type = other DNA
ggcttggaatgacactctgagaaattacacagatttagcaaatcacacagatttaagtggcaatataactctccaatgta

SEQ ID NO: 75552 - DNA, 80 bp, synthetic construct
  source 1..80: mol_type = other DNA
tacaggattattgttaacaagagatggaggatttaacaataatactaatggaagtgagactttcaggcctgcaggaggag

SEQ ID NO: 75553 - DNA, 80 bp, synthetic construct
  source 1..80: mol_type = other DNA
ggataaggcaatttataaatatgtggcaaaaagtaggaaaagcaatgtatgcccctcccatcccaggagaaataaggtgt

SEQ ID NO: 75554 - DNA, 80 bp, synthetic construct
  source 1..80: mol_type = other DNA
gaatcaaacattacaggattattgttaacaagagatggaggatttaacaataatactaatggaagtgagactttcaggcc

SEQ ID NO: 75555 - DNA, 80 bp, synthetic construct
  source 1..80: mol_type = other DNA
tgttaaatggcagtctagcagaagaagacatagtaattagatctcaaaatatcacagacaatgcaaaaatcataatagta

SEQ ID NO: 75556 - DNA, 80 bp, synthetic construct
  source 1..80: mol_type = other DNA
cagacctgacaacaatacaagaaaaggtgtacatataggaccagggcaaacattctttgcaacaggtgacataatagggg

SEQ ID NO: 75557 - DNA, 80 bp, synthetic construct
  source 1..80: mol_type = other DNA
tggaggagaatttttctattgtgatacaacaaagctgtttaatagcagttggaataacgagaccagcttaaacaataaca

SEQ ID NO: 75558 - DNA, 80 bp, synthetic construct
  source 1..80: mol_type = other DNA
gctcaaacacaaatgaaaatataactatccaatgcagaataaagcaaattataaatatgtggcagagagtaggacaagca

SEQ ID NO: 75559 - DNA, 80 bp, synthetic construct
  source 1..80: mol_type = other DNA
atgtacgcccctcccatccgaggagtaataaggtgtgaatcaaacattacaggactaatattaacaagagatggagggag

SEQ ID NO: 75560 - DNA, 80 bp, synthetic construct
  source 1..80: mol_type = other DNA
atgattagatctgaaaatatcacaaacaatgccaaaaccatactagtacagttagtcaagcctgtaagaataaattgtac

SEQ ID NO: 75561 - DNA, 80 bp, synthetic construct
  source 1..80: mol_type = other DNA
ctctatgagaataaaaccataatgttcatctcatctgcaggaggggacctagaaattacaacacatagtttcaattgtag

SEQ ID NO: 75562 - DNA, 80 bp, synthetic construct
  source 1..80: mol_type = other DNA
aggagaatttttctattgtaatacatcaggactatttaataatagtctttttaatgagactatcactaatagcactgaaa

SEQ ID NO: 75563 - DNA, 80 bp, synthetic construct
  source 1..80: mol_type = other DNA
acatcacactcccatgtaggataaaacaaattgtaagaatgtggcagagagtaggacaagcaatatatgcccctcccatc

SEQ ID NO: 75564 - DNA, 80 bp, synthetic construct
  source 1..80: mol_type = other DNA
gcaggaaaaattgaatgtagatcaagtatcacaggactactgttaacaagagatggtgggagtgacagtattaatgagac

SEQ ID NO: 75565 - DNA, 80 bp, synthetic construct
  source 1..80: mol_type = other DNA
ctactgttaacaagagatggtgggagtgacagtattaatgagaccttcagacctggaggaggagatatgagggacaattg

SEQ ID NO: 75566 - DNA, 80 bp, synthetic construct
  source 1..80: mol_type = other DNA
atgattagatctgagaactacacaaacaatgccaaagtcataatagtgcagcttaatgagactatagaaattaattgtac

SEQ ID NO: 75567 - DNA, 80 bp, synthetic construct
  source 1..80: mol_type = other DNA
cccaacaacaatacaaggaaaagtataacatttggaccaggacaagtattctatgcaacaaacaacataataggaaatat

SEQ ID NO: 75568 - DNA, 80 bp, synthetic construct
  source 1..80: mol_type = other DNA
aagatctgaaaatttcaacagacaatgccaaaagcataatagtgcagcttaataagactgtagagattaattgtaccaga

SEQ ID NO: 75569 - DNA, 80 bp, synthetic construct
  source 1..80: mol_type = other DNA
gatggaggggctgatgataagaaggataatggtaaagagcagacctttaggcctggaggaggagatatgagggacaattg

SEQ ID NO: 75570 - DNA, 80 bp, synthetic construct
  source 1..80: mol_type = other DNA
ctattaacaagagatgggcctgggtctaggaatagtaatgggtctgagaataacaaggagatcgtcagacctggaagagg

SEQ ID NO: 75571 - DNA, 80 bp, synthetic construct
  source 1..80: mol_type = other DNA
ttaattgtaccagacctggcaacaatacaagacaaagcataagtataggaccaggacgagcgttctatacaacaggtgat

SEQ ID NO: 75572 - DNA, 80 bp, synthetic construct
  source 1..80: mol_type = other DNA
ataataggagatataagaaaagcatattgtattgttaatggaacagaatggaataacactttaacaaaggtagaggcaaa

SEQ ID NO: 75573 - DNA, 80 bp, synthetic construct
  source 1..80: mol_type = other DNA
actagaagaacagtttgggaataaaacaatactctttaactcatctgcaggagggggtttagaaattacaacacatagtt

SEQ ID NO: 75574 - DNA, 80 bp, synthetic construct
  source 1..80: mol_type = other DNA
ttaattgtagaggagaatttttctattgctccacatcagacctgtttaacagcagcaagaggcaggatctaactggtcct

SEQ ID NO: 75575 - DNA, 80 bp, synthetic construct
  source 1..80: mol_type = other DNA
atagttcttccatgcagaataaagcaaattataaatatgtggcaaagagtaggacaagcaatgtatgcccctcccatcaa

SEQ ID NO: 75576 - DNA, 80 bp, synthetic construct
  source 1..80: mol_type = other DNA
aagagaggtagtgattagatctgaaaatttcacaaacaatgccaaaatcataatagtacagcttaatgagtctgtatcaa

SEQ ID NO: 75577 - DNA, 80 bp, synthetic construct
  source 1..80: mol_type = other DNA
gaataagactgtaataattaattgtaccagacctaacaacaatacaagaaaaagcatacacataggaccaggacaagcat

SEQ ID NO: 75578 - DNA, 80 bp, synthetic construct
  source 1..80: mol_type = other DNA
tctatgcaagaggtgacataataggagatataagacaagcacactgtaatgttagtagaaaagactggaataacacatta

SEQ ID NO: 75579 - DNA, 80 bp, synthetic construct
  source 1..80: mol_type = other DNA
gaaaaggtagttgcaaaactaaaacaacagtttaagaacaagacaataatctttaattcctctgcaggaggggatttaga

SEQ ID NO: 75580 - DNA, 80 bp, synthetic construct
  source 1..80: mol_type = other DNA
aattacaacacatagttttacttgtggaggagaatttttctattgcaatacatcaggtctgtttaacagtacttgggggc

SEQ ID NO: 75581 - DNA, 80 bp, synthetic construct
  source 1..80: mol_type = other DNA
ttaacaagagatggtggtaatagtagtgataacagcgagaccttcagacctggaggaggagatatgagggacaattggag

SEQ ID NO: 75582 - DNA, 80 bp, synthetic construct
  source 1..80: mol_type = other DNA
ttaacagtactcggaatgatacacagacgtcagagattataactcttcaatgcagaataaagcaaattataaatatgtgg

SEQ ID NO: 75583 - DNA, 80 bp, synthetic construct
  source 1..80: mol_type = other DNA
cagagagtaggacaagcaatgtatgcccctcccatccaaggaatgataaggtgttcatcaaacattacaggactgctatt

SEQ ID NO: 75584 - DNA, 80 bp, synthetic construct
  source 1..80: mol_type = other DNA
aatggcagtctagcagaaggagaagtagtgattagatctaaaaatatcacaaacaatgccaatactataatagtacaatt

SEQ ID NO: 75585 - DNA, 80 bp, synthetic construct
  source 1..80: mol_type = other DNA
ctttagtaataacaatagtagctttaatagcagcagctttactagcaataggtgtgtggatcctagcatatatagaatat

SEQ ID NO: 75586 - DNA, 80 bp, synthetic construct
  source 1..80: mol_type = other DNA
caatgagacaccagggcttagatatcagtataatgtgctcccacagggatggaaaggatcaccagcaaatttccaaagca

SEQ ID NO: 75587 - DNA, 80 bp, synthetic construct
  source 1..80: mol_type = other DNA
ggatctgacttagaaataggacaacatagaacaaaagtagaggaactgagagaacatctgttgaagtggggatttaccac

SEQ ID NO: 75588 - DNA, 80 bp, synthetic construct
  source 1..80: mol_type = other DNA
ctcgtcacaataaggataggggggcaactaaaagaggctctgttagatacaggagcagatgatacagtattagaagacat

SEQ ID NO: 75589 - DNA, 80 bp, synthetic construct
  source 1..80: mol_type = other DNA
caatactccagtatttgccataaagaaaaaagacagtacaaaatggaggaaattagtagatttcagagaacttaataaga

SEQ ID NO: 75590 - DNA, 80 bp, synthetic construct
  source 1..80: mol_type = other DNA
gcatgacaaaaatcttagagccttttagagaacagaatccagacctagttatctatcaatacatggatgatttatatgta

SEQ ID NO: 75591 - DNA, 80 bp, synthetic construct
  source 1..80: mol_type = other DNA
gagtttgccaggaaaatggaaaccaaaaatgatagggggaattggaggatttatcaaagtaaagcagtatgatcaggtag

SEQ ID NO: 75592 - DNA, 80 bp, synthetic construct
  source 1..80: mol_type = other DNA
gaactcaagacttctgggaagtccaattaggaataccacatccagcagggttaaaaaagaaaaaatcagtaaccgtcctg

SEQ ID NO: 75593 - DNA, 80 bp, synthetic construct
  source 1..80: mol_type = other DNA
ggatctgacttagagatagggcaacatagaacaaaaatagaggaactgagacagcacctgttagggtggggattcaccac

SEQ ID NO: 75594 - DNA, 80 bp, synthetic construct
  source 1..80: mol_type = other DNA
tcgtagaaatttgtggacataaagctataggtacagtgttagtgggacctacacctgtcaacataattggaagaaatctg

SEQ ID NO: 75595 - DNA, 80 bp, synthetic construct
  source 1..80: mol_type = other DNA
gtatgacaaaaatcttagaaccttatagaaaacaaaatccagaaatagttatttatcaatacatggatgatttgtatgta

SEQ ID NO: 75596 - DNA, 80 bp, synthetic construct
  source 1..80: mol_type = other DNA
tgagacagcatctattgacgtggggatttaccacaccagacaagaaacatcagaaagaacctccatttctttggatgggc

SEQ ID NO: 75597 - DNA, 80 bp, synthetic construct
  source 1..80: mol_type = other DNA
gatgtgggtgatgcatatttctcagttccattagatgaggacttcagaaaatatactgcatttaccatacctagtctaaa

SEQ ID NO: 75598 - DNA, 80 bp, synthetic construct
  source 1..80: mol_type = other DNA
gcatttgccagggagatggaaaccaaaaatgatagggggaattggaggttttatcaaagtaaaacagtatgatcagatac

SEQ ID NO: 75599 - DNA, 80 bp, synthetic construct
  source 1..80: mol_type = other DNA
ttgactcagattggttgcactttaaattttgagatggaaaaggaagggaaaatttcaaaaattgggcctgaaaatccata

SEQ ID NO: 75600 - DNA, 80 bp, synthetic construct
  source 1..80: mol_type = other DNA
gatgtgggtgatgcatacttttcagttcctttatatgaagacttcaggaagtatactgcatttactatacctagtacaaa

SEQ ID NO: 75601 - DNA, 80 bp, synthetic construct
  source 1..80: mol_type = other DNA
tgagacaacatctgctcagttggggatttaccacaccagacaaaaaacatcagaaagaacctccgttcctttggatgggt

SEQ ID NO: 75602 - DNA, 80 bp, synthetic construct
  source 1..80: mol_type = other DNA
ggatctgacttagaaatagggcagcatagaacaaaaatagaggaactgagacaacatctgctcagttggggatttaccac

SEQ ID NO: 75603 - DNA, 80 bp, synthetic construct
  source 1..80: mol_type = other DNA
tagacttcagagagcttaataagagaactcaagacttctgggaagtccagttaggtataccacatcccgcagggttaaaa

SEQ ID NO: 75604 - DNA, 80 bp, synthetic construct
  source 1..80: mol_type = other DNA
actctttggcaacgacccctcgtcacaataaaggtagggggacagctaaaggaagccctattagatacaggagcagatga

SEQ ID NO: 75605 - DNA, 80 bp, synthetic construct
  source 1..80: mol_type = other DNA
ggcagtatgatcaggtacccatggaaatctgtggacataaagctataggtacagtattagtaggacctacacctgtcaac

SEQ ID NO: 75606 - DNA, 80 bp, synthetic construct
  source 1..80: mol_type = other DNA
ataattggaagaaatctgttgactcagattggttgcactttaaatttttgtacagaaatggaaaaggaaggaaaaatttc

SEQ ID NO: 75607 - DNA, 80 bp, synthetic construct
  source 1..80: mol_type = other DNA
aagaaaaaatcagtaacagtactggatgtgggtgatgcatatttttcagttcctttagacaaggacttcaggaagtatac

SEQ ID NO: 75608 - DNA, 80 bp, synthetic construct
  source 1..80: mol_type = other DNA
actctttggcaacgacccctcgtcacaataaggataggggggcaactaaaagaggctctgttagatacaggagcagatga

SEQ ID NO: 75609 - DNA, 80 bp, synthetic construct
  source 1..80: mol_type = other DNA
caatacatggatgatttatatgtaggatctgacttagaaatagggctgcacagaacaaaaatagaggaactgagacaaca

SEQ ID NO: 75610 - DNA, 80 bp, synthetic construct
  source 1..80: mol_type = other DNA
ctgccgaacctgcacgacatttaaatcccaacaaaacaaaaagatggggatattccctcaatttcatgggttatgtaatt

SEQ ID NO: 75611 - DNA, 80 bp, synthetic construct
  source 1..80: mol_type = other DNA
gattaaagtaaaacagctgtgtaaactccttaggggagccaaagcactaacaagcatagtgccactgactgcagaagcag

SEQ ID NO: 75612 - DNA, 80 bp, synthetic construct
  source 1..80: mol_type = other DNA
aattggaattggcagagaatagggagattctgaaagaacctgtacatggagtatattatgaaccatcaaaagaattaata

SEQ ID NO: 75613 - DNA, 80 bp, synthetic construct
  source 1..80: mol_type = other DNA
cagggattagatattgttacaatgtgcttccacagggatggaaaggatcaccagcaatatttcagagtagcatgacaaaa

SEQ ID NO: 75614 - DNA, 80 bp, synthetic construct
  source 1..80: mol_type = other DNA
acttatatgtaggatctgacttagaaatagggcagcatagagcaaaaatagaggagttaagaaaacatttgttaagctgg

SEQ ID NO: 75615 - DNA, 80 bp, synthetic construct
  source 1..80: mol_type = other DNA
gacagtacagcctataacgctgccagaaaaagaaagctggactgtcaatgatatacaaaagttagtgggaaaattaaatt

SEQ ID NO: 75616 - DNA, 80 bp, synthetic construct
  source 1..80: mol_type = other DNA
gggcaagtcagatttatccagggattaaagtaaaacaactatgtaaactccttaggggagccaaggcactaacaagcata

SEQ ID NO: 75617 - DNA, 80 bp, synthetic construct
  source 1..80: mol_type = other DNA
gtaccactgactgcagaagcagaattggaattggcagagaacagggagattctgaaagaacctgtacatggagcctatta

SEQ ID NO: 75618 - DNA, 80 bp, synthetic construct
  source 1..80: mol_type = other DNA
tgaaccatcaaaagagttaatagcagaagtgcagaaacaagggctaggccagtggacataccaagtctatcaagagccat

SEQ ID NO: 75619 - DNA, 80 bp, synthetic construct
  source 1..80: mol_type = other DNA
acaaaaatctgaaaacaggaaaatatgcaaaaagaggatctgcccacactaatgatgtaaaacaattaacagaaatagta

SEQ ID NO: 75620 - DNA, 80 bp, synthetic construct
  source 1..80: mol_type = other DNA
caaaaaatagcaacagagagcatagtaatatggggaaaaactcctaaatttagattacccatacaaaaggaaacatggga

SEQ ID NO: 75621 - DNA, 80 bp, synthetic construct
  source 1..80: mol_type = other DNA
ggaagaggggatatatcccttagcctccctcaaatcactctttggcagcgacccctagtcacagtaaggatagggggaca

SEQ ID NO: 75622 - DNA, 80 bp, synthetic construct
  source 1..80: mol_type = other DNA
taacagtgctagatgtgggagatgcatacttttcagtacccttagatgcagactttagaaaatatactgcattcactata

SEQ ID NO: 75623 - DNA, 80 bp, synthetic construct
  source 1..80: mol_type = other DNA
cctagtagaaataatgagatgccaggaattagatatcagtacaatgtgcttccacagggatggaaaggatcaccagcaat

SEQ ID NO: 75624 - DNA, 80 bp, synthetic construct
  source 1..80: mol_type = other DNA
atttcagagtagcatgacaaaaatcttagagcctttcagaaaaagaaatccagaaatagtgatctaccaatatatggatg

SEQ ID NO: 75625 - DNA, 80 bp, synthetic construct
  source 1..80: mol_type = other DNA
atttatatgtaggatcggacttagaaatagggcagcatagagcaaaaatagaggagttaagagctcatctgctgaaatgg

SEQ ID NO: 75626 - DNA, 80 bp, synthetic construct
  source 1..80: mol_type = other DNA
gtagcactaactgaagaggcagaattagaactggcagagaacagggagattctaaaagaacctgtacatggagtctacta

SEQ ID NO: 75627 - DNA, 80 bp, synthetic construct
  source 1..80: mol_type = other DNA
aggctagagccaacagccccacccgcagagatcttcgggttcggagagaagatagccccctccttgaagcaggagcagga

SEQ ID NO: 75628 - DNA, 80 bp, synthetic construct
  source 1..80: mol_type = other DNA
caaaaaatatccacagagagcatagtaatatggggaaaagttcctaaatttaaactacctataaggaaagagacatggga

SEQ ID NO: 75629 - DNA, 80 bp, synthetic construct
  source 1..80: mol_type = other DNA
agtatggtggacagaatattggcaggccacctggattcctgagtgggagtttgtcaacacccctcctctagtaaagttat

SEQ ID NO: 75630 - DNA, 80 bp, synthetic construct
  source 1..80: mol_type = other DNA
ggaaaaggaatcacctccgttaacctccctcaaatcactctttggcagcgacccctagttacagtaagaatagggggaca

SEQ ID NO: 75631 - DNA, 80 bp, synthetic construct
  source 1..80: mol_type = other DNA
actgcacagagagacaggctaattttttagggaaaatctggccttccaacaaggggaggccagggaattttcctcagagc

SEQ ID NO: 75632 - DNA, 80 bp, synthetic construct
  source 1..80: mol_type = other DNA
atattagaacccttcaggtcacagaatccagaaatggtgatctatcaatacatggacgacttgtatgtaggatctgactt

SEQ ID NO: 75633 - DNA, 80 bp, synthetic construct
  source 1..80: mol_type = other DNA
agaaataggacaacatagggcaaaaatagaagaactgagagagcatctattgagatggggatttacaacaccagataaaa

SEQ ID NO: 75634 - DNA, 80 bp, synthetic construct
  source 1..80: mol_type = other DNA
gataaaggtaagacaactgtgcaaacttatcaggggaaccaaagcactgacagacatagtcccactgactaaagaagcag

SEQ ID NO: 75635 - DNA, 80 bp, synthetic construct
  source 1..80: mol_type = other DNA
ccccaccagcagagaacttcgggatgggggaaggaatagccccctccccgagacaggagaaggaacagggccctccttta

SEQ ID NO: 75636 - DNA, 80 bp, synthetic construct
  source 1..80: mol_type = other DNA
atatgcaagaaggaagtctgcccatactaatgatgtaaaacagttaacagaagtagtgcaaaaggtggtcacagagagca

SEQ ID NO: 75637 - DNA, 80 bp, synthetic construct
  source 1..80: mol_type = other DNA
ttgtgatatggggaaagactcctaaatttaggctacccatacagaaggaaacatgggatgcatggtggatggagtattgg

SEQ ID NO: 75638 - DNA, 80 bp, synthetic construct
  source 1..80: mol_type = other DNA
acaggagcagatgacacagtaatagaagacataaatttatcaggaaaatggaaaccaagaatgatagggggaattggagg

SEQ ID NO: 75639 - DNA, 80 bp, synthetic construct
  source 1..80: mol_type = other DNA
ttttatcaaagtaaggcagtatgatcaaataaccatagacatctgtggacaaaaggctataggtacagtattagtaggac

SEQ ID NO: 75640 - DNA, 80 bp, synthetic construct
  source 1..80: mol_type = other DNA
attaacagaaatatgtagggagatggaaaaggaaggaaaaatttcaaaaattggaccagaaaatccatacaacactccaa

SEQ ID NO: 75641 - DNA, 80 bp, synthetic construct
  source 1..80: mol_type = other DNA
tgcgtacttttcagttcccttagacccagattttagaaagtatactgcattcacaatacctagtgtaaataatgagacac

SEQ ID NO: 75642 - DNA, 80 bp, synthetic construct
  source 1..80: mol_type = other DNA
caggggttaggtaccaatacaatgtgcttccacaaggatggaaaggatcaccggcaatatttcagtgtagcatgacaaga

SEQ ID NO: 75643 - DNA, 80 bp, synthetic construct
  source 1..80: mol_type = other DNA
taggctctgacttagaaataggacaacatagagcaaaaatagaggaattaagagagcatctattgaaatggggatttaca

SEQ ID NO: 75644 - DNA, 80 bp, synthetic construct
  source 1..80: mol_type = other DNA
acctatccagctgccagaacaggacaactggactgtcaatgatatacagaagttagtgggaaaactaaattgggcaagtc

SEQ ID NO: 75645 - DNA, 80 bp, synthetic construct
  source 1..80: mol_type = other DNA
agatctatccagggataaaggtaaagcaaatgtgcaaactcctcaggggagccaaagcactgacagacatagtcccactg

SEQ ID NO: 75646 - DNA, 80 bp, synthetic construct
  source 1..80: mol_type = other DNA
taaaaacagggaaatacgcaaaaaggaagtctgcccatactaatgatgtaaaacaattagcagaagtagtgcaaaaggtg

SEQ ID NO: 75647 - DNA, 80 bp, synthetic construct
  source 1..80: mol_type = other DNA
acagggtcctctaatttccctcaaatcactctttggcaacgacccattgtcacagtaaaaatagaagggcaactaagaga

SEQ ID NO: 75648 - DNA, 80 bp, synthetic construct
  source 1..80: mol_type = other DNA
gtactagtaggacctacacctgtcaacataattggaaggaatatgttgactcagattggctgtacgttaaactttccaat

SEQ ID NO: 75649 - DNA, 80 bp, synthetic construct
  source 1..80: mol_type = other DNA
ccaacagccccaccagcagagaacttagggatgggggaaggaataaccccctccccgaagcaggagctgagggaaaagga

SEQ ID NO: 75650 - DNA, 80 bp, synthetic construct
  source 1..80: mol_type = other DNA
aataatgagaaaccaggggttagataccaatacaatgtgcttccacaaggatggaaagggtcaccagcaatatttcagag

SEQ ID NO: 75651 - DNA, 80 bp, synthetic construct
  source 1..80: mol_type = other DNA
attccaatatagcatgacaaaaatcttagagccctttagactacaaaatccagaaataattatctatcaatatatggatg

SEQ ID NO: 75652 - DNA, 80 bp, synthetic construct
  source 1..80: mol_type = other DNA
acttatatgtaggatctgatttagaaatagggcaacatagaacaaagatagaggagctaagggctcatctattgacgtgg

SEQ ID NO: 75653 - DNA, 80 bp, synthetic construct
  source 1..80: mol_type = other DNA
gtaaccttgactgaagaagcagaattagaattggcagagaacagggaaattctaaaagaccctgtgcatggggtgtatta

SEQ ID NO: 75654 - DNA, 80 bp, synthetic construct
  source 1..80: mol_type = other DNA
tgacccatcaaaagacttagtagcagaaatacagaaacaagggccagaccaatggacataccaaatctaccaagagccat

SEQ ID NO: 75655 - DNA, 80 bp, synthetic construct
  source 1..80: mol_type = other DNA
aggccagtgccaacagccccaccagcagagctcttggggatgggagaagagataacctcctctccgaagcaggagcagcg

SEQ ID NO: 75656 - DNA, 80 bp, synthetic construct
  source 1..80: mol_type = other DNA
ttaaaaatctgaaaacagggaaatatgcaaaaaagaggtctgctcacactaatgatgtaagacaattagtagaagtggtg

SEQ ID NO: 75657 - DNA, 80 bp, synthetic construct
  source 1..80: mol_type = other DNA
caaaaggtgggcacagaaagcatagtaatatggggaaagacccctaaatttaaactgcccatacagaaggaaacatggga

SEQ ID NO: 75658 - DNA, 80 bp, synthetic construct
  source 1..80: mol_type = other DNA
aacatggtggatggagtattggcaggctacctatattcctgagtgggagttcgtcaacacccctcctctagtaaaattat

SEQ ID NO: 75659 - DNA, 80 bp, synthetic construct
  source 1..80: mol_type = other DNA
ggacagggaacaacctcctttagtttccctcaaatcactctttggcaacgacccgttgtcacagtaagaataggaggaca

SEQ ID NO: 75660 - DNA, 80 bp, synthetic construct
  source 1..80: mol_type = other DNA
gctcaataagagaactcaggacttctgggaagttcaattaggaataccgcacccagcgggtttgaaaaagaaaaaatcaa

SEQ ID NO: 75661 - DNA, 80 bp, synthetic construct
  source 1..80: mol_type = other DNA
taacagtactggatgtaggggacgcatatttttcagttcctttagataaagactttagaaagtatactgcatttaccata

SEQ ID NO: 75662 - DNA, 80 bp, synthetic construct
  source 1..80: mol_type = other DNA
cccagtataaacaatgagacaccaggagtcagatatcagtacaatgtgctaccacagggatggaaaggatcaccagcaat

SEQ ID NO: 75663 - DNA, 80 bp, synthetic construct
  source 1..80: mol_type = other DNA
gtatagcatgacaaaaatcttagagccctttagatcacaaaatccagaagtagttatctaccaatacatggatgacttat

SEQ ID NO: 75664 - DNA, 80 bp, synthetic construct
  source 1..80: mol_type = other DNA
atgtaggatctgatttagaaatagggcaacatagaacaaaaatagaggagctgagagctcatctattgaaatggggactt

SEQ ID NO: 75665 - DNA, 80 bp, synthetic construct
  source 1..80: mol_type = other DNA
ttgactgaggaagcagaattagaattggcagagaacagggagattctaaaagaccctgtgcatggggtatactatgaccc

SEQ ID NO: 75666 - DNA, 80 bp, synthetic construct
  source 1..80: mol_type = other DNA
atcaaaagacttagtagcagaaatccagaaacaagggcaagaccagtggacataccaaatctaccaagagccatttaaaa

SEQ ID NO: 75667 - DNA, 80 bp, synthetic construct
  source 1..80: mol_type = other DNA
agaacagagccaacagccccaccagcagagctcctggggatgggggaagagataacctcctcactgaagcaggagcagag

SEQ ID NO: 75668 - DNA, 80 bp, synthetic construct
  source 1..80: mol_type = other DNA
atctgaaaacagggaaatatgcaaaaaagaggtctactcacactaatgatgtaagacaattagtagaagtagtgcagaag

SEQ ID NO: 75669 - DNA, 80 bp, synthetic construct
  source 1..80: mol_type = other DNA
gtgagcacagaaagcatagtaatatggggaaagacccctaaatttaaactacccatacagaaagaaacatgggaaacatg

SEQ ID NO: 75670 - DNA, 80 bp, synthetic construct
  source 1..80: mol_type = other DNA
ggaacagcctcctgcaatttccctcaaatcactctttggcaacgacccgttgtcacagtaagaatagaaggacagttaaa

SEQ ID NO: 75671 - DNA, 80 bp, synthetic construct
  source 1..80: mol_type = other DNA
aagaaaaaataaaagcattgacagcaatttgtaaagagatggaagaggaagggaaaatttcaaaaattgggcctgaaaat

SEQ ID NO: 75672 - DNA, 80 bp, synthetic construct
  source 1..80: mol_type = other DNA
tagaagaactcaggacttctgggaggttcaattaggaataccgcatccagcgggtttgaaaaagaaaaaatcaataacag

SEQ ID NO: 75673 - DNA, 80 bp, synthetic construct
  source 1..80: mol_type = other DNA
tactagatgtaggggacgcatatttttcagttcctttagatgaaaactttagaaagtatactgcgttcactatacctagt

SEQ ID NO: 75674 - DNA, 80 bp, synthetic construct
  source 1..80: mol_type = other DNA
ataaataatgagacaccaggagtcaggtatcagtataatgtgctaccacagggatggaaaggatcaccagcaatattcca

SEQ ID NO: 75675 - DNA, 80 bp, synthetic construct
  source 1..80: mol_type = other DNA
atgacaaaaatcttagatccctttagagcaaaaaatccagaaatagttatctatcaatacatggatgacctgtatgtagg

SEQ ID NO: 75676 - DNA, 80 bp, synthetic construct
  source 1..80: mol_type = other DNA
atctgatctagaaatagagcaacatagaacaaaaatagaggagttgagagctcatctattgagctgggggttgactacac

SEQ ID NO: 75677 - DNA, 80 bp, synthetic construct
  source 1..80: mol_type = other DNA
ctatgcagggattaaagtaaagcagttgtgtaaattactcaggggagccaaagcactaacagaagtagtaccattgactg

SEQ ID NO: 75678 - DNA, 80 bp, synthetic construct
  source 1..80: mol_type = other DNA
gacttaatagcagaaatacagaaacaaggacaagaccaatggacatatcaaatttatcaagaaccatttaaaaatttaaa

SEQ ID NO: 75679 - DNA, 80 bp, synthetic construct
  source 1..80: mol_type = other DNA
ccccaccagcagagagctttgggatgggggaagaaataaccccctccccgaagcaagagcagagcaacagggaacagcct

SEQ ID NO: 75680 - DNA, 80 bp, synthetic construct
  source 1..80: mol_type = other DNA
aacaggaaaatatgcaagaaagaggtctgctcatactaatgatgtaaaacaattggcagacgcagtgcaaaaagtggcca

SEQ ID NO: 75681 - DNA, 80 bp, synthetic construct
  source 1..80: mol_type = other DNA
aataaaagctttgacagaaatttgtaaagagatggaacaggaaggaaaaatttcaaaaattgggcctgagaatccataca

SEQ ID NO: 75682 - DNA, 80 bp, synthetic construct
  source 1..80: mol_type = other DNA
tgtgggggatgcatatttttcagtgcctttatatgaagattttaggaaatatactgcattcaccatacctagtacaaaca

SEQ ID NO: 75683 - DNA, 80 bp, synthetic construct
  source 1..80: mol_type = other DNA
atgagacaccaggaatcagatatcagtacaatgtgcttccacagggatggaaaggatcaccggcaatattccagagtagt

SEQ ID NO: 75684 - DNA, 80 bp, synthetic construct
  source 1..80: mol_type = other DNA
acttgtatgtaggatctgatttagaaatagaaaagcatagaacaaaaatagaggagttgagagctcatctattaagttgg

SEQ ID NO: 75685 - DNA, 80 bp, synthetic construct
  source 1..80: mol_type = other DNA
ggactcactaccccagacaagaaacatcagaaagaacctccattcctttggatgggatatgaactccatcctgataaatg

SEQ ID NO: 75686 - DNA, 80 bp, synthetic construct
  source 1..80: mol_type = other DNA
gggcaagtcagatttatgcagggattcaagtaaagcaactgtgtaaactcctcaggggaaccaaggcactaacagaggta

SEQ ID NO: 75687 - DNA, 80 bp, synthetic construct
  source 1..80: mol_type = other DNA
gtacaactgactgaggaagcagaattagaattggcagaaaacagggaaattctcagaaaccctgtgcatggggtatatta

SEQ ID NO: 75688 - DNA, 80 bp, synthetic construct
  source 1..80: mol_type = other DNA
agaacggagccaacagccccaccagcagagatgctctgcgggatgggggaagggacctcccctccgaagaaggagttgaa

SEQ ID NO: 75689 - DNA, 80 bp, synthetic construct
  source 1..80: mol_type = other DNA
caaaaggtggccctagaaagcataataatatggggaaagacccctaaatttaaactacccatacaaaaagagacatggga

SEQ ID NO: 75690 - DNA, 80 bp, synthetic construct
  source 1..80: mol_type = other DNA
atgtagggtctgacttagaaatagggcaacatagagcaaaagtagaagaactaagagaacatctattgaaatggggactg

SEQ ID NO: 75691 - DNA, 80 bp, synthetic construct
  source 1..80: mol_type = other DNA
atcaaaagacctagtagcagaaatacagaagcaaggacaagaccaatggacatatcaaatttatcaagagccatttaaaa

SEQ ID NO: 75692 - DNA, 80 bp, synthetic construct
  source 1..80: mol_type = other DNA
atctgaaaacaggaaaatatgcaaaaaagaggtctgctcacacaaatgatgtaagacaattaacagaagtggtgcaaaaa

SEQ ID NO: 75693 - DNA, 80 bp, synthetic construct
  source 1..80: mol_type = other DNA
agaccggagccatcagccccaccagcagagaactgggggatgaaggaggagataaactcctctccgaagcaggagaagga

SEQ ID NO: 75694 - DNA, 80 bp, synthetic construct
  source 1..80: mol_type = other DNA
acagtattagtaggacctacacctgtcaacataattggacgaaacatgttgacccaaattggttgtactctaaattttcc

SEQ ID NO: 75695 - DNA, 80 bp, synthetic construct
  source 1..80: mol_type = other DNA
ccatataatactccagtatttgctataaagaaaaaggacagcactaaatggagaaaattagtagatttcagagagctcaa

SEQ ID NO: 75696 - DNA, 80 bp, synthetic construct
  source 1..80: mol_type = other DNA
taaaagaactcaggatttctgggaagttcaattaggaataccacatccagcgggtctcaagaagaaaaaatcagtaacag

SEQ ID NO: 75697 - DNA, 80 bp, synthetic construct
  source 1..80: mol_type = other DNA
tgttagatgtgggggatgcatatttctcagtccctttagatgagaacttcaggaagtatactgcattcactatacccagt

SEQ ID NO: 75698 - DNA, 80 bp, synthetic construct
  source 1..80: mol_type = other DNA
gagtagcatgacaaaaatcttagagccctatagaaaaagaaatccagacatagttatataccaatacatggatgatttgt

SEQ ID NO: 75699 - DNA, 80 bp, synthetic construct
  source 1..80: mol_type = other DNA
attgggcaagtcagatttatccaggaattaaggtaaggcaactgtgtagactccttaggggagctaaagcactaacagat

SEQ ID NO: 75700 - DNA, 80 bp, synthetic construct
  source 1..80: mol_type = other DNA
aaactggaaccaacagccccaccagcagagagctttgggatgggggaagagataacctcccctccggaacaagaatcgag

SEQ ID NO: 75701 - DNA, 80 bp, synthetic construct
  source 1..80: mol_type = other DNA
gagcaaggaactataccctcccttagcttccctcaaatcactctttggcaacgacccttagtcacagtaaggataggggg

SEQ ID NO: 75702 - DNA, 80 bp, synthetic construct
  source 1..80: mol_type = other DNA
gatgatttatacgtaggatcagacttagaaatagggcagcatagagccaaaatagaggagttgagaggacatctactgaa

SEQ ID NO: 75703 - DNA, 80 bp, synthetic construct
  source 1..80: mol_type = other DNA
ggacaaggggctataccctcccttagcttccctcaaatcactctttggcaacgaccagtagttacagtaagaataggggg

SEQ ID NO: 75704 - DNA, 80 bp, synthetic construct
  source 1..80: mol_type = other DNA
ccccaccagcagagagctttggggaggaggaagagatacccccctccccgaagcaagagccgagggacaagggactatat

SEQ ID NO: 75705 - DNA, 80 bp, synthetic construct
  source 1..80: mol_type = other DNA
atgacaaaaatcttagagccctttagaacaaaaaacccagagatagtgatctaccaatatatggatgatttatatgtagg

SEQ ID NO: 75706 - DNA, 80 bp, synthetic construct
  source 1..80: mol_type = other DNA
aggaagcagaattagaattggcagagaacagggaaattctaaaagaacctgtacatggagtatattatgacccaatgaaa

SEQ ID NO: 75707 - DNA, 80 bp, synthetic construct
  source 1..80: mol_type = other DNA
ccccaccagcagagaacttggggatgggggaagaggtagccccctccccgaagcaggaaccgggggacaagggaatatac

SEQ ID NO: 75708 - DNA, 80 bp, synthetic construct
  source 1..80: mol_type = other DNA
gaaattagtgggaaaactaaattgggcaagtcagatctatgcaggaattcaagtgaggcaactctgtagactcctcaggg

SEQ ID NO: 75709 - DNA, 80 bp, synthetic construct
  source 1..80: mol_type = other DNA
attgggcaagtcagatctatgcaggaattcaagtgaggcaactctgtagactcctcaggggggccaaagcactgacagat

SEQ ID NO: 75710 - DNA, 80 bp, synthetic construct
  source 1..80: mol_type = other DNA
catttaaaaatctaaagacaggaaaatatgcaaaaaagaggggtactcatactaatgatgtaaaacaattaacagaggta

SEQ ID NO: 75711 - DNA, 80 bp, synthetic construct
  source 1..80: mol_type = other DNA
cagatcggaaccaacagccccaccagcagagatcttggggatgggggaagagataccccccactccgaagcaagaaccga

SEQ ID NO: 75712 - DNA, 80 bp, synthetic construct
  source 1..80: mol_type = other DNA
gggacaaggaactgtatcctcccttgacctccctcaaatcactctttggcaacgacccttagttacagtaaaaatagggg

SEQ ID NO: 75713 - DNA, 80 bp, synthetic construct
  source 1..80: mol_type = other DNA
gactgcactgagagacaggcaaattttttagggaaaattttgccttcctacaagggaaggccaggcaactttcctcagag

SEQ ID NO: 75714 - DNA, 80 bp, synthetic construct
  source 1..80: mol_type = other DNA
atagtagtgctgactaaggaagcagaattagaattggcagagaacagggaaattctagcagaacctgtacatggagtata

SEQ ID NO: 75715 - DNA, 80 bp, synthetic construct
  source 1..80: mol_type = other DNA
agactggaaccaacagccccaccagcagagaactctgggatgggggaagagataacctcctctccacagcaggaactgag

SEQ ID NO: 75716 - DNA, 80 bp, synthetic construct
  source 1..80: mol_type = other DNA
gtgcaaaaagtggttacagaaagcatagtaatatggggaaaggcccctaaatttagactacccatacaaagagacacatg

SEQ ID NO: 75717 - DNA, 80 bp, synthetic construct
  source 1..80: mol_type = other DNA
caaaaatgatagggggaattggaggttttatcaaagtaagacaatatgatcagatatctctagaaatttgtggaaaaaag

SEQ ID NO: 75718 - DNA, 80 bp, synthetic construct
  source 1..80: mol_type = other DNA
cattgacagaagaaaaaataaaagcattaacagacatttgtagagagatggaaaaggaaggaaaaatttcaaaaattgga

SEQ ID NO: 75719 - DNA, 80 bp, synthetic construct
  source 1..80: mol_type = other DNA
ctctgaagcaggaaccgaggggaaaggaactatatcctcctttaacttccctcaaatcactctttggcaacgacccttag

SEQ ID NO: 75720 - DNA, 80 bp, synthetic construct
  source 1..80: mol_type = other DNA
aatatttcaggcaagcatgacaaaaatcttagagacctttagagcaaagaatccggaaatggtgatctatcaatacatgg

SEQ ID NO: 75721 - DNA, 80 bp, synthetic construct
  source 1..80: mol_type = other DNA
aatctaaagacaggaaagtatgcaaaaaggaggtctgcccacactaatgatgtaaagcaattatcagaggtagtgcaaaa

SEQ ID NO: 75722 - DNA, 80 bp, synthetic construct
  source 1..80: mol_type = other DNA
gaagaaaaaataaaggcactagtagaaatttgtacagagatggaaaaggaaggaaaaatttcaaaaattgggcctgaaaa

SEQ ID NO: 75723 - DNA, 80 bp, synthetic construct
  source 1..80: mol_type = other DNA
aatatttcaggcaagtatgacaaaaatcttagagccctttagaacaagaaatccagagatagtgatctaccaatacatgg

SEQ ID NO: 75724 - DNA, 80 bp, synthetic construct
  source 1..80: mol_type = other DNA
atgatttatatgtaggatctgacttagagatagggcagcatagagcaaaaatagaggagttaagagatcacctactgaaa

SEQ ID NO: 75725 - DNA, 80 bp, synthetic construct
  source 1..80: mol_type = other DNA
tggggatttaccacaccagacaagaaacatcagaaagagcctccatttctttggatgggatatgaactccatcctgacaa

SEQ ID NO: 75726 - DNA, 80 bp, synthetic construct
  source 1..80: mol_type = other DNA
atggacagtccagcctatacagttaccagaaaaggacagctggactgtcaatgatatacagaaattggtgggaaaactaa

SEQ ID NO: 75727 - DNA, 80 bp, synthetic construct
  source 1..80: mol_type = other DNA
attgggcaagtcagatttatgcaggaattaaagtaaagcaattgtgcaaactcatcaggggagccaaagcactaacagat

SEQ ID NO: 75728 - DNA, 80 bp, synthetic construct
  source 1..80: mol_type = other DNA
gtagtaacaatgactgaggaagcagaattagaattggcagagaacagggaaattctaaaagaacctgtacatggagtata

SEQ ID NO: 75729 - DNA, 80 bp, synthetic construct
  source 1..80: mol_type = other DNA
ttatgacccaacaaaagatttaatagcagaaatacaaaaacaagggcaagaccaatggacatatcaaatttatcaagagc

SEQ ID NO: 75730 - DNA, 80 bp, synthetic construct
  source 1..80: mol_type = other DNA
agaccagaaccaacagccccaccagcagagagctttgggacgggggaagagacaacctcctctctgaagcaggaaccgag

SEQ ID NO: 75731 - DNA, 80 bp, synthetic construct
  source 1..80: mol_type = other DNA
catttaaaaatttaaaaacaggaaaatatgcaaaacagaggtctgcccacactaatgatgtaaaacaattaacagaggta

SEQ ID NO: 75732 - DNA, 80 bp, synthetic construct
  source 1..80: mol_type = other DNA
gtgcaaaaggtagctacagaaagcatagtaatatggggaaagacccccaaatttagactacccatacagaaagaaacatg

SEQ ID NO: 75733 - DNA, 80 bp, synthetic construct
  source 1..80: mol_type = other DNA
ggaggcatggtggatggagtattggcaggctacctggattcctgagtgggagtttgtcaataccccacctctagtaaaat

SEQ ID NO: 75734 - DNA, 80 bp, synthetic construct
  source 1..80: mol_type = other DNA
ggacaagggaatatatcctcccttaacttccctcaaatcactctttggcaacgacccttagtcacagtaagaatagaggg

SEQ ID NO: 75735 - DNA, 80 bp, synthetic construct
  source 1..80: mol_type = other DNA
acagctaatagaagccctattagatacaggagcagatgatacagtattagaagacataaatttaccaggaaagtggaaac

SEQ ID NO: 75736 - DNA, 80 bp, synthetic construct
  source 1..80: mol_type = other DNA
gccataggtacagtattagtaggacctacacctgtcaacataattggacgaaatatgttgactcagattggttgtacttt

SEQ ID NO: 75737 - DNA, 80 bp, synthetic construct
  source 1..80: mol_type = other DNA
aaattttccaattagtcctattgaaactgtgccagtaaaattaaagccaggaatggatggcccaaaagttaaacaatggc

SEQ ID NO: 75738 - DNA, 80 bp, synthetic construct
  source 1..80: mol_type = other DNA
cctgaaaatccatacaatactccagtatttgccataaagaaaaaagatagtactaaatggagaaaattagtagatttcag

SEQ ID NO: 75739 - DNA, 80 bp, synthetic construct
  source 1..80: mol_type = other DNA
actgtactgagagacaggccaattttttagggaaaatttggccttccagcaaggggaggccaggaaactttccccagagc

SEQ ID NO: 75740 - DNA, 80 bp, synthetic construct
  source 1..80: mol_type = other DNA
agaactcaataagagaactcaagacttctgggaggtccaattaggaatacctcatcctgcgggattaaaaaagaaaaaat

SEQ ID NO: 75741 - DNA, 80 bp, synthetic construct
  source 1..80: mol_type = other DNA
cagtaacagtactagatgtgggggatgcatatttttcagttcccttatatgaagactttagaaagtatactgcattcact

SEQ ID NO: 75742 - DNA, 80 bp, synthetic construct
  source 1..80: mol_type = other DNA
cattgacagaagaaaaaataagagcattaacagaaatctgtacagacatggagaaagaaggaaaaatttcaagaattggg

SEQ ID NO: 75743 - DNA, 80 bp, synthetic construct
  source 1..80: mol_type = other DNA
gatttatatgtaggatctgacttagaaatagggcagcatagagcaaaaatagaggagttgagggaacatctactgagatg

SEQ ID NO: 75744 - DNA, 80 bp, synthetic construct
  source 1..80: mol_type = other DNA
ggacagtccagcctataaagctgccagacaaagaaaactggactgtcaatgatatacagaaattagtgggaaaactaaat

SEQ ID NO: 75745 - DNA, 80 bp, synthetic construct
  source 1..80: mol_type = other DNA
tgggcaagccagatccatgcaggaattaaagtaaagcaactgtgtaaactcctcaggggagccaaagcgctaacagatat

SEQ ID NO: 75746 - DNA, 80 bp, synthetic construct
  source 1..80: mol_type = other DNA
gccggaaccaacagccccaccagcagagagctttgggatgggggaagagacaaccccctctccaaagcaggaaccggagg

SEQ ID NO: 75747 - DNA, 80 bp, synthetic construct
  source 1..80: mol_type = other DNA
gcaaaaggtggctacagaaagcatagtaatatggggaaaaatccctagatttagactacccatacaaaaagaaacatggg

SEQ ID NO: 75748 - DNA, 80 bp, synthetic construct
  source 1..80: mol_type = other DNA
agaccggaaccaacagctccaccagcagagaactttgggatgggggaagagataacctcttctccgaagcaggaaccggg

SEQ ID NO: 75749 - DNA, 80 bp, synthetic construct
  source 1..80: mol_type = other DNA
gtgcaaaaagtgtctaaagaaagcatagtaatatggggaaaaatccctaaatttcgactacccatacaaagagaaacatg

SEQ ID NO: 75750 - DNA, 80 bp, synthetic construct
  source 1..80: mol_type = other DNA
catttaaaaatctaaaaacaggaaaatatgcaaaaaggagatctgcccacaccaatgatgtaaaacaattagcagaagca

SEQ ID NO: 75751 - DNA, 80 bp, synthetic construct
  source 1..80: mol_type = other DNA
agaccggaaccaacagccccaccagcagagagctgtgggatgggggaagagatagccccctccccgaagcaagaaccggg

SEQ ID NO: 75752 - DNA, 80 bp, synthetic construct
  source 1..80: mol_type = other DNA
aatatttcaggcaagcatgacaaaaatcttagagccctatagagcaaaaaatccagagttggtaatctaccaatatatgg

SEQ ID NO: 75753 - DNA, 80 bp, synthetic construct
  source 1..80: mol_type = other DNA
atggacagtccagcctataaagctgccagaaaaagacagctggactgtcaatgacatacaaaaattagtgggaaagctaa

SEQ ID NO: 75754 - DNA, 80 bp, synthetic construct
  source 1..80: mol_type = other DNA
catttaaaaatctaaagacaggaaaatatgcaaaaaggaagtctacccacactaatgatataagacaattaacagaggca

SEQ ID NO: 75755 - DNA, 80 bp, synthetic construct
  source 1..80: mol_type = other DNA
accaatatatggatgatttatatgtaggatctaacttagagatagggcaacatagagcaaaaatagaggagttgagagaa

SEQ ID NO: 75756 - DNA, 80 bp, synthetic construct
  source 1..80: mol_type = other DNA
tgggaaagctaaattgggcaagccagatttatgcaggaattaaaataaagcaactatgtaaactcctcaggggagccaag

SEQ ID NO: 75757 - DNA, 80 bp, synthetic construct
  source 1..80: mol_type = other DNA
gcactaacagatatagtaacattgactgaggaagcagaactagaattggcagaaaacagggaaattctaagagaacctgt

SEQ ID NO: 75758 - DNA, 80 bp, synthetic construct
  source 1..80: mol_type = other DNA
acatggagtatattatgacccaacaaaagacttaatagcagaagtacaaaaacaggggcaagaccaatggacatatcaaa

SEQ ID NO: 75759 - DNA, 80 bp, synthetic construct
  source 1..80: mol_type = other DNA
ggacgagccgagggacaagggactatatcctcctttaacttccctcaaatcactctttggcagcgacccgtagtcacagt

SEQ ID NO: 75760 - DNA, 80 bp, synthetic construct
  source 1..80: mol_type = other DNA
gagaatagagggacaactaatagaagctctattagacacaggagcagatgatacagtattaggagaaataaatttaccag

SEQ ID NO: 75761 - DNA, 80 bp, synthetic construct
  source 1..80: mol_type = other DNA
tggttgtactttaaatttcccaattagtactattgacactgtgccagtaaaattaaagccaggaatggatgggccaaggg

SEQ ID NO: 75762 - DNA, 80 bp, synthetic construct
  source 1..80: mol_type = other DNA
actaactgaggaggcagaattagaattggcagaggacagggaaattctaaaagaacctgtacatggagtatactatgacc

SEQ ID NO: 75763 - DNA, 80 bp, synthetic construct
  source 1..80: mol_type = other DNA
agcagctacagaaagcatagtaatatggggtaagacccctaaatttagactgcccatacaaaaagagacatgggaagcat

SEQ ID NO: 75764 - DNA, 80 bp, synthetic construct
  source 1..80: mol_type = other DNA
ctattagacacaggagcagatgatacagtattagaacaaatagatttgccaggaaaatggaggccaaaaatgataggggg

SEQ ID NO: 75765 - DNA, 80 bp, synthetic construct
  source 1..80: mol_type = other DNA
agaccagaaccaacagccccaccagcagagagtgtggggatgggggaagaaataccctcctctccgaagcaggaaccgag

SEQ ID NO: 75766 - DNA, 80 bp, synthetic construct
  source 1..80: mol_type = other DNA
caaggagtctgctcctttagcttccctcaaatcactctttggcaacgaccccttgtctcaataagagtaggaggagaagt

SEQ ID NO: 75767 - DNA, 80 bp, synthetic construct
  source 1..80: mol_type = other DNA
aaaatagccacggagagcatagtaatatggggaaagactcctaaatttagattacccattcagaaggaaacatgggaggc

SEQ ID NO: 75768 - DNA, 80 bp, synthetic construct
  source 1..80: mol_type = other DNA
tccaggctagtatgacaaaaatcttagagccctttaggacaaaaaacccagaaatagtcatatatcaatatatggatgac

SEQ ID NO: 75769 - DNA, 80 bp, synthetic construct
  source 1..80: mol_type = other DNA
ttgtatgtaggatctgatttagaaatagggcaacatagggcaaaaatagaagagttaagaaaccatctattgaaatgggg

SEQ ID NO: 75770 - DNA, 80 bp, synthetic construct
  source 1..80: mol_type = other DNA
cagtacagcctatacagctaccagaaaaggataactggactgttaatgatatacagaaattagtaggaaaattaaactgg

SEQ ID NO: 75771 - DNA, 80 bp, synthetic construct
  source 1..80: mol_type = other DNA
accactgactgaagaggcagaattagaattagcggaaaacagggaaattctaaaagaaccagtacatggggtatattatg

SEQ ID NO: 75772 - DNA, 80 bp, synthetic construct
  source 1..80: mol_type = other DNA
caggctagagccaacagccccaccagcagaggatttcaggttcgagaaagcaaccccctctctgaagcaggagcggaaag

SEQ ID NO: 75773 - DNA, 80 bp, synthetic construct
  source 1..80: mol_type = other DNA
aaaaatctgaagacagggaagtatgcaaaaatgaggactgcccacactaatgatgtaagacagctaacagaagcagtgca

SEQ ID NO: 75774 - DNA, 80 bp, synthetic construct
  source 1..80: mol_type = other DNA
acgaggaacctgctcccttagtttccctcaaatcactctttggcaacgaccccttgtctcaataaaagtaggaggacaag

SEQ ID NO: 75775 - DNA, 80 bp, synthetic construct
  source 1..80: mol_type = other DNA
atgataggaggaattggaggttttatcaaagtaaagcaatatgatcacatagttatggaaatttgtggaaaaaaggccat

SEQ ID NO: 75776 - DNA, 80 bp, synthetic construct
  source 1..80: mol_type = other DNA
aggtacagtattagtaggacctacacctgtcaacataattggaagaaatatgttgacccagcttggttgtactctaaact

SEQ ID NO: 75777 - DNA, 80 bp, synthetic construct
  source 1..80: mol_type = other DNA
acagaagaaaaaataaaagcattaacagcaatatgtgaagagatggagaaagaaggaaaaattacaaaaattgggcctga

SEQ ID NO: 75778 - DNA, 80 bp, synthetic construct
  source 1..80: mol_type = other DNA
gactgtactgagagacaggctaattttttagggaaaatctggccttcccacaaaggaaggccagggaatttcatgcagaa

SEQ ID NO: 75779 - DNA, 80 bp, synthetic construct
  source 1..80: mol_type = other DNA
tagtgtaaacaatgaaacaccagggattaggtatcaatacaatgtgctaccacagggatggaaaggatcaccagcaatat

SEQ ID NO: 75780 - DNA, 80 bp, synthetic construct
  source 1..80: mol_type = other DNA
accagcaatattccagagtagcatgacaacaatcttagcgccctttagagcaaaaaacccagaaatagttatctatcaat

SEQ ID NO: 75781 - DNA, 80 bp, synthetic construct
  source 1..80: mol_type = other DNA
acatggatgatctgtatgtagggtctgacttagaaatagggcagcataggacaaaaatagaggagttgagagcacaccta

SEQ ID NO: 75782 - DNA, 80 bp, synthetic construct
  source 1..80: mol_type = other DNA
ttgacatggggatttactacaccagataaaaaacatcagaaagaacccccatttctttggatggggtatgaactccatcc

SEQ ID NO: 75783 - DNA, 80 bp, synthetic construct
  source 1..80: mol_type = other DNA
tgacaaatggacagtacagcctataaacttgccagaaaagaccagctggacagtcaatgatatacagaagttagtgggaa

SEQ ID NO: 75784 - DNA, 80 bp, synthetic construct
  source 1..80: mol_type = other DNA
aactaaattgggcaagtcagatttatccaggtattaaagtaaggtacttgtgtaaactccttaggggagccaaagcacta

SEQ ID NO: 75785 - DNA, 80 bp, synthetic construct
  source 1..80: mol_type = other DNA
acagaggtagtaccactgactgaagaagcagagctagaattagcagagaacagggaaattctaaaagaaccagtacatgg

SEQ ID NO: 75786 - DNA, 80 bp, synthetic construct
  source 1..80: mol_type = other DNA
aacagaccagaaccaacagccccgccagcagagagcttcaggttcggagaggagatagtcccctccccgaagcaggaaca

SEQ ID NO: 75787 - DNA, 80 bp, synthetic construct
  source 1..80: mol_type = other DNA
gaagtagtgcaaaaaatagccacagaaggcatagtaatatggggaaaaattcctaaatttagactacctatacaaaagga

SEQ ID NO: 75788 - DNA, 80 bp, synthetic construct
  source 1..80: mol_type = other DNA
gaaggacaaggaacagtctccttctcccttgacctccctcaaatcactctttggcagcgacccttagtcacaataaaagt

SEQ ID NO: 75789 - DNA, 80 bp, synthetic construct
  source 1..80: mol_type = other DNA
gggcaactaagggaggctttattagatacaggagcagatgatacggtattagaagatatagaattaccaggaaaatggaa

SEQ ID NO: 75790 - DNA, 80 bp, synthetic construct
  source 1..80: mol_type = other DNA
ggaaaccaagaatgatagggggaattggaggttttatcaaagtgagacagtatgatcaaatacccatagaaatttgtgga

SEQ ID NO: 75791 - DNA, 80 bp, synthetic construct
  source 1..80: mol_type = other DNA
cgaaaggctataggtacagtattggtaggacctacccctgtcaacataattggaagaaatatgttgactcaggttgggtg

SEQ ID NO: 75792 - DNA, 80 bp, synthetic construct
  source 1..80: mol_type = other DNA
actgcactgaaaggcaggctaattttttagggaaaatttggccttcccacaaaggggggaggccagggaattttcttcag

SEQ ID NO: 75793 - DNA, 80 bp, synthetic construct
  source 1..80: mol_type = other DNA
tttcagagaacttaataaaagaactcaagatttttgggaggttcaattaggaataccacacccggcaggattaaaaaaga

SEQ ID NO: 75794 - DNA, 80 bp, synthetic construct
  source 1..80: mol_type = other DNA
aaaaatcagtaaccgtactagatgtgggggatgcatatttttcagttcccttagataaggagttcaggaagtacactgca

SEQ ID NO: 75795 - DNA, 80 bp, synthetic construct
  source 1..80: mol_type = other DNA
gtaggatctgacttagagatagggcagcatagaacaaaaatagaggagttaagagaacatttattggcatggggatttac

SEQ ID NO: 75796 - DNA, 80 bp, synthetic construct
  source 1..80: mol_type = other DNA
aggctatacagctgccagagagggatagctggactgtcaatgacatacagaagctagtaggaaaactaaattgggcaagt

SEQ ID NO: 75797 - DNA, 80 bp, synthetic construct
  source 1..80: mol_type = other DNA
cagatttatccagggatcaaagtaaagcaattatgtaagctaattagaggcgccaaggcattaacagaagtaatacaact

SEQ ID NO: 75798 - DNA, 80 bp, synthetic construct
  source 1..80: mol_type = other DNA
gactgcagaagcagagttagaattggcagaaaacagggaaattctgaaagaacctgtacatggggtctattatgacccat

SEQ ID NO: 75799 - DNA, 80 bp, synthetic construct
  source 1..80: mol_type = other DNA
caaaagacttaatagcagaattacagaaacaagggagggaccaatggacataccaaatctatcaggagccatttaaaaat

SEQ ID NO: 75800 - DNA, 80 bp, synthetic construct
  source 1..80: mol_type = other DNA
agacatggtggacagagtattggcaagccacatggcttcctgattgggagtttgttaataccccacctctagtaaaatta

SEQ ID NO: 75801 - DNA, 80 bp, synthetic construct
  source 1..80: mol_type = other DNA
aacagccccaccagcagagagcttcaggttcggagaggagacgacctcctctccgaagcaggagccgaaagacaagggac

SEQ ID NO: 75802 - DNA, 80 bp, synthetic construct
  source 1..80: mol_type = other DNA
ctaaaaacaggaaagtatgcaagaacaaggtctgcccacagtaatgatgtgaagcaattaacagaagcagtgcaaaaaat

SEQ ID NO: 75803 - DNA, 80 bp, synthetic construct
  source 1..80: mol_type = other DNA
agccagagaaagcatagtaatatggggaaaaattcctaaatttagactgcccatacaaaaggaaacatgggagacatggt

SEQ ID NO: 75804 - DNA, 80 bp, synthetic construct
  source 1..80: mol_type = other DNA
tgtaccctcctttggattccctcaaatcactctttggcaacgaccccttgtcacagtaaaaataggaggacagataaaag

SEQ ID NO: 75805 - DNA, 80 bp, synthetic construct
  source 1..80: mol_type = other DNA
gggggaattgggggttttatcaaagtaagacagtatgagcaagtgcccatagaaatttgtggacacaaggccataggtac

SEQ ID NO: 75806 - DNA, 80 bp, synthetic construct
  source 1..80: mol_type = other DNA
agagaactcaggatttttgggaagttcaattaggaataccacatcctgcagggttaaaaaagaaaaagtcagtaacagta

SEQ ID NO: 75807 - DNA, 80 bp, synthetic construct
  source 1..80: mol_type = other DNA
caagtcagatttatccaggaattaaagtaaagcaactatgcagactccttagggggaccaaagccttaacagatatagta

SEQ ID NO: 75808 - DNA, 80 bp, synthetic construct
  source 1..80: mol_type = other DNA
agaccagagccaacagccccaccagcagagagctttggggtcggagaggagatgacccccgctccgaagcaggagatgaa

SEQ ID NO: 75809 - DNA, 80 bp, synthetic construct
  source 1..80: mol_type = other DNA
atggtggacagagtattggcaagccacctggatccctgaatgggaatttgttaataccccccatctagtaaaattatggt

SEQ ID NO: 75810 - DNA, 80 bp, synthetic construct
  source 1..80: mol_type = other DNA
aagccacctggatccctgaatgggaatttgttaataccccccatctagtaaaattatggtatcagttagaaacagagccc

SEQ ID NO: 75811 - DNA, 80 bp, synthetic construct
  source 1..80: mol_type = other DNA
gaaggaagctctattagatacaggagcagatgatacagtattagaagaaatcaatttgtcaggaagatggaaaccaaaaa

SEQ ID NO: 75812 - DNA, 80 bp, synthetic construct
  source 1..80: mol_type = other DNA
tgataggaggaattggaggttttataaaagtaagacagtatgagcaagtaaccatagaaatctgtgggaaaaaggctata

SEQ ID NO: 75813 - DNA, 80 bp, synthetic construct
  source 1..80: mol_type = other DNA
ggcacagtgttagtaggacctacacctatcaatataattggaaggaatatattgactcaaattggttgcactttaaattt

SEQ ID NO: 75814 - DNA, 80 bp, synthetic construct
  source 1..80: mol_type = other DNA
aatccatacaacactccaatctttgccataaaaaagaaggacagtacaaaatggagaaaattagtggatttcagagaact

SEQ ID NO: 75815 - DNA, 80 bp, synthetic construct
  source 1..80: mol_type = other DNA
taaattgggcaagtcaagtttatccagggattaaagtaaagcaattatgtaaactcctcagaggagcaaaagcactgaca

SEQ ID NO: 75816 - DNA, 80 bp, synthetic construct
  source 1..80: mol_type = other DNA
aggccagagcccacagccccaccggcagagagcttcgggttcggagaggagatagccccctcccagaagccggagccgag

SEQ ID NO: 75817 - DNA, 80 bp, synthetic construct
  source 1..80: mol_type = other DNA
ggaaaaggagaaggagctatatcccttagcttccctcaaatcactctttggcagcgacccctagtcacagtaagagtagg

SEQ ID NO: 75818 - DNA, 80 bp, synthetic construct
  source 1..80: mol_type = other DNA
aatcagtaacagtattggatgtgggggatgcatatttttcagttcccttagatggaaactttagaaagtatactgcattc

SEQ ID NO: 75819 - DNA, 80 bp, synthetic construct
  source 1..80: mol_type = other DNA
attccagagtagcatgacaaaaattttagcaccatttagagcaaaaaacccagaaatggttatctaccaatacatggatg

SEQ ID NO: 75820 - DNA, 80 bp, synthetic construct
  source 1..80: mol_type = other DNA
acttgtatgtgggatctgacttagaaataggacagcacagagaaaaggtagaagaattaagggagcatctattgaagtgg

SEQ ID NO: 75821 - DNA, 80 bp, synthetic construct
  source 1..80: mol_type = other DNA
ggattcaccacaccagataaaaaacatcagaaagaacctccattcctctggatggggtatgagctccacccagacaagtg

SEQ ID NO: 75822 - DNA, 80 bp, synthetic construct
  source 1..80: mol_type = other DNA
gggcaagtcagatttatccaggggttcaaacaaaacaactatgtaaactccttagggggaccaaagcactaacagacata

SEQ ID NO: 75823 - DNA, 80 bp, synthetic construct
  source 1..80: mol_type = other DNA
gtacaactgactgcagaagcagaattggagttggcagaaaacagggaaattctaaaagaaccagtacatggagtatatta

SEQ ID NO: 75824 - DNA, 80 bp, synthetic construct
  source 1..80: mol_type = other DNA
tgacccagcaaaagacttaatagcagaagtgcagaaacaagggctagaccagtggacatatcaaatataccaagagccat

SEQ ID NO: 75825 - DNA, 80 bp, synthetic construct
  source 1..80: mol_type = other DNA
aggccagagccaacagccccaccagcggagagcttcgggttcggagaggagataacctcctccccgaagcaggagccgaa

SEQ ID NO: 75826 - DNA, 80 bp, synthetic construct
  source 1..80: mol_type = other DNA
ttaagaacctgaaaacagggaaatatgcaaaaaggaggactgcccacactaatgatgtaaggcaattagcagaaatgata

SEQ ID NO: 75827 - DNA, 80 bp, synthetic construct
  source 1..80: mol_type = other DNA
caaaaaatatgctcagaaagcatagtaatatggggaaaaattcctaaatttagactacccatacaaagggaaacatggga

SEQ ID NO: 75828 - DNA, 80 bp, synthetic construct
  source 1..80: mol_type = other DNA
aacatggtggacagactattggcaggccacctggattcctgaatgggagtttgtaaataccccccctctggtaaaattat

SEQ ID NO: 75829 - DNA, 80 bp, synthetic construct
  source 1..80: mol_type = other DNA
gctgagggaagccctattagatacaggagcagatgacacagtattagaagaaatagatttgccaggaagatggaaaccaa

SEQ ID NO: 75830 - DNA, 80 bp, synthetic construct
  source 1..80: mol_type = other DNA
aaatgatagggggaattggaggctttatcaaagtaagacagtatgaagacatagttatagagattgaggggaaaaaggct

SEQ ID NO: 75831 - DNA, 80 bp, synthetic construct
  source 1..80: mol_type = other DNA
gtaggcacagtgttaataggacctacacctgtcaacataattggaaggaatatattaactcagattggttgtactctaaa

SEQ ID NO: 75832 - DNA, 80 bp, synthetic construct
  source 1..80: mol_type = other DNA
gaaaatccatataatactccagtgtttgccataaagaaaaaggacagcactaaatggagaaaattagttgattttaggga

SEQ ID NO: 75833 - DNA, 80 bp, synthetic construct
  source 1..80: mol_type = other DNA
cctagtataaacaatgagacacctgggattagatatcaatacaacgtgctaccacagggatggaaaggatccccggctat

SEQ ID NO: 75834 - DNA, 80 bp, synthetic construct
  source 1..80: mol_type = other DNA
atagccaaaaattgcagggctcctaggaaaaagggctgttggaaatgtggaaaggaaggacaccaaatgaaagattgtac

SEQ ID NO: 75835 - DNA, 80 bp, synthetic construct
  source 1..80: mol_type = other DNA
agtacccctcaggaacaaataggatggatgacacataatccacctatcccagtaggagaaatctataaaagatggataat

SEQ ID NO: 75836 - DNA, 80 bp, synthetic construct
  source 1..80: mol_type = other DNA
gacagcatgtcagggagtggggggacccggccataaagcaagggtcttggctgaagcaatgagccaattacagccagcag

SEQ ID NO: 75837 - DNA, 80 bp, synthetic construct
  source 1..80: mol_type = other DNA
tcatggtacagggaggcaattttaggaaccaaagaaaacctgttaagtgcttcaattgcggtaaagaagggcacatagcc

SEQ ID NO: 75838 - DNA, 80 bp, synthetic construct
  source 1..80: mol_type = other DNA
actccctctcagaagcaggagcagatggacaaggagaggtatcctgtaacctccctcagatcactctttggcaacgaccc

SEQ ID NO: 75839 - DNA, 80 bp, synthetic construct
  source 1..80: mol_type = other DNA
acaggctaattttttagggaaaatctggccttcccacaagggaaggccaggaaattttattcagagcaggccagaaccat

SEQ ID NO: 75840 - DNA, 80 bp, synthetic construct
  source 1..80: mol_type = other DNA
aaaatatcaactaaaacacatagtatgggcaagcagggagctagaacgattcgcagtcaaccctggtcttttagaaacag

SEQ ID NO: 75841 - DNA, 80 bp, synthetic construct
  source 1..80: mol_type = other DNA
gattgcatccagtgcaggcagggcctgttgcaccaggccagcagagagaaccacggggaagtgacatagcagggactact

SEQ ID NO: 75842 - DNA, 80 bp, synthetic construct
  source 1..80: mol_type = other DNA
cctgggactacagaaaatagtaagaatgtatagccctaccagcattctggacataagacaaggaccaaaagaacccttta

SEQ ID NO: 75843 - DNA, 80 bp, synthetic construct
  source 1..80: mol_type = other DNA
accttgatgatccaaaatgcgaatccagattgtaagactattttaaaagcattagggccaggagctacactagaagaaat

SEQ ID NO: 75844 - DNA, 80 bp, synthetic construct
  source 1..80: mol_type = other DNA
gatgacagcatgtcagggagtggggggacccagccataaagcaagagtcttagctgaagcaatgagccaagtaacgaatc

SEQ ID NO: 75845 - DNA, 80 bp, synthetic construct
  source 1..80: mol_type = other DNA
agtcagctaccatcatgatgcagaaaggcaattataggaaccaacgaaagactgttaagtgtttcaattgtggcaaagaa

SEQ ID NO: 75846 - DNA, 80 bp, synthetic construct
  source 1..80: mol_type = other DNA
gggcatgtagccagaaattgcagggcccctaggaaaaaaggctgttggaaatgcggaaaggaaggacaccaaatgaaaga

SEQ ID NO: 75847 - DNA, 80 bp, synthetic construct
  source 1..80: mol_type = other DNA
gctccctcccagaaacaggaaaagatagacaaggaaccgtatcctttaactgccctcaaatcactctttggcaacgaccc

SEQ ID NO: 75848 - DNA, 80 bp, synthetic construct
  source 1..80: mol_type = other DNA
gaacagagccaacagccccaccagaagaaagcttcaggtttggggaagagacaacagctccctcccagaaacaggaaaag

SEQ ID NO: 75849 - DNA, 80 bp, synthetic construct
  source 1..80: mol_type = other DNA
acaatataaattaaagcatctagtatgggcaagcagggagctagagcgatttgcagttaatcctggcctgttagaaacat

SEQ ID NO: 75850 - DNA, 80 bp, synthetic construct
  source 1..80: mol_type = other DNA
cagaaggctgtaaacaaatactgaaacagctatatccatcccttcagacaggatcggaagaacttaaatcattatataat

SEQ ID NO: 75851 - DNA, 80 bp, synthetic construct
  source 1..80: mol_type = other DNA
acagtagcagtcctctattgtgtgcatcaaaggatagggataaaagacaccaaggaggctttagacaagatagaggaaga

SEQ ID NO: 75852 - DNA, 80 bp, synthetic construct
  source 1..80: mol_type = other DNA
gcaaaataagagtaagcaaaaagcacagcaagcagcagctgacacaggagacagcagcagcaaggtcagccaaaattacc

SEQ ID NO: 75853 - DNA, 80 bp, synthetic construct
  source 1..80: mol_type = other DNA
ctatagtacaaaacctccaggggcaaatggtacaccaggccatatcacctagaactttaaatgcatgggtaaaagtagta

SEQ ID NO: 75854 - DNA, 80 bp, synthetic construct
  source 1..80: mol_type = other DNA
gaggaaaaagctttcagcccagaagtaatacccatgttttcagcattatcagaaggagccactccacaagacttaaacac

SEQ ID NO: 75855 - DNA, 80 bp, synthetic construct
  source 1..80: mol_type = other DNA
catgctaaacacagtaggagggcatcaagcagctatgcaaatgttaaaagagaccatcaatgaggaagctgcagaatggg

SEQ ID NO: 75856 - DNA, 80 bp, synthetic construct
  source 1..80: mol_type = other DNA
atagattacatccagtacatgcagggcctattgcaccaggccagatgagagaaccaaggggaagtgacatagcaggaact

SEQ ID NO: 75857 - DNA, 80 bp, synthetic construct
  source 1..80: mol_type = other DNA
atgggtgcgagagcgtcaatattaagcgggggacaattagatagatgggagaaaattaggttaaggccaggggggaagaa

SEQ ID NO: 75858 - DNA, 80 bp, synthetic construct
  source 1..80: mol_type = other DNA
actagtacccttcaggaacagatagggtggatgacaaataatccacctatcccagtaggagaaatctataaaaggtggat

SEQ ID NO: 75859 - DNA, 80 bp, synthetic construct
  source 1..80: mol_type = other DNA
aatcctgggattaaataaaatagtaagaatgtatagccctaccagcattctggacataaaacaaggaccaaaggaaccct

SEQ ID NO: 75860 - DNA, 80 bp, synthetic construct
  source 1..80: mol_type = other DNA
ttagagattatgtagatcggttctataaaactctaagggccgaacaagcttcacaggatgtaaaaaattggatgacagaa

SEQ ID NO: 75861 - DNA, 80 bp, synthetic construct
  source 1..80: mol_type = other DNA
gagactatgtagaccgattctataaaactctaagagccgagcaagcttcacaagaggtaaaaaattggatgacagaaacc

SEQ ID NO: 75862 - DNA, 80 bp, synthetic construct
  source 1..80: mol_type = other DNA
gagccaacagccccatcagaagagagcgtcaggtttggagaagagacaacaactccctctcagaagcaggagccgataga

SEQ ID NO: 75863 - DNA, 80 bp, synthetic construct
  source 1..80: mol_type = other DNA
cagaaggctgtagacaaatactgggacagctacaaccgtcccttcagacaggatcagaagagcttagatcattatataat

SEQ ID NO: 75864 - DNA, 80 bp, synthetic construct
  source 1..80: mol_type = other DNA
acagtagccaccctctattgtgtacatcaaaagatagaggtaaaagacaccaaggaagctttagagaagatagaggaaga

SEQ ID NO: 75865 - DNA, 80 bp, synthetic construct
  source 1..80: mol_type = other DNA
gcaaaacaaaagtaagaaaaaagcacagcaagcagcagctgacacaggaaacagcagccaggtcagccaaaattacccta

SEQ ID NO: 75866 - DNA, 80 bp, synthetic construct
  source 1..80: mol_type = other DNA
tagtgcagaacctacaggggcaaatggtacatcaggccatatcacctagaactttaaatgcatgggtaaaagtagtggaa

SEQ ID NO: 75867 - DNA, 80 bp, synthetic construct
  source 1..80: mol_type = other DNA
atgggtgcgagagcgtcagtattaagtgcgggggaattagataagtgggaaaaaattcggttaaggccagggggaaagaa

SEQ ID NO: 75868 - DNA, 80 bp, synthetic construct
  source 1..80: mol_type = other DNA
cttgttggtccaaaatgcaaacccagattgtaaaactatcttaaaagcattgggtccagcagctacactagaagaaatga

SEQ ID NO: 75869 - DNA, 80 bp, synthetic construct
  source 1..80: mol_type = other DNA
gctaccataatgatacagaaaggcaattttaggaaccaaagaaagactgttaagtgtttcaattgtggcaaagaagggca

SEQ ID NO: 75870 - DNA, 80 bp, synthetic construct
  source 1..80: mol_type = other DNA
actccctctcagaagcaggagccgatagacaaggaactgtatcctttagcttccctcagatcactctttggcagcgaccc

SEQ ID NO: 75871 - DNA, 80 bp, synthetic construct
  source 1..80: mol_type = other DNA
ctgagagacaggctaattttttaggtaagatctggccttcccacaagggaaggccagggaattttcttcagagcagacca

SEQ ID NO: 75872 - DNA, 80 bp, synthetic construct
  source 1..80: mol_type = other DNA
acaatatagattaaagcatatagtatgggcaagcagggagctagaaagattcgcagtcaaccccggcctgttaaaaacat

SEQ ID NO: 75873 - DNA, 80 bp, synthetic construct
  source 1..80: mol_type = other DNA
caaaaggctgtaaacaaatactgggacagttacaaccatcccttcaaacaggatcaaaaaaacttaaatcattatataat

SEQ ID NO: 75874 - DNA, 80 bp, synthetic construct
  source 1..80: mol_type = other DNA
acagtaccaaccctctattgtgtacatcaaaagatagacataaaaaacaccaaggaagctctagacaggatagaggaaaa

SEQ ID NO: 75875 - DNA, 80 bp, synthetic construct
  source 1..80: mol_type = other DNA
gcaaaacaaaagtaaaaaaaaagcacagcaggcagcagctgacaaaaacaataacagccaggtcagccaaaattacccta

SEQ ID NO: 75876 - DNA, 80 bp, synthetic construct
  source 1..80: mol_type = other DNA
tagtgcaaaaccttcaggggcaaatggtacatcaccccctaacacctagaactttaaatgcatgggtaaaagtagtaaaa

SEQ ID NO: 75877 - DNA, 80 bp, synthetic construct
  source 1..80: mol_type = other DNA
aagaaggctttcagcccaaaggtgatacccatgcttacagcattatcaaaaggagccaccccacaaaacttaaacactat

SEQ ID NO: 75878 - DNA, 80 bp, synthetic construct
  source 1..80: mol_type = other DNA
ttgttggtccaaaatgcgaacccggattgtaagactattttaaaagcattgggaccaggagcgacactagaagaaatgat

SEQ ID NO: 75879 - DNA, 80 bp, synthetic construct
  source 1..80: mol_type = other DNA
tattggtctcagggagcaaaagcaggagtttaaaatgaatccaaatcagaagataataatcattagctcaatctgtatga

SEQ ID NO: 75880 - DNA, 80 bp, synthetic construct
  source 1..80: mol_type = other DNA
atttctgggaagttcaattaggaataccacatcctgcaggtttaaaaaagaacaaatcagtaacagtactagatgtgggg

SEQ ID NO: 75881 - DNA, 80 bp, synthetic construct
  source 1..80: mol_type = other DNA
ctattgaagtggggatttaccacaccagacaaaaaacatcagaaagaacctccatttctttggatggttatggaactaaa

SEQ ID NO: 75882 - DNA, 80 bp, synthetic construct
  source 1..80: mol_type = other DNA
cttttaaagtgggggtttaccacccccgacaagaaacatcagaaagaacctccctttctttggatgggttatgaactaaa

SEQ ID NO: 75883 - DNA, 80 bp, synthetic construct
  source 1..80: mol_type = other DNA
ctagaaataggccaccatagagcaaaaatagaagagttaagagcacatcttttaaagtgggggtttaccacccccgacaa

SEQ ID NO: 75884 - DNA, 80 bp, synthetic construct
  source 1..80: mol_type = other DNA
gatgcatattttagcgtacccttagataaggacttcaggaagtacactgcattcaccatacctagtatcaataatgaaac

SEQ ID NO: 75885 - DNA, 80 bp, synthetic construct
  source 1..80: mol_type = other DNA
ctactgaaatggggatttactacaccggacaaaaaacatcaaaaagaacccccattcctttggatggggtatgaactcca

SEQ ID NO: 75886 - DNA, 80 bp, synthetic construct
  source 1..80: mol_type = other DNA
aaatcttagatccctttagagcaaagaatccagacctagttatctaccaatacatggatgatttgtatgtagggtctgac

SEQ ID NO: 75887 - DNA, 80 bp, synthetic construct
  source 1..80: mol_type = other DNA
ttagaaatagggcagcatagaacaaaaatagaggagttaagagaacatctactgaaatggggatttactacaccggacaa

SEQ ID NO: 75888 - DNA, 80 bp, synthetic construct
  source 1..80: mol_type = other DNA
gcattgacagaaatatgtttggaaatggaaaaagaaggaaagatctcaaaaattgggcctgaaaatccatacaatactcc

SEQ ID NO: 75889 - DNA, 80 bp, synthetic construct
  source 1..80: mol_type = other DNA
gatgcatatttttcagttcctttagatgaaggtttcaggaagtatactgcattcaccatacctagtagaaacaatgaaac

SEQ ID NO: 75890 - DNA, 80 bp, synthetic construct
  source 1..80: mol_type = other DNA
ttagaaatagggcaacatagagcaaaaatagaggagttaagaaaccatctgttaaagtgggggtttaccacgccagacaa

SEQ ID NO: 75891 - DNA, 80 bp, synthetic construct
  source 1..80: mol_type = other DNA
gcgctggtggaaatttgcaccgaaatggaaaaggaaggaaaaattacaaaaattgggcctgataatccatataacactcc

SEQ ID NO: 75892 - DNA, 80 bp, synthetic construct
  source 1..80: mol_type = other DNA
agtatttgttataaagaaaaaggacagcgccaaatggaggaaattagtagatttcagagagctcaataaaagaactcagg

SEQ ID NO: 75893 - DNA, 80 bp, synthetic construct
  source 1..80: mol_type = other DNA
accaggaatcagatatcagtacaatgtgctaccacagggatggaaaggatctccggcaatattccagtgcagcatgacaa

SEQ ID NO: 75894 - DNA, 80 bp, synthetic construct
  source 1..80: mol_type = other DNA
aatatttgccataaagaagaaaaacagtactagatggaggaaattagtagatttcagagaacttaataaaagaactcagg

SEQ ID NO: 75895 - DNA, 80 bp, synthetic construct
  source 1..80: mol_type = other DNA
atttttgggaggttcaattgggaataccgcaccctgcagggttaaaaaagaaaaagtcagtaacggtactggatgtgggg

SEQ ID NO: 75896 - DNA, 80 bp, synthetic construct
  source 1..80: mol_type = other DNA
gatgcatatttttcaattcccttagataaggagttcaggaaatacactgcattcaccatacctagtatcaacaatgagac

SEQ ID NO: 75897 - DNA, 80 bp, synthetic construct
  source 1..80: mol_type = other DNA
accaggaattaggtaccagtacaatgtgcttccacaaggatggaaaggatcaccagcaatattccaatgtagcatgacga

SEQ ID NO: 75898 - DNA, 80 bp, synthetic construct
  source 1..80: mol_type = other DNA
ttagaaatagagcaacacagaacaaaaatagacgagttaagagagcatctactaaggtggggattggacacaccagacaa

SEQ ID NO: 75899 - DNA, 80 bp, synthetic construct
  source 1..80: mol_type = other DNA
aattatcctggtagcagttcatgtagccagtgggtatatagaagcagaagttattccagcagaaacagggcaggaaacag

SEQ ID NO: 75900 - DNA, 80 bp, synthetic construct
  source 1..80: mol_type = other DNA
catactttctcttaaaattagcaggaagatggccagtaaaaataatacatacagacaatggcagcaatttcaccagtgct

SEQ ID NO: 75901 - DNA, 80 bp, synthetic construct
  source 1..80: mol_type = other DNA
gcggttaaggctgcctgttggtgggcaggagtcaagcaggaatttggcattccctacaatccccaaagtcaaggggtagt

SEQ ID NO: 75902 - DNA, 80 bp, synthetic construct
  source 1..80: mol_type = other DNA
tataggacaggtaagagatcaggccgaacatcttaagacagcagtacaaatggcagtactcatccacaattttaaaagaa

SEQ ID NO: 75903 - DNA, 80 bp, synthetic construct
  source 1..80: mol_type = other DNA
agaatctatgaataatgaattaaagaaaattataggacaggtaagagatcaggccgaacatcttaagacagcagtacaaa

SEQ ID NO: 75904 - DNA, 80 bp, synthetic construct
  source 1..80: mol_type = other DNA
tggcagtactcatccacaattttaaaagaaaaggggggattggggggtacagtgcaggagaaagaataatagacataata

SEQ ID NO: 75905 - DNA, 80 bp, synthetic construct
  source 1..80: mol_type = other DNA
ctaaaaggagaagccatgcatggacaagtagactgtagtccaggaatatggcaactagattgtacacatttagaaggaaa

SEQ ID NO: 75906 - DNA, 80 bp, synthetic construct
  source 1..80: mol_type = other DNA
ggcagcaatttcaccagtgctgcggttaaggctgcctgttggtgggcaggagtcaagcaggaatttggaattccctacaa

SEQ ID NO: 75907 - DNA, 80 bp, synthetic construct
  source 1..80: mol_type = other DNA
tactttcttttgaaattagcaggaagatggccagtaacaacagtacatacagacaatggcagcaatttcaccagtaatgc

SEQ ID NO: 75908 - DNA, 80 bp, synthetic construct
  source 1..80: mol_type = other DNA
tccccaaagtcaaggagtagtagaatctatgaataaagaattaaagaaaattataggacaggtaagagatcaggctgaac

SEQ ID NO: 75909 - DNA, 80 bp, synthetic construct
  source 1..80: mol_type = other DNA
gaaaggataatagacataatatcaacagacatacaaactaaagaactacaaaaacaaattacaaaaattcaaaattttcg

SEQ ID NO: 75910 - DNA, 80 bp, synthetic construct
  source 1..80: mol_type = other DNA
gtgataaatgtcagctaaaaggagaagccatgcatggacaagtagactgtagtccaggaatatggcaattagattgtaca

SEQ ID NO: 75911 - DNA, 80 bp, synthetic construct
  source 1..80: mol_type = other DNA
catttagaaggaaaagttatcctggtagcagttcatgtagccagtggatacatagaagcagaagttattccagcagagac

SEQ ID NO: 75912 - DNA, 80 bp, synthetic construct
  source 1..80: mol_type = other DNA
atttcatcagtactactgttaaggccgcctgttggtgggcagggatcaagcaggaatttggcattccctacaatccccca

SEQ ID NO: 75913 - DNA, 80 bp, synthetic construct
  source 1..80: mol_type = other DNA
agtcaaggagtagtagaatctatgcataatgaattaaagaaaattataggacaggtgagagatcaggctgaacatcttaa

SEQ ID NO: 75914 - DNA, 80 bp, synthetic construct
  source 1..80: mol_type = other DNA
aacagcagtacaaatggcagtattcatccacaattttaaaagaaaaggggggattgggggatacagtgcaggagaaagaa

SEQ ID NO: 75915 - DNA, 80 bp, synthetic construct
  source 1..80: mol_type = other DNA
tacagggacagcagagatccactttgggaaggaccagcaaaacttctctggaaaggtgaaggggcagtagtaatacaaga

SEQ ID NO: 75916 - DNA, 80 bp, synthetic construct
  source 1..80: mol_type = other DNA
gaaatatcacagtaattggagagcaatggctagtgattttaacctgccacctatagtagcaaaggaaatagtagccagct

SEQ ID NO: 75917 - DNA, 80 bp, synthetic construct
  source 1..80: mol_type = other DNA
tgtagccagtggatatatagaagcagaagttattccagcagagacggggcaggaaacagcatactttctcttaaagttag

SEQ ID NO: 75918 - DNA, 80 bp, synthetic construct
  source 1..80: mol_type = other DNA
caggaagatggccagtaaagacaatacatacagacaatggccctaatttcataagtactactgttaaggccgcctgttgg

SEQ ID NO: 75919 - DNA, 80 bp, synthetic construct
  source 1..80: mol_type = other DNA
tgggcggggatcaagcaggaatttggtattccctacaatccccaaagtcaaggagtagtagaatccatgaataaagaatt

SEQ ID NO: 75920 - DNA, 80 bp, synthetic construct
  source 1..80: mol_type = other DNA
aaagaaaattataggacaggtaagagaccaggctgaacaacttaagacagcagtacaaatggcagtattcatccacaatt

SEQ ID NO: 75921 - DNA, 80 bp, synthetic construct
  source 1..80: mol_type = other DNA
gaattacaaaaacgaattatccaaattcaaaattttcgggtttattacagggacagcagagatccgctttggaaaggacc

SEQ ID NO: 75922 - DNA, 80 bp, synthetic construct
  source 1..80: mol_type = other DNA
agcaaagcttctctggaaaggtgaaggggcagttgtaatacaagataatagtgaaataaaagtagtgccaaggagaaaag

SEQ ID NO: 75923 - DNA, 80 bp, synthetic construct
  source 1..80: mol_type = other DNA
ggacaagtagacagcagtccaggaatatggcaactagattgtacacatttagaaggaaaaattatcctggtagcagttca

SEQ ID NO: 75924 - DNA, 80 bp, synthetic construct
  source 1..80: mol_type = other DNA
tagactgtagtccaggaatatggcaattagattgtacacatttagaaggaaaagttattctggtagcagtccatgtagcc

SEQ ID NO: 75925 - DNA, 80 bp, synthetic construct
  source 1..80: mol_type = other DNA
agtggatatatagaagcagaagttattccagcagagacagggcaggaaacagcatactttctcttaaaattagcaggaag

SEQ ID NO: 75926 - DNA, 80 bp, synthetic construct
  source 1..80: mol_type = other DNA
atggccagtaaaaataatacatacagacaatggcagcaatttcatcagtactactgttaaggccgcctgttggtgggcgg

SEQ ID NO: 75927 - DNA, 80 bp, synthetic construct
  source 1..80: mol_type = other DNA
ggatcaagcaggaatttggcattccctacaatccccaaagtcagggagtagtagaatctatgaataaagaattaaagaaa

SEQ ID NO: 75928 - DNA, 80 bp, synthetic construct
  source 1..80: mol_type = other DNA
attataggacaggtaagagatcaggctgagcagcttaaaacagcagtacaaatggcagtattcatccacaattttaaacg

SEQ ID NO: 75929 - DNA, 80 bp, synthetic construct
  source 1..80: mol_type = other DNA
tttttagatggaatagataaggcccaagaagaacatgagaaatatcacagtaattggagagcaatggctagtgattttaa

SEQ ID NO: 75930 - DNA, 80 bp, synthetic construct
  source 1..80: mol_type = other DNA
cttctctggaaaggtgaaggagcagtagtaatacaagataatagtgacataaaagtagtgccagggagaaaagtaaagat

SEQ ID NO: 75931 - DNA, 80 bp, synthetic construct
  source 1..80: mol_type = other DNA
cagggcaggaaacagcatactttatcttaaaattagcaggaagatggccagtaaaaataatacatacagacaatggcagc

SEQ ID NO: 75932 - DNA, 80 bp, synthetic construct
  source 1..80: mol_type = other DNA
atagtagacataatagcaacagacatacaaactaaagaattacaaaaacagattacaaaacttcaaaattttcgggttta

SEQ ID NO: 75933 - DNA, 80 bp, synthetic construct
  source 1..80: mol_type = other DNA
cctgccacctatagtagcaaaagaaatagtagccagctgtgataaatgccagctaaaaggagaggccatgcatggacaag

SEQ ID NO: 75934 - DNA, 80 bp, synthetic construct
  source 1..80: mol_type = other DNA
ggggcagtagtaatacaagataatagtgacataaaagtagtgccaagaagaaaagcaaagatcattagggattatggaaa

SEQ ID NO: 75935 - DNA, 80 bp, synthetic construct
  source 1..80: mol_type = other DNA
ttgcacacatttagaaggaaaagttatcctggtagcagttcatgtagccagtggatatatagaagcagaagtgattccag

SEQ ID NO: 75936 - DNA, 80 bp, synthetic construct
  source 1..80: mol_type = other DNA
cagagacaggacaggaaacagcatactttatcttaaaattagcaggaagatggccagtaaaaacaatacatacagacaat

SEQ ID NO: 75937 - DNA, 80 bp, synthetic construct
  source 1..80: mol_type = other DNA
ggccccaatttcaccagtgctacagttaaggctgcctgttggtgggcagggatcaagcaagaatttggcattccctacaa

SEQ ID NO: 75938 - DNA, 80 bp, synthetic construct
  source 1..80: mol_type = other DNA
atcttaagacagcagtacaaatggcagtattcatccacaattttaaaagaaaaggggggattggggggtacagtgcaggg

SEQ ID NO: 75939 - DNA, 80 bp, synthetic construct
  source 1..80: mol_type = other DNA
gaaagaatagtagacataatagcaacagacatacaaattagagaattacagaaacacatcacaaaaattcaaaattttcg

SEQ ID NO: 75940 - DNA, 80 bp, synthetic construct
  source 1..80: mol_type = other DNA
ggtttattacagggacagcagagatccactttggaaaggaccagcaaagcttctctggaaaggtgaaggggcagtagtaa

SEQ ID NO: 75941 - DNA, 80 bp, synthetic construct
  source 1..80: mol_type = other DNA
tacaagaccagagtgacataaaggtagtgccaaggagaaaagcaaagatcattagggattatggaaaacagatggcaggt

SEQ ID NO: 75942 - DNA, 80 bp, synthetic construct
  source 1..80: mol_type = other DNA
gccagctgtgataaatctcaggtaaaaggagaagccatgcatggacaagtagactgtagtccaggaatatggcaactaga

SEQ ID NO: 75943 - DNA, 80 bp, synthetic construct
  source 1..80: mol_type = other DNA
ccaaagtcaaggggtggtagaatccatgaacaaagaattaaagaaaattataggacaggtaagagaccaggctgagcatc

SEQ ID NO: 75944 - DNA, 80 bp, synthetic construct
  source 1..80: mol_type = other DNA
agaatagtagacataatagcaacagacatacaaactcaagaactacaaaaacaaatttcaaaaattcaaaattttcgggt

SEQ ID NO: 75945 - DNA, 80 bp, synthetic construct
  source 1..80: mol_type = other DNA
tacacatttagaaggaaaaattatcctggtagcagtccatgtagccagtggctatatagaagcggaagtcatcccagcag

SEQ ID NO: 75946 - DNA, 80 bp, synthetic construct
  source 1..80: mol_type = other DNA
aaacaggacaggagacagcatactttatattaaaattagcaggaagatggccagtgaaagtaatacacacagacaatggc

SEQ ID NO: 75947 - DNA, 80 bp, synthetic construct
  source 1..80: mol_type = other DNA
cccaatttcaccagtgctgcagtaaaggcagcatgttggtgggcaaatattacacaagaatttggaattccctacaatcc

SEQ ID NO: 75948 - DNA, 80 bp, synthetic construct
  source 1..80: mol_type = other DNA
ccaaagccaaggagtagtggaatctatgaataaaggattaaagaaaatcataggacaggtcagggatcaagctgaacact

SEQ ID NO: 75949 - DNA, 80 bp, synthetic construct
  source 1..80: mol_type = other DNA
gggaattttcctcagaacaggttagaaccaacagccccaccagcagacctcctggggatgggggaagggataaccccccc

SEQ ID NO: 75950 - DNA, 80 bp, synthetic construct
  source 1..80: mol_type = other DNA
ttcgaagcaggaagagagagagagggaagctccttcagtttccctcaaatcactctttggcaacgaccccttgtcacaat

SEQ ID NO: 75951 - DNA, 80 bp, synthetic construct
  source 1..80: mol_type = other DNA
tacatggagcctattatgaccctgcaaaagacttaatagcagaaatacagaaacaaggacaaggccaatggacatatcag

SEQ ID NO: 75952 - DNA, 80 bp, synthetic construct
  source 1..80: mol_type = other DNA
catttgttgaagtggggatttaccacaccagacaagaagcatcagaaagaacccccatttctttggatgggatatgaact

SEQ ID NO: 75953 - DNA, 80 bp, synthetic construct
  source 1..80: mol_type = other DNA
gctggactgtcaatgatatacagaagctggtgggaaaactaaattgggcaagccagatctatgcagggattaaagtaagg

SEQ ID NO: 75954 - DNA, 80 bp, synthetic construct
  source 1..80: mol_type = other DNA
ccatcctgacaaatggacagtacagcctgtaaaactgccagaaaaagacagctggactgtcaatgatatacagaagctgg

SEQ ID NO: 75955 - DNA, 80 bp, synthetic construct
  source 1..80: mol_type = other DNA
tgggaaaactaaattgggcaagccagatctatgcagggattaaagtaaggcaactatgtaaactccttaggggggccaaa

SEQ ID NO: 75956 - DNA, 80 bp, synthetic construct
  source 1..80: mol_type = other DNA
gcactaacagacatagtaccactaacaaaagaggcagaattggaattggaagaaaacagggagattctgagagaaccagt

SEQ ID NO: 75957 - DNA, 80 bp, synthetic construct
  source 1..80: mol_type = other DNA
gggaacttcctccagagcaggccagagccaacagccccaccagcagagagcttcaggttcggagaggagatgaccccctc

SEQ ID NO: 75958 - DNA, 80 bp, synthetic construct
  source 1..80: mol_type = other DNA
tccgaagcaggagccgaaggacatggaacctcccttgccttccctcaaatcactctttggcagcgacctcttgtcacagt

SEQ ID NO: 75959 - DNA, 80 bp, synthetic construct
  source 1..80: mol_type = other DNA
aaacatagagggacagttaagggaagctctattagatacaggagcagatgatacagtattagaagagataaatttgccag

SEQ ID NO: 75960 - DNA, 80 bp, synthetic construct
  source 1..80: mol_type = other DNA
tcaagaatagggcctgagaatccatataacactccaatatttgccataaaaaagaaggacagtactaaatggagaaaatt

SEQ ID NO: 75961 - DNA, 80 bp, synthetic construct
  source 1..80: mol_type = other DNA
ggaaaggatcaccggcaatattccagagtagcatgacaaaaatcttagagccctttaggtcaaaaaatccagacataatt

SEQ ID NO: 75962 - DNA, 80 bp, synthetic construct
  source 1..80: mol_type = other DNA
caaatttttcaagaggcatttaaaaatttaaaaacagggaaatatgcaggaaaaaagtctgctcacactaatgatgtaaa

SEQ ID NO: 75963 - DNA, 80 bp, synthetic construct
  source 1..80: mol_type = other DNA
aaattttccccaaagcagaccagagccaacagccccaccagcagagatctttgggatgggggaagaaataactgcccctc

SEQ ID NO: 75964 - DNA, 80 bp, synthetic construct
  source 1..80: mol_type = other DNA
agaagcaggagcagaacgacaggggtcagaacccacctttagtttccctcaaatcactctttggcaacgacctcttgtca

SEQ ID NO: 75965 - DNA, 80 bp, synthetic construct
  source 1..80: mol_type = other DNA
aattggtggatttcagagagctcaataaaagaactcaagacttttgggaggttcaattaggaataccgcatccagcgggc

SEQ ID NO: 75966 - DNA, 80 bp, synthetic construct
  source 1..80: mol_type = other DNA
atatactgcattcaccatacctagcataaacaatgagacaccgggaatcaggtatcagtacaatgtgcttccacagggat

SEQ ID NO: 75967 - DNA, 80 bp, synthetic construct
  source 1..80: mol_type = other DNA
ttgtatgtaggatctgatttagaaatagggcagcatagaataaaaatagaagagttaagaactcatctattgagctgggg

SEQ ID NO: 75968 - DNA, 80 bp, synthetic construct
  source 1..80: mol_type = other DNA
ttttcctcagagcagaccagaaccaacagccccaccagcagagatctgtgggatgaaggaagaggattctcctccgaagc

SEQ ID NO: 75969 - DNA, 80 bp, synthetic construct
  source 1..80: mol_type = other DNA
aggagcagaacccaccttcagtttccctcaaatcactctttggcaacgacctcttgtcacagtaaaaatagggggacagc

SEQ ID NO: 75970 - DNA, 80 bp, synthetic construct
  source 1..80: mol_type = other DNA
taaaagaagctctattagatacaggagcagatgacacagttttagaagacataaatttgccaggaaaatggaaaccaaga

SEQ ID NO: 75971 - DNA, 80 bp, synthetic construct
  source 1..80: mol_type = other DNA
atgatagggggaattggagggttcatcaaggtaaaacagtatgatcaaatacttatagaaatttgtgggaaaaaggctat

SEQ ID NO: 75972 - DNA, 80 bp, synthetic construct
  source 1..80: mol_type = other DNA
caccaaatgaaagattgcactgagagacaggctaattttttagggaaattttggcctcccaacaaggggaggccaggaaa

SEQ ID NO: 75973 - DNA, 80 bp, synthetic construct
  source 1..80: mol_type = other DNA
acagacatagtaatattaactgaagaagcagaattagaattagcagaaaacagggaaattctaaaagaaccagtacatgg

SEQ ID NO: 75974 - DNA, 80 bp, synthetic construct
  source 1..80: mol_type = other DNA
agggggccagacaagggaggctctcttagacacaggagcagatgatacagtactagaggaaataaatttgccaggaaaat

SEQ ID NO: 75975 - DNA, 80 bp, synthetic construct
  source 1..80: mol_type = other DNA
aaaaatcagtgacagtactggatgtgggggatgcatatttttcggtgcctttatatgaagactttaggaaatacactgca

SEQ ID NO: 75976 - DNA, 80 bp, synthetic construct
  source 1..80: mol_type = other DNA
caatacatggatgacttgtatgtggggtctgacttagaaataaggcagcatagagaaaaagtagaggaattgaggaagca

SEQ ID NO: 75977 - DNA, 80 bp, synthetic construct
  source 1..80: mol_type = other DNA
cctattgaggtggggattcaccacaccagataaaaaacatcagaaagaacctccattcctctggatgggatatgagctcc

SEQ ID NO: 75978 - DNA, 80 bp, synthetic construct
  source 1..80: mol_type = other DNA
actaacagacgtagtaccactgactacagaggcagaatttgaattggcagagaacagggaaattctaaaagagccagtac

SEQ ID NO: 75979 - DNA, 80 bp, synthetic construct
  source 1..80: mol_type = other DNA
atggagtatattatgactcatcaaaagaactaatagcagaagtacagaaacaagggctagaacaatggacatatcaaata

SEQ ID NO: 75980 - DNA, 80 bp, synthetic construct
  source 1..80: mol_type = other DNA
tatcaagagccattcaaaaacctaaaaacagggaaatatgcaaaaaggaggactgcccacactaatgatgtaaggcaatt

SEQ ID NO: 75981 - DNA, 80 bp, synthetic construct
  source 1..80: mol_type = other DNA
aaatggaaaccaaaaatgatagggggaattggaggttttatcaaagtaagacagtatgaggacataaccatagaaattga

SEQ ID NO: 75982 - DNA, 80 bp, synthetic construct
  source 1..80: mol_type = other DNA
gggtaaaaaggctataggtacagtactaataggacctacacctgtcaacataattggaaggaacctgttgactcagattg

SEQ ID NO: 75983 - DNA, 80 bp, synthetic construct
  source 1..80: mol_type = other DNA
aagaaaaagtcagtaacagtactggatgtgggggatgcatatttttcagtccctttatgtgagagctttaggaaatatac

SEQ ID NO: 75984 - DNA, 80 bp, synthetic construct
  source 1..80: mol_type = other DNA
gatcaccagcaatatttcagagtagcatgacaaaaatcttagatccatttagaacacaaaacccagaactagttatctat

SEQ ID NO: 75985 - DNA, 80 bp, synthetic construct
  source 1..80: mol_type = other DNA
ctccatcctgacaaatggacagtccagcctataatgctgccagaaaaggacagctggactgtcaatgatatacagaaatt

SEQ ID NO: 75986 - DNA, 80 bp, synthetic construct
  source 1..80: mol_type = other DNA
aatttatcaagagccatttaaaaatttaaaaacagggaaacatgcaagacagaggtctgctcacactaatgatgtaagac

SEQ ID NO: 75987 - DNA, 80 bp, synthetic construct
  source 1..80: mol_type = other DNA
aagcaggagcagaagaacagggacagggacccacctttagtttccctcaaatcactctttggcaacgacctcttgtcaca

SEQ ID NO: 75988 - DNA, 80 bp, synthetic construct
  source 1..80: mol_type = other DNA
agccatattccagagtagcatgacaaaaatcttggaaccctttagaacaaacaatccagaaatagttatataccaataca

SEQ ID NO: 75989 - DNA, 80 bp, synthetic construct
  source 1..80: mol_type = other DNA
taaattgggcaagtcagatttatccagggattaaggtaaagcaattatgtaagctccttaggggagccaaagcactaaca

SEQ ID NO: 75990 - DNA, 80 bp, synthetic construct
  source 1..80: mol_type = other DNA
agccatataaaaatctgaaaacagggaagtatgcaagaatgaggtctgcccacactaatgatgtaaggcaattaacagaa

SEQ ID NO: 75991 - DNA, 80 bp, synthetic construct
  source 1..80: mol_type = other DNA
gggaactttcctcagagcagaccggagccatcagccccaccagcagagagctttgggatgaaggaagagataacctcctc

SEQ ID NO: 75992 - DNA, 80 bp, synthetic construct
  source 1..80: mol_type = other DNA
tccgaagcaggagcagccccctcctttagtttccctcaaatcactctttggcaacgacccgttgtcacagtaagagtagg

SEQ ID NO: 75993 - DNA, 80 bp, synthetic construct
  source 1..80: mol_type = other DNA
accatacctagtatcaataatgagacaccaggggttagataccaatacaatgtgctaccacagggatggaaagggtcacc

SEQ ID NO: 75994 - DNA, 80 bp, synthetic construct
  source 1..80: mol_type = other DNA
aaaagcatcagaaagaacctccattcctttggatgggatacgagctccatcctgacaggtggacagtccagcctataacg

SEQ ID NO: 75995 - DNA, 80 bp, synthetic construct
  source 1..80: mol_type = other DNA
agggattaaagtaaagcagttgtgtaaacttctcaggggagccaaagccctaacagatatagtaacattcactaaggaag

SEQ ID NO: 75996 - DNA, 80 bp, synthetic construct
  source 1..80: mol_type = other DNA
cagcagagatctttggaatggggaaagagatatcctcccctccgaagcaggagcagacagacagggaacaggccccgcct

SEQ ID NO: 75997 - DNA, 80 bp, synthetic construct
  source 1..80: mol_type = other DNA
ttttttagggagaatctggccttccaacaaggggaggccaggaaattttcctcagagcagattggagccaacagccccac

SEQ ID NO: 75998 - DNA, 80 bp, synthetic construct
  source 1..80: mol_type = other DNA
ccagcaatattccagagtagcatgacaaaaatcttagagccctttagagagaaaaataaggacatagtcatctatcaata

SEQ ID NO: 75999 - DNA, 80 bp, synthetic construct
  source 1..80: mol_type = other DNA
attaaattgggccagtcagatttacccagggattaaagtaaggcaactttgtaaactccttagggggaccaaagcactaa

SEQ ID NO: 76000 - DNA, 80 bp, synthetic construct
  source 1..80: mol_type = other DNA
aagcaggagctgaaggacagggaacccttaacttccctcagatcactctttggcaacgaccccttgtcacaataaaaata

SEQ ID NO: 76001 - DNA, 80 bp, synthetic construct
  source 1..80: mol_type = other DNA
acactaaattttccaattagttctattgacactgtgccagtaaaattaaagccaggaatggatggcccaaaggttaaaca

SEQ ID NO: 76002 - DNA, 80 bp, synthetic construct
  source 1..80: mol_type = other DNA
ttgggcctgaaaatccttataacactccaatatttgccataaaaaagaaggacagtactaagtggagaaaattagtagat

SEQ ID NO: 76003 - DNA, 80 bp, synthetic construct
  source 1..80: mol_type = other DNA
gggacaccaaatgaaagactgtactgagagacaggctaattttttagggagaatttggccttcccccaagggaaggccgg

SEQ ID NO: 76004 - DNA, 80 bp, synthetic construct
  source 1..80: mol_type = other DNA
gtggaaaggatcaccagcaatatttcaggcaagcatgacaaaaatcttagagccctttagatcacagaatcctgaaataa

SEQ ID NO: 76005 - DNA, 80 bp, synthetic construct
  source 1..80: mol_type = other DNA
agagctcatctgttaggatggggattaactacaccagataagaagcatcagaaggaacctccatttctttggatgggata

SEQ ID NO: 76006 - DNA, 80 bp, synthetic construct
  source 1..80: mol_type = other DNA
gtttaaaaaagaaaaagtcagtaacagtactagatgtgggggacgcatatttttcagtccctttagatgagagctttaga

SEQ ID NO: 76007 - DNA, 80 bp, synthetic construct
  source 1..80: mol_type = other DNA
atataccagtacatggatgatttgtatgtagggtctgacttagaaatagggcaacatagaacaaaaatagaagagctcag

SEQ ID NO: 76008 - DNA, 80 bp, synthetic construct
  source 1..80: mol_type = other DNA
cagtgcatggggtatattatgacccatcaaaagaattaatagcagagttacagaagcaggggcaaggtcaatggacatat

SEQ ID NO: 76009 - DNA, 80 bp, synthetic construct
  source 1..80: mol_type = other DNA
gaactttccccagagccgaccagagccatcggcaccaccagcagagctctttgggatgagggaagagggatcctcctccc

SEQ ID NO: 76010 - DNA, 80 bp, synthetic construct
  source 1..80: mol_type = other DNA
ttaaagaagaaaaaatcaataacagtattggatgtgggagatgcatatttttcagtccctttagatagagatttcaggaa

SEQ ID NO: 76011 - DNA, 80 bp, synthetic construct
  source 1..80: mol_type = other DNA
aggcaaaaatctgaaaacaggaaaatatgcaaacagggggtctgctcatacaaatgatgtgaagcaattaacagaggcag

SEQ ID NO: 76012 - DNA, 80 bp, synthetic construct
  source 1..80: mol_type = other DNA
tacatggagtatactatgagccagcaaaggaattaatagcagaagtacagaaacaagggctagaccaatggacatatcaa

SEQ ID NO: 76013 - DNA, 80 bp, synthetic construct
  source 1..80: mol_type = other DNA
aaatttccttcagaacaggccagaaccaacagccccacccgcagaggacttcgggtccggggaggagatagccccctccc

SEQ ID NO: 76014 - DNA, 80 bp, synthetic construct
  source 1..80: mol_type = other DNA
atttatcaagagccaggcaaaaatctgaaaacaggaaaatatgcaaacagggggtctgctcatacaaatgatgtgaagca

SEQ ID NO: 76015 - DNA, 80 bp, synthetic construct
  source 1..80: mol_type = other DNA
cgaagcaggagctgaaggaaaaggagctatatcctttaacctccctcaaatcactctttggcagcgacccttagtcacag

SEQ ID NO: 76016 - DNA, 80 bp, synthetic construct
  source 1..80: mol_type = other DNA
tactgcattcacgatacctagtataaataatgcaacaccagggattagatatcagtacaatgtacttccacaggggtgga

SEQ ID NO: 76017 - DNA, 80 bp, synthetic construct
  source 1..80: mol_type = other DNA
agtatattatgacccatcaaaagacttgatagctgaaatacagaaacaggggcatgaccaatggacatatcaaatttacc

SEQ ID NO: 76018 - DNA, 80 bp, synthetic construct
  source 1..80: mol_type = other DNA
gggaatttccttcagaacaggccagagccaacagccccaccagcagagagcttcaggttcgaggagacaacccccgctcc

SEQ ID NO: 76019 - DNA, 80 bp, synthetic construct
  source 1..80: mol_type = other DNA
gaagcaggagccgaaaaaccaggaacccttaatttccctcaaatcactctttggcagcgaccccttgtctcaataaaagt

SEQ ID NO: 76020 - DNA, 80 bp, synthetic construct
  source 1..80: mol_type = other DNA
tatgtaggatctaacttagaaatagggcagcatagaaaaaagatagaggagttgagaaatcatctattaagatggggatt

SEQ ID NO: 76021 - DNA, 80 bp, synthetic construct
  source 1..80: mol_type = other DNA
agtcaaatttatgcaggcataaaggtaaagcaactgtgtagactcctcagaggggctagagcattaacagatgtagtcac

SEQ ID NO: 76022 - DNA, 80 bp, synthetic construct
  source 1..80: mol_type = other DNA
actgactgaggaagcagaattagaattggctgagaacagagagattctgaaggaccctgtacacggggcatattatgatc

SEQ ID NO: 76023 - DNA, 80 bp, synthetic construct
  source 1..80: mol_type = other DNA
gccaacagccccaccagcagaggtctgtgggatgagggaagggataaccccctccccgaagcaggagccgggagagaggg

SEQ ID NO: 76024 - DNA, 80 bp, synthetic construct
  source 1..80: mol_type = other DNA
aacagcatcctcctttaatttccctcaaatcactctttggcaacgacccgttgtctcaataaaagtagaaggacaactaa

SEQ ID NO: 76025 - DNA, 80 bp, synthetic construct
  source 1..80: mol_type = other DNA
gtgctagatgtgggtgatgcatacttttctgttcccttggacaaggacttcagaaagtatactgcattcaccatacctag

SEQ ID NO: 76026 - DNA, 80 bp, synthetic construct
  source 1..80: mol_type = other DNA
tgtaaacaacgagacaccaggggtcaggtatcagtataatgtgcttccacagggatggaaagggtcacctgcgatatttc

SEQ ID NO: 76027 - DNA, 80 bp, synthetic construct
  source 1..80: mol_type = other DNA
gcaacatagagcaaaaatagaggagctgagggctcatctattgaagtggggatttaccacaccagacaagaagcatcaga

SEQ ID NO: 76028 - DNA, 80 bp, synthetic construct
  source 1..80: mol_type = other DNA
aaagcagctatgtaaactccttaggggagccaaagcattaacagacatagtatcattgactgacgaagcagaattagaat

SEQ ID NO: 76029 - DNA, 80 bp, synthetic construct
  source 1..80: mol_type = other DNA
cagcagagagcttcaggttcgaggagacaacaccccctcagaagcaggagtcgaaaaacaaggaacccttaatttccctc

SEQ ID NO: 76030 - DNA, 80 bp, synthetic construct
  source 1..80: mol_type = other DNA
aataggacaacatagagcaaaaatagaggagctaagagaacatttattgaaatggggatttaccacaccagacaagaagc

SEQ ID NO: 76031 - DNA, 80 bp, synthetic construct
  source 1..80: mol_type = other DNA
gacaaggaaagctggactgtcaatgatatacagaagttagtgggaaaattaaactgggccagtcagatctacgcaggaat

SEQ ID NO: 76032 - DNA, 80 bp, synthetic construct
  source 1..80: mol_type = other DNA
ccccaccagcagagagcttcaaattcgaggagacaacccccgctccgaaacaggagccgaaagacaaggatgccttaact

SEQ ID NO: 76033 - DNA, 80 bp, synthetic construct
  source 1..80: mol_type = other DNA
ccatcaatattccagcatagcatgacaaaaatcttagagccctttagaacacaaaatccagaaatagttatctatcaata

SEQ ID NO: 76034 - DNA, 80 bp, synthetic construct
  source 1..80: mol_type = other DNA
agaaccattcaaaaatctgaagacaggaaagtatgcaaaaatgaggactgcccacactaatgatgtaaaacagttagcag

SEQ ID NO: 76035 - DNA, 80 bp, synthetic construct
  source 1..80: mol_type = other DNA
acaaaaagcatcagaaagaacctccatttctttggatggggtatgaactccatcctgacaagtggacagttcagtctata

SEQ ID NO: 76036 - DNA, 80 bp, synthetic construct
  source 1..80: mol_type = other DNA
tggaggttttatcaaggtaaaacagtatgatcaggtacttatggaaatttgtgggaaaaaggctataggtacagtcttag

SEQ ID NO: 76037 - DNA, 80 bp, synthetic construct
  source 1..80: mol_type = other DNA
caccagcagagatctttgggatgagggaagagacagctccccctccgaagcaggagcagaaagacagggaacagggtcca

SEQ ID NO: 76038 - DNA, 80 bp, synthetic construct
  source 1..80: mol_type = other DNA
ctgggcaagtcagatttacgcagggattaaggtaaagcaactttgtagactccttaggggggctaaagcactagcagaca

SEQ ID NO: 76039 - DNA, 80 bp, synthetic construct
  source 1..80: mol_type = other DNA
ggtaaagcaactttgtagactccttaggggggctaaagcactagcagacatagtaccactaactgaagaagcagaattag

SEQ ID NO: 76040 - DNA, 80 bp, synthetic construct
  source 1..80: mol_type = other DNA
attcaaaaacctgaaaacaggaaaatatgcaaaaagaaggactgcccacacaaatgatgtaaaacagttaacagaggcag

SEQ ID NO: 76041 - DNA, 80 bp, synthetic construct
  source 1..80: mol_type = other DNA
atacagaaacaggggcatgatcaatggacatatcaaatttatcaagaaccattcaaaaacctgaaaacaggaaaatatgc

SEQ ID NO: 76042 - DNA, 80 bp, synthetic construct
  source 1..80: mol_type = other DNA
ccccaccagcagagaacttcaagttcgaggagacctccgctccgaagcaggaactggaaggcagggaaccctcaatttcc

SEQ ID NO: 76043 - DNA, 80 bp, synthetic construct
  source 1..80: mol_type = other DNA
ctcaaatcactctttggcagcgaccccttgtctcaataaaagtagggggccagatgaaggaggctctcttagacacagga

SEQ ID NO: 76044 - DNA, 80 bp, synthetic construct
  source 1..80: mol_type = other DNA
agaaatttgtgaggaaatggagaaggaaaagaaaatttcaagaattgggcctgaaaatccatataacactccagtatttg

SEQ ID NO: 76045 - DNA, 80 bp, synthetic construct
  source 1..80: mol_type = other DNA
aggatctgatttagaaatagggcaacacagaacaaaaatagaggagttgagagctcatctattgagctggggattaacta

SEQ ID NO: 76046 - DNA, 80 bp, synthetic construct
  source 1..80: mol_type = other DNA
gatatatccagggattaaagtaaggcagctgtgtaagctacttaggggagccaaagcactaacagatgtagtaccattga

SEQ ID NO: 76047 - DNA, 80 bp, synthetic construct
  source 1..80: mol_type = other DNA
acttaaaaatttaaaaacaggaaaatatgcaaaaaagaaggctgcacacactaatgatgtaaaacaattaacagaagtgg

SEQ ID NO: 76048 - DNA, 80 bp, synthetic construct
  source 1..80: mol_type = other DNA
ctgaggaagcagaactagaattggcagagaatagggagattctaaaagagcctgtgcacggggtatattatgacccatca

SEQ ID NO: 76049 - DNA, 80 bp, synthetic construct
  source 1..80: mol_type = other DNA
aaagacttaatagcagaaatacagaaacaagggcacgaccagtggacatatcaaatttatcaagagccacttaaaaattt

SEQ ID NO: 76050 - DNA, 80 bp, synthetic construct
  source 1..80: mol_type = other DNA
agccaacagctccaccagcagagagcttggggataggggaagagttctcctctcagaagcaggagcagcgagacagggaa

SEQ ID NO: 76051 - DNA, 80 bp, synthetic construct
  source 1..80: mol_type = other DNA
ccccctcccttagtttccctcaaatcactctttggcaacgaccccttgttaccgtaaaaataggaggacagctaaaagaa

SEQ ID NO: 76052 - DNA, 80 bp, synthetic construct
  source 1..80: mol_type = other DNA
agaacacaggacttctgggaagttcaattaggaataccgcatccggcgggtttaaaaaagaaaaaatcagtaacagtact

SEQ ID NO: 76053 - DNA, 80 bp, synthetic construct
  source 1..80: mol_type = other DNA
acaatgaaacaccaggaaaaaggtatcagtacaatgtgcttccacagggatggaaaggatcaccatcaatattccagagt

SEQ ID NO: 76054 - DNA, 80 bp, synthetic construct
  source 1..80: mol_type = other DNA
aatggacggtacaacctatacagctaccaaacaaggacagctggactgtcaatgacatacaaaagttagtgggaaaacta

SEQ ID NO: 76055 - DNA, 80 bp, synthetic construct
  source 1..80: mol_type = other DNA
aactccttaggggggccagggccctaacagacatagtaccactaactacagaagcagaaatggaattggcagagaatagg

SEQ ID NO: 76056 - DNA, 80 bp, synthetic construct
  source 1..80: mol_type = other DNA
aattgggcaagtcagatttatccagggattaaagtaaaacatctatgtaaactccttaggggggccagggccctaacaga

SEQ ID NO: 76057 - DNA, 80 bp, synthetic construct
  source 1..80: mol_type = other DNA
catagtaccactaactacagaagcagaaatggaattggcagagaatagggaaattctaaaagaacctgtacatggtgttt

SEQ ID NO: 76058 - DNA, 80 bp, synthetic construct
  source 1..80: mol_type = other DNA
aaattttcttcagaacagaccagagccaacagccccaccagcagagttcggaggggagacagccccctccccgaagcagg

SEQ ID NO: 76059 - DNA, 80 bp, synthetic construct
  source 1..80: mol_type = other DNA
ccatacaagaatctgaaaacagggaaatatgcaaaaagggggtctgcccacactaatgatgtaaaacaattagtagaagc

SEQ ID NO: 76060 - DNA, 80 bp, synthetic construct
  source 1..80: mol_type = other DNA
aaacgaaggaggagctatatcctttaacttccctcagatcactctttggcaacgacccatagtcacagtaagaatagggg

SEQ ID NO: 76061 - DNA, 80 bp, synthetic construct
  source 1..80: mol_type = other DNA
gagagctcaataaaagaacccaagacttctgggaggtccagttaggaatacctcaccccgcggggttaaaaaagaaaaga

SEQ ID NO: 76062 - DNA, 80 bp, synthetic construct
  source 1..80: mol_type = other DNA
aaagcattgacagaagtagtaccactgactagggaagcagaactagaattggaagaaaacagggagattctaaaagaccc

SEQ ID NO: 76063 - DNA, 80 bp, synthetic construct
  source 1..80: mol_type = other DNA
agtaagaataggaggacagctaaaagaagctctattagatacaggtgcagatgatacagtattagaagaaataaatttgc

SEQ ID NO: 76064 - DNA, 80 bp, synthetic construct
  source 1..80: mol_type = other DNA
atttgtgggaaaaaggctataggtacagtcttggtaggacctacacctgtcaacataattggaagaaatatgttgactca

SEQ ID NO: 76065 - DNA, 80 bp, synthetic construct
  source 1..80: mol_type = other DNA
gacaccaaatgaaagactgcactgagagacaggctaattttttagggaaactttggcctcccagcactgggaggccgggg

SEQ ID NO: 76066 - DNA, 80 bp, synthetic construct
  source 1..80: mol_type = other DNA
atggaaaggatcaccggcaatattccagcacagcatgacaaaaattttagaaccctttagatcacagaacccagaaatag

SEQ ID NO: 76067 - DNA, 80 bp, synthetic construct
  source 1..80: mol_type = other DNA
agagctcatctattgggctgggggtttactacaccagacaaaaaacatcagaaagaacctccatttctttggatgggata

SEQ ID NO: 76068 - DNA, 80 bp, synthetic construct
  source 1..80: mol_type = other DNA
gccaaagcactaacagatgtagtaccattgactgaggaagcagaattagaattggcagagaatagggagattttaagaac

SEQ ID NO: 76069 - DNA, 80 bp, synthetic construct
  source 1..80: mol_type = other DNA
atttaaaaatctaaaaacaggaaaatatggaagaaaaaggtctgctcatactaatgatgtaagacaactagtagaagcgg

SEQ ID NO: 76070 - DNA, 80 bp, synthetic construct
  source 1..80: mol_type = other DNA
ccctgtgcatggagtctattatgacccatcaaaagacttaatagcagaaatacagaaacaaggacatggccaatggacgt

SEQ ID NO: 76071 - DNA, 80 bp, synthetic construct
  source 1..80: mol_type = other DNA
aggccagggaattttcctcagagcagaccagagccatcagccccaccagtagagagcttgatgggggaagagatgacctc

SEQ ID NO: 76072 - DNA, 80 bp, synthetic construct
  source 1..80: mol_type = other DNA
atcaaatttatcaagagccatttaaaaatctaaaaacaggaaaatatggaagaaaaaggtctgctcatactaatgatgta

SEQ ID NO: 76073 - DNA, 80 bp, synthetic construct
  source 1..80: mol_type = other DNA
ctctctgaggcaggagcagaaagacagggaacatcctcccttaatttccctcaaatcactctttggcaacgacccgttgt

SEQ ID NO: 76074 - DNA, 80 bp, synthetic construct
  source 1..80: mol_type = other DNA
tatcaggaaaatggaaaccaaaaatgatagggggaattggaggttttatcaaagtgagacagtatgatcaaatacttata

SEQ ID NO: 76075 - DNA, 80 bp, synthetic construct
  source 1..80: mol_type = other DNA
caaaggtcaaacagtggcctttgacagaagaaaagataaaagcattaacagaaatttgtaaagagatggaaaaggaagga

SEQ ID NO: 76076 - DNA, 80 bp, synthetic construct
  source 1..80: mol_type = other DNA
aaggacaccaaatgaaagactgcactagcactgagagacaggctaattttttaggaaaaatttggcctccccgcaaggag

SEQ ID NO: 76077 - DNA, 80 bp, synthetic construct
  source 1..80: mol_type = other DNA
gtttaaaaaagaaaaaatcagtaacagtactagatgtgggagatgcatatttttcagttcctttatatgaagactttaga

SEQ ID NO: 76078 - DNA, 80 bp, synthetic construct
  source 1..80: mol_type = other DNA
atcaccagcaatctttcagtgtagcatgacaaaaatcttagagccctttagaagaaacaatccagacatagtgatctacc

SEQ ID NO: 76079 - DNA, 80 bp, synthetic construct
  source 1..80: mol_type = other DNA
gaaagctaaattgggcaagtcagatttatccagggattaaggtaaagcaattatgtaaacttatcagggggaccaaagca

SEQ ID NO: 76080 - DNA, 80 bp, synthetic construct
  source 1..80: mol_type = other DNA
tggagtctattatgacccatcaaaagacttaatagcagaagtacagaaacaagggtgtgaccaatggacatatcaaattt

SEQ ID NO: 76081 - DNA, 80 bp, synthetic construct
  source 1..80: mol_type = other DNA
gaagcaggagcagaaggagagggaacctcccttaacttccctcaaatcactctttggcagcgaccactagtctcagtaag

SEQ ID NO: 76082 - DNA, 80 bp, synthetic construct
  source 1..80: mol_type = other DNA
aaaattgggcctgagaatccctataacactccaatatttgctataaagaaaaaagacagtactaaatggaggaaactagt

SEQ ID NO: 76083 - DNA, 80 bp, synthetic construct
  source 1..80: mol_type = other DNA
gatggaaaggatcaccatcaatatttcagagtagcatgacaaaaattttagagccctttagggcacagaacccagaaata

SEQ ID NO: 76084 - DNA, 80 bp, synthetic construct
  source 1..80: mol_type = other DNA
aagagaacatctcttgaggtggggactcaccacaccagataagaaacatcagaaagaaccaccatttctttggatggggt

SEQ ID NO: 76085 - DNA, 80 bp, synthetic construct
  source 1..80: mol_type = other DNA
aagttagtgggaaaattaaactgggcaagtcagatttactcagggatcaaagtaaagcaattgtgtaaactccttagggg

SEQ ID NO: 76086 - DNA, 80 bp, synthetic construct
  source 1..80: mol_type = other DNA
aaccaaagccctaacagaagtagtaccactgactgaagaagcagaattagaattggcagagaacagggagattctaaaag

SEQ ID NO: 76087 - DNA, 80 bp, synthetic construct
  source 1..80: mol_type = other DNA
aaccagtacatggagcatattatgacccatcaaaagacttaatagctgaaatacagaaacaggggaatggccagtggaca

SEQ ID NO: 76088 - DNA, 80 bp, synthetic construct
  source 1..80: mol_type = other DNA
gccaggaaacttcctccagagcagaccagagccaacagtcccaacagccccaccagcagagagcttcaagctcgaggaga

SEQ ID NO: 76089 - DNA, 80 bp, synthetic construct
  source 1..80: mol_type = other DNA
caacctcctctccgaagcaggagcaaaaggacagggaacccttaatttccctcaaatcactctttggcagcgacccctcg

SEQ ID NO: 76090 - DNA, 80 bp, synthetic construct
  source 1..80: mol_type = other DNA
gggcagataaaggaagctctcttagacacaggagcagatgatacagtattagaagaaataaaattgccaggaatttggaa

SEQ ID NO: 76091 - DNA, 80 bp, synthetic construct
  source 1..80: mol_type = other DNA
tctcaataaaagtaggggggcagataaaggaagctctcttagacacaggagcagatgatacagtattagaagaaataaaa

SEQ ID NO: 76092 - DNA, 80 bp, synthetic construct
  source 1..80: mol_type = other DNA
ttgccaggaatttggaaaccaaaaatgatagggggaattggaggttttatcaaagtaagacagtatgatcaaatagttgt

SEQ ID NO: 76093 - DNA, 80 bp, synthetic construct
  source 1..80: mol_type = other DNA
agaaatttgtggaaaaaaggctataggtacagtactagtgggacctacacctgtcaacataattggaaggaatctgttga

SEQ ID NO: 76094 - DNA, 80 bp, synthetic construct
  source 1..80: mol_type = other DNA
ccaaaggtcaaacaatggccattaacagaagagaaaataaaagcattaacagcaatttgtgaagagatggaaaaagaagg

SEQ ID NO: 76095 - DNA, 80 bp, synthetic construct
  source 1..80: mol_type = other DNA
ggacaccaaatgaaagactgtactggtactgaaagacaggctaattttttagggaaaatttggccttcccacaaggggag

SEQ ID NO: 76096 - DNA, 80 bp, synthetic construct
  source 1..80: mol_type = other DNA
gaaaattagtagatttcagggaactcaataaaagaactcaagatttttgggaagttcaattagggataccacacccagca

SEQ ID NO: 76097 - DNA, 80 bp, synthetic construct
  source 1..80: mol_type = other DNA
gggaattttcctcagagcagaccggaaccaacagccccaccagcagagagcttagggatgggggaagaagtgaccccctc

SEQ ID NO: 76098 - DNA, 80 bp, synthetic construct
  source 1..80: mol_type = other DNA
taaaaaagaaaaaatcagtaacagtactagatgtaggggacgcatacttttcagtccctttagatgaaaactttagaaag

SEQ ID NO: 76099 - DNA, 80 bp, synthetic construct
  source 1..80: mol_type = other DNA
gaaaggatccccagcaatattccagagtagcatgacaaagatcttagagccctttagagcacaaaatccaaaaatagtta

SEQ ID NO: 76100 - DNA, 80 bp, synthetic construct
  source 1..80: mol_type = other DNA
tctatcaatacatggatgacttatatgtaggatctgacttggaaatagggcagcatagagcaaaaatagaggaattgaga

SEQ ID NO: 76101 - DNA, 80 bp, synthetic construct
  source 1..80: mol_type = other DNA
tagtgggaaaattaaattgggcaagtcagatttatgcagggattaaagtgagacaactatgcaaactcctcaggggagcc

SEQ ID NO: 76102 - DNA, 80 bp, synthetic construct
  source 1..80: mol_type = other DNA
aaggcactaacagatgtagtagtactaactcaggaagcagaattagaattggcagaaaacagggagattttaaaagaacc

SEQ ID NO: 76103 - DNA, 80 bp, synthetic construct
  source 1..80: mol_type = other DNA
tgtgcatggggtgtattatgacccatcaaaagacctaatagcagaaatacagaaacagggacaaggtcagtggacatatc

SEQ ID NO: 76104 - DNA, 80 bp, synthetic construct
  source 1..80: mol_type = other DNA
gaagcaggaacagagggacagggagcagtctcctcccttagtttccctcaaatcactctttggcaacgacctgttgtcac

SEQ ID NO: 76105 - DNA, 80 bp, synthetic construct
  source 1..80: mol_type = other DNA
aataagagtagaaggacagctaaaagaagctctgttagatacaggagcagatgacacagtattagaagacatagatttgc

SEQ ID NO: 76106 - DNA, 80 bp, synthetic construct
  source 1..80: mol_type = other DNA
attagtagatttcagagagctcaataaaagaacccaggacttctgggaagtacaattagggataccacacccagcgggtc

SEQ ID NO: 76107 - DNA, 80 bp, synthetic construct
  source 1..80: mol_type = other DNA
cctgaagcaggagcagagggacagggagcggcctccctcagtttccctcaaatcactctttggcaacgaccccttatcac

SEQ ID NO: 76108 - DNA, 80 bp, synthetic construct
  source 1..80: mol_type = other DNA
cagggaaatggaagccaaaaatgatagggggaattggaggttttatcaaggtaaaacaatatgatcagatacttatagaa

SEQ ID NO: 76109 - DNA, 80 bp, synthetic construct
  source 1..80: mol_type = other DNA
gctaaagcactaacagaggtagtaccattgactaaggaagcagaattagaattggcagaaaatagggagattctaaaaga

SEQ ID NO: 76110 - DNA, 80 bp, synthetic construct
  source 1..80: mol_type = other DNA
ccctgtgcatggagcatattatgacccatcaaaagacttagtagcagaagtacagaaacaagggcaggaccaatggacat

SEQ ID NO: 76111 - DNA, 80 bp, synthetic construct
  source 1..80: mol_type = other DNA
cccgaagcaggagcagagggacagggaacagcctcctcccttagtttccctcaaatcactctttggcaacgacccctcgt

SEQ ID NO: 76112 - DNA, 80 bp, synthetic construct
  source 1..80: mol_type = other DNA
tgccaggaaaatggaaaccaaaaatgatagggggaatagggggctttatcaaggtaagacaatatgatgaggtagttata

SEQ ID NO: 76113 - DNA, 80 bp, synthetic construct
  source 1..80: mol_type = other DNA
gatatttgtggaaaaaaggctgtaggttcagtactaataggacctacacctgtcaacataattggaagaaatatgctgac

SEQ ID NO: 76114 - DNA, 80 bp, synthetic construct
  source 1..80: mol_type = other DNA
tctaaaggaggagcagaaggacaaggaaccccctcctttagtttccctcaaatcactctttggcaacgacccattgtcac

SEQ ID NO: 76115 - DNA, 80 bp, synthetic construct
  source 1..80: mol_type = other DNA
ccaatacatggatgatttatatgtaggatctgatttagaaatagggcaacatagagcaaaagtagaggagttgaggagtc

SEQ ID NO: 76116 - DNA, 80 bp, synthetic construct
  source 1..80: mol_type = other DNA
cattaacagacatagtaccactgactgaagaagcagaattggaattggcagagaacagggagattctgaaagagccagta

SEQ ID NO: 76117 - DNA, 80 bp, synthetic construct
  source 1..80: mol_type = other DNA
attcaaaaatctgaagacaggaaaatatgcaagaatgaggtctgcccacactaatgatgtaaaacaattaactgaagcag

SEQ ID NO: 76118 - DNA, 80 bp, synthetic construct
  source 1..80: mol_type = other DNA
ggaattttcttcagagcaggccagagccgacagccccaccagcggagagcttcgggttcggagaagagataaacccctct

SEQ ID NO: 76119 - DNA, 80 bp, synthetic construct
  source 1..80: mol_type = other DNA
ccgaagcaggagaagaaggacagggaacctcctttagcttccctcaaatcactctttggcaacgacccctggtcacagta

SEQ ID NO: 76120 - DNA, 80 bp, synthetic construct
  source 1..80: mol_type = other DNA
ctgcattcaccatacccagcataaacaatgagactccaggggttagatatcagtataatgtgctaccacagggatggaaa

SEQ ID NO: 76121 - DNA, 80 bp, synthetic construct
  source 1..80: mol_type = other DNA
ggatcaccggcaatattccagagtagcatgacaaaaatcttagatcccttcagaaaacaaaatcctgagattgttattta

SEQ ID NO: 76122 - DNA, 80 bp, synthetic construct
  source 1..80: mol_type = other DNA
atggaaaggatcgccagcaatattccagagtagcatgacaagaattttagagccctttagagcacaaaatccagaattaa

SEQ ID NO: 76123 - DNA, 80 bp, synthetic construct
  source 1..80: mol_type = other DNA
aactagtgggaaaactaaattgggcaagtcaagtttatccagggattcaagtaaggcaactgtgtaaactcctcagggga

SEQ ID NO: 76124 - DNA, 80 bp, synthetic construct
  source 1..80: mol_type = other DNA
cacagtaagaatagagggacagttaaaagaagccctattagatacaggagcagatgatacagtcttagaagacatagaat

SEQ ID NO: 76125 - DNA, 80 bp, synthetic construct
  source 1..80: mol_type = other DNA
ggaagggatcaccatcaatattccagagtaccatgacaaaaatcttagagccctttagagcacaaaatccagacatagtt

SEQ ID NO: 76126 - DNA, 80 bp, synthetic construct
  source 1..80: mol_type = other DNA
cttcaaaaatcttaaaacaggaaaatatgcaaaaaggaggtctgctcacacaaatgatgtaaaacaattagtagaagtaa

SEQ ID NO: 76127 - DNA, 80 bp, synthetic construct
  source 1..80: mol_type = other DNA
caagtttatcaagagcccttcaaaaatcttaaaacaggaaaatatgcaaaaaggaggtctgctcacacaaatgatgtaaa

SEQ ID NO: 76128 - DNA, 80 bp, synthetic construct
  source 1..80: mol_type = other DNA
tgaaacaggagcagaaagacagggaacagcctcctcctttaatttccctcaaatcactctttggcaacgaccccttgtca

SEQ ID NO: 76129 - DNA, 80 bp, synthetic construct
  source 1..80: mol_type = other DNA
gaaaggatcaccatcaatatttcagagtagcatgacaaaaatcttagagccctttagatcaaaaaacccagaaatggtta

SEQ ID NO: 76130 - DNA, 80 bp, synthetic construct
  source 1..80: mol_type = other DNA
gaaagggtcaccagcaatatttcagagtagcatgacaaaaattttagagccttttagagcacaaaatccagagatagtta

SEQ ID NO: 76131 - DNA, 80 bp, synthetic construct
  source 1..80: mol_type = other DNA
cccgaagcaggagccgaaggaaaaggagctgtatccttcagtttccctcaaatcactctttggcagcgacccttagtcac

SEQ ID NO: 76132 - DNA, 80 bp, synthetic construct
  source 1..80: mol_type = other DNA
gtaggatcagacttagaaatagagcaacatagagcaaagatagaggagctaagagaacatctattgaggtggggactaac

SEQ ID NO: 76133 - DNA, 80 bp, synthetic construct
  source 1..80: mol_type = other DNA
cccactggagccaacagccccaccagcagagagcttcaggttcgaggaaacaaccccctctcagaagcaggagcagaaag

SEQ ID NO: 76134 - DNA, 80 bp, synthetic construct
  source 1..80: mol_type = other DNA
agtattggtgggacctacacctgtcaacataattggaagaaatctgttgactcagcttggatgcacactaaattttccaa

SEQ ID NO: 76135 - DNA, 80 bp, synthetic construct
  source 1..80: mol_type = other DNA
gagaaaataaaagcattaacagcaatttgtgaagagatggaaaaggaaggaaaaattgaaaaaattgggcctgaaaatcc

SEQ ID NO: 76136 - DNA, 80 bp, synthetic construct
  source 1..80: mol_type = other DNA
aaagaactcaagacttttgggaagtgcaactagggataccacatccagcagggttaaaaaagaaaaaatcagtgacagta

SEQ ID NO: 76137 - DNA, 80 bp, synthetic construct
  source 1..80: mol_type = other DNA
gtagcatgacaaaaatcttggagccctttagaggaaaaaatccagagatagtgatctaccaatatatggatgatttatat

SEQ ID NO: 76138 - DNA, 80 bp, synthetic construct
  source 1..80: mol_type = other DNA
ttgggcaagtcagatttattcagggattaaagtaaaacaactatgtaaacttcttaggggggccaaagcactaacagaca

SEQ ID NO: 76139 - DNA, 80 bp, synthetic construct
  source 1..80: mol_type = other DNA
cttcttaggggggccaaagcactaacagacatagtaccactgactgcagaagcagaattggaattggcagagaacaggga

SEQ ID NO: 76140 - DNA, 80 bp, synthetic construct
  source 1..80: mol_type = other DNA
tatgacccatcaaaagacttaatagcagaagtacagaaacaaggacaagatcaatggacatatcaaatttaccaagagcc

SEQ ID NO: 76141 - DNA, 80 bp, synthetic construct
  source 1..80: mol_type = other DNA
caacagccccacccgcagagagcttcgggttcggagaggagataaccccctccccgaaaacagagcagaaggagaaggag

SEQ ID NO: 76142 - DNA, 80 bp, synthetic construct
  source 1..80: mol_type = other DNA
gagctcaataaaagaactcaagatttctgggaggtccaattaggcatacctcatcccgcaggactaaaaaagaaaaaatc

SEQ ID NO: 76143 - DNA, 80 bp, synthetic construct
  source 1..80: mol_type = other DNA
gacaaaaatcttagagcccttcaggtcacaaaatccagacatagttatctatcaatacatggatgacttgtatgtaggat

SEQ ID NO: 76144 - DNA, 80 bp, synthetic construct
  source 1..80: mol_type = other DNA
ctgatttagaaatagggcaacatagagcaaaaatagaggagttaagagaccatctattgagatggggattgactacacca

SEQ ID NO: 76145 - DNA, 80 bp, synthetic construct
  source 1..80: mol_type = other DNA
atccagggataaaggtaaagcatctgtgtagactccttaggggagccaaagcactaacagaggtagtaccattgactgag

SEQ ID NO: 76146 - DNA, 80 bp, synthetic construct
  source 1..80: mol_type = other DNA
gagccatcagccccgccagcagagatcttaggaataggggactctctgaagcaggaacagagggacaaggaacagccccc

SEQ ID NO: 76147 - DNA, 80 bp, synthetic construct
  source 1..80: mol_type = other DNA
tcccttagtttccctcaaatcactctttggcaacgacccattgttaccgtaaaaatagggggacagataaaagaagctct

SEQ ID NO: 76148 - DNA, 80 bp, synthetic construct
  source 1..80: mol_type = other DNA
ttggaggttttatcaaagtaagacagtatgatcagatagttatagaaattcatggaaaaaaggcgataggtacagtattg

SEQ ID NO: 76149 - DNA, 80 bp, synthetic construct
  source 1..80: mol_type = other DNA
taaaagcattaacggaaatttgtaaagagatggaaaaggaaggaaaaatttcaaaaattgggcctgaaaatccatataat

SEQ ID NO: 76150 - DNA, 80 bp, synthetic construct
  source 1..80: mol_type = other DNA
gtatgtaggatctgacttagaaataggacagcatagagcaaaaatagaggagttgagagctcatttattgagctgggggt

SEQ ID NO: 76151 - DNA, 80 bp, synthetic construct
  source 1..80: mol_type = other DNA
cactgactgaggaagcagaattagaattggccgagaacagggagattctaaaagaccctgtgcatggagtttattatgat

SEQ ID NO: 76152 - DNA, 80 bp, synthetic construct
  source 1..80: mol_type = other DNA
agccaacagccccaccagcagagatcttggggatgggggaagagataactccctctcagaagcaggagcagagagacagg

SEQ ID NO: 76153 - DNA, 80 bp, synthetic construct
  source 1..80: mol_type = other DNA
gaacagccccctcctgcaatttccctcaaatcactctttggcaacgacctattgtcacagtaaaaataggaggacagcta

SEQ ID NO: 76154 - DNA, 80 bp, synthetic construct
  source 1..80: mol_type = other DNA
ccaattagtcctattgaaactgtaccagtgacattgaagccaggaatggatggccccaaggttaaacaatggccattgac

SEQ ID NO: 76155 - DNA, 80 bp, synthetic construct
  source 1..80: mol_type = other DNA
tgagagacaggctaattttttagggagaatctggccttcccacaaaggaaggccagggaactttccccagagcagaccag

SEQ ID NO: 76156 - DNA, 80 bp, synthetic construct
  source 1..80: mol_type = other DNA
aataaaagaacccaggacttctgggaggtccaattaggaataccacatccagcaggtttaaaaaagaaaaaatcagtaac

SEQ ID NO: 76157 - DNA, 80 bp, synthetic construct
  source 1..80: mol_type = other DNA
ttggcagagaatagggagattctgaaaaaccctgtgcatggagtatattatgacccatcaaaagacttaatagcagaaat

SEQ ID NO: 76158 - DNA, 80 bp, synthetic construct
  source 1..80: mol_type = other DNA
ccaccagcagagatgggggaagagatgacctccttcccgaaacaggagcagagggacagggaatatccctcagtttccct

SEQ ID NO: 76159 - DNA, 80 bp, synthetic construct
  source 1..80: mol_type = other DNA
taaagcaactgtgtaagctcctcaggggagccaaagggctaacagacatagtaacactgactgaggaagcagaattagaa

SEQ ID NO: 76160 - DNA, 80 bp, synthetic construct
  source 1..80: mol_type = other DNA
gatctgatctagagataaggcagcatagagcaaaagtagaagagttgagagctcatctattgagctggggattcactaca

SEQ ID NO: 76161 - DNA, 80 bp, synthetic construct
  source 1..80: mol_type = other DNA
ccagacaaaaaacaccagaaagaacccccattcctttggatgggatatgagctacatcctgacaagtggacagtccagcc

SEQ ID NO: 76162 - DNA, 80 bp, synthetic construct
  source 1..80: mol_type = other DNA
tttatgcaggaattaaagtaaggcagctgtgcaaactccttaggggagccaaagcactaacagagatagtaacattgact

SEQ ID NO: 76163 - DNA, 80 bp, synthetic construct
  source 1..80: mol_type = other DNA
gagcagaaagacagggaaccggtcccaccttcagtttccctcaaatcactctttggcaacgacctgttgtcacagtaaga

SEQ ID NO: 76164 - DNA, 80 bp, synthetic construct
  source 1..80: mol_type = other DNA
atttaaaaatctgaaaacagggaaatatgcaaaaaggaggtctactcatactaatgatgtaaagcaactagcagaagtgg

SEQ ID NO: 76165 - DNA, 80 bp, synthetic construct
  source 1..80: mol_type = other DNA
gccccaccggcagacctcttagggatgggggaggagatagcctcccctctgaagcaggagcagaaagacagggaaccggt

SEQ ID NO: 76166 - DNA, 80 bp, synthetic construct
  source 1..80: mol_type = other DNA
cccaccttcagtttccctcaaatcactctttggcaacgacctgttgtcacagtaagaataggggggcagctaaaagaagc

SEQ ID NO: 76167 - DNA, 80 bp, synthetic construct
  source 1..80: mol_type = other DNA
aggctaattttttagggaaaatttggccttccagcaaggggaggccaggaaattttcctcagagcagaccagagccatca

SEQ ID NO: 76168 - DNA, 80 bp, synthetic construct
  source 1..80: mol_type = other DNA
aacacaagacttttgggaagtacaattggggataccgcatccagcgggcctaaaaaagaaaaaatcagtaacagtactag

SEQ ID NO: 76169 - DNA, 80 bp, synthetic construct
  source 1..80: mol_type = other DNA
aaaattttagagccctttaggacaaaaaacccagacctagttatctatcaatatatggatgacctgtatgtaggatctga

SEQ ID NO: 76170 - DNA, 80 bp, synthetic construct
  source 1..80: mol_type = other DNA
atagctgagatacagaaacaggggcatgaccaatggacataccaaatttaccaagaaccattcaaaaatctgaagacagg

SEQ ID NO: 76171 - DNA, 80 bp, synthetic construct
  source 1..80: mol_type = other DNA
caacagccccaccagcagagagcttcaggttcgaggagacaacccccgctccgacgcaggagccgaaagaaaaggaacct

SEQ ID NO: 76172 - DNA, 80 bp, synthetic construct
  source 1..80: mol_type = other DNA
aagacaggcaaattttttagggaaactttggccttcctacaaggggaggccggggaatttcgttcagagcagaccagagc

SEQ ID NO: 76173 - DNA, 80 bp, synthetic construct
  source 1..80: mol_type = other DNA
ggatgcatatttttcagttcctttacatgaagacttcaggaaatacacagcattcaccatacctagtataaacaatgcag

SEQ ID NO: 76174 - DNA, 80 bp, synthetic construct
  source 1..80: mol_type = other DNA
ataatgcaacatagggcaaaaatagaggagttaagagaacacctattgagatggggatttaccacaccagacaaaaaaca

SEQ ID NO: 76175 - DNA, 80 bp, synthetic construct
  source 1..80: mol_type = other DNA
aaaaggatagttggactgtcaatgatatacaaaagttagtgggaaagttaaactgggcaagtcaaatttacccagggatt

SEQ ID NO: 76176 - DNA, 80 bp, synthetic construct
  source 1..80: mol_type = other DNA
ccctcaaatcactctttggcagcgaccccttgtcacaataagaatagggggccagctaaaggaggctctcttagatacag

SEQ ID NO: 76177 - DNA, 80 bp, synthetic construct
  source 1..80: mol_type = other DNA
gggaaattcagttaggaataccacacccagcagggttaaaaaagaaaaaatcagtgacagtactggatgtgggggatgca

SEQ ID NO: 76178 - DNA, 80 bp, synthetic construct
  source 1..80: mol_type = other DNA
cccaccaatggagagcttcaggttcgaggaaacaacctcctctccgaagcaggaggcgaaagacagggaacccttaactt

SEQ ID NO: 76179 - DNA, 80 bp, synthetic construct
  source 1..80: mol_type = other DNA
tatttttcagttcctttagatgtagacttcaggaagtatactgcattcaccatacctagtataaacaatgaaacaccagg

SEQ ID NO: 76180 - DNA, 80 bp, synthetic construct
  source 1..80: mol_type = other DNA
gattagatatcaatataatgtgcttccacagggatggaaaggatcaccagcaatattccagcatagtatgacaaaaatct

SEQ ID NO: 76181 - DNA, 80 bp, synthetic construct
  source 1..80: mol_type = other DNA
tccacagggatggaaaggatcaccatcaatattccagagtagcatgacaaagatcttagagccctttagagcaaaaaatc

SEQ ID NO: 76182 - DNA, 80 bp, synthetic construct
  source 1..80: mol_type = other DNA
cagaactagttatctatcaatacatggatgacttgtatgtaggatctgatttagaaatagggcagcatagaacaaaaata

SEQ ID NO: 76183 - DNA, 80 bp, synthetic construct
  source 1..80: mol_type = other DNA
ggaaggccagggaattttcctcagagcagaccagagccatcagccccaccagcagagaactttgggatgggggaagagat

SEQ ID NO: 76184 - DNA, 80 bp, synthetic construct
  source 1..80: mol_type = other DNA
aacctcccctctgaggcaggagcagagggacagggaccagcctcctcctgctgtttccctcaaatcactctttggcaacg

SEQ ID NO: 76185 - DNA, 80 bp, synthetic construct
  source 1..80: mol_type = other DNA
accccttgttaccgtaagaatagcaggacaactaaaagaagctctactagatacaggagcagatgatacagtattagaag

SEQ ID NO: 76186 - DNA, 80 bp, synthetic construct
  source 1..80: mol_type = other DNA
aaggacaccaaatgaaagattgcactgagagaaatgaaagacaggctaattttttagggaaaatctggccttccagcaag

SEQ ID NO: 76187 - DNA, 80 bp, synthetic construct
  source 1..80: mol_type = other DNA
taaatggaggaaattggtggatttcagagagctcaataaaagaactcaggacttttgggaagttcaattaggaataccgc

SEQ ID NO: 76188 - DNA, 80 bp, synthetic construct
  source 1..80: mol_type = other DNA
agctttagaaagtatactgcattcaccatacccagtacaaacaatgggacaccaggaatcaggtatcagtacaatgtgct

SEQ ID NO: 76189 - DNA, 80 bp, synthetic construct
  source 1..80: mol_type = other DNA
atataaaaatttgaaaacagggaagtatgcaagaacaaagtctgcccacactaatgatgtaagacaattaacagaagcag

SEQ ID NO: 76190 - DNA, 80 bp, synthetic construct
  source 1..80: mol_type = other DNA
accagcagagaactttgggatgggggaagggatatacccctctctgaagcaggaacagagggacaaggaaccaacccctc

SEQ ID NO: 76191 - DNA, 80 bp, synthetic construct
  source 1..80: mol_type = other DNA
gggggttttattaaagtaagacaatatgatcaagtagttatggaaatttgtggaaaaaaggctataggtacagtactagt

SEQ ID NO: 76192 - DNA, 80 bp, synthetic construct
  source 1..80: mol_type = other DNA
atgacacaaatcctagagccctttagaaagcaaaatccagaaatagttatctatcaatacatggatgatttatatgtagg

SEQ ID NO: 76193 - DNA, 80 bp, synthetic construct
  source 1..80: mol_type = other DNA
ttattcagggattcaagtgaagcaactatgtaaactcctcagaggaaccaaagcactaacagatatagtaccactgactg

SEQ ID NO: 76194 - DNA, 80 bp, synthetic construct
  source 1..80: mol_type = other DNA
ccccaccagcagagatgatctggggaatgggggaagagatagcagcctcccctccgaagaaagagcagagggacagggaa

SEQ ID NO: 76195 - DNA, 80 bp, synthetic construct
  source 1..80: mol_type = other DNA
aataaaagcattaatagaaatttgcaatgaaatggaaaaagaaggaaaaatttcaaaaattggacctgaaaatccatata

SEQ ID NO: 76196 - DNA, 80 bp, synthetic construct
  source 1..80: mol_type = other DNA
catttaccaatacatggatgatttatatgtaggatctgacttagaaataggacagcatagagcaaaaatagaagagctaa

SEQ ID NO: 76197 - DNA, 80 bp, synthetic construct
  source 1..80: mol_type = other DNA
attggtgggaaaactaaattgggcaagtcagatttatgcagggattcaagtaaggcaactgtgtaaacttctcaggggta

SEQ ID NO: 76198 - DNA, 80 bp, synthetic construct
  source 1..80: mol_type = other DNA
ggaactttcttcagagcaggccagagccaacagccccaccagcagagagcctcgaggggaaagaggaaatggcctcctct

SEQ ID NO: 76199 - DNA, 80 bp, synthetic construct
  source 1..80: mol_type = other DNA
ccgaagcaggaactgagggagaaggaactataccctcctttagcttccctcaaatcactctttggcagcgacccctaata

SEQ ID NO: 76200 - DNA, 80 bp, synthetic construct
  source 1..80: mol_type = other DNA
cagattggttgtactctaaatttcccaataagccctattgaaactataccagtatcattaaagccaggaatggatggccc

SEQ ID NO: 76201 - DNA, 80 bp, synthetic construct
  source 1..80: mol_type = other DNA
gaaaggatcaccagcaatattccaaagtagcatgacaaaaatcttagagccctatagaaagaaaaatccagaagtagtta

SEQ ID NO: 76202 - DNA, 80 bp, synthetic construct
  source 1..80: mol_type = other DNA
actccatcctgataaatggacggtacagcctataacactggcagaacaagacagttggactgtcaatgatatacagaagt

SEQ ID NO: 76203 - DNA, 80 bp, synthetic construct
  source 1..80: mol_type = other DNA
agtacatggagtgtattatgacccatctaaagaattaatagcagagttacaaaaacaagggcaagaccaatggacatatc

SEQ ID NO: 76204 - DNA, 80 bp, synthetic construct
  source 1..80: mol_type = other DNA
aaatctaccaagagccatttaaaaatctaaaaacaggaaagtatgcaagaaaaaggggtgcccacactaatgatgtaaga

SEQ ID NO: 76205 - DNA, 80 bp, synthetic construct
  source 1..80: mol_type = other DNA
atttgtggacataaggctacaggtacagtattagtaggacctacacctgtaaacataattggaagaaacttgttaaccca

SEQ ID NO: 76206 - DNA, 80 bp, synthetic construct
  source 1..80: mol_type = other DNA
taaaaaagaaaaaatcagtaacagtactggatgtgggtgatgcatatttttcaattcccctatgtgaagattttagaaag

SEQ ID NO: 76207 - DNA, 80 bp, synthetic construct
  source 1..80: mol_type = other DNA
acatggatgacttgtatgtgggatctgacttggaaatagggcagcagagagaaaaaatagaggaattgaggaagcatcta

SEQ ID NO: 76208 - DNA, 80 bp, synthetic construct
  source 1..80: mol_type = other DNA
gctatgtaagctccttaggggggccaaagcactaacagacatagtaccactgactccagaagcagagttagaattggcag

SEQ ID NO: 76209 - DNA, 80 bp, synthetic construct
  source 1..80: mol_type = other DNA
aactaaattgggcaagtcagatttatgcaggaattaaagtaaaacagctatgtaagctccttaggggggccaaagcacta

SEQ ID NO: 76210 - DNA, 80 bp, synthetic construct
  source 1..80: mol_type = other DNA
acagacatagtaccactgactccagaagcagagttagaattggcagagaacagggaaattctaagagaacctgtacatgg

SEQ ID NO: 76211 - DNA, 80 bp, synthetic construct
  source 1..80: mol_type = other DNA
gggaactttcttcagaacagaccagagccgacagccccaccagcagagagcctaggagaggagatagctccctccccgaa

SEQ ID NO: 76212 - DNA, 80 bp, synthetic construct
  source 1..80: mol_type = other DNA
aggaaccatacaaaaatctgaaaacaggaaaatatgcaaagagggggtctgcccacactaatgatgtaaaactattaaca

SEQ ID NO: 76213 - DNA, 80 bp, synthetic construct
  source 1..80: mol_type = other DNA
gcaggagccgaaggaagagctatatcctttaacctccctcaaatcactctttggcagcgacccttagtcacagtaagaat

SEQ ID NO: 76214 - DNA, 80 bp, synthetic construct
  source 1..80: mol_type = other DNA
agggggacagctaatagaagccctgttagatacaggagcagatgatacagtattaaaagaaataaatttgtcaggaagat

SEQ ID NO: 76215 - DNA, 80 bp, synthetic construct
  source 1..80: mol_type = other DNA
ggacaccaaaaatgatagggggaattggaggttttatcaaagtaagacagtatgataacatggccatggaaattgaggga

SEQ ID NO: 76216 - DNA, 80 bp, synthetic construct
  source 1..80: mol_type = other DNA
aaggacaccaaatgaaagactgcagggagagacaggctaattttttagggaaagtctggccttccaacaaagggaggcca

SEQ ID NO: 76217 - DNA, 80 bp, synthetic construct
  source 1..80: mol_type = other DNA
ttttagggaactcaataaaagaactcaagacttctgggaagttcaattaggaatacctcatccagcaggtttaaaaaaga

SEQ ID NO: 76218 - DNA, 80 bp, synthetic construct
  source 1..80: mol_type = other DNA
ttcactatacccagtataaacaatgagacaccagggattagatatcagtacaacgtgctaccacagggatggaaaggatc

SEQ ID NO: 76219 - DNA, 80 bp, synthetic construct
  source 1..80: mol_type = other DNA
aggatcaccagcaatattccagagtagcatgacaaaaatcttagacccatttagaaaacaaaacccagagatagttattt

SEQ ID NO: 76220 - DNA, 80 bp, synthetic construct
  source 1..80: mol_type = other DNA
atcaatacatggatgacttgtacgtggggtctgacttagagatagggcagcatagagaaaaagtagaggaactgagacag

SEQ ID NO: 76221 - DNA, 80 bp, synthetic construct
  source 1..80: mol_type = other DNA
gcaattgtgtagactccttaggggggcaaaagcactaacagacatagtaccactgactgaagaggcagaattagaattgg

SEQ ID NO: 76222 - DNA, 80 bp, synthetic construct
  source 1..80: mol_type = other DNA
tgggaaaattaaattgggcaagtcagatttatgcaggaattaaagtaaagcaattgtgtagactccttaggggggcaaaa

SEQ ID NO: 76223 - DNA, 80 bp, synthetic construct
  source 1..80: mol_type = other DNA
gcactaacagacatagtaccactgactgaagaggcagaattagaattggcagagaacagggaaattctacgagaacctgt

SEQ ID NO: 76224 - DNA, 80 bp, synthetic construct
  source 1..80: mol_type = other DNA
acatggagtctattatgacccagaaaaagacttaatagcagaaatacagaagcaaggggaagaacaatggacatatcaaa

SEQ ID NO: 76225 - DNA, 80 bp, synthetic construct
  source 1..80: mol_type = other DNA
cccgaagcaggaaccaaaggaggagctatatcctctaacctccctcaaatcactctttggcaacgacccctagtcacagt

SEQ ID NO: 76226 - DNA, 80 bp, synthetic construct
  source 1..80: mol_type = other DNA
aagaatagggggaaagctaatagaagccctattagatacaggagcagatgatacagtattaacagaaatagatttgccag

SEQ ID NO: 76227 - DNA, 80 bp, synthetic construct
  source 1..80: mol_type = other DNA
gaagatggaaaccaaaaatgatagggggaattggaggttttatcaaagtaagacagtatgataatatgaccatggaaatt

SEQ ID NO: 76228 - DNA, 80 bp, synthetic construct
  source 1..80: mol_type = other DNA
gaaggaaaaaaggctataggcaccgtattaataggacccacacctgtcaacataattggaagaaatatgttgactcaaat

SEQ ID NO: 76229 - DNA, 80 bp, synthetic construct
  source 1..80: mol_type = other DNA
tggttgcactttaaattttccaatcagtactattgaaactgtgccagtaaaattaaagccagggatggatggtccaaaag

SEQ ID NO: 76230 - DNA, 80 bp, synthetic construct
  source 1..80: mol_type = other DNA
tcaaggattgggcctgaaaatccatataacactccagtgtttgctataaagaaaaaggacagcactaaatggagaaaatt

SEQ ID NO: 76231 - DNA, 80 bp, synthetic construct
  source 1..80: mol_type = other DNA
aaaagaaaaaatcagtaacagtactggatgtgggggatgcatatttttcaatccctctagatgaaaatttcaggaagtat

SEQ ID NO: 76232 - DNA, 80 bp, synthetic construct
  source 1..80: mol_type = other DNA
actgcattcactatacctagtataaacaatgagacaccagggattagatatcaatacaacgtgctaccacaaggttggaa

SEQ ID NO: 76233 - DNA, 80 bp, synthetic construct
  source 1..80: mol_type = other DNA
catggggtgtactatgacccgtcaaaagagttaatagctgaaatacagaaacaggggcatgaccaatggacatatcaaat

SEQ ID NO: 76234 - DNA, 80 bp, synthetic construct
  source 1..80: mol_type = other DNA
ggaatttccttcagagcagaccagaaccaacagccccaccagcagagagcctcaggttcgaggagacaactcccttgacg

SEQ ID NO: 76235 - DNA, 80 bp, synthetic construct
  source 1..80: mol_type = other DNA
aggcaggagcagaaagacaaggaacctgctcccttagtttccctcaaatcactctttggcaacgaccccttgtcacagta

SEQ ID NO: 76236 - DNA, 80 bp, synthetic construct
  source 1..80: mol_type = other DNA
atagtagggggacagcaaagggaggccctcttggatacaggagcagatgatacagtattagaagaaataagtttgccagg

SEQ ID NO: 76237 - DNA, 80 bp, synthetic construct
  source 1..80: mol_type = other DNA
ggatcaccatcaatattccagagtagcatgacaaaaatcttagagccctttagagcaaaaaatccagagatagttatcta

SEQ ID NO: 76238 - DNA, 80 bp, synthetic construct
  source 1..80: mol_type = other DNA
cacagtaaaaataggaggacagttaaaagaagctctgttagacacaggagcagatgatacagtattagaagaaataaatt

SEQ ID NO: 76239 - DNA, 80 bp, synthetic construct
  source 1..80: mol_type = other DNA
aagtatactgcattcactatacctagtactaataatgagacaccagggattagatatcagtacaatgtgttaccgcaggg

SEQ ID NO: 76240 - DNA, 80 bp, synthetic construct
  source 1..80: mol_type = other DNA
atggaaagggtcaccagcaatattccagagtagcatgacaaaaatcttagaaccctttagaacaagaaatccagaagtag

SEQ ID NO: 76241 - DNA, 80 bp, synthetic construct
  source 1..80: mol_type = other DNA
agggtaaaaaacccagagttaattatctatcaatacatggatgacttgtatgtagggtctgatttagaaatagaacagca

SEQ ID NO: 76242 - DNA, 80 bp, synthetic construct
  source 1..80: mol_type = other DNA
tagagcaaaaattgaggaattaagaactcatctactgaggtgggggtttactacaccagacaaaaagcatcagaaagaac

SEQ ID NO: 76243 - DNA, 80 bp, synthetic construct
  source 1..80: mol_type = other DNA
ctccatttctttggatgggatatgaactccatcctgacaaatggacagttcagcctatacagctgccagataaagatagc

SEQ ID NO: 76244 - DNA, 80 bp, synthetic construct
  source 1..80: mol_type = other DNA
caagggcaagatcaatggacatatcaaatttatcaagagccatttaaaaatctgaaaacaggaaaatatgcaaaaagggg

SEQ ID NO: 76245 - DNA, 80 bp, synthetic construct
  source 1..80: mol_type = other DNA
cagccccaccagcagagagcttagggatgagggaagagaaaaacagggaacagactcctcccttaatttccctcaaatca

SEQ ID NO: 76246 - DNA, 80 bp, synthetic construct
  source 1..80: mol_type = other DNA
ctctttggcaacgaccccttgtcacagtaagaataggaggacagctaaaagaagctctactagatacaggagcagatgat

SEQ ID NO: 76247 - DNA, 80 bp, synthetic construct
  source 1..80: mol_type = other DNA
tcctttagatgaaaacttcagaaagtatactgcattcactattcctagtataaacaatgagacaccaggagtcaggtatc

SEQ ID NO: 76248 - DNA, 80 bp, synthetic construct
  source 1..80: mol_type = other DNA
atttgttaagctggggattgaccacaccagacaaaaagcatcagaaagaacctccatttctttggatgggttatgaactc

SEQ ID NO: 76249 - DNA, 80 bp, synthetic construct
  source 1..80: mol_type = other DNA
catggagcatattatgacccatcaaaagacttagtagcagaaatacagaaacaagggcacgaccaatggacgtatcaaat

SEQ ID NO: 76250 - DNA, 80 bp, synthetic construct
  source 1..80: mol_type = other DNA
atttccctcagagcagactagagccaacagccccaccagcagagagcttgggaataggggaggagataacctcccatcag

SEQ ID NO: 76251 - DNA, 80 bp, synthetic construct
  source 1..80: mol_type = other DNA
aagcaggggcagaaggacaaggaccagtctcctttaatctccctcaaatcactctttggcaacgacctcttgtcacagta

SEQ ID NO: 76252 - DNA, 80 bp, synthetic construct
  source 1..80: mol_type = other DNA
aaagtagggggacagctaaaagaagctctattggatacaggagcagatgatacagtattagaagaaatagatttaccagg

SEQ ID NO: 76253 - DNA, 80 bp, synthetic construct
  source 1..80: mol_type = other DNA
ccagagtagcatgacaaaaatcttagagccctttagaaaacaaaatccagaaatagtgatttatcagtatatggatgatt

SEQ ID NO: 76254 - DNA, 80 bp, synthetic construct
  source 1..80: mol_type = other DNA
caagtcagatttatccaggaattaaagtaaagcaattatgtaaactacttaggggaaccaaagcactgacagatgtaata

SEQ ID NO: 76255 - DNA, 80 bp, synthetic construct
  source 1..80: mol_type = other DNA
gctcctcagaacagaccagagccaacagccccaccagtagagagcttcaggtttggggaagagaagcaggagcagaagga

SEQ ID NO: 76256 - DNA, 80 bp, synthetic construct
  source 1..80: mol_type = other DNA
cgaggaactctatcccttaacttccctcagatcactctttggcaaagaccccttgtcacaataagaatagggggacagct

SEQ ID NO: 76257 - DNA, 80 bp, synthetic construct
  source 1..80: mol_type = other DNA
taataagagaactcaagatttctgggaagtccaattaggaataccgcatcctgcagggctaaaaaagaaaaaatcaataa

SEQ ID NO: 76258 - DNA, 80 bp, synthetic construct
  source 1..80: mol_type = other DNA
cagtactggatgtgggtgatgcatatttttcagttccattagatgaagattttaggaaatataccgcatttacaatacct

SEQ ID NO: 76259 - DNA, 80 bp, synthetic construct
  source 1..80: mol_type = other DNA
tctgaagcaggagacgagggacaaggaaaatcccttaacttccctcaaatcactctttggcagcgacccctcgttacagt

SEQ ID NO: 76260 - DNA, 80 bp, synthetic construct
  source 1..80: mol_type = other DNA
tggctgcacattaaattttccaattagtcctattaacactgtaccagtaacattaaagccaggaatggatggcccaaaaa

SEQ ID NO: 76261 - DNA, 80 bp, synthetic construct
  source 1..80: mol_type = other DNA
agaagaaaaaatcaataacagtactggatgtgggggatgcatatttttcagtccctctacatgaagactttaggaagtac

SEQ ID NO: 76262 - DNA, 80 bp, synthetic construct
  source 1..80: mol_type = other DNA
caaatcactaacagacgtagtagcactgactgaggaagcagaattagaattggaagagaacagggagattctaaaagacc

SEQ ID NO: 76263 - DNA, 80 bp, synthetic construct
  source 1..80: mol_type = other DNA
cgaagcaggagcagaaagacaaggaacaggccccacccttagtttccctcaaatcactctttggcaacgaccccttgtca

SEQ ID NO: 76264 - DNA, 80 bp, synthetic construct
  source 1..80: mol_type = other DNA
tacatggatgatttatatgtaggatctgacttagaaataggacagcatagagcaaaaatagaggagttgagagaacatct

SEQ ID NO: 76265 - DNA, 80 bp, synthetic construct
  source 1..80: mol_type = other DNA
tgaagcaggagccgagggaactatatcctctaacttccctcaaatcactctttggcaacgacccctagtcacagtaagaa

SEQ ID NO: 76266 - DNA, 80 bp, synthetic construct
  source 1..80: mol_type = other DNA
aaaagaggctataggtacagtactggtaggacctacacctgtcaacataattgggagaaatatgttgactcagattggtt

SEQ ID NO: 76267 - DNA, 80 bp, synthetic construct
  source 1..80: mol_type = other DNA
ctttaccatacctagtataaacaatgagacaccaggaatcaggtatcagtacaatgtgcttccacaaggatggaaaggat

SEQ ID NO: 76268 - DNA, 80 bp, synthetic construct
  source 1..80: mol_type = other DNA
catttaaaaatctaaaaacagggaaatatgcaaaaaagaggtctgctcacactaatgatgtaagacagttatcagaagta

SEQ ID NO: 76269 - DNA, 80 bp, synthetic construct
  source 1..80: mol_type = other DNA
accgaaggggttatatcctcctctaacttccctcaaatcactctttggcaacgacctgtagtcacagtaaagatagaggg

SEQ ID NO: 76270 - DNA, 80 bp, synthetic construct
  source 1..80: mol_type = other DNA
gccaacagccccaccagcagagagcttcgggtttggggaagaaataaccccctctcagaaacaggagcagaaagacaaag

SEQ ID NO: 76271 - DNA, 80 bp, synthetic construct
  source 1..80: mol_type = other DNA
acaaggaactgtaccctttagcttccctcaaatcactctttggcaacgaccccttgtcacaataaaggtagggggacaac

SEQ ID NO: 76272 - DNA, 80 bp, synthetic construct
  source 1..80: mol_type = other DNA
taaaagaagctctattagacacaggagcagatgatacagtattagaggacataaatttgccagggaaatggaggccaaaa

SEQ ID NO: 76273 - DNA, 80 bp, synthetic construct
  source 1..80: mol_type = other DNA
atgataggaggaattggaggatttatcaaagtaaaacagtatgataatgtacatatagacatttgtggacagaaggccat

SEQ ID NO: 76274 - DNA, 80 bp, synthetic construct
  source 1..80: mol_type = other DNA
aggtacagtattagtgggacctacacctgtcaatataattggaagaaatttgttgacccaaattggctgcactctaaatt

SEQ ID NO: 76275 - DNA, 80 bp, synthetic construct
  source 1..80: mol_type = other DNA
gaaagacaggctaattttttagggaaaatttggccttccaacaagggaaggccggggaactttcttcagagcagaccaga

SEQ ID NO: 76276 - DNA, 80 bp, synthetic construct
  source 1..80: mol_type = other DNA
agcatgacaaaaatcttagagccctttagaataaagaatccagaaatggtgatctatcaatacatggatgatttatatgt

SEQ ID NO: 76277 - DNA, 80 bp, synthetic construct
  source 1..80: mol_type = other DNA
cctataacgctgccatgcaaagaacactggactgtcaatgatatacagaaattagtgggaaaactaaattgggcgagtca

SEQ ID NO: 76278 - DNA, 80 bp, synthetic construct
  source 1..80: mol_type = other DNA
gattcatggaggaattcaagtaaagcagctgtgtaaacttctcaggggagccaaagcgctaacagatatagtaccactga

SEQ ID NO: 76279 - DNA, 80 bp, synthetic construct
  source 1..80: mol_type = other DNA
aaagaattaacagcagagatacagaaacaagggcaagaccaatggacatatcaaatttatcaagagccatttaagaatct

SEQ ID NO: 76280 - DNA, 80 bp, synthetic construct
  source 1..80: mol_type = other DNA
cagccccgccagcagagatctttgggatgggggaagagacgacctcccctgcgaagcaggactcgaaggacaaggaacta

SEQ ID NO: 76281 - DNA, 80 bp, synthetic construct
  source 1..80: mol_type = other DNA
gccctactagatacaggagcagatgatacagtattagaaaaaatagagttaccaggaaaatggaagccaaaaatgatagg

SEQ ID NO: 76282 - DNA, 80 bp, synthetic construct
  source 1..80: mol_type = other DNA
aaagcactaactgagatagtgccactgactgaagaagcagaattagaattggcagaaaacagggagattctaagagaacc

SEQ ID NO: 76283 - DNA, 80 bp, synthetic construct
  source 1..80: mol_type = other DNA
agtacatggggtatactatgacccatcaaaagacttaatagctgaaatacagaaacagggacatgaccagtggacatatc

SEQ ID NO: 76284 - DNA, 80 bp, synthetic construct
  source 1..80: mol_type = other DNA
agatttaccaggaaccattcaaaaacttgaaaacagggaagtatgcaaaaaggaaggctgcccacaccaatgatgtaaaa

SEQ ID NO: 76285 - DNA, 80 bp, synthetic construct
  source 1..80: mol_type = other DNA
tcagaagcaggagtcgaaagacaaggactcgggtcccttaacctccctcaaatcactctttggcaacgaccccttgttac

SEQ ID NO: 76286 - DNA, 80 bp, synthetic construct
  source 1..80: mol_type = other DNA
agtaaaaatagggggacagttaagggaggcccttttggatacaggagcagatgatacagtattagaagaaataaatttgc

SEQ ID NO: 76287 - DNA, 80 bp, synthetic construct
  source 1..80: mol_type = other DNA
attacaaaaattgggcctgacaatccatataatactccaatatttgccataaaaaagaaggacagtactaaatggagaaa

SEQ ID NO: 76288 - DNA, 80 bp, synthetic construct
  source 1..80: mol_type = other DNA
ccagggaatttccttcagagcagaccagagccgacagccccaccagcagagagcttcagattcgaggagacaaccccctc

SEQ ID NO: 76289 - DNA, 80 bp, synthetic construct
  source 1..80: mol_type = other DNA
tatactgcattcactatacccagtataaacaatgaaacaccagggattaggtatcaatacaatgtgctaccgcagggatg

SEQ ID NO: 76290 - DNA, 80 bp, synthetic construct
  source 1..80: mol_type = other DNA
tctgatttagaaataggacagcatagaacaaaaatagaagaattaagagcacatctattagcatggggatttactacacc

SEQ ID NO: 76291 - DNA, 80 bp, synthetic construct
  source 1..80: mol_type = other DNA
tccgaaacaggagcagagggacagggaacagaacccaccttcaatttccctcaaatcactctttggcaacgaccagtagt

SEQ ID NO: 76292 - DNA, 80 bp, synthetic construct
  source 1..80: mol_type = other DNA
tatccagggattaaagtaaagcaactgtgtaaactcctcaggggagcaaaagcactaacagatatagtagtactgactga

SEQ ID NO: 76293 - DNA, 80 bp, synthetic construct
  source 1..80: mol_type = other DNA
cccaccagcggagctctttgggatggggggagagatagcctcccctccgaaacaggagcagagggacagggaacagaacc

SEQ ID NO: 76294 - DNA, 80 bp, synthetic construct
  source 1..80: mol_type = other DNA
caccttcagtttccctcaaatcactctttggcaacgaccagtagtcacaataaaaatagggggacaaataaaagaagctt

SEQ ID NO: 76295 - DNA, 80 bp, synthetic construct
  source 1..80: mol_type = other DNA
agtagggcctacacctgtcaacataattgggagaaatatgttgactcagattggttgtactctaaatttcccgattagtc

SEQ ID NO: 76296 - DNA, 80 bp, synthetic construct
  source 1..80: mol_type = other DNA
atccagggattaaagtaaagcaactgtgtagactcatcaggggagccaaggcactgacagatgtagtgacactgactgag

SEQ ID NO: 76297 - DNA, 80 bp, synthetic construct
  source 1..80: mol_type = other DNA
gccccaccagcagagaactttggaatgggggaagagataacctcctctctgaaacaggagcagaacaaggaattgcctcc

SEQ ID NO: 76298 - DNA, 80 bp, synthetic construct
  source 1..80: mol_type = other DNA
cagatttagaaatagggcagcatagaacaaaaatagatgagttgagagctcatctgttgagctggggattcactacacca

SEQ ID NO: 76299 - DNA, 80 bp, synthetic construct
  source 1..80: mol_type = other DNA
cagataaagaatactggactgtcaatgatatacagaaattagtggggaaactaaattgggcaagtcagatctatccaggg

SEQ ID NO: 76300 - DNA, 80 bp, synthetic construct
  source 1..80: mol_type = other DNA
attagaattggcagagaacagggaaattctaaaagaccctgtgcatggagtatattatgacccatcaaaagatctaatag

SEQ ID NO: 76301 - DNA, 80 bp, synthetic construct
  source 1..80: mol_type = other DNA
cagaaatacaaaaacaagggcaagaccaatggtcatatcaaatttatcaagagccatttaaaaatctgaaaacagggaaa

SEQ ID NO: 76302 - DNA, 80 bp, synthetic construct
  source 1..80: mol_type = other DNA
gcatacttttcagtccctttagatgaaagctttagaaagtatactgcattcaccatacctagtataaacaatgcaacacc

SEQ ID NO: 76303 - DNA, 80 bp, synthetic construct
  source 1..80: mol_type = other DNA
tttttagggagaatgtggccttccagcaaaggaaggccagggaattttcctcagaacagactagagccaacagccccacc

SEQ ID NO: 76304 - DNA, 80 bp, synthetic construct
  source 1..80: mol_type = other DNA
gaaatagggcagcatagagcaaaagtagaagaattaagagatcatctattgagatggggacttactacaccagacaaaaa

SEQ ID NO: 76305 - DNA, 80 bp, synthetic construct
  source 1..80: mol_type = other DNA
atgcagggattaaggtaaaacaattatgtaaactcctcaggggagccaaagcactaacagaggtagtacccctgactgag

SEQ ID NO: 76306 - DNA, 80 bp, synthetic construct
  source 1..80: mol_type = other DNA
cttaatagcagaaatacagaaacaagggcaagaccaatggacgtatcaaatttaccaagagccatttaaaaacctgaaaa

SEQ ID NO: 76307 - DNA, 80 bp, synthetic construct
  source 1..80: mol_type = other DNA
tattgaaactgtaccagtagcattaaagccagggatggatggcccgagggttaaacaatggccattgtcagaagaaaaaa

SEQ ID NO: 76308 - DNA, 80 bp, synthetic construct
  source 1..80: mol_type = other DNA
gagacaccaggaatcaggtatcagtacaatgtgcttccacagggatggaagggatcgccagcaatattccagtgtagcat

SEQ ID NO: 76309 - DNA, 80 bp, synthetic construct
  source 1..80: mol_type = other DNA
ctaattttttagggagaatctggccttccaacaaggggaggccagggaactttcctcagaacagactggagccgacagcc

SEQ ID NO: 76310 - DNA, 80 bp, synthetic construct
  source 1..80: mol_type = other DNA
agaattggagctagcagagaacaaagagattctaaaagaaccagtacatggagtatattatgatccatcaaaagacttaa

SEQ ID NO: 76311 - DNA, 80 bp, synthetic construct
  source 1..80: mol_type = other DNA
tagcagaagtacagaagcaagggctagatcaatggacatatcagatttatcaggagccatttaaaaacctgaaaacaggg

SEQ ID NO: 76312 - DNA, 80 bp, synthetic construct
  source 1..80: mol_type = other DNA
tccgaaacaggagccgaaggagctgtatcctgcaactgccctcaaatcactctttggcaacgaccccttgtcacagtaaa

SEQ ID NO: 76313 - DNA, 80 bp, synthetic construct
  source 1..80: mol_type = other DNA
agccccaccagcagagagcttcgggttcggggaggagataaccccctctccgaaacaggagccgaaggagctgtatcctg

SEQ ID NO: 76314 - DNA, 80 bp, synthetic construct
  source 1..80: mol_type = other DNA
caactgccctcaaatcactctttggcaacgaccccttgtcacagtaaaaataggggggcagctgaaggaagctctactag

SEQ ID NO: 76315 - DNA, 80 bp, synthetic construct
  source 1..80: mol_type = other DNA
agtgtttgccataaggaaaaaggacagcactaaatggagaaaattagtagattttagagaactcaataaaagaactcaag

SEQ ID NO: 76316 - DNA, 80 bp, synthetic construct
  source 1..80: mol_type = other DNA
acttctgggaggttcaattaggaataccacatccagcagggttaaaaaagaagaaatcagtaacagtgttggatgtgggg

SEQ ID NO: 76317 - DNA, 80 bp, synthetic construct
  source 1..80: mol_type = other DNA
gatgcatatttttcagtcccgttagatccagacttcagaaagtatactgcattcactatacctagtataaacaatgcgac

SEQ ID NO: 76318 - DNA, 80 bp, synthetic construct
  source 1..80: mol_type = other DNA
ttagaaatagagcaacatagagtaaaaatagaggaattgagagagcatctattgaggtggggattcaccacaccagataa

SEQ ID NO: 76319 - DNA, 80 bp, synthetic construct
  source 1..80: mol_type = other DNA
tgccaaacaaagaaagctggactgtcaatgatatacaaaagttagtgggaaaactaaattgggcaagtcagatttatcca

SEQ ID NO: 76320 - DNA, 80 bp, synthetic construct
  source 1..80: mol_type = other DNA
gggaactttcttcagaggagaccagagccaacagccccgccaatagagagcttcgggtttggggaggagacagccccctc

SEQ ID NO: 76321 - DNA, 80 bp, synthetic construct
  source 1..80: mol_type = other DNA
tcagaaacaggaacagaaggaggacaaggaactgtatcctttagcctccctcaaatcactctttggcaacgaccccttgt

SEQ ID NO: 76322 - DNA, 80 bp, synthetic construct
  source 1..80: mol_type = other DNA
ccagattggctgcactttaaattttccaattagtcctattgaaactgtaccagtaagattaaggccaggaatggatggcc

SEQ ID NO: 76323 - DNA, 80 bp, synthetic construct
  source 1..80: mol_type = other DNA
agagagcatctgttgaggtggggactaaccacaccagacaaaaaacatcagaaagaacctccatttctttggatgggtta

SEQ ID NO: 76324 - DNA, 80 bp, synthetic construct
  source 1..80: mol_type = other DNA
aggtagtgggaaaattaaattgggcaagccagatttattcaggaattaaagtaagacaattatgtaaactccttagggga

SEQ ID NO: 76325 - DNA, 80 bp, synthetic construct
  source 1..80: mol_type = other DNA
gatctgatttagaaatagggcaacatagagcaaaagtagaggaattaagagatcatctgttgaagtggggatttactaca

SEQ ID NO: 76326 - DNA, 80 bp, synthetic construct
  source 1..80: mol_type = other DNA
tctatcaaggaattaaagtaaaacaattatgcagatgccttaagggagccaaagcactgacagaagtagtaccactgaca

SEQ ID NO: 76327 - DNA, 80 bp, synthetic construct
  source 1..80: mol_type = other DNA
agaattaatagcagaaatacagaaacaagggcaagaccaatggacatatcaaatttatcaggagccttttaaaaacctaa

SEQ ID NO: 76328 - DNA, 80 bp, synthetic construct
  source 1..80: mol_type = other DNA
acagctccaccagcagagagcttcgggtttggggaggagataacaccctctcagaaacaggagcagaaggacaaggagct

SEQ ID NO: 76329 - DNA, 80 bp, synthetic construct
  source 1..80: mol_type = other DNA
agataaaagcattaacagaaatttgtaaggagatggaagaggaagggaaaatttcaagaattgggcctgaaaatccatac

SEQ ID NO: 76330 - DNA, 80 bp, synthetic construct
  source 1..80: mol_type = other DNA
aatactccaatatttgctataaagaaaaaggatagcactaaatggagaaaattagtagattttagagaacttaataagag

SEQ ID NO: 76331 - DNA, 80 bp, synthetic construct
  source 1..80: mol_type = other DNA
atgtgggtgatgcatatttttcagttcctttacatgaggactttagaaagtatactgcattcaccatacctagtacaaac

SEQ ID NO: 76332 - DNA, 80 bp, synthetic construct
  source 1..80: mol_type = other DNA
gagcttcatcctgataagtggacagttcaacctatagaactgccagaaaaagacagctggactgtcaatgatatacagaa

SEQ ID NO: 76333 - DNA, 80 bp, synthetic construct
  source 1..80: mol_type = other DNA
ccaaagcactaacagaagtagtagcattgactaaagaagcagagctggaattggcagagaacagggagattctaagaaac

SEQ ID NO: 76334 - DNA, 80 bp, synthetic construct
  source 1..80: mol_type = other DNA
ttatttatcagtacatggatgacttgtatgtaggatctgatttagaaataggacagcatagagcaaaagtagaggagttg

SEQ ID NO: 76335 - DNA, 80 bp, synthetic construct
  source 1..80: mol_type = other DNA
agggcccatctattaagatggggatttactacaccagacaaaaagcatcagaaagaaccgccatttctttggatgggata

SEQ ID NO: 76336 - DNA, 80 bp, synthetic construct
  source 1..80: mol_type = other DNA
aattagtgggaaaactaaattgggcaagtcagatttatgcagggatcaaagtaaagcaactatgtaaacttcttagagga

SEQ ID NO: 76337 - DNA, 80 bp, synthetic construct
  source 1..80: mol_type = other DNA
gggaactttcctcagaacaggttagagccaacagccccaccagcggagagcttcagcatgggggaggagataacctcctc

SEQ ID NO: 76338 - DNA, 80 bp, synthetic construct
  source 1..80: mol_type = other DNA
tccgaagcaggagctgaaagacagggagcagcatcctcccttaatttccctcaaatcactctttggcaacgaccccttgt

SEQ ID NO: 76339 - DNA, 80 bp, synthetic construct
  source 1..80: mol_type = other DNA
tgccaggaaaatggaaaccaagaatgatagggggaattggaggttttatcaaagtgaaacaatatgatcagatagctata

SEQ ID NO: 76340 - DNA, 80 bp, synthetic construct
  source 1..80: mol_type = other DNA
gtttaaagaagaaaaaatcagtaacagtcctagatgtaggggacgcatatttctctgttcccttagatgaaaactttaga

SEQ ID NO: 76341 - DNA, 80 bp, synthetic construct
  source 1..80: mol_type = other DNA
aaatatactgcatttaccatacctagtataaacaatgagacaccaggaactagatatcaatacaatgtacttcctcaggg

SEQ ID NO: 76342 - DNA, 80 bp, synthetic construct
  source 1..80: mol_type = other DNA
gcaatattccagagtagcatgacaaaaatcttagagcccttcagaaagcaaaatcctgaaatggttatttaccaatatat

SEQ ID NO: 76343 - DNA, 80 bp, synthetic construct
  source 1..80: mol_type = other DNA
gatggggatttacaacaccagataaaaaacatcagaaagaacccccatttctgtggatggggtatgagctccatcctgac

SEQ ID NO: 76344 - DNA, 80 bp, synthetic construct
  source 1..80: mol_type = other DNA
aaatggacagtgcagcctatacaactgcctaacaaggaaagctggactgtcaatgatatacagaaattagtgggaaaact

SEQ ID NO: 76345 - DNA, 80 bp, synthetic construct
  source 1..80: mol_type = other DNA
attttcttcagaacaggccagagccaacagccccaccagcagagagctttgggttcggggaggagatagcccctgccccg

SEQ ID NO: 76346 - DNA, 80 bp, synthetic construct
  source 1..80: mol_type = other DNA
aagcaggagccgaaggagaaggacttagctgccctcaaatcactctttggcaacgacccttagtcacagtaagaataggg

SEQ ID NO: 76347 - DNA, 80 bp, synthetic construct
  source 1..80: mol_type = other DNA
ggcctgagaatccatacaacacaccaatatttgccataaaaaagaaagacagtactaaatggagaaaattagtggatttc

SEQ ID NO: 76348 - DNA, 80 bp, synthetic construct
  source 1..80: mol_type = other DNA
atcagtaacagtgctggatgtgggagatgcatatttttcagttcctttgtatgaaggcttcaggaagtatactgcattca

SEQ ID NO: 76349 - DNA, 80 bp, synthetic construct
  source 1..80: mol_type = other DNA
cacaaggatggaaagggtcaccatcaatattccagggtagcatgacaaaaatcttagagcccttcaggaagcaaaatcca

SEQ ID NO: 76350 - DNA, 80 bp, synthetic construct
  source 1..80: mol_type = other DNA
agaattaagagaacatctattgaggtggggatttaccacaccagataaaaaacatcagaaagaacccccatttctttgga

SEQ ID NO: 76351 - DNA, 80 bp, synthetic construct
  source 1..80: mol_type = other DNA
tgggttatgaactccatcctgataagtggacagtacagcctataaaactgccagaaaaggagagctggactgtcaatgat

SEQ ID NO: 76352 - DNA, 80 bp, synthetic construct
  source 1..80: mol_type = other DNA
taggggaaccaaagcactaacagaagtggtaccactaacagaagaagcagaattagaactggcagaaaacagggagattt

SEQ ID NO: 76353 - DNA, 80 bp, synthetic construct
  source 1..80: mol_type = other DNA
taaaagaaccagtacatggagtgtattatgacccatcaaaagacttaatagcagaagtgcagaaacaagggaacggccaa

SEQ ID NO: 76354 - DNA, 80 bp, synthetic construct
  source 1..80: mol_type = other DNA
atttaaaaatctgaagacaggaaagtatgctagaatgaggggaacccacactaatgatgtaaaacaattaacagagctag

SEQ ID NO: 76355 - DNA, 80 bp, synthetic construct
  source 1..80: mol_type = other DNA
tggacataccaaatttatcaagaaccatttaaaaatctgaagacaggaaagtatgctagaatgaggggaacccacactaa

SEQ ID NO: 76356 - DNA, 80 bp, synthetic construct
  source 1..80: mol_type = other DNA
agcaggagctgaaaaggagggaacaggatcctcctctagatcctcctctaatttccctcaaatcactctttggcaacgac

SEQ ID NO: 76357 - DNA, 80 bp, synthetic construct
  source 1..80: mol_type = other DNA
cccttgtcacagtaacaatagaaggacagctaaaagaggctctattggatacaggagcagatgatacagtattagaagat

SEQ ID NO: 76358 - DNA, 80 bp, synthetic construct
  source 1..80: mol_type = other DNA
ataaatttggcaggaaaatggaaaccaagaatgatagggggaattggaggttttatcaaagtaaaacaatatgatcaagt

SEQ ID NO: 76359 - DNA, 80 bp, synthetic construct
  source 1..80: mol_type = other DNA
aactgtagacatttgtggaagaaaggctataggtacagtattagtaggacctacacctgtcaacataattggaaggaata

SEQ ID NO: 76360 - DNA, 80 bp, synthetic construct
  source 1..80: mol_type = other DNA
gatgggccaaaagttaaacaatggccactgacagaagaaaaaataaaagctttaacagaaatttgtacagaaatggaaaa

SEQ ID NO: 76361 - DNA, 80 bp, synthetic construct
  source 1..80: mol_type = other DNA
cctgcagggctaaaaaagaaaaaatcagtaacagtactggatgtgggtgatgcatatttttcagtccccttagataaaga

SEQ ID NO: 76362 - DNA, 80 bp, synthetic construct
  source 1..80: mol_type = other DNA
taaactgggcaagtcagatttatccagggattaaagtaaagaatctgtgtaagctccttaggggaactaaagcactaaca

SEQ ID NO: 76363 - DNA, 80 bp, synthetic construct
  source 1..80: mol_type = other DNA
gacatagtaccgttgacagaagaagcagaattagaattggcagagaacagggaaattctaaaagaaccagtacatggagt

SEQ ID NO: 76364 - DNA, 80 bp, synthetic construct
  source 1..80: mol_type = other DNA
ggaaatttcatccagagcaggacagagccaacagccccaccagcagagagcttcaggttcgaggagggagtgaacccctc

SEQ ID NO: 76365 - DNA, 80 bp, synthetic construct
  source 1..80: mol_type = other DNA
aaccatttaaaaatctgaaaacagggaagtatgcaaaaaggaggactgctcatactaatgatgtaaaacagttaacagag

SEQ ID NO: 76366 - DNA, 80 bp, synthetic construct
  source 1..80: mol_type = other DNA
tcagaaacaagaacagagagatcctataacctccctcaaatcactctttggcagcgaccccttgttacaataaagatagg

SEQ ID NO: 76367 - DNA, 80 bp, synthetic construct
  source 1..80: mol_type = other DNA
aaccaaaaatgatagggggaattggaggttttatcaaagtaaaacagtatgatcaaatatctgtgaacatctgtggacat

SEQ ID NO: 76368 - DNA, 80 bp, synthetic construct
  source 1..80: mol_type = other DNA
agccctaacagatgtagtaccactaactgaggaagcagaattagaattggcagagaatagggaaattctaaaaagccctg

SEQ ID NO: 76369 - DNA, 80 bp, synthetic construct
  source 1..80: mol_type = other DNA
atttatcaagaaccatttaaaaatctaaaaacaggaaagtatgcaaggaggaagggtgctcacactaatgatgtaaaaca

SEQ ID NO: 76370 - DNA, 80 bp, synthetic construct
  source 1..80: mol_type = other DNA
gaactttttacagagcagaccagagccaacagccccaccagcagagagcttcgggtttggggaagagatgaccccctctc

SEQ ID NO: 76371 - DNA, 80 bp, synthetic construct
  source 1..80: mol_type = other DNA
agaaacaggagcagaaagacaaagggttatctcctgtaacttccctcaaatcactctttggcaacgaccccttgtcacag

SEQ ID NO: 76372 - DNA, 80 bp, synthetic construct
  source 1..80: mol_type = other DNA
taaaaatagggggacagctaaaggaagctctattagatacaggagcagatgatacagtagtggaagaaatgaatttacca

SEQ ID NO: 76373 - DNA, 80 bp, synthetic construct
  source 1..80: mol_type = other DNA
aaaaagaaaaaatcagtgacagtactagatgtgggggacgcatatttttcagttccgttagatgaaggttttagaaagta

SEQ ID NO: 76374 - DNA, 80 bp, synthetic construct
  source 1..80: mol_type = other DNA
gggaattttcctcaaagcagaacagtgccaacagccccaccagcagagagctttgggatgggggaagaggtaacctcctc

SEQ ID NO: 76375 - DNA, 80 bp, synthetic construct
  source 1..80: mol_type = other DNA
tctgaagcaggagcagagagagatggaacagccccctcccttagtttccctcaaatcactctttggcaacgacctattgt

SEQ ID NO: 76376 - DNA, 80 bp, synthetic construct
  source 1..80: mol_type = other DNA
aaatatactgcattcactattcctagtgtaaataatgagaccccagggatcagatatcagtataatgtgcttccacaggg

SEQ ID NO: 76377 - DNA, 80 bp, synthetic construct
  source 1..80: mol_type = other DNA
atggaaaggatcaccagcgatatttcagagtagcatgacaaaaatcttggagccctttagaacacaaaatccagacatag

SEQ ID NO: 76378 - DNA, 80 bp, synthetic construct
  source 1..80: mol_type = other DNA
gctacaccctgacaaatggacagtccagcctatacagctgcccgacaaggaaagctggactgtcaatgatatacagaaat

SEQ ID NO: 76379 - DNA, 80 bp, synthetic construct
  source 1..80: mol_type = other DNA
gggaattttcttcagagcaggccagagccaacagccccacccgcagagagcttcgaggggaaagaggagatctcccctca

SEQ ID NO: 76380 - DNA, 80 bp, synthetic construct
  source 1..80: mol_type = other DNA
gggtcaaacaatggccattaacagaagaaaaaataaaagcattaacagaaatttgcaatgacatggaaaaggaaggaaaa

SEQ ID NO: 76381 - DNA, 80 bp, synthetic construct
  source 1..80: mol_type = other DNA
tgaaaaagaaaagatcagtaacagtactagatgtgggagatgcatatttttcagtccccttagatgaaaactttagaaaa

SEQ ID NO: 76382 - DNA, 80 bp, synthetic construct
  source 1..80: mol_type = other DNA
aaatggtgatctaccaatatatggatgatttatatgtagggtctgacttagagatagggcaacatagagcaaaaatagaa

SEQ ID NO: 76383 - DNA, 80 bp, synthetic construct
  source 1..80: mol_type = other DNA
tacagaaattagtaggaaagttaaattgggcaagtcagatttatgcagggattaaagtgaagcaactgtgtagactcctt

SEQ ID NO: 76384 - DNA, 80 bp, synthetic construct
  source 1..80: mol_type = other DNA
agaggagccaaagcactaacagacatagtaccactgactaaagaagcagagctagaattggaagagaacagggagattct

SEQ ID NO: 76385 - DNA, 80 bp, synthetic construct
  source 1..80: mol_type = other DNA
atttaaaaatctaaaaacaggaaaatatgcaaaaaggaggaccacccatactaatgatgtgaaacaattaacagaagcag

SEQ ID NO: 76386 - DNA, 80 bp, synthetic construct
  source 1..80: mol_type = other DNA
aattttcctcagagcagaccagagccaacagccccgccagcggagagctggggaatgggggaagagacaacctctgcccc

SEQ ID NO: 76387 - DNA, 80 bp, synthetic construct
  source 1..80: mol_type = other DNA
ggacatatcaaatttatcaagagccatttaaaaatctaaaaacaggaaaatatgcaaaaaggaggaccacccatactaat

SEQ ID NO: 76388 - DNA, 80 bp, synthetic construct
  source 1..80: mol_type = other DNA
gaagcaggaacagaagcaggaacagaaggacaaggaactatatcccttcacttccctcaaatcactctttggcaacgacc

SEQ ID NO: 76389 - DNA, 80 bp, synthetic construct
  source 1..80: mol_type = other DNA
cttagtttcagtaaaaataggagaacagacaatagaagctctattagatacaggagcagatgatacagtattagaagaaa

SEQ ID NO: 76390 - DNA, 80 bp, synthetic construct
  source 1..80: mol_type = other DNA
tagatttacctggaagatggaaaccaaaaatgatagggggaattggaggttttatcaaagtaagacaatatgagcagata

SEQ ID NO: 76391 - DNA, 80 bp, synthetic construct
  source 1..80: mol_type = other DNA
cctatagaaatttgtggaaaaaaggctatgggtacagtgttagtaggacctacacctgtcaacataattggaaggaacat

SEQ ID NO: 76392 - DNA, 80 bp, synthetic construct
  source 1..80: mol_type = other DNA
atggagaaaattagtagatttcagagaactcaataaaagaactcaagatttctgggaagtccagctaggaataccacatc

SEQ ID NO: 76393 - DNA, 80 bp, synthetic construct
  source 1..80: mol_type = other DNA
cagcaggattaaaaaagaaaaaatcagtaacagtactagatgtaggggacgcatatttttcagtccctttagatgaaaac

SEQ ID NO: 76394 - DNA, 80 bp, synthetic construct
  source 1..80: mol_type = other DNA
tttagaaaatacacagcatttaccatacctagtataaataatgagacaccagggattagataccagtacaatgtgcttcc

SEQ ID NO: 76395 - DNA, 80 bp, synthetic construct
  source 1..80: mol_type = other DNA
atgtgcttccacaggggtggaaagggtcaccagcaatatttcagagtagcatgacaaaaatcttagagcccttcagagca

SEQ ID NO: 76396 - DNA, 80 bp, synthetic construct
  source 1..80: mol_type = other DNA
aaaaatccagaaatggtaatttaccaatacatggatgatttatatgtgggatctgacttggagatagggcagcatagggc

SEQ ID NO: 76397 - DNA, 80 bp, synthetic construct
  source 1..80: mol_type = other DNA
aaagatagaggagttaagagaacatctactaaaatggggatttaccacaccagacaaaaagcatcagaaagaacccccat

SEQ ID NO: 76398 - DNA, 80 bp, synthetic construct
  source 1..80: mol_type = other DNA
ttctttggatgggatatgagcttcatcctgacaaatggacagtccagcctataacgcttccagaaaaagaaagctggact

SEQ ID NO: 76399 - DNA, 80 bp, synthetic construct
  source 1..80: mol_type = other DNA
gaattttcttcagaacaggacagaaccaacagccaacaggccagaaccaacagccccaccagcagagagcttcgggttcg

SEQ ID NO: 76400 - DNA, 80 bp, synthetic construct
  source 1..80: mol_type = other DNA
gggaggagatagctccctccctgaagcaagagaagaagaaggaggagctatatcctgtagcttccctcaaatcactcttt

SEQ ID NO: 76401 - DNA, 80 bp, synthetic construct
  source 1..80: mol_type = other DNA
tgatcagatacttatagaaattgagggaaaaaaggctatggggacagtattagtaggacctacacctattaacataattg

SEQ ID NO: 76402 - DNA, 80 bp, synthetic construct
  source 1..80: mol_type = other DNA
atacctcaccccgcggggttaaaaaagaaaagatcagtaacagtactagatgtgggggatgcatatttttcagttccctt

SEQ ID NO: 76403 - DNA, 80 bp, synthetic construct
  source 1..80: mol_type = other DNA
agatgaaaactttagaaagtatactgcattcactatacctagtataaataatgagacaccaggaattagatatcaataca

SEQ ID NO: 76404 - DNA, 80 bp, synthetic construct
  source 1..80: mol_type = other DNA
aaaaattttagagccttttagagcaaaaaatccagaaatagttatctaccaatacatggatgatttgtatgtaggatctg

SEQ ID NO: 76405 - DNA, 80 bp, synthetic construct
  source 1..80: mol_type = other DNA
aagggattaaagtaaagcagttgtgtaagcttcttagaggaactaaagcattaacagacatagtaccactgactgaagaa

SEQ ID NO: 76406 - DNA, 80 bp, synthetic construct
  source 1..80: mol_type = other DNA
atttaagaacctgaaaacagggaaatatgcaagagtaaagtctgcacacactaatgatgtaaagcaattaacagaagcag

SEQ ID NO: 76407 - DNA, 80 bp, synthetic construct
  source 1..80: mol_type = other DNA
gatagcagaaatacagaaacaagggcaggaccagtggacatatcaaatctatcaagaaccatttaagaacctgaaaacag

SEQ ID NO: 76408 - DNA, 80 bp, synthetic construct
  source 1..80: mol_type = other DNA
ccaccagcagagagcttcgagacaagagaggagatagctccctccctgaagcaggagcagagggacaaggaacaatatcc

SEQ ID NO: 76409 - DNA, 80 bp, synthetic construct
  source 1..80: mol_type = other DNA
accagtacatggagtatattatgacccatcaaaagacttaatagctgaaatacaaaaacaaggacatgaccaatggacat

SEQ ID NO: 76410 - DNA, 80 bp, synthetic construct
  source 1..80: mol_type = other DNA
atcaaatttatcaggaacccttcaaaaatctgaaaacagggaaatatgcaaaaagaaggactgcccacactaatgatgta

SEQ ID NO: 76411 - DNA, 80 bp, synthetic construct
  source 1..80: mol_type = other DNA
gggaattttcctcagagcagaccagagccaacagccccaccagccgagatcttcgggatgggggaggagataacctcccc

SEQ ID NO: 76412 - DNA, 80 bp, synthetic construct
  source 1..80: mol_type = other DNA
ttcgaagcaggagcagaaggacagggaacagggatcacctttagtttccctcaaatcactctttggcaacgaccccttgt

SEQ ID NO: 76413 - DNA, 80 bp, synthetic construct
  source 1..80: mol_type = other DNA
aaaattgaaaaaattgggcctgaaaatccatataacactccagtatttgccataaaaaagaaagacagtactaagtggag

SEQ ID NO: 76414 - DNA, 80 bp, synthetic construct
  source 1..80: mol_type = other DNA
gattaaaaaagaaaaaatcagtgacagtactggatgtgggggatgcatacttctcagttcctttagataaagagttcagg

SEQ ID NO: 76415 - DNA, 80 bp, synthetic construct
  source 1..80: mol_type = other DNA
aaatatactgcattcaccatacctagtataaacaatgaagcaccagggattagatatcaatataatgtgcttccacaggg

SEQ ID NO: 76416 - DNA, 80 bp, synthetic construct
  source 1..80: mol_type = other DNA
aattggtgggaaagctaaattgggcaagtcagatttatccagggattaaagtaaagcaactgtgcaaactccttagggga

SEQ ID NO: 76417 - DNA, 80 bp, synthetic construct
  source 1..80: mol_type = other DNA
gccaaagcattaacacaggtaatagaactgactgaagaagcagaattagagttggcagaaaatagggaaattctaagaga

SEQ ID NO: 76418 - DNA, 80 bp, synthetic construct
  source 1..80: mol_type = other DNA
atacaaaaatctaaaaacaggaaaatatgcaaaaaaggactctgctcatactaatgatgtaagacaactaacaaatgtgg

SEQ ID NO: 76419 - DNA, 80 bp, synthetic construct
  source 1..80: mol_type = other DNA
acctgtacatggagtctattatgacccagaaaaggaattaatagcagaaatacagaaacaagggcaagatcaatggacat

SEQ ID NO: 76420 - DNA, 80 bp, synthetic construct
  source 1..80: mol_type = other DNA
gggaactttcttcagaacaggccagagccaacagccccacccgcggagagcttcgagacgagagaggagacaacctcccc

SEQ ID NO: 76421 - DNA, 80 bp, synthetic construct
  source 1..80: mol_type = other DNA
atcaaatctatcaagagccatacaaaaatctaaaaacaggaaaatatgcaaaaaaggactctgctcatactaatgatgta

SEQ ID NO: 76422 - DNA, 80 bp, synthetic construct
  source 1..80: mol_type = other DNA
tccgaagcaggaaccgggggacagggaactgtatcctcctttagtttccctcaaatcactctttggcaacgacccgttgt

SEQ ID NO: 76423 - DNA, 80 bp, synthetic construct
  source 1..80: mol_type = other DNA
caaaggttaaacaatggccattgacagaagagaaaataaaagcattaacagagatttgccaggaaatggaaaaggaagga

SEQ ID NO: 76424 - DNA, 80 bp, synthetic construct
  source 1..80: mol_type = other DNA
agggacatcagatgaaagactgcacagaaagacaagctaattttttagggaaaatctggccttccaacaagggaaggcca

SEQ ID NO: 76425 - DNA, 80 bp, synthetic construct
  source 1..80: mol_type = other DNA
aaaattagtagatttcagagagctcaataaaagaactcaggacttttgggaggtccaattaggaatacctcatcccgcag

SEQ ID NO: 76426 - DNA, 80 bp, synthetic construct
  source 1..80: mol_type = other DNA
agaattagttatataccaatacatggatgatttgtatgtagggtctgatttagaaatagagcaacatagaacaaaaatag

SEQ ID NO: 76427 - DNA, 80 bp, synthetic construct
  source 1..80: mol_type = other DNA
aggaattaagggaacatctattgaaatggggattgaccacaccagacaaaaagcatcagaaggaacccccatttctttgg

SEQ ID NO: 76428 - DNA, 80 bp, synthetic construct
  source 1..80: mol_type = other DNA
ttaggggagccaaagcactaacagacatagtaccactaactgcagaagctgaattagaattggcagagaatagggaaatt

SEQ ID NO: 76429 - DNA, 80 bp, synthetic construct
  source 1..80: mol_type = other DNA
ggaactttctccagagcagaccagagccgacagccccaccagcagaaagcttcgggttcagggagaagataacggagggg

SEQ ID NO: 76430 - DNA, 80 bp, synthetic construct
  source 1..80: mol_type = other DNA
acaaccccctccccgaagcaggagaccagggaccaggaactgtatcctttagcttccctcaaatcactctttggcagcga

SEQ ID NO: 76431 - DNA, 80 bp, synthetic construct
  source 1..80: mol_type = other DNA
cccctagttaccataagagtaggagggcagatgaaggaagctctattagacacaggagcagatgatacagtattagaaga

SEQ ID NO: 76432 - DNA, 80 bp, synthetic construct
  source 1..80: mol_type = other DNA
ctgttgactcagattggatgtactttaaatttcccaattagtcctattgaaactgtaccagtaaaactgaaaccaggaat

SEQ ID NO: 76433 - DNA, 80 bp, synthetic construct
  source 1..80: mol_type = other DNA
ggttcaggaagtatactgcattcactataccaagtattaataatgagacaccaggaattagatatcagtacaatgtactg

SEQ ID NO: 76434 - DNA, 80 bp, synthetic construct
  source 1..80: mol_type = other DNA
tctggatggggtatgaactccatcctgataaatggacagtacagcctatacagctgccagacaaagaagactggactgtc

SEQ ID NO: 76435 - DNA, 80 bp, synthetic construct
  source 1..80: mol_type = other DNA
aatgatatacagaagctagtaggaaaattaaactgggcaagtcagatttatccagggattaaagtaaggcagctgtgtaa

SEQ ID NO: 76436 - DNA, 80 bp, synthetic construct
  source 1..80: mol_type = other DNA
ttttctccagaacagaccagagccaacagccccaccagtagagccaacagccccaccagcagagagcttcaggttcgaag

SEQ ID NO: 76437 - DNA, 80 bp, synthetic construct
  source 1..80: mol_type = other DNA
aggagacagcctcctctccgaggcgggagacgaagggcaaggaccctgctcccttggattccctcaaatcactctttggc

SEQ ID NO: 76438 - DNA, 80 bp, synthetic construct
  source 1..80: mol_type = other DNA
agcgaccccttgttacaataaaaatagggggacaggtgagggaagctctattagatacaggagcggatgatacagtattg

SEQ ID NO: 76439 - DNA, 80 bp, synthetic construct
  source 1..80: mol_type = other DNA
tcaaataactatagaaatttgtgggaaaaaggctataggtacagtattagtagggcctacacctgtcaacataattggaa

SEQ ID NO: 76440 - DNA, 80 bp, synthetic construct
  source 1..80: mol_type = other DNA
gaaacatgttgactcagcttggttgtactctaaattttccaattagccctattgagactgtacctgtaaaattaaagcca

SEQ ID NO: 76441 - DNA, 80 bp, synthetic construct
  source 1..80: mol_type = other DNA
ggaatggatggcccaaaagttaaacaatggccattgacagaagagaaaataaaagcattgacagaaatttgtaaagaaat

SEQ ID NO: 76442 - DNA, 80 bp, synthetic construct
  source 1..80: mol_type = other DNA
ggaaaaggaaggaaagattacaaaaattgggcctgaaaacccatacaatactccaatatttgccataaaaaagaaggata

SEQ ID NO: 76443 - DNA, 80 bp, synthetic construct
  source 1..80: mol_type = other DNA
caccaaatgaaagactgtactgaaagacaggctaattttttagggagactttggccttcccggcagggaaggccagggaa

SEQ ID NO: 76444 - DNA, 80 bp, synthetic construct
  source 1..80: mol_type = other DNA
gtactaaatggagaaaattagtggatttcagagaacttaataaaagaacccaagacttttgggaagtccaattaggaata

SEQ ID NO: 76445 - DNA, 80 bp, synthetic construct
  source 1..80: mol_type = other DNA
ccacacccagcagggttaaaaaagaaaaaatcagtaacagtgctagatgtgggagatgcatatttttcagttcctttaga

SEQ ID NO: 76446 - DNA, 80 bp, synthetic construct
  source 1..80: mol_type = other DNA
tgaaagctttagaaagtatactgcattcaccatccctagcataaacaatgaaacaccagggatcagatatcaatacaatg

SEQ ID NO: 76447 - DNA, 80 bp, synthetic construct
  source 1..80: mol_type = other DNA
agcaatattccaatgtagcatgacaaaaatcttagaaccatttagaataaaaaatccagaactagttatataccaataca

SEQ ID NO: 76448 - DNA, 80 bp, synthetic construct
  source 1..80: mol_type = other DNA
taaattgggcaagtcagatttatgcagggattaaagtaaggcaactgtgcaaactcctcaggggagccaaggcattaaca

SEQ ID NO: 76449 - DNA, 80 bp, synthetic construct
  source 1..80: mol_type = other DNA
gagccgacagccccaccagcagagagcttcgggttcggggaggagataacgaaggggacaaccccctccccggagcagaa

SEQ ID NO: 76450 - DNA, 80 bp, synthetic construct
  source 1..80: mol_type = other DNA
gcagaaggacaaggaactgtatcctgtagcttccctcaaatcactctttggcaacgacccttagtggacataaaagtaga

SEQ ID NO: 76451 - DNA, 80 bp, synthetic construct
  source 1..80: mol_type = other DNA
gggacagctgatggaagctctattagacacaggagcagatgatacagtattagaagacataaatttgccaggaaaatgga

SEQ ID NO: 76452 - DNA, 80 bp, synthetic construct
  source 1..80: mol_type = other DNA
aatcagtatcagtattggatgtgggagatgcatatttttcagtccctttagataaagagttcaggaaatatactgcattc

SEQ ID NO: 76453 - DNA, 80 bp, synthetic construct
  source 1..80: mol_type = other DNA
gacaaaaatcctagagccatatagaacacaaaacccagaaatggttatctatcaatacatggatgacttatatgtgggat

SEQ ID NO: 76454 - DNA, 80 bp, synthetic construct
  source 1..80: mol_type = other DNA
ctgacttagaaatagggcagcatagaaaaaagatagaggaattgagggagcatctattgaaatggggattcaccacacca

SEQ ID NO: 76455 - DNA, 80 bp, synthetic construct
  source 1..80: mol_type = other DNA
atccagggattaaggtaaggcaactatgtaaactccttagggggaccaaggcactaacagatatagtaccactgactaca

SEQ ID NO: 76456 - DNA, 80 bp, synthetic construct
  source 1..80: mol_type = other DNA
ccgccagcagagagcttcgagataaaagaggagataccctcccctccgaagcaggaaccgagggacaaggaactctatcc

SEQ ID NO: 76457 - DNA, 80 bp, synthetic construct
  source 1..80: mol_type = other DNA
ttggaggttttatcaaagtaagacagtatgatcaaatacttatagaaatttgtggaaaaagagctatgggcacagtatta

SEQ ID NO: 76458 - DNA, 80 bp, synthetic construct
  source 1..80: mol_type = other DNA
taaaagcattaacagaaatttgcaatgaaatggaaaaagaagggaagatttcaaaaatcgggcctgaaaatccatacaac

SEQ ID NO: 76459 - DNA, 80 bp, synthetic construct
  source 1..80: mol_type = other DNA
ctaattttttagggaaaatttggccttcccacaaggggaggccagggaatttccttcaggacaggctggagccaacagcc

SEQ ID NO: 76460 - DNA, 80 bp, synthetic construct
  source 1..80: mol_type = other DNA
gagacaccaggaattagatatcagtacaacgtgctaccacagggatggaaagggtcaccggcaatattccaggctagcat

SEQ ID NO: 76461 - DNA, 80 bp, synthetic construct
  source 1..80: mol_type = other DNA
tccctcaaatcactctttggcaacgaccagtagtcacaataaaagtagggggacagttaagggaagctctattagataca

SEQ ID NO: 76462 - DNA, 80 bp, synthetic construct
  source 1..80: mol_type = other DNA
tatcaaagtaagacaatatgagcaagtactcatagaaatttgtgggcaaaaagctataggtacagtattagtaggaccta

SEQ ID NO: 76463 - DNA, 80 bp, synthetic construct
  source 1..80: mol_type = other DNA
gaattaggtatcagtacaatgtacttccacagggatggaaaggatcaccagcaatattccaaagcagcatgacaaaaatt

SEQ ID NO: 76464 - DNA, 80 bp, synthetic construct
  source 1..80: mol_type = other DNA
ttagagccttttagagcaaaaaatccagagatggtcatctaccaatacatggatgacttgtatgtagggtctgacttaga

SEQ ID NO: 76465 - DNA, 80 bp, synthetic construct
  source 1..80: mol_type = other DNA
aatagggcagcatagggcaaaaatagaagaattaagagaacatttattgaagtggggatttactacaccagacaaaaagc

SEQ ID NO: 76466 - DNA, 80 bp, synthetic construct
  source 1..80: mol_type = other DNA
tagagtaaagcacttatgtagactccttaggggggccaaagcactgacagacatagtaccactgactgaagaagcagagc

SEQ ID NO: 76467 - DNA, 80 bp, synthetic construct
  source 1..80: mol_type = other DNA
atcaggagccatttaaaaatctgaaaacagagggcatgaccagtggacatatcaaatttatcaggagccatttaaaaatc

SEQ ID NO: 76468 - DNA, 80 bp, synthetic construct
  source 1..80: mol_type = other DNA
ggaatttcctccagaacagaccagaaccatcagccccaccagcggagagcttcgggtttggagaggagataaccccctcc

SEQ ID NO: 76469 - DNA, 80 bp, synthetic construct
  source 1..80: mol_type = other DNA
ccgaagcaggagcagaaagacaaggaacagtgccctcctttaactaccctcagatcactctttggcagcgaccccttgtc

SEQ ID NO: 76470 - DNA, 80 bp, synthetic construct
  source 1..80: mol_type = other DNA
aaattgaaggaaaaagggctataggtacggtattagtaggacccacacctgtcaacataattggaagaaatatattgact

SEQ ID NO: 76471 - DNA, 80 bp, synthetic construct
  source 1..80: mol_type = other DNA
gaactccatcctgacaaatggacagtgcagcctatacaactgccagaaaaggacagttggactgttaatgacatacaaaa

SEQ ID NO: 76472 - DNA, 80 bp, synthetic construct
  source 1..80: mol_type = other DNA
gttagtgggaaaattaaattgggcaagtcaaatctatccaggggttagagtaaagcacttatgtagactccttagggggg

SEQ ID NO: 76473 - DNA, 80 bp, synthetic construct
  source 1..80: mol_type = other DNA
ccaaagcactgacagacatagtaccactgactgaagaagcagagctagaattggcagagaacagagaaattctgaaagaa

SEQ ID NO: 76474 - DNA, 80 bp, synthetic construct
  source 1..80: mol_type = other DNA
tcaaatttatcaggagccatttaaaaatctgaaaacagagggcatgaccagtggacatatcaaatttatcaggagccatt

SEQ ID NO: 76475 - DNA, 80 bp, synthetic construct
  source 1..80: mol_type = other DNA
aagcagaattagaactggcagagaacagggaaattctaaaggaacctgtacatggagtttattatgacccagaaaaagat

SEQ ID NO: 76476 - DNA, 80 bp, synthetic construct
  source 1..80: mol_type = other DNA
ctaatagcagaaatacagaaacaagggcaagaacagtggacatatcaaatttatcaagaaccatacaaaaatcttaagac

SEQ ID NO: 76477 - DNA, 80 bp, synthetic construct
  source 1..80: mol_type = other DNA
ctccagtgtttgctataaagaaaaaagacagtactaaatggagaaagttagtagattttagagaactcaataaaagaact

SEQ ID NO: 76478 - DNA, 80 bp, synthetic construct
  source 1..80: mol_type = other DNA
acaaaaatcttagaaccatttagaaaacacaacccagaaataattatctatcaatacatggatgacttgtatgtgggatc

SEQ ID NO: 76479 - DNA, 80 bp, synthetic construct
  source 1..80: mol_type = other DNA
cctctaacttccctcaaatcactctttggcagcgacccgtcgtcacaataaaaatagcggggcagctgagggaagctcta

SEQ ID NO: 76480 - DNA, 80 bp, synthetic construct
  source 1..80: mol_type = other DNA
tgacttagaaatagggcagcatagaaaaaaggtagaggaattaagggaacatctattgaggtggggatttacaaccccag

SEQ ID NO: 76481 - DNA, 80 bp, synthetic construct
  source 1..80: mol_type = other DNA
tttagaaatagggcaacatagagcaaaaatagaggagttaagaggacatttattgaagtggggattcaccacaccagata

SEQ ID NO: 76482 - DNA, 80 bp, synthetic construct
  source 1..80: mol_type = other DNA
ctgcagagagcttcaagttcgaggaggagacagcagccccctcctcgaagcaggagccgaaggaaaaggagctatatccc

SEQ ID NO: 76483 - DNA, 80 bp, synthetic construct
  source 1..80: mol_type = other DNA
ggaaaggatcaccagcaatatttcagtgtagcatgacaaaaattttagagccctttaggacaaaaaatccagaaatagtg

SEQ ID NO: 76484 - DNA, 80 bp, synthetic construct
  source 1..80: mol_type = other DNA
atctgccaatacgtggatgatttatatgttggatctgacttggaaataggacaacatagggcaaaaatagaggagttaag

SEQ ID NO: 76485 - DNA, 80 bp, synthetic construct
  source 1..80: mol_type = other DNA
ttggtgggaaaactaaattgggcaagtcagatctatgcagggatccaagtaaggcaattatgtaaactcctcaggggagc

SEQ ID NO: 76486 - DNA, 80 bp, synthetic construct
  source 1..80: mol_type = other DNA
aaaagcactaacagatgtagtaccactaactgcagaggcagaattagaattggcagagaacagggaaattctaaaagagc

SEQ ID NO: 76487 - DNA, 80 bp, synthetic construct
  source 1..80: mol_type = other DNA
cagtgcatggagcatattatgacccatcgaaagacttagtagcagaaatacagaagcagggacaaggccaatggacatat

SEQ ID NO: 76488 - DNA, 80 bp, synthetic construct
  source 1..80: mol_type = other DNA
agggaattttcttcagaacaggccagagccaacagccccacccgcagagagcttcagtttcggggaggagacaaccccct

SEQ ID NO: 76489 - DNA, 80 bp, synthetic construct
  source 1..80: mol_type = other DNA
caaatatatcaggagccacataaaaacctgaaaacagggaaatatgcaagaataaagtctacccacactaatgatgtaaa

SEQ ID NO: 76490 - DNA, 80 bp, synthetic construct
  source 1..80: mol_type = other DNA
acaattaacagaagcagtgcaaaagatagcccaagaaagcatagtaatatggggaaaaactcctaaatttagactgccca

SEQ ID NO: 76491 - DNA, 80 bp, synthetic construct
  source 1..80: mol_type = other DNA
tacaaaaggaaacatgggagacatggtggacagaatattggcaagccacctggatccctgaatgggagtttgtcaatacc

SEQ ID NO: 76492 - DNA, 80 bp, synthetic construct
  source 1..80: mol_type = other DNA
ccgcgaagcaggagacgaaggagaaggagctatatcccttagcctccctcaaatcactctttggcaacgacccctagttg

SEQ ID NO: 76493 - DNA, 80 bp, synthetic construct
  source 1..80: mol_type = other DNA
aattagaattggcagagaacagggaaattctaaaagaatctgtacatggggtatattatgacccaacaaaagacttaata

SEQ ID NO: 76494 - DNA, 80 bp, synthetic construct
  source 1..80: mol_type = other DNA
cagaaatagtgatctgccaatatatggatgatctatatgtaagctctgacttagagatagggcaacatagagcaaaaata

SEQ ID NO: 76495 - DNA, 80 bp, synthetic construct
  source 1..80: mol_type = other DNA
gaggagttgagagaacatctactgagatgggggtttaccacaccagacaaaaagcatcagaaggaacctccatttctttg

SEQ ID NO: 76496 - DNA, 80 bp, synthetic construct
  source 1..80: mol_type = other DNA
gattcctgaatgggagtttgtcaatacccctcccctagtaaaattatggtaccagttagagaaagaccccatagcagagc

SEQ ID NO: 76497 - DNA, 80 bp, synthetic construct
  source 1..80: mol_type = other DNA
aatgatgtaaaacaattaacagaggtagtgcaaaaagtgtctatggaaagcatagtaatatggggaaaaactcctaaatt

SEQ ID NO: 76498 - DNA, 80 bp, synthetic construct
  source 1..80: mol_type = other DNA
tagactacccatacaaaaagaaacatgggaagcatggtggacggagtattggcaggctacctggattcctgaatgggagt

SEQ ID NO: 76499 - DNA, 80 bp, synthetic construct
  source 1..80: mol_type = other DNA
accgagggacaagggggggctataccctcctttaacttccctcaaatcactctttggcaacgacccttagtcacagcaaa

SEQ ID NO: 76500 - DNA, 80 bp, synthetic construct
  source 1..80: mol_type = other DNA
agcctcctctccacaacaggaaccgagggacaagggggggctataccctcctttaacttccctcaaatcactctttggca

SEQ ID NO: 76501 - DNA, 80 bp, synthetic construct
  source 1..80: mol_type = other DNA
aaatatattgactcagattggttgtactctaaattttccaattagtcctattgaaactgtaccagtaaaattgaaaccag

SEQ ID NO: 76502 - DNA, 80 bp, synthetic construct
  source 1..80: mol_type = other DNA
gaaagggaaggaaagatttcaaaaattgggcctgaaaatccatacaatactccagtatttgccataaaaagaaaagatag

SEQ ID NO: 76503 - DNA, 80 bp, synthetic construct
  source 1..80: mol_type = other DNA
atcccgcagggttagaaaagaagaaatcagtgacagtactagacgtaggggatgcatatttctcagttcctttagacaaa

SEQ ID NO: 76504 - DNA, 80 bp, synthetic construct
  source 1..80: mol_type = other DNA
tggaaaggatcaccagcaatatttcaggcaagtatgacaaaaatcttagagccctttagagcaaaaaatccagagatcgt

SEQ ID NO: 76505 - DNA, 80 bp, synthetic construct
  source 1..80: mol_type = other DNA
gatctgccaatatatggatgatttatatgtaggatctgacttagaaatagggcagcatagagcaaaaatagaggagttga

SEQ ID NO: 76506 - DNA, 80 bp, synthetic construct
  source 1..80: mol_type = other DNA
gagaacatctactgaactggggatttaccacaccagataaaaaacatcagaaagaacctccatttctttggatgggatat

SEQ ID NO: 76507 - DNA, 80 bp, synthetic construct
  source 1..80: mol_type = other DNA
gaacttcatcctgacaaatggacagtccagcctatacagctgccagacaaagacagctggactgtcaatgatatacagaa

SEQ ID NO: 76508 - DNA, 80 bp, synthetic construct
  source 1..80: mol_type = other DNA
attagtgggaaaactaaactgggcaagccagatttatgcaggaattaaagtaaaacaactgtgtaaactactcaggggag

SEQ ID NO: 76509 - DNA, 80 bp, synthetic construct
  source 1..80: mol_type = other DNA
ccaaggcactaacagagatagtaaccctgactgaggaagcagaattagaattggcagagaacagggaaattctgaaagaa

SEQ ID NO: 76510 - DNA, 80 bp, synthetic construct
  source 1..80: mol_type = other DNA
cctgtacatggggtatattatgatccaacaaaagacctaatagcagaaatacagaaacaagggcaagaccaatggacata

SEQ ID NO: 76511 - DNA, 80 bp, synthetic construct
  source 1..80: mol_type = other DNA
tcaaatttatcaagaaccatttaaaaatttaaaaacaggaaaatatgcaaaaaagaggtctgcccacactaatgatgtaa

SEQ ID NO: 76512 - DNA, 80 bp, synthetic construct
  source 1..80: mol_type = other DNA
aacaattaacagaggtggtgcaaaaggtagctacagaaggcatagtgatatggggaaagacccctaaatttagactaccc

SEQ ID NO: 76513 - DNA, 80 bp, synthetic construct
  source 1..80: mol_type = other DNA
ccgaagcaggagccgaaggaaaagaggctatatccagacttgccctccctcaaatcactctttggcaacgacccttagtc

SEQ ID NO: 76514 - DNA, 80 bp, synthetic construct
  source 1..80: mol_type = other DNA
aaatttgtggaaaaagggccataggtacagtattagtaggacctacacctgtcaacataattgggcgaaatatgttgact

SEQ ID NO: 76515 - DNA, 80 bp, synthetic construct
  source 1..80: mol_type = other DNA
aaatttcaaaaattgggcctgaaaatccatacaatactccagtatttgccataaaaaagaaagatagtaataaatggaga

SEQ ID NO: 76516 - DNA, 80 bp, synthetic construct
  source 1..80: mol_type = other DNA
attaaaaaagaacaaatcagtaacagtactagatgtgggggatgcctatttttcagttcctttagataaggaatttagaa

SEQ ID NO: 76517 - DNA, 80 bp, synthetic construct
  source 1..80: mol_type = other DNA
ccgaagcaggaaccgggggacaagggactatatccccctctaacttccctcaaatcactctttggcagcgacccttaatc

SEQ ID NO: 76518 - DNA, 80 bp, synthetic construct
  source 1..80: mol_type = other DNA
gcagcaagagtagagggacagttaatagaagccctattagacacaggagcagatgatacagtattagaagaaataaattt

SEQ ID NO: 76519 - DNA, 80 bp, synthetic construct
  source 1..80: mol_type = other DNA
atttactgagatggggacttaccacaccagacaaaaaacatcagaaagaacctccatttctttggatgggatatgaactc

SEQ ID NO: 76520 - DNA, 80 bp, synthetic construct
  source 1..80: mol_type = other DNA
ggggaaactaaattgggcaagtcaaatttatccaggaattaaagtaaagcaactgtgtaaactcctcaggggagtcaaag

SEQ ID NO: 76521 - DNA, 80 bp, synthetic construct
  source 1..80: mol_type = other DNA
cactaacagatgtaataacattgactgaggaagcagaattagaattagcagagaatagggaaattctaaaagaaccagta

SEQ ID NO: 76522 - DNA, 80 bp, synthetic construct
  source 1..80: mol_type = other DNA
ttcctcagagcaggccggaaccaacagccccaccagcagagagtgtcgggatgggggaagagataccctcctctcagaag

SEQ ID NO: 76523 - DNA, 80 bp, synthetic construct
  source 1..80: mol_type = other DNA
tagtagaggtggtgcaaaaagtggctacagaaagcatagtaatatggggaaagactcctaaatttagactacccatacaa

SEQ ID NO: 76524 - DNA, 80 bp, synthetic construct
  source 1..80: mol_type = other DNA
gacaccaaatgaaagactgtactgagagactaattttttagggaaaatttggccttccagcaaggggaggccaggaaact

SEQ ID NO: 76525 - DNA, 80 bp, synthetic construct
  source 1..80: mol_type = other DNA
agggattagatatcagtacaatgtgcttccacagggatggaaaggatcaccatcaatatttcaagcaagtatgacaaaaa

SEQ ID NO: 76526 - DNA, 80 bp, synthetic construct
  source 1..80: mol_type = other DNA
tcttagaaccctttagaacaaaatatccagagattgtgatctgccaatatgtggatgatttatatgtaggatctgattta

SEQ ID NO: 76527 - DNA, 80 bp, synthetic construct
  source 1..80: mol_type = other DNA
gaaatagggcagcatagagaaaaaatagaggagttgagaggacatctattgaaatggggattttacacaccagacaaaaa

SEQ ID NO: 76528 - DNA, 80 bp, synthetic construct
  source 1..80: mol_type = other DNA
gcatcagaaagagcctccatttctttggatgggttatgaactccatcctgacaaatggacagttcagcctataaatctac

SEQ ID NO: 76529 - DNA, 80 bp, synthetic construct
  source 1..80: mol_type = other DNA
cagaaaaagacagctggactgtcaatgacatacagaaattagtgggaaaactaaattgggcaagtcagatttatgcagga

SEQ ID NO: 76530 - DNA, 80 bp, synthetic construct
  source 1..80: mol_type = other DNA
attaaagtaaagcaactgtgtagactcctcagaggagccaaagcactaacagatgtagtaacactgactgaggaagcaga

SEQ ID NO: 76531 - DNA, 80 bp, synthetic construct
  source 1..80: mol_type = other DNA
cagaaatacagaaacaagggcaagaccagtggacatatcaaatttaccaggagccatttaaaattttaaaaacagggaaa

SEQ ID NO: 76532 - DNA, 80 bp, synthetic construct
  source 1..80: mol_type = other DNA
tatgcaaaaaggaggtctgcccacactaatgatgtaaaacaattaacagaagtagtgcaaaaagcagctatagaaagcat

SEQ ID NO: 76533 - DNA, 80 bp, synthetic construct
  source 1..80: mol_type = other DNA
agtaatatggggaaagacccctaaatttaggctacccatacaaaaagagacatgggaaacatggtggatggactattggc

SEQ ID NO: 76534 - DNA, 80 bp, synthetic construct
  source 1..80: mol_type = other DNA
aggctacctggattcctgaatgggagtttgtcaataccccacctctagtaaaattatggtaccagttagaaaaagacccc

SEQ ID NO: 76535 - DNA, 80 bp, synthetic construct
  source 1..80: mol_type = other DNA
acctccctctcagcagcaggaacagaaggacaagtctcagcagcaggaacagagggacaaggggctatatcctcctttaa

SEQ ID NO: 76536 - DNA, 80 bp, synthetic construct
  source 1..80: mol_type = other DNA
cttccctcaaatcactctttggcagcgacccttagtcacagtgagaatagagggacagttaatagaagccctattagaca

SEQ ID NO: 76537 - DNA, 80 bp, synthetic construct
  source 1..80: mol_type = other DNA
tttatcaaagtaagacaatatgatcagatacttatagaaatttgtggaaaaaaggccataggtacagtattagtaggacc

SEQ ID NO: 76538 - DNA, 80 bp, synthetic construct
  source 1..80: mol_type = other DNA
tacacctgtcaacataattggacgaaatatgttgactcagattggttgtaccttaaattttccaattagtcctattgaaa

SEQ ID NO: 76539 - DNA, 80 bp, synthetic construct
  source 1..80: mol_type = other DNA
ttaacagaaatttgtacagaattggaaaaggaagggaaaatttcaagagttggacctgaaaatccatacaatactccaat

SEQ ID NO: 76540 - DNA, 80 bp, synthetic construct
  source 1..80: mol_type = other DNA
atttgccataaagaaaaaggatagtactaaatggagaaaattaatggattttagagaactcaataagagaactcaagatt

SEQ ID NO: 76541 - DNA, 80 bp, synthetic construct
  source 1..80: mol_type = other DNA
tctgggaggtccagctaggaatacctcatcccgcgggattaaaaaagaaaaaatcagtaacagtgctagatgtgggggat

SEQ ID NO: 76542 - DNA, 80 bp, synthetic construct
  source 1..80: mol_type = other DNA
gcatatttttcagttcccttagataaagactttagaaagtatactgcatttactatacctagtagaaataatgagacacc

SEQ ID NO: 76543 - DNA, 80 bp, synthetic construct
  source 1..80: mol_type = other DNA
atgacccagcaaaagacttagtagcagaaatacagaagcaagggcaagaccaatggacatatcaaatttatcaggaacca

SEQ ID NO: 76544 - DNA, 80 bp, synthetic construct
  source 1..80: mol_type = other DNA
acaagggactatatcctcccttaacttccctcaaatcactctttggcagcgacccttaattgcagtaagagtagggggac

SEQ ID NO: 76545 - DNA, 80 bp, synthetic construct
  source 1..80: mol_type = other DNA
acaaaaagtgatcacagaaagcatagtgatatggggaaagacccctaaatttaaactacccatacaaaaagaaacatggg

SEQ ID NO: 76546 - DNA, 80 bp, synthetic construct
  source 1..80: mol_type = other DNA
acctgtattcctgactgggagtttgtcaatacccctcctctagtaaaattgtggtaccagttagagaaggaccccatgta

SEQ ID NO: 76547 - DNA, 80 bp, synthetic construct
  source 1..80: mol_type = other DNA
tgtactgaaagacaggctaattttttagggaaaatctggccttccagcaaagggaggccagggaactttcctcagagcag

SEQ ID NO: 76548 - DNA, 80 bp, synthetic construct
  source 1..80: mol_type = other DNA
tattccaggctagcatgacaaaaatcttagagccctttagatcaaaaaatccagacttaattatcgttcaatacgtggat

SEQ ID NO: 76549 - DNA, 80 bp, synthetic construct
  source 1..80: mol_type = other DNA
agcatcagacttagaaatagggcaacacagagcaaaaatagaggaactaagaggacatctgttgaactggggatttacta

SEQ ID NO: 76550 - DNA, 80 bp, synthetic construct
  source 1..80: mol_type = other DNA
gatttatgcaggaattaaggtaaaacaactgtgtaaactcctcaggggagccaaagcactaacagaggtagtaacactga

SEQ ID NO: 76551 - DNA, 80 bp, synthetic construct
  source 1..80: mol_type = other DNA
ctgaagaggcagaattagaattggcagagaacagggaaattctgaaagaccctgtgcatggggtatattatgacccatca

SEQ ID NO: 76552 - DNA, 80 bp, synthetic construct
  source 1..80: mol_type = other DNA
aaagacttagtagcagaaatacagaaacaagggatggaccaatggacgtatcaaatctatcaagaaccatttaagaatct

SEQ ID NO: 76553 - DNA, 80 bp, synthetic construct
  source 1..80: mol_type = other DNA
gaaaacaggaaaatatgcaagaaggaggactgctcatactaatgatataaaacaattagtagaagtggtgcaaaaggtgg

SEQ ID NO: 76554 - DNA, 80 bp, synthetic construct
  source 1..80: mol_type = other DNA
gggaattggaggttttatcaaagtgagacagtatgatcagatacttatagaaatttgtggaaaaagagccataggtacag

SEQ ID NO: 76555 - DNA, 80 bp, synthetic construct
  source 1..80: mol_type = other DNA
agaactcaagatttctgggaggtccaattaggaataccacatcccgcaggattagaaaagaaaaaatcagtaacagtatt

SEQ ID NO: 76556 - DNA, 80 bp, synthetic construct
  source 1..80: mol_type = other DNA
gaaattttctccagaacagaccagagccctcagccccaccggcagagagcttcgggttcggagaggagatagccccctcc

SEQ ID NO: 76557 - DNA, 80 bp, synthetic construct
  source 1..80: mol_type = other DNA
aatatatcaggagccacataaaaacctgaaaacaggaaagtatgcaagaacaaagtctgcccacactaacgacgtaaaac

SEQ ID NO: 76558 - DNA, 80 bp, synthetic construct
  source 1..80: mol_type = other DNA
gattaaacaatggccattgacagaagaaaaattaagagcattaacagaaatttgcgaagatatggaaaaagaaggaaaaa

SEQ ID NO: 76559 - DNA, 80 bp, synthetic construct
  source 1..80: mol_type = other DNA
tttcaaaaattgggcctgaaaatccatacaatactccagtatttattataaagaaaaaggatggtaataaatggagaaaa

SEQ ID NO: 76560 - DNA, 80 bp, synthetic construct
  source 1..80: mol_type = other DNA
ttaatagatttcagagaacttaataaaagaactcaagacttttgggaaattcaattaggaataccacatccagctgggtt

SEQ ID NO: 76561 - DNA, 80 bp, synthetic construct
  source 1..80: mol_type = other DNA
gaagaagaataaatcagtaacagtattggatataggggatgcatattattcagttcccttagatgaaaactttagaaaat

SEQ ID NO: 76562 - DNA, 80 bp, synthetic construct
  source 1..80: mol_type = other DNA
atactgcattcactatacctagtatcaataatgagaggccagggattcgatatcagtacaatgtgcttccaatgggatgg

SEQ ID NO: 76563 - DNA, 80 bp, synthetic construct
  source 1..80: mol_type = other DNA
atcaatatgtggatgacttgtatgtaggatctgatttagaaatagggcagcatagaacaaaaatagaggaattgagagaa

SEQ ID NO: 76564 - DNA, 80 bp, synthetic construct
  source 1..80: mol_type = other DNA
ccaacagccccaccagtggaaccaacagccccaccagcagagagctctgggaaggaggaggaaataacctcctccccgca

SEQ ID NO: 76565 - DNA, 80 bp, synthetic construct
  source 1..80: mol_type = other DNA
ttagtagaagtagtacacaaagtggctgtagaaagcatagtaatatggggaaagacccctaaatttagactacccataca

SEQ ID NO: 76566 - DNA, 80 bp, synthetic construct
  source 1..80: mol_type = other DNA
gcaggaaccgagggacaggggactatatcctcccttagcttccctcaaatcactctttggcaacgacccttagtcacagt

SEQ ID NO: 76567 - DNA, 80 bp, synthetic construct
  source 1..80: mol_type = other DNA
cagagatagtgatctgccaatacgtggatgatttatatgtaggatctgatttggagataggacagcatagagcaaaagta

SEQ ID NO: 76568 - DNA, 80 bp, synthetic construct
  source 1..80: mol_type = other DNA
gaggaactgagagaacatctattaaaatggggacttttcacaccagacgaaaaatatcagaaggaacctccgtttcattg

SEQ ID NO: 76569 - DNA, 80 bp, synthetic construct
  source 1..80: mol_type = other DNA
gggaggccaggaaattttcctcagagcagaccagaaccatcagccccaccagcagagagctttggagtggaggagaagat

SEQ ID NO: 76570 - DNA, 80 bp, synthetic construct
  source 1..80: mol_type = other DNA
aacctcctcctcgaagcaggaaccgggggacaaaggactatatcctcctttaacttccctcaaatcactctttggcaacg

SEQ ID NO: 76571 - DNA, 80 bp, synthetic construct
  source 1..80: mol_type = other DNA
agatatcagtataatgtgcttccacagggatggaaaggatcaccagcaatatttcaggcaagcatgacaaagattttgga

SEQ ID NO: 76572 - DNA, 80 bp, synthetic construct
  source 1..80: mol_type = other DNA
gccctttagaacaaacaatccagatatagtgatctgccaatacatggatgatttatatgttggatctgacttagaaatag

SEQ ID NO: 76573 - DNA, 80 bp, synthetic construct
  source 1..80: mol_type = other DNA
ggcaacatagagcaaaaatagaggagttgagagaacatctattgaaatggggatttaccacaccagacaaaaaacatcag

SEQ ID NO: 76574 - DNA, 80 bp, synthetic construct
  source 1..80: mol_type = other DNA
aaagaacctccatttctttggatgggatatgaactccatcctgacaaatggacagtccagcctatacagctgccagaaaa

SEQ ID NO: 76575 - DNA, 80 bp, synthetic construct
  source 1..80: mol_type = other DNA
ggacagctggactgtcaatgatatacagaaattagtgggaaaactaaattgggcaagtcagatttatccagggattaaag

SEQ ID NO: 76576 - DNA, 80 bp, synthetic construct
  source 1..80: mol_type = other DNA
taaagaacttatgtaaactcctcagaggagcaaaagcactaacagacatagtgccactaactgcagaagcagaattagaa

SEQ ID NO: 76577 - DNA, 80 bp, synthetic construct
  source 1..80: mol_type = other DNA
ttggcagagaacagggaaattctgaaagaacctgtacatggagtatactatgacccaacaaaagaattaatagcagaaat

SEQ ID NO: 76578 - DNA, 80 bp, synthetic construct
  source 1..80: mol_type = other DNA
aggggaggccaggaaattttcctcagagcaggccggaaccaacagctccaccagcagagctcttgggagtggaggaaaag

SEQ ID NO: 76579 - DNA, 80 bp, synthetic construct
  source 1..80: mol_type = other DNA
acagaaacaagggcaagaccaatggacatatcaaatttatcaagagccatttaaaaatctgaaaacaggaaaatatgcaa

SEQ ID NO: 76580 - DNA, 80 bp, synthetic construct
  source 1..80: mol_type = other DNA
aaaggaggtctgcccacaccaatgatgtaaaacagttaacagaggtagtgcaaaaaatagctctagaaagcatagtaata

SEQ ID NO: 76581 - DNA, 80 bp, synthetic construct
  source 1..80: mol_type = other DNA
taaaattatggtatcagttagaaaaagaccccataataggagcagaaactttctatgtagaatggggcagcttaatagaa

SEQ ID NO: 76582 - DNA, 80 bp, synthetic construct
  source 1..80: mol_type = other DNA
tggggaaagacccctaaatttagactacccatacaaaaggaaacatgggaagcatggtggttggaatattggcaggctac

SEQ ID NO: 76583 - DNA, 80 bp, synthetic construct
  source 1..80: mol_type = other DNA
ctggattcctgaatgggagtttgtcaatacccctcctctagtaaaattatggtatcagttagaaaaagaccccataatag

SEQ ID NO: 76584 - DNA, 80 bp, synthetic construct
  source 1..80: mol_type = other DNA
acagccccttctcagaagcaggaactgagggagaagcaggaaccgagggacaagggactataccctcctttagcttccct

SEQ ID NO: 76585 - DNA, 80 bp, synthetic construct
  source 1..80: mol_type = other DNA
caaatcactctttggcaacgacccttagtcacagcaaaaatagggggacagctaatagaagccctattagacacaggagc

SEQ ID NO: 76586 - DNA, 80 bp, synthetic construct
  source 1..80: mol_type = other DNA
agatgatacagtattagaagaaataagtttaccaggaaaatggaaaccaaaaatgatagggggaattggaggttttatta

SEQ ID NO: 76587 - DNA, 80 bp, synthetic construct
  source 1..80: mol_type = other DNA
aagtaagacagtatgatcagatacttatagaaatttgtgggaaaaaggccataggtacagtgttagtaggacctacacct

SEQ ID NO: 76588 - DNA, 80 bp, synthetic construct
  source 1..80: mol_type = other DNA
gtcaacataattggacgaaacatgttgacccagattggttgtactttaaattttccaattagtcctattgaaactgtacc

SEQ ID NO: 76589 - DNA, 80 bp, synthetic construct
  source 1..80: mol_type = other DNA
acatatgtacagaaatggaaaaggaaggaaaaatttcaaaaattgggcctgaaaatccatacaatactccagtatttgcc

SEQ ID NO: 76590 - DNA, 80 bp, synthetic construct
  source 1..80: mol_type = other DNA
tgtggaaagggaaggacaccaaatgaaagactgcactgagagacaggctaattttttagggaaaatttggccttccaaca

SEQ ID NO: 76591 - DNA, 80 bp, synthetic construct
  source 1..80: mol_type = other DNA
ataaagaaaaaggatagtactaaatggagaaaattagtagatttcagggaacttaataagagaactcaagacttctggga

SEQ ID NO: 76592 - DNA, 80 bp, synthetic construct
  source 1..80: mol_type = other DNA
ggtccaattaggaatacctcaccccgcaggattaaaaaagaaaaaatcagtaacagtactagatgtgggggatgcatatt

SEQ ID NO: 76593 - DNA, 80 bp, synthetic construct
  source 1..80: mol_type = other DNA
tttcagttcctttagataaggactttagaaaatatactgcattcactatacctagtataaataatgagacaccagggatt

SEQ ID NO: 76594 - DNA, 80 bp, synthetic construct
  source 1..80: mol_type = other DNA
tccaaagatagtgatctaccagtatgtggatgatttatatgtagcatctgacttagagatagggcaacatagagcaaaaa

SEQ ID NO: 76595 - DNA, 80 bp, synthetic construct
  source 1..80: mol_type = other DNA
attttaaaggaacctgtacatggggtatattatgacccaacaaaagacttaatagcagagatacagaaacaaggacaaga

SEQ ID NO: 76596 - DNA, 80 bp, synthetic construct
  source 1..80: mol_type = other DNA
tcatcccgcagggttacagaagaaaaaatcagtaacagtactagatgtgggggatgcatatttttcagttcctttagata

SEQ ID NO: 76597 - DNA, 80 bp, synthetic construct
  source 1..80: mol_type = other DNA
ccacagggatggaaaggatcaccagcaatctttcaggcaagcatgacaaaaatcttagaaccctttagaacggaaaatcc

SEQ ID NO: 76598 - DNA, 80 bp, synthetic construct
  source 1..80: mol_type = other DNA
ctaaaagaaccggtacatggagtatattatgacccaacaaaagacttaatagcagaaatacagaagcaagggcaaggaca

SEQ ID NO: 76599 - DNA, 80 bp, synthetic construct
  source 1..80: mol_type = other DNA
ggagctaagaaaacatctattgaaatggggactgactacaccagataaaaagcatcagaaagaacccccatttctttgga

SEQ ID NO: 76600 - DNA, 80 bp, synthetic construct
  source 1..80: mol_type = other DNA
cagaggagccaaagcattaacagatgtagtaccattgactgaagaagcagaattagaattggcagagaacagagagattc

SEQ ID NO: 76601 - DNA, 80 bp, synthetic construct
  source 1..80: mol_type = other DNA
tgaaagaacctgtgcatggggtatattatgacccatcaaaagacttagtagcagaaatacagaaacaaggagaaggccaa

SEQ ID NO: 76602 - DNA, 80 bp, synthetic construct
  source 1..80: mol_type = other DNA
tggacatatcaaatctatcaagagccatttaaaaatctgaaaacagggaaatatgcaagaaagaagtctgctcacactaa

SEQ ID NO: 76603 - DNA, 80 bp, synthetic construct
  source 1..80: mol_type = other DNA
tgatgtaaggcaattagtagaagtagtgcaaaaggtgaccacagaaagcatagtaatatggggaaaggcccctaaattca

SEQ ID NO: 76604 - DNA, 80 bp, synthetic construct
  source 1..80: mol_type = other DNA
ggggaggccagggaactttcttcagaacaggccagagccaacagccccaccagcagagagcctcagcctcggagaggaga

SEQ ID NO: 76605 - DNA, 80 bp, synthetic construct
  source 1..80: mol_type = other DNA
aactacccatacaaaaggagacatgggaaacatggtggacagaatattggcaggctacctttattcctgaatgggaggtt

SEQ ID NO: 76606 - DNA, 80 bp, synthetic construct
  source 1..80: mol_type = other DNA
ccctagtcccagtaagaatagggggacaactaatagaagctctattagacacaggagcagatgatacagtattagaggac

SEQ ID NO: 76607 - DNA, 80 bp, synthetic construct
  source 1..80: mol_type = other DNA
acttatagaaattagtggaaaaaaggctatagggacagtattagtaggacctacacctatcaacattattgggagaaata

SEQ ID NO: 76608 - DNA, 80 bp, synthetic construct
  source 1..80: mol_type = other DNA
tgttgactcagattggctgtactttaaactttccaataagtcctattgaaactgtaccagtaaaattaaagccaggaatg

SEQ ID NO: 76609 - DNA, 80 bp, synthetic construct
  source 1..80: mol_type = other DNA
gatggcccaagggttaaacagtggccattgacagaagaaaaaataaaagcattaacagaaatttgcaatgaaatggaaaa

SEQ ID NO: 76610 - DNA, 80 bp, synthetic construct
  source 1..80: mol_type = other DNA
ggaaggaaaaatctcaaaaattgggcctgagaatccatacaacactccaatatttgccataaagaaaaaagacagttcta

SEQ ID NO: 76611 - DNA, 80 bp, synthetic construct
  source 1..80: mol_type = other DNA
aatggagaaaattggtagatttcagagaacttaataaaagaactcaagacttctgggaggtccaattaggaatacctcat

SEQ ID NO: 76612 - DNA, 80 bp, synthetic construct
  source 1..80: mol_type = other DNA
cccgcagggttaaaaaagaacaaatcagtaacagtactagatgtgggagatgcatacttttcagttcccttagatgagga

SEQ ID NO: 76613 - DNA, 80 bp, synthetic construct
  source 1..80: mol_type = other DNA
cacagggatggaaaggatcaccagcaatatttcagagcagcatgacaaaaatcttagagccctttagaaaagaaaatcca

SEQ ID NO: 76614 - DNA, 80 bp, synthetic construct
  source 1..80: mol_type = other DNA
gaaatagtgatttaccaatacgtggatgatctatatgtgggatctgacttagaaatagggcaacatagagcaaaaataga

SEQ ID NO: 76615 - DNA, 80 bp, synthetic construct
  source 1..80: mol_type = other DNA
atggggaaaaactcctaaatttagactacccatacaaaaagagacatgggaaacatggtggacggagtattggcaggcta

SEQ ID NO: 76616 - DNA, 80 bp, synthetic construct
  source 1..80: mol_type = other DNA
cctgaatgggagtttgtcaatacccctcctctagtaaaattatggtacccagttagagaaagatcccataacagagtcaa

SEQ ID NO: 76617 - DNA, 80 bp, synthetic construct
  source 1..80: mol_type = other DNA
ggaattaagagaacatctgctaaaatggggatttaccacaccagataaaaaacatcagaaggaacctccattcctttgga

SEQ ID NO: 76618 - DNA, 80 bp, synthetic construct
  source 1..80: mol_type = other DNA
caggggagccaaagcactaacagatatagtaacattgactaaggaagcagaattagaactggcagagaacagggagattt

SEQ ID NO: 76619 - DNA, 80 bp, synthetic construct
  source 1..80: mol_type = other DNA
taaaagaccctgtacatggggtatactatgacccatcaaaagacttagtagcagaaatacagaaacaagggcaagaccag

SEQ ID NO: 76620 - DNA, 80 bp, synthetic construct
  source 1..80: mol_type = other DNA
ctgaatgggagtttgtcaatacccctcctctagtaaaattatggtaccagttagagaaggaacccataccaggagcagaa

SEQ ID NO: 76621 - DNA, 80 bp, synthetic construct
  source 1..80: mol_type = other DNA
aactacccatacaaaaggaaacatgggacacatggtggatggagtattggcaggctacctatatccctgaatgggagttt

SEQ ID NO: 76622 - DNA, 80 bp, synthetic construct
  source 1..80: mol_type = other DNA
tgaccccctccccgaagcaggagccgaaggaaaaggagctatatcccttagcttccctcagatcactctttggcaacgac

SEQ ID NO: 76623 - DNA, 80 bp, synthetic construct
  source 1..80: mol_type = other DNA
cccgcggggttaaaacagaaaaaatcagtaacagtactagatgtaggagatgcctacttttcagttcccttagatgaaag

SEQ ID NO: 76624 - DNA, 80 bp, synthetic construct
  source 1..80: mol_type = other DNA
ctttagaaaatatactgcattcactatacccagtataaataatgagacaccaggaattagatatcagtacaatgtgcttc

SEQ ID NO: 76625 - DNA, 80 bp, synthetic construct
  source 1..80: mol_type = other DNA
taatgatgtaaaacaattaacaggggcggtacaaaaagtggctagggaaagcataataatatggggaaagacccctaaat

SEQ ID NO: 76626 - DNA, 80 bp, synthetic construct
  source 1..80: mol_type = other DNA
taacctcccctccgaagcaggaacagaaggacaagggattatatcctcctttggattccctcaaatcactctttggcaac

SEQ ID NO: 76627 - DNA, 80 bp, synthetic construct
  source 1..80: mol_type = other DNA
atggatgatttatgtgtaggatctgacttagagataggggagcacagagcaaaaatagagcagttgagagaacatctgct

SEQ ID NO: 76628 - DNA, 80 bp, synthetic construct
  source 1..80: mol_type = other DNA
acaaatggacagtccagcctatacagctgccagacaaagacagttggactgtcaatgatatacagaaattagtaggaaaa

SEQ ID NO: 76629 - DNA, 80 bp, synthetic construct
  source 1..80: mol_type = other DNA
ctaaattgggcaagtcaaatttatgcaggaattaagataaaacaactgtgtaaacttatcaggggagccaaggcattaac

SEQ ID NO: 76630 - DNA, 80 bp, synthetic construct
  source 1..80: mol_type = other DNA
agatgtagtaccactgactcaggaagcagaattagaattggcagagaacagggagattctaaaagaacctgtgcatggag

SEQ ID NO: 76631 - DNA, 80 bp, synthetic construct
  source 1..80: mol_type = other DNA
gccatcagccccaccagcagagagctttgggatgggggacgagatgccctcctctcagaagcaggaacagggggacaagg

SEQ ID NO: 76632 - DNA, 80 bp, synthetic construct
  source 1..80: mol_type = other DNA
gacagctaatagaagccctattagatacaggagcagatgatacagtattagaagaaaaaatagatttacaaggaaaatgg

SEQ ID NO: 76633 - DNA, 80 bp, synthetic construct
  source 1..80: mol_type = other DNA
tcagggaactcaataagagaactcaagacttctgggaggtccaattgggaatacctcatcccgcggggttaaagaagaaa

SEQ ID NO: 76634 - DNA, 80 bp, synthetic construct
  source 1..80: mol_type = other DNA
aaatcaatgacagtgctagatgtgggggatgcatacttttcagttcccttagataaagagtttagaaagtatactgcatt

SEQ ID NO: 76635 - DNA, 80 bp, synthetic construct
  source 1..80: mol_type = other DNA
cactatacctagtgtaaacaatgagtcaccagggattaggtatcaatataatgtgcttccgcagggatggaaaggatcac

SEQ ID NO: 76636 - DNA, 80 bp, synthetic construct
  source 1..80: mol_type = other DNA
gacaggaaaatatgcaaaaagggggtccacccacactaatgaggtaaaacaattagcagaagtagtgcaaaaaatagcta

SEQ ID NO: 76637 - DNA, 80 bp, synthetic construct
  source 1..80: mol_type = other DNA
atgagacaccagggattagatatcagtacaatgtgctccctcagggatggaaaggatctccagcaatatttcagagtagc

SEQ ID NO: 76638 - DNA, 80 bp, synthetic construct
  source 1..80: mol_type = other DNA
gaagagttgagagagcatctactaaaatggggatttactacaccagacaaaaaacatcagaaagaacctccatttctttg

SEQ ID NO: 76639 - DNA, 80 bp, synthetic construct
  source 1..80: mol_type = other DNA
gggaggccaggaaattttccccagagcagaccagaaccaacagccccaccagcagaaagtcttgggttggggggagagat

SEQ ID NO: 76640 - DNA, 80 bp, synthetic construct
  source 1..80: mol_type = other DNA
aacctcccctccgaagcaagaaccgaaggaggggggactataccctcctttaacttccctcaaatcactctttggcaacg

SEQ ID NO: 76641 - DNA, 80 bp, synthetic construct
  source 1..80: mol_type = other DNA
tatgttgactcagattggttgtaccctaaattttccaattagtcctattgaaactgtgccagtaaaattaaagccaggaa

SEQ ID NO: 76642 - DNA, 80 bp, synthetic construct
  source 1..80: mol_type = other DNA
tgtggaaaggaggacaccaaatgaaggactgtagtgaaagacaggctaattttttagggaaaatttggccttccagcaaa

SEQ ID NO: 76643 - DNA, 80 bp, synthetic construct
  source 1..80: mol_type = other DNA
atcctgcaggattaaaaaagaaaaaatcagtaacaatactagatgtgggggatgcatatttttcagttccattagatgaa

SEQ ID NO: 76644 - DNA, 80 bp, synthetic construct
  source 1..80: mol_type = other DNA
agccccctccccgaagcaggagacgaaggaaaaggagctatatcctatggattccctcaaatcactctttggcagcgacc

SEQ ID NO: 76645 - DNA, 80 bp, synthetic construct
  source 1..80: mol_type = other DNA
gtacaatatgtggatgatctgtacataggatctgacttagaaatagggcagcatagagcaaaaatagaggagttgagagc

SEQ ID NO: 76646 - DNA, 80 bp, synthetic construct
  source 1..80: mol_type = other DNA
ttttccccagagcagaccagaaccaacagccccaccagcagagatctttggaatgggggaggagataacctcctctccga

SEQ ID NO: 76647 - DNA, 80 bp, synthetic construct
  source 1..80: mol_type = other DNA
gttaacagaggtagtgcaaaaggtggccatggaaagcatagtaatatggggaaagacccctagatttagactacccatac

SEQ ID NO: 76648 - DNA, 80 bp, synthetic construct
  source 1..80: mol_type = other DNA
ttcaaaaattgggcctgataatccatacaatactccagtatttgccataaagaaaaaggacagtaccaaatggagaaaat

SEQ ID NO: 76649 - DNA, 80 bp, synthetic construct
  source 1..80: mol_type = other DNA
ggtggtgatctaccaatacgtggatgatttatatgtaggatctgacttagaaatagggcaacatagagcaaaaatagagg

SEQ ID NO: 76650 - DNA, 80 bp, synthetic construct
  source 1..80: mol_type = other DNA
agttaagaaatcatctgttaaaatggggatttaccacaccagataaaaaacatcagaaagaacccccatttctttggatg

SEQ ID NO: 76651 - DNA, 80 bp, synthetic construct
  source 1..80: mol_type = other DNA
gggtatgaactccatcctgacaaatggacagtgcagcctatacaattgccagacaaggatagctggactgtcaatgatat

SEQ ID NO: 76652 - DNA, 80 bp, synthetic construct
  source 1..80: mol_type = other DNA
acagaaattggtgggaaaactaaattgggcaagtcagatttattcaggaattaaagtaagggaattatgcaaactcatca

SEQ ID NO: 76653 - DNA, 80 bp, synthetic construct
  source 1..80: mol_type = other DNA
ggggaacaaaagcactaacagaaatagtaccactaactgcagaagcagaattagaattggcagagaacagggaaattcta

SEQ ID NO: 76654 - DNA, 80 bp, synthetic construct
  source 1..80: mol_type = other DNA
aaagagccagtgcatggggtatattatgacccatcaaaagacttaatagcagaaatacagaaacaggggcgaggccaatg

SEQ ID NO: 76655 - DNA, 80 bp, synthetic construct
  source 1..80: mol_type = other DNA
ggaggccagggaattttctccagaacaggccagagcccacggccccaccagcagagagcttcgggttcggggaggagata

SEQ ID NO: 76656 - DNA, 80 bp, synthetic construct
  source 1..80: mol_type = other DNA
gacatatcaaatatatcaggagccacataaaaacctgaaaacagggaagtatgcaaaaataaagtctgcccacactaatg

SEQ ID NO: 76657 - DNA, 80 bp, synthetic construct
  source 1..80: mol_type = other DNA
tgagtgggaatttgtcaacacctctcccctagtaaagttatggtaccagttagaaacagagcccatagccagagccgaat

SEQ ID NO: 76658 - DNA, 80 bp, synthetic construct
  source 1..80: mol_type = other DNA
atgtaagacagttaacagaggcagtgcaaaagatagccctagaaagcatagtaatatggggaaagactcctaaatttaga

SEQ ID NO: 76659 - DNA, 80 bp, synthetic construct
  source 1..80: mol_type = other DNA
ttacccatacaaaaagaaacatgggagacatggtggacagaatattggcaagccacctggatccctgagtgggaatttgt

SEQ ID NO: 76660 - DNA, 80 bp, synthetic construct
  source 1..80: mol_type = other DNA
gtagtcacagtaagagtagagggacagccaatagaagccctattagacacaggagcagatgatacagtattagaagatat

SEQ ID NO: 76661 - DNA, 80 bp, synthetic construct
  source 1..80: mol_type = other DNA
aaatttacaaggaaaatggaaaccaaaaatgatagggggaattggaggttttatcaaagtaaggcagtatgatcaaatac

SEQ ID NO: 76662 - DNA, 80 bp, synthetic construct
  source 1..80: mol_type = other DNA
tggcccaaaggttaaacaatggccattgacagaagagaaaataaaagcattaacagaaatctgtacagaaatggagaaag

SEQ ID NO: 76663 - DNA, 80 bp, synthetic construct
  source 1..80: mol_type = other DNA
tggagaaaattaatagatttcagagaacttaataaaagaactcaagacttttgggaagttcaattaggaataccacatcc

SEQ ID NO: 76664 - DNA, 80 bp, synthetic construct
  source 1..80: mol_type = other DNA
tgctgggctgaagaagaacaaatcagtaacagtgttggatgtaggggatgcatatttttcagttcctttagataaaaact

SEQ ID NO: 76665 - DNA, 80 bp, synthetic construct
  source 1..80: mol_type = other DNA
ttagaaagtatacagcattcactctccctagtttaaacaatgagacgccaggggttagatatcagtacaatgtacttcca

SEQ ID NO: 76666 - DNA, 80 bp, synthetic construct
  source 1..80: mol_type = other DNA
gccagatttatccagggattagagtaaagcaattgtgtaaactcctcaggggagccaaagcactaacagatatagtagca

SEQ ID NO: 76667 - DNA, 80 bp, synthetic construct
  source 1..80: mol_type = other DNA
ggagctatatcccttagcctccctcaaatcactctttggcagcgacccatagtcacagtaagggtagggggacagttaat

SEQ ID NO: 76668 - DNA, 80 bp, synthetic construct
  source 1..80: mol_type = other DNA
gtggcttcggaaagcatagtaatatggggaaaaacccctaaatttagactacccatacaaaaagagacatgggaaacatg

SEQ ID NO: 76669 - DNA, 80 bp, synthetic construct
  source 1..80: mol_type = other DNA
aagagaaaataaaggccttaacagaaatctgtacagaaatggagaaggaaggaaagatttcaaaaattgggcctgaaaat

SEQ ID NO: 76670 - DNA, 80 bp, synthetic construct
  source 1..80: mol_type = other DNA
gcagagcatgacaaaaattttagagccctttagaacaaaaaatccagaaataattatctatcaatacgtggatgacttgt

SEQ ID NO: 76671 - DNA, 80 bp, synthetic construct
  source 1..80: mol_type = other DNA
atctgacttggagatagggcagcatagagcaaaaatagaggagttgagagaacatctactgaaatggggatttaccacac

SEQ ID NO: 76672 - DNA, 80 bp, synthetic construct
  source 1..80: mol_type = other DNA
ttatgcaggaattaaagtaaaacaactgtgtaaactcctcaggggagctaaagcactaacagatatagtgacactgactg

SEQ ID NO: 76673 - DNA, 80 bp, synthetic construct
  source 1..80: mol_type = other DNA
ccccaccagcagagatccttgggatgggggaagagatcacctcccctccgaagcaagaaccgagggacaaggagctatat

SEQ ID NO: 76674 - DNA, 80 bp, synthetic construct
  source 1..80: mol_type = other DNA
cagaaagcatagtaatatggggaaaagcccctaaatttagactacccatacaaagagacacatgggaaacatggtggatg

SEQ ID NO: 76675 - DNA, 80 bp, synthetic construct
  source 1..80: mol_type = other DNA
cctcctttaacctccctcaaatcactctttggcaacgacccttagtcacagtaaaaatagggggacagctaatagaagcc

SEQ ID NO: 76676 - DNA, 80 bp, synthetic construct
  source 1..80: mol_type = other DNA
aattggaggttttatcaaagtaagacaatatgatcagatacttttagaaatttgtggaaaaagggctataggtacggtgt

SEQ ID NO: 76677 - DNA, 80 bp, synthetic construct
  source 1..80: mol_type = other DNA
aataaaagcattaaaagagatttgtacagaaatggaaaaggaaggaaaaatttcaaaaattgggcctgaaaatccataca

SEQ ID NO: 76678 - DNA, 80 bp, synthetic construct
  source 1..80: mol_type = other DNA
acccaagacttctgggaggtccaattaggcataccccatcccgcaggattaaaaaagaataaatcagtaacagtactgga

SEQ ID NO: 76679 - DNA, 80 bp, synthetic construct
  source 1..80: mol_type = other DNA
tgtaggggatgcatatttttcagttcccttagataaagactttagaaaatatactgcattcactatacctagtgtaaata

SEQ ID NO: 76680 - DNA, 80 bp, synthetic construct
  source 1..80: mol_type = other DNA
tgagagagcatttattaaaatggggatttaccacaccagacaaaaaacatcagaaagaacccccatttctttggatggga

SEQ ID NO: 76681 - DNA, 80 bp, synthetic construct
  source 1..80: mol_type = other DNA
tatgagctccatcctgacaaatggacagtacagcctatacagttgccagaaaaagacagctggactgtcaatgatataca

SEQ ID NO: 76682 - DNA, 80 bp, synthetic construct
  source 1..80: mol_type = other DNA
gaaattagtgggaaaactaaattgggcaagtcagatttatccaggaattaaagtaaagcacctgtgtaaactcctcaggg

SEQ ID NO: 76683 - DNA, 80 bp, synthetic construct
  source 1..80: mol_type = other DNA
gagccaaaactctaacagatataataacactgactgaggaagcagaattagaattggcagaaaacagggaaattctaaaa

SEQ ID NO: 76684 - DNA, 80 bp, synthetic construct
  source 1..80: mol_type = other DNA
gaacctgtacatggagtatattatgacccaacaaaagacttagttgcagaaatacagaaacaaggacaagaccagtggac

SEQ ID NO: 76685 - DNA, 80 bp, synthetic construct
  source 1..80: mol_type = other DNA
atatcaaatttatcaagagccatttaagaatctaaaaacaggaaaatatgcaaaaaggaggtctgctcacactaatgatg

SEQ ID NO: 76686 - DNA, 80 bp, synthetic construct
  source 1..80: mol_type = other DNA
gaaattttcctcagaacagactggaaccaacagccccaccagcagagagcttggggatgggggaagagataacctcctct

SEQ ID NO: 76687 - DNA, 80 bp, synthetic construct
  source 1..80: mol_type = other DNA
ccgaggcaggaacaaccgagggacaagggactctatcctcctttaacttccctcaaatcactctttggcaacgaccctta

SEQ ID NO: 76688 - DNA, 80 bp, synthetic construct
  source 1..80: mol_type = other DNA
gttgcagtaaaaatagggggacagttaatagaagctctattagacacaggagcagatgatacagtattagaagaaattga

SEQ ID NO: 76689 - DNA, 80 bp, synthetic construct
  source 1..80: mol_type = other DNA
actcagattggttgtactttaaattttccaattagtcctattgaaaccgtgccagtaaaattaaagccaggaatggatgg

SEQ ID NO: 76690 - DNA, 80 bp, synthetic construct
  source 1..80: mol_type = other DNA
gggattaaaaaagaacaaatcagtaacagtattagatgtaggagatgcatatttttcagttcccttagatgaagacttta

SEQ ID NO: 76691 - DNA, 80 bp, synthetic construct
  source 1..80: mol_type = other DNA
gaaagtatacagcatttactatacctagtgtaaataatgaaacaccagggattagatatcaatacaatgtacttccacag

SEQ ID NO: 76692 - DNA, 80 bp, synthetic construct
  source 1..80: mol_type = other DNA
tctgtacataggatctgacttagaaatagggcagcatagagcaaaaatagaggagttgagagcacatctattggaatggg

SEQ ID NO: 76693 - DNA, 80 bp, synthetic construct
  source 1..80: mol_type = other DNA
acagtccaacctatacagcggccagaaaaggatagctggactgtcaatgatatacagaaattagtgggaaaactaaattg

SEQ ID NO: 76694 - DNA, 80 bp, synthetic construct
  source 1..80: mol_type = other DNA
ggcaagtcagatttatccagggattaaagtaaagaacttgtgtagactcctcaggggagcaaaagcactaacagacatag

SEQ ID NO: 76695 - DNA, 80 bp, synthetic construct
  source 1..80: mol_type = other DNA
taccactaactgcagaagcagaactagaactggcagagaacagggaaattctaaaagaacctgtacatggagtatattat

SEQ ID NO: 76696 - DNA, 80 bp, synthetic construct
  source 1..80: mol_type = other DNA
taaaaatctaaaaacaggaaaatatgcaaaaaagaggtcagcccacactaatgatgtaaaacagttaacagaggtagtgc

SEQ ID NO: 76697 - DNA, 80 bp, synthetic construct
  source 1..80: mol_type = other DNA
cagaaccaacagccccaccagcagagatctttggaatgggggaggagataacctcctctccgaagcaggaaccgggggac

SEQ ID NO: 76698 - DNA, 80 bp, synthetic construct
  source 1..80: mol_type = other DNA
aaaaggtggccatggaaagcatagtaatatggggaaagacccctagatttagactacccatacagaaagaaacatgggaa

SEQ ID NO: 76699 - DNA, 80 bp, synthetic construct
  source 1..80: mol_type = other DNA
aagggactatatcctcctttaacctccctcaaatcactctttggcaacgacccttagtcacagtaagaatagggggacgg

SEQ ID NO: 76700 - DNA, 80 bp, synthetic construct
  source 1..80: mol_type = other DNA
ctcaataaaagaactcaagacttctgggaggtccaattaggaatacctcatccctcggggttaaaaaggaaaaaatcagt

SEQ ID NO: 76701 - DNA, 80 bp, synthetic construct
  source 1..80: mol_type = other DNA
aacagtactagatgtgggagatgcatacttttcagttcccttacatgaggactttagaaagtacactgcattcactatac

SEQ ID NO: 76702 - DNA, 80 bp, synthetic construct
  source 1..80: mol_type = other DNA
tttcaggcaagcatgacaaaaatcttagagccctttagagcaaaaaatccagagatggtgattgtacaatatgtggatga

SEQ ID NO: 76703 - DNA, 80 bp, synthetic construct
  source 1..80: mol_type = other DNA
tctaccagtatgtggatgatttacttgtaggatctgacttagagatagggcagcacagagcaaaagtagaggagttgaga

SEQ ID NO: 76704 - DNA, 80 bp, synthetic construct
  source 1..80: mol_type = other DNA
tagtgggaaagctaaattgggcgagtcaaatttatccaggaattaaggtaagacaactgtgtaaacttatcaggggagcc

SEQ ID NO: 76705 - DNA, 80 bp, synthetic construct
  source 1..80: mol_type = other DNA
tgtacatggagtctattatgacccagcaaaagacttaatagcagaaatacagaaacaagggcaagaccagtggacttatc

SEQ ID NO: 76706 - DNA, 80 bp, synthetic construct
  source 1..80: mol_type = other DNA
aattttccccagagcagaccggagccatcagccccaccagcagagagcctggggatgggggaagaggtaaccccccctcc

SEQ ID NO: 76707 - DNA, 80 bp, synthetic construct
  source 1..80: mol_type = other DNA
agtaagaatagggggacagccaagagaagccttattagatacaggagcagatgatacagtatttgaagaaatagatttac

SEQ ID NO: 76708 - DNA, 80 bp, synthetic construct
  source 1..80: mol_type = other DNA
tccagaaatagtgatttgccaatacatggatgatttatatgtaggatctgacttagaaatagggcagcatagagcaaaaa

SEQ ID NO: 76709 - DNA, 80 bp, synthetic construct
  source 1..80: mol_type = other DNA
tagaggagttaagagaacatctactgaaatggggatttaccacaccagataaaaaacatcagaaagaacctccattcctt

SEQ ID NO: 76710 - DNA, 80 bp, synthetic construct
  source 1..80: mol_type = other DNA
tggatgggatatgagctccatcctgacaaatggacggtacagcctatacagctgccaaacaaggaaagctggactgtcaa

SEQ ID NO: 76711 - DNA, 80 bp, synthetic construct
  source 1..80: mol_type = other DNA
ttcttagggggaccaaagcactaacagacataatacccctgacagcagaagcagaaatggagttggaagagaacagggaa

SEQ ID NO: 76712 - DNA, 80 bp, synthetic construct
  source 1..80: mol_type = other DNA
attctaaaagaacctgtacatggggtctattatgacccatcaaaagaattaatagcagaagtacagaagcaagggctaga

SEQ ID NO: 76713 - DNA, 80 bp, synthetic construct
  source 1..80: mol_type = other DNA
ccaatggacatatcaaatttatcaagagccatacaagaatctgaaaacaggaaaatatgcaaagaaggggtctgcacaca

SEQ ID NO: 76714 - DNA, 80 bp, synthetic construct
  source 1..80: mol_type = other DNA
actttctccagaacaggccagagccaacagccccgccattagagagcttcggattcggggaggagatagccccttccccg

SEQ ID NO: 76715 - DNA, 80 bp, synthetic construct
  source 1..80: mol_type = other DNA
ccaatgatgtaaaacaattaacagaagcagtgcaaaaaatagccacagagagcatagtaatatggggaaaaattcctaaa

SEQ ID NO: 76716 - DNA, 80 bp, synthetic construct
  source 1..80: mol_type = other DNA
ctgattgggagtttatcaatacccctcctctagtaaaattgtggtatcagctagaaacagaacccatactaggagcagaa

SEQ ID NO: 76717 - DNA, 80 bp, synthetic construct
  source 1..80: mol_type = other DNA
tttaaactacccatacgaaaagaaacatgggaagtatggtggacagagtattggcaggccacctggattcctgattggga

SEQ ID NO: 76718 - DNA, 80 bp, synthetic construct
  source 1..80: mol_type = other DNA
aaataactttagaaattagtggaagaaaggctacagggacagtattagtaggacctacacctatcaacataattgggaga

SEQ ID NO: 76719 - DNA, 80 bp, synthetic construct
  source 1..80: mol_type = other DNA
accacaaatgaaagaatgcacagagggacgggctaattttttagggaaaatctggccttccaacaaggggaggccaggga

SEQ ID NO: 76720 - DNA, 80 bp, synthetic construct
  source 1..80: mol_type = other DNA
atcagacttagaaatagggcagcatagggcaaaagtagaagagttaagagaacatctatggagatggggatttaccacac

SEQ ID NO: 76721 - DNA, 80 bp, synthetic construct
  source 1..80: mol_type = other DNA
cccctccagcagagaactttggaatggaggaagagataacctcctctcagaagcaggaacagaaggacaagggactatac

SEQ ID NO: 76722 - DNA, 80 bp, synthetic construct
  source 1..80: mol_type = other DNA
acactccagtctttgccataaagaaaaagaatagtacaaaatggagaaaattagtagatttcagagaacttaataagaga

SEQ ID NO: 76723 - DNA, 80 bp, synthetic construct
  source 1..80: mol_type = other DNA
tgtgggggatgcatatttttcagttcccttgcatgaagaattcagaaaatatactgcattcactatacctagtacaaata

SEQ ID NO: 76724 - DNA, 80 bp, synthetic construct
  source 1..80: mol_type = other DNA
attgggcaagtcagatttatgcagggattaaagtaaagcagttatgtagactcctcagaggagcaaaagcactgacagac

SEQ ID NO: 76725 - DNA, 80 bp, synthetic construct
  source 1..80: mol_type = other DNA
ccgacagccccacctgcagagagcttcgggttcggagaggaggtaaccccctcggtgaccccctccccgaagcaggagcc

SEQ ID NO: 76726 - DNA, 80 bp, synthetic construct
  source 1..80: mol_type = other DNA
atccctgaatgggaatttgtcaatacccctcccctagtaaaactatggtatcagttagaaacagagcccatagaagagca

SEQ ID NO: 76727 - DNA, 80 bp, synthetic construct
  source 1..80: mol_type = other DNA
caaagatgatagggggaattggaggttttatcaaagtaaaacagtatgatcagatacttatggaaatttgtgggaagaaa

SEQ ID NO: 76728 - DNA, 80 bp, synthetic construct
  source 1..80: mol_type = other DNA
atgatttgtatgtaggatctgacctagaaattgggcaacatagggcaaaagtagaggagttaagagagcatctattgaag

SEQ ID NO: 76729 - DNA, 80 bp, synthetic construct
  source 1..80: mol_type = other DNA
caatgtagcatgacaaaaatcttagagccctttagaagaaaaaatccagaactggtgatctgccaatacatagatgattt

SEQ ID NO: 76730 - DNA, 80 bp, synthetic construct
  source 1..80: mol_type = other DNA
atatgtaggctctgacttagaaatagggcaacatagagcaaaaatagaggagttaagaaaccacctattggaatggggat

SEQ ID NO: 76731 - DNA, 80 bp, synthetic construct
  source 1..80: mol_type = other DNA
gtgcaacctgtacaactgccagacaaggagagctggactgtcaatgacatacaaaaattggtgggaaaattaaattgggc

SEQ ID NO: 76732 - DNA, 80 bp, synthetic construct
  source 1..80: mol_type = other DNA
aggggcaaggccagtggacatatcaaatatatcaggagccacataagaacctgaaaacagggaagtatgcaagaatgagg

SEQ ID NO: 76733 - DNA, 80 bp, synthetic construct
  source 1..80: mol_type = other DNA
cagctgtaccccttagcttccctcaaatcactctttggcaacgacccctagtcaaagtaagaataggggaacagctagta

SEQ ID NO: 76734 - DNA, 80 bp, synthetic construct
  source 1..80: mol_type = other DNA
atccatacaatactccagtatttgctataaagaaaaaagatagtactaaatggagaaaattagtagatttcagggagctt

SEQ ID NO: 76735 - DNA, 80 bp, synthetic construct
  source 1..80: mol_type = other DNA
agtgttggatgtgggggatgcatatttttcagtccccctacatgaagactttagaaagtacactgcatttactataccca

SEQ ID NO: 76736 - DNA, 80 bp, synthetic construct
  source 1..80: mol_type = other DNA
caacgtgctaccacagggatggaaaggatcaccagcaatatttcaggcaagcatgacaagaatcttagagccctttagaa

SEQ ID NO: 76737 - DNA, 80 bp, synthetic construct
  source 1..80: mol_type = other DNA
cgagaaatccagagatagtgatctaccaatatgtggatgatttatatgtaggatctgacttagagatagagcagcacagg

SEQ ID NO: 76738 - DNA, 80 bp, synthetic construct
  source 1..80: mol_type = other DNA
gcaaaaatagaggagctgagagaacatctactgaaatggggatttactacaccagacaaaaaacatcagaaggaacctcc

SEQ ID NO: 76739 - DNA, 80 bp, synthetic construct
  source 1..80: mol_type = other DNA
atttctttggatgggatatgaactccatcctgacaaatggacagtccagcctatacaactgccagaaaaggacagctgga

SEQ ID NO: 76740 - DNA, 80 bp, synthetic construct
  source 1..80: mol_type = other DNA
ctgttaatgatatacagaaattagtgggaaaactaaattgggcaagtcagatttatgcaggaattcaagtgaggcaacta

SEQ ID NO: 76741 - DNA, 80 bp, synthetic construct
  source 1..80: mol_type = other DNA
tgtaaactcctcaggggagctaaagcactaacagatatagtgacaatgactgaggaagcagaattagaattggcagagaa

SEQ ID NO: 76742 - DNA, 80 bp, synthetic construct
  source 1..80: mol_type = other DNA
cagggaaattttaaaagaacctgtacatggagtatattatgatccaacaaaagacttagtagcagaaatacagaagcaag

SEQ ID NO: 76743 - DNA, 80 bp, synthetic construct
  source 1..80: mol_type = other DNA
aggggaggccagggaattttcctcagagcagaccagagccgacagccccaccagcagagagcttggggatggaggaagag

SEQ ID NO: 76744 - DNA, 80 bp, synthetic construct
  source 1..80: mol_type = other DNA
gcccacactaatgatgtaaaacaattaatagaagtagtgcaaaaagcagctgtagaaagcattgtcatatggggaaagac

SEQ ID NO: 76745 - DNA, 80 bp, synthetic construct
  source 1..80: mol_type = other DNA
ccctaaatttagactacccatacaaaaagaaacatgggaagcatggtggatggagtattggcaggctacctggattcctg

SEQ ID NO: 76746 - DNA, 80 bp, synthetic construct
  source 1..80: mol_type = other DNA
aaaacctccctctctgaagcaggaacaggaacagagggacaagggactatatcctcccttagcttccctcaaatcactct

SEQ ID NO: 76747 - DNA, 80 bp, synthetic construct
  source 1..80: mol_type = other DNA
ttggcaacgacccttagtctcagtaaaattagggggacagctaatagaagccctattagacacaggagcagatgatacag

SEQ ID NO: 76748 - DNA, 80 bp, synthetic construct
  source 1..80: mol_type = other DNA
tattagaagaaataaatttaccaggaaaatggaagccaaaaatgatagggggaattggaggttttatcaaggtaaggcaa

SEQ ID NO: 76749 - DNA, 80 bp, synthetic construct
  source 1..80: mol_type = other DNA
tatgatcagataactatggaaatttgtggaaaaagggctataggtacagtattagtaggacctacccctgtcaacataat

SEQ ID NO: 76750 - DNA, 80 bp, synthetic construct
  source 1..80: mol_type = other DNA
tggacgaaatatgttgactcagattggttgtactttaaattttccaattagtcctattgaaactgtaccagtaaaattaa

SEQ ID NO: 76751 - DNA, 80 bp, synthetic construct
  source 1..80: mol_type = other DNA
agccaggaatggatggcccaaaggttaagcaatggccattgacagaagaaaaaataaaagcattaacagaaatttgtaca

SEQ ID NO: 76752 - DNA, 80 bp, synthetic construct
  source 1..80: mol_type = other DNA
gatatggaaaaggaaggaaaaatctcaaaaattgggcctgaaaatccatacaatactccaatatttgctataaagaaaaa

SEQ ID NO: 76753 - DNA, 80 bp, synthetic construct
  source 1..80: mol_type = other DNA
agatagtactaaatggagaaaattagtagatttcagagaactcaataagagaactcaagacttctgggaggtccaattag

SEQ ID NO: 76754 - DNA, 80 bp, synthetic construct
  source 1..80: mol_type = other DNA
gaatacctcatccaggaggattaaaaaagaacaaatcagtaacagtactagatgtgggggatgcttacttttcagttcct

SEQ ID NO: 76755 - DNA, 80 bp, synthetic construct
  source 1..80: mol_type = other DNA
ttagataaagactttagaaaatatactgcattcactatacctagtttaaataatgaaacaccagggattagatatcagta

SEQ ID NO: 76756 - DNA, 80 bp, synthetic construct
  source 1..80: mol_type = other DNA
taaagcaactgtgtaaactcctcagaggagccaaagcactaacagatgtaataccactgactgaggaagcagaattagaa

SEQ ID NO: 76757 - DNA, 80 bp, synthetic construct
  source 1..80: mol_type = other DNA
aggggaggccaggaaattttccccagagcagaccggaaccatcagccccgccagcagagctctttgggatgagggaagag

SEQ ID NO: 76758 - DNA, 80 bp, synthetic construct
  source 1..80: mol_type = other DNA
atagccacccctcagaagcaggaacagggggagaagcaggaacagggggacaagggactatatcctcccttaacttccct

SEQ ID NO: 76759 - DNA, 80 bp, synthetic construct
  source 1..80: mol_type = other DNA
acaccagggattagatatcagtacaatgtacttccacagggatggaaaggatcaccagcaatatttcaggcaagcatgac

SEQ ID NO: 76760 - DNA, 80 bp, synthetic construct
  source 1..80: mol_type = other DNA
aaaaatcttagagccctttaggataaaaaatccagaattggtgatctgccaatatgtagatgatttatatgtaggatctg

SEQ ID NO: 76761 - DNA, 80 bp, synthetic construct
  source 1..80: mol_type = other DNA
cagggatcaaagtaaaacaattatgtaaactcctcagaggagcaaaagcactaacagacatagtaccgctaactgtagaa

SEQ ID NO: 76762 - DNA, 80 bp, synthetic construct
  source 1..80: mol_type = other DNA
gcagaattagaattagcagaaaatagggaaattctaaaagagccagtgcatggggtatattatgacccaacaaaagactt

SEQ ID NO: 76763 - DNA, 80 bp, synthetic construct
  source 1..80: mol_type = other DNA
aggggaggccgggaaacttcctccaaaacaggccagagccaacagccccaccagcagagagcttcagagagccaacagcc

SEQ ID NO: 76764 - DNA, 80 bp, synthetic construct
  source 1..80: mol_type = other DNA
gcaaatatgcaaaaaggagatctgcccacactaatgatgtaaaacaattaacagaagcagtgcaaaagatagccagggaa

SEQ ID NO: 76765 - DNA, 80 bp, synthetic construct
  source 1..80: mol_type = other DNA
atacccctcctctagtaaaattatggtatcagttagaaaaggaccccataataggagcagaaacgttctatgtagatggg

SEQ ID NO: 76766 - DNA, 80 bp, synthetic construct
  source 1..80: mol_type = other DNA
ttggcaagccacctggatccctgaatgggaatttgtcaatacccctcctctagtaaaattatggtatcagttagaaaagg

SEQ ID NO: 76767 - DNA, 80 bp, synthetic construct
  source 1..80: mol_type = other DNA
ccaccagcagagagcttcgggttcggggaagagatagccccctcccagaagcaggaggagaaggaaaaggggctatatcc

SEQ ID NO: 76768 - DNA, 80 bp, synthetic construct
  source 1..80: mol_type = other DNA
cttagcttccctcaaatcactctttggcaacgacccctagtcacagtaaaagtagggggacagctaatagaagccctatt

SEQ ID NO: 76769 - DNA, 80 bp, synthetic construct
  source 1..80: mol_type = other DNA
aagcattaacagacatttgtacagagatggaaaaggagggaaaaatttcaaaaattgggcctgaaaacccatacaatact

SEQ ID NO: 76770 - DNA, 80 bp, synthetic construct
  source 1..80: mol_type = other DNA
ccaatatttgctataaaaaagaaagatagtactaaatggagaaaactagtagatttcagagaactcaataaaagaaccca

SEQ ID NO: 76771 - DNA, 80 bp, synthetic construct
  source 1..80: mol_type = other DNA
agacttttgggaagttcaattaggaataccacatcctgctgggttgaagaagaacaaatcagtaacagtactagatgtgg

SEQ ID NO: 76772 - DNA, 80 bp, synthetic construct
  source 1..80: mol_type = other DNA
agaaagaacccccatttctttggatggggtatgaactccatcctgacaaatggacaatgcagcctatacaattgccagag

SEQ ID NO: 76773 - DNA, 80 bp, synthetic construct
  source 1..80: mol_type = other DNA
agtaaagcaattatgtaaactccttaggggagccaaagcgctaacagacataataccactaactgaagaagcagaattag

SEQ ID NO: 76774 - DNA, 80 bp, synthetic construct
  source 1..80: mol_type = other DNA
aattggcagagaacagggagattctaaaagaaccagtgcatggggtatattatgacccatcaaaagacttaatagcagaa

SEQ ID NO: 76775 - DNA, 80 bp, synthetic construct
  source 1..80: mol_type = other DNA
atacagaagcaagggcaaggccaatggacatatcaaatatatcaagagcaacataagaatctaaaaacaggaaagtatgc

SEQ ID NO: 76776 - DNA, 80 bp, synthetic construct
  source 1..80: mol_type = other DNA
aagagaaaagtctgcccacactaatgatgtaaagcaattaacagaggcagtgcaaaaaatagccttagaatgcatagtga

SEQ ID NO: 76777 - DNA, 80 bp, synthetic construct
  source 1..80: mol_type = other DNA
tatggggaaagacccctaaatttagactgcccatacaaaaagaaacatgggaaacatggtggacagactattggcaggcc

SEQ ID NO: 76778 - DNA, 80 bp, synthetic construct
  source 1..80: mol_type = other DNA
gggaaggccagggaatttcccccagagcagaccagagccaacagccccaccagcagagagcttcgggttcggagaggaga

SEQ ID NO: 76779 - DNA, 80 bp, synthetic construct
  source 1..80: mol_type = other DNA
acctggattcctgagtgggagtttgttaataccccccctctagtaaaattatggtaccagttagaaaaggaacccatagc

SEQ ID NO: 76780 - DNA, 80 bp, synthetic construct
  source 1..80: mol_type = other DNA
ctcaaatcactctttggcagcgacccctagttaacataaaggtagagggacagctaatagaagctctattagacacagga

SEQ ID NO: 76781 - DNA, 80 bp, synthetic construct
  source 1..80: mol_type = other DNA
caaagtaaaacaatatgatcagatacagatagaaatttgtggaaaaagggctataggtacagtattaataggacctacac

SEQ ID NO: 76782 - DNA, 80 bp, synthetic construct
  source 1..80: mol_type = other DNA
ctgtcaacataattggacggaatatgttgactcagattggctgtactttaaatttccccattagtcctattgaaactgta

SEQ ID NO: 76783 - DNA, 80 bp, synthetic construct
  source 1..80: mol_type = other DNA
ccagtaaaattgaagccaggaatggatggcccaaaagttaaacagtggccattgacagaagagaaaataaaagcattaac

SEQ ID NO: 76784 - DNA, 80 bp, synthetic construct
  source 1..80: mol_type = other DNA
agaaatttgtaatgacatggaaaaggaaggaaaaatttcaaaaattgggcctgacaacccatacaatactccagtatttg

SEQ ID NO: 76785 - DNA, 80 bp, synthetic construct
  source 1..80: mol_type = other DNA
tttttcagtccctttagacccggagtttagaaagtacactgcatttactatacccagtataaacaatgaaacaccaggga

SEQ ID NO: 76786 - DNA, 80 bp, synthetic construct
  source 1..80: mol_type = other DNA
gaaccctttagaacaaagaatccagaaatagtcatatgccaatacgtggatgatttgtatgtagggtctgatttagaaat

SEQ ID NO: 76787 - DNA, 80 bp, synthetic construct
  source 1..80: mol_type = other DNA
aggcaagcatgacaaaaatcctagagccctttagagcaagaaatccagagatagtaatctaccagtatatggatgattta

SEQ ID NO: 76788 - DNA, 80 bp, synthetic construct
  source 1..80: mol_type = other DNA
cttagaaatagggcagcatagagcaaaaatagaggaattaagagagcatctattgaaatggggatttaccacaccagata

SEQ ID NO: 76789 - DNA, 80 bp, synthetic construct
  source 1..80: mol_type = other DNA
aggggttaaggtaaagcaactatgtaaactccttaggggggccaaagcactaacagacatagtacccctgacgccagaag

SEQ ID NO: 76790 - DNA, 80 bp, synthetic construct
  source 1..80: mol_type = other DNA
gggccaaagcactaacagacatagtacccctgacgccagaagcagaaatggagttagcagagaatagggaaattctaaga

SEQ ID NO: 76791 - DNA, 80 bp, synthetic construct
  source 1..80: mol_type = other DNA
cagaaatggagttagcagagaatagggaaattctaagagaacctgtacatggagtctattatgacccatcaaaagaatta

SEQ ID NO: 76792 - DNA, 80 bp, synthetic construct
  source 1..80: mol_type = other DNA
atagcagaagtacagaaacaagggctagaccaatggacctaccaaatttatcaagagccatacaaaaatctaaagacagg

SEQ ID NO: 76793 - DNA, 80 bp, synthetic construct
  source 1..80: mol_type = other DNA
ccatagtaatatggggaaaggttcctaaatttaaactacctataagaaaagaaacatgggaagtatggtggacagagtat

SEQ ID NO: 76794 - DNA, 80 bp, synthetic construct
  source 1..80: mol_type = other DNA
ccccaccagcagagagcctcagattcggagaggagatagccccctccccgaagcaggaacagaaggaggagctatatccc

SEQ ID NO: 76795 - DNA, 80 bp, synthetic construct
  source 1..80: mol_type = other DNA
ggagaattttttagggaaaatttggccttccaacaaggggaggccagggaactttcttcagaacaggccagagccaacag

SEQ ID NO: 76796 - DNA, 80 bp, synthetic construct
  source 1..80: mol_type = other DNA
aaaatcttagagccctttagaacaaaaaatccagaaatagtgatctgccagtacgtggatgatttatatgtaggatctga

SEQ ID NO: 76797 - DNA, 80 bp, synthetic construct
  source 1..80: mol_type = other DNA
aaattttccccagagcagaccggaaccatcagccccaccagcagagctcttagggatgggggaagagatagcctcatctc

SEQ ID NO: 76798 - DNA, 80 bp, synthetic construct
  source 1..80: mol_type = other DNA
gagccctttagaacaaagaatccagagatagtgatctgccaatatgtggatgatttgtatgtagcatctgacttagagat

SEQ ID NO: 76799 - DNA, 80 bp, synthetic construct
  source 1..80: mol_type = other DNA
agggcagcatagagcaaaaataaaggagttaagagaacatctactgaaatggggatttaccacaccagaccaaaagtatc

SEQ ID NO: 76800 - DNA, 80 bp, synthetic construct
  source 1..80: mol_type = other DNA
agtaaagcaactgtgtagacttctcaggggagccaaagcattaacagacatagtaacactaactgaggaagcagaattag

SEQ ID NO: 76801 - DNA, 80 bp, synthetic construct
  source 1..80: mol_type = other DNA
aggaaggccagggaattttcctcagagcagaccagaaccaacagccccaccagcagaaccaacagccccaccagcagaga

SEQ ID NO: 76802 - DNA, 80 bp, synthetic construct
  source 1..80: mol_type = other DNA
aaagaagaggtctgcccacactaatgatgtaagacaattaacagaggtagtgcaaaaagtgtctgtagaaagcatagtaa

SEQ ID NO: 76803 - DNA, 80 bp, synthetic construct
  source 1..80: mol_type = other DNA
aatacccctcctctagtaaaattatggtaccagttagagaaagatcccataacaggagcagaaactttttatgtagatgg

SEQ ID NO: 76804 - DNA, 80 bp, synthetic construct
  source 1..80: mol_type = other DNA
gctttgggaggggggaagagacagcctcccctccgaagcaggaatcgagggacaagggactatatcctcccttaacttcc

SEQ ID NO: 76805 - DNA, 80 bp, synthetic construct
  source 1..80: mol_type = other DNA
ctcaaatcactctttggcaacgaccagtagtcacagtaagagtagggggtcagccaatagaagccctattagacacaggg

SEQ ID NO: 76806 - DNA, 80 bp, synthetic construct
  source 1..80: mol_type = other DNA
caaagtaagacaatatgatcagatacctctagaaatttgtgggaaaagggccataggaacagtattagtaggacctacac

SEQ ID NO: 76807 - DNA, 80 bp, synthetic construct
  source 1..80: mol_type = other DNA
ccataaagaaaaaaggtagtgatagatggagaaaattagtagacttcagagaactcaataaaagaacacaagacttttgg

SEQ ID NO: 76808 - DNA, 80 bp, synthetic construct
  source 1..80: mol_type = other DNA
tttttcagttcccttggatccagactttagaaagtatactgcattcacaatacctagtgtaaataatgagacaccaggga

SEQ ID NO: 76809 - DNA, 80 bp, synthetic construct
  source 1..80: mol_type = other DNA
tatttcaggcaagcatgacaaaaatcttagagccttttagagcacaaaatccagagatagtaatctgtcaatatatggat

SEQ ID NO: 76810 - DNA, 80 bp, synthetic construct
  source 1..80: mol_type = other DNA
gggacttaccacaccagacaaaaagcatcagaaagaacctccatttcgttggatgggatatgaacttcatcctgacaaat

SEQ ID NO: 76811 - DNA, 80 bp, synthetic construct
  source 1..80: mol_type = other DNA
actggaaccaacagccccaccagcagagagctttggaatgggggaagagataacctcccctccgaagcaggaacagaagg

SEQ ID NO: 76812 - DNA, 80 bp, synthetic construct
  source 1..80: mol_type = other DNA
tttaaaaatctcaaaacagggaaatatgcaaaaaaggggtccgcccacactaatgatgtaaaacaattaacaggggcagt

SEQ ID NO: 76813 - DNA, 80 bp, synthetic construct
  source 1..80: mol_type = other DNA
acaagggattatatcctcctttggattccctcaaatcactctttggcaacgacccatagtcacggtgaaaatagggggac

SEQ ID NO: 76814 - DNA, 80 bp, synthetic construct
  source 1..80: mol_type = other DNA
agccaatagaagctctactagacacaggagcagatgatacagtattagaagaaataaatttaccagggaaatggaaacca

SEQ ID NO: 76815 - DNA, 80 bp, synthetic construct
  source 1..80: mol_type = other DNA
cagggaattttcctcagagcagaccggaaccaacagccccaccagcagaaaacttgatgggggaggagataacctcctct

SEQ ID NO: 76816 - DNA, 80 bp, synthetic construct
  source 1..80: mol_type = other DNA
aggacaccaaatgaaggactgcaccactgaaagacaggctaattttttagggaaactctggccttccagcaaagggaggc

SEQ ID NO: 76817 - DNA, 80 bp, synthetic construct
  source 1..80: mol_type = other DNA
aaaggatcaccagcagtatttcaggcaagcatgacaaaaatcttagagccctttagaacaaacaatccagagatagtgat

SEQ ID NO: 76818 - DNA, 80 bp, synthetic construct
  source 1..80: mol_type = other DNA
cccctcctctagtaaaactatggtatcagttagagaaagaccccatagcaggagcagaaactttctatgtagatggggca

SEQ ID NO: 76819 - DNA, 80 bp, synthetic construct
  source 1..80: mol_type = other DNA
aattaacagaggtagtgcaaaaagtggctacagaaagtatagtgatatggggaaaaactcctaaatttaaactacccata

SEQ ID NO: 76820 - DNA, 80 bp, synthetic construct
  source 1..80: mol_type = other DNA
aaaaacatcagaaagaacctcccttcctttggatgggctatgaactccatcctgataaatggactgtacagcctatagtg

SEQ ID NO: 76821 - DNA, 80 bp, synthetic construct
  source 1..80: mol_type = other DNA
ttgccagaaaaagacagctggactgtcaatgacatacagaagctagtgggaaaattgaactgggcaagtcagatttatcc

SEQ ID NO: 76822 - DNA, 80 bp, synthetic construct
  source 1..80: mol_type = other DNA
atggaaagtgcaaatgcctccacgtctgcaacgaccatagaccagttgtgcaagacgtttaatctatctatgcatacgtt

SEQ ID NO: 76823 - DNA, 80 bp, synthetic construct
  source 1..80: mol_type = other DNA
gtgaaataagtccacgattggacgccattaaacttacaagacagccaaaaaaggtaaagcgacggctgtttcaaaccagg

SEQ ID NO: 76824 - DNA, 80 bp, synthetic construct
  source 1..80: mol_type = other DNA
gaactaacggacagtggatatggctattctgaagtggaagctggaacgggaacgcaggtagagaaacatggcgtaccgga

SEQ ID NO: 76825 - DNA, 80 bp, synthetic construct
  source 1..80: mol_type = other DNA
aaatggtggagatggtcaggaaaaggacacaggaagggacatagagggggaggaacatacagaggcggaagcgcccacaa

SEQ ID NO: 76826 - DNA, 80 bp, synthetic construct
  source 1..80: mol_type = other DNA
acagtgtacgggagcatgcaggcacagcaggaatattggaattgctaaaatgtaaagatttacgggcagcattacttggt

SEQ ID NO: 76827 - DNA, 80 bp, synthetic construct
  source 1..80: mol_type = other DNA
aagtttaaagaatgctttgggctgtcttttatagatttaattaggccatttaaaagtgataaaacaacatgtgcagattg

SEQ ID NO: 76828 - DNA, 80 bp, synthetic construct
  source 1..80: mol_type = other DNA
ggtggtagcaggatttggtatacatcatagcatatcagaggcatttcaaaaattaattgagccattaagtttatatgcac

SEQ ID NO: 76829 - DNA, 80 bp, synthetic construct
  source 1..80: mol_type = other DNA
atatacaatggctaacaaatgcatggggaatggtattgttagtattattaagatttaaagtaaataaaagtagaagtacc

SEQ ID NO: 76830 - DNA, 80 bp, synthetic construct
  source 1..80: mol_type = other DNA
tgtttcgaggcggctatccatatgcagcctgcgcgtgctgcctagaatttcatggaaaaattaaccaatatagacacttt

SEQ ID NO: 76831 - DNA, 80 bp, synthetic construct
  source 1..80: mol_type = other DNA
gttgcacgtacacttgcaacgctattaaatatacctgaaaatcaaatgttaatagagccaccaaaaatacaaagtggtgt

SEQ ID NO: 76832 - DNA, 80 bp, synthetic construct
  source 1..80: mol_type = other DNA
tgcagccctgtattggtttcgtacaggtatatcaaatgccagtacagttataggggaagcaccagaatggataacacgcc

SEQ ID NO: 76833 - DNA, 80 bp, synthetic construct
  source 1..80: mol_type = other DNA
aaactgttattgaacatgggttggcagacagtcagtttaaattaacagaaatggtgcagtgggcatatgataatgacata

SEQ ID NO: 76834 - DNA, 80 bp, synthetic construct
  source 1..80: mol_type = other DNA
cacaaaggggagattttgattctaatgcacgagcatttttaaatagcaatatgcaggcaaaatatgtgaaagattgtgca

SEQ ID NO: 76835 - DNA, 80 bp, synthetic construct
  source 1..80: mol_type = other DNA
actatgtgtagacattataaacatgcagaaatgaggaagatgtctataaaacaatggataaaacataggggttctaaaat

SEQ ID NO: 76836 - DNA, 80 bp, synthetic construct
  source 1..80: mol_type = other DNA
agaaggcacaggaaattggaaaccaattgtacaattcctacgacatcaaaatatagaatttattccatttttaagtaaat

SEQ ID NO: 76837 - DNA, 80 bp, synthetic construct
  source 1..80: mol_type = other DNA
ttaaattatggctgcacggtacgccaaaaaaaaactgcatagccatagtaggccctccagatactgggaaatcgtacttt

SEQ ID NO: 76838 - DNA, 80 bp, synthetic construct
  source 1..80: mol_type = other DNA
tgtatgagtttaataagctttttaggaggtacagttattagtcatgtaaattccagcagccatttttggctgcaaccgtt

SEQ ID NO: 76839 - DNA, 80 bp, synthetic construct
  source 1..80: mol_type = other DNA
agtagatgctaaggtagcattgctagatgatgcaacacagccatgttggatatatatggatacttatatgagaaatttgt

SEQ ID NO: 76840 - DNA, 80 bp, synthetic construct
  source 1..80: mol_type = other DNA
ataaagcattgacattaattaaatgtccacctctgctagtaacatccaacatagatattaccaaagaagagaaatataag

SEQ ID NO: 76841 - DNA, 80 bp, synthetic construct
  source 1..80: mol_type = other DNA
gattatgctggatatgcaacaactgttgaagaagaaactaaacaagacattttagacgtgctaattcggtgctacctgtg

SEQ ID NO: 76842 - DNA, 80 bp, synthetic construct
  source 1..80: mol_type = other DNA
tatttacatactagagtaacaacatttacatttccaaatccattcccttttgacagaaatgggaatgcagtgtatgaact

SEQ ID NO: 76843 - DNA, 80 bp, synthetic construct
  source 1..80: mol_type = other DNA
gtcaaatgcaaactggaaatgtttttttgaaagactatcgtcaagcctagacattcaggattcagaggacgaggaagatg

SEQ ID NO: 76844 - DNA, 80 bp, synthetic construct
  source 1..80: mol_type = other DNA
gaagcaatagccaagcgtttagatgcgtgccaggaacagttgttagaactttatgaagaaaacagtactgacctaaacaa

SEQ ID NO: 76845 - DNA, 80 bp, synthetic construct
  source 1..80: mol_type = other DNA
acatgtactgcattggaaatgcataagacatgaaagtgtattattatataaagcaaaacaaatgggcctaagccacatag

SEQ ID NO: 76846 - DNA, 80 bp, synthetic construct
  source 1..80: mol_type = other DNA
gaatgcaagtagtgccaccattaaaggtgtccgaagcaaaaggacataatgccattgaaatgcaaatgcatttagaatca

SEQ ID NO: 76847 - DNA, 80 bp, synthetic construct
  source 1..80: mol_type = other DNA
ttattaaagactgagtatagtatggaaccgtggacattacaagaaacaagttatgaaatgtggcaaacaccacctaaacg

SEQ ID NO: 76848 - DNA, 80 bp, synthetic construct
  source 1..80: mol_type = other DNA
ctgttttaaaaaacggggcaaaactgtagaagttaaatttgatggctgtgcaaacaatacaatggattatgtggtatgga

SEQ ID NO: 76849 - DNA, 80 bp, synthetic construct
  source 1..80: mol_type = other DNA
cagatgtgtatgtgcaggacactgactcctgggtaaaggtgcatagtatggtagatgctaagggtatatattacacatgt

SEQ ID NO: 76850 - DNA, 80 bp, synthetic construct
  source 1..80: mol_type = other DNA
ggacaatttaaaacatattatgtaaactttgtaaaagaggcagaaaagtatgggagcaccaaacaatgggaagtatgtta

SEQ ID NO: 76851 - DNA, 80 bp, synthetic construct
  source 1..80: mol_type = other DNA
tggcagcacagttatatgttctcctgcatctgtatctagcactacacaagaagtatccattcctgaatctactacataca

SEQ ID NO: 76852 - DNA, 80 bp, synthetic construct
  source 1..80: mol_type = other DNA
tcacaaaccgctgtgtgaagtagaaaaggtaaaacatatactaaccaaggcacggttcataaagctaaattgtacgtgga

SEQ ID NO: 76853 - DNA, 80 bp, synthetic construct
  source 1..80: mol_type = other DNA
cccccgcacagacctccacccctgtgtcctcaagcacccaggaagacgcagtgcaaacgccgcctagaaaacgagcacga

SEQ ID NO: 76854 - DNA, 80 bp, synthetic construct
  source 1..80: mol_type = other DNA
ggagtccaacagtcaccttgcaacgccttgtgtgtggcccacattggacccgtggacagtggaaaccacaacgtcatcac

SEQ ID NO: 76855 - DNA, 80 bp, synthetic construct
  source 1..80: mol_type = other DNA
taacaatcacgaccagcaccaaagaaggaacaacagtaacagttcagctacgcctatagtgcaatttcaaggtgaatcta

SEQ ID NO: 76856 - DNA, 80 bp, synthetic construct
  source 1..80: mol_type = other DNA
attgtttaaagtgttttagatataggctaaatgacaaacacagacatttatttgatttaatatcatcaacgtggcactgg

SEQ ID NO: 76857 - DNA, 80 bp, synthetic construct
  source 1..80: mol_type = other DNA
gcctcctcaaaggcaccacataaacatgccattgtaactgtaacatatcatagtgaggaacaaaggcaacagtttttaaa

SEQ ID NO: 76858 - DNA, 80 bp, synthetic construct
  source 1..80: mol_type = other DNA
tgttgtaaaaataccccctactattagacacaaactggggtttatgtcaatgcacctattgtaatttgtatatatgtaaa

SEQ ID NO: 76859 - DNA, 80 bp, synthetic construct
  source 1..80: mol_type = other DNA
tgtgtaaatatatggtattggtgtaatacaactgtacatgtatggaagtggtacctgtacaaatagctgcaggaacaacc

SEQ ID NO: 76860 - DNA, 80 bp, synthetic construct
  source 1..80: mol_type = other DNA
agcacattaatactgcctgttataattgcatttgttgtatgttttgttagcatcatacttattgtatggatatctgactt

SEQ ID NO: 76861 - DNA, 80 bp, synthetic construct
  source 1..80: mol_type = other DNA
tattgtgtacacatctgtgctagtactaacactgcttttatacttactattgtggctgctattaacaacccccttgcaat

SEQ ID NO: 76862 - DNA, 80 bp, synthetic construct
  source 1..80: mol_type = other DNA
ttttcctactaacgttacttgtgtgttactgtcccgcttgttatatacaccactacattgtgaacacacagcaatgatgc

SEQ ID NO: 76863 - DNA, 80 bp, synthetic construct
  source 1..80: mol_type = other DNA
agggtcgctgcctacactgctggacaacatgcatggaagacatgttaccctaaaggatattgtattagacctgcaacctc

SEQ ID NO: 76864 - DNA, 80 bp, synthetic construct
  source 1..80: mol_type = other DNA
taacatgtcaatttaatgatggagatacctggctgggtttgtggttgttatgtgcctttattgtaggggtgttggggtta

SEQ ID NO: 76865 - DNA, 80 bp, synthetic construct
  source 1..80: mol_type = other DNA
ttattaatgcactatagagctgtacaaggcgataaacacaccaaatgtaacaagtgtaacaaacacaactgtaatgatga

SEQ ID NO: 76866 - DNA, 80 bp, synthetic construct
  source 1..80: mol_type = other DNA
ttatgtaactatgcattatgatactgctggtgattatatatatatgaattagagtaaaactttttttatatttgtaacag

SEQ ID NO: 76867 - DNA, 80 bp, synthetic construct
  source 1..80: mol_type = other DNA
tgtatgctttgtataccatggcacatagtagggcccgacgacgcaagcgtgcgtcagctacacagctatatcaaacatgt

SEQ ID NO: 76868 - DNA, 80 bp, synthetic construct
  source 1..80: mol_type = other DNA
gttccggcactgggggtcgtactggctatgttcccttaggaacttctgcaaaaccttctattactagtgggcctatggct

SEQ ID NO: 76869 - DNA, 80 bp, synthetic construct
  source 1..80: mol_type = other DNA
cgtcctcctgtggtggtggagcctgtggccccttcggatccatccattgtgtctttaattgaagaatcggcaatcattaa

SEQ ID NO: 76870 - DNA, 80 bp, synthetic construct
  source 1..80: mol_type = other DNA
cgcaggggcgcctgaaattgtgccccctgcacacggtgggtttacaattacatcctctgaaacaactacccctgcaatat

SEQ ID NO: 76871 - DNA, 80 bp, synthetic construct
  source 1..80: mol_type = other DNA
tggatgtatcagttactagtcatactactactagtatatttagaaatcctgtctttacagaaccttctgtaacacaaccc

SEQ ID NO: 76872 - DNA, 80 bp, synthetic construct
  source 1..80: mol_type = other DNA
cagaccctgtagggttacattgctatgagcaattagtagacagctcagaagatgaggtggacgaagtggacggacaagat

SEQ ID NO: 76873 - DNA, 80 bp, synthetic construct
  source 1..80: mol_type = other DNA
caaccacccgtggaggctaatggacatatattaatttctgcacccactataacgtcacaccctatagaggaaattccttt

SEQ ID NO: 76874 - DNA, 80 bp, synthetic construct
  source 1..80: mol_type = other DNA
agatacttttgtgatatcctctagtgatagcggtcctacatccagtacccctgttcctggtactgcacctcggcctcgtg

SEQ ID NO: 76875 - DNA, 80 bp, synthetic construct
  source 1..80: mol_type = other DNA
tgggcctatatagtcgtgcattgcaccaggtgcaggttacagaccctgcatttctttccactcctcaacgcttaattaca

SEQ ID NO: 76876 - DNA, 80 bp, synthetic construct
  source 1..80: mol_type = other DNA
tatgataaccctgtatatgaaggggaggatgttagtgtacaatttagtcatgattctatacacaatgcacctgatgaggc

SEQ ID NO: 76877 - DNA, 80 bp, synthetic construct
  source 1..80: mol_type = other DNA
ttttatggacataattcgtttgcacagacctgctattgcgtcccgacgtggccttgtgcggtacagtcgcattggacaac

SEQ ID NO: 76878 - DNA, 80 bp, synthetic construct
  source 1..80: mol_type = other DNA
gggggtctatgcacactcgcagcggaaagcacataggggcccgcattcattatttttatgatatttcacctattgcacaa

SEQ ID NO: 76879 - DNA, 80 bp, synthetic construct
  source 1..80: mol_type = other DNA
gctgcagaagaaatagaaatgcaccctcttgtggctgcacaggaagatacatttgatatttatgctgaatcttttgaacc

SEQ ID NO: 76880 - DNA, 80 bp, synthetic construct
  source 1..80: mol_type = other DNA
tgacattaaccctacccaacaccctgttacaaatatatcagatacatatttaacttccacacctaatacagttacacaac

SEQ ID NO: 76881 - DNA, 80 bp, synthetic construct
  source 1..80: mol_type = other DNA
cgtggggtaacaccacagttccattgtcaattcctaatgacctgtttttacagtctggccctgatataacttttcctact

SEQ ID NO: 76882 - DNA, 80 bp, synthetic construct
  source 1..80: mol_type = other DNA
gcacctatgggaacaccctttagtcctgtaactcctgctttacctacaggccctgttttcattacaggttctggatttta

SEQ ID NO: 76883 - DNA, 80 bp, synthetic construct
  source 1..80: mol_type = other DNA
tcacaacctttaaaacaacattaccaaatagtgacctgttgctgtggatgtgacagcaacgttcgactggttgtgcagtg

SEQ ID NO: 76884 - DNA, 80 bp, synthetic construct
  source 1..80: mol_type = other DNA
tttgcatcctgcatggtattttgcacgtaaacgccgtaaacgtattcccttatttttttcagatgtggcggcctagcgac

SEQ ID NO: 76885 - DNA, 80 bp, synthetic construct
  source 1..80: mol_type = other DNA
agcacagtatatgtgcctcctcctaaccctgtatccaaagttgttgccacggatgcttatgttactcgcaccaacatatt

SEQ ID NO: 76886 - DNA, 80 bp, synthetic construct
  source 1..80: mol_type = other DNA
ttatcatgccagcagttctagacttcttgcagtgggtcatccttatttttccataaaacgggctaacaaaactgttgtgc

SEQ ID NO: 76887 - DNA, 80 bp, synthetic construct
  source 1..80: mol_type = other DNA
caaaggtgtcaggatatcaatacagggtatttaaggtggtgttaccagatcctaacaaatttgcattgcctgactcgtct

SEQ ID NO: 76888 - DNA, 80 bp, synthetic construct
  source 1..80: mol_type = other DNA
ctttttgatcccacaacacaacgtttggtatgggcatgcacaggcctagaggtgggcaggggacagccattaggtgtgcg

SEQ ID NO: 76889 - DNA, 80 bp, synthetic construct
  source 1..80: mol_type = other DNA
tgtaagtggacatcctttcctaaataaatatgatgatgttgaaaattcagggagtggtggtaaccctggacaggataaca

SEQ ID NO: 76890 - DNA, 80 bp, synthetic construct
  source 1..80: mol_type = other DNA
gggttaatgttggtatggattataaacaaacacaattatgcatggttggatgtgccccccctttgggcgagcattggggt

SEQ ID NO: 76891 - DNA, 80 bp, synthetic construct
  source 1..80: mol_type = other DNA
aaaggtaaacagtgtactaatacacctgtacaggctggtgactgcccgcccttagaacttattaccagtgttatacagga

SEQ ID NO: 76892 - DNA, 80 bp, synthetic construct
  source 1..80: mol_type = other DNA
tggcgatatggttgacacaggctttggtgctatgaattttgctgatttgcagaccaataaatcagatgttcctattgaca

SEQ ID NO: 76893 - DNA, 80 bp, synthetic construct
  source 1..80: mol_type = other DNA
tacagaaacagacatcagagaagtgcaacagcttctgttgggaacactaaacatagtgtgtcccatctgcgcaccgaaga

SEQ ID NO: 76894 - DNA, 80 bp, synthetic construct
  source 1..80: mol_type = other DNA
atttttttttctacggaaggaacaaatgtttgccagacatttttttaacagggctggcgaggtgggggaacctgtgcctg

SEQ ID NO: 76895 - DNA, 80 bp, synthetic construct
  source 1..80: mol_type = other DNA
atactcttataattaagggtagtggaaatcgaacgtctgtagggagtagtatatatgttaacaccccaagcggctctttg

SEQ ID NO: 76896 - DNA, 80 bp, synthetic construct
  source 1..80: mol_type = other DNA
gtgtcctctgaggcacaattgtttaataagccatattggctacaaaaagcccagggacataacaatggtatttgttgggg

SEQ ID NO: 76897 - DNA, 80 bp, synthetic construct
  source 1..80: mol_type = other DNA
cacgcagtaccaacatgacattatgtgcatccgtaactacatcttccacatacaccaattctgattataaagagtacatg

SEQ ID NO: 76898 - DNA, 80 bp, synthetic construct
  source 1..80: mol_type = other DNA
cgtcatgtggaagagtatgatttacaatttatttttcaattatgtagcattacattgtctgctgaagtaatggcctatat

SEQ ID NO: 76899 - DNA, 80 bp, synthetic construct
  source 1..80: mol_type = other DNA
tcacacaatgaatccctctgttttggaagactggaactttgggttatcgcctcccccaaatggtacattagaagatacct

SEQ ID NO: 76900 - DNA, 80 bp, synthetic construct
  source 1..80: mol_type = other DNA
ataggtatgtgcagtcacaggccattacctgtcaaaagcccactcctgaaaaggaaaagccagatccctataagaacctt

SEQ ID NO: 76901 - DNA, 80 bp, synthetic construct
  source 1..80: mol_type = other DNA
agtttttgggaggttaatttaaaagaaaagttttctagtgaattggatcagtatcctttgggacgcaagtttttgttaca

SEQ ID NO: 76902 - DNA, 80 bp, synthetic construct
  source 1..80: mol_type = other DNA
aagtggatataggggacggtcctctattcgtaccggtgttaagcgccctgctgtttccaaagcctctgctgcccctaaac

SEQ ID NO: 76903 - DNA, 80 bp, synthetic construct
  source 1..80: mol_type = other DNA
gtaagcgcgccaaaaccaaaaggtaatatatgtgtatatgtactgttatatatatgtgtgtatgtactgttatgtatatg

SEQ ID NO: 76904 - DNA, 80 bp, synthetic construct
  source 1..80: mol_type = other DNA
cataacaacgatggcggacgattcaggtacagaaaatgaggggtctgggtgtacaggatggtttatggtagaagctatag

SEQ ID NO: 76905 - DNA, 80 bp, synthetic construct
  source 1..80: mol_type = other DNA
tgtgtgtttatgtgcaataaacaattaactacattattgtatatcttgttacaccctgtgactcagtggctgttgcacgc

SEQ ID NO: 76906 - DNA, 80 bp, synthetic construct
  source 1..80: mol_type = other DNA
gttttggtttgcacgcgccttacacacataagtaatatacatgcacaatatatatatttttgtttccaataatatatttt

SEQ ID NO: 76907 - DNA, 80 bp, synthetic construct
  source 1..80: mol_type = other DNA
tatatttgcaaccgttttcggttgcccttggcatacactttccaccaatttgttacaacgtgttgcctgttaatcctata

SEQ ID NO: 76908 - DNA, 80 bp, synthetic construct
  source 1..80: mol_type = other DNA
tattttgtgccaggtacacattgccctgccaagttgattgccaagtgcatcatatcctgccaaccacacacctggcgcca

SEQ ID NO: 76909 - DNA, 80 bp, synthetic construct
  source 1..80: mol_type = other DNA
gggtgcggtattgccttactcatatgtttattgccactgcaataaacctgtctttgtgttatacttttatgcactgtagc

SEQ ID NO: 76910 - DNA, 80 bp, synthetic construct
  source 1..80: mol_type = other DNA
caactcttaaaagcatttttggcttgtagcagcacatttttttgctcttactgtttggtatacaataacataaaaatgag

SEQ ID NO: 76911 - DNA, 80 bp, synthetic construct
  source 1..80: mol_type = other DNA
taacctaaggtcacacacctgcaaccggtttcggttatccacaccctacatatttccttcttatagttaataacaatctt

SEQ ID NO: 76912 - DNA, 80 bp, synthetic construct
  source 1..80: mol_type = other DNA
ggttttaaaaaataggagggaccgaaaacggttcaaccgaaaacggttgtatataaaccagccctaaaatttagcaaacg

SEQ ID NO: 76913 - DNA, 80 bp, synthetic construct
  source 1..80: mol_type = other DNA
gcaaattaattgtgtgttttgcaagaatgcactgaccactgcagagatttattcatatgcatataaacagctaaaggtcc

SEQ ID NO: 76914 - DNA, 80 bp, synthetic construct
  source 1..80: mol_type = other DNA
tgcaacacccaacaggtacacaaatatcagacgatgaggatgaggaggtggaggacagtgggtatgacatggtggacttt

SEQ ID NO: 76915 - DNA, 80 bp, synthetic construct
  source 1..80: mol_type = other DNA
attgatgacagcaatattacacacaattccttggaagcacaggcattgtttaacaggcaggaggcggacacccattatgc

SEQ ID NO: 76916 - DNA, 80 bp, synthetic construct
  source 1..80: mol_type = other DNA
gactgtgcaggacctaaaacgaaagtatttaggtagtccatatgttagtcctataaacactatagccgaggcagtggaaa

SEQ ID NO: 76917 - DNA, 80 bp, synthetic construct
  source 1..80: mol_type = other DNA
gcgcaccggggatcctaggcaatttgattgtgttttctgtggaactttacaacctgggcccatcaacatggggaacagac

SEQ ID NO: 76918 - DNA, 80 bp, synthetic construct
  source 1..80: mol_type = other DNA
gattaatgactgaatagacttgatgtaaagattttctttatttggcccccggacacatttactacccaaagttctgcaca

SEQ ID NO: 76919 - DNA, 80 bp, synthetic construct
  source 1..80: mol_type = other DNA
acatatgaccacaataaaagtacttttctttcattttgtgattgctgtaaacattgtcacagaattctttgtaaaagcta

SEQ ID NO: 76920 - DNA, 80 bp, synthetic construct
  source 1..80: mol_type = other DNA
tcaggcagaatttcacaatcgaaatcttcaaccatatggttcgataattcacctttaatcagtctaatgtggaatttatt

SEQ ID NO: 76921 - DNA, 80 bp, synthetic construct
  source 1..80: mol_type = other DNA
acaattttctgaactgtctctctcaactggtcaaaatataaacttgcactcccttcaagcagaatctcatccaggtcaga

SEQ ID NO: 76922 - DNA, 80 bp, synthetic construct
  source 1..80: mol_type = other DNA
ccggtcaacattgacaccttgctgctgagaccctaagaccaagttgctcattgcttgttgaaccttatactcataatcct

SEQ ID NO: 76923 - DNA, 80 bp, synthetic construct
  source 1..80: mol_type = other DNA
tcaagcaactcttcgcatgttctgcctttcaatcttaatttcccaccactagattgtatcatgaccctcctctttgactt

SEQ ID NO: 76924 - DNA, 80 bp, synthetic construct
  source 1..80: mol_type = other DNA
taaacctatttgtcatcatacttttcacttcattgcataaaatcaagcttatcaaagcccttattagtttataaagtaga

SEQ ID NO: 76925 - DNA, 80 bp, synthetic construct
  source 1..80: mol_type = other DNA
aagtcagtggtttccgacagctcaaccacccccatggcatatgggaaagtctcctcttgtgatttctgataactgattgt

SEQ ID NO: 76926 - DNA, 80 bp, synthetic construct
  source 1..80: mol_type = other DNA
ttccatcgcagctgttgctcttttgatggtcttttgaataattgagcttaggatttgattctttgacaaacactgggaag

SEQ ID NO: 76927 - DNA, 80 bp, synthetic construct
  source 1..80: mol_type = other DNA
ctcaatccaatcatccactgcctcaaaagcagcgttcaagactttcaggccgtccttaggcatgaccttcttcaacacag

SEQ ID NO: 76928 - DNA, 80 bp, synthetic construct
  source 1..80: mol_type = other DNA
atcaatgtataacttgttgaattcactaagcaagtggtctttgttgaccctcatgaactggcactttatctcccctcctc

SEQ ID NO: 76929 - DNA, 80 bp, synthetic construct
  source 1..80: mol_type = other DNA
tgtccaatagggtattcaaactctcaattcctgaaagtctccctgaagtcattgacaaagactcacacagcctactgtat

SEQ ID NO: 76930 - DNA, 80 bp, synthetic construct
  source 1..80: mol_type = other DNA
tgctcggttgtgggggtcgctgtttgaggagtgctactgagtcagtgactataagatgacaaaattgatattgattttaa

SEQ ID NO: 76931 - DNA, 80 bp, synthetic construct
  source 1..80: mol_type = other DNA
caaaattgatattgattttaattgattttaatttagatattctcataagaaagtcaaaatgcctaggatcctcggtgcgc

SEQ ID NO: 76932 - DNA, 80 bp, synthetic construct
  source 1..80: mol_type = other DNA
aagccaaaaatccagaggtggagaacagcccaagggctagtctaattccggatgccacgcaccttgggccacagttctgc

SEQ ID NO: 76933 - DNA, 80 bp, synthetic construct
  source 1..80: mol_type = other DNA
ccgctacatcttgaaccaaatatttgccttgctcattcattgaaccgacaaaattcaggtgaatagcaaaactttcccta

SEQ ID NO: 76934 - DNA, 80 bp, synthetic construct
  source 1..80: mol_type = other DNA
cactcccacaacccacctctatgtacaaccagaggaatcgcctcagagcaggggcccaccaagacaaaatcatgttctac

SEQ ID NO: 76935 - DNA, 80 bp, synthetic construct
  source 1..80: mol_type = other DNA
taagggtcataagttgggagtaagttagtccagccgagaagcctgcagattggagagatttgttggagttaccactgcca

SEQ ID NO: 76936 - DNA, 80 bp, synthetic construct
  source 1..80: mol_type = other DNA
attttctgtggtttcccatctgtttcaaggtccactacagtgttttcccaagcccttcctactattgatgtcctagatgc

SEQ ID NO: 76937 - DNA, 80 bp, synthetic construct
  source 1..80: mol_type = other DNA
agactcttaccactccatctctcccagcctgtgacccctgactgccgtttgtcatcccaatcaaatttagaagtgccctc

SEQ ID NO: 76938 - DNA, 80 bp, synthetic construct
  source 1..80: mol_type = other DNA
tgttgagttactgaattgtgatgaaggctgtgagtggtcactaaagtgatcaatgcaaagcgcaatccaatagcctagga

SEQ ID NO: 76939 - DNA, 80 bp, synthetic construct
  source 1..80: mol_type = other DNA
tgaattgtgatgaaggctgtgagtggtcactaaagtgatcaatgcaaagcgcaatccaatagcctaggatccactgtgcg

SEQ ID NO: 76940 - DNA, 80 bp, synthetic construct
  source 1..80: mol_type = other DNA
cagtcgcgaatggcatcttgcagactttcatgagaatggcatggggtgggagctatattgctcttgactcaggccgtgga

SEQ ID NO: 76941 - DNA, 80 bp, synthetic construct
  source 1..80: mol_type = other DNA
tcaactgtggcaaagaaggacacctagccagaaattgcaaggcccctagaaaaaggggttgttggaaatgtgggaaggag

SEQ ID NO: 76942 - DNA, 80 bp, synthetic construct
  source 1..80: mol_type = other DNA
tgaggcaatgagtcaagttcatcagcccaacataatgatgcagagaggcaattttaggggccagagaacaataaagtgtt

SEQ ID NO: 76943 - DNA, 80 bp, synthetic construct
  source 1..80: mol_type = other DNA
agcaacaagtgcaactgttgcaatagtgatgatgaggggtaattttattagtcctagaagaactgttaaaagtttcaaat

SEQ ID NO: 76944 - DNA, 80 bp, synthetic construct
  source 1..80: mol_type = other DNA
gtggtaaagaagggcaaaaagcagaaaatggcagggcccccaggaagaaggggtgttggaaatgtggaaaggaaggacag

SEQ ID NO: 76945 - DNA, 80 bp, synthetic construct
  source 1..80: mol_type = other DNA
caaataaaagaattcaatgaatgccaggataattttttagggagaatatggccttcctacaagggaaggccggggaagct

SEQ ID NO: 76946 - DNA, 80 bp, synthetic construct
  source 1..80: mol_type = other DNA
gtatccactgacgcagatgaaaccattttttaggacaggagcagatgatacagtatagaagacagagcagagatacagta

SEQ ID NO: 76947 - DNA, 80 bp, synthetic construct
  source 1..80: mol_type = other DNA
tcttcatagcagtccagagccaacagccccaccagcaccgccattagggtgtttgggggagaggaccccctctacaaaga

SEQ ID NO: 76948 - DNA, 80 bp, synthetic construct
  source 1..80: mol_type = other DNA
atcataagcaggatcagaaagacaaggaattgtatccactgacgcagatgaaaccattttttaggacaggagcagatgat

SEQ ID NO: 76949 - DNA, 80 bp, synthetic construct
  source 1..80: mol_type = other DNA
tttttagaattgctggcagcaacgcagggagtggggggacccggccgtcccgcacgagttttggtagtggtggtgaggca

SEQ ID NO: 76950 - DNA, 80 bp, synthetic construct
  source 1..80: mol_type = other DNA
aaaaactgttaagtgtttcaattgtggcaaagatgggcacatagccaaaaattgcagggcccctaggagaaggggctgtt

SEQ ID NO: 76951 - DNA, 80 bp, synthetic construct
  source 1..80: mol_type = other DNA
ggaaatgtggaaaggaaggacaccaaatgaaagattgtacagagagacaggctaattttttagggaaaatctggccttcc

SEQ ID NO: 76952 - DNA, 80 bp, synthetic construct
  source 1..80: mol_type = other DNA
cacaaaggaaggccagggaacttccttcagaacagaccagagccaacagccccaccagccccaccagaagagagcttcag

SEQ ID NO: 76953 - DNA, 80 bp, synthetic construct
  source 1..80: mol_type = other DNA
acccctcgtcccaataaggataggggggcagctaaaggaagctctattagatacaggagcagatgatacagtgttagaag

SEQ ID NO: 76954 - DNA, 80 bp, synthetic construct
  source 1..80: mol_type = other DNA
gtttggggaggagacaacaactccctctcagaagcaggagccaacagacaagggaatctatcccttggattccctcagat

SEQ ID NO: 76955 - DNA, 80 bp, synthetic construct
  source 1..80: mol_type = other DNA
aagattttggcagaagcaatgagccaagcaacacaggcatctgccataatgatgcagaaaggcaattttaggaaccaaag

SEQ ID NO: 76956 - DNA, 80 bp, synthetic construct
  source 1..80: mol_type = other DNA
agaacaataaagtgtttcaactgtggcaaagaaggacacctagccagaaattgcaaggcccctagaaaaaggggttgttg

SEQ ID NO: 76957 - DNA, 80 bp, synthetic construct
  source 1..80: mol_type = other DNA
gcaaggggaggccaggaaattttcctcagagcagaccagaaccaacagccccaccagcagagagcgttgggatggaggaa

SEQ ID NO: 76958 - DNA, 80 bp, synthetic construct
  source 1..80: mol_type = other DNA
gagataacctcctttccgaagcaggaaccgagggacaagggactatatcctcctttaacttccctcaaatcactctttgg

SEQ ID NO: 76959 - DNA, 80 bp, synthetic construct
  source 1..80: mol_type = other DNA
aaagcaagattttagctgaggcaatgagtcaagttcatcagtccaacataatgatgcagagaggcaattttaggggccag

SEQ ID NO: 76960 - DNA, 80 bp, synthetic construct
  source 1..80: mol_type = other DNA
ttaaatgcttcaactgtggcaaggacggtcatctagctagaaattgcagggcccctagaaaaaagggctgttggaaatgt

SEQ ID NO: 76961 - DNA, 80 bp, synthetic construct
  source 1..80: mol_type = other DNA
ggaaaggagggacatcaaatgaaagactgcacagagagacatgctaattttttagggagaatttgtccttccaacatggg

SEQ ID NO: 76962 - DNA, 80 bp, synthetic construct
  source 1..80: mol_type = other DNA
tttagctgaggcaatgagcaaggcatcaggggcatcagtaatgatgcaaaaaggcaattttaagggtccaggaagaaaga

SEQ ID NO: 76963 - DNA, 80 bp, synthetic construct
  source 1..80: mol_type = other DNA
tgaaagactgcacagagagacatgctaattttttagggagaatttgtccttccaacatgggggaggccggtaaattgtct

SEQ ID NO: 76964 - DNA, 80 bp, synthetic construct
  source 1..80: mol_type = other DNA
agttatacccattaacctccgttgatacagtttagaagacaggagcagatgatacagtgtagaagacatgagcagagata

SEQ ID NO: 76965 - DNA, 80 bp, synthetic construct
  source 1..80: mol_type = other DNA
gttcatcagtccaacataatggtgcagagaggcaattttaggggccagagaacaataaagtgtttcaaatgtggcaaaga

SEQ ID NO: 76966 - DNA, 80 bp, synthetic construct
  source 1..80: mol_type = other DNA
aggacacatagccaaaaattgcaaggcccctagaaaaaggggttgttggaaatgtgggaaggagggacaccaaatgaaag

SEQ ID NO: 76967 - DNA, 80 bp, synthetic construct
  source 1..80: mol_type = other DNA
tatcgtccacaggagcagatgatatcagtgttagaagacaggagcagatgatacagtgtagaagacagagcagagataca

SEQ ID NO: 76968 - DNA, 80 bp, synthetic construct
  source 1..80: mol_type = other DNA
ggacaagggactatatcgtccacaggagcagatgatatcagtgttagaagacaggagcagatgatacagtgtagaagaca

SEQ ID NO: 76969 - DNA, 80 bp, synthetic construct
  source 1..80: mol_type = other DNA
tagaagaaatgatgacagcatgtcagggattgggaggacctggccataaagcaagagtttttgctgaggcaatgagtcaa

SEQ ID NO: 76970 - DNA, 80 bp, synthetic construct
  source 1..80: mol_type = other DNA
gagagtttcgggttcggggaggagataaccccctccccgcagcaagatccgaaaagaaggaatacccacaggagcagatg

SEQ ID NO: 76971 - DNA, 80 bp, synthetic construct
  source 1..80: mol_type = other DNA
tccagaacaggccagagccaacagccccaccagcagagagtttcgggttcggggaggagataaccccctccccgcagcaa

SEQ ID NO: 76972 - DNA, 80 bp, synthetic construct
  source 1..80: mol_type = other DNA
ttcaattgtggcaaagaagggcacatagctaaaaattgcagggctcctagaaaaaggggctgttggaaatgtggaaagga

SEQ ID NO: 76973 - DNA, 80 bp, synthetic construct
  source 1..80: mol_type = other DNA
gaaattttcttcagagcagaccagagccaacagccccaccagcagagagcttcgggtttggggaggagaccgcaaccccc

SEQ ID NO: 76974 - DNA, 80 bp, synthetic construct
  source 1..80: mol_type = other DNA
gcaatgagccagtaacaagttcaaataccataatgatgcagagaggcaattttaagaaccaacgaaaaattgttaagtgt

SEQ ID NO: 76975 - DNA, 80 bp, synthetic construct
  source 1..80: mol_type = other DNA
cttacttagcctccgaaaaatgggacattgaaaaaaagccctgttagctgaaagaacccatgatacactaataaaagaat

SEQ ID NO: 76976 - DNA, 80 bp, synthetic construct
  source 1..80: mol_type = other DNA
atagccccctccccgaagcaagagccgaaggagagggagttatacccctcagcctccctcaaatcactctttggcagcga

SEQ ID NO: 76977 - DNA, 80 bp, synthetic construct
  source 1..80: mol_type = other DNA
actgttaagtgtttcaattgtggcaaagaagggcacatagcaagaaattgcagggctcctaggaaaaagggctgttggaa

SEQ ID NO: 76978 - DNA, 80 bp, synthetic construct
  source 1..80: mol_type = other DNA
atagccccctccccgaagcaagagccgaaggagaaggagaaggagttataccccttaacctccctcaaatcactctttgg

SEQ ID NO: 76979 - DNA, 80 bp, synthetic construct
  source 1..80: mol_type = other DNA
cagcgacccctagtcgcagtaagagtagggggacaactaatagaagccctgttagatacaggagcagatgatacagtatt

SEQ ID NO: 76980 - DNA, 80 bp, synthetic construct
  source 1..80: mol_type = other DNA
gttttggcggaagcaatgagccaaataacaaatccactgccataatgatgcagagaggcaattttaggaaccaaagaaaa

SEQ ID NO: 76981 - DNA, 80 bp, synthetic construct
  source 1..80: mol_type = other DNA
ccaggcatcaggggcaacagtgatgatgcaaaaaagcaattttaagggtccaagaagaacgattaagtgtttcaaatgtg

SEQ ID NO: 76982 - DNA, 80 bp, synthetic construct
  source 1..80: mol_type = other DNA
gcacaggagcagaagatacagtgttagaacacaggagcagatgatacagtgttagaagacaggagcagatgatacagtat

SEQ ID NO: 76983 - DNA, 80 bp, synthetic construct
  source 1..80: mol_type = other DNA
atgaaagagtgcaaagagagacaggataattttttagggaaaatttggctttccaacaaggggaggccaggaaatttttt

SEQ ID NO: 76984 - DNA, 80 bp, synthetic construct
  source 1..80: mol_type = other DNA
ccagaacaggctagagccaacagccccacccgcagagagttccgggttcggggaggagatagccccctcccagaagcaca

SEQ ID NO: 76985 - DNA, 80 bp, synthetic construct
  source 1..80: mol_type = other DNA
aggttagaagaaatgatgatagcatgtcagggagtgggaggacccagtcacaaagcaagagttttagatgaggcaatgag

SEQ ID NO: 76986 - DNA, 80 bp, synthetic construct
  source 1..80: mol_type = other DNA
tggaatccaaaactgatagggggaattggtggttttatcaaagtaagacagtatgatcagatatccatggaaatttgtgg

SEQ ID NO: 76987 - DNA, 80 bp, synthetic construct
  source 1..80: mol_type = other DNA
aacaatggccattaacagaagaaaaaataaaagcattaaaagaaatttgtacagaaatggaaagggaaggaaaaatttca

SEQ ID NO: 76988 - DNA, 80 bp, synthetic construct
  source 1..80: mol_type = other DNA
tcagtgcacacttagatgaaagctttagaaagagtaataccacaatatctactatagcgggagtacaaataatgagacac

SEQ ID NO: 76989 - DNA, 80 bp, synthetic construct
  source 1..80: mol_type = other DNA
agaaaaaatcagtaacagtgctggatgttgggggatgcatacttttcagtgcacacttagatgaaagctttagaaagagt

SEQ ID NO: 76990 - DNA, 80 bp, synthetic construct
  source 1..80: mol_type = other DNA
tatggaatccaaaattgatagggggaattggtggttttatcaaagtaagacagtatgatcaaatacttatagaaattgag

SEQ ID NO: 76991 - DNA, 80 bp, synthetic construct
  source 1..80: mol_type = other DNA
acataaagctataggtacagtattagtaggacctacacctgtcaacataattggaagaaatttgttgacccaaattggct

SEQ ID NO: 76992 - DNA, 80 bp, synthetic construct
  source 1..80: mol_type = other DNA
gggggatgcatacttttcagtgcctttagatgcaagctttagaaagtatactgcattcactatacctagtacaaataatg

SEQ ID NO: 76993 - DNA, 80 bp, synthetic construct
  source 1..80: mol_type = other DNA
gatgcatatttttcagttcccttagataaagattttagtatggaaaccaaaattgattactggaacggatgctataacac

SEQ ID NO: 76994 - DNA, 80 bp, synthetic construct
  source 1..80: mol_type = other DNA
gaaagtatactgcattcaccatacctagtaaaaataatgagacaccagggattagatatcagtacaatgtgcttccacaa

SEQ ID NO: 76995 - DNA, 80 bp, synthetic construct
  source 1..80: mol_type = other DNA
ataaggacttcagaaagtatactgcatttaccatacctagtttaaacaatgagacaccaggaattagatatcagtacaat

SEQ ID NO: 76996 - DNA, 80 bp, synthetic construct
  source 1..80: mol_type = other DNA
caaaaattggacctgaaaatccatataacactccaatatttgccataaagaaaaaagacagtactaaatggagaaaattg

SEQ ID NO: 76997 - DNA, 80 bp, synthetic construct
  source 1..80: mol_type = other DNA
gtactaagtggagaaagttggtagatttcagagaacttaataagaaaactcaagacttctgggaagtccagttaggaata

SEQ ID NO: 76998 - DNA, 80 bp, synthetic construct
  source 1..80: mol_type = other DNA
taaagacttcaggaagtatactgcctttaccatacctagcacaaacaatgagacaccagggattagatatcagtacaatg

SEQ ID NO: 76999 - DNA, 80 bp, synthetic construct
  source 1..80: mol_type = other DNA
aggaatggatggcccaaaagttaaacaatggccattgacagaagaaaaaataaaagcgttaatggaaatttgtactgaaa

SEQ ID NO: 77000 - DNA, 80 bp, synthetic construct
  source 1..80: mol_type = other DNA
ccttagataaagaatttaggaagtatactgcattcaccatacctagtacaaacaatgagacaccagggattagatatcag

SEQ ID NO: 77001 - DNA, 80 bp, synthetic construct
  source 1..80: mol_type = other DNA
agtatgaggagatacccataaaaatttgtggacatggagctgtaggtacagtactagtaggacctacacctgtcaacata

SEQ ID NO: 77002 - DNA, 80 bp, synthetic construct
  source 1..80: mol_type = other DNA
acctcatccctcggggttaaaaaagaaaaaatcagtgacagtgctagatgtgggggatgcatacttttcagtgcccttag

SEQ ID NO: 77003 - DNA, 80 bp, synthetic construct
  source 1..80: mol_type = other DNA
atccctcagggttgaaaaagaaaaagtcagtaacagtgctagatgtgggggatgcgtacttttcagtgcccttagatgaa

SEQ ID NO: 77004 - DNA, 80 bp, synthetic construct
  source 1..80: mol_type = other DNA
tatgttgactcagattggttgtactttaaattttccaattagtcctattgaaactgtatcagtacaatgtgcttccacaa

SEQ ID NO: 77005 - DNA, 80 bp, synthetic construct
  source 1..80: mol_type = other DNA
ggatgggcccaaaggttaaacaatggccattaacagaagaaaaaataaaagcattagtagaaatatgtacagaaatggaa

SEQ ID NO: 77006 - DNA, 80 bp, synthetic construct
  source 1..80: mol_type = other DNA
taaatggagaaaattagtagatttcagggaacttaataaaagaactcaagatttttgggaggttcaattaggaataccac

SEQ ID NO: 77007 - DNA, 80 bp, synthetic construct
  source 1..80: mol_type = other DNA
gatcaatacctatagaaatttgtggaaaaagggctatagggacagtattagtaggacctacacctatcaacataattggg

SEQ ID NO: 77008 - DNA, 80 bp, synthetic construct
  source 1..80: mol_type = other DNA
agaaatctgttgactcagattggttgcactttaaattttcccattagtcctattgaaactgtaccagtaaaattaaagcc

SEQ ID NO: 77009 - DNA, 80 bp, synthetic construct
  source 1..80: mol_type = other DNA
gatcgatacccatagaaatttgtggacataaagctataggtacagtattagtaggacctacacctgtcaacataattgga

SEQ ID NO: 77010 - DNA, 80 bp, synthetic construct
  source 1..80: mol_type = other DNA
aattcaggaagtatactgcattcaccatacctagtacaaacaatgagacaccaggaattagatatcagtacaatgtgctt

SEQ ID NO: 77011 - DNA, 80 bp, synthetic construct
  source 1..80: mol_type = other DNA
tacccatagaaatctgtggacataaagctataggtacagtattagtgggacctacacctgtcaacataattggaagaaac

SEQ ID NO: 77012 - DNA, 80 bp, synthetic construct
  source 1..80: mol_type = other DNA
catatttttcagttcccttagataaggaattcagaaagtatactgcatttaccatacctagtgtaaacaatagacaccag

SEQ ID NO: 77013 - DNA, 80 bp, synthetic construct
  source 1..80: mol_type = other DNA
catggaaaccaaaattgatagggggaattggaggttttatcaaagtaagacagtatgaccagatacccatagaaatctgt

SEQ ID NO: 77014 - DNA, 80 bp, synthetic construct
  source 1..80: mol_type = other DNA
taatagcagaaatacagaaacaggagcaaggccaatggacataccaaatttatcaagaaccattaaaaatctaaatcata

SEQ ID NO: 77015 - DNA, 80 bp, synthetic construct
  source 1..80: mol_type = other DNA
cagttatgtaaactcctcaggggaaccaaagcactaacagaaataataccactaacaaaagaagcagagctagaactggc

SEQ ID NO: 77016 - DNA, 80 bp, synthetic construct
  source 1..80: mol_type = other DNA
gctggactgtcaatgacatacagaagttagtgggaaaattgaattgggcaagtcagatttatccaggaattaaaataaaa

SEQ ID NO: 77017 - DNA, 80 bp, synthetic construct
  source 1..80: mol_type = other DNA
agatttacccagggattaaagtaaggcagttatgcaaactccttaggggaaccaaagcactaacagaaataataccacta

SEQ ID NO: 77018 - DNA, 80 bp, synthetic construct
  source 1..80: mol_type = other DNA
gtaggatctgacttagaaatagggcagcatagagcaaaaatagagaagttaagaaaacacctgttaagctgggggtttac

SEQ ID NO: 77019 - DNA, 80 bp, synthetic construct
  source 1..80: mol_type = other DNA
cacaccagataaaaaacatcagaaagaacctccattcctttggatgggatatgagctccatcctgacaagtggacagtac

SEQ ID NO: 77020 - DNA, 80 bp, synthetic construct
  source 1..80: mol_type = other DNA
agcctatacagctgccagacaaagaaagctggactgtcaacgacatacaaaagttagtgggaaaactaaattgggcaagc

SEQ ID NO: 77021 - DNA, 80 bp, synthetic construct
  source 1..80: mol_type = other DNA
cagatttatccagggattaaaataaaacaactatgcaaactccttaggggagccaaagcattaacagacatagtaccact

SEQ ID NO: 77022 - DNA, 80 bp, synthetic construct
  source 1..80: mol_type = other DNA
tggagtacctgtgtggaaagaagcaaccaccactctgttctgtgcatcagatgctaaagctatagaggaagagaaacata

SEQ ID NO: 77023 - DNA, 80 bp, synthetic construct
  source 1..80: mol_type = other DNA
tggggtcacggtctattatggggtacctgtgtgggagaatgcaaataccactctattttgtgcatctgatgctaaagcat

SEQ ID NO: 77024 - DNA, 80 bp, synthetic construct
  source 1..80: mol_type = other DNA
ctattatggagtacctgtgtggaaggaagcaaccaccactctattttgtgcatcagatgctaaagcatatatacagaggt

SEQ ID NO: 77025 - DNA, 80 bp, synthetic construct
  source 1..80: mol_type = other DNA
tatggggtacctgtgtggaaagaagcaaccaccactctattctgtgcatcagatgctaaagcgtatgacactgaagtcat

SEQ ID NO: 77026 - DNA, 80 bp, synthetic construct
  source 1..80: mol_type = other DNA
atggagtacctgtgtggaaagatgcaaccaccactctattctgtgcatcagatgctaaagcatatgatacagagtacata

SEQ ID NO: 77027 - DNA, 80 bp, synthetic construct
  source 1..80: mol_type = other DNA
gggtcacggtctattatggagtacctgtgtggaaagaagcaaccaccactctattctgtgcatcagatgctaaagcatat

SEQ ID NO: 77028 - DNA, 80 bp, synthetic construct
  source 1..80: mol_type = other DNA
tcacggtctattatggggtaccggtgtggaaagacgcagagaccaccctattttgtgcatcagatgctaaagcatatgat

SEQ ID NO: 77029 - DNA, 80 bp, synthetic construct
  source 1..80: mol_type = other DNA
acagaagtacataatgtttgggctacacacgcctgtgtacccacagatcctaacccacaagaaatacatttggaaaatgt

SEQ ID NO: 77030 - DNA, 80 bp, synthetic construct
  source 1..80: mol_type = other DNA
gaattatccacccttgtggagatgggggatgatattccttggaatgataataatttgtaaggctacagaaaatttgtggg

SEQ ID NO: 77031 - DNA, 80 bp, synthetic construct
  source 1..80: mol_type = other DNA
tgtgtggagagacgcagagaccaccctattttgtgcatcagatgctaaagcatatacacagaagcacataatctgcaacc

SEQ ID NO: 77032 - DNA, 80 bp, synthetic construct
  source 1..80: mol_type = other DNA
ctgtgtctcttcagctaccaccgattgagagacttactctcgattgtaacgaggattgtggaacttgtgggacgcagggg

SEQ ID NO: 77033 - DNA, 80 bp, synthetic construct
  source 1..80: mol_type = other DNA
ggattgtggaacttgtgggacgcagggggtgggaagccctcaaatattggtggaatttcttacagtatggggtcaggaac

SEQ ID NO: 77034 - DNA, 80 bp, synthetic construct
  source 1..80: mol_type = other DNA
gtctgtgtctcttcagctaccaccgattgagagacttactcttgattgtgacgagggctgtagaacttctgggacgcagg

SEQ ID NO: 77035 - DNA, 80 bp, synthetic construct
  source 1..80: mol_type = other DNA
gaacttctgggacgcagggggtgggaagccctcaaatattggtggaatcttctacaatattggagtcaggaactaaagaa

SEQ ID NO: 77036 - DNA, 80 bp, synthetic construct
  source 1..80: mol_type = other DNA
gaaatgtcccaaaggttgataccagagggcttttcggagccatagcaggtttcatcgaagggggatggactggaatggta

SEQ ID NO: 77037 - DNA, 80 bp, synthetic construct
  source 1..80: mol_type = other DNA
gaagaaagattctgtcggattttgaacaaggccccacttgacttaagaggatgcaccatggagggttggatattagggaa

SEQ ID NO: 77038 - DNA, 80 bp, synthetic construct
  source 1..80: mol_type = other DNA
actgagttttatataataccaagatcgcaggaatctaagtgtaatgaatatataaatactgggttgccaccaatgcagaa

SEQ ID NO: 77039 - DNA, 80 bp, synthetic construct
  source 1..80: mol_type = other DNA
ctcttggtgtaggttgcttgactactgatccaacgacatttgaagaggtagcatctgcggaaaaattggcaataacagat

SEQ ID NO: 77040 - DNA, 80 bp, synthetic construct
  source 1..80: mol_type = other DNA
aatatgcaatcttgttgctgaacaggcagtggtttcagtgaagttagcgggcagttctcctctctgctctgttagtgggt

SEQ ID NO: 77041 - DNA, 80 bp, synthetic construct
  source 1..80: mol_type = other DNA
actacaaatagaagcagagattgtaacgcagtaaccaattctatcacagtaaacaatacaatagcagatgaagtaagaaa

SEQ ID NO: 77042 - DNA, 80 bp, synthetic construct
  source 1..80: mol_type = other DNA
atgtacaaacttgtagcagtaattgcgctccttggagcagtgagaggtcttgacaaaatctgtctaggacatcatgcagt

SEQ ID NO: 77043 - DNA, 80 bp, synthetic construct
  source 1..80: mol_type = other DNA
aggatttatagaaaatggatgggaaggaatggtggatggttggtatggtttcagacaccaaaatgctcaggggacaggcc

SEQ ID NO: 77044 - DNA, 80 bp, synthetic construct
  source 1..80: mol_type = other DNA
agagtactcaggcagctatcgaccaaatcactgggaagctgaacaggctgattgagaagaccaacactgagtttgagtca

SEQ ID NO: 77045 - DNA, 80 bp, synthetic construct
  source 1..80: mol_type = other DNA
atagagtctgagttcagtgagattgaacatcagattggtaacgtcattaattggaccaaggattcaataaccgacatctg

SEQ ID NO: 77046 - DNA, 80 bp, synthetic construct
  source 1..80: mol_type = other DNA
gacttatcaggaagaactattggtagcaatggagaaccagcatacaattgacatggctgattcagagatgctaaatttgt

SEQ ID NO: 77047 - DNA, 80 bp, synthetic construct
  source 1..80: mol_type = other DNA
atgagagagtgaggaaacaactcaggcagaatgcagaagaagatgggaaggggtgttttgagatatatcatacttgtgac

SEQ ID NO: 77048 - DNA, 80 bp, synthetic construct
  source 1..80: mol_type = other DNA
gattcgtgcatggagagcataaggaacaacacctatgaccattcacaatacagagaggaagctcttttgaatagactgaa

SEQ ID NO: 77049 - DNA, 80 bp, synthetic construct
  source 1..80: mol_type = other DNA
catcaattcagtaaaactttcttcgggttataaagacatcatcctttggtttagcttcggggcatcatgctttgttcttc

SEQ ID NO: 77050 - DNA, 80 bp, synthetic construct
  source 1..80: mol_type = other DNA
gtctaaacaggttatgtatgaagggaagaagctataaggatctgggcaattgccatccaataggaatgttgataggaaca

SEQ ID NO: 77051 - DNA, 80 bp, synthetic construct
  source 1..80: mol_type = other DNA
atttagttaaaaacacccaaacccccttgggaccctgagaggcacccccaagaattagtaaaaaaccccccaaaattttt

SEQ ID NO: 77052 - DNA, 80 bp, synthetic construct
  source 1..80: mol_type = other DNA
ccagcttgtgatctgcatcttactgggacatgggacactctcattgagcgagagaatgccattgcctactgttaccctgg

SEQ ID NO: 77053 - DNA, 80 bp, synthetic construct
  source 1..80: mol_type = other DNA
agcgaccgtaaatgaagaagcactgaggcagaaaataatggagagtgggggaatcagcaaaataagcactggcttcactt

SEQ ID NO: 77054 - DNA, 80 bp, synthetic construct
  source 1..80: mol_type = other DNA
atgggtcttccatcaactcagccggaaccactaaagcatgcatgagaaatggaggaaatagcttttatgcagagctcaaa

SEQ ID NO: 77055 - DNA, 80 bp, synthetic construct
  source 1..80: mol_type = other DNA
tggctagtatcaaagagtaagggacaaaacttccctcagaccacgaacacttatagaaacacggacacagctgaacatct

SEQ ID NO: 77056 - DNA, 80 bp, synthetic construct
  source 1..80: mol_type = other DNA
cataatatggggaatccatcacccttccagcactcaggagaagaatgatctatatgggacacaatcactatctatatcag

SEQ ID NO: 77057 - DNA, 80 bp, synthetic construct
  source 1..80: mol_type = other DNA
ttgggagttccacatatcagaacaattttgttccagttgttggggcaagacctcaggtcaatggacaaagcgggcgaatt

SEQ ID NO: 77058 - DNA, 80 bp, synthetic construct
  source 1..80: mol_type = other DNA
gatttccactggacattagtacaaccaggcgataatatcactttctcacacaatgggggtctgatagcaccgagtcgagt

SEQ ID NO: 77059 - DNA, 80 bp, synthetic construct
  source 1..80: mol_type = other DNA
agccaatggaaccatcgtgaagacccttacaaatgaacaggaagaggtgaccaatgctactgaaacagtggagagcacaa

SEQ ID NO: 77060 - DNA, 80 bp, synthetic construct
  source 1..80: mol_type = other DNA
tagcaaactagttggaagaggattgggagttcaatcagaagcatcaatagacaatggttgtgaatctaaatgtttttgga

SEQ ID NO: 77061 - DNA, 80 bp, synthetic construct
  source 1..80: mol_type = other DNA
gaggaggctccataaatacaaagctccctttccaaaatttgtcaccaaggacagtgggtcagtgtcccaaatacgtgaat

SEQ ID NO: 77062 - DNA, 80 bp, synthetic construct
  source 1..80: mol_type = other DNA
aagaagagtttgatgcttgcaacaggaatgagaaatgtaccagaaataatgcaagggagaggtctatttggtgcaatagc

SEQ ID NO: 77063 - DNA, 80 bp, synthetic construct
  source 1..80: mol_type = other DNA
tattcgtctcagggagcaaaagcagggggacaaaaacataatggattccaacacgataacctcgtttcaggtagattgct

SEQ ID NO: 77064 - DNA, 80 bp, synthetic construct
  source 1..80: mol_type = other DNA
gcatgagagacatgtgtgatgctccctttgatgacaggctcagaagagaccaaaaggcattaaagggaagaggcagcaca

SEQ ID NO: 77065 - DNA, 80 bp, synthetic construct
  source 1..80: mol_type = other DNA
aaggcaagaagattgtggaggatatcctcaaaagcgagacagatgaaaacctcaaaattgcaattgcatctagtcctgct

SEQ ID NO: 77066 - DNA, 80 bp, synthetic construct
  source 1..80: mol_type = other DNA
agcattgaagaaataagcagggaatggtacatgctgatgcccagacaaaagataacggggggtttaatggtgaaaatgga

SEQ ID NO: 77067 - DNA, 80 bp, synthetic construct
  source 1..80: mol_type = other DNA
gaataatactcaaagcgaatttctccgtattatttgatcaattggagacactagtctcactgagggctttcacagaggat

SEQ ID NO: 77068 - DNA, 80 bp, synthetic construct
  source 1..80: mol_type = other DNA
tagctgaaatatctcccattccttccatgccaggacattctacagaggatgtcaaaaatgcaattggaatcctcatcggt

SEQ ID NO: 77069 - DNA, 80 bp, synthetic construct
  source 1..80: mol_type = other DNA
agatcaggtggctgattgctgaatgcaggaacgtgttgaccaaaacagaaaacagctttgagcaaataacgttcttgcaa

SEQ ID NO: 77070 - DNA, 80 bp, synthetic construct
  source 1..80: mol_type = other DNA
gcatctagtcctgctcctcgatacatcactgatatgagcattgaagaaataagcagggaatggtacatgctgatgcccag

SEQ ID NO: 77071 - DNA, 80 bp, synthetic construct
  source 1..80: mol_type = other DNA
atgagtgacatcgaagccatggcgtctcaaggcaccaaacgatcatatgaacaaatggagactggtggggaacgccagga

SEQ ID NO: 77072 - DNA, 80 bp, synthetic construct
  source 1..80: mol_type = other DNA
cataagaggtaattcccccatatttaactacaataagataaccagaaggctaacagtcctcggaaaggacgcaggtgcat

SEQ ID NO: 77073 - DNA, 80 bp, synthetic construct
  source 1..80: mol_type = other DNA
gttctatgtcattgggattggttgtactcaatgtcctactgcatgttgtgagcattgtagtaacagtattagtcctgagg

SEQ ID NO: 77074 - DNA, 80 bp, synthetic construct
  source 1..80: mol_type = other DNA
tgacactatcggtagtaagcctcctgataggaattgccaatttaggtttaaacatcggactccattataaggtaggcgat

SEQ ID NO: 77075 - DNA, 80 bp, synthetic construct
  source 1..80: mol_type = other DNA
ctgggcaaacaaagagtgtttcaatccttgtttctatgtggagctaattagagggaggcccaaagaaagcagtgtactgt

SEQ ID NO: 77076 - DNA, 80 bp, synthetic construct
  source 1..80: mol_type = other DNA
ctgcatacagcactcttgccatagtcaccagcgtcctctaccgaccttaaggcatacttcaaagactgtgtgtttactga

SEQ ID NO: 77077 - DNA, 80 bp, synthetic construct
  source 1..80: mol_type = other DNA
gtgccaacataacaaaacagcatttcacaaatgtcaacgaccgaccttgaggcatacttcaaagactgtgtgtttaatga

SEQ ID NO: 77078 - DNA, 80 bp, synthetic construct
  source 1..80: mol_type = other DNA
aaattgatccaagcactacgatttcaccaatccaaaattaccgaccttgaggcatacttcaccgactgtgtgtttactga

SEQ ID NO: 77079 - DNA, 80 bp, synthetic construct
  source 1..80: mol_type = other DNA
cggagcacacggattcccgccctctccccacgtcaacgaccgaccttgaggcatacttcaaagactgtttgttcaaagac

SEQ ID NO: 77080 - DNA, 80 bp, synthetic construct
  source 1..80: mol_type = other DNA
tctacttctagcacgccctccccactccgtctgtcaactaccgaccttgaggcatacttcaaagactgtttgtttaagga

SEQ ID NO: 77081 - DNA, 80 bp, synthetic construct
  source 1..80: mol_type = other DNA
cttttttgccttctgacttctttccttctattcgagatctcctctagaccgcagtccatcggatcgcactcaggcaagtt

SEQ ID NO: 77082 - DNA, 80 bp, synthetic construct
  source 1..80: mol_type = other DNA
agccaattccgaaaatctagatcgggacctccaccctcacaaagccaattggccgaactccaacaaggtgggagtgggag

SEQ ID NO: 77083 - DNA, 80 bp, synthetic construct
  source 1..80: mol_type = other DNA
cccatgatcccactgttggggtggagccctttcctgctgggcctactcacaactgtgccgtgagccctcctcctgcctcc

SEQ ID NO: 77084 - DNA, 80 bp, synthetic construct
  source 1..80: mol_type = other DNA
acctctcccatatcatgaatcttagctactaccttataccctgcactaaagaagtctaatcctcaggccatgcagtggaa

SEQ ID NO: 77085 - DNA, 80 bp, synthetic construct
  source 1..80: mol_type = other DNA
agcatggaaggttggtcttgtaaacaaacctacgcatggggatcacctttctgttccccatcgtctgcgattgtttcccg

SEQ ID NO: 77086 - DNA, 80 bp, synthetic construct
  source 1..80: mol_type = other DNA
aggaaggaaggtaggttgtccaaccaccataggcatgggggcttatttttctgctcccaataatccgggatactttacac

SEQ ID NO: 77087 - DNA, 80 bp, synthetic construct
  source 1..80: mol_type = other DNA
agcatgggaggttggtcttcgagccgaataaaggtatggggacgatctggcagtatttcatcctcagggattgcatcccg

SEQ ID NO: 77088 - DNA, 80 bp, synthetic construct
  source 1..80: mol_type = other DNA
aaaggaccattgagcacaagccgaacacgtaggagcgggagccttccctccagggttcactcttccgcggagaagtcttt

SEQ ID NO: 77089 - DNA, 80 bp, synthetic construct
  source 1..80: mol_type = other DNA
caagccgaacacgtaggagcgggagccttccctccagggttcactcttccgcggagaagtcttttgggggggagccctca

SEQ ID NO: 77090 - DNA, 80 bp, synthetic construct
  source 1..80: mol_type = other DNA
ggctcagggcatattaactcctcctccagcctttcctcctcctgcctcaaggaagccgccttctagaaggcctcctcctc

SEQ ID NO: 77091 - DNA, 80 bp, synthetic construct
  source 1..80: mol_type = other DNA
caatctctcctcctctaacagacaggcatactcacgccatgctctgccactccactcccttccaccaaactctgcgggat

SEQ ID NO: 77092 - DNA, 80 bp, synthetic construct
  source 1..80: mol_type = other DNA
acaattaaccctgctctcaatattgcctttcacatgacagcggtcttcgctacgattggggaccatatcacgaccatggg

SEQ ID NO: 77093 - DNA, 80 bp, synthetic construct
  source 1..80: mol_type = other DNA
atcatcaagtggaccctgcgttcggagccaactgctacaacccccattgggacttcagcccccaaaaggaccattgagca

SEQ ID NO: 77094 - DNA, 80 bp, synthetic construct
  source 1..80: mol_type = other DNA
aggggttttttgtgaggaaaattggcccgacaccacccagagtcgagtcacagcattcgggccagggttcacccctcccc

SEQ ID NO: 77095 - DNA, 80 bp, synthetic construct
  source 1..80: mol_type = other DNA
agcatgcctcgttggtcttgggacctaatctttctgtggcgatcctctgggatttcctccccatcagggattggaccctg

SEQ ID NO: 77096 - DNA, 80 bp, synthetic construct
  source 1..80: mol_type = other DNA
cccaattgggatcattggccaaacgaaaatcacggaggagcgggaaattacgggccagaggtatcatcacctcaaggcgg

SEQ ID NO: 77097 - DNA, 80 bp, synthetic construct
  source 1..80: mol_type = other DNA
ctagcaatgcattgtaactccgcaatgttccaccactctctgccatatccccaagtgaggggccaatatttacctgctgg

SEQ ID NO: 77098 - DNA, 80 bp, synthetic construct
  source 1..80: mol_type = other DNA
caggcaaccctgttcgaactactgactctgctccatctactgtctcctcgaggactgcggactttgcgccgaacatggag

SEQ ID NO: 77099 - DNA, 80 bp, synthetic construct
  source 1..80: mol_type = other DNA
agaatctaaactcaggtcttccaacgtcccaaacgtatgggtccgatcgttctgttccctatcctcagggaagtttcccg

SEQ ID NO: 77100 - DNA, 80 bp, synthetic construct
  source 1..80: mol_type = other DNA
cccaattgcgatcactggccctacgaggatcacgggccagcgggaaatttcggggcagggtgcaccttctggccaaggtt

SEQ ID NO: 77101 - DNA, 80 bp, synthetic construct
  source 1..80: mol_type = other DNA
ccttttggggtggagccgtcttgttggagggatattgacaacagtgggcatatcgactcctcctgcctccaccaatcctc

SEQ ID NO: 77102 - DNA, 80 bp, synthetic construct
  source 1..80: mol_type = other DNA
actccgcaatgttccggaagctctgccatttccccaagctctgcgccctgcttttgttgctggtggctcaacttctggaa

SEQ ID NO: 77103 - DNA, 80 bp, synthetic construct
  source 1..80: mol_type = other DNA
cagtaaacactgctgccacaactacctctgccatctcttcaatcatcgcgaagactgcagactccgcaccgaacagggac

SEQ ID NO: 77104 - DNA, 80 bp, synthetic construct
  source 1..80: mol_type = other DNA
gagtctcaactcaaccaccataaagacacatgcatacgtatgttcactgcagcactattcacaataccacagagtctaga

SEQ ID NO: 77105 - DNA, 80 bp, synthetic construct
  source 1..80: mol_type = other DNA
ctcaatcagttggaccctgcgttcagagccaactcaaacaatccatattgggacttcaaccccaacaaggatcactggcc

SEQ ID NO: 77106 - DNA, 80 bp, synthetic construct
  source 1..80: mol_type = other DNA
ctagtctcaactcaaccttccaacgacccatactttcgggtcagtccgcttcgattccatcctcagggaagtccaacctc

SEQ ID NO: 77107 - DNA, 80 bp, synthetic construct
  source 1..80: mol_type = other DNA
actccactatgttccacccagctctgctagatccaaaagtgaggggtcgatattttgctgctggaggctccaattccgga

SEQ ID NO: 77108 - DNA, 80 bp, synthetic construct
  source 1..80: mol_type = other DNA
caataaatgctgttcccacttctgccttcttcataacgactgtctactctaggactggcgagcatacaacaaacacggga

SEQ ID NO: 77109 - DNA, 80 bp, synthetic construct
  source 1..80: mol_type = other DNA
catcagttagaccctgcgttcatcccactgagacattcaatattgggacttcaaccccaacaaggatcattgggtagaag

SEQ ID NO: 77110 - DNA, 80 bp, synthetic construct
  source 1..80: mol_type = other DNA
agcatctaaactcaggtcttcctgcctccaaaaggtatggttccaaatctttctgttcccaatcctcagggattctttga

SEQ ID NO: 77111 - DNA, 80 bp, synthetic construct
  source 1..80: mol_type = other DNA
attggaaaaaggatcattgggcagaagcaaatccagtaggaccgggatcattcccaccagggttcacccttttggagtgg

SEQ ID NO: 77112 - DNA, 80 bp, synthetic construct
  source 1..80: mol_type = other DNA
agtcttttggggtggagccctcaggctcagggcatattgacaactccgcctgcctcccctcctcctgcctccacaaaacg

SEQ ID NO: 77113 - DNA, 80 bp, synthetic construct
  source 1..80: mol_type = other DNA
attccacactgttccacccagctctgctagacctaaaagttaggggcctatgctttcctgctggaggctccaattccgga

SEQ ID NO: 77114 - DNA, 80 bp, synthetic construct
  source 1..80: mol_type = other DNA
caacaacccctgttcccactactgcctccttcatatcgactatcttccctaggactgaggaccctaacccaaaattggga

SEQ ID NO: 77115 - DNA, 80 bp, synthetic construct
  source 1..80: mol_type = other DNA
aacctccccaacagggttctcccctctgcgggggagtgttttggggtggagcccttggctcagggtatatcggcaactgt

SEQ ID NO: 77116 - DNA, 80 bp, synthetic construct
  source 1..80: mol_type = other DNA
gacctactactctcttctctcctcctcgaaaaaaaagtcctccggcggtgatgcggagcacctccacattcttccaccat

SEQ ID NO: 77117 - DNA, 80 bp, synthetic construct
  source 1..80: mol_type = other DNA
ctgctgcaagacagaggaagggggggattattttttgctggtggtggctcttcttgaagaacaggccctgttgttactac

SEQ ID NO: 77118 - DNA, 80 bp, synthetic construct
  source 1..80: mol_type = other DNA
gctggtggtggctcttcttgaagaacaggccctgttgttactactgccgcctccatattatcaatcatcttcaggaggac

SEQ ID NO: 77119 - DNA, 80 bp, synthetic construct
  source 1..80: mol_type = other DNA
caggccctgttgttactactgccgcctccatattatcaatcatcttcaggaggactgacgatgctgcgaagatgatgaag

SEQ ID NO: 77120 - DNA, 80 bp, synthetic construct
  source 1..80: mol_type = other DNA
gcagaacaagtaggagcgggatccttccggccagggttctccctaccgcggggcagtgttttggtgtggagccctcaggc

SEQ ID NO: 77121 - DNA, 80 bp, synthetic construct
  source 1..80: mol_type = other DNA
acaactaccgctgttccaactactgccttctcaacgacgattgtcttctctacgattgaggaccatacaacaaacatggg

SEQ ID NO: 77122 - DNA, 80 bp, synthetic construct
  source 1..80: mol_type = other DNA
actcagaagaatttaagggactttccgctggggactttccagagagggcggtccagtgggcgggactgggagtggcttcc

SEQ ID NO: 77123 - DNA, 80 bp, synthetic construct
  source 1..80: mol_type = other DNA
tacagatggagcaaactgtttgtactattctgtacattcactgtactgaaagctgacaccatagagtgggctaccatgca

SEQ ID NO: 77124 - DNA, 80 bp, synthetic construct
  source 1..80: mol_type = other DNA
tgcagaatatgcatttagagcttggatttcaaaatgtgtggaaaaacacccttgtttctacttatagtgagtcgtaatta

SEQ ID NO: 77125 - DNA, 80 bp, synthetic construct
  source 1..80: mol_type = other DNA
gaggattatgggtgtcaggaggagaggaacacacagagaaaggagatgcaggaggaccaggagaagacagagaactctct

SEQ ID NO: 77126 - DNA, 80 bp, synthetic construct
  source 1..80: mol_type = other DNA
ggcaaaattagtgataatcacttattggggtctaacaacaggagaacagccttggcatctaggacacggagtatccatag

SEQ ID NO: 77127 - DNA, 80 bp, synthetic construct
  source 1..80: mol_type = other DNA
gactgcgctctttatataacgccttagcagttctttattgtgtccataataaaagacagatacataatacacaagaagct

SEQ ID NO: 77128 - DNA, 80 bp, synthetic construct
  source 1..80: mol_type = other DNA
aatggagactaggaaaatacaagacacaagttgatcctgagatggcagacaagctaatacatctttattattttaattgt

SEQ ID NO: 77129 - DNA, 80 bp, synthetic construct
  source 1..80: mol_type = other DNA
ttagggcaacacatctataacacatatggagacacctgggagggggtagaggcaattatcagaatactacaacaattact

SEQ ID NO: 77130 - DNA, 80 bp, synthetic construct
  source 1..80: mol_type = other DNA
gtttatccattataggattggctgccagcacagcagaatagggattactcctcaaaggagaaggaatggagccagtagat

SEQ ID NO: 77131 - DNA, 80 bp, synthetic construct
  source 1..80: mol_type = other DNA
ggattcatagcgctaggggtagcaattataatagcagtagtgatctgggtattactatataaagaatataagaaaataaa

SEQ ID NO: 77132 - DNA, 80 bp, synthetic construct
  source 1..80: mol_type = other DNA
ttggaccacataaaagaggtaaaggaacagcacaagcccaagccaaaagagccagaagcaggggcagcggcagcagtaga

SEQ ID NO: 77133 - DNA, 80 bp, synthetic construct
  source 1..80: mol_type = other DNA
attgcaggaagaaataaaacaattaagacagagaataagaagtagagcagaagatagtgacaatgagagtgatgaggagg

SEQ ID NO: 77134 - DNA, 80 bp, synthetic construct
  source 1..80: mol_type = other DNA
cagagtgggtggctactctgctgtttcctactaagcttgacaattgggtttgaaccaaaatgggtaacagtgtactatgg

SEQ ID NO: 77135 - DNA, 80 bp, synthetic construct
  source 1..80: mol_type = other DNA
gagggtagtggaactaacagtagcagtgaaaatgtggcaaggaatagtgagacagggacaacaaatagcctagacctaga

SEQ ID NO: 77136 - DNA, 80 bp, synthetic construct
  source 1..80: mol_type = other DNA
tgatctgttggtgcaatggaataagacagtgtcaataaattgtacaaggccaggaaataatacaggaggacaggtacaaa

SEQ ID NO: 77137 - DNA, 80 bp, synthetic construct
  source 1..80: mol_type = other DNA
gactggggagcaatgtggaatagcacaaaagagaaaataaggaacctcctggggagcaaaaacataaccttcagggctcg

SEQ ID NO: 77138 - DNA, 80 bp, synthetic construct
  source 1..80: mol_type = other DNA
ggggaagaatgatggagacccagaagtaacacacttaatgctcaattgtggaggggaatttttctattgtaacacttcca

SEQ ID NO: 77139 - DNA, 80 bp, synthetic construct
  source 1..80: mol_type = other DNA
aattatttaacgagaacgagactcattcaaatcagactattactctgccctgtagagtaagacaaattgtaaatttgtgg

SEQ ID NO: 77140 - DNA, 80 bp, synthetic construct
  source 1..80: mol_type = other DNA
acaaaaataggaaaaggaatttatgcaccaccaattaggggaaatattacctgtaactccaatattactggactaattct

SEQ ID NO: 77141 - DNA, 80 bp, synthetic construct
  source 1..80: mol_type = other DNA
agaaagcagtggtggtggaaataatatcagtaatgtcagtgtatatcccacaggaggatacatggttaatttatggagac

SEQ ID NO: 77142 - DNA, 80 bp, synthetic construct
  source 1..80: mol_type = other DNA
aagagttgcataagtacgaagtagttagtgtagaacccataggagtagcaccaggtaaagctaaaagacgcacagtgagt

SEQ ID NO: 77143 - DNA, 80 bp, synthetic construct
  source 1..80: mol_type = other DNA
caagaacaacagaacacaaatgagaaatcactcttggagttgggtcattgggcaagtctgtggaactggtttgatattac

SEQ ID NO: 77144 - DNA, 80 bp, synthetic construct
  source 1..80: mol_type = other DNA
gctctcaagacagggtcagaaggactgcgctctttatataataccctagcagttctttattgtgtccatagtagaataca

SEQ ID NO: 77145 - DNA, 80 bp, synthetic construct
  source 1..80: mol_type = other DNA
ggtacacaatacacaagaagctttggacaaaataaaagagaaacaggaacagcacaagccgcccgagccaaaaaacccgg

SEQ ID NO: 77146 - DNA, 80 bp, synthetic construct
  source 1..80: mol_type = other DNA
ggattcttagcattagggttagcacttatcatagcagtaataatttgggtattactatatagagaatataaggaaataaa

SEQ ID NO: 77147 - DNA, 80 bp, synthetic construct
  source 1..80: mol_type = other DNA
attgcaagaaagaataaaacacataagacagagaataagagacagggcagaagatagtggcaatgagagtgatggggata

SEQ ID NO: 77148 - DNA, 80 bp, synthetic construct
  source 1..80: mol_type = other DNA
cagagctattggtcactcgtctgtctcttagtaagcttgatcaaggtgattgggtctgaacaacattgggcaacagtgta

SEQ ID NO: 77149 - DNA, 80 bp, synthetic construct
  source 1..80: mol_type = other DNA
gaggagccagttgatgacctcacccagaaaaatgtaacagacataggagataagagaatgaaaaattgctcatttaatgc

SEQ ID NO: 77150 - DNA, 80 bp, synthetic construct
  source 1..80: mol_type = other DNA
aaccactgatctaagagataaaaagaaaacagtttactctctgttttatgaagaggatgtagtacaaatcagtaataata

SEQ ID NO: 77151 - DNA, 80 bp, synthetic construct
  source 1..80: mol_type = other DNA
aatgtacacatggaataaagccagtgatatccactcagttaatcctaaatggaagcttaaatacagatgatattattatt

SEQ ID NO: 77152 - DNA, 80 bp, synthetic construct
  source 1..80: mol_type = other DNA
agaaatgatagtagtggtaatctattggtgcaatggaataagacagtgtcaataaattgtacaaggccaggaaataatac

SEQ ID NO: 77153 - DNA, 80 bp, synthetic construct
  source 1..80: mol_type = other DNA
aagaggacaagtgcaaataggacctgctatgacattttataacatagagagaatagtaggagacactaggcaagcgcact

SEQ ID NO: 77154 - DNA, 80 bp, synthetic construct
  source 1..80: mol_type = other DNA
gtattgtctctaaaaaagattggacaaaaatgtggaatagaacaaaagagaaaatagggagcaacaagaccttccaggca

SEQ ID NO: 77155 - DNA, 80 bp, synthetic construct
  source 1..80: mol_type = other DNA
cgtaacaagactgaaggagacccagaagtaacccacttaatgttcaattgtagaggagagtttttctattgtaacacttc

SEQ ID NO: 77156 - DNA, 80 bp, synthetic construct
  source 1..80: mol_type = other DNA
caaattatttgataaaaatttacttaacaagacaaacgagactattgttctgccctgtagaataaaacagattgtaaact

SEQ ID NO: 77157 - DNA, 80 bp, synthetic construct
  source 1..80: mol_type = other DNA
tgtggacaagggtaggaaaagggatttatgcaccaccagttaggggaaatcttacctgtaactccaatattactggactg

SEQ ID NO: 77158 - DNA, 80 bp, synthetic construct
  source 1..80: mol_type = other DNA
attctagagtatagtggtaacagtggtaacgaaatggtgtatccctcaggaggacacatggttaatctttggagacaaga

SEQ ID NO: 77159 - DNA, 80 bp, synthetic construct
  source 1..80: mol_type = other DNA
gttgcataactacaaagtagttagtatagaacccataggagtagcaccaagtaaagctaaaaggcacacagtgagtagag

SEQ ID NO: 77160 - DNA, 80 bp, synthetic construct
  source 1..80: mol_type = other DNA
cctcttatgatacaatctggaataatttaacctggcaagaatgggataagaaagtaagaaactattcaggtgtcatcttt

SEQ ID NO: 77161 - DNA, 80 bp, synthetic construct
  source 1..80: mol_type = other DNA
ggtacaggcaacaactagtgtctttgcacaaaggggaaactttaaaggcataaggagacccattaaatgtttcaattgtg

SEQ ID NO: 77162 - DNA, 80 bp, synthetic construct
  source 1..80: mol_type = other DNA
aattatgggtttcaggaggagaggagcacacagggaaaggagatgcaagagaaccaggagaggacagagaactctctgta

SEQ ID NO: 77163 - DNA, 80 bp, synthetic construct
  source 1..80: mol_type = other DNA
gcaagcggccttagggagaccagtattacctaagtgtgaatatccagcagggcacaaacaggtaggcaccttacaatatc

SEQ ID NO: 77164 - DNA, 80 bp, synthetic construct
  source 1..80: mol_type = other DNA
gattcatagcattaggattggcaattataatagcagtagtaatctgggtattaatctatagagaatataagaaaataaaa

SEQ ID NO: 77165 - DNA, 80 bp, synthetic construct
  source 1..80: mol_type = other DNA
ttgcaggggagaataaaaacaataagtggcaatgggaataatgggaatgaagagtggttggccattcttctgtctcctga

SEQ ID NO: 77166 - DNA, 80 bp, synthetic construct
  source 1..80: mol_type = other DNA
aaagagaaacaggaccagcacaagcccgagccaaaaaacccagaaacagaggcagcggcagcagctgatagcaatatcag

SEQ ID NO: 77167 - DNA, 80 bp, synthetic construct
  source 1..80: mol_type = other DNA
aaaaatgagaaaaagacagctaacacgacaacttctacagggaacataagtgcagaagacctagaagaaaaacacatgaa

SEQ ID NO: 77168 - DNA, 80 bp, synthetic construct
  source 1..80: mol_type = other DNA
aaattgctcattcaatgcaaccactgaggtgacagataaacagaagaaagtttactctctgttttatgcagaagatgtaa

SEQ ID NO: 77169 - DNA, 80 bp, synthetic construct
  source 1..80: mol_type = other DNA
ggcaatatgttggtgcagtggagtgagacagtgtcaataaattgtacaaggccaggaaataatacagggggacaggtgca

SEQ ID NO: 77170 - DNA, 80 bp, synthetic construct
  source 1..80: mol_type = other DNA
gataggacctgctatgacattttataacatagaaaaaataataggagacattagacaagcacattgtattgtctctagaa

SEQ ID NO: 77171 - DNA, 80 bp, synthetic construct
  source 1..80: mol_type = other DNA
aagattgggaatcaatgtggaataaaacaaaagcaaaaataaaagagaccctgggagaaaacataacattcagggctcgg

SEQ ID NO: 77172 - DNA, 80 bp, synthetic construct
  source 1..80: mol_type = other DNA
aagaaaaatgaaggagacccagaagtaacaaatttaatgttcaattgtcatggagagtttttctattgtaatacttccaa

SEQ ID NO: 77173 - DNA, 80 bp, synthetic construct
  source 1..80: mol_type = other DNA
attatttgatgagggccagaataagacaaatggtactattactctgccctgtagaataaaacaaattgtaaatttgtgga

SEQ ID NO: 77174 - DNA, 80 bp, synthetic construct
  source 1..80: mol_type = other DNA
caagagtagggaaaggaatttatgcaccaccaattcggggaaatcttacctgtcactccaacattactggactgattcta

SEQ ID NO: 77175 - DNA, 80 bp, synthetic construct
  source 1..80: mol_type = other DNA
gaatatagtgaagatagtaaagatggcactggcacaaacacgacagtatatccctcaggaggaaacatggttgatctctg

SEQ ID NO: 77176 - DNA, 80 bp, synthetic construct
  source 1..80: mol_type = other DNA
gagacaagagttgcacaagtacaaagtagtcagtatagaacccataggagtagcaccaggtaaagctaaaagacgcacag

SEQ ID NO: 77177 - DNA, 80 bp, synthetic construct
  source 1..80: mol_type = other DNA
gggataatttaacctggcaacaatgggatcagaaagtaagaaactattcaggtgtcatttttggccttatagagcaggca

SEQ ID NO: 77178 - DNA, 80 bp, synthetic construct
  source 1..80: mol_type = other DNA
agaagaagaagaagaagaggaagtaggctttccagttcgccctcaggtaccattgaggccaatgacctataaagcagctt

SEQ ID NO: 77179 - DNA, 80 bp, synthetic construct
  source 1..80: mol_type = other DNA
gatatagcagggacaactagtactctggcagaacaggtggcatggatgactgctaatcctcctgttccagtaggagatat

SEQ ID NO: 77180 - DNA, 80 bp, synthetic construct
  source 1..80: mol_type = other DNA
tgtagtgaatgccacaagcaggctaaatgtaataacccctctgagaatagaaccgccgccaatccattagagctatttaa

SEQ ID NO: 77181 - DNA, 80 bp, synthetic construct
  source 1..80: mol_type = other DNA
gtgcagttttaatacaaccacagtattgaaagataaaaagcaggaacagcaagcactcttctatagaacagacctaatag

SEQ ID NO: 77182 - DNA, 80 bp, synthetic construct
  source 1..80: mol_type = other DNA
cactgaatgagacagcaaataatacactatatagattaattaattgcaacaccactaccattacacaagcatgcccaaaa

SEQ ID NO: 77183 - DNA, 80 bp, synthetic construct
  source 1..80: mol_type = other DNA
gtgacttttgagccactacccatacagtattgtgcaccagcagggtatgcactaatgaaatgcaagcagacaggatttaa

SEQ ID NO: 77184 - DNA, 80 bp, synthetic construct
  source 1..80: mol_type = other DNA
atacttgtaatgagaagggtgtatgcagtatcaataatcatacaggtaattacacaggggagaacataataacactgcct

SEQ ID NO: 77185 - DNA, 80 bp, synthetic construct
  source 1..80: mol_type = other DNA
gctcgcctgcttgccattgaaacctacttaagggatcagcaactcctaggactgtggggatgctcaggacaaatagtatg

SEQ ID NO: 77186 - DNA, 80 bp, synthetic construct
  source 1..80: mol_type = other DNA
gctaatgaaaaaaagttattagagttagaccaatgggcacaattgtggaactggttggacataacgcaatggttgtggta

SEQ ID NO: 77187 - DNA, 80 bp, synthetic construct
  source 1..80: mol_type = other DNA
gtcattccaggggcggggagtcttcgagctctcggacgaaaaggcaacgaacccgatcgtgccttccttcttcatgatat

SEQ ID NO: 77188 - DNA, 80 bp, synthetic construct
  source 1..80: mol_type = other DNA
aaatataacctgattctgagcgaatatctgagctttgtgtataacagccagagcgcggtgcagattccgatttattatag

SEQ ID NO: 77189 - DNA, 80 bp, synthetic construct
  source 1..80: mol_type = other DNA
aaccgctgtttgaagaatataaagatgtgattaacaacgcgaccctgctgagcattctgagctatagctatgataaatat

SEQ ID NO: 77190 - DNA, 80 bp, synthetic construct
  source 1..80: mol_type = other DNA
aacgcggtggaacgtaaactggtgaactatgcgaaaggcaaaccgctggaagcggatctgaccgcgaacgaactggatta

SEQ ID NO: 77191 - DNA, 80 bp, synthetic construct
  source 1..80: mol_type = other DNA
tgaaaacaacaaaattaccagcgaactgtttcagagcgcggaagaatataccgatagcctgatggatccggcgattctga

SEQ ID NO: 77192 - DNA, 80 bp, synthetic construct
  source 1..80: mol_type = other DNA
ccagcctgagcagcaacctgaacgcggtgatgttttggctggaacgtcatagcaccgatgtggcggatgcgaacaaaatt

SEQ ID NO: 77193 - DNA, 80 bp, synthetic construct
  source 1..80: mol_type = other DNA
tataaacgtcgtctggatctgtttaccattgtggcgagcaccattaacaaatatggcgtgccgcgtcataacgaaaaata

SEQ ID NO: 77194 - DNA, 80 bp, synthetic construct
  source 1..80: mol_type = other DNA
cagcaacagcgaactggaaaaacgttgcattgaatttcatgcgaaatgcgtggatagcagcaaaaaaagcctgagcctga

SEQ ID NO: 77195 - DNA, 80 bp, synthetic construct
  source 1..80: mol_type = other DNA
tatcgtaaacgtggcgcgaaacgtgaaaacctgctgcagcagaacgaacgtctgcaggaagaaaaagaaattgaaaaaaa

SEQ ID NO: 77196 - DNA, 80 bp, synthetic construct
  source 1..80: mol_type = other DNA
tgattaccgatgcgcaggatgatgtgaaaattgcggatgaagtgaaaaaaagcagcaaagaagaaagcaaacagctgctg

SEQ ID NO: 77197 - DNA, 80 bp, synthetic construct
  source 1..80: mol_type = other DNA
cgaaagaaagcattctgaaaaaactggaagatattcgtccggaacaggcgaaaaaacagaccaaactgtttcgtattttt

SEQ ID NO: 77198 - DNA, 80 bp, synthetic construct
  source 1..80: mol_type = other DNA
gaaccgcgtcagctgccgatttatcgtgcgaacggcgaaaaagaactgcgtaaccgttggtattggaaactgaaaaaaga

SEQ ID NO: 77199 - DNA, 80 bp, synthetic construct
  source 1..80: mol_type = other DNA
aaatgccggattatctgctgctgaaagatatggcggtggaaaacaaaaacagccgtgatgcgggcaaagtggtggatagc

SEQ ID NO: 77200 - DNA, 80 bp, synthetic construct
  source 1..80: mol_type = other DNA
caccgatgtgaccatggaaaacaaaagcaacagcaaaaaacagcagctgagcgataaagtgctgagccagaaagaagaag

SEQ ID NO: 77201 - DNA, 80 bp, synthetic construct
  source 1..80: mol_type = other DNA
aaatgccagattatttgttgctgaaggatatggctgtagagaataaaaactctagagatgctggtaaagttgtagattct

SEQ ID NO: 77202 - DNA, 80 bp, synthetic construct
  source 1..80: mol_type = other DNA
tgagaaaatccctttccatttacagataagcaagcaagtgatacatgccgagattcaacatttaggtcattggatggatg

SEQ ID NO: 77203 - DNA, 80 bp, synthetic construct
  source 1..80: mol_type = other DNA
tgaaagaattcccttccatttacaaataagcaaacaagtaatacatgctgaaattcaacatttaggtcattggatggatg

SEQ ID NO: 77204 - DNA, 80 bp, synthetic construct
  source 1..80: mol_type = other DNA
ttgggactgtttcaaaatttcaaccctctgatacattgttattcttaggtccactcgaacagggtgggttgattttaaaa

SEQ ID NO: 77205 - DNA, 80 bp, synthetic construct
  source 1..80: mol_type = other DNA
ttggaactatttcaaaatttcaaccctctgatacattattattcttaggcccacttgaacaaggtggattgatttttaag

SEQ ID NO: 77206 - DNA, 80 bp, synthetic construct
  source 1..80: mol_type = other DNA
ttggaactgtttcaaaattccagccctcagacactctgttattcttagggccccttgagcaaggtggattaatatttaag

SEQ ID NO: 77207 - DNA, 80 bp, synthetic construct
  source 1..80: mol_type = other DNA
agaaaaaatcccttttcacctacaaattagtaagcagataatccatgctgagattcaacatttagggcattggatggatg

SEQ ID NO: 77208 - DNA, 80 bp, synthetic construct
  source 1..80: mol_type = other DNA
ttggaactgtttcaaaatttcaaccctcagacactttactattcctagggcccctcgagcaaggtggactaatatttaag

SEQ ID NO: 77209 - DNA, 80 bp, synthetic construct
  source 1..80: mol_type = other DNA
agaaagaatacctttccatctacagataagtaaacagataattcatgctgaaattcaacatttaggccattggatggatg

SEQ ID NO: 77210 - DNA, 80 bp, synthetic construct
  source 1..80: mol_type = other DNA
ttggaactatttcaaagtttcagccatcagatactttgttatttttaggtcccctcgaacaaggtggattgatattcaaa

SEQ ID NO: 77211 - DNA, 80 bp, synthetic construct
  source 1..80: mol_type = other DNA
tcatctgttcaaccctggtatctagagatccctcagatcacgtagactgaggcagaaaatctctagcagtggcgcccgaa

SEQ ID NO: 77212 - DNA, 80 bp, synthetic construct
  source 1..80: mol_type = other DNA
tcagcccctccgatggaggaggtaatgcagggacaagagaatcaggaacagaagggggagcagaacgaactctatccgtt

SEQ ID NO: 77213 - DNA, 80 bp, synthetic construct
  source 1..80: mol_type = other DNA
tagtccagaaggtgtctcaagaatctatagttatctggggaaaattgcctaaatttaagctgccagtcactagggagact

SEQ ID NO: 77214 - DNA, 80 bp, synthetic construct
  source 1..80: mol_type = other DNA
aagacagggtcagacagcctgcagtcactctggaacacaatagcagtgctctggtgtgttcacaacagatatagagttga

SEQ ID NO: 77215 - DNA, 80 bp, synthetic construct
  source 1..80: mol_type = other DNA
tctagaaagaccaaggactggtgttacaaacaccattttgaatccctaaatccaagagtcagttcaagtgtacatattcc

SEQ ID NO: 77216 - DNA, 80 bp, synthetic construct
  source 1..80: mol_type = other DNA
agacacacagcaggcgatacaaaagttaaaggaagtaatggggagcaggaagtctgcagaggtcgctaaggaagacacag

SEQ ID NO: 77217 - DNA, 80 bp, synthetic construct
  source 1..80: mol_type = other DNA
ctctcgtttcagaccctcaaccggcaccagccgggagcagaagcaccaggaggaacaggagaaggaggtggagaagaaga

SEQ ID NO: 77218 - DNA, 80 bp, synthetic construct
  source 1..80: mol_type = other DNA
caggcccagattgacaccctcgcctcagggattcttaccacttttctacacggacctcaggacaataatcttgtggattt

SEQ ID NO: 77219 - DNA, 80 bp, synthetic construct
  source 1..80: mol_type = other DNA
agtagataccattgcagtggcagttgcaaattggactgacggcataatagcagggatacaaaggatagggagaggaattc

SEQ ID NO: 77220 - DNA, 80 bp, synthetic construct
  source 1..80: mol_type = other DNA
cagtctccagggaattagcagctagaggagggatacccagttcctttactcctcaaaacaatgcagcccttgcattccta

SEQ ID NO: 77221 - DNA, 80 bp, synthetic construct
  source 1..80: mol_type = other DNA
gaaagtcaccaagaagaagaagtaggtttcccagtaagacctcaagtgcctctaaggccaatgacatataaactagcatt

SEQ ID NO: 77222 - DNA, 80 bp, synthetic construct
  source 1..80: mol_type = other DNA
caagaagaagaagtaggtttcccagtaagacctcaagtgcctctaaggccaatgacatataaactagcatttgacctcag

SEQ ID NO: 77223 - DNA, 80 bp, synthetic construct
  source 1..80: mol_type = other DNA
gttccaccattgaagaactcagacggcaaaaataatgaatttaacttgtccttcatgaaaaaatgcctgtttttctacta

SEQ ID NO: 77224 - DNA, 80 bp, synthetic construct
  source 1..80: mol_type = other DNA
aaagaatgagacgagctcgtgctcgtccagcacagaaccagcagcagagggagacagcagcaggaagtaggaccagcatc

SEQ ID NO: 77225 - DNA, 80 bp, synthetic construct
  source 1..80: mol_type = other DNA
agacacttggcccgcgagctatatccggagtattacaagaactgatgatacagaagatacaaagactgctgacacagaaa

SEQ ID NO: 77226 - DNA, 80 bp, synthetic construct
  source 1..80: mol_type = other DNA
ctcgaggccagtacagcggttttgtaagaacactgtttcagcaaatgagagatgtgcttggaacatttgacactgtccaa

SEQ ID NO: 77227 - DNA, 80 bp, synthetic construct
  source 1..80: mol_type = other DNA
gcagctgcgcctccggaacaaagcagaatgcaattctcctctttaaccgtaaatgtaagaggatcgggcatgagaatact

SEQ ID NO: 77228 - DNA, 80 bp, synthetic construct
  source 1..80: mol_type = other DNA
tccggatgagggtactgctggagtggaatcggctgtactaaggggctttctgatcttggggaaggaagacaaaagatacg

SEQ ID NO: 77229 - DNA, 80 bp, synthetic construct
  source 1..80: mol_type = other DNA
tgctggagagggagctagtgagaaaaacacggttcttgccagtggctggtggaaccagcagtgtttacatcgaagtgctg

SEQ ID NO: 77230 - DNA, 80 bp, synthetic construct
  source 1..80: mol_type = other DNA
ccaataccaataatagtagtgggttagaagggataacgggagaactaagaaactgctctttcaatgtcacagaggaaata

SEQ ID NO: 77231 - DNA, 80 bp, synthetic construct
  source 1..80: mol_type = other DNA
atgcagattgccctcttagcaatgactattacactacacctcaatcagaatgaatgcagcaaaccctcgaataaccaggt

SEQ ID NO: 77232 - DNA, 80 bp, synthetic construct
  source 1..80: mol_type = other DNA
agtgccctgtgaaccaatcataatagaaagggacatagtgcatctgaatagcactaccatagagaaggaaatttgtccta

SEQ ID NO: 77233 - DNA, 80 bp, synthetic construct
  source 1..80: mol_type = other DNA
atgactcaatcagagataatagcaattggttctgtttctctaactattgcttcaatatgcttcctcatgcagattgccct

SEQ ID NO: 77234 - DNA, 80 bp, synthetic construct
  source 1..80: mol_type = other DNA
attacactacacctcaatcagaatgaatgcagcaaaccctcgaataaccaggtagtgccctgtgaaccaatcataataga

SEQ ID NO: 77235 - DNA, 80 bp, synthetic construct
  source 1..80: mol_type = other DNA
atcgtatgcgaattatacggcaagtgaaacatttttgacttcaacattatgtttatattatccaaacgaagcagctactg

SEQ ID NO: 77236 - DNA, 80 bp, synthetic construct
  source 1..80: mol_type = other DNA
agaaaacgttgctgtaatacaggtgggaggtccagacgtacttgacataacagcggatccaactactgcaccgcaaactg

SEQ ID NO: 77237 - DNA, 80 bp, synthetic construct
  source 1..80: mol_type = other DNA
ttcatacgtgacgaacatttctgatgaagttagtgaaattgggactaggaaagcaacgaacgttacagttaatccaggac

SEQ ID NO: 77238 - DNA, 80 bp, synthetic construct
  source 1..80: mol_type = other DNA
ggtagtaatacaacaatacgagttagtaatgctatacaaactggagaggatttaaaaacgatggcggacgcatcaacgca

SEQ ID NO: 77239 - DNA, 80 bp, synthetic construct
  source 1..80: mol_type = other DNA
aatttcaaacgttagtagaagcttacgactacgcgaatttactacgcaaactgataatttaagctttgatgacatatcag

SEQ ID NO: 77240 - DNA, 80 bp, synthetic construct
  source 1..80: mol_type = other DNA
taaggtaccaaaagtcctccgatctgagctgcaggttttccttgcccagagactgttcaacaccatgcagagattgtctg

SEQ ID NO: 77241 - DNA, 80 bp, synthetic construct
  source 1..80: mol_type = other DNA
ggaaacattaggtggaaaggattattcaatccttactcagggaacaacattgaagagctgcaaactcttataagctgctg

SEQ ID NO: 77242 - DNA, 80 bp, synthetic construct
  source 1..80: mol_type = other DNA
ctgccccttttcagttgcacaaggtaggaggaaacattaggtggaaaggattattcaatccttactcagggaacaacatt

SEQ ID NO: 77243 - DNA, 80 bp, synthetic construct
  source 1..80: mol_type = other DNA
gtttggggggtttgggttgcgaaagcaggtactgatccaaaatggaagactttgtgcgacaatgcttcaatccaatgatt

SEQ ID NO: 77244 - DNA, 80 bp, synthetic construct
  source 1..80: mol_type = other DNA
gtgttggtgcataatttggggtagttggggaaaatgattgcaatcattgcaatagcgatattggcaacagccggaaagtc

SEQ ID NO: 77245 - DNA, 80 bp, synthetic construct
  source 1..80: mol_type = other DNA
aaatgttcctcagattgagactagaggactcttcggggctattgcaggatttattgaaggaggttggactggaatgatag

SEQ ID NO: 77246 - DNA, 80 bp, synthetic construct
  source 1..80: mol_type = other DNA
atgggtggtatggctatcaccatgaaaattctcaaggctcaggatatgcggcagacagagaaagcactcaaaaggctata

SEQ ID NO: 77247 - DNA, 80 bp, synthetic construct
  source 1..80: mol_type = other DNA
atgaacacacaatttgaagctgtcgaccacgaattttcgaacctggagagaagaattgacaatctgaacaaaagaatgga

SEQ ID NO: 77248 - DNA, 80 bp, synthetic construct
  source 1..80: mol_type = other DNA
agatgggtttctagatgtctggacctacaatgctgaactgctggttcttcttgaaaacgagagaacattagacctgcatg

SEQ ID NO: 77249 - DNA, 80 bp, synthetic construct
  source 1..80: mol_type = other DNA
atgcaaatgtgaagaacctatacgaaaaggtcaaatcgcaactaagggacaatgctaatgatctaggaaatgggtgcttc

SEQ ID NO: 77250 - DNA, 80 bp, synthetic construct
  source 1..80: mol_type = other DNA
gaattctggcataaatgtgacaatgagtgcatagagtctgtcaaaaatggtacctatgactatcccaaatatcaggacga

SEQ ID NO: 77251 - DNA, 80 bp, synthetic construct
  source 1..80: mol_type = other DNA
gagcaaattaaacaggcaagaaatagaatcggtaaagctagagagtcttggtgtgtatcaaatccttgctatttatagta

SEQ ID NO: 77252 - DNA, 80 bp, synthetic construct
  source 1..80: mol_type = other DNA
cacattcaattgaattgctggagaaccagaaggaagaaagattctgcaagatcttgaacaaggcccctttagacctaaag

SEQ ID NO: 77253 - DNA, 80 bp, synthetic construct
  source 1..80: mol_type = other DNA
cggtatcgagcagcctagtcttggtagggctgatcatagcaatgggtctttggatgtgttcaaatggctcaatgcaatgc

SEQ ID NO: 77254 - DNA, 80 bp, synthetic construct
  source 1..80: mol_type = other DNA
aaatggctcaatgcaatgcaggatatgtatataattaagaaaaacaccaatagcatgaaaattctgcttatggtacctga

SEQ ID NO: 77255 - DNA, 80 bp, synthetic construct
  source 1..80: mol_type = other DNA
ggatgcaccatagagggttggatcttggggaatcctcagtgtgacctattgcttggtgatcaaagctggtcatatatagt

SEQ ID NO: 77256 - DNA, 80 bp, synthetic construct
  source 1..80: mol_type = other DNA
ggaaaggcctactgctcaaaatgggatttgctacccaggagctttgaatgaggtggaagaactgaaagcacttattggat

SEQ ID NO: 77257 - DNA, 80 bp, synthetic construct
  source 1..80: mol_type = other DNA
caggaggaagggtagaaagatttgagatgtttcccaaaagtacatggaccggagtagacacaagcagtggggtaacaaag

SEQ ID NO: 77258 - DNA, 80 bp, synthetic construct
  source 1..80: mol_type = other DNA
gcttgcccttataatagtggttcatctttctatagaaacctcctatggataataaagaccaaatcagcagcatatccagt

SEQ ID NO: 77259 - DNA, 80 bp, synthetic construct
  source 1..80: mol_type = other DNA
aattaaaggaaattacaacaacactggaaaccaaccaatcctttatttctggggtgtgcaccatcctcctgacaccaatg

SEQ ID NO: 77260 - DNA, 80 bp, synthetic construct
  source 1..80: mol_type = other DNA
agcaaaatactctgtatggctctggtgataggtatgttagaatgggaactgaaagcatgaatttcgccaagagtccggaa

SEQ ID NO: 77261 - DNA, 80 bp, synthetic construct
  source 1..80: mol_type = other DNA
attgcagcaagacctgccgtgaacggtcaaagaggcagaattgattattactggtccattttgaagccaggggaaacctt

SEQ ID NO: 77262 - DNA, 80 bp, synthetic construct
  source 1..80: mol_type = other DNA
agacaaaatctgcattggataccatgccaacaattcaacaacacaagtggacacgatactcgaaagaaatgtcaccgtca

SEQ ID NO: 77263 - DNA, 80 bp, synthetic construct
  source 1..80: mol_type = other DNA
gaatgtggagtctaatgggaatctaatcgccccttggtatgcatacaaatttgtcagcacaaataataagggagccgtct

SEQ ID NO: 77264 - DNA, 80 bp, synthetic construct
  source 1..80: mol_type = other DNA
tcaagtcaaatttaccaatcgagaactgtgatgccacatgccagactatagcaggagtcctgaggactaataaaacattt

SEQ ID NO: 77265 - DNA, 80 bp, synthetic construct
  source 1..80: mol_type = other DNA
cagaatgtgagccctctgtggataggagaatgccccaaatatgtgaaaagtgaaagtttgaggcttgcaactggactgag

SEQ ID NO: 77266 - DNA, 80 bp, synthetic construct
  source 1..80: mol_type = other DNA
ggtgtgtttgggttgtgggggaatttcgtagccagctaaaatgggaataatagcactaatagctatactattagtaacaa

SEQ ID NO: 77267 - DNA, 80 bp, synthetic construct
  source 1..80: mol_type = other DNA
ccattcccagttgggtccggttccttccccgatggggcgcagatccaatacttttcgtaaaatgcaaaaaaaaaaaaaaa

SEQ ID NO: 77268 - DNA, 80 bp, synthetic construct
  source 1..80: mol_type = other DNA
ttgtgtggacgatagtaggtatagaagttaagagagtgctgaagcaaagaaaaatagatagaataattagaagaataagt

SEQ ID NO: 77269 - DNA, 80 bp, synthetic construct
  source 1..80: mol_type = other DNA
gcataccaaaataaaatagcgcaatgcacagacgtgtagacacagtactagaaaagaatgtaacagtaacacactctgtt

SEQ ID NO: 77270 - DNA, 80 bp, synthetic construct
  source 1..80: mol_type = other DNA
gctcaacaaggatttaccagattttggcgatctattcaactgtcgccagttcattggtacctggtattcccccccgggga

SEQ ID NO: 77271 - DNA, 80 bp, synthetic construct
  source 1..80: mol_type = other DNA
cgacacagagatccggagaaaaatacattgagcatccttttaatttggttggtaccgagatatgcattcgcaatggaaag

SEQ ID NO: 77272 - DNA, 80 bp, synthetic construct
  source 1..80: mol_type = other DNA
cggggcgcggtctaaacaacctcccccgagggacataccacaaaaacccccacgaccgcccaccccagaactggtcaaaa

SEQ ID NO: 77273 - DNA, 80 bp, synthetic construct
  source 1..80: mol_type = other DNA
aacggggaggatgagctagtggtttcttacagtgttaaagatggcgtctctggtctgcccgacctcaccactgtcaggca

SEQ ID NO: 77274 - DNA, 80 bp, synthetic construct
  source 1..80: mol_type = other DNA
aagaggccctgtattccatcattcaaattgccggagccgcatttgtcaccacgcgcatcgctaagcgcatgaacatacaa

SEQ ID NO: 77275 - DNA, 80 bp, synthetic construct
  source 1..80: mol_type = other DNA
acctgaagaagacaatactgccttcagtgttcccccactcaaccagagggagaatagggacgccaaggagccactaactg

SEQ ID NO: 77276 - DNA, 80 bp, synthetic construct
  source 1..80: mol_type = other DNA
gggtctcccccagcctgttcataacatcaactcatgtaatacctcagggtgcacaagagtttttcggagtgcccatcaaa

SEQ ID NO: 77277 - DNA, 80 bp, synthetic construct
  source 1..80: mol_type = other DNA
aaatagttgcagaagaccttctatctcctagtgtaatggatgtgggagatttcaagatatctatcaatgagggccttccc

SEQ ID NO: 77278 - DNA, 80 bp, synthetic construct
  source 1..80: mol_type = other DNA
ctagaggccccaatcatgatgacccatctgaatcaatgataccacactcccaaagacccatacaattaatgtctctgttg

SEQ ID NO: 77279 - DNA, 80 bp, synthetic construct
  source 1..80: mol_type = other DNA
gccactcaaaaattgcaacaaggtttaatgaaggtcaaacaggagatgcttttagaaggtggattctttgaaacagatgc

SEQ ID NO: 77280 - DNA, 80 bp, synthetic construct
  source 1..80: mol_type = other DNA
cttcaggggcattgccaggtagaactaatcttagggccactgtccccgctcggggctcctctagtgcatttcctaatact

SEQ ID NO: 77281 - DNA, 80 bp, synthetic construct
  source 1..80: mol_type = other DNA
tcccctgtcacttctgtgtattcaaatcaaactgtttcaacgagacttggttcttcagcaggttctggcaccagtgtctc

SEQ ID NO: 77282 - DNA, 80 bp, synthetic construct
  source 1..80: mol_type = other DNA
atgattctaagttaaagaaggtggctaacatattcctatgtgctctatcctcactgtttaccagacccattaaagacatc

SEQ ID NO: 77283 - DNA, 80 bp, synthetic construct
  source 1..80: mol_type = other DNA
caggggaccagcgcgtgggtctcatcccgcgcaatggtgtcgaccattgggacgcgtacaagggagaaagggttgtcctg

SEQ ID NO: 77284 - DNA, 80 bp, synthetic construct
  source 1..80: mol_type = other DNA
ggaggcactgtactccatcatccaaattgctggggctgcatttgtcaccacgcgcattactaagcgcatgaacatacaga

SEQ ID NO: 77285 - DNA, 80 bp, synthetic construct
  source 1..80: mol_type = other DNA
gaacggggagtcattcacaggaaaattagcagatcaggcctccaaggccaatctaatgtttgaagaggggaagaacatga

SEQ ID NO: 77286 - DNA, 80 bp, synthetic construct
  source 1..80: mol_type = other DNA
ttgaatcaagaaccaaaccatttaccgttccaatcttaactgttgaggaaatgaccaattcaagattccccattcctttg

SEQ ID NO: 77287 - DNA, 80 bp, synthetic construct
  source 1..80: mol_type = other DNA
ccacaagaagtgatggctcgactcgcggccacaaggccacagtgctcactgggagtgccgacttcgccccaaaattgggc

SEQ ID NO: 77288 - DNA, 80 bp, synthetic construct
  source 1..80: mol_type = other DNA
cttcgggggcattgtcaggaagaattaatcccaggactcccacccccgctcggggctcctctagtacatcttctagtgct

SEQ ID NO: 77289 - DNA, 80 bp, synthetic construct
  source 1..80: mol_type = other DNA
ctgtcctctacttccaggaacatcaactaccagcacgggaccctgcaagacctgcacgactctgctgctatgcctcatct

SEQ ID NO: 77290 - DNA, 80 bp, synthetic construct
  source 1..80: mol_type = other DNA
tcttgttggttcttgtggactaccaaggtatgttgcccgttcctgctcaaggaacctctatgtttccctcttgttgctgt

SEQ ID NO: 77291 - DNA, 80 bp, synthetic construct
  source 1..80: mol_type = other DNA
acaaaaccttcagacggaaattgcacttgtattcccatcccatcatcttgggctttcgcaagattcctatgggagtgggc

SEQ ID NO: 77292 - DNA, 80 bp, synthetic construct
  source 1..80: mol_type = other DNA
cttcttccgggataaaacaccctgttactactgctgcctctcccacatcaaccatcttctcgacggctggcgcccctgca

SEQ ID NO: 77293 - DNA, 80 bp, synthetic construct
  source 1..80: mol_type = other DNA
tgttaacatgggcctaaaaatcagacaactattgtggtttcacatttcctgtcttactttggaagagaaacagtctagat

SEQ ID NO: 77294 - DNA, 80 bp, synthetic construct
  source 1..80: mol_type = other DNA
gccagcaggtcctcctcctgggaccaccaatactcaggcaagaaggaagccaactcccatctctcctcctcctgccaaca

SEQ ID NO: 77295 - DNA, 80 bp, synthetic construct
  source 1..80: mol_type = other DNA
ctcatcctcaggccagaagacggaacactcccatctctccacctcttctggacaatcatccacaggggaggctgtggaat

SEQ ID NO: 77296 - DNA, 80 bp, synthetic construct
  source 1..80: mol_type = other DNA
tctgctggtgtctaccgttctcgaacagaacccccagtgaggaccacggctcctcctgctggtggctccttttccagaac

SEQ ID NO: 77297 - DNA, 80 bp, synthetic construct
  source 1..80: mol_type = other DNA
atgccttgttgggcttggggactaatctttgtgttccgatcctctgtgattctttcctcatctgggattctatcctgatc

SEQ ID NO: 77298 - DNA, 80 bp, synthetic construct
  source 1..80: mol_type = other DNA
caacttttgtaccagggttaacatttgggccagggttccttttggggtggagccctcttgctcagggcatattgccaact

SEQ ID NO: 77299 - DNA, 80 bp, synthetic construct
  source 1..80: mol_type = other DNA
acggagccaactctgcgttcggaattgctacttcaaccccaattgggacttcaagcccaacgcagatcacgggccagagg

SEQ ID NO: 77300 - DNA, 80 bp, synthetic construct
  source 1..80: mol_type = other DNA
cgctcaggacgtccacaactgtgtggccgccaatgctggtgtggcggcatcctttcggggtggggaacgcctcccactgg

SEQ ID NO: 77301 - DNA, 80 bp, synthetic construct
  source 1..80: mol_type = other DNA
cttattgggggggaggcctcatgctgctggtgtgctaaaaacatttcttccagatgctcctcctgcttcctccactaagc

SEQ ID NO: 77302 - DNA, 80 bp, synthetic construct
  source 1..80: mol_type = other DNA
tcatgctgctggtgtgctaaaaacatttcttccagatgctcctcctgcttcctccactaagcggccagcaaggaagccta

SEQ ID NO: 77303 - DNA, 80 bp, synthetic construct
  source 1..80: mol_type = other DNA
ggccagcaaggaagcctacccctcccttaactccttttataaaggaccctcctcctgacatgatgtggaattccaaaaaa

SEQ ID NO: 77304 - DNA, 80 bp, synthetic construct
  source 1..80: mol_type = other DNA
ctcctccaaactcttcaggatcccgctcctgctccctgggtttttttcttgttggctccaattcccgaaaaaagaaccca

SEQ ID NO: 77305 - DNA, 80 bp, synthetic construct
  source 1..80: mol_type = other DNA
cccgaaaaaagaacccagttgtactactgcctcacaactctccatcatgactcctaggattgctgaccctgttacgaaca

SEQ ID NO: 77306 - DNA, 80 bp, synthetic construct
  source 1..80: mol_type = other DNA
cagggtccatcagcagcacctcctgcagccccccctcatccgtccaccagtcggcagtctggaagccagcctcctcccat

SEQ ID NO: 77307 - DNA, 80 bp, synthetic construct
  source 1..80: mol_type = other DNA
agaatcctcacaataccacagatgccgacgaatctttctgttcccatcctctggtattctttcccgatcacttcttggac

SEQ ID NO: 77308 - DNA, 80 bp, synthetic construct
  source 1..80: mol_type = other DNA
agcaggtggaggtatttctaagttcgccatcgtatggggttgtttcccgatcaccacaagcatctgggattcggagccaa

SEQ ID NO: 77309 - DNA, 80 bp, synthetic construct
  source 1..80: mol_type = other DNA
gcaggtttcaccccagcacgagcaggtctttcggggtggagccctccgcctcagggtatattggcaacagggcctcaggc

SEQ ID NO: 77310 - DNA, 80 bp, synthetic construct
  source 1..80: mol_type = other DNA
agatacagtcatctccagcacattcagtggaaccccagaacaaggggccaagattttcctgctggtggctccagttccgg

SEQ ID NO: 77311 - DNA, 80 bp, synthetic construct
  source 1..80: mol_type = other DNA
aagggtggttggtgttacaagacttgccacagcaggtggaggtattcctaacttccccatcgtatggggatgattcctta

SEQ ID NO: 77312 - DNA, 80 bp, synthetic construct
  source 1..80: mol_type = other DNA
agttaaatcccatcggagagggagcattaggggcaaatttcaccccaccgggagcattcgggccggggttgagccctccg

SEQ ID NO: 77313 - DNA, 80 bp, synthetic construct
  source 1..80: mol_type = other DNA
cctcagggtatattgggaaggagcccagtagctcatcgtctttcgtccaccaatccgcagtcaggaagacagcctactcc

SEQ ID NO: 77314 - DNA, 80 bp, synthetic construct
  source 1..80: mol_type = other DNA
tgttcccaatcatctgggattcggagccaatccccacaatccagatgcggacttcaacccctccaaggatccagggccgg

SEQ ID NO: 77315 - DNA, 80 bp, synthetic construct
  source 1..80: mol_type = other DNA
tggaacaactgcccctgctccaactactgcctctcccataacggcggacttcgcaaggactgtggacaatgcaccatcca

SEQ ID NO: 77316 - DNA, 80 bp, synthetic construct
  source 1..80: mol_type = other DNA
tcaagtccagggttcaccccagcacacggcggtgggttcggcccgacccatcagggtcagggcaggtggacaccagtgcc

SEQ ID NO: 77317 - DNA, 80 bp, synthetic construct
  source 1..80: mol_type = other DNA
agcagggcttcctccaaccaccaccaatgcgcagtcaggaagacagcccaatcggctctcaggaagacaaagagacagtc

SEQ ID NO: 77318 - DNA, 80 bp, synthetic construct
  source 1..80: mol_type = other DNA
atcctcaggccaaagagacaattccacaacgttccaccagggaactctagatcccagagtgaggggcctgtattttcctg

SEQ ID NO: 77319 - DNA, 80 bp, synthetic construct
  source 1..80: mol_type = other DNA
tgctcgtgttacaggcggggtttttcttgttgacaagaatcctcacaataccacagagggattctttcccgatcaccagt

SEQ ID NO: 77320 - DNA, 80 bp, synthetic construct
  source 1..80: mol_type = other DNA
cctgctgatccctcagtgaggggaccagatattcctgctcctagcactgcctcccgcatagcaaaaactgtttcgacgac

SEQ ID NO: 77321 - DNA, 80 bp, synthetic construct
  source 1..80: mol_type = other DNA
ccgcatagcaaaaactgtttcgacgactgcctcccctgtatcgaccatcttcaccacgactgcggaatttgcaccaaaca

SEQ ID NO: 77322 - DNA, 80 bp, synthetic construct
  source 1..80: mol_type = other DNA
cctcccatctcttcaactccaatacacatctctccgcctgacatgcaaaggaatccccaggccttgcactgtaattccac

SEQ ID NO: 77323 - DNA, 80 bp, synthetic construct
  source 1..80: mol_type = other DNA
agacttccacctgagacggctaaaccctccagcgaggggcccctactccccagcaggaggctccgctgccactactgcca

SEQ ID NO: 77324 - DNA, 80 bp, synthetic construct
  source 1..80: mol_type = other DNA
cactactgccacccctgtttcgactactgcctcaacgatagggtacaccgtatcgaggattgaggacactgcaccgaaat

SEQ ID NO: 77325 - DNA, 80 bp, synthetic construct
  source 1..80: mol_type = other DNA
gcaaatcaggtaggagctcaggccatagggacaacagtcaccgcagcacctcctcctgcctccggcaataggcattcagg

SEQ ID NO: 77326 - DNA, 80 bp, synthetic construct
  source 1..80: mol_type = other DNA
acatttccacctgcacgtcacagtccttcccacaccaggcagtggaattccacaacattccaccaagctctgctagaccc

SEQ ID NO: 77327 - DNA, 80 bp, synthetic construct
  source 1..80: mol_type = other DNA
atgacaagttggtcttctttggggtggcaaggcatggggacgaatcttttggttcccattcctctgggattccttcctga

SEQ ID NO: 77328 - DNA, 80 bp, synthetic construct
  source 1..80: mol_type = other DNA
cctactcccatctctccttgggacttcacacccatcctcaatcactggcctaaaacaaatcaagtttcaacgggactctt

SEQ ID NO: 77329 - DNA, 80 bp, synthetic construct
  source 1..80: mol_type = other DNA
ctggatccggtactgccgggcctatatttttctgttggggggtaccgttccggaacaggaaaccctgttccgactactgc

SEQ ID NO: 77330 - DNA, 80 bp, synthetic construct
  source 1..80: mol_type = other DNA
ttccggaacaggaaaccctgttccgactactgcctcaccctcctcctgcctcttctctaggactggggaccctgcataat

SEQ ID NO: 77331 - DNA, 80 bp, synthetic construct
  source 1..80: mol_type = other DNA
cataatctggtcaatccaccttcaagattcctacgacccctgctcgtgttacagaactcgtttttcttgttgacactctc

SEQ ID NO: 77332 - DNA, 80 bp, synthetic construct
  source 1..80: mol_type = other DNA
ctcacccaacagtgaggcccgctggtggcttcggttgcggatccgtaaacccagcaccgactactgtctcaactactgcc

SEQ ID NO: 77333 - DNA, 80 bp, synthetic construct
  source 1..80: mol_type = other DNA
cggatccgtaaacccagcaccgactactgtctcaactactgcctcaatcttctcgacgactgtggacactactgcgaaca

SEQ ID NO: 77334 - DNA, 80 bp, synthetic construct
  source 1..80: mol_type = other DNA
agacccggagcattccattggcggtaggcccatccagtaggagcgctttcggtgtggacccgtttcgccccagcactatt

SEQ ID NO: 77335 - DNA, 80 bp, synthetic construct
  source 1..80: mol_type = other DNA
gactcttttgcggtggagccctcctgctgccgccatattgacaaatctgccagccatgcctcctcctgcctccaccaatc

SEQ ID NO: 77336 - DNA, 80 bp, synthetic construct
  source 1..80: mol_type = other DNA
ggcatcctcaggtcaagcagtgaaacacgggcctgttttttcctgctgtgctctatagtacaggaacgggacagcctgtt

SEQ ID NO: 77337 - DNA, 80 bp, synthetic construct
  source 1..80: mol_type = other DNA
cctgctactgcctcccctacaggaacaatcatccctggtactgctactgccgctccgataatggcaaacaccacaaggag

SEQ ID NO: 77338 - DNA, 80 bp, synthetic construct
  source 1..80: mol_type = other DNA
aggaacaatcatccctggtactgctactgccgctccgataatggcaaacaccacaaggagattcgaaccagccctgaaca

SEQ ID NO: 77339 - DNA, 80 bp, synthetic construct
  source 1..80: mol_type = other DNA
atgggagggcggtcttccaaacctcgacaaggcagggggacaagtctttgcgttcacaatcatggcggattgtttacaga

SEQ ID NO: 77340 - DNA, 80 bp, synthetic construct
  source 1..80: mol_type = other DNA
tccccaagcgcatcctccgttctgagccaattcacactatccagaacagcattttaacccctacacggatctaagaccag

SEQ ID NO: 77341 - DNA, 80 bp, synthetic construct
  source 1..80: mol_type = other DNA
atgcaatcaggccatgcagtggaactccacaacattccaccaagctctgctagaccccagagtgaggggcctatactttc

SEQ ID NO: 77342 - DNA, 80 bp, synthetic construct
  source 1..80: mol_type = other DNA
tttttctatttcccctatggaaggctggcattcttataagagagaaactacacgcagcgcctcattttgagggtcaccca

SEQ ID NO: 77343 - DNA, 80 bp, synthetic construct
  source 1..80: mol_type = other DNA
atcgaacatggagaacacaatgtcaggattactaggacccctgctcgtgttacaaagcggctttttcatgttgacgagaa

SEQ ID NO: 77344 - DNA, 80 bp, synthetic construct
  source 1..80: mol_type = other DNA
atggaaggttggtcttccaaacctacaaaaggtttggttcccaatcttctggtattctttcctcagggattctttcacga

SEQ ID NO: 77345 - DNA, 80 bp, synthetic construct
  source 1..80: mol_type = other DNA
aagcgggagcagtcggaccagggttcttcccaccagggttcagtcttttggggtggagccctttggctcggggcatattg

SEQ ID NO: 77346 - DNA, 80 bp, synthetic construct
  source 1..80: mol_type = other DNA
gcaacagggccattgacaactcctcctgcctcccctcctcctgcctccagaaaacagcctactcgaatctctcctactct

SEQ ID NO: 77347 - DNA, 80 bp, synthetic construct
  source 1..80: mol_type = other DNA
aatatatccacctcctcaagacatgcattgtaattccacaacattcaattccactctgatccaccccacactgaggggcc

SEQ ID NO: 77348 - DNA, 80 bp, synthetic construct
  source 1..80: mol_type = other DNA
tataatttactggtggaggctttccttctggaacatcgaattctgtaacaactactgccgctcccatatctgcaatcttc

SEQ ID NO: 77349 - DNA, 80 bp, synthetic construct
  source 1..80: mol_type = other DNA
tcaacgactgtcgactctgcgactgacgagcataacacaacatcgggattcataagatcactgctcgtattacacgtgct

SEQ ID NO: 77350 - DNA, 80 bp, synthetic construct
  source 1..80: mol_type = other DNA
gactgacgagcataacacaacatcgggattcataagatcactgctcgtattacacgtgctgttgttcttggtgacgttaa

SEQ ID NO: 77351 - DNA, 80 bp, synthetic construct
  source 1..80: mol_type = other DNA
tgccttcggagaccctgcgttcggagccaactgggacttcccccattgggactatcactggcccaaggataattgggtag

SEQ ID NO: 77352 - DNA, 80 bp, synthetic construct
  source 1..80: mol_type = other DNA
atgggaggttggtcttacaatcctggacaaggcacggggaggaatagagcagttctccatcctgtgcgattttttgtgga

SEQ ID NO: 77353 - DNA, 80 bp, synthetic construct
  source 1..80: mol_type = other DNA
caggccataaagcggaaatgcagaacgctccatcaaattttgccacatcccagagacagggacctatatgttcctgctgg

SEQ ID NO: 77354 - DNA, 80 bp, synthetic construct
  source 1..80: mol_type = other DNA
tcaccagattgatcggaacatgggagccaactcaaacaatccagattgggaattcaaccccaacaaggatcagaggccag

SEQ ID NO: 77355 - DNA, 80 bp, synthetic construct
  source 1..80: mol_type = other DNA
atgggaggtcggtcttgcaaacgcaggcaaggcattgtgacgaatctttgtgttctcaatctttttggattgtttcccga

SEQ ID NO: 77356 - DNA, 80 bp, synthetic construct
  source 1..80: mol_type = other DNA
tcatgccaccgttcaccccacctcatgggggttttaggggtcagagccctcaggctcagggaacagtgacaacagcacct

SEQ ID NO: 77357 - DNA, 80 bp, synthetic construct
  source 1..80: mol_type = other DNA
tttctagagacagtcgtgacagtcatccgcagggcaagtactggacattccaacaagttcccctagatccgagagtaagg

SEQ ID NO: 77358 - DNA, 80 bp, synthetic construct
  source 1..80: mol_type = other DNA
gcaaatccagtaggagcgggtcttttggggcgaaggcttaccgctccaggcatatgtcttttggggtggagccctcctgc

SEQ ID NO: 77359 - DNA, 80 bp, synthetic construct
  source 1..80: mol_type = other DNA
catgccatgcattggaactccacaacactccatctacctgtgccagatcccagagcgaggactgtatattttcctgctgg

SEQ ID NO: 77360 - DNA, 80 bp, synthetic construct
  source 1..80: mol_type = other DNA
ggaacagtaaaccctgtaccgactacggcctcacccatatcgtttatcttatcgacaactggcgtcctgcacccgaagat

SEQ ID NO: 77361 - DNA, 80 bp, synthetic construct
  source 1..80: mol_type = other DNA
accagttggaccccttcttcccagccaactatcactgtccagatggggacctcgaaccagccaaggatttctggccaggg

SEQ ID NO: 77362 - DNA, 80 bp, synthetic construct
  source 1..80: mol_type = other DNA
ggctattctgggatggaccactctttcggtaggaactcctcctgcctccgccatacggccttcaggaacacagccaactc

SEQ ID NO: 77363 - DNA, 80 bp, synthetic construct
  source 1..80: mol_type = other DNA
tttttacaactctgtggaaggcgggcttctatataagagagaacgtcaatcttctcgaggactggggaccctgcaccgaa

SEQ ID NO: 77364 - DNA, 80 bp, synthetic construct
  source 1..80: mol_type = other DNA
tctgtggaaggcgggcttctatataagagagaacgtcaatcttctcgaggactggggaccctgcaccgaacatggagaac

SEQ ID NO: 77365 - DNA, 80 bp, synthetic construct
  source 1..80: mol_type = other DNA
tttttcttgttgacaagaatcctcacaataccacaagtctagactcacaaccccgacaaggatcactggccagaggcaaa

SEQ ID NO: 77366 - DNA, 80 bp, synthetic construct
  source 1..80: mol_type = other DNA
cgggctctccccctcttacagacagtcatcctcaagccatacagtagacctccacaacattccaccaagctctgctagat

SEQ ID NO: 77367 - DNA, 80 bp, synthetic construct
  source 1..80: mol_type = other DNA
cccttagttaggggcggggactctgctgcagaaaatggagattcaagaacaactattcccgttcccactgctgctgttac

SEQ ID NO: 77368 - DNA, 80 bp, synthetic construct
  source 1..80: mol_type = other DNA
agaacaactattcccgttcccactgctgctgttaccacaagggctgttcttgctgagaggaggacacaacaccaaaattg

SEQ ID NO: 77369 - DNA, 80 bp, synthetic construct
  source 1..80: mol_type = other DNA
gctagtgtttctgttcgggtttttcttggagactttaaccatcacaaaccacaccctgctagactcgacaactcaaacaa

SEQ ID NO: 77370 - DNA, 80 bp, synthetic construct
  source 1..80: mol_type = other DNA
gaacattaaacactgtcccgacgactgggtaacccataccgtccatggactacaggacagggggacccgcaccaaacctg

SEQ ID NO: 77371 - DNA, 80 bp, synthetic construct
  source 1..80: mol_type = other DNA
gactggggaccctgtaccgaacatggagaacatcgcatccgggtttttaggtttcctaatcggggaaaggcccgttttaa

SEQ ID NO: 77372 - DNA, 80 bp, synthetic construct
  source 1..80: mol_type = other DNA
attttttacaactctgtggaggctggcattctatataagagagaaactacacgcagcgcctcattttgtgggtcaccata

SEQ ID NO: 77373 - DNA, 80 bp, synthetic construct
  source 1..80: mol_type = other DNA
gaaactacacgcagcgcctcattttgtgggtcaccatattcttgggaacaagagctacagcatgggaggtttttccattt

SEQ ID NO: 77374 - DNA, 80 bp, synthetic construct
  source 1..80: mol_type = other DNA
agactggggaccctgtgcagaacatggagaacatcgcatcaggactcctaggtcttattaacacttggtagaaacccaaa

SEQ ID NO: 77375 - DNA, 80 bp, synthetic construct
  source 1..80: mol_type = other DNA
aggatcactggccagaggcaaatcaggccatgcagtggaactccacaacattccaccaagctctgctagatcccagagtg

SEQ ID NO: 77376 - DNA, 80 bp, synthetic construct
  source 1..80: mol_type = other DNA
aggacccctgctcgtgttacaggcggggtttttcttgttgacaaaaatcctcacaataccacagatcttgtactcaaaaa

SEQ ID NO: 77377 - DNA, 80 bp, synthetic construct
  source 1..80: mol_type = other DNA
ttggccgcaccactcggtggtttttccgtatggacccttcaggctaagggtggattgccaacggcgcccgtggcacctcc

SEQ ID NO: 77378 - DNA, 80 bp, synthetic construct
  source 1..80: mol_type = other DNA
acctttagcaactgtcaggaaggggcccatcagaggaaagagagaaatcacacggagggctccatttttttacaactctg

SEQ ID NO: 77379 - DNA, 80 bp, synthetic construct
  source 1..80: mol_type = other DNA
tggaaggctggcattgtatataagagagaaactacacgcagcgcctcattttgtgggtcaccatattcttgggaacacaa

SEQ ID NO: 77380 - DNA, 80 bp, synthetic construct
  source 1..80: mol_type = other DNA
gcagcgcctcattttgtgggtcaccatattcttgggaacacaacatcaggattcctaggacccctgctcgtgttacgggc

SEQ ID NO: 77381 - DNA, 80 bp, synthetic construct
  source 1..80: mol_type = other DNA
tccttatatccaaaacccccccacccccccccctcctctgaaccggaaggcttaaaaacctcggaaactttatcatcccc

SEQ ID NO: 77382 - DNA, 80 bp, synthetic construct
  source 1..80: mol_type = other DNA
cccccccctcctctgaaccggaaggcttaaaaacctcggaaactttatcatcccccccttacgcaatccaggaaaccaat

SEQ ID NO: 77383 - DNA, 80 bp, synthetic construct
  source 1..80: mol_type = other DNA
ccttctattcgagatctcctcgacaccgcctctagctcgtgtatcgtgagacctgcgatctcaagagaaggagcgcgcca

SEQ ID NO: 77384 - DNA, 80 bp, synthetic construct
  source 1..80: mol_type = other DNA
tttcctgctgttcgagatctcctcgacatcgcatggacaccacatgagatgcacctcgagcacctgtcgattgcacaccc

SEQ ID NO: 77385 - DNA, 80 bp, synthetic construct
  source 1..80: mol_type = other DNA
tttccttctattcgagatctcatcgataccgcgtagaccaccaccatgcacccgcttctctctcgtgcaatccatcccct

SEQ ID NO: 77386 - DNA, 80 bp, synthetic construct
  source 1..80: mol_type = other DNA
cttctattcgagatctcctcgataccgcctctgctctatatcgggaggccttagatctccagtacagtcccggatttgcc

SEQ ID NO: 77387 - DNA, 80 bp, synthetic construct
  source 1..80: mol_type = other DNA
ccttctattcgagatctcctcgacacttttaacagctttgtatcgggaggccagagatttgtggatcgcacgctcccccc

SEQ ID NO: 77388 - DNA, 80 bp, synthetic construct
  source 1..80: mol_type = other DNA
tccttccattcgagacctcctcgacaccgcctcagctctgtatcgagaggcaatagagtctccagacacagttattgggg

SEQ ID NO: 77389 - DNA, 80 bp, synthetic construct
  source 1..80: mol_type = other DNA
tccttctattcgtgatctcctcgataccgcgtagaccacgtatgatgcacgcctcatcactttttgcaatggatcgatta

SEQ ID NO: 77390 - DNA, 80 bp, synthetic construct
  source 1..80: mol_type = other DNA
ttctattcgagatctcctcgacaccgcatcagctctgtatcgggaggccttagagtttccatttaagattaaaaatagca

SEQ ID NO: 77391 - DNA, 80 bp, synthetic construct
  source 1..80: mol_type = other DNA
tccttctgttcgagagctcctcgacacgcgcctcagctccgtatcgacaggccgagatttctcggtgccctttcctccct

SEQ ID NO: 77392 - DNA, 80 bp, synthetic construct
  source 1..80: mol_type = other DNA
accctaaaaaaaaattggaaccttcggggaatttactctttttttggcctccgaattccttcctttcaatccaaaatctc

SEQ ID NO: 77393 - DNA, 80 bp, synthetic construct
  source 1..80: mol_type = other DNA
cccaaccccccctcggccttgtatcggaaggcctaaaattccccggaacatggttcacttccccttccaccattcaggca

SEQ ID NO: 77394 - DNA, 80 bp, synthetic construct
  source 1..80: mol_type = other DNA
cctcggccttgtatcggaaggcctaaaattccccggaacatggttcacttccccttccaccattcaggcaaccattagct

SEQ ID NO: 77395 - DNA, 80 bp, synthetic construct
  source 1..80: mol_type = other DNA
atggagaccaccgctgacacactcaggcaagctatagacgttacgcttgaagcatacttcaaagactgtgtgtttactga

SEQ ID NO: 77396 - DNA, 80 bp, synthetic construct
  source 1..80: mol_type = other DNA
ttccttctattcgagatctcctcgttaccgcatagaccacgcatgatacacccgcatacacacatcgtcaatcgatatgg

SEQ ID NO: 77397 - DNA, 80 bp, synthetic construct
  source 1..80: mol_type = other DNA
actattcgagatctcctcgacaccgcctccgctttgtatcgggaggccttagagtctcccgcaatcatttatcttccccg

SEQ ID NO: 77398 - DNA, 80 bp, synthetic construct
  source 1..80: mol_type = other DNA
ttctattcgagatctcctcgacaccgcctctgctctgtatcgggagccagcaagcgctagcggccccgttagttcccccg

SEQ ID NO: 77399 - DNA, 80 bp, synthetic construct
  source 1..80: mol_type = other DNA
cttccattcgagatctcctcgacaccgcctctgctctgtatcgggaggctctagagtcaccggaagaattaaatacccag

SEQ ID NO: 77400 - DNA, 80 bp, synthetic construct
  source 1..80: mol_type = other DNA
tccgtctgttcgagatcttctcgacaccgcctctgctccgtatctcacagcccgcagttgctagcgtagacagatttccc

SEQ ID NO: 77401 - DNA, 80 bp, synthetic construct
  source 1..80: mol_type = other DNA
ttctgacttctttccttccattcgagatctcctcgacaccgcctcaacctcaccatacagcactcaggcaagctaagaac

SEQ ID NO: 77402 - DNA, 80 bp, synthetic construct
  source 1..80: mol_type = other DNA
ctgtatcgggaggccttagaagctccggaacattgttcacctctccatacctcactctagcaagctatggcaagctataa

SEQ ID NO: 77403 - DNA, 80 bp, synthetic construct
  source 1..80: mol_type = other DNA
ctctttttttcttgcttacttctttacttcttttctacaactcctcaactccgcatcacctctgcatctgggggccggaa

SEQ ID NO: 77404 - DNA, 80 bp, synthetic construct
  source 1..80: mol_type = other DNA
ctgcatctgggggccggaaagtctccggaacattggacccctcttcatccaacactaaagcaatctataaagctataata

SEQ ID NO: 77405 - DNA, 80 bp, synthetic construct
  source 1..80: mol_type = other DNA
tgcatgctacaatgaggctgttcgcctacaccatgcaactttttcacctctgccaactcatctcccgttcatgtcctatt

SEQ ID NO: 77406 - DNA, 80 bp, synthetic construct
  source 1..80: mol_type = other DNA
gtttgttcctctcctatgggcctagcgtggctttggggcctggactgggacccggataaggaatttgaaccttccaagga

SEQ ID NO: 77407 - DNA, 80 bp, synthetic construct
  source 1..80: mol_type = other DNA
attactctcttttttgccttttcacttctttttttcttttgactacttcccttacaccccctatcccctctaccccgagg

SEQ ID NO: 77408 - DNA, 80 bp, synthetic construct
  source 1..80: mol_type = other DNA
ccgaggcttttcagtctccggaagatttttaacctccccatacttcactcccgcaccctataacactcaggaaagctata

SEQ ID NO: 77409 - DNA, 80 bp, synthetic construct
  source 1..80: mol_type = other DNA
cgtctttggggtgcgttgattggctctgggaaatgaacattgactcctatgaagaatttggatcttttgtggagttactc

SEQ ID NO: 77410 - DNA, 80 bp, synthetic construct
  source 1..80: mol_type = other DNA
cgcatgagaccgccgttcactcgcaagatagctatataccaagcttgaggcatacttcaaagactgtttgtttaaggact

SEQ ID NO: 77411 - DNA, 80 bp, synthetic construct
  source 1..80: mol_type = other DNA
cgcatgagacgcttttgctctcgggtcgctccccgttcgcatggagttacgttcgcaagtggatgtttaatgagtgggag

SEQ ID NO: 77412 - DNA, 80 bp, synthetic construct
  source 1..80: mol_type = other DNA
ttctttcgcatggagaccaccgtgaacgcccaccagttcttgcccaaggtcgaacataagagactctgaacatactcccc

SEQ ID NO: 77413 - DNA, 80 bp, synthetic construct
  source 1..80: mol_type = other DNA
ttaggtttgagcattcttggactttaagaagtgtcaaagaccaaccaagaggcatacttcaaaaattgtttgttttttta

SEQ ID NO: 77414 - DNA, 80 bp, synthetic construct
  source 1..80: mol_type = other DNA
gcggttttgacccctccaattgacaaagagtcaagcacatccatcatgggcaggtcaaaatccaaacaaaaagaaaccac

SEQ ID NO: 77415 - DNA, 80 bp, synthetic construct
  source 1..80: mol_type = other DNA
atgggatctgttctcagtaaattaagacactcatccaggagcctcacatccacttcacctttgaacatatatgtgcatga

SEQ ID NO: 77416 - DNA, 80 bp, synthetic construct
  source 1..80: mol_type = other DNA
taggaactcagcaacaccaggactctgcagtctacattttattacaaatatcactgaaaaccgtctaagacaatctgtgt

SEQ ID NO: 77417 - DNA, 80 bp, synthetic construct
  source 1..80: mol_type = other DNA
tgttttgattgtgtgaaaagtcaacagacaccgaaaactctaaaaatccttttgtgtagtcgagaatgtaatcccacaga

SEQ ID NO: 77418 - DNA, 80 bp, synthetic construct
  source 1..80: mol_type = other DNA
tctctcagggttctgaaggacttaggctcagtcagtccctgccttatcaacaaagctgcattgcagatgatatctcctag

SEQ ID NO: 77419 - DNA, 80 bp, synthetic construct
  source 1..80: mol_type = other DNA
acgatatgaaaaccaaccgaaaccaaactgcaaatcacttttatacataggtctttcaatgcccctgttcactaccttta

SEQ ID NO: 77420 - DNA, 80 bp, synthetic construct
  source 1..80: mol_type = other DNA
acacaaaagactggaaaggccccaaagcctctgccccatcttcagagggcatcatctctttatgagggaaccatgagaaa

SEQ ID NO: 77421 - DNA, 80 bp, synthetic construct
  source 1..80: mol_type = other DNA
ttgcccaatgttcttgatgtcaacacaaattctcggatgaacgactcgaagtaaatctgttttaagaagtttttacaaac

SEQ ID NO: 77422 - DNA, 80 bp, synthetic construct
  source 1..80: mol_type = other DNA
gacatgacagcctggtcaagtgtcatgaccactacctgtgtagaaactgtctaaatcttttgttgacagtttcagacagg

SEQ ID NO: 77423 - DNA, 80 bp, synthetic construct
  source 1..80: mol_type = other DNA
atctcttgtgctaacaacgaactcgtctgtcaagcttgagtctgaacgttgatgtgactcaacaaggtctgagaataaaa

SEQ ID NO: 77424 - DNA, 80 bp, synthetic construct
  source 1..80: mol_type = other DNA
ctgtgtaatgctcatctcttttccatttcacaacatgggatatcaatgacaaagactcagaatttatatcaattaataca

SEQ ID NO: 77425 - DNA, 80 bp, synthetic construct
  source 1..80: mol_type = other DNA
cacaaatctaaaaatttaatacgagggctccacctcatgttcttggagctttgatcagacataaaaggtaggagctgatc

SEQ ID NO: 77426 - DNA, 80 bp, synthetic construct
  source 1..80: mol_type = other DNA
ttcgaagatctttgggtacaaccttctgactgattgtaacacatgattcaagctgattttgtcctctagcaatcttgagc

SEQ ID NO: 77427 - DNA, 80 bp, synthetic construct
  source 1..80: mol_type = other DNA
tttcaggttttcttgcaacataatcgcagggattcaactgctttagtactggcttgcttgttcctcttgccatcgaaggt

SEQ ID NO: 77428 - DNA, 80 bp, synthetic construct
  source 1..80: mol_type = other DNA
tctgctaaaacccaaacacccaattcaaaggaattactcaaggatatacagatgtaatcccagagaagaggcctcagaag

SEQ ID NO: 77429 - DNA, 80 bp, synthetic construct
  source 1..80: mol_type = other DNA
actgacatgatcaagaagtggttccgggtgagcatgtttatcacagatatacaacattatgtcacactctttttgaatgc

SEQ ID NO: 77430 - DNA, 80 bp, synthetic construct
  source 1..80: mol_type = other DNA
caagaatattgtcatctttggtcaggtcttccagaatttttcttatgtagagattttctctgttctggttcctcacacat

SEQ ID NO: 77431 - DNA, 80 bp, synthetic construct
  source 1..80: mol_type = other DNA
ctacttcccagagtcttacaaagacctataaatcctgatgagatacaactctgaaaagctgatttattgatagcttctga

SEQ ID NO: 77432 - DNA, 80 bp, synthetic construct
  source 1..80: mol_type = other DNA
caaaagtttctgtgctccccttgtgaatctgctgcacaatttgttttgaagtgttttaatcaatgatggcaccctttctt

SEQ ID NO: 77433 - DNA, 80 bp, synthetic construct
  source 1..80: mol_type = other DNA
tgccccctctgcaagcacccactgcccacaagactgagaatttcaccagcacccagctcgcctcccccctacgaagagta

SEQ ID NO: 77434 - DNA, 80 bp, synthetic construct
  source 1..80: mol_type = other DNA
cttgaaaattcatagttgaaggataaatcaccttctgcctcagcaccatcctcataggatgtaattcattaagattcaac

SEQ ID NO: 77435 - DNA, 80 bp, synthetic construct
  source 1..80: mol_type = other DNA
cagttaatgtcagcaagagtgcccaaatcatcctcaatacctagcacatcagcaagctgaaggatagcctctttcttgtc

SEQ ID NO: 77436 - DNA, 80 bp, synthetic construct
  source 1..80: mol_type = other DNA
tctattgaaaaggtccaggaagaattcctcattgaattctccattctttagtttgtgatgaagtcttcttatgagcttcc

SEQ ID NO: 77437 - DNA, 80 bp, synthetic construct
  source 1..80: mol_type = other DNA
tcatagtctttgtttcctgagggcacaatgcctcaatcaacctctgaattctgtaacctctggatccatccagccagtcc

SEQ ID NO: 77438 - DNA, 80 bp, synthetic construct
  source 1..80: mol_type = other DNA
ttcacatctgtgtttgtgttaagaagaaagggatctagagggaaatttgcatattttaggaggtctaatgttctcctttg

SEQ ID NO: 77439 - DNA, 80 bp, synthetic construct
  source 1..80: mol_type = other DNA
aatacagttcactagcgagataggaacaccattggcgacagcttgatctgcaattgtgtcaattgtctcacagagctgat

SEQ ID NO: 77440 - DNA, 80 bp, synthetic construct
  source 1..80: mol_type = other DNA
gtggctccttgcacttaacattatgtaaagctgctgacacgaacttcgtaaggagagggacctcctcgccccacacataa

SEQ ID NO: 77441 - DNA, 80 bp, synthetic construct
  source 1..80: mol_type = other DNA
aatcttgacttaaactctgcagcaaatctccctactacactttttggactaataaatttgtttagaaggccacttaaatg

SEQ ID NO: 77442 - DNA, 80 bp, synthetic construct
  source 1..80: mol_type = other DNA
agagtgaaattccaacagcactaggatttcctctggatcgctatcaaccaggctgctcagtctcttgtcaaacagtgtga

SEQ ID NO: 77443 - DNA, 80 bp, synthetic construct
  source 1..80: mol_type = other DNA
tctggtcatcactagatgtgtatgcatctggtctttctccaaagataagaccaatgcagtagtttataaatctttcacta

SEQ ID NO: 77444 - DNA, 80 bp, synthetic construct
  source 1..80: mol_type = other DNA
gggaccgagaggagagcgggcccccagtggccacacggacacagtcccagacagccagcccagacccacacgacaacaca

SEQ ID NO: 77445 - DNA, 80 bp, synthetic construct
  source 1..80: mol_type = other DNA
actaagccataaaagtcagaagcattgtgcagaattccttgccccatatcaattagactagagatgtgtgaaggcacaat

SEQ ID NO: 77446 - DNA, 80 bp, synthetic construct
  source 1..80: mol_type = other DNA
cccaagatcaaagtaacttctgaagatttcttctgttactgtcgtctgtgaccctctaaggagtttcaatttggctttga

SEQ ID NO: 77447 - DNA, 80 bp, synthetic construct
  source 1..80: mol_type = other DNA
cataagatttcatcagtgcattaacaactgggtagggaacttcaacaagtttgtgcatgtgccaagtcaagagggtgcta

SEQ ID NO: 77448 - DNA, 80 bp, synthetic construct
  source 1..80: mol_type = other DNA
acatggtccttcccagatctaacatactgatcatcacctaaacggaggttctgtaacaacatcaagaaaaggaatgggca

SEQ ID NO: 77449 - DNA, 80 bp, synthetic construct
  source 1..80: mol_type = other DNA
catcatggggccccatttactgtgatccatactgtagttgagaaaaccttctctaacattaatggtcatggacaagattg

SEQ ID NO: 77450 - DNA, 80 bp, synthetic construct
  source 1..80: mol_type = other DNA
cgttttcgaattccttatcattgttgagacatgaacctgagaagaagctagaaaatgactcaaaatagtcctccacaagc

SEQ ID NO: 77451 - DNA, 80 bp, synthetic construct
  source 1..80: mol_type = other DNA
cttgtgaacatctttgtcctcaaatcaccaatatacagttctctattgcccccaacttgttccttgtaagacaatgcaaa

SEQ ID NO: 77452 - DNA, 80 bp, synthetic construct
  source 1..80: mol_type = other DNA
ctttaacctaccagaatcagggcctacagaagtgtaagatgtgggagattcttcagagtagaaacataagttcttcagtg

SEQ ID NO: 77453 - DNA, 80 bp, synthetic construct
  source 1..80: mol_type = other DNA
ctgcactcatgcactttgtcaatgacagagccttactcagagattcagagttactttccctctcgcttattctcacttct

SEQ ID NO: 77454 - DNA, 80 bp, synthetic construct
  source 1..80: mol_type = other DNA
tcctccagcctatcccaatcaaatttgaaattcagtccctgtctctgtgcatgtctatacttaccagaatatgcatttgc

SEQ ID NO: 77455 - DNA, 80 bp, synthetic construct
  source 1..80: mol_type = other DNA
attcatttgtaacaggatcattttcatacaagaaaaccagtcatgatcacaaaagaacttcctacaaagattttttgcca

SEQ ID NO: 77456 - DNA, 80 bp, synthetic construct
  source 1..80: mol_type = other DNA
tttcatccaggccacattgctctttgacatcactagtaaaatataatgatgacagtttttcatgttcctcaacagcttca

SEQ ID NO: 77457 - DNA, 80 bp, synthetic construct
  source 1..80: mol_type = other DNA
cacacagacctcatgtcatcgattgaaagacaggctgggtcaaaatcttccactaaatgaaatgagatctctgataatat

SEQ ID NO: 77458 - DNA, 80 bp, synthetic construct
  source 1..80: mol_type = other DNA
gattttccttaggtaagccagcttccctgttaacaccacctgcagatgatgcaggcctttggaaacctcacctttcccca

SEQ ID NO: 77459 - DNA, 80 bp, synthetic construct
  source 1..80: mol_type = other DNA
cctcttctaattgatcagcaacagtcctcttcttatagtttgatattgttgatttgaccttattctccatctgcctaaaa

SEQ ID NO: 77460 - DNA, 80 bp, synthetic construct
  source 1..80: mol_type = other DNA
aatgcggtctcctcttcaccatcaaaatgggtgtgttcaccattgttcccttctgtattaatgtctggctcctttgaacc

SEQ ID NO: 77461 - DNA, 80 bp, synthetic construct
  source 1..80: mol_type = other DNA
aaggaccagtctagaaacaagcttagacaccttatactcgtaatccgagtggcaaagtttgtatttctgttttcttaaga

SEQ ID NO: 77462 - DNA, 80 bp, synthetic construct
  source 1..80: mol_type = other DNA
acccttcggttatctgactcactgcactaacgagcaatttattgaaattatattctagcaaacgctcaccattcaaatgc

SEQ ID NO: 77463 - DNA, 80 bp, synthetic construct
  source 1..80: mol_type = other DNA
ttattgacaacaacactcttgttacttgcaagatctaaagctgttgcacatcctgagttggtcattggatccaagttgtt

SEQ ID NO: 77464 - DNA, 80 bp, synthetic construct
  source 1..80: mol_type = other DNA
gagtcttttttctcccttataaatgagtgtgccattgttaaaagatgacaccataaaactgaaaacttctaaatttacac

SEQ ID NO: 77465 - DNA, 80 bp, synthetic construct
  source 1..80: mol_type = other DNA
caggaactactgcctgacagtcaacttctttactaacaaactttctcatctgttccaaaaagatgtcttcttcctgaggt

SEQ ID NO: 77466 - DNA, 80 bp, synthetic construct
  source 1..80: mol_type = other DNA
gaaatctcctctttaggattgatgaaaaatccgaatttgcttttaggctcaaaaaacttctcaaaacattttatttgatc

SEQ ID NO: 77467 - DNA, 80 bp, synthetic construct
  source 1..80: mol_type = other DNA
agtcagcctgtcaggagtttccttcgttattaagtggcataaatatgatacattcaacatgaacttaaacttagctgtta

SEQ ID NO: 77468 - DNA, 80 bp, synthetic construct
  source 1..80: mol_type = other DNA
acatgactctctctcctgtaccaaacagtgttactaacaagtatctaagcagcttgtagaccaccctctccgcatgtgta

SEQ ID NO: 77469 - DNA, 80 bp, synthetic construct
  source 1..80: mol_type = other DNA
atcagatcttccttcaacttgtccatcaaagttgtggatgagaaatcagaaacaatggccatcaccatgtacctcatgtt

SEQ ID NO: 77470 - DNA, 80 bp, synthetic construct
  source 1..80: mol_type = other DNA
ctgaacctgtttttgatttctttttgttggattagttagcaacagaagaattaaagttctcaaggaaagctctatttcat

SEQ ID NO: 77471 - DNA, 80 bp, synthetic construct
  source 1..80: mol_type = other DNA
caatatgtccagcaagatcaggacatgatcttatccaggagatcatcacatcaaccatctcatgcaatacctcatcggag

SEQ ID NO: 77472 - DNA, 80 bp, synthetic construct
  source 1..80: mol_type = other DNA
aatattggcaggaaaaacctttttggatctgcataaaatgagatgacatgacctgctggaccttgtatagaatagcatct

SEQ ID NO: 77473 - DNA, 80 bp, synthetic construct
  source 1..80: mol_type = other DNA
tgaggactcccctgtcttttggtacaacagatgatattcttccttttctatcttcatgacctggctaaagacctccttac

SEQ ID NO: 77474 - DNA, 80 bp, synthetic construct
  source 1..80: mol_type = other DNA
attccacgacctgatatctaacagagccaagttgattctgcctaagcctggccactgagcttgttttcatactgtttgtt

SEQ ID NO: 77475 - DNA, 80 bp, synthetic construct
  source 1..80: mol_type = other DNA
tttgatttgctataacaaagcctacagtctttaaaagagaaccagtctggcacgcccttcagagatggcaacagggcagg

SEQ ID NO: 77476 - DNA, 80 bp, synthetic construct
  source 1..80: mol_type = other DNA
agtgccaggcagacagatgagagcttcctcaagcaccctttgtctctcagattctccacatctgtttgaaagttatattc

SEQ ID NO: 77477 - DNA, 80 bp, synthetic construct
  source 1..80: mol_type = other DNA
atcaaattttgtgtagtgcattatgggatggctcccctttctcacatacccctcaaaggcatcaagtgtgatttgacatt

SEQ ID NO: 77478 - DNA, 80 bp, synthetic construct
  source 1..80: mol_type = other DNA
cagctactaaacctttggagagcccatagtgttcaaaggttaagccgactgctgagaggcacttgtcgattttgactata

SEQ ID NO: 77479 - DNA, 80 bp, synthetic construct
  source 1..80: mol_type = other DNA
aactcttgcatggattttttaaataattcccttaaatgcacacctttgttcactcttgaccgttttctattcctcaagag

SEQ ID NO: 77480 - DNA, 80 bp, synthetic construct
  source 1..80: mol_type = other DNA
cctcataaactcttcctttgtgctactgaagctcaccaacctgtcattgacactactgtaacaacagcctacccagtgct

SEQ ID NO: 77481 - DNA, 80 bp, synthetic construct
  source 1..80: mol_type = other DNA
tctcatttgccaaaccttcggaatggttcaactttattaaagcagaaagacaaagtgcatccaagttcaaaagttgcttt

SEQ ID NO: 77482 - DNA, 80 bp, synthetic construct
  source 1..80: mol_type = other DNA
ctcctggtgttcagaagtttaaggctttttactttgttgagcatggaaagaagcctctcataaatagtgctaatggtagg

SEQ ID NO: 77483 - DNA, 80 bp, synthetic construct
  source 1..80: mol_type = other DNA
gcatcttctgaacccctctgtatttccagtaatgaatctcattagaggacaggattcaattgcctcagaacaaagggatt

SEQ ID NO: 77484 - DNA, 80 bp, synthetic construct
  source 1..80: mol_type = other DNA
gtacggtgtccgaaagtgacacattctcatagagctcagagaactcctcaatcagcatcatcgggctagcctttctaaag

SEQ ID NO: 77485 - DNA, 80 bp, synthetic construct
  source 1..80: mol_type = other DNA
tttctctttaatctccccccttctaagtctcttctaaatttactgaataatgagttgacacctatggccacctcatcaca

SEQ ID NO: 77486 - DNA, 80 bp, synthetic construct
  source 1..80: mol_type = other DNA
cttttcaacatacagctcttgtagcacaactcctatttcagaactcatgagatgttcacctgttctgaatcgatgcaaga

SEQ ID NO: 77487 - DNA, 80 bp, synthetic construct
  source 1..80: mol_type = other DNA
ggtcaaattggggttcacgccaccatgacacatcttcataatggtttcattgtgagtcgatcttgcatccctcagaacct

SEQ ID NO: 77488 - DNA, 80 bp, synthetic construct
  source 1..80: mol_type = other DNA
tcattgagtctattcctgaacgcttgtctaccatagtctttagagattcacagagtctgaaatactctgattcttcaaaa

SEQ ID NO: 77489 - DNA, 80 bp, synthetic construct
  source 1..80: mol_type = other DNA
actttctcatcctgactagaatattctaacaatttgaatagaagatctctgaatttgaagttgacccactctggcatgaa

SEQ ID NO: 77490 - DNA, 80 bp, synthetic construct
  source 1..80: mol_type = other DNA
gctgttatcataagaacagcgaccgtccactatgggcacgagtgttattccggcaactgcaagatcctccttgatgcttg

SEQ ID NO: 77491 - DNA, 80 bp, synthetic construct
  source 1..80: mol_type = other DNA
acagtttgttggtgtcttcaatgaactttctctcaaagctggctggggtggtcctcacaaaacactcaagcaaaatgagt

SEQ ID NO: 77492 - DNA, 80 bp, synthetic construct
  source 1..80: mol_type = other DNA
gagttgtcaattaacttgtaaccatccggtatgatcaagggtagaccaggacaaaccactccggagtctataagaatagt

SEQ ID NO: 77493 - DNA, 80 bp, synthetic construct
  source 1..80: mol_type = other DNA
ttccacggacttgtcatcatagttgtgtgtgcagccactcttgtcagcactgtccatctcaatacatctcgacaacagct

SEQ ID NO: 77494 - DNA, 80 bp, synthetic construct
  source 1..80: mol_type = other DNA
tgagcccttccatcaagaccaattttggttctctttgacttaagaaattcagcttctgtcttgacaggcgctcatcctgt

SEQ ID NO: 77495 - DNA, 80 bp, synthetic construct
  source 1..80: mol_type = other DNA
tctatgtagtttagacataggctccttaactctgaaatgatatcttccattgcgcaaccaaaaaagcctaggatccacgg

SEQ ID NO: 77496 - DNA, 80 bp, synthetic construct
  source 1..80: mol_type = other DNA
aaaggttgcctaacacttcatcaaacttcgaataaccttcaagttcagcgaacaaaactctaaggtcttttgtctctata

SEQ ID NO: 77497 - DNA, 80 bp, synthetic construct
  source 1..80: mol_type = other DNA
tgggcagtggagggtagatcagagattctccccgacgcaacataccttggcccgctcaactgcaaaatcctgctggcaaa

SEQ ID NO: 77498 - DNA, 80 bp, synthetic construct
  source 1..80: mol_type = other DNA
ttaaccataatgttctgaacgaggtttctaccttcatacagtgcaccatgtttgacagttagaggcacaggctcccagtc

SEQ ID NO: 77499 - DNA, 80 bp, synthetic construct
  source 1..80: mol_type = other DNA
tgggccaaccctttcaaaatctacagacctaaccccatccaatattttatatgagctcaagacctccaactctaaggaat

SEQ ID NO: 77500 - DNA, 80 bp, synthetic construct
  source 1..80: mol_type = other DNA
cacccagcaccattgggtccaccatgtagtcccaaaactcatcagatcttagatcaaaggtaccgtccctggttttgaaa

SEQ ID NO: 77501 - DNA, 80 bp, synthetic construct
  source 1..80: mol_type = other DNA
ggaggctctcccaaccagtcctcacaggacctccccttcagcctaaatcttccaactgaggtctcatacattattgtgtc

SEQ ID NO: 77502 - DNA, 80 bp, synthetic construct
  source 1..80: mol_type = other DNA
tcgcaccgggggatcctaggcttttgggattgcgctttgcgttggtgacagctaaaagagagaacaggaaagttgctctc

SEQ ID NO: 77503 - DNA, 80 bp, synthetic construct
  source 1..80: mol_type = other DNA
atgctaagattgattgactacaacaaggctgctttgtccaagttcaaggaagatgttgagtcagctttgcacctgttcaa

SEQ ID NO: 77504 - DNA, 80 bp, synthetic construct
  source 1..80: mol_type = other DNA
gacaacagtgaattctttgatctcagatcagttgttaatgaggaatcatctaagagacctaatgggggtaccctactgca

SEQ ID NO: 77505 - DNA, 80 bp, synthetic construct
  source 1..80: mol_type = other DNA
attattcaaaattctggtacctggaacatgcaaaaacaggtgagaccagtgtgcccaagtgctggttggtgtccaatggc

SEQ ID NO: 77506 - DNA, 80 bp, synthetic construct
  source 1..80: mol_type = other DNA
tcatatctgaatgagacacacttcagtgatcagattgaacaggaggctgacaacatgatcactgagatgctcagaaagga

SEQ ID NO: 77507 - DNA, 80 bp, synthetic construct
  source 1..80: mol_type = other DNA
ttacatcaaaaggcagggaagcacccccctagcattgatggatcttctaatgttttctacatcggcctacttaattagca

SEQ ID NO: 77508 - DNA, 80 bp, synthetic construct
  source 1..80: mol_type = other DNA
tcttcctccatctgctgaagatccctacacatagacacatcaaaggaggctcatgtcccaaaccacaccggctcaccagt

SEQ ID NO: 77509 - DNA, 80 bp, synthetic construct
  source 1..80: mol_type = other DNA
aagggtatttgtagctgcggggcattcaaagtgccaggcgtaaaaacagtctggaaaagacgctaaatgatggcgcctcc

SEQ ID NO: 77510 - DNA, 80 bp, synthetic construct
  source 1..80: mol_type = other DNA
tgtgctcataataataacaagtctgaaagctgtgtacaactttgcaacttgtggcatcatagcactgatcagcttttgcc

SEQ ID NO: 77511 - DNA, 80 bp, synthetic construct
  source 1..80: mol_type = other DNA
ctgactctccacctcgaaagaggtggagagtcagggaggccccgtggggaccttagagtgtcacaacatttggacccctg

SEQ ID NO: 77512 - DNA, 80 bp, synthetic construct
  source 1..80: mol_type = other DNA
aagattaggtcatgtggcaaaatgttatggatgttcttcagttcgggcagcctggcctttgaagcagcttcaaaaatgat

SEQ ID NO: 77513 - DNA, 80 bp, synthetic construct
  source 1..80: mol_type = other DNA
gcagtccataagagcacaatgaggtgtgatctccttctttttcttgtccttcactaccccagtgtgcatcttgcacagcc

SEQ ID NO: 77514 - DNA, 80 bp, synthetic construct
  source 1..80: mol_type = other DNA
atccataattgtcccagactttgtcctcatactctctggatgcctcccttgacatctctacatcaatcaatttgatgtcc

SEQ ID NO: 77515 - DNA, 80 bp, synthetic construct
  source 1..80: mol_type = other DNA
ctcctgttttgggaatcaagaagctttctgatgtcatctgagccctgacagctaaggaccatcccttgtggtaaagcacc

SEQ ID NO: 77516 - DNA, 80 bp, synthetic construct
  source 1..80: mol_type = other DNA
gatgactgatgatgtcagccctggttgtgcattgaaaaggtcagcaaggtccataccatgtgagtactttgagtcttgtt

SEQ ID NO: 77517 - DNA, 80 bp, synthetic construct
  source 1..80: mol_type = other DNA
tgaattgtttctggtcagctggttctctgtaaaaatgaatgaactgaccattttgaggttgaaatagagcaacctcaaca

SEQ ID NO: 77518 - DNA, 80 bp, synthetic construct
  source 1..80: mol_type = other DNA
ggatcattgaatcttccctcaatgtcaatccatgtgggtgcattaggatcaatgccactcattaggtcctttaacagcat

SEQ ID NO: 77519 - DNA, 80 bp, synthetic construct
  source 1..80: mol_type = other DNA
ggtttggctgtaacttagaccaacctggggtggtcctgcagcacctggggttggtcttgcggtattagtgatcagtttgt

SEQ ID NO: 77520 - DNA, 80 bp, synthetic construct
  source 1..80: mol_type = other DNA
cacctgacaggtcaatggttgtgttctcccaagctcttccaacaacagatgttctacaagcaatataaggccacccctca

SEQ ID NO: 77521 - DNA, 80 bp, synthetic construct
  source 1..80: mol_type = other DNA
tgctagctggtagatcatgcgggatgtatggtttgtctggccctgacatttacaagggagtataccagttcaaatccgtt

SEQ ID NO: 77522 - DNA, 80 bp, synthetic construct
  source 1..80: mol_type = other DNA
ccggacaagcagaccttgtacaagatgttttcataagggtttctgtccccaacctggtctgacacaaacatattcagctt

SEQ ID NO: 77523 - DNA, 80 bp, synthetic construct
  source 1..80: mol_type = other DNA
tcgctttgcaccaagaactgctttcaggagatcctcagagttgcttggctttattaagatagactctagcatgttacccc

SEQ ID NO: 77524 - DNA, 80 bp, synthetic construct
  source 1..80: mol_type = other DNA
catctaacagtgcggctccagcttttacagccgcacctaagctgaagttgtatccagatatgtttatgcttgattgttgc

SEQ ID NO: 77525 - DNA, 80 bp, synthetic construct
  source 1..80: mol_type = other DNA
tctgtgatgacacccagaaccggatgtttgtctttcaacctctcaaggtcagaaaggttggggtactttactgtatagag

SEQ ID NO: 77526 - DNA, 80 bp, synthetic construct
  source 1..80: mol_type = other DNA
taaccccaggtctgtgagcgcctgaacaacatcatttaatggagtctgtgattgtttggccatgcaagccattgtcaggc

SEQ ID NO: 77527 - DNA, 80 bp, synthetic construct
  source 1..80: mol_type = other DNA
tgggcatcgttccaaattggttgttcaagagagaggaatccttgacatcccagactctaacaacaccattgttcccttgc

SEQ ID NO: 77528 - DNA, 80 bp, synthetic construct
  source 1..80: mol_type = other DNA
tggggtctcctcatcccgaccatttgtaggatttgagatctttggtctagttgctgggttgtcaggttccccatgtacac

SEQ ID NO: 77529 - DNA, 80 bp, synthetic construct
  source 1..80: mol_type = other DNA
acctgaggcctgcggcctctcggttctgattattttggcttttagcttttcaaggtcagctgcaagggacattagttcct

SEQ ID NO: 77530 - DNA, 80 bp, synthetic construct
  source 1..80: mol_type = other DNA
ctgcactgagtctcccaacttttaggatattcttttttgaggttgatttcagctccaccaaggaatggacagtctggttg

SEQ ID NO: 77531 - DNA, 80 bp, synthetic construct
  source 1..80: mol_type = other DNA
aggctcctaagtctctgcagatctttatcgtccctcttgtccttcctcatgatcctctgaacattgctgacttcagagaa

SEQ ID NO: 77532 - DNA, 80 bp, synthetic construct
  source 1..80: mol_type = other DNA
gagtttgacatgtcacatttgaacctgacaatgccaaatgcatgctctgtcaacaactctcatcattacatcagcatggg

SEQ ID NO: 77533 - DNA, 80 bp, synthetic construct
  source 1..80: mol_type = other DNA
gtcaagcccattcaaaaggctggtagcatctttaatcacggcagctttaacattcgaggtgaacccctgcaattccctcc

SEQ ID NO: 77534 - DNA, 80 bp, synthetic construct
  source 1..80: mol_type = other DNA
tcaatgcctgagtccattgaaagctcttgacctccttggacagggacattctgatgggcaccactgtgtcactggcaatt

SEQ ID NO: 77535 - DNA, 80 bp, synthetic construct
  source 1..80: mol_type = other DNA
cttggacagggacattctgatgggcaccactgtgtcactggcaattgcgcaatcaatttgcctaggatccacggtgcgaa

SEQ ID NO: 77536 - DNA, 80 bp, synthetic construct
  source 1..80: mol_type = other DNA
aaagtctggcctggagctaactttcacaaatgacagcatccttagccacaatttttgtaatttgactgatggctttaaga

SEQ ID NO: 77537 - DNA, 80 bp, synthetic construct
  source 1..80: mol_type = other DNA
agagaacctttgactacacactcatgagtattgtggcaagtctgcacctcagcatcagaggaaacacccagtacagagct

SEQ ID NO: 77538 - DNA, 80 bp, synthetic construct
  source 1..80: mol_type = other DNA
gtctcctgtgacttcaacaatgggattaccatccaatacaacttgagcttcagcaccacacaaagtgctgcgaatcagtg

SEQ ID NO: 77539 - DNA, 80 bp, synthetic construct
  source 1..80: mol_type = other DNA
caacactttcagaggtagggtcttggacatgtttagaacggcatttgggggcaagcacatgaggtcaggttatggctgga

SEQ ID NO: 77540 - DNA, 80 bp, synthetic construct
  source 1..80: mol_type = other DNA
cggacgcctctgggaagacaacctggtgcagccagactgactatatgttcttaataatccagaacaggacgtgggacaat

SEQ ID NO: 77541 - DNA, 80 bp, synthetic construct
  source 1..80: mol_type = other DNA
atccacagtatgggccaaatcatcacaatgtttgaggctttgcctcacatcattgatgaggcaatcaacattgtcatgat

SEQ ID NO: 77542 - DNA, 80 bp, synthetic construct
  source 1..80: mol_type = other DNA
cactgtcagtatgcaggtcccttcgggctctcaagaatcctctttgcacaagagaaaacaaaattcctgaccagaagact

SEQ ID NO: 77543 - DNA, 80 bp, synthetic construct
  source 1..80: mol_type = other DNA
cgcagggactttcacctggactttatctgattcatcgggaactgagaatccaggtggttactgtttgacaaggtggatga

SEQ ID NO: 77544 - DNA, 80 bp, synthetic construct
  source 1..80: mol_type = other DNA
taatcgctgcagaccttaagtgctttgggaatactgcagttgcaaaatgcaacataaaccatgatgaggaattttgtgat

SEQ ID NO: 77545 - DNA, 80 bp, synthetic construct
  source 1..80: mol_type = other DNA
ggatgggaaggtctcatcgatggatggtatggtttcagacatcaaaatgcacaaggagaaggaactgcagctgactacaa

SEQ ID NO: 77546 - DNA, 80 bp, synthetic construct
  source 1..80: mol_type = other DNA
tagacaatgaattcagtgagatagaacaacaaatcgggaatgtcattaactggacacgagactcaatgactgaggtaatg

SEQ ID NO: 77547 - DNA, 80 bp, synthetic construct
  source 1..80: mol_type = other DNA
cgaacgcgtcagaaaacaactaagggaaaatgctgaagaagatggaactggatgctttgagatattccataagtgtgatg

SEQ ID NO: 77548 - DNA, 80 bp, synthetic construct
  source 1..80: mol_type = other DNA
ccacggagacggtggaaactgtaaatattaagaaaatatgcactcaaggaaaaaggccaacagatctgggacaatgtgga

SEQ ID NO: 77549 - DNA, 80 bp, synthetic construct
  source 1..80: mol_type = other DNA
agaatggaaacatgcggtgcactatttgtatatagtttgagaaaaaaacacccttgtttctactaatacgagacaatata

SEQ ID NO: 77550 - DNA, 80 bp, synthetic construct
  source 1..80: mol_type = other DNA
caaacaatgcggcatttccccaaatgactaagtcgtataggaatcccaggaacaaaccagctctgataatctggggagtg

SEQ ID NO: 77551 - DNA, 80 bp, synthetic construct
  source 1..80: mol_type = other DNA
catcactctggatcagctactgagcagaccaaactctatggaagtggaaacaagttgataacagtaggaagctcgaaata

SEQ ID NO: 77552 - DNA, 80 bp, synthetic construct
  source 1..80: mol_type = other DNA
ccagcaatcattcactccaagcccgggagcacggccacaagtgaatggacaatcaggaaggattgattttcattggctac

SEQ ID NO: 77553 - DNA, 80 bp, synthetic construct
  source 1..80: mol_type = other DNA
gaatcgctaggagtccagagtgatgttcctttggattctggttgtgaaggggattgcttccacagtgggggtacgatagt

SEQ ID NO: 77554 - DNA, 80 bp, synthetic construct
  source 1..80: mol_type = other DNA
cagttccctgccattccaaaacatcaaccctagaacagtggggaaatgccctcgatatgtcaaacagacaagcctccttt

SEQ ID NO: 77555 - DNA, 80 bp, synthetic construct
  source 1..80: mol_type = other DNA
tggctacaggaatgagaaacgttccagagaaccccaagaccagaggcctttttggagcgattgctggattcacagagaat

SEQ ID NO: 77556 - DNA, 80 bp, synthetic construct
  source 1..80: mol_type = other DNA
ggtccaaactataaaaatggaaaaagtagtgattgccctcgcaataatcagcattgtcaaaggtgaccggatctgcattg

SEQ ID NO: 77557 - DNA, 80 bp, synthetic construct
  source 1..80: mol_type = other DNA
ggccgcggatccagtagtgtgtgcccgtctgttgtgtgactctggtaactagagatcccggaaaatctctagcagtggcg

SEQ ID NO: 77558 - DNA, 80 bp, synthetic construct
  source 1..80: mol_type = other DNA
actttcagactttggcaaatttgaggattacaaggcgtgacttggcattctaatgattgagttggaatttaatgatgtcg

SEQ ID NO: 77559 - DNA, 80 bp, synthetic construct
  source 1..80: mol_type = other DNA
aacaaacagctatttgggtgggtggttggggacagaaatattgcggtatatatattccaaattcattcttgctgttttaa

SEQ ID NO: 77560 - DNA, 80 bp, synthetic construct
  source 1..80: mol_type = other DNA
ttaactgccgaaaaatggatggcacaaaaaacagtacttattgccaaaagcttaaaagatgtggagcagcttaaatgggg

SEQ ID NO: 77561 - DNA, 80 bp, synthetic construct
  source 1..80: mol_type = other DNA
tgaagagagaaaaacaacaagtgtcactcagatatgattggcatattattaaatttattcaattgatttgaatctaaatt

SEQ ID NO: 77562 - DNA, 80 bp, synthetic construct
  source 1..80: mol_type = other DNA
atggagaaaatagtgcttctatttgcaatactcagtcttattaaaggtgatcagatttgcattggttaccatgcaaacaa

SEQ ID NO: 77563 - DNA, 80 bp, synthetic construct
  source 1..80: mol_type = other DNA
tagcactggcaatcatgatagctggtctatccttctggatgtgctccaatggttcattgcagtgcagaatttgcatttaa

SEQ ID NO: 77564 - DNA, 80 bp, synthetic construct
  source 1..80: mol_type = other DNA
aggacaaccctgtcaatggcctatggtaccctggggatttcaacgtctatgaagaaatgaaacaccttttaagcagcacg

SEQ ID NO: 77565 - DNA, 80 bp, synthetic construct
  source 1..80: mol_type = other DNA
tcaggggtgagctccgcatgtccatataatcggaagtcctctattttcaggaatgtggtgtggctcatcaagaagggtaa

SEQ ID NO: 77566 - DNA, 80 bp, synthetic construct
  source 1..80: mol_type = other DNA
tggactagtgggagcagcatatccttttgtggtgtaaatagtgacactgtgggttggtcttggcgagacggtgctgagtt

SEQ ID NO: 77567 - DNA, 80 bp, synthetic construct
  source 1..80: mol_type = other DNA
atatgtttcctcatgcagattgccatattagcaacgactgtaacactgcatttagtgtatttgaataatactaccataga

SEQ ID NO: 77568 - DNA, 80 bp, synthetic construct
  source 1..80: mol_type = other DNA
agtgaaaatgaatccaaatcagaagataataacaattggctccgtctctctaaccattgccatagtatgtttcctcttgc

SEQ ID NO: 77569 - DNA, 80 bp, synthetic construct
  source 1..80: mol_type = other DNA
ccagtcatggcagagagaaatattgaatacaggaattggtcaaaaccacagtgtaaagtaacaggatttgctccattttc

SEQ ID NO: 77570 - DNA, 80 bp, synthetic construct
  source 1..80: mol_type = other DNA
agtaaaaatgaatccaaatcaaaggataatagcacttggatctgcttctctaacgattgcgacaatatgtttactcattc

SEQ ID NO: 77571 - DNA, 80 bp, synthetic construct
  source 1..80: mol_type = other DNA
agtaaaaatgaatccaaatcaaaagataatagcacttggctctgtttctctaatcattgcgacaatatgtttgcttatgc

SEQ ID NO: 77572 - DNA, 80 bp, synthetic construct
  source 1..80: mol_type = other DNA
aatgctcctgttaccccaagtacccagaagttagatgtgtttgcagagacaattggaagggctccaatagacctgtacta

SEQ ID NO: 77573 - DNA, 80 bp, synthetic construct
  source 1..80: mol_type = other DNA
aggagtctgatgaggcaatgccggcttcacgctacctaactgacatgactatcgaagaaatgtcaagggactggttcatg

SEQ ID NO: 77574 - DNA, 80 bp, synthetic construct
  source 1..80: mol_type = other DNA
agtgaaaatgaatccaaatcagaagataataacaattggctctatttctctcactattgcgacagtatgtttctttatgc

SEQ ID NO: 77575 - DNA, 80 bp, synthetic construct
  source 1..80: mol_type = other DNA
agtttaaaatgaatccaaaccagaaaataataaccattggagcaatatccctaggactggtggtccttaatattctcctg

SEQ ID NO: 77576 - DNA, 80 bp, synthetic construct
  source 1..80: mol_type = other DNA
ggagttaagggttttggattcagacaaggcaacgatgtatggatgggaagaaccatcagcagaacatcaagatcaggatt

SEQ ID NO: 77577 - DNA, 80 bp, synthetic construct
  source 1..80: mol_type = other DNA
tgaaatccttaaagtcagaaatggttgggtacaaaatagtaaagagcaaatcaaaaggcaggttataattgacaattcag

SEQ ID NO: 77578 - DNA, 80 bp, synthetic construct
  source 1..80: mol_type = other DNA
attggtcaggatacagtggttctttcacattacctgtggaactaacaagaaagaattgtctggtcccatgtttttgggtt

SEQ ID NO: 77579 - DNA, 80 bp, synthetic construct
  source 1..80: mol_type = other DNA
gagatgataaggggcaaaccggaagagagggcaatatggacctcaagcagctccattgtgatgtgtggagtagattatga

SEQ ID NO: 77580 - DNA, 80 bp, synthetic construct
  source 1..80: mol_type = other DNA
aatatggacctcaagcagctccattgtgatgtgtggagtagattatgagattgccgattggtcatggccacgatggaact

SEQ ID NO: 77581 - DNA, 80 bp, synthetic construct
  source 1..80: mol_type = other DNA
ggaatacaatgagacagtgagaatcgagaaaatgacgcaagagctcaatgccaatgtcattgaatatatagagagaccag

SEQ ID NO: 77582 - DNA, 80 bp, synthetic construct
  source 1..80: mol_type = other DNA
agagtgagcacttcatgaataatacagaaccattatgcgacgataagggttttgctcctttttccaaggacaatgggata

SEQ ID NO: 77583 - DNA, 80 bp, synthetic construct
  source 1..80: mol_type = other DNA
aggattggatcgaggggtcatgtttttgttataagggaaccatttgttttttgttcgccaacagagtgcagaacgttttt

SEQ ID NO: 77584 - DNA, 80 bp, synthetic construct
  source 1..80: mol_type = other DNA
ccttactcagggttccctagtcaatgacaaacattgtaatggcacggtaaaaggcaggagtccctataggactctaatga

SEQ ID NO: 77585 - DNA, 80 bp, synthetic construct
  source 1..80: mol_type = other DNA
gtgtagagatagggcagtcacccaatgtataccaagcaaggtttgaagcagtagcatggtcagccactgcatgccacgat

SEQ ID NO: 77586 - DNA, 80 bp, synthetic construct
  source 1..80: mol_type = other DNA
ccaagcaaggtttgaagcagtagcatggtcagccactgcatgccacgatggaaagaagtggatgacaattggagtaacgg

SEQ ID NO: 77587 - DNA, 80 bp, synthetic construct
  source 1..80: mol_type = other DNA
ggaaagaagtggatgacaattggagtaacggggcccgatgccaaagcggttgcagtagtgcactatggagggattcccat

SEQ ID NO: 77588 - DNA, 80 bp, synthetic construct
  source 1..80: mol_type = other DNA
tgacgtgatcaattcttgggcaggggacatattaaggactcaagaatcatcgtgcacttgcatccagggtgagtgttatt

SEQ ID NO: 77589 - DNA, 80 bp, synthetic construct
  source 1..80: mol_type = other DNA
gggtaatgacggatgggccagcaaacagacaagcacaatacagagtattcaaggccaagcaggggaaaataattgggcaa

SEQ ID NO: 77590 - DNA, 80 bp, synthetic construct
  source 1..80: mol_type = other DNA
catataattagcattacaataacagtattagttttccctaagagtaaaagtaatggaagttgcaatgaaatagtcattag

SEQ ID NO: 77591 - DNA, 80 bp, synthetic construct
  source 1..80: mol_type = other DNA
actgagatcagtttcaatggaggccatatagaagaatgctcatgttaccccaacaatggtaaggtggaatgcatttgtag

SEQ ID NO: 77592 - DNA, 80 bp, synthetic construct
  source 1..80: mol_type = other DNA
ggataactggaccggaaccaataggccagttttagtgatttccccagatttgtcttacaaagttgggtatttgtgtgcag

SEQ ID NO: 77593 - DNA, 80 bp, synthetic construct
  source 1..80: mol_type = other DNA
gtattcccagtgacactccaagaggagaagataatcagttcacagggtcatgcatcagtcctatgggaaatcagggatat

SEQ ID NO: 77594 - DNA, 80 bp, synthetic construct
  source 1..80: mol_type = other DNA
gtcactcaattcagactgggaatcaaaataacatcagcaataccaattttcttaccgagcaggctgtagcttcagtgaca

SEQ ID NO: 77595 - DNA, 80 bp, synthetic construct
  source 1..80: mol_type = other DNA
cttacgaaaacaatacttgggtgaatcaaacatatgttaacatcagtaataccattttttcagcagaaaaatctgtagat

SEQ ID NO: 77596 - DNA, 80 bp, synthetic construct
  source 1..80: mol_type = other DNA
gcagtggcattagcgggcaactcctctctctgccctattagtgggtgggctatatacagtaaagacaatggtataaggat

SEQ ID NO: 77597 - DNA, 80 bp, synthetic construct
  source 1..80: mol_type = other DNA
atgcaaccaaagcattactgaacaggctgtaacttcggtgacattagcgggcaattcatctctttgccctattagtgggt

SEQ ID NO: 77598 - DNA, 80 bp, synthetic construct
  source 1..80: mol_type = other DNA
tgcgagatgaatccaaatcagaagataataacaattggtgttgtgaacactactctatcaacaatagcccttctcattgg

SEQ ID NO: 77599 - DNA, 80 bp, synthetic construct
  source 1..80: mol_type = other DNA
acccggagtgaagggatttggcttcaaagttggcagtgacgtgtggctgggcagaacggtgtcaaccagtggtagatcag

SEQ ID NO: 77600 - DNA, 80 bp, synthetic construct
  source 1..80: mol_type = other DNA
gctttgaagtcatcaaagtcactgagggatggatcaactcacccagtcaagccaaatcggtcacacagacactagtgtca

SEQ ID NO: 77601 - DNA, 80 bp, synthetic construct
  source 1..80: mol_type = other DNA
aacaatgattggtcaggctactcaggtagcttcatcgtccaaactggtggatgtttccaaccgtgcttttatgttgaact

SEQ ID NO: 77602 - DNA, 80 bp, synthetic construct
  source 1..80: mol_type = other DNA
catacgagggagacctaataagaatgatgatgtctcttggacgagcaacagtatagtcacattctgtgggctaaacaatg

SEQ ID NO: 77603 - DNA, 80 bp, synthetic construct
  source 1..80: mol_type = other DNA
cacccgcaataccaaactgcagcgacaccattataacatataacaaaacggtaataaacaacataacaacaacaataata

SEQ ID NO: 77604 - DNA, 80 bp, synthetic construct
  source 1..80: mol_type = other DNA
actgaggcagagaggcctttcaagccttcattaccactctgcccctttcaagggtttttccctttccacaaagacaacgc

SEQ ID NO: 77605 - DNA, 80 bp, synthetic construct
  source 1..80: mol_type = other DNA
aatacgactgggtgagaacaaggatgtcatagtcacaagggaaccctacattagctgcgataacgatcactgctggtcct

SEQ ID NO: 77606 - DNA, 80 bp, synthetic construct
  source 1..80: mol_type = other DNA
ttgctcttgctcaaggagcgctattagggaccaaacatagcaatggaaccatcaaagacagaacgccgtataggtcgtta

SEQ ID NO: 77607 - DNA, 80 bp, synthetic construct
  source 1..80: mol_type = other DNA
atccggttcccaataggaacagccccggtccttggaaattacagggaaatatgcattgcttggtcgagcagtagctgttt

SEQ ID NO: 77608 - DNA, 80 bp, synthetic construct
  source 1..80: mol_type = other DNA
cgatgggaaagaatggatgcatgtatgcatgacagggaatgataaagatgcaagtgctcaaataatatatgcagggaaaa

SEQ ID NO: 77609 - DNA, 80 bp, synthetic construct
  source 1..80: mol_type = other DNA
tgacagactccatcaaatcatggagaaaagacatactaagaacccaggaatctgaatgtcagtgcattggcggaacctgt

SEQ ID NO: 77610 - DNA, 80 bp, synthetic construct
  source 1..80: mol_type = other DNA
gttgtggctgttacagatggccctgctgctaacagtgcagaccatagggtttactggatacgagaggggagggttttgaa

SEQ ID NO: 77611 - DNA, 80 bp, synthetic construct
  source 1..80: mol_type = other DNA
agtggggaacctaatcttcaatacagtcatacatgagaaaataggaaaccaccaacccacgacatacccaaccgcaacag

SEQ ID NO: 77612 - DNA, 80 bp, synthetic construct
  source 1..80: mol_type = other DNA
gtatgagaatgttcctaaaacaaagatacagcacctggaagagtgttcttgctacgtggacattgatgtgtactgcatat

SEQ ID NO: 77613 - DNA, 80 bp, synthetic construct
  source 1..80: mol_type = other DNA
gcagagacaactggaaaggctcaaacaggccttggatgaggattaacaacgaaaccatattagagacaggatacgtgtgt

SEQ ID NO: 77614 - DNA, 80 bp, synthetic construct
  source 1..80: mol_type = other DNA
agcaaatttcactcagacactcccagacctgctgatccttcagtagtatcatgtgattccccaagcaatattaatggaga

SEQ ID NO: 77615 - DNA, 80 bp, synthetic construct
  source 1..80: mol_type = other DNA
agtttcataatgaatccaaatcaaaagatcataaccattggtagtgtaagcattttactgacaacaataggactgctact

SEQ ID NO: 77616 - DNA, 80 bp, synthetic construct
  source 1..80: mol_type = other DNA
ggaagatagtaaacacaaaggatgtggatgctacagggtatcactttgaggaatgttcctgctatccaagtggggaaaat

SEQ ID NO: 77617 - DNA, 80 bp, synthetic construct
  source 1..80: mol_type = other DNA
gtcgagtgtgtgtgcagggacaattggagagggagtaataggccatggataaggttcaacagtaatcttgactatcaaat

SEQ ID NO: 77618 - DNA, 80 bp, synthetic construct
  source 1..80: mol_type = other DNA
agcaaaagcaggggaattaactagcaatatgaaaacaataccactgctaactatactactagtagtaacaacaagcaatg

SEQ ID NO: 77619 - DNA, 80 bp, synthetic construct
  source 1..80: mol_type = other DNA
agcaaaaccaggggatttacttgacaagaaaaatgaaatcaatatcactgataactatactactagtagtaacaacaagc

SEQ ID NO: 77620 - DNA, 80 bp, synthetic construct
  source 1..80: mol_type = other DNA
gttcctggtacctcaatgtttccgtcttgttcttgtacctgtacttcagactcaaactgaacttgcattcgcatcccatc

SEQ ID NO: 77621 - DNA, 80 bp, synthetic construct
  source 1..80: mol_type = other DNA
atcctggtcttgcgctttattcctatgccaatgggactgggcccgattctcctgctccaggttactattgccattggctc

SEQ ID NO: 77622 - DNA, 80 bp, synthetic construct
  source 1..80: mol_type = other DNA
tagagggaactgcttccttaagccctggaatgatgatgggtatgtttaatatgttaagcactgtgttgggtgtttccatt

SEQ ID NO: 77623 - DNA, 80 bp, synthetic construct
  source 1..80: mol_type = other DNA
gaactaatggacaaggattatcaggggcgattatgcaatccgctaaatccatttgtcggccacaaggaaattgaatcagt

SEQ ID NO: 77624 - DNA, 80 bp, synthetic construct
  source 1..80: mol_type = other DNA
cacaaggacggcaaaccttcgattggactctgaataggaatcagcctgctgcaacagcattagccaacacaatagaagtg

SEQ ID NO: 77625 - DNA, 80 bp, synthetic construct
  source 1..80: mol_type = other DNA
tggaaggctcatagacttcctgaaagatgttatggattcaatggacaaagaagaaatggaaattgtgacccatttccaga

SEQ ID NO: 77626 - DNA, 80 bp, synthetic construct
  source 1..80: mol_type = other DNA
ccataggtaaaaagaaacagaaattaaatagaaagggttatctgattagggcattaactttgaacacaatgactaaagac

SEQ ID NO: 77627 - DNA, 80 bp, synthetic construct
  source 1..80: mol_type = other DNA
tgaaaaaaaaattccaagggttaaaaatatgaaaaaaacaagtccactaaaatgggcacttggtgaaaatatggcccccg

SEQ ID NO: 77628 - DNA, 80 bp, synthetic construct
  source 1..80: mol_type = other DNA
gagataggggatatggtcctaagaaccgctatgggtcaagtggcaaggcccatgtttctatacgtgagaacaaacgggac

SEQ ID NO: 77629 - DNA, 80 bp, synthetic construct
  source 1..80: mol_type = other DNA
gggttgggaaaccaaggtacctcccagatctgtacgactacaaagaagatagattcattgagattggtgtgacaagaagg

SEQ ID NO: 77630 - DNA, 80 bp, synthetic construct
  source 1..80: mol_type = other DNA
aagattgcaaagatatcggtgatttaaaacagtataacagtgatgagccaaaattgagatcactagcaagctggattcag

SEQ ID NO: 77631 - DNA, 80 bp, synthetic construct
  source 1..80: mol_type = other DNA
tcgtgcacgaaaacaaatagtcaaacgtattctggaagaagagtacgatgaatcacttaaaatgactatcgcttctgtgc

SEQ ID NO: 77632 - DNA, 80 bp, synthetic construct
  source 1..80: mol_type = other DNA
agcgcagcggaatcaagtggaataaaattggaatcaataaaaatctaccacagactgactattaattcaacattggtgaa

SEQ ID NO: 77633 - DNA, 80 bp, synthetic construct
  source 1..80: mol_type = other DNA
tgcctcatcactgtcactcatcgaaactggcctatctctctgcatgtgctccaatggatcactgcaatgcaggatttgca

SEQ ID NO: 77634 - DNA, 80 bp, synthetic construct
  source 1..80: mol_type = other DNA
gaaatgggagatgagcaggagaaagctaagctgctacatccagcctgcacttatggggattcagatcatcatagggagat

SEQ ID NO: 77635 - DNA, 80 bp, synthetic construct
  source 1..80: mol_type = other DNA
ggaccaggggccaccttagaagaaatgatgaatgcctgtcaaggagtagggggaccaacacataaggccagggtcttagc

SEQ ID NO: 77636 - DNA, 80 bp, synthetic construct
  source 1..80: mol_type = other DNA
agaagctatggcagcagctaatcaagctaaccaagatttaaaaggagggtatacaactgttttcatgcagagtggacaga

SEQ ID NO: 77637 - DNA, 80 bp, synthetic construct
  source 1..80: mol_type = other DNA
gaaagccagttaagtgctttaactgtggaaaaataggacacatagcaaagaactgtaaggcacctaggagaaaaggatgc

SEQ ID NO: 77638 - DNA, 80 bp, synthetic construct
  source 1..80: mol_type = other DNA
cagccccacctatggaggaggacgagatgacccgggacaagcagagggagaaggaggaggacgaggaggaatacccttta

SEQ ID NO: 77639 - DNA, 80 bp, synthetic construct
  source 1..80: mol_type = other DNA
agtttacggaactgtattagtgggcccaaccccagtaaacataataggaagaaatattttgacattaattggatgtactc

SEQ ID NO: 77640 - DNA, 80 bp, synthetic construct
  source 1..80: mol_type = other DNA
cttaatgtggaagtttgacagatcactgggagaaagacatgttgccttacaaaagcacccggaactgtttactaaagact

SEQ ID NO: 77641 - DNA, 80 bp, synthetic construct
  source 1..80: mol_type = other DNA
aaagtgctgacgctacgcagctactaagttgctgacactgcagggactttccggggacggaaagtcccgagggcggaaca

SEQ ID NO: 77642 - DNA, 80 bp, synthetic construct
  source 1..80: mol_type = other DNA
caaaaagcagaattagaagcagtgctgttagccttaaaagaatcaggaaaacaggctaacatagtaacagactcccaata

SEQ ID NO: 77643 - DNA, 80 bp, synthetic construct
  source 1..80: mol_type = other DNA
tgtgttagggatcatctcagcaactccagatcaaagtgactcccccctagtgcaaaaaataatagaagaaatgacaaaga

SEQ ID NO: 77644 - DNA, 80 bp, synthetic construct
  source 1..80: mol_type = other DNA
ggatcatgaaaaatatcacagtaattggaaagccctagctagtgactttggccttccaccaatagtggcaaaagagatta

SEQ ID NO: 77645 - DNA, 80 bp, synthetic construct
  source 1..80: mol_type = other DNA
ataggtctaaaaagacaaagaattggttttataggcatcattatgagacagtccatcctaggattagttcaggagtttac

SEQ ID NO: 77646 - DNA, 80 bp, synthetic construct
  source 1..80: mol_type = other DNA
attccagtaggagcagcaaccattgttgtgactacttattgggggcttatgcctggggaaagagaagaacaattaggaca

SEQ ID NO: 77647 - DNA, 80 bp, synthetic construct
  source 1..80: mol_type = other DNA
tggagcaagtgtggagtggagacaaggtaaatacaccacccagatagatccagaaacagcagataggctaattcatctcc

SEQ ID NO: 77648 - DNA, 80 bp, synthetic construct
  source 1..80: mol_type = other DNA
actactttcaatgtttttcagattcggctgtgaggagggcaatactaggggacagggtattgaacaagtgtgaatactca

SEQ ID NO: 77649 - DNA, 80 bp, synthetic construct
  source 1..80: mol_type = other DNA
gcaggacatagtcaggtaggctccttgcagtttttagccttaaaagtggtagtagggaaagtaaaaaggaagccacccct

SEQ ID NO: 77650 - DNA, 80 bp, synthetic construct
  source 1..80: mol_type = other DNA
ccctagtgtccagatattgacacaagatatatggagcaagccccagaggaccaagggccgccaagagagccattcaatga

SEQ ID NO: 77651 - DNA, 80 bp, synthetic construct
  source 1..80: mol_type = other DNA
gtggatgctacaaaccttagaggaactcaaggcggaagcagtaagacccttccctctgcaatacttacactcattaggac

SEQ ID NO: 77652 - DNA, 80 bp, synthetic construct
  source 1..80: mol_type = other DNA
aatacatctataatacctatggggacacctgggagggagtaactgcaattattaggatcctaccacaattaatttttatc

SEQ ID NO: 77653 - DNA, 80 bp, synthetic construct
  source 1..80: mol_type = other DNA
cattatagaattggatgtcaccatagtagaataggtatattgccaccctctcgaagaggaaggagacatggaccaagtag

SEQ ID NO: 77654 - DNA, 80 bp, synthetic construct
  source 1..80: mol_type = other DNA
gatgaggcagtattaataatagctggggtattactaatttgcattatagtagtttgggggaaggtcctgctatttgtgct

SEQ ID NO: 77655 - DNA, 80 bp, synthetic construct
  source 1..80: mol_type = other DNA
gggaaggtcctgctatttgtgctaaaagagagagaaagggataagtttgtacaaaggctagtaaggtggagagaaaggca

SEQ ID NO: 77656 - DNA, 80 bp, synthetic construct
  source 1..80: mol_type = other DNA
aaaagagagagaaagggataagtttgtacaaaggctagtaaggtggagagaaaggcaagaagatggggggtatgagagca

SEQ ID NO: 77657 - DNA, 80 bp, synthetic construct
  source 1..80: mol_type = other DNA
atgcatcgctaactagcaaagagcagcataatatttgggccacccaggcctgtgtgcccaccgaccctacaccaatagag

SEQ ID NO: 77658 - DNA, 80 bp, synthetic construct
  source 1..80: mol_type = other DNA
tgtagtgaatgccacagggaggctagctgtaataataacagtagctcctctgtgaatagcaccgccgacaatccattaga

SEQ ID NO: 77659 - DNA, 80 bp, synthetic construct
  source 1..80: mol_type = other DNA
tctatttaagtgcagttttaatacaaccacagtattgaaagataaaaagcagggacagcaagcactcttctatagaacag

SEQ ID NO: 77660 - DNA, 80 bp, synthetic construct
  source 1..80: mol_type = other DNA
acctaatagcactgaatgagacagcaaataatacactatatagattaattaattgcaacaccactaccattacacaagca

SEQ ID NO: 77661 - DNA, 80 bp, synthetic construct
  source 1..80: mol_type = other DNA
tgcccaaaagtgacttttgagccactacccatacagtattgtgcaccagcagggtatgcactaatgaaatgcaatcagaa

SEQ ID NO: 77662 - DNA, 80 bp, synthetic construct
  source 1..80: mol_type = other DNA
atacttgtaatacctcgggtgcatgtacaggtaaacacacaggtgagaacatgacaataacactgccttgtagactaaag

SEQ ID NO: 77663 - DNA, 80 bp, synthetic construct
  source 1..80: mol_type = other DNA
caagtagttaattcatggatgaaagtgggatcaggcttgtttgcgccacctatcgagggacaattgcagtgccactccaa

SEQ ID NO: 77664 - DNA, 80 bp, synthetic construct
  source 1..80: mol_type = other DNA
cattacaggtttaatattagacagagcatcaccttataatgccaacagcagcaacaccactttaagccctacagggggag

SEQ ID NO: 77665 - DNA, 80 bp, synthetic construct
  source 1..80: mol_type = other DNA
aaatgagaaatatctggagaagtgagttatatccctacaaggtagttcaagtaaaggctctggctgtggcacctacaaga

SEQ ID NO: 77666 - DNA, 80 bp, synthetic construct
  source 1..80: mol_type = other DNA
gtctccagacctacaatcatggctcatgatgctcataggaaaaaaaggggagcaggcctaggaatgctattccttgggtt

SEQ ID NO: 77667 - DNA, 80 bp, synthetic construct
  source 1..80: mol_type = other DNA
cctcagtcgagaatgctcagcaggacaagggcatagccatcccacatgatattgaccttggtgagtcccgagttgtgatt

SEQ ID NO: 77668 - DNA, 80 bp, synthetic construct
  source 1..80: mol_type = other DNA
cttcagtcgagaacgcccagcaggacaagggtatagctattccacatgatattgaccttggtgagtcccgggtagttatc

SEQ ID NO: 77669 - DNA, 80 bp, synthetic construct
  source 1..80: mol_type = other DNA
ggctctgtctctctaaccattgccacagtatgtttcctcatgcagattgccattctagcaacgactgtaacactgcactt

SEQ ID NO: 77670 - DNA, 80 bp, synthetic construct
  source 1..80: mol_type = other DNA
aggtgaagaacattcagaaaagattcacgtccaggttatgagactttcaaagttattgggggtgggaccccagtaaattc

SEQ ID NO: 77671 - DNA, 80 bp, synthetic construct
  source 1..80: mol_type = other DNA
caattcccaggggaatagaaaattattagtggccaataaaaattgtttgggttatttgggattttttttttttgaaggca

SEQ ID NO: 77672 - DNA, 80 bp, synthetic construct
  source 1..80: mol_type = other DNA
aaagtggcaccaaaagtggtttttttggggagttgataaggggagggccccaaaaaattggagttgggtggccttcaaaa

SEQ ID NO: 77673 - DNA, 80 bp, synthetic construct
  source 1..80: mol_type = other DNA
gggccccaaaaaattggagttggggggccttcaaaaaccattttggttttttgggccatttcaggtccttatgaaccgtg

SEQ ID NO: 77674 - DNA, 80 bp, synthetic construct
  source 1..80: mol_type = other DNA
gggagcatctgggtaacaagagaaccttatgtgtcatgcaactccaacaaatgttatcaatttgcacttgggcaggggac

SEQ ID NO: 77675 - DNA, 80 bp, synthetic construct
  source 1..80: mol_type = other DNA
tattcattaaggaggggaaaatggttcatataagcccatattcagaaagtgttcaaaatatagaagaaaggttttggtat

SEQ ID NO: 77676 - DNA, 80 bp, synthetic construct
  source 1..80: mol_type = other DNA
caggcaaaatgaaggcagcattccctcgaacaatcaagtggttccatgtgagccaatcataatagaaaggaacataacag

SEQ ID NO: 77677 - DNA, 80 bp, synthetic construct
  source 1..80: mol_type = other DNA
tcccggcttccaaattttaaaggtgtttgcagagccaattggaaaggttttaaaagaccctttttaaaattaaatatggg

SEQ ID NO: 77678 - DNA, 80 bp, synthetic construct
  source 1..80: mol_type = other DNA
ggattttggtttggtttccatttatgggggttcaggatttttgggggcccccccagggaaggataatatttttgttaata

SEQ ID NO: 77679 - DNA, 80 bp, synthetic construct
  source 1..80: mol_type = other DNA
ccaattccagggttcttaaaaataaagaagggaacccgggagaaaaaggtgggccctttgattatgggaagaagtttgtg

SEQ ID NO: 77680 - DNA, 80 bp, synthetic construct
  source 1..80: mol_type = other DNA
ctgctaataggattgaccaacttggggctgaaccttgggcttcttttcggggtcggagacatcacaaaaaccggaacccc

SEQ ID NO: 77681 - DNA, 80 bp, synthetic construct
  source 1..80: mol_type = other DNA
ggacctccaatagtatagtagcactctgtggatccaaggagcgattgggatcttggtcatggcatcatggggctgaaatc

SEQ ID NO: 77682 - DNA, 80 bp, synthetic construct
  source 1..80: mol_type = other DNA
attggacgtgcacaagtatcatcaataaagaaacggagactgcaaagcaaaattacctaatgctgaacaaaagcttatgc

SEQ ID NO: 77683 - DNA, 80 bp, synthetic construct
  source 1..80: mol_type = other DNA
aagtgtagttgcaggacaggctgtagctccagtaacactagcaggcaattcctctctctgccccatcagtggatgggcta

SEQ ID NO: 77684 - DNA, 80 bp, synthetic construct
  source 1..80: mol_type = other DNA
ggatgtcgccccaatcgagcatattgcaagcatgaggaggaattgtaaaacgacggccagtagcaaaagcagggcaacag

SEQ ID NO: 77685 - DNA, 80 bp, synthetic construct
  source 1..80: mol_type = other DNA
tatcggcaaatttaaatgatgtgcaatgtactggaggaaattatgattttgtacttccggtaggaccatggccaattatg

SEQ ID NO: 77686 - DNA, 80 bp, synthetic construct
  source 1..80: mol_type = other DNA
tcaggtggagccgtcacactatcttttgcaggagttaccttgtctacacaatttactgattacgtatcacttaattcatt

SEQ ID NO: 77687 - DNA, 80 bp, synthetic construct
  source 1..80: mol_type = other DNA
aagatttagatttagattatcggttggggaaccatcattttcaataataagaaccagaatgagtggactttatggattgc

SEQ ID NO: 77688 - DNA, 80 bp, synthetic construct
  source 1..80: mol_type = other DNA
ttatctcaagaaatagcaatatctcaattggtggacttagcaacactgcctttggacatgttctcaatgttctcaggact

SEQ ID NO: 77689 - DNA, 80 bp, synthetic construct
  source 1..80: mol_type = other DNA
caaatcgacatttggagcaattaggtctttaaccactaatgtaatgaaaaagtttaaaaagtcaaatattgctcaatcga

SEQ ID NO: 77690 - DNA, 80 bp, synthetic construct
  source 1..80: mol_type = other DNA
tatcaagtttaactgacgctatgtctgacgctgcctcctcaattaacagatcgcgatcgactagatcaattacatcaaat

SEQ ID NO: 77691 - DNA, 80 bp, synthetic construct
  source 1..80: mol_type = other DNA
ataagtacaataacgcaaaccagcagcgagatagagtctatagctgacatttcaacacaagtatcatcaataagtagaca

SEQ ID NO: 77692 - DNA, 80 bp, synthetic construct
  source 1..80: mol_type = other DNA
attaaggttaaaagaattttctactcaaaccgatcacatgaactttgatgatatttcagcagctgtactcaaaaccaaat

SEQ ID NO: 77693 - DNA, 80 bp, synthetic construct
  source 1..80: mol_type = other DNA
taccttcaagaacatatagatttattgatgatgataatgtgtttgaggctagtatagatggaacgttctatgcatatagg

SEQ ID NO: 77694 - DNA, 80 bp, synthetic construct
  source 1..80: mol_type = other DNA
gttgaaacattagacgaaatatcttttgatatggagagatttagaaaattagttacggactcacctgtaatttcagcgat

SEQ ID NO: 77695 - DNA, 80 bp, synthetic construct
  source 1..80: mol_type = other DNA
cactggatcttatatactcaaatccgaaaacattgaaagaatttataaacaatgataatccaataatcagaaacaggatc

SEQ ID NO: 77696 - DNA, 80 bp, synthetic construct
  source 1..80: mol_type = other DNA
atgataatccaataatcagaaacaggatcgagaatttaattgcacaatgcagactgtaattgtctgattgagatgtgacc

SEQ ID NO: 77697 - DNA, 80 bp, synthetic construct
  source 1..80: mol_type = other DNA
atacaacttgttcagtaaatggtgttaatgatttcagctataatagtggtacattgccgactgacttttcgatctccagg

SEQ ID NO: 77698 - DNA, 80 bp, synthetic construct
  source 1..80: mol_type = other DNA
ggtccccacccccccgtgtccaacattaaaccattaaatcatgaggggctcgccccaccctggccccctttttattctag

SEQ ID NO: 77699 - DNA, 80 bp, synthetic construct
  source 1..80: mol_type = other DNA
aaacctgcacgactcgagcctcaaggaaccggtatgctcccacggcagctgacaaaaaccacggagagaaagcgtgacgt

SEQ ID NO: 77700 - DNA, 80 bp, synthetic construct
  source 1..80: mol_type = other DNA
caaaataggtgggggattccagataatgggcgcactcccacaccagggggggacttctttctagactcgggggtggactt

SEQ ID NO: 77701 - DNA, 80 bp, synthetic construct
  source 1..80: mol_type = other DNA
tgtagactagtggtggagttggagactagattggactccgcacactcggggggggctgttctctagactccgttgtggac

SEQ ID NO: 77702 - DNA, 80 bp, synthetic construct
  source 1..80: mol_type = other DNA
gggggtcgtgggggtttagactcggtggattctagactagaggtggactgcccgactcgaggcggactgtacttctagac

SEQ ID NO: 77703 - DNA, 80 bp, synthetic construct
  source 1..80: mol_type = other DNA
cctgcacaactccggatcaaggaacctctatgtttccctggagttgctgtacaaaacatacggacagaaagtgcacccgt

SEQ ID NO: 77704 - DNA, 80 bp, synthetic construct
  source 1..80: mol_type = other DNA
aagccccaatctaactcagggggggcttctagactctggggtgttcttatagactagggtggacttctctcaattttcta

SEQ ID NO: 77705 - DNA, 80 bp, synthetic construct
  source 1..80: mol_type = other DNA
aacctccacaactcctgttaaaaggaactgttacgttccctcgatcgacgccaaatggactctagactacgtgcgacgtt

SEQ ID NO: 77706 - DNA, 80 bp, synthetic construct
  source 1..80: mol_type = other DNA
ttctagagggggattcttggctcgcgccgccctctagactcgtggtggacttcttctagactcgtggtggacttctctca

SEQ ID NO: 77707 - DNA, 80 bp, synthetic construct
  source 1..80: mol_type = other DNA
cctgcacaactcctgctcaaggaacctgtatgtttcccacgggcagaagtacaaaacacatccgagagaaagcggcgacg

SEQ ID NO: 77708 - DNA, 80 bp, synthetic construct
  source 1..80: mol_type = other DNA
ttctagtggggggcttctagaccggggacttcataggggggtggacttcttcaattttctagggggagcacccacagtcc

SEQ ID NO: 77709 - DNA, 80 bp, synthetic construct
  source 1..80: mol_type = other DNA
ctgcacgattcctgctcaaggaacctctatgtttctcagtagaggtgctgtacaaagcactactagagctacgcgggacg

SEQ ID NO: 77710 - DNA, 80 bp, synthetic construct
  source 1..80: mol_type = other DNA
gggaaaaggaggcctgagtgatactgctaagacattcctgcagaaattcggcatcaggcttccatagagggacaatgaga

SEQ ID NO: 77711 - DNA, 80 bp, synthetic construct
  source 1..80: mol_type = other DNA
tgctaaaattaggttccaaattctaaattcatatatgtcaatttgattaattggttatccaaaagggttttcttaaggga

SEQ ID NO: 77712 - DNA, 80 bp, synthetic construct
  source 1..80: mol_type = other DNA
aattccatggtcttgggggaaagtaaagaggtcttcgagcttgaggagcttccagatgatatgctggaaatggcactgag

SEQ ID NO: 77713 - DNA, 80 bp, synthetic construct
  source 1..80: mol_type = other DNA
gataaatttttactatttcacctgcattctaaattatgctgtgagctggagtcttgttatcattggcctactgactgggc

SEQ ID NO: 77714 - DNA, 80 bp, synthetic construct
  source 1..80: mol_type = other DNA
tactattcaaaaggtaccagcataagtttttaaatatttatgcaatgtattgtgaagaatgcgatatgtaccatgacaaa

SEQ ID NO: 77715 - DNA, 80 bp, synthetic construct
  source 1..80: mol_type = other DNA
gggctgaaacgacatggtgacttcactaataagtgcaggcaatgcacatgcggccaatatgaggatgcaacggggttgat

SEQ ID NO: 77716 - DNA, 80 bp, synthetic construct
  source 1..80: mol_type = other DNA
ttttggtattaataaaggattctgctataatcgtgcaagctgctggaaccgactttagctcctgcttagaaaccgaaagt

SEQ ID NO: 77717 - DNA, 80 bp, synthetic construct
  source 1..80: mol_type = other DNA
ataaattggaattgcaccgggccattcttgaatctcgggaattgtcaaaaacaacaaaagaaggagccctatgctaacat

SEQ ID NO: 77718 - DNA, 80 bp, synthetic construct
  source 1..80: mol_type = other DNA
tcgcagctcagctaaaagggctgaaggcaatttcagtgcttgatattcctatgataacagaaatcccagatgatattgca

SEQ ID NO: 77719 - DNA, 80 bp, synthetic construct
  source 1..80: mol_type = other DNA
agtgctttaagatatatagaagagagggaggctttccacgtccaattgactgcagaatatgcaatgttgactaggtactg

SEQ ID NO: 77720 - DNA, 80 bp, synthetic construct
  source 1..80: mol_type = other DNA
agggcttaccaggtatggcaaactttaaacatgacgagttttgggatgaattattgtacaaacctacaccaacaaaggcc

SEQ ID NO: 77721 - DNA, 80 bp, synthetic construct
  source 1..80: mol_type = other DNA
ccgaatcttgctagagggagagaatcatcttataatttcaagctagcaatttcatcaaagtccataaaaacctgcaaaaa

SEQ ID NO: 77722 - DNA, 80 bp, synthetic construct
  source 1..80: mol_type = other DNA
tatatagaaaaccattaaatggtgtatttcaatctagtactgaccaatcaatgtattgtctgttagacagccattgctta

SEQ ID NO: 77723 - DNA, 80 bp, synthetic construct
  source 1..80: mol_type = other DNA
gaagaatttgaggctatcagccaagaagaattggatgcagtgaaaaagtccaaatgttgggagatagaatactctgacat

SEQ ID NO: 77724 - DNA, 80 bp, synthetic construct
  source 1..80: mol_type = other DNA
attagataggaggcctatatataatagggttgagtcctatattaggtgatttatttatagtatagctgttgttaagtggg

SEQ ID NO: 77725 - DNA, 80 bp, synthetic construct
  source 1..80: mol_type = other DNA
tatataatagggttgagtcctatattaggtgatttatttatagtatagctgttgttaagtggggggtggggaattaacaa

SEQ ID NO: 77726 - DNA, 80 bp, synthetic construct
  source 1..80: mol_type = other DNA
ttttgattctaatcaaggattctgccataattgtacgagctgccggaactgactttagctcctgcttagaaacagaaatc

SEQ ID NO: 77727 - DNA, 80 bp, synthetic construct
  source 1..80: mol_type = other DNA
ataaattggaactgcactgggccatttttgaatctcgggaattgccaaaggcaacaaaaaaaggagccttatgctaacat

SEQ ID NO: 77728 - DNA, 80 bp, synthetic construct
  source 1..80: mol_type = other DNA
tgcagctcaattaaaaggattgaaagcaatttcagtgcttgacatccctatgataacagaaataccagatgacatcgcaa

SEQ ID NO: 77729 - DNA, 80 bp, synthetic construct
  source 1..80: mol_type = other DNA
gtgcattaagatatatagaagagagagaggctttccatgtccaattgactgcagaatacgcaatgctgagtagatattgt

SEQ ID NO: 77730 - DNA, 80 bp, synthetic construct
  source 1..80: mol_type = other DNA
tatacaggaagccatcaggcggtgtcttccagtccagcactgaccaatctatgtattgtttgctggatagtcattgcttg

SEQ ID NO: 77731 - DNA, 80 bp, synthetic construct
  source 1..80: mol_type = other DNA
gaagaatttgaagctatcagccaggaagaattggatgcggtgaagaaatcgaaatgttgggaaatagaataccctgacgt

SEQ ID NO: 77732 - DNA, 80 bp, synthetic construct
  source 1..80: mol_type = other DNA
tctcaggaagcatgaggatgcatataagagagagatgaaaattaggtaaaaagccgtgtgaagcaagattaagtcttgtg

SEQ ID NO: 77733 - DNA, 80 bp, synthetic construct
  source 1..80: mol_type = other DNA
aaaagccgtgtgaagcaagattaagtcttgtgttatataatttatttatagtatagctgttgttaagtggggggtgggga

SEQ ID NO: 77734 - DNA, 80 bp, synthetic construct
  source 1..80: mol_type = other DNA
agtccagttatgggggtcattggattcagcttctttgtaaaggattggatggagaggattgaaaacttcctagctgctga

SEQ ID NO: 77735 - DNA, 80 bp, synthetic construct
  source 1..80: mol_type = other DNA
tcactgagtgacatcaaaatcatggcgtcccaaggcaccaaacggtcttatgaacagatggaaactgatggggatcgcca

SEQ ID NO: 77736 - DNA, 80 bp, synthetic construct
  source 1..80: mol_type = other DNA
cggaattacgaacaaggtcaattccatcattgataaaatgaacacacaatttgaggctgtaggtcatgagttttcaaacc

SEQ ID NO: 77737 - DNA, 80 bp, synthetic construct
  source 1..80: mol_type = other DNA
aattagtctctgtaatgaactctttacaaatagcatcaatagtagcactagtagtagcatttttccttgcagtagttgcg

SEQ ID NO: 77738 - DNA, 80 bp, synthetic construct
  source 1..80: mol_type = other DNA
aaaagagggccttttacggaagggatgcctgagtttatgagggaagagtatcggcaggagcagcagagtgctgtggatgt

SEQ ID NO: 77739 - DNA, 80 bp, synthetic construct
  source 1..80: mol_type = other DNA
tgctgtacaaaaccttcggatggaaactgcacctgtattcccatcccatcgtcatgggctttcggaaaattcctatggga

SEQ ID NO: 77740 - DNA, 80 bp, synthetic construct
  source 1..80: mol_type = other DNA
gtaggagtgagagcattcgggccagggttcactcccccacacggaggtgttctggggtggagccctcaggctcagggcat

SEQ ID NO: 77741 - DNA, 80 bp, synthetic construct
  source 1..80: mol_type = other DNA
ctgtacaaaaccaacggacggaaattgcacctgtattcccatcccatcatcttgggctttcgcaaaatacctatgggagt

SEQ ID NO: 77742 - DNA, 80 bp, synthetic construct
  source 1..80: mol_type = other DNA
acacctcaaggagctataaacagcagtcttcctttccagaacgtacacccagtcacaataggagagtgtccaaagtatgt

SEQ ID NO: 77743 - DNA, 80 bp, synthetic construct
  source 1..80: mol_type = other DNA
aaaccagaatgaaagtaaaactactggtcctgttatgcacatttacagctacatatgcagacacaatatgtataggctac

SEQ ID NO: 77744 - DNA, 80 bp, synthetic construct
  source 1..80: mol_type = other DNA
tgaaggggggtggactggaatggtagatggttggtatggttatcatcatcagaatgagcaaggatctggctatgctgcag

SEQ ID NO: 77745 - DNA, 80 bp, synthetic construct
  source 1..80: mol_type = other DNA
caattgggtaactgcaccgttgccgggtggatcttaggaaacccagaatgcgaattactgatttccaaggagtcatggtc

SEQ ID NO: 77746 - DNA, 80 bp, synthetic construct
  source 1..80: mol_type = other DNA
ttacattgtagaaaaaccaaatcctgagaatggaacatgttacccagggcatttcgctgactatgaggaactgagggagc

SEQ ID NO: 77747 - DNA, 80 bp, synthetic construct
  source 1..80: mol_type = other DNA
ccataatggggaaaacagtttttacagaaatttgctatggctgacggggaagaatggtttgtacccaaacctgagcaagt

SEQ ID NO: 77748 - DNA, 80 bp, synthetic construct
  source 1..80: mol_type = other DNA
ttgtactatggggtgttcatcacccgccaaacatagctgaccaaaagaccctctatcatacagaaaatgcttatgtttct

SEQ ID NO: 77749 - DNA, 80 bp, synthetic construct
  source 1..80: mol_type = other DNA
gtagtgtcttcacattatagcagaaaattcaccccagaaatagccaaaagacccaaaataagagatcaagaaggaagaat

SEQ ID NO: 77750 - DNA, 80 bp, synthetic construct
  source 1..80: mol_type = other DNA
caactactactggactctgcttgaacccggggatacaataatatttgaggcaaatggaaatctaatagcgccaagatatg

SEQ ID NO: 77751 - DNA, 80 bp, synthetic construct
  source 1..80: mol_type = other DNA
agggagcaaaagcaggggttttgatctatcaaaatggaaagagcaatacttcttcttgcgctggtcagtcttgtccgagg

SEQ ID NO: 77752 - DNA, 80 bp, synthetic construct
  source 1..80: mol_type = other DNA
agatgaacactcagttcgaagctgctgggaaagagttcaacaatttggagaggagaatagagaatttgaatatgaaaatg

SEQ ID NO: 77753 - DNA, 80 bp, synthetic construct
  source 1..80: mol_type = other DNA
agataaatggggttaaattggaatcaatgggggtatatcaaattttgtcaatttactcatcagtggcaagttctctagca

SEQ ID NO: 77754 - DNA, 80 bp, synthetic construct
  source 1..80: mol_type = other DNA
gcccaggacatccttgaaaggacgcacaacgggaaactctgcagtctaaatggagtaaaaccccttatattaaaagactg

SEQ ID NO: 77755 - DNA, 80 bp, synthetic construct
  source 1..80: mol_type = other DNA
tagtgttgctggatggctcactgggaaccccaaatgcgacgcatttctgagtgtgccggaatggtcctatatagtagaaa

SEQ ID NO: 77756 - DNA, 80 bp, synthetic construct
  source 1..80: mol_type = other DNA
aggacaatcctgctgaaggcctttgctacccaggcaatgttaatgactatgaagaattaaaacatttattgactagtaca

SEQ ID NO: 77757 - DNA, 80 bp, synthetic construct
  source 1..80: mol_type = other DNA
aaacattttgaaaaaattcgaatcatacctaaggagtcctggtctaatcatgacgcatcaggggtgacctcagcatgttc

SEQ ID NO: 77758 - DNA, 80 bp, synthetic construct
  source 1..80: mol_type = other DNA
attccttgggaaatcctctttttatagaaacgtggtgtggcttatcaaaaagaacaatgaatacccaacaataaaaagaa

SEQ ID NO: 77759 - DNA, 80 bp, synthetic construct
  source 1..80: mol_type = other DNA
cttataataatactaaccaggaggaccttctgataatatggggaatccaccatcccagtagcacaacagaacaaacaaat

SEQ ID NO: 77760 - DNA, 80 bp, synthetic construct
  source 1..80: mol_type = other DNA
ctctataaaaactcaaacacttacgtttctgtaggaacatcaacattaaaccaaagatcaatcccagaaatagctaccag

SEQ ID NO: 77761 - DNA, 80 bp, synthetic construct
  source 1..80: mol_type = other DNA
agagtggaaggatggatttcttctggacaattttgaggccaaatgatgcaataaattttgaaagtaacggaaacttcata

SEQ ID NO: 77762 - DNA, 80 bp, synthetic construct
  source 1..80: mol_type = other DNA
tgaccaaatttgcattggttatcatgcaaacaattcaacggagcaggttgacacaataatggagaagaatgtgactgtca

SEQ ID NO: 77763 - DNA, 80 bp, synthetic construct
  source 1..80: mol_type = other DNA
aaaggagactcggcagtcatgaaaagtgaattaggatatggaaactgtgacgccaaatgccaaactccattgggtgccgt

SEQ ID NO: 77764 - DNA, 80 bp, synthetic construct
  source 1..80: mol_type = other DNA
aaactccagtatgcccttccacaacatacatcctcttaccattggagaatgccccaagtatgtaaaatcagatagattgg

SEQ ID NO: 77765 - DNA, 80 bp, synthetic construct
  source 1..80: mol_type = other DNA
ctctttcaatatcaccacaagtggaggaagtaagaggcagaaagaatatgcactttttaatgatcttgatttagtaggga

SEQ ID NO: 77766 - DNA, 80 bp, synthetic construct
  source 1..80: mol_type = other DNA
atgccttttggtgctcctcctggttttgcttgtgctccatgtggatttgaagatctcaaaggaacaggaccaggtgtaaa

SEQ ID NO: 77767 - DNA, 80 bp, synthetic construct
  source 1..80: mol_type = other DNA
tatggaagtttgacagcagcctagcacggaggcacatagcccgagaactgcatccggacttctataaggactaaagactg

SEQ ID NO: 77768 - DNA, 80 bp, synthetic construct
  source 1..80: mol_type = other DNA
cctttggacttgtggattctaatgggaagccgtcagctgctgtcatggcagccgctcaggcttacaagacagcagcctaa

SEQ ID NO: 77769 - DNA, 80 bp, synthetic construct
  source 1..80: mol_type = other DNA
ctaatagcattgtagctctctgtggatccaaagagcgattaggatcatggtcctggcatgatggtgctgaaatcatctac

SEQ ID NO: 77770 - DNA, 80 bp, synthetic construct
  source 1..80: mol_type = other DNA
ccaaacgtgaacgagaacaactcgacaacaataataaacacaaatatcactaacattatagtgaacaagaatgaagaaaa

SEQ ID NO: 77771 - DNA, 80 bp, synthetic construct
  source 1..80: mol_type = other DNA
cacttagtgattcagaaggaaatgagacaccaggaggttattgtctcactaggtggatgttgattgaggccgatctaaag

SEQ ID NO: 77772 - DNA, 80 bp, synthetic construct
  source 1..80: mol_type = other DNA
tctgactctggcatgtctgaccaaacagggacaggtggacttaaatgatgttgttcaggctttgacagacttaggattga

SEQ ID NO: 77773 - DNA, 80 bp, synthetic construct
  source 1..80: mol_type = other DNA
tgaggcactcagtaaggctctgtctttaactaattgcaccacagcaatgctaaaaaacctatgtttttatagtcaagagt

SEQ ID NO: 77774 - DNA, 80 bp, synthetic construct
  source 1..80: mol_type = other DNA
tcttggaagaatgtcacaatttgtcccattctgatcgtatgaaatcctaataaggctttcaaaaatgcgcaatcctaaat

SEQ ID NO: 77775 - DNA, 80 bp, synthetic construct
  source 1..80: mol_type = other DNA
ccatccccaattgggtatcttgggcttctctcacagagaactagagatatatacattagtagaagattactaggaacgtt

SEQ ID NO: 77776 - DNA, 80 bp, synthetic construct
  source 1..80: mol_type = other DNA
aattttgtacgtcaaaactgtgtgctctctattgagttgagaacaacccatcaacatgggtggcaaacacaccaaacaac

SEQ ID NO: 77777 - DNA, 80 bp, synthetic construct
  source 1..80: mol_type = other DNA
tcacccctaacttttagggggaccctccagaattgcaccccatggttatttgtaaacatttcaacacctttaatatcagc

SEQ ID NO: 77778 - DNA, 80 bp, synthetic construct
  source 1..80: mol_type = other DNA
tattgatgaagttattgattttatgtagaggttctccttattcggtcctctaacacacttactacccaatgttctgcaca

SEQ ID NO: 77779 - DNA, 80 bp, synthetic construct
  source 1..80: mol_type = other DNA
gcaccccaggtcgaacagaccggtcccgcaagtcctccaccatatagtccctagctcatcccggacaacaacacaccaga

SEQ ID NO: 77780 - DNA, 80 bp, synthetic construct
  source 1..80: mol_type = other DNA
cctagtcataagcatagtaagattttgatcaaacattgatatctgatcatcactggaggtgtatgcatcaattgatccgt

SEQ ID NO: 77781 - DNA, 80 bp, synthetic construct
  source 1..80: mol_type = other DNA
tagagccgcaataaaaatatttgtctttcagttcagaatcattataaatggtgtcacagaattctttgtagaagttatct

SEQ ID NO: 77782 - DNA, 80 bp, synthetic construct
  source 1..80: mol_type = other DNA
ggtagaatttcatagtcaaaatcttcaaccatgtggtttgacagctcactcttaattagtctaatgtaaaatttattaga

SEQ ID NO: 77783 - DNA, 80 bp, synthetic construct
  source 1..80: mol_type = other DNA
ctccagatcactcatcagagagataccatcgcttttcatgtgtgaggatgacttgactggctccttgtattgatctatta

SEQ ID NO: 77784 - DNA, 80 bp, synthetic construct
  source 1..80: mol_type = other DNA
tcttttcaattgtccccttcaattgatcaaagtattccgatgcccccccatcaagaagagcctcatctagatcagtactg

SEQ ID NO: 77785 - DNA, 80 bp, synthetic construct
  source 1..80: mol_type = other DNA
cgaaaccgttattcaatgtcctcgatgcctcccacctcttctagtaattcctcacacgtcctgcctttgagcctcagcct

SEQ ID NO: 77786 - DNA, 80 bp, synthetic construct
  source 1..80: mol_type = other DNA
gcaagcaaggataagtactttttggaaatacctggtttcttgtagcttaatctgctcacttcagcacatccctttttgct

SEQ ID NO: 77787 - DNA, 80 bp, synthetic construct
  source 1..80: mol_type = other DNA
gcacagtgttcaacagtgctctaataagtctgtagagtagaaactcagcttctgtgatcagcctttccttgagtttctgg

SEQ ID NO: 77788 - DNA, 80 bp, synthetic construct
  source 1..80: mol_type = other DNA
tggctcacatctatcccaacgtcagctaaagcggaagtggctttcttaatggtcttttgaataatggttcctaagatctg

SEQ ID NO: 77789 - DNA, 80 bp, synthetic construct
  source 1..80: mol_type = other DNA
tttttgtctaaacaaggaaaagaagctgttgtgtgggacttggaaaccaccactctacaccttctctccatccacttcct

SEQ ID NO: 77790 - DNA, 80 bp, synthetic construct
  source 1..80: mol_type = other DNA
tattacatttattcctcatgaaatctctcctacttgcaaggagtattaagatgtcaaaaaccagcatcagctttcgtcta

SEQ ID NO: 77791 - DNA, 80 bp, synthetic construct
  source 1..80: mol_type = other DNA
tttgttgactccacctttaatatctgcatataagaacctcataattggcgacactctcttatattgatgggtcaggcagt

SEQ ID NO: 77792 - DNA, 80 bp, synthetic construct
  source 1..80: mol_type = other DNA
aacacgtcatgcaaaaccttcatagcactgtcaggcattgccttttttaatgtttgaacaatatccacccctgaccattg

SEQ ID NO: 77793 - DNA, 80 bp, synthetic construct
  source 1..80: mol_type = other DNA
caattgtatcctcttgagccacaacctcatcaccatataagttattaaatttgtacatcaggtcctcttggtcgaccctc

SEQ ID NO: 77794 - DNA, 80 bp, synthetic construct
  source 1..80: mol_type = other DNA
agttctgagtttcaatctgtccattatcatggcagtcaatgctccaaccatcagatcatgagaactatcatcaatctctt

SEQ ID NO: 77795 - DNA, 80 bp, synthetic construct
  source 1..80: mol_type = other DNA
tcctccatgactcctgagagctcttaggggatttcagcaaacggaaatcaaaagtagatcacaaaatagaacctcaaaat

SEQ ID NO: 77796 - DNA, 80 bp, synthetic construct
  source 1..80: mol_type = other DNA
aattcagctggacttcagtggtgagactcatcttagtgaatccctgaatcaaagtgcctagtcaaaatgggcaacagaca

SEQ ID NO: 77797 - DNA, 80 bp, synthetic construct
  source 1..80: mol_type = other DNA
ggtttgggtttgtaccagtgtagcctgtaagtcagttggtggtatcccaaaaaagctcctgcagaaatgagagacaatat

SEQ ID NO: 77798 - DNA, 80 bp, synthetic construct
  source 1..80: mol_type = other DNA
cagcatggaatagatgatgaacatggagaagtactgatgtggaagtttgacactgccctagcacgaagacacataacccg

SEQ ID NO: 77799 - DNA, 80 bp, synthetic construct
  source 1..80: mol_type = other DNA
agaagtagaggaagacaccaaagaagaaaacaactgcctgttacatcccataagccagcatagaataaatgacaagcata

SEQ ID NO: 77800 - DNA, 80 bp, synthetic construct
  source 1..80: mol_type = other DNA
acagctacaataactcttttaccagatgcagaaagatttagttttccaagagtgattaattcagctgacggagcgactac

SEQ ID NO: 77801 - DNA, 80 bp, synthetic construct
  source 1..80: mol_type = other DNA
ctccgatgtgtctggtatcaaaacaaaacagatttagggcagcagaacagcaaattagcttcatctgtcagagagtagat

SEQ ID NO: 77802 - DNA, 80 bp, synthetic construct
  source 1..80: mol_type = other DNA
atgtggattctcctccttgttattgagtctatattatgggcagctagtgcagcggagatcccccttgttcccttatggac

SEQ ID NO: 77803 - DNA, 80 bp, synthetic construct
  source 1..80: mol_type = other DNA
gattcttttcagtcattcaatactagcaatgttcacttcacagatgagaggattgaatggagggatcctgatggtatgct

SEQ ID NO: 77804 - DNA, 80 bp, synthetic construct
  source 1..80: mol_type = other DNA
aaagctgtttgattggcctcggtccttacagaattcaagtgatctatgagagaacctactgtagcacagggatactgaca

SEQ ID NO: 77805 - DNA, 80 bp, synthetic construct
  source 1..80: mol_type = other DNA
ataccaaatctcaggccagatagaggccaagatcccccatactgtgagttctaagaatctaaagcttactgcctttgctg

SEQ ID NO: 77806 - DNA, 80 bp, synthetic construct
  source 1..80: mol_type = other DNA
gtctagactcagccacctactgtcctccaatttgtccgggttatcgctggatgtgtctgcggcgtttttaacaaaattcc

SEQ ID NO: 77807 - DNA, 80 bp, synthetic construct
  source 1..80: mol_type = other DNA
ggtcgatcatcatgcatttcgagccagatgatgggatgggaatacaggtgcaatttccgtccgaaggtttggtacagcaa

SEQ ID NO: 77808 - DNA, 80 bp, synthetic construct
  source 1..80: mol_type = other DNA
gcaaaactgttctttcagtatgaccacagtattaagagataaacagaagaaagtatatgcgctgttttatgagcctatag

SEQ ID NO: 77809 - DNA, 80 bp, synthetic construct
  source 1..80: mol_type = other DNA
tcaaataaaacaaattgtaaacatgtggcaggaagtaaggcaagcaatgtataccgctcccgttgcaggaataattgcct

SEQ ID NO: 77810 - DNA, 80 bp, synthetic construct
  source 1..80: mol_type = other DNA
ctacaaccaccactactactccaaccactacccctactaatacaaccaccaatagtagtagtgaggagaaagacatgaaa

SEQ ID NO: 77811 - DNA, 80 bp, synthetic construct
  source 1..80: mol_type = other DNA
aactgctctttctatgtcacctcaggcatacaaggtaagtttcagaaagaatatgcacttttttataaacttgatataat

SEQ ID NO: 77812 - DNA, 80 bp, synthetic construct
  source 1..80: mol_type = other DNA
agtaccagtagggaggaggtaggagtgaaaaactgctctttctataaccccacaagtacaaaaaaagaggagaagaaaga

SEQ ID NO: 77813 - DNA, 80 bp, synthetic construct
  source 1..80: mol_type = other DNA
atatgcaattttttctgatcttgatgtaagatcaataaataaaagtagtataaattatatgttgataagttgtaatacct

SEQ ID NO: 77814 - DNA, 80 bp, synthetic construct
  source 1..80: mol_type = other DNA
gccaataatggcggagggacaaataaaagaatgctctttcaatatcaccgcaagcattaaagataaggtgcagagagaat

SEQ ID NO: 77815 - DNA, 80 bp, synthetic construct
  source 1..80: mol_type = other DNA
agaaatgaagaattgctctttcaattttaccacagacatgggaaaacaggaagttttccgtgcactcttcaataaacttg

SEQ ID NO: 77816 - DNA, 80 bp, synthetic construct
  source 1..80: mol_type = other DNA
tagaagccttgcagagccttggtagagccataccaaatatacctacaagaataagacagggcttggaaagggctttgcca

SEQ ID NO: 77817 - DNA, 80 bp, synthetic construct
  source 1..80: mol_type = other DNA
acaagaataagacagggcttggaaagggctttgccataaaatggggggcaaggggtcaaaaaaggggagggccgccaaaa

SEQ ID NO: 77818 - DNA, 80 bp, synthetic construct
  source 1..80: mol_type = other DNA
atgaagaattgctctttcaatattaccacaaacatgggacaggaacaaataaaacatgccctcttctataaacttaatgt

SEQ ID NO: 77819 - DNA, 80 bp, synthetic construct
  source 1..80: mol_type = other DNA
tcccaagcatgaatgagactcaaaataatttcacaaatatcactaacattatagtgaacaaaaacgaggaaaagacattc

SEQ ID NO: 77820 - DNA, 80 bp, synthetic construct
  source 1..80: mol_type = other DNA
ctgaatctggccaaacctctatgtgaagtaaactcatggcacatcttgtcgaaagacaattcaataagaataggagagaa

SEQ ID NO: 77821 - DNA, 80 bp, synthetic construct
  source 1..80: mol_type = other DNA
gttttccaagagtgattaattcagctgacggagcaactacatggtactttaacccagtaattcttagaccaaacaacgtt

SEQ ID NO: 77822 - DNA, 80 bp, synthetic construct
  source 1..80: mol_type = other DNA
atttttggttgcgcaatttaagtgtcttttgacatgggacaaattgtgacatttttccaagaggtgcctcatgtgattga

SEQ ID NO: 77823 - DNA, 80 bp, synthetic construct
  source 1..80: mol_type = other DNA
aggagggtactgtttaagtagatggatgctgattgaagctgagttaaaatgctttgggaatacggcagtagccaaatgca

SEQ ID NO: 77824 - DNA, 80 bp, synthetic construct
  source 1..80: mol_type = other DNA
tcatacaggcaccgggaaaacatcattgcctagatgttggcttgtttcgaatggctcttacttgaatgaaactcatttct

SEQ ID NO: 77825 - DNA, 80 bp, synthetic construct
  source 1..80: mol_type = other DNA
tgttcccaggagtctcctgctaatgtagatgtccctagtcctctgcgaaaggagcccaaggtagccaataggagatggcc

SEQ ID NO: 77826 - DNA, 80 bp, synthetic construct
  source 1..80: mol_type = other DNA
agggcaaggatacaccaggagggtattgtctgactagatggatgttgattgaggcggaactgaaatgtttgggaaacacg

SEQ ID NO: 77827 - DNA, 80 bp, synthetic construct
  source 1..80: mol_type = other DNA
acacaccaggaggatattgcctaaccagatggatgttaattgaggctgaattaaaatgctttggtaacacagcggtggca

SEQ ID NO: 77828 - DNA, 80 bp, synthetic construct
  source 1..80: mol_type = other DNA
catacaggcaccgggagaacatcattgcctagatgctggcttgtctcgaatggctcctacttaaatgaaacacacttttc

SEQ ID NO: 77829 - DNA, 80 bp, synthetic construct
  source 1..80: mol_type = other DNA
atttttggttgcgcattttggatttccttaccagaatgggacagattgtaacattctttcaggaagttcctcatgtcata

SEQ ID NO: 77830 - DNA, 80 bp, synthetic construct
  source 1..80: mol_type = other DNA
ggtattccatattgtaactatagtaaatattggtatctgaatcacacagtcactggaaagacttcattgccaaagtgctg

SEQ ID NO: 77831 - DNA, 80 bp, synthetic construct
  source 1..80: mol_type = other DNA
cagtcactggaaagacttcattgccaaagtgctggcttgtgtccaacggttcatacttaaatgagacccacttctccgat

SEQ ID NO: 77832 - DNA, 80 bp, synthetic construct
  source 1..80: mol_type = other DNA
ccctttgtaaaggggagtcgtgcaagatcttccgcacaataaaaggaatgtaattaagccaacaagaccacatgtagcaa

SEQ ID NO: 77833 - DNA, 80 bp, synthetic construct
  source 1..80: mol_type = other DNA
tacagcaaatattggtaccttaatcacacgggaactggcaagacatcattgcccaaatgctggcttgtatcaaatggctc

SEQ ID NO: 77834 - DNA, 80 bp, synthetic construct
  source 1..80: mol_type = other DNA
atttttggttgcgcaattttagtgtcttttgacatggggcagattgtaacattctttcaagaagtgcctcatgtaataga

SEQ ID NO: 77835 - DNA, 80 bp, synthetic construct
  source 1..80: mol_type = other DNA
ttaatcacacaggcaccgggaagacatcattgcctagatgctggcttgtctcgaatggctcctacctaaatgagacccat

SEQ ID NO: 77836 - DNA, 80 bp, synthetic construct
  source 1..80: mol_type = other DNA
ggacattcacatggacattgtcagactccgagggtaaagacacaccagggggatactgtttaacaagatggatgctaatt

SEQ ID NO: 77837 - DNA, 80 bp, synthetic construct
  source 1..80: mol_type = other DNA
ccatctcccatcggctaccttgggcttctttcgcagagaacccgggacatctacattagtagaagactcttagggtcatt

SEQ ID NO: 77838 - DNA, 80 bp, synthetic construct
  source 1..80: mol_type = other DNA
tcattcacatggacactgtcggactccgagggcagagacacaccaggggggtattgtttgacaagatggatgttgattga

SEQ ID NO: 77839 - DNA, 80 bp, synthetic construct
  source 1..80: mol_type = other DNA
cacaccagggaggtattgtttgacaagatggatgttgattgaggctgagttaaaatgctttgggaatacggcggtggcaa

SEQ ID NO: 77840 - DNA, 80 bp, synthetic construct
  source 1..80: mol_type = other DNA
aagtgtcctttgacatgggacaaattgtaacattctttcaagaagtgcctcatgtgatagaggaggtgatgaacatagtg

SEQ ID NO: 77841 - DNA, 80 bp, synthetic construct
  source 1..80: mol_type = other DNA
actccagggggatactgtttaacgagatggatgttgattgaggctgagttgaaatgctttggaaatacggcggtggcaaa

SEQ ID NO: 77842 - DNA, 80 bp, synthetic construct
  source 1..80: mol_type = other DNA
gatacaccaggagggtactgtttgacaagatggatgttgattgaggctgagttgaagtgctttgggaacacggcggtagc

SEQ ID NO: 77843 - DNA, 80 bp, synthetic construct
  source 1..80: mol_type = other DNA
atttttggttgcgctgatcaaatatctttcctattatgggacagattgtgacattcttccaagaggtgcctcatgtgata

SEQ ID NO: 77844 - DNA, 80 bp, synthetic construct
  source 1..80: mol_type = other DNA
aatcaagataccaactcatagacacattgtgaacaaaccgtgtcctaaaccccacaggctgaatcacatgggtgtgtgtt

SEQ ID NO: 77845 - DNA, 80 bp, synthetic construct
  source 1..80: mol_type = other DNA
catgcggtctctacaagcagcctggcgttcctgtgagatggaagagatgagcatcccaccagggcccccgtgacccaccg

SEQ ID NO: 77846 - DNA, 80 bp, synthetic construct
  source 1..80: mol_type = other DNA
tcaaacacgccagcgtcagacttggcatagtcccgaactggttattaagtagctctgcgttctttacatcccagactctc

SEQ ID NO: 77847 - DNA, 80 bp, synthetic construct
  source 1..80: mol_type = other DNA
accactccgtctctcccagcctgaactccttgattaccaccattcattcctatcatgtttaagagagctcgtctctgttc

SEQ ID NO: 77848 - DNA, 80 bp, synthetic construct
  source 1..80: mol_type = other DNA
tcattgccgaattagtgtgtgttgtgcaaacacaacaatgactacccacagaagtgatcaaagaaaagcgcaatccaatt

SEQ ID NO: 77849 - DNA, 80 bp, synthetic construct
  source 1..80: mol_type = other DNA
attgactttcctattatgggacagattgtaacattcttccaagaagtgcctcatgtaatagaggaggtgatgaatattgt

SEQ ID NO: 77850 - DNA, 80 bp, synthetic construct
  source 1..80: mol_type = other DNA
caaagatgcaccaggaggatactgcttgaccaggtggatgttgattgaggctgaattgaaatgctttggtaacacagctg

SEQ ID NO: 77851 - DNA, 80 bp, synthetic construct
  source 1..80: mol_type = other DNA
tccaaacgctgtcgatgacattatcatcacagccccatctaataaaaaagaggtttgtgcactctccgtcattaaagttg

SEQ ID NO: 77852 - DNA, 80 bp, synthetic construct
  source 1..80: mol_type = other DNA
caaagggaccaaagcacccagcagggatcagcactgccccacggtgagacaccctctccatatactaacagttccccctg

SEQ ID NO: 77853 - DNA, 80 bp, synthetic construct
  source 1..80: mol_type = other DNA
ataggggggtgcttggtttggtcgcccctggctcagtcgttgaaagcaggagactattcgccttccttccaaaagtcaac

SEQ ID NO: 77854 - DNA, 80 bp, synthetic construct
  source 1..80: mol_type = other DNA
ctgtgtcttgacgacaccagaagcgtggcctacattaagagacttgatttcgaggctcccccgagcgtctggtcacgtat

SEQ ID NO: 77855 - DNA, 80 bp, synthetic construct
  source 1..80: mol_type = other DNA
ggtctggttggggtttctgggtttcatccgatctcctgatcacaacaccccttgtcctacctaaggtggttagggaactc

SEQ ID NO: 77856 - DNA, 80 bp, synthetic construct
  source 1..80: mol_type = other DNA
ggtctggttggggtttctgggtttcatccgatctcctgatcacaacaccccttgtcctacctaagggggttagggaactc

SEQ ID NO: 77857 - DNA, 80 bp, synthetic construct
  source 1..80: mol_type = other DNA
agggaactgtgtttggagttgctagccaaagaaacaccacaggaaactctgaagagggcgcgacccgcgcccatgaagta

SEQ ID NO: 77858 - DNA, 80 bp, synthetic construct
  source 1..80: mol_type = other DNA
tggacagcccacccgctttacccctattggcatgggagccgatgattggcgccaatgggagttgcctgaatactctggtc

SEQ ID NO: 77859 - DNA, 80 bp, synthetic construct
  source 1..80: mol_type = other DNA
gtgccttctgctggtggttatgggtcgggccagatagattgcctcatcccacaggaatgggttcagcacttctatcagga

SEQ ID NO: 77860 - DNA, 80 bp, synthetic construct
  source 1..80: mol_type = other DNA
gtatgattttaacaaacaactccaattggcatccctcaaacatgacaaggagatgttgcagtcacaagttctggccacta

SEQ ID NO: 77861 - DNA, 80 bp, synthetic construct
  source 1..80: mol_type = other DNA
tagtaaccctgtgcataggcaacccaccttaccccgctctgatccctcaaaaatcaaggttaatagtgattctgctagcg

SEQ ID NO: 77862 - DNA, 80 bp, synthetic construct
  source 1..80: mol_type = other DNA
tgtataactctgtatccactgctccttcacaatcaacccgttcaacggttttgactatggggtctgggtcatccagaaca

SEQ ID NO: 77863 - DNA, 80 bp, synthetic construct
  source 1..80: mol_type = other DNA
agcagtatttccttctgtggcgtggacagtgaaaccgcaagctggtcgtggccagacggagctgatctgccgttcaccat

SEQ ID NO: 77864 - DNA, 80 bp, synthetic construct
  source 1..80: mol_type = other DNA
actaagaggagccagcaaactgtaattcctaatatcgggcctagaccctggataaggggtctgtccagtagaataagcat

SEQ ID NO: 77865 - DNA, 80 bp, synthetic construct
  source 1..80: mol_type = other DNA
acctccccttaaatgacgacagcacagcaacactgtgcctgggacaccatgcagtttcaaatggaacactagtgaaaaca

SEQ ID NO: 77866 - DNA, 80 bp, synthetic construct
  source 1..80: mol_type = other DNA
ggctgatccacctagctgtgaccttcagagtgctcatgggaacccctgcatgaaagagaaactcgtgatgaagacacact

SEQ ID NO: 77867 - DNA, 80 bp, synthetic construct
  source 1..80: mol_type = other DNA
ctaatctttacaaaggagtctatgagcttcagactctagaactaaacatggagacactcaacatgaccatgcctctctct

SEQ ID NO: 77868 - DNA, 80 bp, synthetic construct
  source 1..80: mol_type = other DNA
agaggcacttagtaaagctttgtcgttaacaaactgcactacagcaatgttgaagaacctatgtttttatagtcaagagt

SEQ ID NO: 77869 - DNA, 80 bp, synthetic construct
  source 1..80: mol_type = other DNA
acactgtcagattctgaaggcaaagatgcaccaggagggtattgtttgactaggtggatgctaattgaagctgaactaaa

SEQ ID NO: 77870 - DNA, 80 bp, synthetic construct
  source 1..80: mol_type = other DNA
tcagtgagagagaaagcaactcagaggcgcttagtaaggctttgtcactaacaaactgcaccactgcgatgctaaagaac

SEQ ID NO: 77871 - DNA, 80 bp, synthetic construct
  source 1..80: mol_type = other DNA
aatttggtaatcttcactaaaaagtctctaccctgaacccggcgggatgggcaacaggcagaccaaagctccagaagcaa

SEQ ID NO: 77872 - DNA, 80 bp, synthetic construct
  source 1..80: mol_type = other DNA
ctcagttttgcagaccccggtggcaacgactcaacagcatcaaaaaagtcctctaatgaatcaaacctggggccaaccaa

SEQ ID NO: 77873 - DNA, 80 bp, synthetic construct
  source 1..80: mol_type = other DNA
tccctaatattcaacgggactcgccaatactgaacaccatgagagtctatcaatggctcaattccctgaatatcagaaat

SEQ ID NO: 77874 - DNA, 80 bp, synthetic construct
  source 1..80: mol_type = other DNA
aataaattattttctgcctcaagaccatccttaagggatgatgtgctgccaaattcaaccaagaaaattcaagatcagat

SEQ ID NO: 77875 - DNA, 80 bp, synthetic construct
  source 1..80: mol_type = other DNA
caagactgaggccatcaaccaacccaacggcgcccccagccagagcagagggcggcatcaatcctccaccatacagcccc

SEQ ID NO: 77876 - DNA, 80 bp, synthetic construct
  source 1..80: mol_type = other DNA
ctaaatcattaactgagggctgatttccgccattagggtttgaacctggcttgacaggttctctgtactgatcaataatt

SEQ ID NO: 77877 - DNA, 80 bp, synthetic construct
  source 1..80: mol_type = other DNA
ctgcaccaactttgttctgtcggggtcctagaactagattgctcatcgcctgttgcactttataatcataatcctgttta

SEQ ID NO: 77878 - DNA, 80 bp, synthetic construct
  source 1..80: mol_type = other DNA
tgtagtgttctacactaattccgacatcttttaaggcagcagtagctttcaaaatggtcttttggaacattgagatgaga

SEQ ID NO: 77879 - DNA, 80 bp, synthetic construct
  source 1..80: mol_type = other DNA
agtccacccagtcatccactgcctcaagaactgcattcaaaaccttcacactgttgcttggcatggcagccttcaacata

SEQ ID NO: 77880 - DNA, 80 bp, synthetic construct
  source 1..80: mol_type = other DNA
atctggttcttatctggaggctgaatagtattggacctttcagactgttgcctccgcccaacccatttttctagatccct

SEQ ID NO: 77881 - DNA, 80 bp, synthetic construct
  source 1..80: mol_type = other DNA
tttaaccttattcaaaaacgatctccaatattgcatttgacactctttgatagtgtggtgtctctcctcaccatttccct

SEQ ID NO: 77882 - DNA, 80 bp, synthetic construct
  source 1..80: mol_type = other DNA
tttgtggctgtgacctcatcaacatacaaattgttaaaatcattgagtaatcgagatttatcaacctttaaaaactgacc

SEQ ID NO: 77883 - DNA, 80 bp, synthetic construct
  source 1..80: mol_type = other DNA
tgtttgaacaaggaatgctagcttctgccttgagagacgttcattatctgctaaatatttagacactaggtctttgacac

SEQ ID NO: 77884 - DNA, 80 bp, synthetic construct
  source 1..80: mol_type = other DNA
tgcctaagaaaagtagtggctgaacccttctgagtggatattcaattagaatagcaattccaccgcaagacaaggcccca

SEQ ID NO: 77885 - DNA, 80 bp, synthetic construct
  source 1..80: mol_type = other DNA
ctgagtggatattcaattagaatagcaattccaccgcaagacaaggccccatataagtcaatcaaatagatagccttaat

SEQ ID NO: 77886 - DNA, 80 bp, synthetic construct
  source 1..80: mol_type = other DNA
atcaagcgaggagtctccaacctctttcacaaacatctcaagatcctgatcctgcacgacaggggtgaaagatgccagtt

SEQ ID NO: 77887 - DNA, 80 bp, synthetic construct
  source 1..80: mol_type = other DNA
gctataaagaaaaagggcggcactaagtggaggaagttagtagatttcagggagctcaataaaagaacacaggacttttg

SEQ ID NO: 77888 - DNA, 80 bp, synthetic construct
  source 1..80: mol_type = other DNA
tcaatttccctcaaatcactctttggcagcgaccccttgtcacaataagaatagcaggacagataaaagaagctctatta

SEQ ID NO: 77889 - DNA, 80 bp, synthetic construct
  source 1..80: mol_type = other DNA
actagcaatagctgtgtggaccatagtattcttagaatataggaaaatattaagacaaagaaaaatagatagtaatatga

SEQ ID NO: 77890 - DNA, 80 bp, synthetic construct
  source 1..80: mol_type = other DNA
agtgagggggaccaagaagaactgtcatcaatggtggacagggggcatcttgctccttgggatattgttgagggcgtgta

SEQ ID NO: 77891 - DNA, 80 bp, synthetic construct
  source 1..80: mol_type = other DNA
aatagttgtgtggaccatagtactcatagaatataggagaataagaagacaaaggaaaatagactggttaattgatagga

SEQ ID NO: 77892 - DNA, 80 bp, synthetic construct
  source 1..80: mol_type = other DNA
taagagaaagagaacaagacagtggcaatgagagtgagggggaccaagaagaactgtcatcaatggtggacagggggcat

SEQ ID NO: 77893 - DNA, 80 bp, synthetic construct
  source 1..80: mol_type = other DNA
cccaagcagtaggtagtatatgtaatgcaacctttagtgatattatcaatagtagcattagtagtagtggcaataatagc

SEQ ID NO: 77894 - DNA, 80 bp, synthetic construct
  source 1..80: mol_type = other DNA
agaaataattgcactagtagggctaatagtagcaggcctagcagctataattgtgtggaccttagtctttatactatata

SEQ ID NO: 77895 - DNA, 80 bp, synthetic construct
  source 1..80: mol_type = other DNA
agaaatagctgcagtagtaggattaataggagcaggcatagcagccataattgtgtggaccttagtctttatactatata

SEQ ID NO: 77896 - DNA, 80 bp, synthetic construct
  source 1..80: mol_type = other DNA
ttataacacttatggggatacttgggaaggagttgaagccataataagaatactacaacaactattgtttatccatttca

SEQ ID NO: 77897 - DNA, 80 bp, synthetic construct
  source 1..80: mol_type = other DNA
gaattgggtgccatcatagcaaaataggcattattccacggagaaaaataagggatggacccggtagatcctaacctaga

SEQ ID NO: 77898 - DNA, 80 bp, synthetic construct
  source 1..80: mol_type = other DNA
gccctggaatcatccagggagtcagcctaaaactgcttgtactaaatgttattgtaaaaagtgttgctggcattgccaag

SEQ ID NO: 77899 - DNA, 80 bp, synthetic construct
  source 1..80: mol_type = other DNA
tttgctttctgaacaaaggcttaggcatctcctatggcaggaagaagcggaagcaccgacgagggactcctcaaagcaat

SEQ ID NO: 77900 - DNA, 80 bp, synthetic construct
  source 1..80: mol_type = other DNA
tggatcatagtctttatacaatataaggaaataagaaaacagagaaaaatagaaaggatacttgatagaataaaagaaag

SEQ ID NO: 77901 - DNA, 80 bp, synthetic construct
  source 1..80: mol_type = other DNA
aaggatcatcaaaatcctgtaccaaagcagtaagtagtaataattagtatatgtaatgcagtcattagaaatagctgcaa

SEQ ID NO: 77902 - DNA, 80 bp, synthetic construct
  source 1..80: mol_type = other DNA
tagtaggactaatagtagcaggcatagcagccataattgtgtggatcatagtctttatacaatataaggaaataagaaaa

SEQ ID NO: 77903 - DNA, 80 bp, synthetic construct
  source 1..80: mol_type = other DNA
ttagaactgttagaagagcttaaaaatgaagctgttagacactttcctaggccctggctccatggcttaggacagtatat

SEQ ID NO: 77904 - DNA, 80 bp, synthetic construct
  source 1..80: mol_type = other DNA
tgacctagaaatagggcaacatagagcaaaaatagaggagttgagacaacatctattgaagtggggatttaccacaccag

SEQ ID NO: 77905 - DNA, 80 bp, synthetic construct
  source 1..80: mol_type = other DNA
tgcaggaattaaagtaaaacaactttgtagacttcttaggggggccaaagcactaacagacatagtgccactaactgaag

SEQ ID NO: 77906 - DNA, 80 bp, synthetic construct
  source 1..80: mol_type = other DNA
accttaacctccctcaaatcactctttggcagcgaccccttgtctcaataaaagtagggggccaggtaaaggaggctctc

SEQ ID NO: 77907 - DNA, 80 bp, synthetic construct
  source 1..80: mol_type = other DNA
aaagacagggaacctttaacttccctcaaatcactctttggcagcgaccccttgtctcaataaaagtagggggccagcta

SEQ ID NO: 77908 - DNA, 80 bp, synthetic construct
  source 1..80: mol_type = other DNA
ttcagagcaggccagagccaacagccccaccagcagagagcttcaggttcgaggaggcaactgctccgaagcaggagctg

SEQ ID NO: 77909 - DNA, 80 bp, synthetic construct
  source 1..80: mol_type = other DNA
cctcaaatcactctttggcagcgacccctagtttcaataaaaataggggaccagataagggaggctctattagatacagg

SEQ ID NO: 77910 - DNA, 80 bp, synthetic construct
  source 1..80: mol_type = other DNA
attagatatcaatataatgtgctaccacagggatggaaaggatcaccagcaatatttcagagtagcatgataagaattct

SEQ ID NO: 77911 - DNA, 80 bp, synthetic construct
  source 1..80: mol_type = other DNA
caatgatttgtgaagaaatggagaaggaaggaaaaattacaagaattggacctgaaaatccatataacactccagtattt

SEQ ID NO: 77912 - DNA, 80 bp, synthetic construct
  source 1..80: mol_type = other DNA
gggtatgaactccatcctgacaaagggacagacagccataaagctgccagaaaaggaagctggactgtcatgaatacaaa

SEQ ID NO: 77913 - DNA, 80 bp, synthetic construct
  source 1..80: mol_type = other DNA
taatgcaacatagagcaaaagtagaggagttaagagaacacttattacaatgggggtttaccacaccagacaagaaacat

SEQ ID NO: 77914 - DNA, 80 bp, synthetic construct
  source 1..80: mol_type = other DNA
gattaaagtaaggcagctgtgtaaactccttaggggagccaaagcattaacagatgtagtacccctgactgaagaagcag

SEQ ID NO: 77915 - DNA, 80 bp, synthetic construct
  source 1..80: mol_type = other DNA
cagagccaacagccccaccagcagagagcttcaggttcgaggagacagctcccactccacaaaaggacagggaaccctta

SEQ ID NO: 77916 - DNA, 80 bp, synthetic construct
  source 1..80: mol_type = other DNA
gacttaatagctgaaatacagaaacaagggcaggaccaatggacatatcaaatttaccaagaaccgtccaaaaatctgaa

SEQ ID NO: 77917 - DNA, 80 bp, synthetic construct
  source 1..80: mol_type = other DNA
cagaaagcatagtaatatggggaaagacccctaaatttagattacccatcctaaaagaaacatgggagacatggtggaca

SEQ ID NO: 77918 - DNA, 80 bp, synthetic construct
  source 1..80: mol_type = other DNA
ggctaattttttagggaaaatttggccttcccacaaaggggggaggccagggaatttccttcagagcagaccagagccaa

SEQ ID NO: 77919 - DNA, 80 bp, synthetic construct
  source 1..80: mol_type = other DNA
atattccagtgtagcatgacaaaaatcttagagccctttagggcacagaacccagaaatagttatctatcaatatataga

SEQ ID NO: 77920 - DNA, 80 bp, synthetic construct
  source 1..80: mol_type = other DNA
tggacagtacagcctatacagctgccagaaaaggaggactggactgtcaacgatatacagaagttagtgggaaaattaaa

SEQ ID NO: 77921 - DNA, 80 bp, synthetic construct
  source 1..80: mol_type = other DNA
ctaaatttagactacccatccagaaagaaacatgggaggcatggtggacagactattggcaagccacctggatacctgaa

SEQ ID NO: 77922 - DNA, 80 bp, synthetic construct
  source 1..80: mol_type = other DNA
ccccaccagcagagagcttcaggttcgaggagacaaccccctccccgaagcaggagatgaaagacaaggagacgaaggac

SEQ ID NO: 77923 - DNA, 80 bp, synthetic construct
  source 1..80: mol_type = other DNA
agggaaccctacagggaacccttaactgccctcaaatcactctttggcagcgaccccttgtctcagtaaaagtaggagga

SEQ ID NO: 77924 - DNA, 80 bp, synthetic construct
  source 1..80: mol_type = other DNA
aaaaatgataggaggaattggaggttttatcaaagtaagacagtatgatcgaataactgtagaaatttgtgggaaaaagg

SEQ ID NO: 77925 - DNA, 80 bp, synthetic construct
  source 1..80: mol_type = other DNA
attaacagaagagaaaataaaagccttaacagcaatttgtgaagacatggaaaaggaaggaaaaattacaaaaattgggc

SEQ ID NO: 77926 - DNA, 80 bp, synthetic construct
  source 1..80: mol_type = other DNA
agtgacagtactggatgtaggggatgcatacttttcagtccctttagatgaaaacttcaggaagtatactgcattcacca

SEQ ID NO: 77927 - DNA, 80 bp, synthetic construct
  source 1..80: mol_type = other DNA
tacctagtacaaacaatgaaacaccagggattagatatcaatataatgtgcttccacaggggtggaaaggatcaccagca

SEQ ID NO: 77928 - DNA, 80 bp, synthetic construct
  source 1..80: mol_type = other DNA
ttatggaaatgggggttttacacaccagacaagaaacatcagaaagaacctccatttctttggatggggtatgaactcca

SEQ ID NO: 77929 - DNA, 80 bp, synthetic construct
  source 1..80: mol_type = other DNA
ggaaattaaattgggcaagtcagatttacccagggattaaggtaaaacagctgtgtaaactccttaggggagcaaaaaca

SEQ ID NO: 77930 - DNA, 80 bp, synthetic construct
  source 1..80: mol_type = other DNA
ctaacagaagtagtgccactgactagagaagcagagttagagttggcagaaaacagggaaattctaaaagaaccagtaca

SEQ ID NO: 77931 - DNA, 80 bp, synthetic construct
  source 1..80: mol_type = other DNA
accaggaaccattcaagaatctgaaaacaggaaagtatgcaagaatgaggactgcccacactaatgatgtaaagcagtta

SEQ ID NO: 77932 - DNA, 80 bp, synthetic construct
  source 1..80: mol_type = other DNA
ccgctaaattttgttcagagcaggccagagccatcagccccaccagcagagagcttcaggttcgaggagacaacccccac

SEQ ID NO: 77933 - DNA, 80 bp, synthetic construct
  source 1..80: mol_type = other DNA
acagaggtagtgcaaaaaatagccattgaaagtatagtaatatggggaaagactcctaaatttaggctgcccatccaaaa

SEQ ID NO: 77934 - DNA, 80 bp, synthetic construct
  source 1..80: mol_type = other DNA
agtagggggccaggaaacggaggctctcttagatacaggagcagatgatacagtattagaaaacataaatttgccaggaa

SEQ ID NO: 77935 - DNA, 80 bp, synthetic construct
  source 1..80: mol_type = other DNA
aatggaagccaaaaatgataggaggaattggaggtttcatcaaagtaagacagtatgatgaggtacctatagaaatttgt

SEQ ID NO: 77936 - DNA, 80 bp, synthetic construct
  source 1..80: mol_type = other DNA
ggaaaaaagattataggttcagtattagtaggacctacacctgtcaacataattggaagaaatataatgactcagcttgg

SEQ ID NO: 77937 - DNA, 80 bp, synthetic construct
  source 1..80: mol_type = other DNA
aacaatggccattgacagaagaaaaaataaaggcattaacagaaatttgtaaggaactggaagaggaaggaaaaattaca

SEQ ID NO: 77938 - DNA, 80 bp, synthetic construct
  source 1..80: mol_type = other DNA
aaaattggacctgaaaatccatataacactccagtatttgccataaaaaagaagaacagtgataggtggagaaaattagt

SEQ ID NO: 77939 - DNA, 80 bp, synthetic construct
  source 1..80: mol_type = other DNA
agatttcagggaactcaataaaagaactcaagacttttgggaagttcaattaggaataccacacccagcagggttaaaag

SEQ ID NO: 77940 - DNA, 80 bp, synthetic construct
  source 1..80: mol_type = other DNA
gacaccaaatgaaagactgcactcttgaacagggacaggctaattttttagggaaaatttggccttcccccaaggggagg

SEQ ID NO: 77941 - DNA, 80 bp, synthetic construct
  source 1..80: mol_type = other DNA
atcaccagcaatattccagtatagcatgacaaaaatcttagaaccctttagggcacaaaacccagacatagtcatttatc

SEQ ID NO: 77942 - DNA, 80 bp, synthetic construct
  source 1..80: mol_type = other DNA
gagagctggactgtcaatgatatacagaagttagtaggaaaattaaactaggcaagtcagatttacccagggattaaagt

SEQ ID NO: 77943 - DNA, 80 bp, synthetic construct
  source 1..80: mol_type = other DNA
caaaaacagaggtatgaccaatggacatatcaaatttaccaagatccattcaaaaatctgaaaacaggaaagtatgcaaa

SEQ ID NO: 77944 - DNA, 80 bp, synthetic construct
  source 1..80: mol_type = other DNA
agtaagacaatatgatcaaatacttatagaaatttgtagaaaaagagctataggtacagtattagtaggacctacacctg

SEQ ID NO: 77945 - DNA, 80 bp, synthetic construct
  source 1..80: mol_type = other DNA
ttcagttcctttatatgaggacttcaggaaatatactgcgttcaccatacctagtataaacaatgagacaccagggatta

SEQ ID NO: 77946 - DNA, 80 bp, synthetic construct
  source 1..80: mol_type = other DNA
ccctttaggacacaaaacccagaaatagttatctatcaatatatggatgacttgtatgtaggatctgacttagaaatagg

SEQ ID NO: 77947 - DNA, 80 bp, synthetic construct
  source 1..80: mol_type = other DNA
cagacaactgtgtaaactccttaggggagccaaagcattaacagacatagtaccactgactgaagaagcagaattagaat

SEQ ID NO: 77948 - DNA, 80 bp, synthetic construct
  source 1..80: mol_type = other DNA
tggcagagaacagggaaattctaaaagaaccagtacatggagcatattatgacccatcgaaagacttaatagctgaaata

SEQ ID NO: 77949 - DNA, 80 bp, synthetic construct
  source 1..80: mol_type = other DNA
cagaaacagggacatgaccaatggacatatcaaatttaccaagaaccattcaagaatttgaaaacagggaaatatgcaaa

SEQ ID NO: 77950 - DNA, 80 bp, synthetic construct
  source 1..80: mol_type = other DNA
cagcagagagcttcaggttcgaggagacaaccccctctccgaagcaggagcagaaagacagggaacctttaacttccctc

SEQ ID NO: 77951 - DNA, 80 bp, synthetic construct
  source 1..80: mol_type = other DNA
aatgaggactgcccacactaatgatgtaaaacagttaacagaggcagtgcaaaaaatagcccaggaaagcatagtaatat

SEQ ID NO: 77952 - DNA, 80 bp, synthetic construct
  source 1..80: mol_type = other DNA
ggggaaagactcctaaatttagattacccattcagaaagaaacatgggaatcatggtggacagactattggcaagccact

SEQ ID NO: 77953 - DNA, 80 bp, synthetic construct
  source 1..80: mol_type = other DNA
tggattcctgagtgggagtttgttaatacccctcccctagtaaagttatggtatcagctggagaaagaacccataatagg

SEQ ID NO: 77954 - DNA, 80 bp, synthetic construct
  source 1..80: mol_type = other DNA
aaatcactctttggcagcgaccccttgtcacaataagagtagggggacagctaaaggaggctctcttagacacaggagca

SEQ ID NO: 77955 - DNA, 80 bp, synthetic construct
  source 1..80: mol_type = other DNA
tcaacataattggaagaaatatgttgactcagcttggatgcacactaaattttccaattagtcccattgaaactgtacca

SEQ ID NO: 77956 - DNA, 80 bp, synthetic construct
  source 1..80: mol_type = other DNA
aatttgtgaagaaatggaaaaggaaggaaaaattacaaaaattgggcccgagaatccatataacactccagtatttgcca

SEQ ID NO: 77957 - DNA, 80 bp, synthetic construct
  source 1..80: mol_type = other DNA
taaaaaagaaggacagtactaagtggagaaaattagtagatttcagggaactcaataaaagaacccaagacttttgggaa

SEQ ID NO: 77958 - DNA, 80 bp, synthetic construct
  source 1..80: mol_type = other DNA
ttcagttcctttagatgaaaatttcaggaaatatactgcattcaccatacctagtacaaacaatgaaacaccagggattc

SEQ ID NO: 77959 - DNA, 80 bp, synthetic construct
  source 1..80: mol_type = other DNA
gatatcaatataatgtgcttccacagggatggaaaggatcaccagcaatattccagagtagcatgacaaaaatcttagag

SEQ ID NO: 77960 - DNA, 80 bp, synthetic construct
  source 1..80: mol_type = other DNA
atacagctgccagataaggatagctggactgtcaatgatatacagaagttagtgggaaaattgaattgggccagccagat

SEQ ID NO: 77961 - DNA, 80 bp, synthetic construct
  source 1..80: mol_type = other DNA
atgacaaaaatcttagagccctttaggacaaaaaacccaggcctagttatctatcaatatatggatgacttgtatgtagg

SEQ ID NO: 77962 - DNA, 80 bp, synthetic construct
  source 1..80: mol_type = other DNA
atctgacttagaaatagagcaacatagagcaaaaatagaggagttaagagaacatttattgaaatgggggcttaccacac

SEQ ID NO: 77963 - DNA, 80 bp, synthetic construct
  source 1..80: mol_type = other DNA
tattgaggtggggatttaccacaccagacaagaagcatcagaaagaaccaccatttctttggatggggtatgaacttcat

SEQ ID NO: 77964 - DNA, 80 bp, synthetic construct
  source 1..80: mol_type = other DNA
ccaagaaccatttaaaaatctgaaaacagggaagtatgcaaaaaggaggactgcccacactaatgatgtaaaacagctaa

SEQ ID NO: 77965 - DNA, 80 bp, synthetic construct
  source 1..80: mol_type = other DNA
cagaggcaatacaaaagatagcccaggaaagcatagtaatatggggaaagactcctaaatttagattacccatccagaaa

SEQ ID NO: 77966 - DNA, 80 bp, synthetic construct
  source 1..80: mol_type = other DNA
ttcctgagtgggaatttgttaatacccctcccctagtaaagttgtggtaccagctggaaaaagaacccaagcagagcgat

SEQ ID NO: 77967 - DNA, 80 bp, synthetic construct
  source 1..80: mol_type = other DNA
tgcaccctaaattttccaattagtcccattgaaactgtaccagtaaaattaaagccaggaatggatggcccaaaagtcaa

SEQ ID NO: 77968 - DNA, 80 bp, synthetic construct
  source 1..80: mol_type = other DNA
gaaaaaatcagtgacagtactggatgtgggggatgcatatttctcagttcctttagatgaaagtttcaggaaatatactg

SEQ ID NO: 77969 - DNA, 80 bp, synthetic construct
  source 1..80: mol_type = other DNA
ttttttagggaaaatttggccttccagcaagggaaggccagggaacttccttcagagcagaccagagccaacagccccac

SEQ ID NO: 77970 - DNA, 80 bp, synthetic construct
  source 1..80: mol_type = other DNA
cattcaccatacctagtataaacaatgaaacaccagggattaggtatcaatataatgtgcttccacagggatggaaagga

SEQ ID NO: 77971 - DNA, 80 bp, synthetic construct
  source 1..80: mol_type = other DNA
tcaccagcaatattccagagcagtatgacaaaaatcttagagccctttaggacaaaaaacccagacatagttatctatca

SEQ ID NO: 77972 - DNA, 80 bp, synthetic construct
  source 1..80: mol_type = other DNA
atatatggatgacttatatgtaggatctgacttagaaatagggcaacatagagcaaaaatagaggagctaagagaacatt

SEQ ID NO: 77973 - DNA, 80 bp, synthetic construct
  source 1..80: mol_type = other DNA
ccatttctttggatggggtatgaactccatcctgacaaatggacagtacaggctatacagctgccaaataaggagagctg

SEQ ID NO: 77974 - DNA, 80 bp, synthetic construct
  source 1..80: mol_type = other DNA
gatttacccagggattaaagtaaagcatctttgtaaactccttaggggggccaaagcattaacagacatagtaccactaa

SEQ ID NO: 77975 - DNA, 80 bp, synthetic construct
  source 1..80: mol_type = other DNA
cagcagagccaacagccccaccagcagagagcttcaggttcgaggagacaacccccgctcagaagcaggagccgaaagag

SEQ ID NO: 77976 - DNA, 80 bp, synthetic construct
  source 1..80: mol_type = other DNA
gccacctggattcctgagtgggaatttgttaatacccctcccctagtgaaattatggtaccagctggagaaagaacccat

SEQ ID NO: 77977 - DNA, 80 bp, synthetic construct
  source 1..80: mol_type = other DNA
agggaacccttaacttccctcaaatcactctttggcaacgaccccttgtgtcaataaaagtagggggccaaataaaggag

SEQ ID NO: 77978 - DNA, 80 bp, synthetic construct
  source 1..80: mol_type = other DNA
tgcgaggagagtgaaattgcatttgaatatgcacaaaggggagattttgattctaatgcacgagcatttttaaatagcaa

SEQ ID NO: 77979 - DNA, 80 bp, synthetic construct
  source 1..80: mol_type = other DNA
tatgcaggcaaaatatgtgaaagattgtgcaactatgtgtagacattataaacatgcagaaatgaggaagatgtctataa

SEQ ID NO: 77980 - DNA, 80 bp, synthetic construct
  source 1..80: mol_type = other DNA
aacaatggataaaacataggggttctaaaatagaaggcacaggaaattggaaaccaattgtacaattcctacgacatcaa

SEQ ID NO: 77981 - DNA, 80 bp, synthetic construct
  source 1..80: mol_type = other DNA
aatatagaattcattccttttttaactaaatttaaattatggctgcacggtacgccaaaaaaaaactgcatagccatagt

SEQ ID NO: 77982 - DNA, 80 bp, synthetic construct
  source 1..80: mol_type = other DNA
aggccctccagatactgggaaatcgtacttttgtatgagtttaataagctttctaggaggtacagttattagtcatgtaa

SEQ ID NO: 77983 - DNA, 80 bp, synthetic construct
  source 1..80: mol_type = other DNA
attccagcagccatttttggttgcaaccgttagtagatgctaaggtagcattgttagatgatgcaacacagccatgttgg

SEQ ID NO: 77984 - DNA, 80 bp, synthetic construct
  source 1..80: mol_type = other DNA
ttcagctacgcctatagtgcaatttcaaggtgaatccaattgtttaaagtgttttagatataggctaaatgacagacaca

SEQ ID NO: 77985 - DNA, 80 bp, synthetic construct
  source 1..80: mol_type = other DNA
gacatttatttgatttaatatcatcaacgtggcactgggcctcctcaaaggcaccacataaacatgccattgtaactgta

SEQ ID NO: 77986 - DNA, 80 bp, synthetic construct
  source 1..80: mol_type = other DNA
acatatgatagtgaggaacaaaggcaacagtttttagatgttgtaaaaataccccctaccattagccacaaactgggatt

SEQ ID NO: 77987 - DNA, 80 bp, synthetic construct
  source 1..80: mol_type = other DNA
tatgtcactgcacctattgtaatttgtatatatgtaaatgtgtaaatatatggtattggtgtaatacaactgtacatgta

SEQ ID NO: 77988 - DNA, 80 bp, synthetic construct
  source 1..80: mol_type = other DNA
tggaagtggtgcctgtacaaatagctgcaggaacaaccagcacattcatactgcctgttataattgcatttgttgtatgt

SEQ ID NO: 77989 - DNA, 80 bp, synthetic construct
  source 1..80: mol_type = other DNA
tttgttagcatcatacttattgtatggatatctgagtttattgtgtacacatctgtgctagtactaacactgcttttata

SEQ ID NO: 77990 - DNA, 80 bp, synthetic construct
  source 1..80: mol_type = other DNA
tttactattgtggctgctattaacaacccccttgcaatttttcctactaactctacttgtgtgttactgtcccgcattgt

SEQ ID NO: 77991 - DNA, 80 bp, synthetic construct
  source 1..80: mol_type = other DNA
atatacactactatattgttaccacacagcaatgatgctaacatgtcaatttaatgatggagatacctggctgggtttgt

SEQ ID NO: 77992 - DNA, 80 bp, synthetic construct
  source 1..80: mol_type = other DNA
ggttgttatgtgcctttattgtagggatgttggggttattattgatgcactatagagctgtacaaggggataaacacacc

SEQ ID NO: 77993 - DNA, 80 bp, synthetic construct
  source 1..80: mol_type = other DNA
aaatgtaagacgtgtaacaaacacaactgtaatgatgattatgtaactatgcattatactactgatggtgattatatata

SEQ ID NO: 77994 - DNA, 80 bp, synthetic construct
  source 1..80: mol_type = other DNA
tatgaattagagtaaaccgttttttatatttgtaacagtgtatgctttgtataccatggcacatagtagggcccgacgac

SEQ ID NO: 77995 - DNA, 80 bp, synthetic construct
  source 1..80: mol_type = other DNA
gcaagcgtgcgtcagctacacagctatatcaaacatgtaaactcactggaacatgccccccagatgtaattcctaaggtg

SEQ ID NO: 77996 - DNA, 80 bp, synthetic construct
  source 1..80: mol_type = other DNA
aaaatggggaagtttggtggtgttttttggagggttgggtataggcacgggttccggcactggtggtcgtactggctatg

SEQ ID NO: 77997 - DNA, 80 bp, synthetic construct
  source 1..80: mol_type = other DNA
ttcccttacaaacttctgcaaaaccttctattactagtgggcctatggctcgtcctcctgtggtggtggagcctgtggcc

SEQ ID NO: 77998 - DNA, 80 bp, synthetic construct
  source 1..80: mol_type = other DNA
ccttcggatccatctattgtgtctttaattgaagaatcggcaatcattaacgcaggggcgcctgaaattgtgccccctgc

SEQ ID NO: 77999 - DNA, 80 bp, synthetic construct
  source 1..80: mol_type = other DNA
acacggtgggtttacaattacatcctctgaaacaactacccctgcaatattggatgtatcagttactagtcacactacta

SEQ ID NO: 78000 - DNA, 80 bp, synthetic construct
  source 1..80: mol_type = other DNA
ctagtatatttagaaatcctgtctttacagaaccttctgtaacacaaccccaaccacccgtggaggctaatggacatata

SEQ ID NO: 78001 - DNA, 80 bp, synthetic construct
  source 1..80: mol_type = other DNA
ttaatttctgcacccactgtaacgtcacaccctatagaggaaattcctttagatacttttgtggtatcatctagtgatag

SEQ ID NO: 78002 - DNA, 80 bp, synthetic construct
  source 1..80: mol_type = other DNA
cggtcctacatccagtacccctgttcctggtactgcacctcggcctcgtgtgggcctatatagtcgtgcattgcaccagg

SEQ ID NO: 78003 - DNA, 80 bp, synthetic construct
  source 1..80: mol_type = other DNA
tgcaggttacagaccctgcatttctttccactcctcaacgcttaattacatatgataaccctgtatatgaaggggaggat

SEQ ID NO: 78004 - DNA, 80 bp, synthetic construct
  source 1..80: mol_type = other DNA
gttagtgtacaatttagtcatgattctatacacaatgcacctgatgaggcttttatggacataattcgtttgcacagacc

SEQ ID NO: 78005 - DNA, 80 bp, synthetic construct
  source 1..80: mol_type = other DNA
tgccattgcgtcccgacgtggccttgtgcggtacagtcgcattggacaacgggggtctatgcacactcgcagcggaaagc

SEQ ID NO: 78006 - DNA, 80 bp, synthetic construct
  source 1..80: mol_type = other DNA
acataggggcccgcattcattatttttatgatatttcacctattgcacaggctgcagaagaaatagaaatgcaccctctt

SEQ ID NO: 78007 - DNA, 80 bp, synthetic construct
  source 1..80: mol_type = other DNA
gtggctgcacaggatgatacatttgatatttatgctgaatcttttgaacctggcattaaccctacccaacaccctgttac

SEQ ID NO: 78008 - DNA, 80 bp, synthetic construct
  source 1..80: mol_type = other DNA
aaatatatcagatacatatttaacttccacacctaatacagttacacaaccgtggggtaacaccacagttccattgtcac

SEQ ID NO: 78009 - DNA, 80 bp, synthetic construct
  source 1..80: mol_type = other DNA
ttcctaatgacctgtttttacaatctggccctgatataacttttcctactgcacctatgggaacaccctttagtcctgta

SEQ ID NO: 78010 - DNA, 80 bp, synthetic construct
  source 1..80: mol_type = other DNA
actcctgctttacctacaggccctgttttcattacaggttctggattttatttgcatcctgcatggtattttgcacgtaa

SEQ ID NO: 78011 - DNA, 80 bp, synthetic construct
  source 1..80: mol_type = other DNA
acgccgtaaacgtattcccttatttttttcagatgtggcggcctagcgacagcacagtatatgtgcctcctcctaaccct

SEQ ID NO: 78012 - DNA, 80 bp, synthetic construct
  source 1..80: mol_type = other DNA
gtatccaaagttgttgccacggatgcttatgttactcgcaccaacatattttatcatgccagcagttctagacttcttgc

SEQ ID NO: 78013 - DNA, 80 bp, synthetic construct
  source 1..80: mol_type = other DNA
agtgggacatccttatttttccataaaacgggctaacaaaactgttgtgccaaaggtgtcaggatatcaatacagggtat

SEQ ID NO: 78014 - DNA, 80 bp, synthetic construct
  source 1..80: mol_type = other DNA
ttaaggtggtgttaccagatcctaacaaatttgcattgcctgactcgtctcttttcgatcccacaacacaacgtttagta

SEQ ID NO: 78015 - DNA, 80 bp, synthetic construct
  source 1..80: mol_type = other DNA
tgggcatgcacaggcctagaggtgggcaggggacagccattaggtgtgggtgtaagtggacatcctttcctaaataaata

SEQ ID NO: 78016 - DNA, 80 bp, synthetic construct
  source 1..80: mol_type = other DNA
tgatgatgttgaaaattcagggagtggtggtaaccctggacaggataacagggttaatgtaggtatggattataaacaaa

SEQ ID NO: 78017 - DNA, 80 bp, synthetic construct
  source 1..80: mol_type = other DNA
cacaattatgcatggttggatgtgccccccctttgggcgagcattggggtaaaggtaaacagtgtactaatacacctgta

SEQ ID NO: 78018 - DNA, 80 bp, synthetic construct
  source 1..80: mol_type = other DNA
caggctggtgactgcccgcccttagaacttattaccagtgttatacaggatggcgatatggttgacacaggctttggtgc

SEQ ID NO: 78019 - DNA, 80 bp, synthetic construct
  source 1..80: mol_type = other DNA
tatgaattttgctgatttgcagaccaataaatcagatgttcctattgacatatgtggcactacatgtaaatatccagatt

SEQ ID NO: 78020 - DNA, 80 bp, synthetic construct
  source 1..80: mol_type = other DNA
tgtgtatatatatgtgtgtgtgtgttctgtgtgtaatgtaatttatttgtgtaatgtgtatgtgtgtttatgtgcaataa

SEQ ID NO: 78021 - DNA, 80 bp, synthetic construct
  source 1..80: mol_type = other DNA
acaattacctcttgttacaccctgtgactcagtggctgttgcacgcgttttggtttgcacgcgccttacacacataagta

SEQ ID NO: 78022 - DNA, 80 bp, synthetic construct
  source 1..80: mol_type = other DNA
atatacatgcacaatatatatatttttgtttaaaatactatacttttatatttgcaaccgttttcggttgcccttagcat

SEQ ID NO: 78023 - DNA, 80 bp, synthetic construct
  source 1..80: mol_type = other DNA
acactttccaccaatttgttacaacgtgtttcctcttaatcctatatattttgtgccaggtacacattgccctgccaagt

SEQ ID NO: 78024 - DNA, 80 bp, synthetic construct
  source 1..80: mol_type = other DNA
tgcttgccaagtgcatcatatcctgccaaccacacacctggcgccagggtgcggtattgccttactcataaacctgtctt

SEQ ID NO: 78025 - DNA, 80 bp, synthetic construct
  source 1..80: mol_type = other DNA
tgtgttatacttttatgcactgtagccaactcttaaaagcatttttggcttgtagcagcacatttttttgctcttactgt

SEQ ID NO: 78026 - DNA, 80 bp, synthetic construct
  source 1..80: mol_type = other DNA
ttggtatacaataacataaaaatgagtaacctaaggtcacacacctgcgaccggtttcggttatccacaccctacatatt

SEQ ID NO: 78027 - DNA, 80 bp, synthetic construct
  source 1..80: mol_type = other DNA
tccttcttatagttaataacaatcttggtttaaaaaataggagggaccgaaaacggttcaaccgaaaacggttgtatata

SEQ ID NO: 78028 - DNA, 80 bp, synthetic construct
  source 1..80: mol_type = other DNA
ctctgatttagaaatagggcaacatagggcaaaaatagatgagttgagagctcatctattgaaatggggattttttacac

SEQ ID NO: 78029 - DNA, 80 bp, synthetic construct
  source 1..80: mol_type = other DNA
ttatccagggatcaaagtaaagcaattgtgtaaactccttaggggagccaaaacactgacagaaatagtgacactgactg

SEQ ID NO: 78030 - DNA, 80 bp, synthetic construct
  source 1..80: mol_type = other DNA
caccagcagaaatctttgggaagggggaagagatgacccccctccctgggaaacaggaacagaaagacagggaacagcag

SEQ ID NO: 78031 - DNA, 80 bp, synthetic construct
  source 1..80: mol_type = other DNA
aattggaggttttgtcagagtaaaacagtatgatcaggtacttatagaaatttgtggaaaaaaggctatagattcagtat

SEQ ID NO: 78032 - DNA, 80 bp, synthetic construct
  source 1..80: mol_type = other DNA
atgacaaaaatcttagagccctttagaataaaaaatccagaaatagtcatctatcaatacgtggatgacttgttggtagg

SEQ ID NO: 78033 - DNA, 80 bp, synthetic construct
  source 1..80: mol_type = other DNA
ttatccagggattaaagcaaggcaattgtgtaaactccttaggggagccaaggcactgacagatgtagtaacactgactg

SEQ ID NO: 78034 - DNA, 80 bp, synthetic construct
  source 1..80: mol_type = other DNA
cagcagaaaactgggggatgggggaagagacaaccccctccctgaaacaggaacagaaagacagggacatgaaccagaat

SEQ ID NO: 78035 - DNA, 80 bp, synthetic construct
  source 1..80: mol_type = other DNA
ttatgacccctcaaaagaactagtagcagaaatacagaaacaagggccaggccaatggacatatcaaatttatcaagagc

SEQ ID NO: 78036 - DNA, 80 bp, synthetic construct
  source 1..80: mol_type = other DNA
gatacaggagcagatgatacagtaatagaagaaatagatttaccaggaagatggaagccaacaataatagggggaattgg

SEQ ID NO: 78037 - DNA, 80 bp, synthetic construct
  source 1..80: mol_type = other DNA
aggttatgtcaaagtaagacagtatgatcatgtaactgtagaaatttgtggaaaaaaggctataggtacagtattagtag

SEQ ID NO: 78038 - DNA, 80 bp, synthetic construct
  source 1..80: mol_type = other DNA
gacctacccctttcaacgtaattggaagaaatttgttgactcagattggttgtactttaaattttccaataagtcctatt

SEQ ID NO: 78039 - DNA, 80 bp, synthetic construct
  source 1..80: mol_type = other DNA
cagtatttgttataaagaaaaaggacagctcaagctctaagtggagaaaaatagtagatttcagggagctcaataaaaga

SEQ ID NO: 78040 - DNA, 80 bp, synthetic construct
  source 1..80: mol_type = other DNA
ttttttagggaaaatttggccttcccacaagggaaggccagggaattttcctcagaagagactagagccatcagccccac

SEQ ID NO: 78041 - DNA, 80 bp, synthetic construct
  source 1..80: mol_type = other DNA
aaagtcttagagccctttaaagcaaaaaatccagaaatagttatctgtcagtacgtggatgacttgtatgtaagctctga

SEQ ID NO: 78042 - DNA, 80 bp, synthetic construct
  source 1..80: mol_type = other DNA
cagcagagaactgggggatgggggaagaggtaaccccctccctgaaacaggaccagaaatgcagggaaccgcgtcctcct

SEQ ID NO: 78043 - DNA, 80 bp, synthetic construct
  source 1..80: mol_type = other DNA
aggttttatcaaagtaagacagtatgatgagatacttttagaaatttgtggaaaaagggctataggttcggtattagtag

SEQ ID NO: 78044 - DNA, 80 bp, synthetic construct
  source 1..80: mol_type = other DNA
tgatttagaaatagggcaacatagaataaaaatagaagagttgagggctcatctattgagctggggatttactacaccag

SEQ ID NO: 78045 - DNA, 80 bp, synthetic construct
  source 1..80: mol_type = other DNA
tggaggttttatcaaggtaaaacaatatgatcagatagttatagacatttgtggaaaaaaggctataggtacggtattag

SEQ ID NO: 78046 - DNA, 80 bp, synthetic construct
  source 1..80: mol_type = other DNA
tgatttagaaatagggcaacatagaacaatagtagaggagttaagagatcatttattgaaatggggacttactacaccag

SEQ ID NO: 78047 - DNA, 80 bp, synthetic construct
  source 1..80: mol_type = other DNA
tgacccgtcaaaagatttagtagcagaaatacagaaacaaggtcaagagcaatggacatatcaaatttatcaagagccat

SEQ ID NO: 78048 - DNA, 80 bp, synthetic construct
  source 1..80: mol_type = other DNA
aagcagaattagaattggcagagaacagagagattctaaaagaacctgtgcatggaacatattatgacccgtcaaaagat

SEQ ID NO: 78049 - DNA, 80 bp, synthetic construct
  source 1..80: mol_type = other DNA
cagcagagaactttgggatgggggaagagataacccccccctccccgaaacaggaacagaaagacaggggacagcgtcct

SEQ ID NO: 78050 - DNA, 80 bp, synthetic construct
  source 1..80: mol_type = other DNA
agggattaaagtaagacaattgtgtaaactccttaggggagctaaagcactaacagaagtaataccactaacaacagaag

SEQ ID NO: 78051 - DNA, 80 bp, synthetic construct
  source 1..80: mol_type = other DNA
cagaagagagcttcaggtttggggaggagaaaacaacccctcctcagaagcaggagccggtggacaaggaagtatatcct

SEQ ID NO: 78052 - DNA, 80 bp, synthetic construct
  source 1..80: mol_type = other DNA
ttgacttccctcagatcactctttggcaacgacccatagtccaagtaaaggtagagggacaaataaaagaagctctatta

SEQ ID NO: 78053 - DNA, 80 bp, synthetic construct
  source 1..80: mol_type = other DNA
gggttttattaaagtaagacagtatgacaatataaccatagacattgagggacataaagcgataggtacagtattagtag

SEQ ID NO: 78054 - DNA, 80 bp, synthetic construct
  source 1..80: mol_type = other DNA
cttagagatagggcagcatagaacaaaaatagaggaactgagagcacatctgctgaagtggggatttaccacaccagata

SEQ ID NO: 78055 - DNA, 80 bp, synthetic construct
  source 1..80: mol_type = other DNA
aggttttatcaaagtaagacaatatgatcaggtaccccttgaaatctgtgggaaaaaggctataggtacagtattagtag

SEQ ID NO: 78056 - DNA, 80 bp, synthetic construct
  source 1..80: mol_type = other DNA
gacctacacctgtcaacataattggaagaaatctgttgactcagattggttgcactctaaattttcccattagtcctgtt

SEQ ID NO: 78057 - DNA, 80 bp, synthetic construct
  source 1..80: mol_type = other DNA
aaaatcttagagccctttagattaaaaaatccaggaataattatctatcaatacatggatgacttgtatgtaggctctga

SEQ ID NO: 78058 - DNA, 80 bp, synthetic construct
  source 1..80: mol_type = other DNA
cagaattagaattggcagagaatagagagattctaagagaacctgtgcatggagtatattatgacccatcaaaagattta

SEQ ID NO: 78059 - DNA, 80 bp, synthetic construct
  source 1..80: mol_type = other DNA
cagagatagaactggcagaaaacagggaaattttaaaagaaccaatgcatggagtatattatgacccagcaaaagactta

SEQ ID NO: 78060 - DNA, 80 bp, synthetic construct
  source 1..80: mol_type = other DNA
ggcaagtcagatttatccaggaatcaaggtaaaacaattatgcaaactccttaggggaaccaaggcactaacagaagtag

SEQ ID NO: 78061 - DNA, 80 bp, synthetic construct
  source 1..80: mol_type = other DNA
cagaagagagcttcaggtttggggaggaaacaacaactccccttcagaagcaggagccccctcagaagcaggagccgagg

SEQ ID NO: 78062 - DNA, 80 bp, synthetic construct
  source 1..80: mol_type = other DNA
ttaaaggaagctctattagatacaggggcagatgatacagtaatagaagacatggaattgtcaggaaggtggaaaccaaa

SEQ ID NO: 78063 - DNA, 80 bp, synthetic construct
  source 1..80: mol_type = other DNA
aatgatagggggaattggaggttttatcaaagtaagagagtatgatcagatacccatagaaatctgtggacataaaacta

SEQ ID NO: 78064 - DNA, 80 bp, synthetic construct
  source 1..80: mol_type = other DNA
cagcagaaaacctggggatgggaaaagagataaccccctccctgaaacaagaacagaaggacagggaccagcatcctcct

SEQ ID NO: 78065 - DNA, 80 bp, synthetic construct
  source 1..80: mol_type = other DNA
gacttttgggaagttcaattaggaataccccatccagcgggttttaaaaagaaaaaatcagtaacagtattagatgtggg

SEQ ID NO: 78066 - DNA, 80 bp, synthetic construct
  source 1..80: mol_type = other DNA
gtaccactaacagcagaagcagagctagaactggcagaaaacagggagattctaaaagaaacagtacatggggtgtatta

SEQ ID NO: 78067 - DNA, 80 bp, synthetic construct
  source 1..80: mol_type = other DNA
actgactgaggaagcagaattagaattggcagaaaacagagaaattctaaaagaacctgtgcatggagcatattatgacc

SEQ ID NO: 78068 - DNA, 80 bp, synthetic construct
  source 1..80: mol_type = other DNA
tgtaggctctgatttagaaatagggcaacatagaataaaaatagaggagttaagagctcatctattgagctggggattta

SEQ ID NO: 78069 - DNA, 80 bp, synthetic construct
  source 1..80: mol_type = other DNA
cagcatcctccttcaatttccctcaaatcactctttggcaacgaccccttgtcacagtaagaataggaggacagctaaaa

SEQ ID NO: 78070 - DNA, 80 bp, synthetic construct
  source 1..80: mol_type = other DNA
cggtattagtaggacctacccctgtcaacataattggaaggaatatgttgactcagattggttgtactttaaatttttcc

SEQ ID NO: 78071 - DNA, 80 bp, synthetic construct
  source 1..80: mol_type = other DNA
cagcagagaacttcgggataggggaagagataaccccctccccgaaacaggaacagagagacagggagaatcctccttca

SEQ ID NO: 78072 - DNA, 80 bp, synthetic construct
  source 1..80: mol_type = other DNA
tttagaataaaaaatccagaaatagtaatctaccaatacatggatgatttatatgtaggatctgacttagaaataggaca

SEQ ID NO: 78073 - DNA, 80 bp, synthetic construct
  source 1..80: mol_type = other DNA
agcctccattcctttggatgggatatgagctccatcctgacaaatggacagtacaacctatacagctgccagacaaggaa

SEQ ID NO: 78074 - DNA, 80 bp, synthetic construct
  source 1..80: mol_type = other DNA
agttggactgtcaatgatatacaaaagttagtgggaaaactaaattgggcaagtcagatctattcagggattaaagtgag

SEQ ID NO: 78075 - DNA, 80 bp, synthetic construct
  source 1..80: mol_type = other DNA
actatgactcatcaaaagaattaatagcagaagtacagaaacaaggacttgaccaatggacatatcaaatttatcaagag

SEQ ID NO: 78076 - DNA, 80 bp, synthetic construct
  source 1..80: mol_type = other DNA
cagagaacagggagattctaaaagaacctgtacatggagtctactatgactcatcaaaagaattaatagcagaagtacag

SEQ ID NO: 78077 - DNA, 80 bp, synthetic construct
  source 1..80: mol_type = other DNA
ccgcagagagcttcgggttcggagaggagaagaagcaagagccgagggagggggaaacacctccgttaacctccctcaaa

SEQ ID NO: 78078 - DNA, 80 bp, synthetic construct
  source 1..80: mol_type = other DNA
tcactctttggcaacgacccctggtcacagtaaggatagggggacagttaatagaggccttattagacacaggagcagat

SEQ ID NO: 78079 - DNA, 80 bp, synthetic construct
  source 1..80: mol_type = other DNA
aaaacaatatgatcagatacctatagaaattgaggggaaaaaggctatagggacagtattagtaggacctacacctatca

SEQ ID NO: 78080 - DNA, 80 bp, synthetic construct
  source 1..80: mol_type = other DNA
agaaaaaagacagtactaaatggagaaaattggtagattttagagagctcaataaaagaactcaagacttctgggaggtc

SEQ ID NO: 78081 - DNA, 80 bp, synthetic construct
  source 1..80: mol_type = other DNA
cagcagaacaccttgggatgggggaagagatagcccccccctccctgaaacaggaacaggaagacagggaacagcatcct

SEQ ID NO: 78082 - DNA, 80 bp, synthetic construct
  source 1..80: mol_type = other DNA
aagtaaggcaactgtgtaaactccttagaggagccaaagcactaacagacatagtaccactaactgaggaagcagaatta

SEQ ID NO: 78083 - DNA, 80 bp, synthetic construct
  source 1..80: mol_type = other DNA
cctgtcaatataattgggaggaatctgttgactcagcttggatgtacactaaattttccaattagtcctattgaaactgt

SEQ ID NO: 78084 - DNA, 80 bp, synthetic construct
  source 1..80: mol_type = other DNA
cagcaatttgtgaggatatggagaaggaaggaaaaatttcaaaaattgggcctgaaaacccatataacactccagtattt

SEQ ID NO: 78085 - DNA, 80 bp, synthetic construct
  source 1..80: mol_type = other DNA
cctcaaatcactctttggcagcgaccccttgtcacaataaaggtagcgggacagctaagagaggctctcttagacacagg

SEQ ID NO: 78086 - DNA, 80 bp, synthetic construct
  source 1..80: mol_type = other DNA
tagggcaacatagagcaaaagtagagcagttaagagaacatctattgaggtggggatttaccacaccagataagaaacac

SEQ ID NO: 78087 - DNA, 80 bp, synthetic construct
  source 1..80: mol_type = other DNA
atttttcaattcctttagataaaaacttcagaaagtatactgcattcactataccaagtacaaacaatgagacaccaggg

SEQ ID NO: 78088 - DNA, 80 bp, synthetic construct
  source 1..80: mol_type = other DNA
cagaaagaacctccttttctttggatgggatatgaactccatcctgacaagtggacagtccagcctatagtgctaccaga

SEQ ID NO: 78089 - DNA, 80 bp, synthetic construct
  source 1..80: mol_type = other DNA
ggcctacccctgtcaacataattggaagaaatatattgactcagcttggttgtaccttaaattttccaataagccctatt

SEQ ID NO: 78090 - DNA, 80 bp, synthetic construct
  source 1..80: mol_type = other DNA
agggattaaagtaaagcaattgtgtaaactccttaggggagccaaagcactgacagatatagtgacactgactgaggaag

SEQ ID NO: 78091 - DNA, 80 bp, synthetic construct
  source 1..80: mol_type = other DNA
cagcagaaatctttgggatgggggaagagataaccccctccctgaaacaggaacagaaagacagggaacagcatcctcct

SEQ ID NO: 78092 - DNA, 80 bp, synthetic construct
  source 1..80: mol_type = other DNA
cctcccgaaacaggaacagaaagacagggaacagcgtcctccttcaatttccctcaaatcactctttggcaacgacccat

SEQ ID NO: 78093 - DNA, 80 bp, synthetic construct
  source 1..80: mol_type = other DNA
cagcagaggacttatggaggggggaagagataacccccctcccgaaacaggaacagaaagacagggaacagcgtcctcct

SEQ ID NO: 78094 - DNA, 80 bp, synthetic construct
  source 1..80: mol_type = other DNA
aaaatcttagagccctttagagataagaatccagaaatagtgatctatcaatacgtggatgacttgtatgtaagctctga

SEQ ID NO: 78095 - DNA, 80 bp, synthetic construct
  source 1..80: mol_type = other DNA
cagcagaggactttgggatgggggaagagataacccccctctccctgaaacaggaacagaaaggggaacagaatcttcct

SEQ ID NO: 78096 - DNA, 80 bp, synthetic construct
  source 1..80: mol_type = other DNA
tagaattggcagagaacagagagattctaaaagaaccggtgcatggagtatattatgacccatcaaaagaattagtagca

SEQ ID NO: 78097 - DNA, 80 bp, synthetic construct
  source 1..80: mol_type = other DNA
cagaaaactttgggatgggggaagagataaccccctccctgaaacgggaacagaaaggggaacagtatcctccttcaatt

SEQ ID NO: 78098 - DNA, 80 bp, synthetic construct
  source 1..80: mol_type = other DNA
tatcaaggtaagacagtatgatgagatacttttagaaatttgtggaaaaaaggctataggttcggtattagtaggaccta

SEQ ID NO: 78099 - DNA, 80 bp, synthetic construct
  source 1..80: mol_type = other DNA
atatttttcagtacctttagatgaaagcttcagaaagtatactgcattcactataccaagcataaacaatgagacaccag

SEQ ID NO: 78100 - DNA, 80 bp, synthetic construct
  source 1..80: mol_type = other DNA
ggatgcatatttttcagttcctttagatgaaagctttagaaagtacactgcattcactataccaagtacaaacaatgcaa

SEQ ID NO: 78101 - DNA, 80 bp, synthetic construct
  source 1..80: mol_type = other DNA
gacttttgggaagttcagttaggaataccccatccagcaggcttagagcagaaaaaatcagtaacagtactagatgtggg

SEQ ID NO: 78102 - DNA, 80 bp, synthetic construct
  source 1..80: mol_type = other DNA
aagcactgacagatatagtgacattaactgaggaagcagaattagaattggcagagaacagagagattctaaaagaaccc

SEQ ID NO: 78103 - DNA, 80 bp, synthetic construct
  source 1..80: mol_type = other DNA
catttcctcagagccgaccagagccatcagccccaccagcagaaaactttgggatgcgggaagagatgaccccctccctg

SEQ ID NO: 78104 - DNA, 80 bp, synthetic construct
  source 1..80: mol_type = other DNA
ttagtagatttcagggagctcaataaaagaactcaggacttttgggaagttcaattaggaataccccacccagcgggttt

SEQ ID NO: 78105 - DNA, 80 bp, synthetic construct
  source 1..80: mol_type = other DNA
cagagccatcagccccaccagcagagaacctgaggatgggggatccttcaatttccctcaaatcactctttggcaacgac

SEQ ID NO: 78106 - DNA, 80 bp, synthetic construct
  source 1..80: mol_type = other DNA
gatggcccaaaggttaaacaatggccattaacagaagagaaaataaaagcattaacagacatttgtatggagatggaaaa

SEQ ID NO: 78107 - DNA, 80 bp, synthetic construct
  source 1..80: mol_type = other DNA
agtggaggaaattagtagatttcagggagctcaataaaaggactcaggacttttgggaagttcaattaggaataccccac

SEQ ID NO: 78108 - DNA, 80 bp, synthetic construct
  source 1..80: mol_type = other DNA
cttcagaaaatatactgcatttactataccaagtatatacaatgagacaccagggatcagatatcagtacaatgtacttc

SEQ ID NO: 78109 - DNA, 80 bp, synthetic construct
  source 1..80: mol_type = other DNA
cagcagaggactttgggatggggaaaaagatgaccccctccctgaaacaggaacagaaagacagggaacagagtcctcct

SEQ ID NO: 78110 - DNA, 80 bp, synthetic construct
  source 1..80: mol_type = other DNA
aaaaccaggacaaattggaggacagcgaggtagaagagtgagtggaggttggggaggagataggttaatggtctttgtat

SEQ ID NO: 78111 - DNA, 80 bp, synthetic construct
  source 1..80: mol_type = other DNA
aaattggaggacagggaggtagaagagtgagtggaggttggggaggagataggttaatggtctttgtattaggaggctgt

SEQ ID NO: 78112 - DNA, 80 bp, synthetic construct
  source 1..80: mol_type = other DNA
acctgtgtggagaaatgcagataccaccctattttgtgcatcagatgctaaagcagttgatacagaagtgcataatgtct

SEQ ID NO: 78113 - DNA, 80 bp, synthetic construct
  source 1..80: mol_type = other DNA
agtgagggagatgcagaggaattggcagcacttggagaggtggggcatcttattcttgggaatattaataatctgtaaag

SEQ ID NO: 78114 - DNA, 80 bp, synthetic construct
  source 1..80: mol_type = other DNA
gggaggttgttgatgacatatagtgttgcagataatttgtgggtcacagtctattatggggtgcctgtatggaaagaagc

SEQ ID NO: 78115 - DNA, 80 bp, synthetic construct
  source 1..80: mol_type = other DNA
gggaataataataatctgtagtgccacagaaaacttgtgggttactgtttactatggggtacctgtgtggaaagatgcag

SEQ ID NO: 78116 - DNA, 80 bp, synthetic construct
  source 1..80: mol_type = other DNA
tgtttactatggggtacctgtgtggaaagatgcagataccatcctgttttgtgcatcagatgcgaaagcatatgtcagga

SEQ ID NO: 78117 - DNA, 80 bp, synthetic construct
  source 1..80: mol_type = other DNA
tgcagaaagacagtggcaatgagagtgatggggacacagaggaattgtcaacacttattgacatgggggactatgatctt

SEQ ID NO: 78118 - DNA, 80 bp, synthetic construct
  source 1..80: mol_type = other DNA
gaatattaataatctgtagtgctacagagaacttgtgggtcacagtctattatggagtacctgtgtggaaagaagcaacc

SEQ ID NO: 78119 - DNA, 80 bp, synthetic construct
  source 1..80: mol_type = other DNA
aacttgtgggtcacagtctattatggagtacctgtgtggaaagaagcaaccactactctattttgtgcatcagatttcta

SEQ ID NO: 78120 - DNA, 80 bp, synthetic construct
  source 1..80: mol_type = other DNA
gcagaagacagtggcaatgagagtgagggggatgcagaggaattggcagcacttggggaagtggggccttttattcctgg

SEQ ID NO: 78121 - DNA, 80 bp, synthetic construct
  source 1..80: mol_type = other DNA
tggataataatactttgtaatgctgaaaatttatgggtcacggtctgctatggggtacctgtgtgggaagaggcaaacac

SEQ ID NO: 78122 - DNA, 80 bp, synthetic construct
  source 1..80: mol_type = other DNA
atgggtcacggtctgctatggggtacctgtgtgggaagaggcaaacaccaccttattttgtgcatcagatgctaaagcat

SEQ ID NO: 78123 - DNA, 80 bp, synthetic construct
  source 1..80: mol_type = other DNA
tgcagaagatagtggcaatgagagtgaaggggacacagaggaattatccactcttatggagatggggaattatgatgttt

SEQ ID NO: 78124 - DNA, 80 bp, synthetic construct
  source 1..80: mol_type = other DNA
aatctgtagtgcctcagataacttgtgggtcacagtgtattatggggtgcctgtatggaaagaagcaaaggccactctat

SEQ ID NO: 78125 - DNA, 80 bp, synthetic construct
  source 1..80: mol_type = other DNA
gggtcacagtgtattatggggtgcctgtatggaaagaagcaaaggccactctattttgtgcatcagatgctaaagcaaac

SEQ ID NO: 78126 - DNA, 80 bp, synthetic construct
  source 1..80: mol_type = other DNA
gtggcaatgagagtgaaggggatacagaggaattggcagcacttgtggaaatggggaactttgatccttgggttggtgat

SEQ ID NO: 78127 - DNA, 80 bp, synthetic construct
  source 1..80: mol_type = other DNA
ggattggtaataattagtagtgcctcgagcaacttgtgggtcacagtatattatggggttcctgtgtggaaagatgcaga

SEQ ID NO: 78128 - DNA, 80 bp, synthetic construct
  source 1..80: mol_type = other DNA
gaccatcctattttgcgcatcagatgctaaagcatatgatacagaaaaacataatgtctgggcgacacatgcctgtgtac

SEQ ID NO: 78129 - DNA, 80 bp, synthetic construct
  source 1..80: mol_type = other DNA
tgcagaagacagtggcaatgagagtgagggggatacagaggaattggcaacacttatggaaatgggggactttgatcctt

SEQ ID NO: 78130 - DNA, 80 bp, synthetic construct
  source 1..80: mol_type = other DNA
gggttggtgataatttgtagtgccaaccacttgtgggtcacagtttattatggggttcctgtgtggagagatgcagatac

SEQ ID NO: 78131 - DNA, 80 bp, synthetic construct
  source 1..80: mol_type = other DNA
tgggtcacagtttattatggggttcctgtgtggagagatgcagatacaaccctattttgtgcatcagatgctaaagccct

SEQ ID NO: 78132 - DNA, 80 bp, synthetic construct
  source 1..80: mol_type = other DNA
tggctaatgataatttgtaatgcagagactatgggtcacagtctactatgggtagcctgtgtggagagaagcaagaacaa

SEQ ID NO: 78133 - DNA, 80 bp, synthetic construct
  source 1..80: mol_type = other DNA
ctgggaatattaataatctgtaatgcagaggaggacttgtgggttacagtctactatggggtacctgtgtggagagatgc

SEQ ID NO: 78134 - DNA, 80 bp, synthetic construct
  source 1..80: mol_type = other DNA
gtgggttacagtctactatggggtacctgtgtggagagatgcaaagaccaccctattttgtgcatcagatgctaaagcat

SEQ ID NO: 78135 - DNA, 80 bp, synthetic construct
  source 1..80: mol_type = other DNA
tgctgcagaagatagtggcaatgagagtgagggagatgaagaggaatcggcagcacttgaggaagtggggcctcttattc

SEQ ID NO: 78136 - DNA, 80 bp, synthetic construct
  source 1..80: mol_type = other DNA
ttagataaaatagaggaaatacaaaacaagagcaagcaaaaggcacagcaggcagcacagcaggcagcggctgccacagg

SEQ ID NO: 78137 - DNA, 80 bp, synthetic construct
  source 1..80: mol_type = other DNA
aagcagcagtaatctcagtcaaaattaccctatagtgcaaaatgcacaagggcaaatggtacatcaggccatttcaccaa

SEQ ID NO: 78138 - DNA, 80 bp, synthetic construct
  source 1..80: mol_type = other DNA
tagtatgggcaagcagggagctggaaagatatgcacttaaccctggtcttttagaaacagcagaaggatgtcaacaggca

SEQ ID NO: 78139 - DNA, 80 bp, synthetic construct
  source 1..80: mol_type = other DNA
caaatggtacatcaggccatgtcaccaagaactttaaatgcatgggtgaaggtagtagaagaaaagggtttcagcccaga

SEQ ID NO: 78140 - DNA, 80 bp, synthetic construct
  source 1..80: mol_type = other DNA
tgtacatcaaaggataacaataaaagacaccaaggaagctatagataaaatagaggaaatacaagataagagcaagcaac

SEQ ID NO: 78141 - DNA, 80 bp, synthetic construct
  source 1..80: mol_type = other DNA
caaatggtgcatcagcccgtgtcaccaagaactttaaatgcatgggtaaaagtgatagaagaaaagggtttcaacccaga

SEQ ID NO: 78142 - DNA, 80 bp, synthetic construct
  source 1..80: mol_type = other DNA
agacacagcaggcagcagctgccgccacaggaaacagcagtgctctcagtcaaaattaccccatagtgcaaaatgcacaa

SEQ ID NO: 78143 - DNA, 80 bp, synthetic construct
  source 1..80: mol_type = other DNA
gggcaaatggtacatcaggccatttcaccaagaactttaaatgcatgggtaaaagtaatagaagaaaaggctttcagccc

SEQ ID NO: 78144 - DNA, 80 bp, synthetic construct
  source 1..80: mol_type = other DNA
tgtacatcaaaagatagaagtgagagacaccaaggaagctctagataaaatagaggaaataaaaagtaagagcaaacaaa

SEQ ID NO: 78145 - DNA, 80 bp, synthetic construct
  source 1..80: mol_type = other DNA
ggtacatcagcccatgtcaccaagaactttaaatgcatgggtgaaagtaatagaagaaaagtcttttagcccagaagtat

SEQ ID NO: 78146 - DNA, 80 bp, synthetic construct
  source 1..80: mol_type = other DNA
aagcacagcaggcagcagctgccacaggaaacagcagtaatttcagtcaaaattaccccatagtgcaaaatgcacaaggg

SEQ ID NO: 78147 - DNA, 80 bp, synthetic construct
  source 1..80: mol_type = other DNA
tgtacatcaacagataacagtaagagacaccaaggaagccttagataaagtagaggaaataaaaaacaagagcaagcaaa

SEQ ID NO: 78148 - DNA, 80 bp, synthetic construct
  source 1..80: mol_type = other DNA
atggaacagttacaatcaactctcaagacaggatcagaagaacttaagtcattatataatacagtagcaaccctctattg

SEQ ID NO: 78149 - DNA, 80 bp, synthetic construct
  source 1..80: mol_type = other DNA
gtgtacatcgaaggatagaagtacaagacaccaaggaagctttagataaaatagaggaaatacaaaacaaaagcaagcaa

SEQ ID NO: 78150 - DNA, 80 bp, synthetic construct
  source 1..80: mol_type = other DNA
atagaacagctgcaatcaactcttaagacaggatcagaagaacttaagtcattatttaatacaatagcaaccctctggtg

SEQ ID NO: 78151 - DNA, 80 bp, synthetic construct
  source 1..80: mol_type = other DNA
taccaataaaagataccaaggaggctgtagataagatagaggaaatacaaaataagagcaagcaaaaggcacagcagaca

SEQ ID NO: 78152 - DNA, 80 bp, synthetic construct
  source 1..80: mol_type = other DNA
gcagctgccacaggaaacagcagtaatctcagtcaaaattaccccatagtgcaaaatgcacaagggcaaatggtacatca

SEQ ID NO: 78153 - DNA, 80 bp, synthetic construct
  source 1..80: mol_type = other DNA
tggcacagttacaaccagctctcaagacaggatcagaagaatttagatcattatttaatttaatagcagtcctttggtgt

SEQ ID NO: 78154 - DNA, 80 bp, synthetic construct
  source 1..80: mol_type = other DNA
tggaacagttacaaacagctctcaggacaggaacagaggaacttaaatcattatataatacagtagctaccctctattgt

SEQ ID NO: 78155 - DNA, 80 bp, synthetic construct
  source 1..80: mol_type = other DNA
gacacagcaggcagcagccgcggcagcagccgacacaggaaacagcagtgtcagccaaaattaccccatagtgcaaaatg

SEQ ID NO: 78156 - DNA, 80 bp, synthetic construct
  source 1..80: mol_type = other DNA
cacaagggcaaatggtacatcaggcagtttcaccaagaactttaaatgcatgggtaaaagcaatagaagaaaaggcttca

SEQ ID NO: 78157 - DNA, 80 bp, synthetic construct
  source 1..80: mol_type = other DNA
gtacatcaaaggataagagtagcagacaccaaggaagctgtagataaaatagaggagatacaaaataagagcaagcaaag

SEQ ID NO: 78158 - DNA, 80 bp, synthetic construct
  source 1..80: mol_type = other DNA
aatggtacatcagagcatatcgcccaggactttgaatgcatgggtaaaggtaatagaagaaaaggcgtcaacccagaaga

SEQ ID NO: 78159 - DNA, 80 bp, synthetic construct
  source 1..80: mol_type = other DNA
aggacagctacaaccagctcttccgacaggaacaaaggaaattatatcattatataatacagtagcaactctcttttgtg

SEQ ID NO: 78160 - DNA, 80 bp, synthetic construct
  source 1..80: mol_type = other DNA
tacatgaaaaaatagaggtgcgagacaccaaggaagccttagaaaaaataaaggaagaacaaaataaaagtcagcaaaaa

SEQ ID NO: 78161 - DNA, 80 bp, synthetic construct
  source 1..80: mol_type = other DNA
acacagcaggcaggggcggctgacaaaggaaaggtcagtcaaaattatcctatagtgcagaatctccaagggcaaatggt

SEQ ID NO: 78162 - DNA, 80 bp, synthetic construct
  source 1..80: mol_type = other DNA
gaacttagatcattatttaatacagtagcagtcctctattgcgtacatcaaaaaatagaggtaagagacaccaaggaagc

SEQ ID NO: 78163 - DNA, 80 bp, synthetic construct
  source 1..80: mol_type = other DNA
tttagataaaatagaggaaatgaaaaataagagcaagcaaaaggcacaacaggcagcagctgacacagaaaacagcagca

SEQ ID NO: 78164 - DNA, 80 bp, synthetic construct
  source 1..80: mol_type = other DNA
aagtcagccaaaattaccctgtagtgcaaaacgcacaagggcagatgatacaccagtccctgtcacctaggactttgaat

SEQ ID NO: 78165 - DNA, 80 bp, synthetic construct
  source 1..80: mol_type = other DNA
atcctggccttttagaaacaacagaaggatgtcagcaaataatggaacagctacagccagctctcaagacaggaacagaa

SEQ ID NO: 78166 - DNA, 80 bp, synthetic construct
  source 1..80: mol_type = other DNA
cttaaatcattatataatacagtagcagccctctattgtgtacatgaaaagataaaggtagcagacaccaaggaagcctt

SEQ ID NO: 78167 - DNA, 80 bp, synthetic construct
  source 1..80: mol_type = other DNA
agacaagatagaagaagaacaaaccaaaagtaagaaaaaaacacagcaagcaacacaggacacaggaaacagcagacagg

SEQ ID NO: 78168 - DNA, 80 bp, synthetic construct
  source 1..80: mol_type = other DNA
tcagccaaaattatcctatagtgcaaaatgcacaagggcaaatggtacatcaggccatatcacctaggactttgaatgca

SEQ ID NO: 78169 - DNA, 80 bp, synthetic construct
  source 1..80: mol_type = other DNA
ctggcctgttagaaacaccaggaggctgcaaacaaataatagaacagctacaaccagctattcagacaggatcagagaca

SEQ ID NO: 78170 - DNA, 80 bp, synthetic construct
  source 1..80: mol_type = other DNA
caaatggtacaccagcccttgtcacctagaactttgaatgcatgggtaaaagtaatagaagagaaaaattcagcccagag

SEQ ID NO: 78171 - DNA, 80 bp, synthetic construct
  source 1..80: mol_type = other DNA
actgcaacagctacaaccagctcttcagacaggaacaaaggaacttatttcattacacaatacagtagcaactctctttt

SEQ ID NO: 78172 - DNA, 80 bp, synthetic construct
  source 1..80: mol_type = other DNA
gtgtacatgaaaggatagatgtacgagacaccaaggaagctttagacaaaataaaggaaatacaaagcaaaagtcagcag

SEQ ID NO: 78173 - DNA, 80 bp, synthetic construct
  source 1..80: mol_type = other DNA
gcagcaacgggtgacaaaggaaagatcagtcaaaattatcctatagtgcagaacctccaagggcaaatggtacatcaggc

SEQ ID NO: 78174 - DNA, 80 bp, synthetic construct
  source 1..80: mol_type = other DNA
aatacaacagctacaaccagctcttaatacaggaacaaaggaacttatctcattgcataatacagtagcaactctttatt

SEQ ID NO: 78175 - DNA, 80 bp, synthetic construct
  source 1..80: mol_type = other DNA
caaatggtacatacgcccctaacacctagaactttgaatgcgtgggtaaaagtaatagaggagagaaattcagccccgag

SEQ ID NO: 78176 - DNA, 80 bp, synthetic construct
  source 1..80: mol_type = other DNA
gtgtacataaaaggataggggtacgggatacccaggaagccttagacaaaataaaggaagaacagaataaaagtcagcaa

SEQ ID NO: 78177 - DNA, 80 bp, synthetic construct
  source 1..80: mol_type = other DNA
aaaacacagcaggcagaagcggctgacagtcaaaattatcctatagtgcagaatcaccaagggcaaatggtacatacgcc

SEQ ID NO: 78178 - DNA, 80 bp, synthetic construct
  source 1..80: mol_type = other DNA
tgcaaccctcttttgtgtacatcaaaggatagatgtaaaagattctaaggaagctttagataaaatagaggaaatacaaa

SEQ ID NO: 78179 - DNA, 80 bp, synthetic construct
  source 1..80: mol_type = other DNA
agaagagtaagcaaaagacacatcaggcagcagctagcacaggcagcagcagcaacaccagccaaaattaccctatagtg

SEQ ID NO: 78180 - DNA, 80 bp, synthetic construct
  source 1..80: mol_type = other DNA
aatggtacatcaggctatatcacctagaactttgaatgcatgggcaaaagtagtagaagaaaaggctttcagtccagaag

SEQ ID NO: 78181 - DNA, 80 bp, synthetic construct
  source 1..80: mol_type = other DNA
atgtcaacagttaatagaacatgttcacaatcaactttcaaggcaggatcagaagaacttaaatcattatataatacaat

SEQ ID NO: 78182 - DNA, 80 bp, synthetic construct
  source 1..80: mol_type = other DNA
attcaacagctacaaccagctcttaagacaggaacaaaggaactaatatcattatataatacagtagtaactctctattg

SEQ ID NO: 78183 - DNA, 80 bp, synthetic construct
  source 1..80: mol_type = other DNA
aaatggtacaccaggccatatcacctagaactttgaatgcctgggtaaaagtaatagaggagaaggcttcagcccagaga

SEQ ID NO: 78184 - DNA, 80 bp, synthetic construct
  source 1..80: mol_type = other DNA
tgtacatgaaaagatagatgtacgagacaccaaggaagcattagacaagataaaggaagaacaagacaaaagtcagcaaa

SEQ ID NO: 78185 - DNA, 80 bp, synthetic construct
  source 1..80: mol_type = other DNA
aataaaacaactacaaccagctcttccgacaggaacaaaggaacttgtgtcattatataatacaatagcaactctctatt

SEQ ID NO: 78186 - DNA, 80 bp, synthetic construct
  source 1..80: mol_type = other DNA
gcgtacatgcagcgatagaggtaagagacaccaaggaagccttagacaaagtaaaggaagaacaaaacaaaagccagcaa

SEQ ID NO: 78187 - DNA, 80 bp, synthetic construct
  source 1..80: mol_type = other DNA
aaaacacagcaggcagaaatggctgacaaaggaaaggtcagtcaaagtcaaaattatcctatagtacagaatctccaagg

SEQ ID NO: 78188 - DNA, 80 bp, synthetic construct
  source 1..80: mol_type = other DNA
gcaaatggtacaccagaacatgtcacctagaactttgaatgcatgggtaaaagtgatagaagagaaggctcagcccagag

SEQ ID NO: 78189 - DNA, 80 bp, synthetic construct
  source 1..80: mol_type = other DNA
ttgtttgggccaagcagggagctggaaagatttgcgcttgaccctagccttttagaaacagcagaaggctgtaaacaaat

SEQ ID NO: 78190 - DNA, 80 bp, synthetic construct
  source 1..80: mol_type = other DNA
tgtacatgaaaggatagaggtaagagacaccaaggaagccttagacaaagtaaaggaagaacagagccagcaaagaacac

SEQ ID NO: 78191 - DNA, 80 bp, synthetic construct
  source 1..80: mol_type = other DNA
tgacaagggaaaggtcagtcaaaattatcctatagtgcagaatctccaagggcaaatggtacaccagcccatgacaccta

SEQ ID NO: 78192 - DNA, 80 bp, synthetic construct
  source 1..80: mol_type = other DNA
ttccgacaggaacaaaggaacttatatcattatataatacagtagcaactctcctttgtgttcatgaaaagatagatgta

SEQ ID NO: 78193 - DNA, 80 bp, synthetic construct
  source 1..80: mol_type = other DNA
gcaaatggtacatcagcccctatcacctagaactttaaatgcatgggtaaaagtaatagaggagaagggttcaacccaga

SEQ ID NO: 78194 - DNA, 80 bp, synthetic construct
  source 1..80: mol_type = other DNA
tagtatgtgcaagcagggagctggaaagatttgcacttgaccctggcctgttagaaacatcacaaggctgtagacaaata

SEQ ID NO: 78195 - DNA, 80 bp, synthetic construct
  source 1..80: mol_type = other DNA
ataaaacaactacaaccagctcttcagacaggatcaaaggaacttatatccttatataatgcagtagcaactctctattg

SEQ ID NO: 78196 - DNA, 80 bp, synthetic construct
  source 1..80: mol_type = other DNA
aaatggtacatcagcccatatcagctagaactttgaatgcatgggtaaaagtggtagaggagaaggcttttagcccagag

SEQ ID NO: 78197 - DNA, 80 bp, synthetic construct
  source 1..80: mol_type = other DNA
tgtacatgaaaggatagaggtaagagacaccaaggaagccttagataaaatacaggaagaacaaaacaaatggcaacaaa

SEQ ID NO: 78198 - DNA, 80 bp, synthetic construct
  source 1..80: mol_type = other DNA
aaacacaacaggcagaagcggctgacaagggaaaggtcagtcaaaattaccctatagtacagaatctccaagggcaaatg

SEQ ID NO: 78199 - DNA, 80 bp, synthetic construct
  source 1..80: mol_type = other DNA
tagtttgggcaagcagggagctggacagatttgcacttgaccctggccttttagagacatcaggaggctgtaaacaaata

SEQ ID NO: 78200 - DNA, 80 bp, synthetic construct
  source 1..80: mol_type = other DNA
ctgagacagatacaaccagctcttccaacaggaacaaaagaacttatatcattatacaatacagtagcaactatctattg

SEQ ID NO: 78201 - DNA, 80 bp, synthetic construct
  source 1..80: mol_type = other DNA
gcaaatggtacaccagcccttatcacctagaactttgaatgcatgggtaaaagtagtggaggaaaagggtcaatccagag

SEQ ID NO: 78202 - DNA, 80 bp, synthetic construct
  source 1..80: mol_type = other DNA
tgtacatgaaaagataaaggtacgagacaccaaggaagccttagacaaaatagaagaacaaaacaaaagtcagcaaaaaa

SEQ ID NO: 78203 - DNA, 80 bp, synthetic construct
  source 1..80: mol_type = other DNA
atgagacagctacaaccatctcttcagacaggaacaaaggaacttatatcgctacacaatgcagtagcagtcctctattg

SEQ ID NO: 78204 - DNA, 80 bp, synthetic construct
  source 1..80: mol_type = other DNA
tatacataaaaagatagagatacgagacaccaaggaagctctagacaaaataaaggaagaacaagacaaacagcaaaaaa

SEQ ID NO: 78205 - DNA, 80 bp, synthetic construct
  source 1..80: mol_type = other DNA
ggcaaatggtacaccaggccatagcacctagaactttgaatgcatgggtaaaagtagtagaggagaaggcttcagcctcg

SEQ ID NO: 78206 - DNA, 80 bp, synthetic construct
  source 1..80: mol_type = other DNA
atgaaacagctacaaccagctcttaagacaggatcaaaggagcttatatcattacataatacagtggcaactctctattg

SEQ ID NO: 78207 - DNA, 80 bp, synthetic construct
  source 1..80: mol_type = other DNA
tgtacatgaaaggatagaggtacgagacaccaacgaagccttagacaaaatacaggaagaacaaaacaaaagtcagcagg

SEQ ID NO: 78208 - DNA, 80 bp, synthetic construct
  source 1..80: mol_type = other DNA
ataagccagccacaaccatctcttcagacaggaacaaaggaacttatatcattacataatacagtagtagttctgtattg

SEQ ID NO: 78209 - DNA, 80 bp, synthetic construct
  source 1..80: mol_type = other DNA
aaccagctcttcggacagggacaaaggaacttatatcattacataatgcagtagcaactctttggtgtgtacatgaaaag

SEQ ID NO: 78210 - DNA, 80 bp, synthetic construct
  source 1..80: mol_type = other DNA
atagatgtacgagacaccaaggaagccttagacaaagtagaggaagcacaaagtaaaagtcagcaaaaaacacagcaggc

SEQ ID NO: 78211 - DNA, 80 bp, synthetic construct
  source 1..80: mol_type = other DNA
agaagcggctgacaaaggaaaggtcagtcaaaattatcctatagtgcagaatctccaagggcaaatggtacaccaggccc

SEQ ID NO: 78212 - DNA, 80 bp, synthetic construct
  source 1..80: mol_type = other DNA
ctagcacagctacaaccatctattcagacaggatcagaagaaattaaatcattatataatacagtagcagtcctctattg

SEQ ID NO: 78213 - DNA, 80 bp, synthetic construct
  source 1..80: mol_type = other DNA
ctacaggggcaaatggtacaccaggccatatcacctagaactttgaacgcatgggtaaaagtaatagaggagaaggatca

SEQ ID NO: 78214 - DNA, 80 bp, synthetic construct
  source 1..80: mol_type = other DNA
tgtacattcaaggataaaggtaacagacaccaaggaagccttagacaagatagaggaagaacaaaacaagagtaagaaaa

SEQ ID NO: 78215 - DNA, 80 bp, synthetic construct
  source 1..80: mol_type = other DNA
atgcacaagggcaaatggtgcaccaggtcctgtcacctaggactttgaatgcatgggtgaaagtaatagaagaaaagggt

SEQ ID NO: 78216 - DNA, 80 bp, synthetic construct
  source 1..80: mol_type = other DNA
tcaacggatagatgtaaaagataccaaggaagctttagataaaatagaggaaatgaaaagcaagcaacaggcacagcagg

SEQ ID NO: 78217 - DNA, 80 bp, synthetic construct
  source 1..80: mol_type = other DNA
cagcagctgacacaggaaacagcggcaaagtcagccagaattatcctatagtgcaaaatgcacaagggcaaatggtgcac

SEQ ID NO: 78218 - DNA, 80 bp, synthetic construct
  source 1..80: mol_type = other DNA
tgggcagcagggagctggaaagattcgcactcaaccctagccttttagaaacaacagaaggatgtaaaaaaataatggaa

SEQ ID NO: 78219 - DNA, 80 bp, synthetic construct
  source 1..80: mol_type = other DNA
agccagctcttaatacaggaacagaagaactcagatcattatttaatacagtagcagtcctctattgtgtacatcaaaag

SEQ ID NO: 78220 - DNA, 80 bp, synthetic construct
  source 1..80: mol_type = other DNA
ttagaggtaagagacaccaaggaagctttagacaaaatagaggaaataaaaaataagagcaagcaaaagaaacaacaggc

SEQ ID NO: 78221 - DNA, 80 bp, synthetic construct
  source 1..80: mol_type = other DNA
agcagctgacacaggaagcagcagtaatgtcagccaaaattaccctatagtgcaaaatgcacaagggcaaccaatacatc

SEQ ID NO: 78222 - DNA, 80 bp, synthetic construct
  source 1..80: mol_type = other DNA
gtacatcgacagatcgatgtaaaagacaccaaggaagctctagataaaatagaggaaatacaaaataagagcaagaaaaa

SEQ ID NO: 78223 - DNA, 80 bp, synthetic construct
  source 1..80: mol_type = other DNA
cagctacacccagctctccaaacaggaacaaaggaacttatatcattatataatacagtagcaactcttttttgtgtaca

SEQ ID NO: 78224 - DNA, 80 bp, synthetic construct
  source 1..80: mol_type = other DNA
tgaaaagatagagataagagacaccaaggaagccttagataaagtaaaggaagaacaagataaaagtcagcaaaaaacaa

SEQ ID NO: 78225 - DNA, 80 bp, synthetic construct
  source 1..80: mol_type = other DNA
agcaggcagaagcggctgacaaaggaaaggtcagtcaaaattatcctatagtacaaaatctccaagggcagatggtacac

SEQ ID NO: 78226 - DNA, 80 bp, synthetic construct
  source 1..80: mol_type = other DNA
gggcaagcagggagctggaaagatttgcacttgaccctggccttttagaaacatcagaaggctgtcaacaaattatgaga

SEQ ID NO: 78227 - DNA, 80 bp, synthetic construct
  source 1..80: mol_type = other DNA
aactctctattgtgtacatgaaaagatagaggtacgagacaccaaggaagccttagacaagatagaggaagaacaaaaca

SEQ ID NO: 78228 - DNA, 80 bp, synthetic construct
  source 1..80: mol_type = other DNA
ggtacaccagcccttatcacctagaactttaaatgcgtgggtaaaagtaatagaggagaagcagtcagcccagaggtatc

SEQ ID NO: 78229 - DNA, 80 bp, synthetic construct
  source 1..80: mol_type = other DNA
aaattcagcaaaaaacacagcaggcaaaggcagctgaccaaggaaaggtcagtcaaaactatcctatagtgcagaattta

SEQ ID NO: 78230 - DNA, 80 bp, synthetic construct
  source 1..80: mol_type = other DNA
caagggcaaatggtacaccagcccttatcacctagaactttaaatgcgtgggtaaaagtaatagaggagaagcagtcagc

SEQ ID NO: 78231 - DNA, 80 bp, synthetic construct
  source 1..80: mol_type = other DNA
tgtaaacaaataatgaaacagctacaaccagctcttcagacaggaacagaggaacttaaatcattgtttaatacagtagc

SEQ ID NO: 78232 - DNA, 80 bp, synthetic construct
  source 1..80: mol_type = other DNA
atagatgtacgagacaccaaggaagcattagacaaaataaaggcagaacaaaacgcaagtcagcaaaaaacacagcaggc

SEQ ID NO: 78233 - DNA, 80 bp, synthetic construct
  source 1..80: mol_type = other DNA
cagggagctggaaagatttgcattagaccctggccttttagaaacatcagaaggctgtaaacaaatactgagacagctac

SEQ ID NO: 78234 - DNA, 80 bp, synthetic construct
  source 1..80: mol_type = other DNA
gaaaggatagtggtgcgagacaccaaggaagccttagacaaaataaaggaagaacaagacaaatgtcagcaaaaagcaca

SEQ ID NO: 78235 - DNA, 80 bp, synthetic construct
  source 1..80: mol_type = other DNA
gcaggcagaagcggctggcggaaatgtcagtcaaaattatcctatagtgcagaatcttcaagggcaaatggtacatcagc

SEQ ID NO: 78236 - DNA, 80 bp, synthetic construct
  source 1..80: mol_type = other DNA
gggcaacagggagctggacagattcgcacttgaccctggccttttggaaacatcagatggctgtagacaaataatgagac

SEQ ID NO: 78237 - DNA, 80 bp, synthetic construct
  source 1..80: mol_type = other DNA
ttgggacagctacaaccaagtattcagacaggatcagaggaggttaaatcattatataatatggtagcagttctctattg

SEQ ID NO: 78238 - DNA, 80 bp, synthetic construct
  source 1..80: mol_type = other DNA
tcagaagagattaaatcactatataatacaatagtggtcctctattttgtacatcaaaagatagagataaaagacaccaa

SEQ ID NO: 78239 - DNA, 80 bp, synthetic construct
  source 1..80: mol_type = other DNA
ggaagccttagacaaactagaggaagaacaaaacaaaagtcagcgaaagacacgacaagaagcagctgacaaaggggtca

SEQ ID NO: 78240 - DNA, 80 bp, synthetic construct
  source 1..80: mol_type = other DNA
cactcaaccctggccttttagagacaacagaaggctgtcggcaaataataacccaaatacagccatccattcaaacagga

SEQ ID NO: 78241 - DNA, 80 bp, synthetic construct
  source 1..80: mol_type = other DNA
tagcaactctctattgtgtacatgcagggatagaggtacgagacaccaaggaagccttagataaaatagaggaagaacaa

SEQ ID NO: 78242 - DNA, 80 bp, synthetic construct
  source 1..80: mol_type = other DNA
tctccaagggcagcatgtacaccaggccatatcacctagaactttgaatgcatgggtaaaagtaatagaggagaaggctt

SEQ ID NO: 78243 - DNA, 80 bp, synthetic construct
  source 1..80: mol_type = other DNA
tagcaactctctattgtgtacataaaaggatagacataaaagacactaaggaagccttagacaagatagaggaagaacaa

SEQ ID NO: 78244 - DNA, 80 bp, synthetic construct
  source 1..80: mol_type = other DNA
aacaaaagtcagcaaaaaacacagcaggcagaagcagctgacaaaggaaaagtcagtcaaaattatcctatagtgcagaa

SEQ ID NO: 78245 - DNA, 80 bp, synthetic construct
  source 1..80: mol_type = other DNA
cggctgtaaacaaataatcaagcagctacaaccagctcttcagacaggaacagaggaacttaaatcattatataacacag

SEQ ID NO: 78246 - DNA, 80 bp, synthetic construct
  source 1..80: mol_type = other DNA
gcagaatatgcaagggcaaatggtacaccagcccatgtcagctagaactttgaatgcatgggtaaaagtgatagaggaga

SEQ ID NO: 78247 - DNA, 80 bp, synthetic construct
  source 1..80: mol_type = other DNA
aggctgtaagcaaataatgagacagctacaaccagctcttcagacaggaaccaaggaattgatatcattatataattcag

SEQ ID NO: 78248 - DNA, 80 bp, synthetic construct
  source 1..80: mol_type = other DNA
ataacacagctacaaccagctcttcagacaggaacaaaggagcttaaatcattatataatacagtagcaactctttactg

SEQ ID NO: 78249 - DNA, 80 bp, synthetic construct
  source 1..80: mol_type = other DNA
aagcacagcaggcagaagcggctgacaaagggaaagtcagtcaaaattatcctatagtgcagaatctccaaggacaaatg

SEQ ID NO: 78250 - DNA, 80 bp, synthetic construct
  source 1..80: mol_type = other DNA
taggacaactacaaccagccattaagacaggaacagaggagcttaaatcattatataacacactagcagttctctattat

SEQ ID NO: 78251 - DNA, 80 bp, synthetic construct
  source 1..80: mol_type = other DNA
tgtacatcgcaagatagaggtaaaagacaccaaggaggctttagataaaatagaggaaatacaaaatcagagcaagcaaa

SEQ ID NO: 78252 - DNA, 80 bp, synthetic construct
  source 1..80: mol_type = other DNA
agacacagcaggcagcagctgacccaggaaacagcaacaaggtcagtcaaaattacccaatagtgcaaaatgcacaaggg

SEQ ID NO: 78253 - DNA, 80 bp, synthetic construct
  source 1..80: mol_type = other DNA
caaatggtacaccaggcagtatcacctagaaccttgaatgcatgggtgaaggtagtagaagaaaaggcattcagtccaga

SEQ ID NO: 78254 - DNA, 80 bp, synthetic construct
  source 1..80: mol_type = other DNA
tgtacatcaaaggataaatgtacaagacaccaaggaagctttagataaaatagaggagctacaaaataagagcaggcaaa

SEQ ID NO: 78255 - DNA, 80 bp, synthetic construct
  source 1..80: mol_type = other DNA
agacacagcaggcagcagctgcagctgccacaagaagcagcagcagccaaaattacccgatagtgcaaaatgcacaaggg

SEQ ID NO: 78256 - DNA, 80 bp, synthetic construct
  source 1..80: mol_type = other DNA
aagagcttaaatcattatataacacaatagtagttctctattatgtacatcaaaggatagaggtaaaagacaccaaggaa

SEQ ID NO: 78257 - DNA, 80 bp, synthetic construct
  source 1..80: mol_type = other DNA
taatcctggccttctagagacaacagaaggctgtaaaaaattaataggacaactacagctatcccttcagacaggatcag

SEQ ID NO: 78258 - DNA, 80 bp, synthetic construct
  source 1..80: mol_type = other DNA
atgggacagttgcaaccagctctccagacaggatcagaggagcttaaatcattatataatacagtagcaaccctctattg

SEQ ID NO: 78259 - DNA, 80 bp, synthetic construct
  source 1..80: mol_type = other DNA
tgtacatcaaaggatagaggtaagagataccaaagaagctttagatgaagtggagaaaatacaaaagaaaagtcagcaaa

SEQ ID NO: 78260 - DNA, 80 bp, synthetic construct
  source 1..80: mol_type = other DNA
aaacacagcaggcagcaaaggacgaaggaaacagcaaacaagtcagtcaaaattatcctatagtgcagaatgcacaaggg

SEQ ID NO: 78261 - DNA, 80 bp, synthetic construct
  source 1..80: mol_type = other DNA
aggatcagaagagcttaaatcattatataatttagtagtagttctctattttgtacatcgaaagatagatgtaagagaca

SEQ ID NO: 78262 - DNA, 80 bp, synthetic construct
  source 1..80: mol_type = other DNA
ccaatgaagctttagataagctaaaggaagaacaagccaaaagtcagccaaaaacacagcaagcaacggctgacgcaggg

SEQ ID NO: 78263 - DNA, 80 bp, synthetic construct
  source 1..80: mol_type = other DNA
gtcagtcaaaattaccctatagtacagaatcttcaggggcaaatggtacatcaatctctatcacctagaactttaaatgc

SEQ ID NO: 78264 - DNA, 80 bp, synthetic construct
  source 1..80: mol_type = other DNA
tttgcagttaatcctggccttttagaaacaccagaaggctgtgaacaaataataagacaactacaaccatcccttcagac

SEQ ID NO: 78265 - DNA, 80 bp, synthetic construct
  source 1..80: mol_type = other DNA
agaaacagcaggaagcagctggcacaggaagcaacagcaaagtcagccaaaattaccctatagtacaaaatgcacaaggg

SEQ ID NO: 78266 - DNA, 80 bp, synthetic construct
  source 1..80: mol_type = other DNA
ttacagccagctctcaagacaggaacagaggagattaaatcattatttaatacagtagcaaccctctattgtgtacatca

SEQ ID NO: 78267 - DNA, 80 bp, synthetic construct
  source 1..80: mol_type = other DNA
gtcaaaattatcctatagtgcagaatgcacaagggcaaatggtacaccagcccatatcacctagaactttaaatgcatgg

SEQ ID NO: 78268 - DNA, 80 bp, synthetic construct
  source 1..80: mol_type = other DNA
gaggatagaggtaagagacaccaaagaagctctagaggcagtggaaaaattacaaaagaaaagtcagcaaaaaacacagc

SEQ ID NO: 78269 - DNA, 80 bp, synthetic construct
  source 1..80: mol_type = other DNA
caagaagggaactggacagatttgcagttaaccctggccttttagaaacagcagaaggttgtcaacaaataatagaacag

SEQ ID NO: 78270 - DNA, 80 bp, synthetic construct
  source 1..80: mol_type = other DNA
gagcttaaatcattatataatttagtagtagttctctattgtgtacatcgaaagatagctgtaagagacaccaatgaagc

SEQ ID NO: 78271 - DNA, 80 bp, synthetic construct
  source 1..80: mol_type = other DNA
tttagataagctacaggaagaacaagccaaaagtcagcaaaaaacacaacaagcaacggctgacaaaggggtcagtcaaa

SEQ ID NO: 78272 - DNA, 80 bp, synthetic construct
  source 1..80: mol_type = other DNA
atcctggccttttagaaacaacagaaggctgtaaacaaataataggacaactacaaccatcccttcagacaggatcagaa

SEQ ID NO: 78273 - DNA, 80 bp, synthetic construct
  source 1..80: mol_type = other DNA
ataggacaactacaatcatccattcagacaggatcagaagagcttaaatcactatataatacaatagtagttctctatca

SEQ ID NO: 78274 - DNA, 80 bp, synthetic construct
  source 1..80: mol_type = other DNA
aaacacaacaagcagcagctgacaaaaaggtcagtcaaaattaccccatagtacagaatcttcaggggcaaatggtacat

SEQ ID NO: 78275 - DNA, 80 bp, synthetic construct
  source 1..80: mol_type = other DNA
tagtatgggcaagcagggagttagaacgatttgcacttaatcctggccttttagagacaacagaaggctgtagaagttta

SEQ ID NO: 78276 - DNA, 80 bp, synthetic construct
  source 1..80: mol_type = other DNA
gatacaaccagctctcaagacaggatcagaagaacttagatcattatataatacagtagcaaccctctattgtgtacatc

SEQ ID NO: 78277 - DNA, 80 bp, synthetic construct
  source 1..80: mol_type = other DNA
aacggatagatgtaaaagacaccaaggaagctttagataaaatagaggaaatacaaaataagagcaagcaaaaggcacag

SEQ ID NO: 78278 - DNA, 80 bp, synthetic construct
  source 1..80: mol_type = other DNA
ataagagcaagcaagtgacacagcaggcagcagctgccacaggaagcagcagccaaaattaccctatagtgcaaaatgca

SEQ ID NO: 78279 - DNA, 80 bp, synthetic construct
  source 1..80: mol_type = other DNA
caagggcagatggtacatcaggccatatcacctaggacgttgaatgcatgggtaaaggtaatagaagaaaaggctttcag

SEQ ID NO: 78280 - DNA, 80 bp, synthetic construct
  source 1..80: mol_type = other DNA
tagtatgggcaagcagggtattggacaggttcgcacttaaccctggccttttagaaacagcggaaggatgccaaccagta

SEQ ID NO: 78281 - DNA, 80 bp, synthetic construct
  source 1..80: mol_type = other DNA
atgggacaattacaaccagctctcgggacaggaacagaagaaattaaatcattatttaatacagtagcaactctctattg

SEQ ID NO: 78282 - DNA, 80 bp, synthetic construct
  source 1..80: mol_type = other DNA
aatagaacaattacaatcagctctcaagacaggatcagaagaatttagatcattatataatacaatagtaaccctctttt

SEQ ID NO: 78283 - DNA, 80 bp, synthetic construct
  source 1..80: mol_type = other DNA
gcaaatggtacatcaggctttatcacctagaactttgaatgcatgggtaaaagtagtagaagaaaagggcttaacccaga

SEQ ID NO: 78284 - DNA, 80 bp, synthetic construct
  source 1..80: mol_type = other DNA
atagcacagctacaactatcccttcagacaggatcagaagagcttaaatcattatttaacacaatagtagtcctctatta

SEQ ID NO: 78285 - DNA, 80 bp, synthetic construct
  source 1..80: mol_type = other DNA
gtacaccagactctatcacctagaactttaaatgcatgggtaaaagtaatagaagagaaggcttcagcccagaagtatcc

SEQ ID NO: 78286 - DNA, 80 bp, synthetic construct
  source 1..80: mol_type = other DNA
tgtacatcgaaagatagaggtaagagacaccaaggaagctttagataagctacaggaagaacaaaacaaaagtcagcaaa

SEQ ID NO: 78287 - DNA, 80 bp, synthetic construct
  source 1..80: mol_type = other DNA
aaacacagcaagaagcggctggcaaaggggtcagtcaaaattaccctatagtacagaatcttcaggggcaaatggtacac

SEQ ID NO: 78288 - DNA, 80 bp, synthetic construct
  source 1..80: mol_type = other DNA
atggaacagttacaaccaactctaaggacaggatcagaagaacttaaatcattatttaatacagtagcagtcctttattg

SEQ ID NO: 78289 - DNA, 80 bp, synthetic construct
  source 1..80: mol_type = other DNA
ctatgccagctacaaccatctattaagacaggatcagaagaacttaaatcattatataatacagtagcaacactctattg

SEQ ID NO: 78290 - DNA, 80 bp, synthetic construct
  source 1..80: mol_type = other DNA
tgtacatgaaaggctggggataaaggacaccaaggaagctttagaaaagatagaggaagaacaaaacaaaagtaaggaaa

SEQ ID NO: 78291 - DNA, 80 bp, synthetic construct
  source 1..80: mol_type = other DNA
aagcacagcaagcagcagctgacaaaggaagcagcagcagccaggtcagccaaaattatcctataatgcagaactcacag

SEQ ID NO: 78292 - DNA, 80 bp, synthetic construct
  source 1..80: mol_type = other DNA
gggcaaatggtataccaagccctatcacctagaaccttgaacgcatgggtaaaagtaatagaggaaaaggcttcaaccca

SEQ ID NO: 78293 - DNA, 80 bp, synthetic construct
  source 1..80: mol_type = other DNA
tagtatgggcaagcagggagctagaacgatttgcacttaatcctggccttttagaaacatcagaaggctgtaaacaaata

SEQ ID NO: 78294 - DNA, 80 bp, synthetic construct
  source 1..80: mol_type = other DNA
gtgtacatcaaaggataggggtaaaagacaccaaagaagctctagaggaagtagaaaagatacagaagaacagtcagaaa

SEQ ID NO: 78295 - DNA, 80 bp, synthetic construct
  source 1..80: mol_type = other DNA
aaacagcaggcagcaaaggatgaaggaaacaacagccaagtcagccaaaattaccctatagtgcagaatgcacaagggca

SEQ ID NO: 78296 - DNA, 80 bp, synthetic construct
  source 1..80: mol_type = other DNA
agagccagcaggcagtagctgacccaggaaacagtagtgaggtcagtcaaaattatcccatagtgcaaaatgcacaagga

SEQ ID NO: 78297 - DNA, 80 bp, synthetic construct
  source 1..80: mol_type = other DNA
caaatgacacaccaggccttgtcacctaggactttgaatgcatgggtaaaagtagtagaagaaaagggttcaacccagaa

SEQ ID NO: 78298 - DNA, 80 bp, synthetic construct
  source 1..80: mol_type = other DNA
agacacagcaggcagcagctgccacaggctgcagccaaaattaccctatagtgcaaaatgcacaagggcaaatgacacat

SEQ ID NO: 78299 - DNA, 80 bp, synthetic construct
  source 1..80: mol_type = other DNA
tgtacatcaaaggttagaaataaaagacaccaaggaagccttagataaaatagaggaaatgcaaaagaagagcaagcaaa

SEQ ID NO: 78300 - DNA, 80 bp, synthetic construct
  source 1..80: mol_type = other DNA
gacacatcagaacatatcacctagaactttaaatgcatgggtaaaggtaatagaagaaaaagcttcagcccagaagtatc

SEQ ID NO: 78301 - DNA, 80 bp, synthetic construct
  source 1..80: mol_type = other DNA
agacacaggcacagcaggcagcagctggcacaggctgcagccaaaattaccctatagtacaaaatgcacaagggcaaatg

SEQ ID NO: 78302 - DNA, 80 bp, synthetic construct
  source 1..80: mol_type = other DNA
tgggcactagtatgggcaagcagggagctagaacgatttgcacttaatcctggccttttagagacaacagaaggctgtaa

SEQ ID NO: 78303 - DNA, 80 bp, synthetic construct
  source 1..80: mol_type = other DNA
agacacagcaggcaacagctgccacaggaagtagcagccaaaattaccctatagtgcaaaatgcacaagggcaatggaca

SEQ ID NO: 78304 - DNA, 80 bp, synthetic construct
  source 1..80: mol_type = other DNA
atggtacaccagcccatgtcacctagaacattgaatgcatgggtaaaagtagggaagaaaagggttcaacccagaaacat

SEQ ID NO: 78305 - DNA, 80 bp, synthetic construct
  source 1..80: mol_type = other DNA
aagacacagcaagcagcagctgacagcaacaaggtcagtcaaaattaccccatagtgcaaaatgcacaagggcaaatggt

SEQ ID NO: 78306 - DNA, 80 bp, synthetic construct
  source 1..80: mol_type = other DNA
aataatgggacagttgcaaccagctctccagacaggaacagaggagcttagatcattatataatacagtagcagtcctct

SEQ ID NO: 78307 - DNA, 80 bp, synthetic construct
  source 1..80: mol_type = other DNA
aaatgacacatcaagctctgtcgcctaggactttaaatgcatgggtgaaggtaatagaagaaaaaggttcaacccagaag

SEQ ID NO: 78308 - DNA, 80 bp, synthetic construct
  source 1..80: mol_type = other DNA
tgtacatcaaaggatagatataaaagataccaaagaagctctagaagaagtggaaaagatacaacagaaaagtcagaaaa

SEQ ID NO: 78309 - DNA, 80 bp, synthetic construct
  source 1..80: mol_type = other DNA
agacacagcagacagcaatggaggaaggaaacagcagccaagtcagccaaaattatcctatagtgcaaaatgcacaaggg

SEQ ID NO: 78310 - DNA, 80 bp, synthetic construct
  source 1..80: mol_type = other DNA
accaatgtaccaagccctatcacctagaaccttgaatgcatgggtaaaagtagtagaagaaaaggccttcagcccagaag

SEQ ID NO: 78311 - DNA, 80 bp, synthetic construct
  source 1..80: mol_type = other DNA
aaaataagagacaccaaagaagctctagatgaaatagaaaagatgcaaaagaaaagtcagcaggcagagggaggaaacag

SEQ ID NO: 78312 - DNA, 80 bp, synthetic construct
  source 1..80: mol_type = other DNA
cgaacaagtcagccaaaattatcctatagtgcagaatgcacaagggcaaccaatgtaccaagccctatcacctagaacct

SEQ ID NO: 78313 - DNA, 80 bp, synthetic construct
  source 1..80: mol_type = other DNA
cagctctccagacaggaacagaggagcttaaatcattatataatacagtagcaaccctcttttgtgtacaccgagggata

SEQ ID NO: 78314 - DNA, 80 bp, synthetic construct
  source 1..80: mol_type = other DNA
ggaacagttacaatcagctctcgggacaggaacagaagaacttaaatcattatttaatacagtagcagtcctctattgtg

SEQ ID NO: 78315 - DNA, 80 bp, synthetic construct
  source 1..80: mol_type = other DNA
tacatcaacggatagaggtaaaagacaccaaggaagctttagataaaatagaggaaatacaaaaaaggagcaagcaaaaa

SEQ ID NO: 78316 - DNA, 80 bp, synthetic construct
  source 1..80: mol_type = other DNA
tgaaagtaatagaagaaaaggctttcagcccagaagtaatacccatgttctcagcattatcagaaggagccaccccacaa

SEQ ID NO: 78317 - DNA, 80 bp, synthetic construct
  source 1..80: mol_type = other DNA
acacaacaggcagcagctgacacaggaaacagcggcaaagtcagccaaaattaccctatagtgcaaaacgcacaagggca

SEQ ID NO: 78318 - DNA, 80 bp, synthetic construct
  source 1..80: mol_type = other DNA
aatggtacaccagaccttatcacctaggactttgaatgcatgggtgaaagtaatagaagaaaaggctttcagcccagaag

SEQ ID NO: 78319 - DNA, 80 bp, synthetic construct
  source 1..80: mol_type = other DNA
gtatgggcaagcaaggagctggaaagattcgcacttaaccctagccttttagaaacaaaagagggatgtcaacaaataat

SEQ ID NO: 78320 - DNA, 80 bp, synthetic construct
  source 1..80: mol_type = other DNA
acagatacaaccagctctcaggacaggatcagaagaacttagatcattacataacacaatagcagtcctctattgcgtac

SEQ ID NO: 78321 - DNA, 80 bp, synthetic construct
  source 1..80: mol_type = other DNA
atcaaaggatagaggtaaaagacaccaaggaagctctagataaaatagaggaaatacaaaagaaaagccagcaaaagaca

SEQ ID NO: 78322 - DNA, 80 bp, synthetic construct
  source 1..80: mol_type = other DNA
cagcaaacagcagctgacacaggaagcagcagcaaggtcagtcaaaattaccccatagtgcaaaatgcacaagggcaaat

SEQ ID NO: 78323 - DNA, 80 bp, synthetic construct
  source 1..80: mol_type = other DNA
tgggcaagcagggagctggaaagattcgcacttaacccaggccttttagaaacagcagaggggtgtcaacaagcaataga

SEQ ID NO: 78324 - DNA, 80 bp, synthetic construct
  source 1..80: mol_type = other DNA
tgcacaagggcaaatggtacaccagcccatatcacctagaacattgaatgcatgggtaaaagtagtggaagaaaagggtt

SEQ ID NO: 78325 - DNA, 80 bp, synthetic construct
  source 1..80: mol_type = other DNA
atagaacaattacaaccagctatcaacacaggaacagaagaccttagatccttatataatacagtagccaccctctattg

SEQ ID NO: 78326 - DNA, 80 bp, synthetic construct
  source 1..80: mol_type = other DNA
agtatgggccaagcagggagctggaaagatttgcacttaaccctagcctgttagaaacaccagaaggatgtcaacaaata

SEQ ID NO: 78327 - DNA, 80 bp, synthetic construct
  source 1..80: mol_type = other DNA
ggatcagaagaacttagatcattatataatacagtagcaaccctctattgtgtacatcaacggatagatgtaaaagacac

SEQ ID NO: 78328 - DNA, 80 bp, synthetic construct
  source 1..80: mol_type = other DNA
acaagggcaaatggtacacaatcccttatcacctagaactttaaatgcatgggtaaaagcagtagaagaaaagaattgca

SEQ ID NO: 78329 - DNA, 80 bp, synthetic construct
  source 1..80: mol_type = other DNA
caaggaagctttagataaaatagaggagatacaaaataagagcaagcaaaaaagccagcaggcagcagctgacacaggaa

SEQ ID NO: 78330 - DNA, 80 bp, synthetic construct
  source 1..80: mol_type = other DNA
acagcagcaatgtcagccaaaattaccccctagtgcaaaatggacaagggcaaatggtacacaatcccttatcacctaga

SEQ ID NO: 78331 - DNA, 80 bp, synthetic construct
  source 1..80: mol_type = other DNA
tcgcacttaaccctagccttttagaaacaacggaaggatgtcaacaaataatggaacagttacaatcagctctcaagaca

SEQ ID NO: 78332 - DNA, 80 bp, synthetic construct
  source 1..80: mol_type = other DNA
cagttacaaccaactctcaagacaggatcagaggaagttaaatcattatttaatacagtagcaaccctctattgtgtaca

SEQ ID NO: 78333 - DNA, 80 bp, synthetic construct
  source 1..80: mol_type = other DNA
tgcacaagggcaaatggtacatcaggctttatcacctagaactttaaatgcttgggtgaaagtagtagaagaaaagggtt

SEQ ID NO: 78334 - DNA, 80 bp, synthetic construct
  source 1..80: mol_type = other DNA
gggcaagcagggagttggaaagattcgcacttaaccccggccttttagaatcagcggaaggatgtcaacaaataatagaa

SEQ ID NO: 78335 - DNA, 80 bp, synthetic construct
  source 1..80: mol_type = other DNA
aagccagcagcagcaaagtcagccaaaattaccctatagtgcaaaatgcacaagggcaaatgatacatcaggccatatca

SEQ ID NO: 78336 - DNA, 80 bp, synthetic construct
  source 1..80: mol_type = other DNA
cctagaactttgaatgcatgggtgaaagtagtagaagaaaagggttttaatccagaagtaatacccatgttctcagcatt

SEQ ID NO: 78337 - DNA, 80 bp, synthetic construct
  source 1..80: mol_type = other DNA
gcacagcaggaagcagctgccacaggaagcagcagccaaaattaccccatagtgcaaaatgcgcaagggcaaatgacaca

SEQ ID NO: 78338 - DNA, 80 bp, synthetic construct
  source 1..80: mol_type = other DNA
aagaacttaaatcattacataatacagtagcagtcctttggtgtgtacatcaaaggatagagataaaagacaccaaggaa

SEQ ID NO: 78339 - DNA, 80 bp, synthetic construct
  source 1..80: mol_type = other DNA
gccttagataaaatagaggaaatgcaaaataagagcaagcaaaaggcacagcaggcagcagctaacacaggaagctgcag

SEQ ID NO: 78340 - DNA, 80 bp, synthetic construct
  source 1..80: mol_type = other DNA
tcaaaattaccctatagtgcaaaatgcgcaagggcaaatgacacatcagagcatgtcacctagaactctgaatgcatggg

SEQ ID NO: 78341 - DNA, 80 bp, synthetic construct
  source 1..80: mol_type = other DNA
taaccctggccttttagaaacagcagaaggatgtcagcaaataatagaacagttacaatcagctctcaagacaggaacag

SEQ ID NO: 78342 - DNA, 80 bp, synthetic construct
  source 1..80: mol_type = other DNA
acagttacaaccaactctcaagacaggatcagaagaacttagatcattatttaatacagtagcagtcctttactgcgtac

SEQ ID NO: 78343 - DNA, 80 bp, synthetic construct
  source 1..80: mol_type = other DNA
aaatgacacaccagaacctgtcacctaggactttgaatgcatgggtgaaagtaatagaagaaaaaggttcagcccagaag

SEQ ID NO: 78344 - DNA, 80 bp, synthetic construct
  source 1..80: mol_type = other DNA
gggcccagcagggagttggaaagattcgcaattaaccctggccttttagacacagcagaaggatgtcaacaaataataga

SEQ ID NO: 78345 - DNA, 80 bp, synthetic construct
  source 1..80: mol_type = other DNA
acaaccaactctaaggacaggatcagaagaacttaagtcattatataatacagtagcagtcctttattgcgtacatcaaa

SEQ ID NO: 78346 - DNA, 80 bp, synthetic construct
  source 1..80: mol_type = other DNA
aaatgacacatcagaacatatcacctaggactttaaatgcatgggtgaaggtaatagaagaaaaggcttcagccccagaa

SEQ ID NO: 78347 - DNA, 80 bp, synthetic construct
  source 1..80: mol_type = other DNA
aacagaagaacttagatcattatataatacagtagcaaccctctattgtgtacataggaggatagagataaaagacacca

SEQ ID NO: 78348 - DNA, 80 bp, synthetic construct
  source 1..80: mol_type = other DNA
aggaggctttagataaaatagaggaaatacaaaataagagcaagcaaagcaagcaaaagacacagcaggcagcagctgac

SEQ ID NO: 78349 - DNA, 80 bp, synthetic construct
  source 1..80: mol_type = other DNA
acaggaaacagcaacaatgtcagtcaaaattaccccatagtgcaaaatgcacaagggcaaatggtacaccagtccatgtc

SEQ ID NO: 78350 - DNA, 80 bp, synthetic construct
  source 1..80: mol_type = other DNA
gcacttaaccctggccttttagaaacagcagaaggatgtcaacaaataatagaacaattacaatcagctctcgggacagg

SEQ ID NO: 78351 - DNA, 80 bp, synthetic construct
  source 1..80: mol_type = other DNA
tagaacagttacaatcaactctcaaaacaggatcagaagaacttaagtccttatacaatacagtagcagttctctattgc

SEQ ID NO: 78352 - DNA, 80 bp, synthetic construct
  source 1..80: mol_type = other DNA
aaatggtacatcaggccatatcacctaggactttgaatgcatgggtaaaagcaatagaagaaaaggccttaatccagagg

SEQ ID NO: 78353 - DNA, 80 bp, synthetic construct
  source 1..80: mol_type = other DNA
taagacagctacaaccatcccttcagacaggatcagaagagcttagatcattgttcaatacagtagcagttctctattgt

SEQ ID NO: 78354 - DNA, 80 bp, synthetic construct
  source 1..80: mol_type = other DNA
gtacatcaaaagatagagataaaggacaccaaggaagctttagagaagttagaggaggaacaaaacaaaggtcagcaaaa

SEQ ID NO: 78355 - DNA, 80 bp, synthetic construct
  source 1..80: mol_type = other DNA
gacacagcaagcggcagctgacaaaggagtcagtcaaaattaccctatagtacaaaatcttcagggacagatggtacatc

SEQ ID NO: 78356 - DNA, 80 bp, synthetic construct
  source 1..80: mol_type = other DNA
tagtttggctaacagggagttagaacgatttgcagttgatcctggacttctagaaacaccagaaggctgtaagcaaataa

SEQ ID NO: 78357 - DNA, 80 bp, synthetic construct
  source 1..80: mol_type = other DNA
ggacaactacaaccatcccttcagacaggaacagaagagattaaatcattatataatacaatagcagttctctattatgt

SEQ ID NO: 78358 - DNA, 80 bp, synthetic construct
  source 1..80: mol_type = other DNA
cacagcaagcagcagctgacaaaggggtcagtcaaaattaccctatagtacagaatcatcaggggcaaatggtataccag

SEQ ID NO: 78359 - DNA, 80 bp, synthetic construct
  source 1..80: mol_type = other DNA
aatggtacaccagcctatctcacctagaactttaaatgcatgggtgaaagtaatagaagagaaggcttcagcccagaagt

SEQ ID NO: 78360 - DNA, 80 bp, synthetic construct
  source 1..80: mol_type = other DNA
ataggacaactacaaccagcccttcagacaggaacagaagagcttaaatcattacataatttagtagcagttctctattt

SEQ ID NO: 78361 - DNA, 80 bp, synthetic construct
  source 1..80: mol_type = other DNA
aaatggtacatcaggctctatcacccagaactttaaatgcatgggtaaaagtaatagaagataagaattcagcccagaag

SEQ ID NO: 78362 - DNA, 80 bp, synthetic construct
  source 1..80: mol_type = other DNA
aaacacagcaagcaacgtctgacaaagaggtcagtcgaaattaccctatagtacagaatcttcaagggcaaatggtacat

SEQ ID NO: 78363 - DNA, 80 bp, synthetic construct
  source 1..80: mol_type = other DNA
ttgagacagttgcaaccatctcttcagacaggaacagaggagcttagatcattatataatacagtagcaactctcttctg

SEQ ID NO: 78364 - DNA, 80 bp, synthetic construct
  source 1..80: mol_type = other DNA
gcaaccagctctccagacaggaacagaggagcttagatcattatataatgcagtagcagttctttattgtgttcatcaaa

SEQ ID NO: 78365 - DNA, 80 bp, synthetic construct
  source 1..80: mol_type = other DNA
ggatagatataaaagacaccaaagaagctgtagaagaagtggaaaagatacaaaagaaaagtcagaaaaagacacagcag

SEQ ID NO: 78366 - DNA, 80 bp, synthetic construct
  source 1..80: mol_type = other DNA
gcagcaaaggatgaaggaaacagcagactagtcagtcaaaattatcctatagtgcaaaatgcacaagggcaaatggtaca

SEQ ID NO: 78367 - DNA, 80 bp, synthetic construct
  source 1..80: mol_type = other DNA
cacagggagctgaaaagatttgcaatcaaccctggctttttagaaacagcagaaggttgtcaacaaatattggaacagtt

SEQ ID NO: 78368 - DNA, 80 bp, synthetic construct
  source 1..80: mol_type = other DNA
tgccacagttgcaaccagctatccaaacaggaacagaggagcttaaatctttatataatacagtagcagtcctctattgt

SEQ ID NO: 78369 - DNA, 80 bp, synthetic construct
  source 1..80: mol_type = other DNA
atcaaaggttagatataaaagacaccaaggaagccttagacaaaatagaggaaatacaaaataagagcaagcaaaaagca

SEQ ID NO: 78370 - DNA, 80 bp, synthetic construct
  source 1..80: mol_type = other DNA
ccacaggaagcagctagcacaagctgcagccaaaattaccctatagtgcaaaatgcacaagggcaaatgacacatcagaa

SEQ ID NO: 78371 - DNA, 80 bp, synthetic construct
  source 1..80: mol_type = other DNA
tattagaacagctacaaccagctcttaagacaggaacagaagaacttcaatcattacataatctgatagcagtcctctat

SEQ ID NO: 78372 - DNA, 80 bp, synthetic construct
  source 1..80: mol_type = other DNA
tgtgtacatcaaagaatagatgtaaaagataccaaggaagctttagaaaaggtagagaaaataaaaaagagccaagaacc

SEQ ID NO: 78373 - DNA, 80 bp, synthetic construct
  source 1..80: mol_type = other DNA
agcacagcaggcagcagttgataaaagacaagacagcaagatcagtcaaaattatcctatagtacagaatgcccaagggc

SEQ ID NO: 78374 - DNA, 80 bp, synthetic construct
  source 1..80: mol_type = other DNA
aaatgacacaccaggccctatcacctaggaccttaaatgcatgggtaaaagtagtggaagaaaaggcttttagcccagaa

SEQ ID NO: 78375 - DNA, 80 bp, synthetic construct
  source 1..80: mol_type = other DNA
tatagtatgggcaagcagggagctggacagatttgcacttaaccctggccttatggaaacatcagaaggctgtctacaaa

SEQ ID NO: 78376 - DNA, 80 bp, synthetic construct
  source 1..80: mol_type = other DNA
tagtatgggttagcagggagctggagagatttgcacttaaccctggccttttagaaacaacagaaggttgtcaacaaata

SEQ ID NO: 78377 - DNA, 80 bp, synthetic construct
  source 1..80: mol_type = other DNA
acacatcagggcatgtcacctaggaccttgaatgcatgggtaaaagtaatagaagaaaaggcttcagcccagaagtatac

SEQ ID NO: 78378 - DNA, 80 bp, synthetic construct
  source 1..80: mol_type = other DNA
tgtacatcagagaataaaggtactagacaccaaagaagctgtagaggaagtggaaaaattacaaaagaaaagtcagaaaa

SEQ ID NO: 78379 - DNA, 80 bp, synthetic construct
  source 1..80: mol_type = other DNA
agacacagcaggcagatgaaggaaacaacagccaagtcagccaaaattatcctatagtacaaaatgcacaagggcaaatg

SEQ ID NO: 78380 - DNA, 80 bp, synthetic construct
  source 1..80: mol_type = other DNA
gtacatgaaaagatagaggtaaaggacacaaaggaagctttagaaaagatagaggaagaacaaaacaaaagtaagaaaaa

SEQ ID NO: 78381 - DNA, 80 bp, synthetic construct
  source 1..80: mol_type = other DNA
ctacaaccagctcttaagacaggatcaaaggaacttatatcactacataatacagtagcaaccctctattgtgtacatca

SEQ ID NO: 78382 - DNA, 80 bp, synthetic construct
  source 1..80: mol_type = other DNA
aaagatagaggtaagagataccaaggaagcgttagacaaaatagaggaagaacaaaacaaaagtaagaaaaaagcacagc

SEQ ID NO: 78383 - DNA, 80 bp, synthetic construct
  source 1..80: mol_type = other DNA
aagcagcagctgacacaggaaacaacagccaggtcagccaaaattatcctatagtgcagaacttacaagggcaaatggta

SEQ ID NO: 78384 - DNA, 80 bp, synthetic construct
  source 1..80: mol_type = other DNA
ccagcagggagctggaaagatttgcacttgaccctggccttttagagacatcagacggctgtaaacaaataatacaacag

SEQ ID NO: 78385 - DNA, 80 bp, synthetic construct
  source 1..80: mol_type = other DNA
aagcacagcaagcagcagctgccacaggaagcagcagccaggtcagccaaaattaccgtatagtgcagaatttacagggg

SEQ ID NO: 78386 - DNA, 80 bp, synthetic construct
  source 1..80: mol_type = other DNA
aaccatcccttcaaacaggaacagaagagcttaaatcattatataatacagtagcagttctctattatgtacatcaaaag

SEQ ID NO: 78387 - DNA, 80 bp, synthetic construct
  source 1..80: mol_type = other DNA
tggtataccaatctctatcacctagaactttaaatgcatgggtaaaagtgatagaagagaaggctttagcccagaggtat

SEQ ID NO: 78388 - DNA, 80 bp, synthetic construct
  source 1..80: mol_type = other DNA
atagatataagagacaccaaggaagctttagataagctagaggaagaacaaggcaaaagtcagcaaaaaacacaacaagc

SEQ ID NO: 78389 - DNA, 80 bp, synthetic construct
  source 1..80: mol_type = other DNA
agcagctgacaaaggggtcagtcaaaattaccctatagtacagaatcatcaggggcaaatggtataccaatctctatcac

SEQ ID NO: 78390 - DNA, 80 bp, synthetic construct
  source 1..80: mol_type = other DNA
cagggagttagaacgatttgcacttaatcctggccttttagagacaacagaaggttgtaaacgaataatgggacaactac

SEQ ID NO: 78391 - DNA, 80 bp, synthetic construct
  source 1..80: mol_type = other DNA
gacacaggaaacaacagccaggtcagccaaaattaccctatagtgcagaacatccaggggcaaatggtacatcagcccat

SEQ ID NO: 78392 - DNA, 80 bp, synthetic construct
  source 1..80: mol_type = other DNA
aaaagaccgccagggaagctttagataagatagaggaagagcaaaacagagctaagaaaaaggcacagcaagcagcagct

SEQ ID NO: 78393 - DNA, 80 bp, synthetic construct
  source 1..80: mol_type = other DNA
tcaactcttaaaacaggatcagaagagcttaagtccttatataatacagtagcagttctctattgcgtacatcaaaggat

SEQ ID NO: 78394 - DNA, 80 bp, synthetic construct
  source 1..80: mol_type = other DNA
cagctgacacaggaagcagcagcaatgtcagccagaattaccccatagtgcaaaatgcacaagggcaaatggtacaccag

SEQ ID NO: 78395 - DNA, 80 bp, synthetic construct
  source 1..80: mol_type = other DNA
gggagctggaaagatttgcaatcaaccctggcctcttagaaacagcaggaggatgtcaacaaataatagaacagttacaa

SEQ ID NO: 78396 - DNA, 80 bp, synthetic construct
  source 1..80: mol_type = other DNA
acaggatcagaagaacttagatcattacataacacaatagcagtcctctattgcgtacatcaaaggatagatgtaaaaga

SEQ ID NO: 78397 - DNA, 80 bp, synthetic construct
  source 1..80: mol_type = other DNA
caccaaggaagctctagataaaatagaggaactacaaaagaaaagccagcaaaagacacagcaaacagcagctgacacag

SEQ ID NO: 78398 - DNA, 80 bp, synthetic construct
  source 1..80: mol_type = other DNA
gaagatcgcacttaacctgccctttagaaacagcagaggggtgtcaacaagcaatagaacagatacaaccagctctcagg

SEQ ID NO: 78399 - DNA, 80 bp, synthetic construct
  source 1..80: mol_type = other DNA
cgtacaccaaaggatagaggtaaaagacaccaaagaagccttagataaaatagaggaaatgcaaaataagagcaagcaga

SEQ ID NO: 78400 - DNA, 80 bp, synthetic construct
  source 1..80: mol_type = other DNA
gtactggaacagttacaatcaactctaaagacagggtcagaagaacttaaatcattatttaatacaatagcagtcctcta

SEQ ID NO: 78401 - DNA, 80 bp, synthetic construct
  source 1..80: mol_type = other DNA
cacaggaagctgcagccaaaattaccctatagtgcaaaatgcacaggggcaaatggtacatcagagacatcatcccctag

SEQ ID NO: 78402 - DNA, 80 bp, synthetic construct
  source 1..80: mol_type = other DNA
ttgtgtacatcaaagggtagatataaaagacaccaaggaagccttagataaaatagaggaaatacaaaataagagtaagc

SEQ ID NO: 78403 - DNA, 80 bp, synthetic construct
  source 1..80: mol_type = other DNA
gagtagtatgggcaagcagggagctggaaaggttcgcgcttaaccctggccttttagaaacagcagaaggatgccaacaa

SEQ ID NO: 78404 - DNA, 80 bp, synthetic construct
  source 1..80: mol_type = other DNA
acaaccatcccttcagacaggatcagaagagcttaaatcattatataatttagtagtagttctctattttgtacatcgaa

SEQ ID NO: 78405 - DNA, 80 bp, synthetic construct
  source 1..80: mol_type = other DNA
agatagatgtaagagacaccaatgaagctttagataagctaaaggaagaacaagccaaaagtcagccaaaaacacagcaa

SEQ ID NO: 78406 - DNA, 80 bp, synthetic construct
  source 1..80: mol_type = other DNA
gcaacggctgaccaaggggtcagtcaaaattaccctatagtacagaatcttcaggggcaaatggtacaccaggctctatc

SEQ ID NO: 78407 - DNA, 80 bp, synthetic construct
  source 1..80: mol_type = other DNA
cacagggagctagaacgatttgcagttaatcctggccttttagaaacaccagaaggctgtaaacaaataataagacaact

SEQ ID NO: 78408 - DNA, 80 bp, synthetic construct
  source 1..80: mol_type = other DNA
atagaacagttagaatccactctcaagtcaggatcagaagaattgaaatcattattcaatgcagtagcagtcctttggtg

SEQ ID NO: 78409 - DNA, 80 bp, synthetic construct
  source 1..80: mol_type = other DNA
aggctccgcaggcagcagctggcgcaagctgcagccaaaattaccctatagtgcaaaatgcacaagggcaaatggtacat

SEQ ID NO: 78410 - DNA, 80 bp, synthetic construct
  source 1..80: mol_type = other DNA
atggtacaccaggctgtatcaccaagaactttgaatgcatgggtgaaagtagtagaagaaaaggcttcagcccagaagta

SEQ ID NO: 78411 - DNA, 80 bp, synthetic construct
  source 1..80: mol_type = other DNA
ggatagaggtaaaagacaccaaagaggctttagataaagtagaggaaatacaaaataagagcaagcaaaagaaacagcag

SEQ ID NO: 78412 - DNA, 80 bp, synthetic construct
  source 1..80: mol_type = other DNA
agcagctggcacaggctgcagccaaaattaccctatagtgcaaaatgcacaagggcaaatgacacatcagaacatgtcac

SEQ ID NO: 78413 - DNA, 80 bp, synthetic construct
  source 1..80: mol_type = other DNA
acacagcaggcagcagctggcacaggaagtagcagcacagtcagccaaaattaccctataatacagaatgcacaagggca

SEQ ID NO: 78414 - DNA, 80 bp, synthetic construct
  source 1..80: mol_type = other DNA
aatggcacataatcctttatcacctagaactttgaatgcatgggtgaaggtagtagaagaaaagggtttaacccagaagt

SEQ ID NO: 78415 - DNA, 80 bp, synthetic construct
  source 1..80: mol_type = other DNA
gtatgggccagcagggagctagaaagattcgcacttaaccctggtctcttagaaacagcagaaggatgtcagcaaataat

SEQ ID NO: 78416 - DNA, 80 bp, synthetic construct
  source 1..80: mol_type = other DNA
atacaaaagaagagcaagcaaaagacccagcaggcagcggtggcccaggaagcacagcagtgtcagccaaaattagggat

SEQ ID NO: 78417 - DNA, 80 bp, synthetic construct
  source 1..80: mol_type = other DNA
ttgtgtacatcagcggatagatgtaagagacaccaaggaagctttaggcaaaatagaggagatacaaaagaagagcaagc

SEQ ID NO: 78418 - DNA, 80 bp, synthetic construct
  source 1..80: mol_type = other DNA
aaccagctctccagacaggatcagaggagcttaaatcattatttaatacagtagcaaccctctattgtgtacatcaaagg

SEQ ID NO: 78419 - DNA, 80 bp, synthetic construct
  source 1..80: mol_type = other DNA
atagaggtaagagataccaaagaagctctagatgaagtggagaaaatgcaaaagaaaagtcagcaaaaaacacagcaggc

SEQ ID NO: 78420 - DNA, 80 bp, synthetic construct
  source 1..80: mol_type = other DNA
agcaaaggacgaaggaaacagcaaccaagtcagtcaaaattatcctatagtgcagaatgcacaagggcaaatgatacacc

SEQ ID NO: 78421 - DNA, 80 bp, synthetic construct
  source 1..80: mol_type = other DNA
cagggaactggagagatttgcacttaaccctggccttttagaaacagcagaaggttgtcaacaaataatgagacagttgc

SEQ ID NO: 78422 - DNA, 80 bp, synthetic construct
  source 1..80: mol_type = other DNA
caacacaccagaacttgtcaccgaggactttgaatgcatgggtaaaagtaatagaagaaaaggcttcagcccagaagtat

SEQ ID NO: 78423 - DNA, 80 bp, synthetic construct
  source 1..80: mol_type = other DNA
gcagcagctgacccagaaaacagtagcaaggtcagtcaaaattaccctatagtgcaaaatgcacagggacagccaacaca

SEQ ID NO: 78424 - DNA, 80 bp, synthetic construct
  source 1..80: mol_type = other DNA
ttgcaaccatctctccagacaggaacagaagagcttaaatcattatttaatgcagtagcagtcctctattgtgtacataa

SEQ ID NO: 78425 - DNA, 80 bp, synthetic construct
  source 1..80: mol_type = other DNA
gaggatagagataaaagacaccaaagaagccttagaggaagtggagaaggcacaaaagaacagtcagcaaaaaacacagc

SEQ ID NO: 78426 - DNA, 80 bp, synthetic construct
  source 1..80: mol_type = other DNA
aggcagcaagtgctgcaggaaacagcaaacaagtcagtcaaaattatcctatagtgcagaatgcacaagggcaaatggta

SEQ ID NO: 78427 - DNA, 80 bp, synthetic construct
  source 1..80: mol_type = other DNA
caagcagggaactggagagatttgcacttaaccctggccttttagaaacaacagaaggttgtcaacagatattgagccag

SEQ ID NO: 78428 - DNA, 80 bp, synthetic construct
  source 1..80: mol_type = other DNA
tggtacatcaggctttatcacctagaactttaaatgcatgggtgaaagtagtagaagaaaagggtttaacccagaagtat

SEQ ID NO: 78429 - DNA, 80 bp, synthetic construct
  source 1..80: mol_type = other DNA
gcagcagctggcacaggaagtagtagcatagccagccaaaattaccctataatacaaaatgcacaagggcaaatggtaca

SEQ ID NO: 78430 - DNA, 80 bp, synthetic construct
  source 1..80: mol_type = other DNA
cacagggagttggaaagattcgcacttaacccgggccttttagaatcagcggaaggatgtcaacaaataatagaacagtt

SEQ ID NO: 78431 - DNA, 80 bp, synthetic construct
  source 1..80: mol_type = other DNA
atgggacagttacaaccagctctccagacaggaacagaagaaatgagatcattatttaatacaatagcaaccctatattg

SEQ ID NO: 78432 - DNA, 80 bp, synthetic construct
  source 1..80: mol_type = other DNA
cgtgcatcaaaagatagaggtaaaggacaccaaggaagcgttagacaaaatagaggaaatccaaaagaagggtaaacaac

SEQ ID NO: 78433 - DNA, 80 bp, synthetic construct
  source 1..80: mol_type = other DNA
cagcagaaggatgtcaacaactaatggaacagttacaatcaactctcaagacaggatcagaagaagttagatcattattt

SEQ ID NO: 78434 - DNA, 80 bp, synthetic construct
  source 1..80: mol_type = other DNA
aatacactagcagtcctttggtgcgtacatcaaagggtagatataaaagacaccaaggaagccttagataaaatagagga

SEQ ID NO: 78435 - DNA, 80 bp, synthetic construct
  source 1..80: mol_type = other DNA
aatgcaaaataagagcaagcaaaaggcacagcaggcagcagcagctggcacaagctgcagtcaaaattaccctatagtgc

SEQ ID NO: 78436 - DNA, 80 bp, synthetic construct
  source 1..80: mol_type = other DNA
gaaaaaatatagactaaaacatcctgtatgggcaagcagggagttggaaagattcgcactcaaccctggccttttagaaa

SEQ ID NO: 78437 - DNA, 80 bp, synthetic construct
  source 1..80: mol_type = other DNA
acgtctgacaaaaaggtcagtcaaaattaccctatagtacagaatcttcaagggcaaatggtacatcaggctctatcacc

SEQ ID NO: 78438 - DNA, 80 bp, synthetic construct
  source 1..80: mol_type = other DNA
gcaaataatagaacagttacaatcagctatcaagacaggaacagaagaacttaaatcattatataatacagtagcagtcc

SEQ ID NO: 78439 - DNA, 80 bp, synthetic construct
  source 1..80: mol_type = other DNA
ttttgtgtgtacaccaaaggatggacataaaagacaccaaggaagctttagataaattagaggaaatacaaaataagagc

SEQ ID NO: 78440 - DNA, 80 bp, synthetic construct
  source 1..80: mol_type = other DNA
aagcaacaagcacagcaggcagcaactggcacaggaagctgcagccaaaattaccctatagtgcaaaatgcacaagggca

SEQ ID NO: 78441 - DNA, 80 bp, synthetic construct
  source 1..80: mol_type = other DNA
gagcatctagtatgggcaagcagggagctggaaaaatttgcacttaaccctggccttttagaaacagcagagggatgtca

SEQ ID NO: 78442 - DNA, 80 bp, synthetic construct
  source 1..80: mol_type = other DNA
ggtcaggtacagaagaacttagatcattatttaattcagtagcaatcctattttgtgtccatcaaagaataaatctaaaa

SEQ ID NO: 78443 - DNA, 80 bp, synthetic construct
  source 1..80: mol_type = other DNA
gacaccaatgaggctttcgataaaatagaggaattaaaaaagaagagcaagcaaaagagccagcaggcagcagctgaccc

SEQ ID NO: 78444 - DNA, 80 bp, synthetic construct
  source 1..80: mol_type = other DNA
aggaaacagtagcaaggtcagtcaaaattaccccatagtgcaaaatgcacagggacaaatgacacaccagaacttgtcac

SEQ ID NO: 78445 - DNA, 80 bp, synthetic construct
  source 1..80: mol_type = other DNA
caggttcgcggttagccttgcccttttagacacagcggaagggtgtcaacaaatatttgaacaattacaatcagctctcg

SEQ ID NO: 78446 - DNA, 80 bp, synthetic construct
  source 1..80: mol_type = other DNA
tgggacaaatacaaccagctctcaggacaggaacagaagaacttagatcattatataatacaatagcagtcctctattgc

SEQ ID NO: 78447 - DNA, 80 bp, synthetic construct
  source 1..80: mol_type = other DNA
gtacataatcggatagaggtaaaagacaccaaggaagccttagataaaatagaggaactacaaaataagagtaagcaaaa

SEQ ID NO: 78448 - DNA, 80 bp, synthetic construct
  source 1..80: mol_type = other DNA
gacacagcaggcagcagctgacacaggagccacaggagccagcagcacggtcagccaaaattaccccatagtgcaaaatg

SEQ ID NO: 78449 - DNA, 80 bp, synthetic construct
  source 1..80: mol_type = other DNA
tgtacatgaaaggatagaggtaaaggacaccaaggaagctttagaaaagatagaggaagaacaaaaaaaggcacagcaag

SEQ ID NO: 78450 - DNA, 80 bp, synthetic construct
  source 1..80: mol_type = other DNA
ggcacagttacaatcagctctcgggacaggaacagaagaacttaaatcattatataatacattagcaaccctttggtgtg

SEQ ID NO: 78451 - DNA, 80 bp, synthetic construct
  source 1..80: mol_type = other DNA
aataataagccagctacaaccagctgttaaaacaggatcagaaggacttaaatcattatataatacaatagcaacactct

SEQ ID NO: 78452 - DNA, 80 bp, synthetic construct
  source 1..80: mol_type = other DNA
acaggggcaaatggtacaccgaggaatatcgccttataagagggagccagcgattatcagaaggagagagcatatcagag

SEQ ID NO: 78453 - DNA, 80 bp, synthetic construct
  source 1..80: mol_type = other DNA
attgtgtacatgcaaggatagaggtaaaagacaccaaggaagctttagaaaagatagaggaagagcaaaacaaaagtaag

SEQ ID NO: 78454 - DNA, 80 bp, synthetic construct
  source 1..80: mol_type = other DNA
aaaaaagcacagcaagcagcagctgacacaggaaacagcagccaggtcagccaaaattatcctatagtacagaacttaca

SEQ ID NO: 78455 - DNA, 80 bp, synthetic construct
  source 1..80: mol_type = other DNA
tacaaccagctctcgggacaggaacagaagaaattagatcattatttaatacaatagcaaccctctattgtgtacataac

SEQ ID NO: 78456 - DNA, 80 bp, synthetic construct
  source 1..80: mol_type = other DNA
tggtacaccaggctatatcacctagaactttaaatgcatgggtaaaagtaatagaagaaaaagccttcatccagaagtat

SEQ ID NO: 78457 - DNA, 80 bp, synthetic construct
  source 1..80: mol_type = other DNA
cagataaagatacaggacaccaaggaggctttagataaaatagaggaaatacaaaataagagcaaacaaaagaaacagca

SEQ ID NO: 78458 - DNA, 80 bp, synthetic construct
  source 1..80: mol_type = other DNA
ggcagaagctgacacaggaaacaacaacaaggtcagtcaaaattaccccatagtgcaaaatgcgcaaggacaaatggtac

SEQ ID NO: 78459 - DNA, 80 bp, synthetic construct
  source 1..80: mol_type = other DNA
cagcagggagctggaaagatttgcacttaaccctagccttatggaaacaggaaaaggatgtcaacaaataatggagcaat

SEQ ID NO: 78460 - DNA, 80 bp, synthetic construct
  source 1..80: mol_type = other DNA
tacatcaacggatagaggtaaaagacaccaaggaagctttagataaaatagagaggatacaaaacaagagccagcaacag

SEQ ID NO: 78461 - DNA, 80 bp, synthetic construct
  source 1..80: mol_type = other DNA
attaataggacaaatgcaaccatcccttcagacaggatcagaagagcttaaatcattatataatacaatagtagttctct

SEQ ID NO: 78462 - DNA, 80 bp, synthetic construct
  source 1..80: mol_type = other DNA
atgcaagggcaaatggtacaccaggctttatcacctagaactttaaatgcatgggtaaaagtaatagaagagaaatctgc

SEQ ID NO: 78463 - DNA, 80 bp, synthetic construct
  source 1..80: mol_type = other DNA
attttgtacatcaaaggatagacgtaagagacaccaaggaagctttagataagctacaggaagaacaaagaaaaagtcag

SEQ ID NO: 78464 - DNA, 80 bp, synthetic construct
  source 1..80: mol_type = other DNA
caaaaagcacaacaagcagcggctgacaaagaggtcagtcaaaattaccctatagtacagaatatgcaagggcaaatggt

SEQ ID NO: 78465 - DNA, 80 bp, synthetic construct
  source 1..80: mol_type = other DNA
gagctagtatgggcaagcagggagttagaacgatttgcccttgatcctggccttttagagacaacagaaggctgtaaaaa

SEQ ID NO: 78466 - DNA, 80 bp, synthetic construct
  source 1..80: mol_type = other DNA
aatgcacaagggcaaatgacacatcagaacatatcacctaggactttaaatgcatgggtgaaggtaattaagaaaagtct

SEQ ID NO: 78467 - DNA, 80 bp, synthetic construct
  source 1..80: mol_type = other DNA
agaaaagatacagaagaacagtcagaaaaaacagcaggcagcaaaggatgaaggaaacaacaggcaagtcagccaaaatt

SEQ ID NO: 78468 - DNA, 80 bp, synthetic construct
  source 1..80: mol_type = other DNA
gagtatgtatgggcaagcagggagctggaaagatttgcactcaaccctggccttttagaaacaacagaaggttgtcagca

SEQ ID NO: 78469 - DNA, 80 bp, synthetic construct
  source 1..80: mol_type = other DNA
agacacagcaggcagcagctggcacagtcagccaaaattaccctataatgcaaaatgcacaagggcaaatggtacataat

SEQ ID NO: 78470 - DNA, 80 bp, synthetic construct
  source 1..80: mol_type = other DNA
acagctacaatcatcccttcagacaggaacagaagagcttaaatcattgtataacacaatagtagttctctattatgtac

SEQ ID NO: 78471 - DNA, 80 bp, synthetic construct
  source 1..80: mol_type = other DNA
atcaaaagatagatgtaagagacaccaaggaagctttagataagctacaggaagaacaaagcagaagtcagcaaaaaaca

SEQ ID NO: 78472 - DNA, 80 bp, synthetic construct
  source 1..80: mol_type = other DNA
caacaagcagcggctgacaaaggagtcagtcaaaattacctatagtacagaatcttcagggacaaatggtacaccagttc

SEQ ID NO: 78473 - DNA, 80 bp, synthetic construct
  source 1..80: mol_type = other DNA
gaggcaagcagggagctagaacgatttgcacttaatcctggccttttagaaacaacagaaggctgtagacaaataataag

SEQ ID NO: 78474 - DNA, 80 bp, synthetic construct
  source 1..80: mol_type = other DNA
cgtacatcggcagatagaggtaaaagacaccaaggaagctttagataaaatagaggaaatacaaaaagaaagcaagaaaa

SEQ ID NO: 78475 - DNA, 80 bp, synthetic construct
  source 1..80: mol_type = other DNA
atcaactatcaagacaggatcagaagaacttaaatcattatttaatacagtagcaaccctctattgtgtacatcaaggga

SEQ ID NO: 78476 - DNA, 80 bp, synthetic construct
  source 1..80: mol_type = other DNA
tagatgtaaaagacaccaaggaagctttagataaaatagaggagatacaaaataagagcaagcaaaagacacagcaggca

SEQ ID NO: 78477 - DNA, 80 bp, synthetic construct
  source 1..80: mol_type = other DNA
gcagctggcacaggaagcagcagcaataatgtcagcctaaattaccctatagtgcaaaatgcacaagggcacatggcaca

SEQ ID NO: 78478 - DNA, 80 bp, synthetic construct
  source 1..80: mol_type = other DNA
aaatgcagcaggcagaaaaggataaagagaaccacagccaagtcagtcaaaattatcctatagtgcagaatgcacaaggg

SEQ ID NO: 78479 - DNA, 80 bp, synthetic construct
  source 1..80: mol_type = other DNA
tagatataaaagacaccaaagaagctttagaggaagtggaaaagatacaaaagaaaagtcagcaaaaaatgcagcaggca

SEQ ID NO: 78480 - DNA, 80 bp, synthetic construct
  source 1..80: mol_type = other DNA
gaaaaggataaagagaaccacagccaagtcagtcaaaattatcctatagtgcagaatgcagaagggcaaatggtacatca

SEQ ID NO: 78481 - DNA, 80 bp, synthetic construct
  source 1..80: mol_type = other DNA
gcagcagctaccacaaccagcagcagcagccaaaattaccctataatgcaaaatgcacaagggcaaatgatacatcaggc

SEQ ID NO: 78482 - DNA, 80 bp, synthetic construct
  source 1..80: mol_type = other DNA
cacagggagctagaaagatttgcacttaaccctggtcttttagaaacagcagaaggatgtcaacaaataatagaacagct

SEQ ID NO: 78483 - DNA, 80 bp, synthetic construct
  source 1..80: mol_type = other DNA
aaatggtacatcaggctgtatcacctagaactttgaatgcataagtgaaagtagtagaagaaaaaggttaacccagaagt

SEQ ID NO: 78484 - DNA, 80 bp, synthetic construct
  source 1..80: mol_type = other DNA
gcagctggcgcaggaagtaacaacaaagtcagcctaaattaccctatagtgcaaaatgcacaagggcaaatggtacatca

SEQ ID NO: 78485 - DNA, 80 bp, synthetic construct
  source 1..80: mol_type = other DNA
ggtacataatcccttatcacctagaactttaaatgcatgggtaaaagcagtagtagagcaagtattcaaggagctcagcg

SEQ ID NO: 78486 - DNA, 80 bp, synthetic construct
  source 1..80: mol_type = other DNA
aggcagcagctgacacaggaaacagcagcaaggtcagccaaaattaccctatagtgcaaaatgcacaagggcaaatggta

SEQ ID NO: 78487 - DNA, 80 bp, synthetic construct
  source 1..80: mol_type = other DNA
caagcagggagctggaaagatttgcacttaaccccagccttttagaaacaacggaaggatgtcagcaaataatagaacag

SEQ ID NO: 78488 - DNA, 80 bp, synthetic construct
  source 1..80: mol_type = other DNA
aaggatgtcaacaactaatggaacagttacaatcagctctcaggacaggatcagaagaacttaaatcattatttaataca

SEQ ID NO: 78489 - DNA, 80 bp, synthetic construct
  source 1..80: mol_type = other DNA
atagcaaccctttggtgcgtacatcaaaggatagacataaaagacaccaaggaagccttagataaattagaggaaatgca

SEQ ID NO: 78490 - DNA, 80 bp, synthetic construct
  source 1..80: mol_type = other DNA
aaataagagcaaacaaaagacacagcagacagcagctgccgcaggaagcagcagccaaaattaccctatagtgcaaaacg

SEQ ID NO: 78491 - DNA, 80 bp, synthetic construct
  source 1..80: mol_type = other DNA
acaatcaactctaaagacaggatcagaagaacttaaatcattgtttaatacaatagcagtcctctattgcgtacaccaaa

SEQ ID NO: 78492 - DNA, 80 bp, synthetic construct
  source 1..80: mol_type = other DNA
agcagggagctggaaaggttcgcaattaaccctggcctgttagaaacaggggaaggatgtcaacaaataatggaacagtt

SEQ ID NO: 78493 - DNA, 80 bp, synthetic construct
  source 1..80: mol_type = other DNA
ataagacagctacaaccagctcttcagacaggaacagaagaacttagatcactatataatacagtagcaactctctattg

SEQ ID NO: 78494 - DNA, 80 bp, synthetic construct
  source 1..80: mol_type = other DNA
tgtacatgcagggataaaggtacaagacaccaaggaagcattagacaaaatagaggaagaacaaaacaaatgtcagcaaa

SEQ ID NO: 78495 - DNA, 80 bp, synthetic construct
  source 1..80: mol_type = other DNA
aaacacagaaggcagaagaagctgacaaaggaaaggtcagccaaaactatcctatagtacagaatctccaagggcaaatg

SEQ ID NO: 78496 - DNA, 80 bp, synthetic construct
  source 1..80: mol_type = other DNA
agaagaacttaaatcattatttaatacaatagtaaccctctggtgcgtacaccagaggatagaggtaaaagacaccaagg

SEQ ID NO: 78497 - DNA, 80 bp, synthetic construct
  source 1..80: mol_type = other DNA
aagctttagataaaatagaggaagtacaaaataagagccagcaaaagacacagcaggcagcagctggcacaggaagcagc

SEQ ID NO: 78498 - DNA, 80 bp, synthetic construct
  source 1..80: mol_type = other DNA
agcaaagtcagccaaaattaccctatagtgcaaaatgcacaagggcaaatggtacaccagcctttatcacctaggacttt

SEQ ID NO: 78499 - DNA, 80 bp, synthetic construct
  source 1..80: mol_type = other DNA
ttaatccctggccttttagaaacagcagaaggatgtcaacaaatcatagaacagttacagtcaactttcaagacaggatc

SEQ ID NO: 78500 - DNA, 80 bp, synthetic construct
  source 1..80: mol_type = other DNA
ctggggcagctacatccagcccttcagacaggatcagaagaacttagatcattatataatacagtagcaaccctctattg

SEQ ID NO: 78501 - DNA, 80 bp, synthetic construct
  source 1..80: mol_type = other DNA
tgtgcatcaagggatagatgtaaaagacaccaaggaagctttagacaagatagaggaagagcaaaacaaaagtaagaaaa

SEQ ID NO: 78502 - DNA, 80 bp, synthetic construct
  source 1..80: mol_type = other DNA
aagcacaacaagcagcagctgcaacagctgacacaggaaaaaacagtcaggtcagccaaaattaccctatagtacagaac

SEQ ID NO: 78503 - DNA, 80 bp, synthetic construct
  source 1..80: mol_type = other DNA
tagtatgggcaagcagggagctagcacgattcgcagtcaaccccggcctgttagaaacatcagaaggctgtagacaaata

SEQ ID NO: 78504 - DNA, 80 bp, synthetic construct
  source 1..80: mol_type = other DNA
agagcttaaatcattatttaatgcagtagcagtcctctattttgtacatcaaaaagtagaggtaaaggacaccaaggaag

SEQ ID NO: 78505 - DNA, 80 bp, synthetic construct
  source 1..80: mol_type = other DNA
aatggtacaccagcctatatcacctagaactttaaatgcatgggtaaaggtgatagaagaaaaggcttttagtccagaaa

SEQ ID NO: 78506 - DNA, 80 bp, synthetic construct
  source 1..80: mol_type = other DNA
ctttagagaagttagaagaagaacaaaacaaaagtcagcaaaaggcacagcaagcggcagctaataaagaggtcagtcaa

SEQ ID NO: 78507 - DNA, 80 bp, synthetic construct
  source 1..80: mol_type = other DNA
aattaccctatagtacaaaatcttcagggacaaatggtacaccagcctatatcacctagaactttaaatgcatgggtaaa

SEQ ID NO: 78508 - DNA, 80 bp, synthetic construct
  source 1..80: mol_type = other DNA
taccctggccttctagaaacatcagaaggctgcaaaaagataatagcacagctacaaccatcctatcagacaggatcaga

SEQ ID NO: 78509 - DNA, 80 bp, synthetic construct
  source 1..80: mol_type = other DNA
aagaaatacaatcattatttaatttgttagcagtcctctattgcgtacaccaaagaatagatgtaaaagacacccaggaa

SEQ ID NO: 78510 - DNA, 80 bp, synthetic construct
  source 1..80: mol_type = other DNA
gctgtaaagaagatagaggaaatacaacataagaaccagaaagaagcacagcaggtaacagctgaaaaggaaaaggatag

SEQ ID NO: 78511 - DNA, 80 bp, synthetic construct
  source 1..80: mol_type = other DNA
caagatcagtcaaaattatcctatagtacagaatgcccaagggcaaatggtacatcaggccctatcacctagaactttaa

SEQ ID NO: 78512 - DNA, 80 bp, synthetic construct
  source 1..80: mol_type = other DNA
ttaccccggccttttagaaacatcggaaggctgtctacaaggaatagaacagctacaaccagctcttaagacaggaacag

SEQ ID NO: 78513 - DNA, 80 bp, synthetic construct
  source 1..80: mol_type = other DNA
gctctagataaaatagaggaaatacaaaataagagcaagcaacagacacaacaggcagcggctgacacaggaagcagcaa

SEQ ID NO: 78514 - DNA, 80 bp, synthetic construct
  source 1..80: mol_type = other DNA
agtcagccaaaattaccctatagtgcaaaatgcacaagggcaaatgatacatcagtctatgtcacctaggaccttgaatg

SEQ ID NO: 78515 - DNA, 80 bp, synthetic construct
  source 1..80: mol_type = other DNA
ttaccctagccttttagagacaacagcaggatgtcaacaaataatggaacagttacaaccagctctcaagacaggaacag

SEQ ID NO: 78516 - DNA, 80 bp, synthetic construct
  source 1..80: mol_type = other DNA
aagaacttagatcattatataatacagtagcaaccctctattgtgtacatgaaaagatagaggtgaaagacaccaaggaa

SEQ ID NO: 78517 - DNA, 80 bp, synthetic construct
  source 1..80: mol_type = other DNA
gtacaccaggccatatcacctagaactttgaacgcatgggtaaaagtagtagaagaaaaggcttcagcccggaagaattt

SEQ ID NO: 78518 - DNA, 80 bp, synthetic construct
  source 1..80: mol_type = other DNA
gccttagacaagatagaggaagaacaaaacaaaagtaagggaaaaaaggcacagcaagcagaagctggcacagggaacag

SEQ ID NO: 78519 - DNA, 80 bp, synthetic construct
  source 1..80: mol_type = other DNA
ttatcctggccttttagagacatcagaaggctgtaaacaaataataggacagctacaaccagctattaagacaggatcag

SEQ ID NO: 78520 - DNA, 80 bp, synthetic construct
  source 1..80: mol_type = other DNA
agctttagaaaggatagaggaagaacaaaacaaaagtaagaaaaaagcacaacaagcagcagctgacacaggaaacagta

SEQ ID NO: 78521 - DNA, 80 bp, synthetic construct
  source 1..80: mol_type = other DNA
accaggtcagccaaaattatcctatagtacagaacctacaagggcagatggtacaccaggccctatcacctagaactttg

SEQ ID NO: 78522 - DNA, 80 bp, synthetic construct
  source 1..80: mol_type = other DNA
tcaatcctggccttttagaaacatcagaaggttgtagacaactaatgggacagctgcaaccggctgttaagacaggatca

SEQ ID NO: 78523 - DNA, 80 bp, synthetic construct
  source 1..80: mol_type = other DNA
aggcacagcaagcagcagctgacacaggaaacaacagccaggtcagccaaaattaccctatagtgcaaaacatccagggg

SEQ ID NO: 78524 - DNA, 80 bp, synthetic construct
  source 1..80: mol_type = other DNA
caaatggtacatcagcccatatcacctagaactttaaatgcatgggtaaaggtagtagaagagaaagcttcagcccagaa

SEQ ID NO: 78525 - DNA, 80 bp, synthetic construct
  source 1..80: mol_type = other DNA
tgtacatctaagaatagatataagagacaccaaggaagctttagataaaatagaggagatacaaaaaaggagcaagcaaa

SEQ ID NO: 78526 - DNA, 80 bp, synthetic construct
  source 1..80: mol_type = other DNA
agacacagcaggcagcagctgacacaggaagtagcagcggccaagtcagccaaaattaccccatagtgcaaaatgcacaa

SEQ ID NO: 78527 - DNA, 80 bp, synthetic construct
  source 1..80: mol_type = other DNA
gggcaaatggtacatcagcccatatcccctagaaccttaaatgcatgggtaaaagcagtagaagaaaaagccttcatcca

SEQ ID NO: 78528 - DNA, 80 bp, synthetic construct
  source 1..80: mol_type = other DNA
tagtatgggcaagcagggagctggaaagattcgcacttaacccctgccttttagaaaatgcagaaggctgtcaacaaata

SEQ ID NO: 78529 - DNA, 80 bp, synthetic construct
  source 1..80: mol_type = other DNA
agaagaaattaaatcattatataatacagtagcaaccctctattgtgtacatcaaaggatagatgtaaaagacaccaagg

SEQ ID NO: 78530 - DNA, 80 bp, synthetic construct
  source 1..80: mol_type = other DNA
atggtacagctacaaccagctcttcagacaggaacagaagaaattaaatccttatataatacagtagcaaccctctattg

SEQ ID NO: 78531 - DNA, 80 bp, synthetic construct
  source 1..80: mol_type = other DNA
aggcacaacaagcagcagctggcacaggaagcagcagccaggtcagccaaaattatcctatagtacagaacctacaaggg

SEQ ID NO: 78532 - DNA, 80 bp, synthetic construct
  source 1..80: mol_type = other DNA
caaatggtacaccaggccatatcacctagaactttgaacgcatgggtaaaagtaatagaagaaaaggccttagcccagaa

SEQ ID NO: 78533 - DNA, 80 bp, synthetic construct
  source 1..80: mol_type = other DNA
aagccttagataaaatagaggaaattcaaaataagagcaagcaacagacgcagcaggcagccgctggcaccggaagcagc

SEQ ID NO: 78534 - DNA, 80 bp, synthetic construct
  source 1..80: mol_type = other DNA
cttaaccctggcctattagaatcagcagaaggatgtcaacaactaatggaacagttacaagcaagtctcaggacaggatc

SEQ ID NO: 78535 - DNA, 80 bp, synthetic construct
  source 1..80: mol_type = other DNA
atggaacaattacaaccagctctcaagacaggaacagaagaagttacgtcattatttaattcagtagcaaccctctattg

SEQ ID NO: 78536 - DNA, 80 bp, synthetic construct
  source 1..80: mol_type = other DNA
tgtacatcaaagaatagatgtaaaagacaccaaggaagctctcgataaaatagaggaaatacaaaataagagcaagcaaa

SEQ ID NO: 78537 - DNA, 80 bp, synthetic construct
  source 1..80: mol_type = other DNA
caaatgatataccaggctgtatcacctagaactttgaatgcatgggtaaaagcaatagaagaaaaggcttcagcccagaa

SEQ ID NO: 78538 - DNA, 80 bp, synthetic construct
  source 1..80: mol_type = other DNA
aggcccagcaggcagcagctgacacagggaacagcagcaacagcaaagtcagccaaaatgtcagccaaaattaccctata

SEQ ID NO: 78539 - DNA, 80 bp, synthetic construct
  source 1..80: mol_type = other DNA
gtgcaaaatgcacaagggcaaatgatataccaggctgtatcacctagaactttgaatgcatgggtaaaagcaatagaaga

SEQ ID NO: 78540 - DNA, 80 bp, synthetic construct
  source 1..80: mol_type = other DNA
tagtatgggcaagcagggaggcggaaagggtggcacttaaccctagccttttagaaacagcagaaggatgtcagcaaata

SEQ ID NO: 78541 - DNA, 80 bp, synthetic construct
  source 1..80: mol_type = other DNA
atagaacagttacaatcaactatcaggacaggatcagaggagcttaaatcattatataatacagtagcaaccctttggtg

SEQ ID NO: 78542 - DNA, 80 bp, synthetic construct
  source 1..80: mol_type = other DNA
tgtacatcaaaggatggaggtaagagacaccaaggaagccttagataaaatagaggaagtacaaaagaggagcaaacaaa

SEQ ID NO: 78543 - DNA, 80 bp, synthetic construct
  source 1..80: mol_type = other DNA
tagtattagcaagcagggagctggaaagattagcagttaaacctggcctcttagaatcagcagaaggaggtcaacaaata

SEQ ID NO: 78544 - DNA, 80 bp, synthetic construct
  source 1..80: mol_type = other DNA
caaatgatacaccagtccgtgtcacctaggactttgaatgcatgggtaaaagtaatagaggaaaaggcttttagcccaga

SEQ ID NO: 78545 - DNA, 80 bp, synthetic construct
  source 1..80: mol_type = other DNA
gtatgggcaagcagggagctagatcgattcgcacttgactctggcctattagaaacatcaggaggctgtagacaaataat

SEQ ID NO: 78546 - DNA, 80 bp, synthetic construct
  source 1..80: mol_type = other DNA
tacaccagtccttatcacctaggaccttgaatgcatgggtaaaagtaatagaagaaaaggcttcagcccagaagtatttc

SEQ ID NO: 78547 - DNA, 80 bp, synthetic construct
  source 1..80: mol_type = other DNA
gatagaggtaaaagacaccaaggaagctttagaaaagatagagaaagaacaaaataaaagcaagggaaaggcacagcaaa

SEQ ID NO: 78548 - DNA, 80 bp, synthetic construct
  source 1..80: mol_type = other DNA
caacagctgactcaggaaacaacagacaggtcagccaaaattaccctatagtgcaaaatgcacaagggcaaatggtacac

SEQ ID NO: 78549 - DNA, 80 bp, synthetic construct
  source 1..80: mol_type = other DNA
caaccagctattaaaacaggaacagaagaacttaaatcattatataatacagtagcaaccctctattgtgtacatgaaag

SEQ ID NO: 78550 - DNA, 80 bp, synthetic construct
  source 1..80: mol_type = other DNA
actggaacagttacaaccaactctcaggacagggtcagaagaagttaaatcattatataatacaatagcaaccctttggt

SEQ ID NO: 78551 - DNA, 80 bp, synthetic construct
  source 1..80: mol_type = other DNA
attggcacagctacagccatcccttcagacaggatcagaagaacttaaatcattatggaatacagtagcagtcctctatt

SEQ ID NO: 78552 - DNA, 80 bp, synthetic construct
  source 1..80: mol_type = other DNA
gtgtacatcaaaggatagaggtgaaagacaccaaggaagcagtagagaaggtagaggaagagcaaaacaaaagtaagaaa

SEQ ID NO: 78553 - DNA, 80 bp, synthetic construct
  source 1..80: mol_type = other DNA
aaggcacagcctgcggcagctgctgctgcaggaaacagcagccaagtcagccaaaattaccctatagtgcagaaccttca

SEQ ID NO: 78554 - DNA, 80 bp, synthetic construct
  source 1..80: mol_type = other DNA
agtagcaaccctctattgtgtacatcaaaggataaaagtagcagacaccaaagaagctttagataaaatagaggaaatac

SEQ ID NO: 78555 - DNA, 80 bp, synthetic construct
  source 1..80: mol_type = other DNA
aaaataagagcaagcaaaaggcaaaggagacagcagctgccacagggaacagcagtaatatcagtcaaaatttccccata

SEQ ID NO: 78556 - DNA, 80 bp, synthetic construct
  source 1..80: mol_type = other DNA
gtgcaaaatgcacaagggcaaatggtacatcaggccatgtcaccaagaactttaaatgcatgggtgaaagtaatagaaga

SEQ ID NO: 78557 - DNA, 80 bp, synthetic construct
  source 1..80: mol_type = other DNA
tgatataccagtccatgtcacctagaactttgaatgcatgggtaaaagtaatagaagaaaaggctttcagcccagaagta

SEQ ID NO: 78558 - DNA, 80 bp, synthetic construct
  source 1..80: mol_type = other DNA
cagcagctgacacaagaacaagcagcacagtcagccaaaattaccctatagtgcaaaatgcacaaggacaaatgatatac

SEQ ID NO: 78559 - DNA, 80 bp, synthetic construct
  source 1..80: mol_type = other DNA
aatcaagtcttgagacaggatcagaagaaattagatcattatataatacagtagcagtcctctattgtgtacatcaaaag

SEQ ID NO: 78560 - DNA, 80 bp, synthetic construct
  source 1..80: mol_type = other DNA
atggtacatcaagctatatcacctagaacattaaatgcatgggtaaaagtaatagaggagaaatcttcagcccagaagta

SEQ ID NO: 78561 - DNA, 80 bp, synthetic construct
  source 1..80: mol_type = other DNA
atagaggtaaaagacaccaaggaagctgtagataaaatagaggagctaggaaataagaaaaagcaaaagacacagcaggc

SEQ ID NO: 78562 - DNA, 80 bp, synthetic construct
  source 1..80: mol_type = other DNA
agcagctgccacaggaagcagcagccaagtcagccaagtcagccaaaattaccccatagtgcaaaatgcacaaggacaga

SEQ ID NO: 78563 - DNA, 80 bp, synthetic construct
  source 1..80: mol_type = other DNA
cagggagctggaaagattcgcgctcaaccctggccttttagaaacagcaataggatgtcagcaaatattagaacagttac

SEQ ID NO: 78564 - DNA, 80 bp, synthetic construct
  source 1..80: mol_type = other DNA
tgacacatcagcccatgtcacctaggaccttaaatgcatgggtgaaggtaatagaagaaaaggctttcagccctagaaag

SEQ ID NO: 78565 - DNA, 80 bp, synthetic construct
  source 1..80: mol_type = other DNA
cgtacagcaacggatagagataaaagataccaaagaagctttagataaaatagaggaaataaaaaatagaagcaagcaaa

SEQ ID NO: 78566 - DNA, 80 bp, synthetic construct
  source 1..80: mol_type = other DNA
atggaacagttacaatcagctctcacggcaggaacagaagaactttgatcattatatactacagtagcaaccatctattg

SEQ ID NO: 78567 - DNA, 80 bp, synthetic construct
  source 1..80: mol_type = other DNA
ttaacacagttacaatcaagtctcgagacaggatcagaagaaattaaatcattatataatacagtagcaaccctctattg

SEQ ID NO: 78568 - DNA, 80 bp, synthetic construct
  source 1..80: mol_type = other DNA
tgtacatcaaaaggtagaggtaaaagacaccaaggaagctgtagataaaatagaggagatacaaaataagaccaagcaaa

SEQ ID NO: 78569 - DNA, 80 bp, synthetic construct
  source 1..80: mol_type = other DNA
tagtttgggtcaacagggagctggaaagattcgcgattaaccctggccttttagaaacagcagtaggatgccagcaaata

SEQ ID NO: 78570 - DNA, 80 bp, synthetic construct
  source 1..80: mol_type = other DNA
attatataatacagtagcaaccctctattgtgtacatcaaaggatagatgtaagagacaccaaggaagctttagataaaa

SEQ ID NO: 78571 - DNA, 80 bp, synthetic construct
  source 1..80: mol_type = other DNA
tagaggaaatacaaaataagagcaagcaaaagacacagcaggcagcagctgcggctgacacaggaagtagcagcaaggtc

SEQ ID NO: 78572 - DNA, 80 bp, synthetic construct
  source 1..80: mol_type = other DNA
agtcagaattaccccatagtgcaaaatgcacaagggcaaatggtacatcagtccctatcacctaggactttgaatgcatg

SEQ ID NO: 78573 - DNA, 80 bp, synthetic construct
  source 1..80: mol_type = other DNA
ttagaatcagcagacggatgtcaacagataatggaacagttacaatcagctctcaagacaggatcagaagaacttagatc

SEQ ID NO: 78574 - DNA, 80 bp, synthetic construct
  source 1..80: mol_type = other DNA
gcagctgacacaggaaacagcaagcaggtcagccaaaattaccctatagtgcaaaatgcacaagggcaaatggtacatca

SEQ ID NO: 78575 - DNA, 80 bp, synthetic construct
  source 1..80: mol_type = other DNA
acagctgcaaccgtccctccagacaggatcagaagaacttagatcattatataatacagtagcaaccctctattgtgtac

SEQ ID NO: 78576 - DNA, 80 bp, synthetic construct
  source 1..80: mol_type = other DNA
atcaaaagatagaggtaagagacaccaaggaagctttagagaagatagaggaagagcaaaataaaagcaagaaaaaggca

SEQ ID NO: 78577 - DNA, 80 bp, synthetic construct
  source 1..80: mol_type = other DNA
cagcaagcagcagctgacgcaggaaacagcagccaggtcagccaaaattaccctatagtgcaaaacatgcaggggcaaat

SEQ ID NO: 78578 - DNA, 80 bp, synthetic construct
  source 1..80: mol_type = other DNA
tgggcaagcagggaactagaacgattcgcacttaaccctggcctgttagaaaatgcaggaggctgtagacaaatactggg

SEQ ID NO: 78579 - DNA, 80 bp, synthetic construct
  source 1..80: mol_type = other DNA
caaaagcggctggcagtcaaaattatcctatagtacagaatctccaagggcaaatggtacaccagtctctatcacctaga

SEQ ID NO: 78580 - DNA, 80 bp, synthetic construct
  source 1..80: mol_type = other DNA
acagggagctggaaagatttgcacttaaccctggccttttaaaaacagcagaaagctgtagacaaataattcaacagtta

SEQ ID NO: 78581 - DNA, 80 bp, synthetic construct
  source 1..80: mol_type = other DNA
agtcagaactatcctatagtacagaatctccaagggcaaatggtacaccaggccctatcacctagaactttgaatgcatg

SEQ ID NO: 78582 - DNA, 80 bp, synthetic construct
  source 1..80: mol_type = other DNA
tacagccagctcttaagacaggatcagaagaacttagatcattatataatgcaatagcaaccctttggtgcgtacatcaa

SEQ ID NO: 78583 - DNA, 80 bp, synthetic construct
  source 1..80: mol_type = other DNA
tacaatcagctctcaggacaggatcagaagaacttaaatcattatataatacaacagcaaccctttggtgtgtacatcaa

SEQ ID NO: 78584 - DNA, 80 bp, synthetic construct
  source 1..80: mol_type = other DNA
aggatagacataaaagacaccaaggaagccttagataaagtagaggaaatacaaaataagagcaagcaaaagacgcagca

SEQ ID NO: 78585 - DNA, 80 bp, synthetic construct
  source 1..80: mol_type = other DNA
gatagagataaaagacaccaaggaagccttagataaaatagaggcagtacaaaataagagcaaacaaaagacacaacagg

SEQ ID NO: 78586 - DNA, 80 bp, synthetic construct
  source 1..80: mol_type = other DNA
gatagaaataagagacaccaaagaagccttagataaattaaaggagatgcaaaacaagagcaaacaaaagacacagcaga

SEQ ID NO: 78587 - DNA, 80 bp, synthetic construct
  source 1..80: mol_type = other DNA
atggaacagatacaaccagctctcaagacaggatcagaagaacttagatcattatttaatacaatagcaactctttggtg

SEQ ID NO: 78588 - DNA, 80 bp, synthetic construct
  source 1..80: mol_type = other DNA
agacacagcaaaagacacagcaggcagcagctgccacaggaagcggcagccaaaattaccctatagtgcaaaatgcacaa

SEQ ID NO: 78589 - DNA, 80 bp, synthetic construct
  source 1..80: mol_type = other DNA
gacacatcagtccatgtcacctaggactttgaatgcatgggtgaaggtaatagaagaaaaggcttttagcccagaagtat

SEQ ID NO: 78590 - DNA, 80 bp, synthetic construct
  source 1..80: mol_type = other DNA
gggcagtggacacatcagtccatgtcacctaggactttgaatgcatgggtgaaggtaatagaagaaaaggcttttagccc

SEQ ID NO: 78591 - DNA, 80 bp, synthetic construct
  source 1..80: mol_type = other DNA
cgtacatcaaaggatagacataaaagacaccaaggaagccttagataaattagaggaagtacaaaataagaacaagcaaa

SEQ ID NO: 78592 - DNA, 80 bp, synthetic construct
  source 1..80: mol_type = other DNA
cgtgcatcaaaggatagaagtaaaagacaccaaggaagccttagacaaggtagaggaaatacaaaataagagcaaacaaa

SEQ ID NO: 78593 - DNA, 80 bp, synthetic construct
  source 1..80: mol_type = other DNA
ggatagatataagagacaccaaagaagccttagataaaatagaggacatgcaaaataagagcaagcaaaaggcacagcag

SEQ ID NO: 78594 - DNA, 80 bp, synthetic construct
  source 1..80: mol_type = other DNA
aaatgacatatcagtctatgtcacctaggactttgaatgcatgggtgaaggcagtagaagaaaaggctttcagcccagaa

SEQ ID NO: 78595 - DNA, 80 bp, synthetic construct
  source 1..80: mol_type = other DNA
atagaacagctacagtcatctcttaggacaggatcagaagagcttcaatcattatttaatacagtagcaaccctttggtg

SEQ ID NO: 78596 - DNA, 80 bp, synthetic construct
  source 1..80: mol_type = other DNA
caatcaactcttaagacaggatcagaagaacttaaatcattgtttaatacaatagcaaccctttggtgtgtacatcaaag

SEQ ID NO: 78597 - DNA, 80 bp, synthetic construct
  source 1..80: mol_type = other DNA
tggaacagttacagtcaaatctcaagacaggctcagaggaaattaaatcattatttaatacaatagcaaccctttggtgt

SEQ ID NO: 78598 - DNA, 80 bp, synthetic construct
  source 1..80: mol_type = other DNA
gtacatcaaaggatagagataaaagacaccaaggatgccttagataaagtggaggaagcacaaaggaagagcaaacaaaa

SEQ ID NO: 78599 - DNA, 80 bp, synthetic construct
  source 1..80: mol_type = other DNA
agacacagcaggcagcagctacagaaagtagcagccagaattaccctatagtgcaaaatgcacaagggcaaatgacacat

SEQ ID NO: 78600 - DNA, 80 bp, synthetic construct
  source 1..80: mol_type = other DNA
aactaacacatcaaaacatgtcaccaaggactttaaatgcatgggtaaaagtaataaaagaaaaagcttcagcccagaag

SEQ ID NO: 78601 - DNA, 80 bp, synthetic construct
  source 1..80: mol_type = other DNA
cgtacatctaagaatagaggtagcagacaccaaggcagctttaaataaaataaagaagatacaaaataaaagtaagcaaa

SEQ ID NO: 78602 - DNA, 80 bp, synthetic construct
  source 1..80: mol_type = other DNA
agttttgggtcaacagggagctggaaagattcgcacttaaccctagccttttagaaacagcagaaggatgtcaaaagata

SEQ ID NO: 78603 - DNA, 80 bp, synthetic construct
  source 1..80: mol_type = other DNA
gcacaagggcaaatggtacacctggccatatcacctagaactttgaatgcatgggtgaaagtagtagaagaaaagtctta

SEQ ID NO: 78604 - DNA, 80 bp, synthetic construct
  source 1..80: mol_type = other DNA
caaatggtacatcagagcatgtcacctaggactttgaatgcgtgggtgaaggtgatagaagaaaaggcttcagccccaga

SEQ ID NO: 78605 - DNA, 80 bp, synthetic construct
  source 1..80: mol_type = other DNA
caacaggcagcagctgctacaggaaatagcagccaaaatttccctatagtgcaaaatgcgcaagggcaaatggtacatca

SEQ ID NO: 78606 - DNA, 80 bp, synthetic construct
  source 1..80: mol_type = other DNA
atagacataaaagacaccaaggaagccttagataagttagaggaaatacaaaataagagcaaacaacagacacagcaggc

SEQ ID NO: 78607 - DNA, 80 bp, synthetic construct
  source 1..80: mol_type = other DNA
gaagaacttaaatcattgtttaatacaatagcaaccctttggtgtgtacatcagaggatagacataaaagacaccaagga

SEQ ID NO: 78608 - DNA, 80 bp, synthetic construct
  source 1..80: mol_type = other DNA
agccttagacaaggtagaggaaatacaagtgaagagtaaacaaaagacacagcaggcagcagctgccacaggaagcagca

SEQ ID NO: 78609 - DNA, 80 bp, synthetic construct
  source 1..80: mol_type = other DNA
gccaaaattaccctatagtgcaaaatgcacaagggcaatggacacatcagtccatgtcacctaggactttgaatgcatgg

SEQ ID NO: 78610 - DNA, 80 bp, synthetic construct
  source 1..80: mol_type = other DNA
acagttacaatcaactctcaagacaggatcagaagaacttagatcactatataatacagtagtaacacttatgtgtgtac

SEQ ID NO: 78611 - DNA, 80 bp, synthetic construct
  source 1..80: mol_type = other DNA
tgtacatcaaagaataggcataagagacaccaaggaagccttagataaagtagaggaaaaacaaaaacaaagtaagagca

SEQ ID NO: 78612 - DNA, 80 bp, synthetic construct
  source 1..80: mol_type = other DNA
gacaacagacacagcaggcagcagctgccacaggaagcagcagccaaaattaccctatagtgcaaaatgcacaagggcaa

SEQ ID NO: 78613 - DNA, 80 bp, synthetic construct
  source 1..80: mol_type = other DNA
gtacatcaagggatagacataagagacaccaaggaagccttagataaagtagaggaaatacaaaagaagagcaaacaaga

SEQ ID NO: 78614 - DNA, 80 bp, synthetic construct
  source 1..80: mol_type = other DNA
aatcagctctcaggacaggatcagaggagcttaaatcattatttaatacaatagcaaccctttggtgcgtacatcaaagg

SEQ ID NO: 78615 - DNA, 80 bp, synthetic construct
  source 1..80: mol_type = other DNA
atagatataaaagacaccaaggaagccttagataaaatagaagagaaacaaaatgaaagcaagcaaagaacagagagaca

SEQ ID NO: 78616 - DNA, 80 bp, synthetic construct
  source 1..80: mol_type = other DNA
cagggagctggaaagattcgcacttaaccctggccttttagaaacagcagaaggatgtcaacaactaatggaacagttac

SEQ ID NO: 78617 - DNA, 80 bp, synthetic construct
  source 1..80: mol_type = other DNA
ggaacagttgcaaccagctctcaaggcaggatcagaagaaattaaatcattatttaatacaacagcaaccctttggtgcg

SEQ ID NO: 78618 - DNA, 80 bp, synthetic construct
  source 1..80: mol_type = other DNA
tacatcaaaggataggcataaaagacaccaaggaagccgtagataaagtagaggaaatgcaaaataagagcaagcaaaag

SEQ ID NO: 78619 - DNA, 80 bp, synthetic construct
  source 1..80: mol_type = other DNA
cagttacaatcagctctcaagacaggaacagaagaacttagatcattatataatacactagcaaccctttggtgcgtaca

SEQ ID NO: 78620 - DNA, 80 bp, synthetic construct
  source 1..80: mol_type = other DNA
tcaaaggatagacgtaaaagacaccaaggaagccttagataaaatagaggaagcacaaaataggagcaagcaaaagacac

SEQ ID NO: 78621 - DNA, 80 bp, synthetic construct
  source 1..80: mol_type = other DNA
caaccaacatatcagtccatgtcacctaggactttaaatgcatgggtgaaggtaatagaagaaaaggcttcagcccagaa

SEQ ID NO: 78622 - DNA, 80 bp, synthetic construct
  source 1..80: mol_type = other DNA
aacagcagcagcagcagcaacagacacagcaggcagcagctgccacaggaagcagcagccagaattaccctatagtgcaa

SEQ ID NO: 78623 - DNA, 80 bp, synthetic construct
  source 1..80: mol_type = other DNA
aatacacaagggcaaccaacatatcagtccatgtcacctaggactttaaatgcatgggtgaaggtaatagaagaaaaggc

SEQ ID NO: 78624 - DNA, 80 bp, synthetic construct
  source 1..80: mol_type = other DNA
gggcaagcagggagctggaaagattcgcacttaaccctgaccttttagacacagcagaaggatgtcaacaactaatggaa

SEQ ID NO: 78625 - DNA, 80 bp, synthetic construct
  source 1..80: mol_type = other DNA
tacatcaaaggatagaaataaaagacaccaaggaggccttagataaagtagaggcagtacaaaagaagaacacacaaaag

SEQ ID NO: 78626 - DNA, 80 bp, synthetic construct
  source 1..80: mol_type = other DNA
atagaaataagagacaccaaggaagccttagataaaatagaggaagtgaaaaagaagagcaaacaaaagacacagcaggc

SEQ ID NO: 78627 - DNA, 80 bp, synthetic construct
  source 1..80: mol_type = other DNA
tacatcaaaggctggagataaaagacaccaaggaagccttagataaaatagaggaaatgaaaaataagaacaagcaaaag

SEQ ID NO: 78628 - DNA, 80 bp, synthetic construct
  source 1..80: mol_type = other DNA
ggaccagctacaaccagctctcaggacaggatcagaagaacttaaatcattatttaatttaatagcaaccctttggtgtg

SEQ ID NO: 78629 - DNA, 80 bp, synthetic construct
  source 1..80: mol_type = other DNA
tacaccaaaggatagaaataagagacaccaaggaagccgtagacaaattggaggagctacaaaataagagcaaacaaaag

SEQ ID NO: 78630 - DNA, 80 bp, synthetic construct
  source 1..80: mol_type = other DNA
cagttacaatccagccttaggacaggatcagaaaaacttaaatcattatttaatacagtagcaaccctttggtgcgtaca

SEQ ID NO: 78631 - DNA, 80 bp, synthetic construct
  source 1..80: mol_type = other DNA
tcaaagaatagacataaaagacaccaaggaagcattagataaattagaggaaatacaaaataagagcaaacaaaaaacac

SEQ ID NO: 78632 - DNA, 80 bp, synthetic construct
  source 1..80: mol_type = other DNA
gggccagcagggagctagaaagattcgcacttgaccctggccttttagaatcagcagaagaatgtcaacaaataatggaa

SEQ ID NO: 78633 - DNA, 80 bp, synthetic construct
  source 1..80: mol_type = other DNA
atcaaaggatagaggtaaaagacaccaaggaagccttagataaagtagaagaagtgcaaaataagagcaagcaaaaaaca

SEQ ID NO: 78634 - DNA, 80 bp, synthetic construct
  source 1..80: mol_type = other DNA
cagcaggcagcggctgtcgcaggaagcagcagccaaaattaccctatagtgcaaaatgcacaagggcaaatgacacatca

SEQ ID NO: 78635 - DNA, 80 bp, synthetic construct
  source 1..80: mol_type = other DNA
acaccaaggaagccttagataaagtagaggaaacacgaaataagagcaaacaaagaacacagcaggcagcagccgctgca

SEQ ID NO: 78636 - DNA, 80 bp, synthetic construct
  source 1..80: mol_type = other DNA
ggaagcagcagccaaaattaccctatagtgcaaaatgcgcaagggcaaatgacacatcagtccatgtcacctaggacttt

SEQ ID NO: 78637 - DNA, 80 bp, synthetic construct
  source 1..80: mol_type = other DNA
agattcgcacttaaccctggccttttagaaacagcagagggatgtcaacaactaatggaacagttacaatcagctctcgg

SEQ ID NO: 78638 - DNA, 80 bp, synthetic construct
  source 1..80: mol_type = other DNA
aagacaccaaggaagccttagataaagtagaggaagtacaaaataagagcaaacaaaaaacacagcaggcagcagctgcc

SEQ ID NO: 78639 - DNA, 80 bp, synthetic construct
  source 1..80: mol_type = other DNA
cgggacaggaacagaagaacttaaatcattatttaatgcaacagcaactctttggtgcgttcatcaaaggatagacataa

SEQ ID NO: 78640 - DNA, 80 bp, synthetic construct
  source 1..80: mol_type = other DNA
atggaacagttacaatcagctctcaggacaggatcagaagaacttaaatcattgtttaatacagtggcaaccctttggtg

SEQ ID NO: 78641 - DNA, 80 bp, synthetic construct
  source 1..80: mol_type = other DNA
tgtacatcaaaggatagatgtaagagacaccaaggaagccttagataaattagaggaaatacaaaataagagtaaccaaa

SEQ ID NO: 78642 - DNA, 80 bp, synthetic construct
  source 1..80: mol_type = other DNA
caagggcaaatgacatatcagtccatgtcacctaggactttaaatgcatgggtgaaggcaatagaggaaaaggcttcagc

SEQ ID NO: 78643 - DNA, 80 bp, synthetic construct
  source 1..80: mol_type = other DNA
tagtttgggcaagcagggagctggaaagattcgcacttaaccctggccttttagaatcagcagaaggatgtcagcaaata

SEQ ID NO: 78644 - DNA, 80 bp, synthetic construct
  source 1..80: mol_type = other DNA
ggcaaatggtacatcagtccatatcacctaggactttgaatgcatgggtgaaggtaatagaagaaaaggcctcagcccag

SEQ ID NO: 78645 - DNA, 80 bp, synthetic construct
  source 1..80: mol_type = other DNA
tacatcagagaatagaaataaaagacgccaaggaagccttagataaaatagaggaaatacaaaagaagagcaaacagaag

SEQ ID NO: 78646 - DNA, 80 bp, synthetic construct
  source 1..80: mol_type = other DNA
tcaaaggataaacataaatgacaccaaggaagccttagataaaatagaggaagtgcaaaacaagagcaaacaaaagacac

SEQ ID NO: 78647 - DNA, 80 bp, synthetic construct
  source 1..80: mol_type = other DNA
acatcaaaggatggagataaaagacaccaaggaagccttagataaaatagaggaaatacaaaataagagtaaggcacagc

SEQ ID NO: 78648 - DNA, 80 bp, synthetic construct
  source 1..80: mol_type = other DNA
aggcagcagctgccgcaggacaaaataagagtaaggcacagcaggcagcagctgccgcaggaagcagcagccaaaatttc

SEQ ID NO: 78649 - DNA, 80 bp, synthetic construct
  source 1..80: mol_type = other DNA
cctatagtgcaaaatgcacaagggcaaatggtacatcagtccatatcacctaggactttaaatgcatgggtgaaggtaat

SEQ ID NO: 78650 - DNA, 80 bp, synthetic construct
  source 1..80: mol_type = other DNA
gaacagttacaaccaactctcaggacaggatcagaggaagttaaatcattattcaatacaatagcaaccctttggtgcgt

SEQ ID NO: 78651 - DNA, 80 bp, synthetic construct
  source 1..80: mol_type = other DNA
aaccaactctcaagacaggatcagaagaacttcaatcgttatataatacagtagcaaccctctattgtgtacatcaaaag

SEQ ID NO: 78652 - DNA, 80 bp, synthetic construct
  source 1..80: mol_type = other DNA
aggagctaacacaggaaacaacaacaatgtcagccaaaattacccaatagtgcaaaatgcacaagggcaaatggtacatc

SEQ ID NO: 78653 - DNA, 80 bp, synthetic construct
  source 1..80: mol_type = other DNA
aagaacttaaatcattatataatacagtagcaacactctactgtgtccatgaaaggatgggggtaaaggacaccaaggaa

SEQ ID NO: 78654 - DNA, 80 bp, synthetic construct
  source 1..80: mol_type = other DNA
gctttagacaagatagaggaagaacaaaacaaaagtaagaaaaaggcacagcaagcagcagcagcagctgacacaggaaa

SEQ ID NO: 78655 - DNA, 80 bp, synthetic construct
  source 1..80: mol_type = other DNA
aaacagccagagccaggtcagccaaaattaccctatagtgcagaacttacaggggcaaatggtacaccaagccatatcac

SEQ ID NO: 78656 - DNA, 80 bp, synthetic construct
  source 1..80: mol_type = other DNA
taaccctggccttttagaaacatcagaaggctgcagacaaatattaggccagctacaaccatctcttcagacaggatcag

SEQ ID NO: 78657 - DNA, 80 bp, synthetic construct
  source 1..80: mol_type = other DNA
tgtacatcaaaggatagaggtaaaagatactaaggaagctttagacaaaatggaggaagcacaaaataagagcaagcaaa

SEQ ID NO: 78658 - DNA, 80 bp, synthetic construct
  source 1..80: mol_type = other DNA
agacacagcaggcagcggctgccacaggaagctgcagcacagtcagccaaaattaccctattgtgcaaaatgcacaaggg

SEQ ID NO: 78659 - DNA, 80 bp, synthetic construct
  source 1..80: mol_type = other DNA
caaatggtacatcaggctatatcacccaggactttaaatgcatgggtgaaagtagtagaagagaaggcttttagcccaga

SEQ ID NO: 78660 - DNA, 80 bp, synthetic construct
  source 1..80: mol_type = other DNA
gacacagcaggcagcagctgacacaggaagcaacaaacaggtcagccaaaattatcctatagtgcagaatgcacaaggac

SEQ ID NO: 78661 - DNA, 80 bp, synthetic construct
  source 1..80: mol_type = other DNA
agccggtacaccaggccatatcacctagaaccttaaatgcatgggtaaaagtagtagaagaaaaggccttcatccagaag

SEQ ID NO: 78662 - DNA, 80 bp, synthetic construct
  source 1..80: mol_type = other DNA
tagtttgggcaacagggaaatggagagatttgcacttaaccctgaccttttagaaacagcagaaggttgtcagcagataa

SEQ ID NO: 78663 - DNA, 80 bp, synthetic construct
  source 1..80: mol_type = other DNA
tgaaccagatgcaaccagctctccagacaggaacagaggagtttagatcattatataatctagtagcagtcctctattgt

SEQ ID NO: 78664 - DNA, 80 bp, synthetic construct
  source 1..80: mol_type = other DNA
gtacaccaaaagatagaggtaaaagacaccaaagaagctctagaggaagtggaaaagatacaaaagaaaggtcagcaaaa

SEQ ID NO: 78665 - DNA, 80 bp, synthetic construct
  source 1..80: mol_type = other DNA
aacacagcaggcagcaacagataaagaaaacagcagccaagtcagtcaaaattatcctatagtgcagaatgcacaagggc

SEQ ID NO: 78666 - DNA, 80 bp, synthetic construct
  source 1..80: mol_type = other DNA
agacaaaccccaccaacagaaggagcagcagcaggagtaggagcagtatctcaagatttagatagacatggagcaatcac

SEQ ID NO: 78667 - DNA, 80 bp, synthetic construct
  source 1..80: mol_type = other DNA
aagtactaatacaacacatgctagttgcgtctggctggaagcacaagaggacgaggaggtaggctttccagtcagaccac

SEQ ID NO: 78668 - DNA, 80 bp, synthetic construct
  source 1..80: mol_type = other DNA
ttaaaatgggtggcaagtggtcaaaaagtagcatagttggatggcctcagataagggaaagaataagacaaaccccaata

SEQ ID NO: 78669 - DNA, 80 bp, synthetic construct
  source 1..80: mol_type = other DNA
aaccaataatgatgcttgtgcctggttggaagcacaagaggaagagggggtaggctttccagtcagaccacaggtacctt

SEQ ID NO: 78670 - DNA, 80 bp, synthetic construct
  source 1..80: mol_type = other DNA
gtagaaggagcagcaccaggagtaggagcagcatctcaagatctagatagacatggagcaatcacaagcagtaatacaac

SEQ ID NO: 78671 - DNA, 80 bp, synthetic construct
  source 1..80: mol_type = other DNA
gaaggggtgggagcagtgtctcaagacttagagaagcatggggcaattacaagcagcaacactgctactaataatgctgc

SEQ ID NO: 78672 - DNA, 80 bp, synthetic construct
  source 1..80: mol_type = other DNA
agcatggggcaattacaagcagcaacactgctactaataatgctgcctgtgcctggctggaagcacaagaggacgaggaa

SEQ ID NO: 78673 - DNA, 80 bp, synthetic construct
  source 1..80: mol_type = other DNA
aatgggggcaagtggtcaaaagtagcatagtgggatggcctgagattagggaaagactaagaagaacccccacagcagca

SEQ ID NO: 78674 - DNA, 80 bp, synthetic construct
  source 1..80: mol_type = other DNA
taagcatggagcaatcacaagcagtaatacaggatctactaatcctgattgtgcctggctggaagcacaaacagaggagg

SEQ ID NO: 78675 - DNA, 80 bp, synthetic construct
  source 1..80: mol_type = other DNA
gcagcagaaggagtaggagcagtgtctcaagatttggataagcatggagcaatcacaagcagtaatacaggatctactaa

SEQ ID NO: 78676 - DNA, 80 bp, synthetic construct
  source 1..80: mol_type = other DNA
gcagcagcaggggtaggagcagtgtctcgagatttggatagacgtggggcagtcacaattaataatatggcatctaataa

SEQ ID NO: 78677 - DNA, 80 bp, synthetic construct
  source 1..80: mol_type = other DNA
gtggggcagtcacaattaataatatggcatctaataatcctgactccgcctggctggaagcacaagaggaagaagaggaa

SEQ ID NO: 78678 - DNA, 80 bp, synthetic construct
  source 1..80: mol_type = other DNA
aatggggcaagtggtcaaaaagtagcatagtgggatggcctaaaattagggaaagaatgagacaaactccagctccccca

SEQ ID NO: 78679 - DNA, 80 bp, synthetic construct
  source 1..80: mol_type = other DNA
gcagcagatggggtaggagcagtgtctcaagatttggataggcatggagcaatcacaagcagaaacacaccacagacaaa

SEQ ID NO: 78680 - DNA, 80 bp, synthetic construct
  source 1..80: mol_type = other DNA
cctccagcagcaaaaggagtaggagcagtatctcaagatttagataaacacggagcaattcaagcagtaacataaatcac

SEQ ID NO: 78681 - DNA, 80 bp, synthetic construct
  source 1..80: mol_type = other DNA
aagacttagataaatatggggcgctaactagcagcaacacccccgccaataatagtgattgtgcctggctggaagcgcaa

SEQ ID NO: 78682 - DNA, 80 bp, synthetic construct
  source 1..80: mol_type = other DNA
taactagcaacaacacccccgccaataatagtgattgtgcctggctggaagcgcaagaggaagaaggagatgtaggctcc

SEQ ID NO: 78683 - DNA, 80 bp, synthetic construct
  source 1..80: mol_type = other DNA
cagtagcaacacagcacagaacaatcctgactgtgcctggttagaagcacaggaagagaaaaaggagtggttccatcgct

SEQ ID NO: 78684 - DNA, 80 bp, synthetic construct
  source 1..80: mol_type = other DNA
gtagcagaaccagcggcagaaggggtgggagcagcatctcgggacctggaaaagcatggggcactcaccagtagcaacac

SEQ ID NO: 78685 - DNA, 80 bp, synthetic construct
  source 1..80: mol_type = other DNA
gcagcaagacaaacccctccagcagcagaaagagtagaagcagcagtaggagtaggagcagtatctcaagatttagctaa

SEQ ID NO: 78686 - DNA, 80 bp, synthetic construct
  source 1..80: mol_type = other DNA
gcatggagcagtcacgagcagtaatactaatgatcctgattgtgcctgtctagaagcacaagaagaggcttgcgaacaag

SEQ ID NO: 78687 - DNA, 80 bp, synthetic construct
  source 1..80: mol_type = other DNA
ttaaaatgggtggcaagtggtcaaaaagcagcatagtgggatggcctaaagtaagggaaagaatgagacaaactcctcca

SEQ ID NO: 78688 - DNA, 80 bp, synthetic construct
  source 1..80: mol_type = other DNA
gcaaaaggagtaggagcagtatctcaagatttagataaacatggagcaatcacaagcaagaatacaaatcaccctagttg

SEQ ID NO: 78689 - DNA, 80 bp, synthetic construct
  source 1..80: mol_type = other DNA
agcaatcacaagcaagaatacaaatcaccctagttgcgtctggctggaagcgcaagaggaggaagaggtaggcttccagt

SEQ ID NO: 78690 - DNA, 80 bp, synthetic construct
  source 1..80: mol_type = other DNA
ttaatgggggcaagtggtcaaaaagtagtatagtgggatggcctgaggttagggaaagactaagacaaaccccttcagca

SEQ ID NO: 78691 - DNA, 80 bp, synthetic construct
  source 1..80: mol_type = other DNA
caagtagtaatacagcagctactaatgctagttgcgcctggctggaagcacaacaggaagagagtgaggtaggctccagt

SEQ ID NO: 78692 - DNA, 80 bp, synthetic construct
  source 1..80: mol_type = other DNA
acagaaaacacagcagcaacaggagtaggagcagtatctcaagatttagctaggcatggagcagtcacaagtagtaatac

SEQ ID NO: 78693 - DNA, 80 bp, synthetic construct
  source 1..80: mol_type = other DNA
acaagggaaagaatgagacgagctcagccagcagcaataggagtaggagcagtgtctcaagatttggacagacgtggggc

SEQ ID NO: 78694 - DNA, 80 bp, synthetic construct
  source 1..80: mol_type = other DNA
gcagacggggtaggagcagtatctcaagatttggataagcatggggcaatcacaagcagcaatacagcaagtacaaatgc

SEQ ID NO: 78695 - DNA, 80 bp, synthetic construct
  source 1..80: mol_type = other DNA
atggggcaatcacaagcagcaatacagcaagtacaaatgctgactgtgcctggttggaagcacaagaggacgaggaggta

SEQ ID NO: 78696 - DNA, 80 bp, synthetic construct
  source 1..80: mol_type = other DNA
ttaaatggggcaagtggtcaaaaagtagcatagtgggatggcctcagataagggaaagattaagacaagccccggcagca

SEQ ID NO: 78697 - DNA, 80 bp, synthetic construct
  source 1..80: mol_type = other DNA
ttaaaatggggggcaagtggtcaaaaagcagcatagggggcaagtggtcgaaaagcagcaaaataagacgacctcctcca

SEQ ID NO: 78698 - DNA, 80 bp, synthetic construct
  source 1..80: mol_type = other DNA
ggtggcaagtggtcaaaaagtgcatagggggttttaagaagggtagggaaagaatgagggtcctggaaaaaaagctgcaa

SEQ ID NO: 78699 - DNA, 80 bp, synthetic construct
  source 1..80: mol_type = other DNA
aaaacatggggcaatcacaagtagcaatacagcaactactaatgctgcctgtgcctggctagaagcacaagaagatgagg

SEQ ID NO: 78700 - DNA, 80 bp, synthetic construct
  source 1..80: mol_type = other DNA
gcagcgcctgggataagggaaagaataagaagaactgatccagcagcagagggggtaggagcagcatctcgagatctgga

SEQ ID NO: 78701 - DNA, 80 bp, synthetic construct
  source 1..80: mol_type = other DNA
ccagcagcagaaggggtgggagcagcttctcaggacttagatagacgaggggcaattacaagcagcaatactggggctac

SEQ ID NO: 78702 - DNA, 80 bp, synthetic construct
  source 1..80: mol_type = other DNA
acatggggcaattacaagcagcaataccagggatactaatcctgatttggcctggctagaagcgcaagaggagagaagta

SEQ ID NO: 78703 - DNA, 80 bp, synthetic construct
  source 1..80: mol_type = other DNA
atggggcaagtggtcaaaaaatagaatagttggatggcctactataagggaaagactaagacgaacccctgcaacagcag

SEQ ID NO: 78704 - DNA, 80 bp, synthetic construct
  source 1..80: mol_type = other DNA
acccctccagcagcaataggagtaggagcagcatctcaagatttagctaagcatggagcaattacaagcagcaatacagc

SEQ ID NO: 78705 - DNA, 80 bp, synthetic construct
  source 1..80: mol_type = other DNA
ttaaatggggcaagtggtcaaaaagttggcctgcaataagggaaagaatgagacaaacccctgtaagacaaacccctacc

SEQ ID NO: 78706 - DNA, 80 bp, synthetic construct
  source 1..80: mol_type = other DNA
gcagcagatggggtaggagcagtatctcgagatctggaaaaacatggggcaatcacaagtagcaatactaatagtgctgc

SEQ ID NO: 78707 - DNA, 80 bp, synthetic construct
  source 1..80: mol_type = other DNA
caatcacaagcagtaatacagcaactactaatgctgattgtgcctggctagaagcacaagaggaagaggaggtaggctcc

SEQ ID NO: 78708 - DNA, 80 bp, synthetic construct
  source 1..80: mol_type = other DNA
caggacaaactcctccagcagcagcaggagtaggagcagcatctcaagatttagaaagacatggagcaatcacaagcagt

SEQ ID NO: 78709 - DNA, 80 bp, synthetic construct
  source 1..80: mol_type = other DNA
tcagaagcagcagcaggagtaggagcagcatctaaagatttagaaaaacatggagcagttacaagtagtaatacaacaca

SEQ ID NO: 78710 - DNA, 80 bp, synthetic construct
  source 1..80: mol_type = other DNA
ttaaaatgggtggcaagtggtcaaaaagtagaataccaggatggcctgagattagggaaagaataagacgaactccccca

SEQ ID NO: 78711 - DNA, 80 bp, synthetic construct
  source 1..80: mol_type = other DNA
ggatggcgagaggtcagggaaaaattgaagcaaactccagcagcagcagcaggagtaggagcagtatctcaagatctaga

SEQ ID NO: 78712 - DNA, 80 bp, synthetic construct
  source 1..80: mol_type = other DNA
taaacatggagcagtaacaagcgctaatataaaaaatgctagtcgtgtctggctggaagcacaggaggaagaggaggtag

SEQ ID NO: 78713 - DNA, 80 bp, synthetic construct
  source 1..80: mol_type = other DNA
ttaaaatgggtggcaagtggtcaaaaagaagcattaaaatggggcgcaagtggtcaaaaagtagcaaaagaagcatagag

SEQ ID NO: 78714 - DNA, 80 bp, synthetic construct
  source 1..80: mol_type = other DNA
cagtaacaagcgctaatataaaaaatgctagtcgtgtctggctggaagcacaggaggaagaggaggtaggctccagtcag

SEQ ID NO: 78715 - DNA, 80 bp, synthetic construct
  source 1..80: mol_type = other DNA
tttaaaattggaggcaagtggtcaaaaagtagcatagtgggatggcctgaggttagggaaagaataagacgaacccgaac

SEQ ID NO: 78716 - DNA, 80 bp, synthetic construct
  source 1..80: mol_type = other DNA
ttagatagacatggagcaatcaccagcaggaatacagcatctacaaatgctgatgttgcctggctggaaccacaagagga

SEQ ID NO: 78717 - DNA, 80 bp, synthetic construct
  source 1..80: mol_type = other DNA
ggcctaggttagggaagataagacaaacccctgcaagaggagaaagagcagcaccaggagtaggagcagtatctcaagat

SEQ ID NO: 78718 - DNA, 80 bp, synthetic construct
  source 1..80: mol_type = other DNA
ttaaaatgggtggcaagtggagaaaaagtagaaaagcgggatgtagccagagcagggaaagaagagagcgaattagaaga

SEQ ID NO: 78719 - DNA, 80 bp, synthetic construct
  source 1..80: mol_type = other DNA
cacaagcagtaatacatcatctactaatgctgatgttgcctggctggaagcacaggaggacgaggaggtaggctccgtcg

SEQ ID NO: 78720 - DNA, 80 bp, synthetic construct
  source 1..80: mol_type = other DNA
agggaaagaataagacaaaccccagcaacaggagaaggagcagtaagacaaaccccagcaacaggagtaggagcagtatc

SEQ ID NO: 78721 - DNA, 80 bp, synthetic construct
  source 1..80: mol_type = other DNA
tcaagatttaggtagacatggagcaatcacaagcagtaatacatcatctactaatgctgatgttgcctggctggaagcac

SEQ ID NO: 78722 - DNA, 80 bp, synthetic construct
  source 1..80: mol_type = other DNA
ttgacagggctttgaaagagctttgctttaaaatgggtggcaagtggtcaaaaagcagcaaagtgggatggcctcaggtt

SEQ ID NO: 78723 - DNA, 80 bp, synthetic construct
  source 1..80: mol_type = other DNA
aagtagtaatacagcaactaccaattctgcttgtgcctggctggaagcacaagaggacgaggaggtaggctccagtcgca

SEQ ID NO: 78724 - DNA, 80 bp, synthetic construct
  source 1..80: mol_type = other DNA
ctccagctcctccagcagcaacaggagtaggagcagcatctcaagatctagataagcatggagcaatcacaagtagtaat

SEQ ID NO: 78725 - DNA, 80 bp, synthetic construct
  source 1..80: mol_type = other DNA
ctggaaatgccgagggcgagggggtgggctttccagaggagccgcaggtaccttttccagcaatgacttaagtaccttta

SEQ ID NO: 78726 - DNA, 80 bp, synthetic construct
  source 1..80: mol_type = other DNA
caataagggagagaataagacgaacccctccagcagcagaaggagtaggaccagtatctcaagatttagctaggcatgga

SEQ ID NO: 78727 - DNA, 80 bp, synthetic construct
  source 1..80: mol_type = other DNA
gcaatcacaagcagtaacacagcagccaataatcctgatcgtgcctggctagaagcacaacaggaggattcagaggttgg

SEQ ID NO: 78728 - DNA, 80 bp, synthetic construct
  source 1..80: mol_type = other DNA
gggaataagaagggctttgaaagggctttgctttaaaatgggtggcaagtggtcaaaaggtagcatagttggatggcctg

SEQ ID NO: 78729 - DNA, 80 bp, synthetic construct
  source 1..80: mol_type = other DNA
acagcatctactaatgctgcttgtgcctggctggaagcacaagaggaagacgaagagggggtaggatttccagtcagacc

SEQ ID NO: 78730 - DNA, 80 bp, synthetic construct
  source 1..80: mol_type = other DNA
atcacaagcagtaatacagcatctactaatgctgcttgtgcctggctggaagcacaagaggaagacgaagagggggtagg

SEQ ID NO: 78731 - DNA, 80 bp, synthetic construct
  source 1..80: mol_type = other DNA
agacaacccctccagaggaatcccctccagcagcaacaggagtaggagcagcatctcaagatctagctaggcatggagca

SEQ ID NO: 78732 - DNA, 80 bp, synthetic construct
  source 1..80: mol_type = other DNA
gcagcagaaggagtaggagcagtatctcaagatttagataaacatggggcagtcacagtactaatatggaaagtgctagt

SEQ ID NO: 78733 - DNA, 80 bp, synthetic construct
  source 1..80: mol_type = other DNA
ttgaaattggtggcaagtggtcaaaacgtagccgagtggaatggcctgaggttagagaaagaatgagacaaactcctgca

SEQ ID NO: 78734 - DNA, 80 bp, synthetic construct
  source 1..80: mol_type = other DNA
atcacaagcagcaatacagcaagtacaaatgctgactgtgcctggttggaagcacaagaggacgaggaggtaggctttgt

SEQ ID NO: 78735 - DNA, 80 bp, synthetic construct
  source 1..80: mol_type = other DNA
ctgtgcctggttggaagcacaagaggacgaggaggtaggctttgtagtctgcacaggtacctttagacccaatgacttaa

SEQ ID NO: 78736 - DNA, 80 bp, synthetic construct
  source 1..80: mol_type = other DNA
ggctcgaaggagatagacaagccccggcagcagcagacggggtaggagcagtatctcaagatttggataagcatggggca

SEQ ID NO: 78737 - DNA, 80 bp, synthetic construct
  source 1..80: mol_type = other DNA
gataaacatggagcagtaacaagtagtaatatgaatcatgctagtgttgcctggttggaagcacaagaggacgaggagta

SEQ ID NO: 78738 - DNA, 80 bp, synthetic construct
  source 1..80: mol_type = other DNA
agggaagaatgagacaaactcctccagaaccagcagcaaaaggagtaggagcagcatctcaagatttagatagacatgga

SEQ ID NO: 78739 - DNA, 80 bp, synthetic construct
  source 1..80: mol_type = other DNA
gcagcaacaggagtaggagcagtatctcaagatttagataaacatggagcaatcacaagcagaaatacagtagccactaa

SEQ ID NO: 78740 - DNA, 80 bp, synthetic construct
  source 1..80: mol_type = other DNA
caagcagaaatacagtagccactaatgctacctgtgcctggctggaagcacaagaagacgaggaggtaggctccagtcag

SEQ ID NO: 78741 - DNA, 80 bp, synthetic construct
  source 1..80: mol_type = other DNA
ggctgcataagggaagaataagacgaacccctgtagcagcagaaggagtaggagcagaatctcgagatttagctaggcat

SEQ ID NO: 78742 - DNA, 80 bp, synthetic construct
  source 1..80: mol_type = other DNA
ggatggctgctgtagggaagataagaagaactgagccagtagcagagggggtaggagcagcatctcgagatctggcagaa

SEQ ID NO: 78743 - DNA, 80 bp, synthetic construct
  source 1..80: mol_type = other DNA
actcaggcagcagcagaaggagttggagcagtatctcaagatttagataaacatggggcagtcacaagcctaatatggaa

SEQ ID NO: 78744 - DNA, 80 bp, synthetic construct
  source 1..80: mol_type = other DNA
ttagataaacatggggcagtcacaagcctaatatggaaagtcctagtccaatgctggaggcacaggaggaaggagaagta

SEQ ID NO: 78745 - DNA, 80 bp, synthetic construct
  source 1..80: mol_type = other DNA
gcggtggccttaaaataaagggcaagtggtcaaaacgtagccgagtggaatggcctgaggttagagaaagaatgagacaa

SEQ ID NO: 78746 - DNA, 80 bp, synthetic construct
  source 1..80: mol_type = other DNA
acaagcagtaatacctcaactactaatgctgcttgtgcctggctggaagcactagaggaagaggaggtaggcttccgtcg

SEQ ID NO: 78747 - DNA, 80 bp, synthetic construct
  source 1..80: mol_type = other DNA
acacaaactcctccagcagcaataggagtaggagcagcatctcgagatttagccaaacatggagcaattacaagcagtaa

SEQ ID NO: 78748 - DNA, 80 bp, synthetic construct
  source 1..80: mol_type = other DNA
catggagcaatcacaagcagtaatacaccaagtataatgctgattgtgcctggctggaagcacaagaggaagaggaggta

SEQ ID NO: 78749 - DNA, 80 bp, synthetic construct
  source 1..80: mol_type = other DNA
gaaccagcagcagaaggagtaggagcagtatctcaagatttagatagacatggagcaatcacaagcagtaatacaccaag

SEQ ID NO: 78750 - DNA, 80 bp, synthetic construct
  source 1..80: mol_type = other DNA
ggcctcgggttagggaagatgagacaaactcctccagcagcagaaggagtaggagcagcatctcgagatttagatagaca

SEQ ID NO: 78751 - DNA, 80 bp, synthetic construct
  source 1..80: mol_type = other DNA
gcagcagatggggtgggagcagtatctcaagacttagataaacgtggggcaattacaagcaacaataccagggcaactaa

SEQ ID NO: 78752 - DNA, 80 bp, synthetic construct
  source 1..80: mol_type = other DNA
ttaaaatgggtggcaagtggtcaaaaagtagtatagttggatggcctgctataagggaaagaatgagacgaacccctaca

SEQ ID NO: 78753 - DNA, 80 bp, synthetic construct
  source 1..80: mol_type = other DNA
gcatctcaagatttagatagacatggagcactcacaaccagtaatacagtaactaataatgctgcttgtgcctggttaga

SEQ ID NO: 78754 - DNA, 80 bp, synthetic construct
  source 1..80: mol_type = other DNA
gaaaaaaaaggggaggggggcggcttagggaaagaaaaagaaaaaaacctccaccagcagcagcagaaggagtaggaaca

SEQ ID NO: 78755 - DNA, 80 bp, synthetic construct
  source 1..80: mol_type = other DNA
gcggcagaaggagtaggagcagcatctcaagatttagctagacatggagcactcacaaccagtaatacagtaactaataa

SEQ ID NO: 78756 - DNA, 80 bp, synthetic construct
  source 1..80: mol_type = other DNA
acaaccagtaatacagtaactaataatgctgcttgtgcctggctggaagcacaagaggacgaggaggtaggctaccgtag

SEQ ID NO: 78757 - DNA, 80 bp, synthetic construct
  source 1..80: mol_type = other DNA
ttaaaatgggtggcaagtggtcaaaaagtagcatagtgggatggccccaggttagggacagaatgaaacaaactcctgtg

SEQ ID NO: 78758 - DNA, 80 bp, synthetic construct
  source 1..80: mol_type = other DNA
gcagcagaaggagtaggagcagtatctcaagatctagagaaacacggagcagtgacaagtagtaatatgaataatcctag

SEQ ID NO: 78759 - DNA, 80 bp, synthetic construct
  source 1..80: mol_type = other DNA
ttaaaatggttttcaagttttcaaaaagtggcaaagtgggatggcctaagattagggaaagaaagagacaaactcctcca

SEQ ID NO: 78760 - DNA, 80 bp, synthetic construct
  source 1..80: mol_type = other DNA
tgctgattgtgcctggctggaagcacaagaagagaacgaggaggtaggctttccattcaggccgcaggtacctttaagac

SEQ ID NO: 78761 - DNA, 80 bp, synthetic construct
  source 1..80: mol_type = other DNA
gcagcagaaggagtaggagcagtatctcgagatttagatagacatggagcaatcaccagcagtaatacagcaggtactaa

SEQ ID NO: 78762 - DNA, 80 bp, synthetic construct
  source 1..80: mol_type = other DNA
gtgcctggctggaagcacaagaggaagaggaggtaggctttccagtctggccgcaggtacctttaagaccaatgactaaa

SEQ ID NO: 78763 - DNA, 80 bp, synthetic construct
  source 1..80: mol_type = other DNA
gcagcagatggggtaggagcagtatctcgagatctggaaaaacatggggcaatcacaagtagcaatacaccacctactaa

SEQ ID NO: 78764 - DNA, 80 bp, synthetic construct
  source 1..80: mol_type = other DNA
tttaaatgggtggcaagtggtcaaaaagtagtatagttggatggcctgctataagggagagaataaggagaactaatcca

SEQ ID NO: 78765 - DNA, 80 bp, synthetic construct
  source 1..80: mol_type = other DNA
gcaaggggagaaggagcagcaaaagaaagagaaggagcagcaataggagtaggagcagcatctcaagatttaggtaaaca

SEQ ID NO: 78766 - DNA, 80 bp, synthetic construct
  source 1..80: mol_type = other DNA
tggagcaatcacaagcagtaatacagcagatactaatgctgatgttgcctggctggaagcacaacaagaggaagagaggt

SEQ ID NO: 78767 - DNA, 80 bp, synthetic construct
  source 1..80: mol_type = other DNA
gctttaaaatgggtagcaagtggtcaaaaagcagcatcatgggatggaataagggtagggatagaatgagacagaccccg

SEQ ID NO: 78768 - DNA, 80 bp, synthetic construct
  source 1..80: mol_type = other DNA
agcagtaatacagcagatactaatgctgatgttgcctggctggaagcacaacaagaggaagagaggtggctccagtcagc

SEQ ID NO: 78769 - DNA, 80 bp, synthetic construct
  source 1..80: mol_type = other DNA
gcagcaccaggagtaggagcagcatctcaagatttagatagacatggagcaatcacaagcagtaatacaccaagtacaaa

SEQ ID NO: 78770 - DNA, 80 bp, synthetic construct
  source 1..80: mol_type = other DNA
gtgtctaataatgctgatatggcctggttggaagcacaagaggacgaggaggtgggctttccagttaagccgcaggtacc

SEQ ID NO: 78771 - DNA, 80 bp, synthetic construct
  source 1..80: mol_type = other DNA
aagacaaaccccagccaacaggagaaggagcagtatctcaagatttaggtagacatggagcaatcacaaacagtaataca

SEQ ID NO: 78772 - DNA, 80 bp, synthetic construct
  source 1..80: mol_type = other DNA
gcagaaggggtgggagcagtgtctcaagacttagataaacatggggcaattacaagcagcaatactggggctactaatgc

SEQ ID NO: 78773 - DNA, 80 bp, synthetic construct
  source 1..80: mol_type = other DNA
ggcaattacaagcagcaatactggggctactaatgcagatatggcctggctagaagcacaagaggaggaggaagtgttcc

SEQ ID NO: 78774 - DNA, 80 bp, synthetic construct
  source 1..80: mol_type = other DNA
ttaatggtggcaagtggtcaaaaagtagtacagttggatggtctactataagggaaagaataagaagaacccctgtagca

SEQ ID NO: 78775 - DNA, 80 bp, synthetic construct
  source 1..80: mol_type = other DNA
ctggggcaatcacaagcagtgggccgctaatactaatgctgcctggctcggctggaaggacaagaggaaggggaagtagc

SEQ ID NO: 78776 - DNA, 80 bp, synthetic construct
  source 1..80: mol_type = other DNA
ctataaggcggcaacggaagtaagaaaaaccccagcagcagcagcaggagtaggagcaggatctcaagatttagataggc

SEQ ID NO: 78777 - DNA, 80 bp, synthetic construct
  source 1..80: mol_type = other DNA
gatttagatagacatggagcaatcacaactagaaatacagcaactactaatgctgattgtgcctggctggaagcacaaga

SEQ ID NO: 78778 - DNA, 80 bp, synthetic construct
  source 1..80: mol_type = other DNA
aacatgtgggatggcctacgattagggaaaaaataagacaaacccctccagcagcaacaggagtaggagcagcatctcaa

SEQ ID NO: 78779 - DNA, 80 bp, synthetic construct
  source 1..80: mol_type = other DNA
gcagcaataggagtaggagcagcatctcaagatttagataaacatggagcaatcacaagtagtaatacagcagctaacaa

SEQ ID NO: 78780 - DNA, 80 bp, synthetic construct
  source 1..80: mol_type = other DNA
gcaatcacaagtagtaatacagcagctaacaatgctgcttgtgcctggctggaagcacaagaggacgaggaggtaggctc

SEQ ID NO: 78781 - DNA, 80 bp, synthetic construct
  source 1..80: mol_type = other DNA
tttaaattgggggcaagtggtcaaaaagtagcatagtgggatggcctcaggttagggaaagaataagacaaactcctcca

SEQ ID NO: 78782 - DNA, 80 bp, synthetic construct
  source 1..80: mol_type = other DNA
cctccttttccttcagcagcaaaaggagtaggagcagtgtctcaggatttagataaatatggagcaataacaagcagaaa

SEQ ID NO: 78783 - DNA, 80 bp, synthetic construct
  source 1..80: mol_type = other DNA
tttgctttaaaatgggtggcaagtggtcaaaaagtagtatagtaggatggcctgagattagggaaagaataagaagaact

SEQ ID NO: 78784 - DNA, 80 bp, synthetic construct
  source 1..80: mol_type = other DNA
gcagcagaaggagtaggagcagcatctcaagatctagataaacgtggagcaatcacaatcaataatacagcaactactaa

SEQ ID NO: 78785 - DNA, 80 bp, synthetic construct
  source 1..80: mol_type = other DNA
acatggagatggagcagtcacaagtagtactattaataatgctggttgtgcctggctggaagcacaagaggaacgaggca

SEQ ID NO: 78786 - DNA, 80 bp, synthetic construct
  source 1..80: mol_type = other DNA
caccagcagcagcagcagcaggaggagtaggatcagtatatcaggatagacatggagatggagcagtcacaagtagtact

SEQ ID NO: 78787 - DNA, 80 bp, synthetic construct
  source 1..80: mol_type = other DNA
atggagcaatcacaagcagtgatacagcagctactaatgctgattgcgccaggctggaagcacaagaggtcgaggaggta

SEQ ID NO: 78788 - DNA, 80 bp, synthetic construct
  source 1..80: mol_type = other DNA
ttcctccagccgcaacaggagtaggagcagcttctcaagatttagatagacatggagcaatcacaagcagtgatacagca

SEQ ID NO: 78789 - DNA, 80 bp, synthetic construct
  source 1..80: mol_type = other DNA
acaatcaataatacagcaaccactaatgctgcttgggcctggctggaagcacaagagagcgaggaggtaggctttccagt

SEQ ID NO: 78790 - DNA, 80 bp, synthetic construct
  source 1..80: mol_type = other DNA
agggaagaatgaggcaaactcctgcagcagcaagaggagtaggagcagcatctcaagatttagatagacgtggagcaatc

SEQ ID NO: 78791 - DNA, 80 bp, synthetic construct
  source 1..80: mol_type = other DNA
gtggcagcagcagaaggagtaggagcagtatctaaagatttagaaaaggtgggagcagtaacaagcagtaatacagcaca

SEQ ID NO: 78792 - DNA, 80 bp, synthetic construct
  source 1..80: mol_type = other DNA
ttaaaatgggtggcaagtggtcaaaaagtagcatagtgggatggcctgagattagggaaaggttaaggcgcactagtcca

SEQ ID NO: 78793 - DNA, 80 bp, synthetic construct
  source 1..80: mol_type = other DNA
acggaaacccctccagcagcaagcggagtaggagcagtatctcgagatttagaaagacatggagcaatcacaagcagcaa

SEQ ID NO: 78794 - DNA, 80 bp, synthetic construct
  source 1..80: mol_type = other DNA
tggagcagtaacaagtagtaatatgaatcatgctagtgttgcctggtggaagcacaagaggacgaggagtagctccgtcg

SEQ ID NO: 78795 - DNA, 80 bp, synthetic construct
  source 1..80: mol_type = other DNA
gaagcagaaggagtagcagcagaaggagtaggagcagtatctcaggatctagataaacatggagcagtaacaagtagtaa

SEQ ID NO: 78796 - DNA, 80 bp, synthetic construct
  source 1..80: mol_type = other DNA
actccagtccagcagcaataggagtaggaggagcatctcaagaagagctaagcatggaggagcacaagcagcaagtcagc

SEQ ID NO: 78797 - DNA, 80 bp, synthetic construct
  source 1..80: mol_type = other DNA
gtggaagcagcagaaggagtgggaccaatatcccaagatttagctagacatggagcagtcacaagcgatactaatactgc

SEQ ID NO: 78798 - DNA, 80 bp, synthetic construct
  source 1..80: mol_type = other DNA
agctagacatggagcagtcacaagcgatactaatactgctagtcgcacatggctggaagcgcaagaagaagataggaggt

SEQ ID NO: 78799 - DNA, 80 bp, synthetic construct
  source 1..80: mol_type = other DNA
gcaagtggtcaaaaagtagagtaccaggatggcctgaaattagggaaagaatgagacgaactcctccagcagcagaaaga

SEQ ID NO: 78800 - DNA, 80 bp, synthetic construct
  source 1..80: mol_type = other DNA
aagcaaaaggacaaagacctgtatctacagattgagctagacctgtatcacacgatctaaagaaacatggaccaataaca

SEQ ID NO: 78801 - DNA, 80 bp, synthetic construct
  source 1..80: mol_type = other DNA
ttattaaaatgggtggcttttggtccaagtgtagaatagtaggatggcctgagattagggaaagaataagaagaactcct

SEQ ID NO: 78802 - DNA, 80 bp, synthetic construct
  source 1..80: mol_type = other DNA
acagcagaaagagttagagcagcagaaggagtaggagcagtatgttgtgatttatttaggcatggagcaatcacaagcag

SEQ ID NO: 78803 - DNA, 80 bp, synthetic construct
  source 1..80: mol_type = other DNA
tttaggcatggagcaatcacaagcagcaattcagcacaaaataatcatgattgtgcttggctggaagaagcacaagagga

SEQ ID NO: 78804 - DNA, 80 bp, synthetic construct
  source 1..80: mol_type = other DNA
ttaaaatgggggctaagtggtcaaaaagtggcatagtgggatggcgtagcatagggggaagaataagacgaacccctaca

SEQ ID NO: 78805 - DNA, 80 bp, synthetic construct
  source 1..80: mol_type = other DNA
gcagcagcagaaggggtaggagcagtatctaaagatttagaaaaatttggagcagtcacaagcagtaatacatcacagac

SEQ ID NO: 78806 - DNA, 80 bp, synthetic construct
  source 1..80: mol_type = other DNA
agtcacaagcagtaatacatcacagactaatactgcttgcgcttggctggaagcacaagaggaagaggaggtaggctcca

SEQ ID NO: 78807 - DNA, 80 bp, synthetic construct
  source 1..80: mol_type = other DNA
ttaatgggggcaagtggtcaaaaagcagcatagtgggatggcctgagattagggaaagaataagacgtactcctccaaag

SEQ ID NO: 78808 - DNA, 80 bp, synthetic construct
  source 1..80: mol_type = other DNA
atgagacgagctcatcctgatcaggcaccaacaacaagagtaggagcagagcaggagaatgcaccagataaaggagtagg

SEQ ID NO: 78809 - DNA, 80 bp, synthetic construct
  source 1..80: mol_type = other DNA
ttaacatgggcggcaagtggtcaaaaagtagaggctggaatgaggttagggaaagactaagacaagctcctccagctagg

SEQ ID NO: 78810 - DNA, 80 bp, synthetic construct
  source 1..80: mol_type = other DNA
ggagcaatcacaagcagcaatacatcagaaactaatgctgcttgtgcctggctggaagcacaagaggaagaggaagtagt

SEQ ID NO: 78811 - DNA, 80 bp, synthetic construct
  source 1..80: mol_type = other DNA
gaaccagcagcactaggagtaggagcagcatctcaagacttagatagacatggagcaatcacaagcagcaatacatcaga

SEQ ID NO: 78812 - DNA, 80 bp, synthetic construct
  source 1..80: mol_type = other DNA
cccaacaaaccccttcagcagcaacaggagtaggagcagcatctcaagatttagataaacatggagcaatcacaagcagt

SEQ ID NO: 78813 - DNA, 80 bp, synthetic construct
  source 1..80: mol_type = other DNA
cttttttattaatatgggcggcaagtggtcaaaaagcaggatagtgggatggcatgagattagggaaagaataagacaag

SEQ ID NO: 78814 - DNA, 80 bp, synthetic construct
  source 1..80: mol_type = other DNA
tcaataatacagcatctaataatgctgacagtgcctggctggaagcacaagaggagggagaggaagtaggcttccagtca

SEQ ID NO: 78815 - DNA, 80 bp, synthetic construct
  source 1..80: mol_type = other DNA
agacaaactcccccagcagcagaaggggtaggagcagtatctagagatttgcatgaacgaggagcagttacaatcaataa

SEQ ID NO: 78816 - DNA, 80 bp, synthetic construct
  source 1..80: mol_type = other DNA
gaagcggatggtctgatgttagggaaagaatgagaagaactcctccagcagcagaaggagtaggagcagtatctcgagat

SEQ ID NO: 78817 - DNA, 80 bp, synthetic construct
  source 1..80: mol_type = other DNA
agacgaaacaaccgtacagcagcaagaggagtaggagcagtatctcaagatgtggataaacatagagcaatcacaagcag

SEQ ID NO: 78818 - DNA, 80 bp, synthetic construct
  source 1..80: mol_type = other DNA
acagaaagagcagcagcaggagtaggagcagtatctaaagatttggataagcatggggcaatcacaagcagcaatacacc

SEQ ID NO: 78819 - DNA, 80 bp, synthetic construct
  source 1..80: mol_type = other DNA
ggaggaaacaaaaagaactgagccagcagcagatggggtaggagcggcatctagagacctgggaaaatatggggcaatca

SEQ ID NO: 78820 - DNA, 80 bp, synthetic construct
  source 1..80: mol_type = other DNA
gggcaatcacaagtaataatacaacagctactaatgctgcctgtgcctggctagaagcacaagaagaggcagaggaggtg

SEQ ID NO: 78821 - DNA, 80 bp, synthetic construct
  source 1..80: mol_type = other DNA
attaatgggggcaagtggtcaaaaagtagtatagttggatggcctgctgtaagggatagaataagaaggactagtccaag

SEQ ID NO: 78822 - DNA, 80 bp, synthetic construct
  source 1..80: mol_type = other DNA
caagcagcaaatcatcatttaataatcatgattccgcgcgggaagcgccacaagaggacgaggaggtggctccatcagca

SEQ ID NO: 78823 - DNA, 80 bp, synthetic construct
  source 1..80: mol_type = other DNA
gaaggagtaggagcatcacaagatttactaagtcgtcaaggagcaaccacaagcagcaaatcatcatttaataatcatga

SEQ ID NO: 78824 - DNA, 80 bp, synthetic construct
  source 1..80: mol_type = other DNA
gcacttacaagcagtaatacagcagctactaatgctgatcgcgcctgcctggaagcacaagaggacgaggaggtagctcc

SEQ ID NO: 78825 - DNA, 80 bp, synthetic construct
  source 1..80: mol_type = other DNA
gcagcagaaggagtaggagcagcatctcaagatgtagataaacagggagcacttacaagcagtaatacagcagctactaa

SEQ ID NO: 78826 - DNA, 80 bp, synthetic construct
  source 1..80: mol_type = other DNA
gcagcagaaggagtaggagcagcagaaggagtaggagcagtatctcgagatttagctaggcatggagcaatcacaagcag

SEQ ID NO: 78827 - DNA, 80 bp, synthetic construct
  source 1..80: mol_type = other DNA
atcacaagcagcaatacagcacaaaataatcctgattgtgcctggctggaagcacaacaggaggattcagaagtaggctt

SEQ ID NO: 78828 - DNA, 80 bp, synthetic construct
  source 1..80: mol_type = other DNA
tagacatggagcaatcacaagtagtaatacagcaggtactaatgctgatgtagcctggctggaagcacaagaggaagagg

SEQ ID NO: 78829 - DNA, 80 bp, synthetic construct
  source 1..80: mol_type = other DNA
ccagcagcagatggggtgggagcagtatcgcgagacctggaaaaacatggggcagtcaccagtagtaatacatcaacaac

SEQ ID NO: 78830 - DNA, 80 bp, synthetic construct
  source 1..80: mol_type = other DNA
gtcaccagtagtaatacatcaacaactaatgaggcctgtgcctggctggaagcacaagaagaggaggaagtagttccagt

SEQ ID NO: 78831 - DNA, 80 bp, synthetic construct
  source 1..80: mol_type = other DNA
aatggggcaagtggtcaaaaagcagcatagttggatggcctgctgtaagggaaagaataagaagaactagaagaactgag

SEQ ID NO: 78832 - DNA, 80 bp, synthetic construct
  source 1..80: mol_type = other DNA
gagcaatcacaagcagcaatacaggatctaataatgctgattgtgcttggctagaagcacaagaggaagaggaagtagct

SEQ ID NO: 78833 - DNA, 80 bp, synthetic construct
  source 1..80: mol_type = other DNA
aaagaaagagcagcaccaggagtaggagcagtatctcaagatttagatagacatggagcaatcacaagcagcaatacagg

SEQ ID NO: 78834 - DNA, 80 bp, synthetic construct
  source 1..80: mol_type = other DNA
tcaaagtaagacaatacgatcagatacatatagaaatttgtggaaaacaggcaacaggtacagtattagtaggacctacc

SEQ ID NO: 78835 - DNA, 80 bp, synthetic construct
  source 1..80: mol_type = other DNA
cagaaagaacctccatttctttggatgggttatgaactccatcctgataaatggacagtgcaacctataaaactggcaga

SEQ ID NO: 78836 - DNA, 80 bp, synthetic construct
  source 1..80: mol_type = other DNA
aaaagaaagctggactgtcaatgatatacagaagctagtgggaaaattaaattgggcgagccagatttatcaaggaatta

SEQ ID NO: 78837 - DNA, 80 bp, synthetic construct
  source 1..80: mol_type = other DNA
ttttaaaggaaccagtacatggagtgtattatgatccatcaaaagacttaatagcagaagtacagaaacaagggcaagga

SEQ ID NO: 78838 - DNA, 80 bp, synthetic construct
  source 1..80: mol_type = other DNA
gaactggcagagaacagggagattttaaaggaaccagtacatggagtgtattatgatccatcaaaagacttaatagcaga

SEQ ID NO: 78839 - DNA, 80 bp, synthetic construct
  source 1..80: mol_type = other DNA
tcaaagtaagacaatatgatcagatacttatggaaatttgtggacataaagctataggtacagtgttagtaggacctaca

SEQ ID NO: 78840 - DNA, 80 bp, synthetic construct
  source 1..80: mol_type = other DNA
gccataaagaaaaaagacagtactaagtggagaaagttagtagacttcagagaacttaataagagaactcaagatttctg

SEQ ID NO: 78841 - DNA, 80 bp, synthetic construct
  source 1..80: mol_type = other DNA
atttttcagttcccttagatgaagattttagaaaatatactgcatttaccatacctagtacaaacaatgagacaccaggg

SEQ ID NO: 78842 - DNA, 80 bp, synthetic construct
  source 1..80: mol_type = other DNA
ttctaaaagaacctgttcatggggtatattatgaccccacaaaagacttaatagcagaaatacaaaaacaagggcaagat

SEQ ID NO: 78843 - DNA, 80 bp, synthetic construct
  source 1..80: mol_type = other DNA
cagaaatttgtacagaaatggaaagtgaaggaaaaatctcaaaaattgggcctgaaaatccatacaatactccagtattt

SEQ ID NO: 78844 - DNA, 80 bp, synthetic construct
  source 1..80: mol_type = other DNA
tcaaagtaagacagtatgatcagatactcatggaaatttgtggaaaaagggccataggtacagtattagtgggacctaca

SEQ ID NO: 78845 - DNA, 80 bp, synthetic construct
  source 1..80: mol_type = other DNA
tagggcagcatagagcaaaaatagaggagttgagagaacatctgctgagatgggggtttaccaccccagacaaaaaacat

SEQ ID NO: 78846 - DNA, 80 bp, synthetic construct
  source 1..80: mol_type = other DNA
cagaaggaacccccatttttgtggatgggatatgaactccatcctgacaaatggacagtccagactatacagttgccaga

SEQ ID NO: 78847 - DNA, 80 bp, synthetic construct
  source 1..80: mol_type = other DNA
ttctaaaagaaccagtgcatggggtatattatgacccatcgaaggacctaatagcagaaatacagaaacaagggcaagga

SEQ ID NO: 78848 - DNA, 80 bp, synthetic construct
  source 1..80: mol_type = other DNA
aagtaaagcaattatgtaaactcctcaggggagcaaaagcactaacagacatagtacccttaactacagaagcagaatta

SEQ ID NO: 78849 - DNA, 80 bp, synthetic construct
  source 1..80: mol_type = other DNA
gctataagaaaaaaagatagtagtaaatggagaaaattagtagatttcagagaacttaataaaagaactcaagacttttg

SEQ ID NO: 78850 - DNA, 80 bp, synthetic construct
  source 1..80: mol_type = other DNA
tagggcaacatagagtaaaaatagaggagttgagacaacatctgttgaaatggggatttaccacaccagataagaaacat

SEQ ID NO: 78851 - DNA, 80 bp, synthetic construct
  source 1..80: mol_type = other DNA
tagaacagcatagagcaaaaatagaggagttaagaggacatctactgagctggggattcaccacaccagacaaaaaacat

SEQ ID NO: 78852 - DNA, 80 bp, synthetic construct
  source 1..80: mol_type = other DNA
gccagtacaattaaaaccaggaatggatggcccaaaagttaaacaatggccactaacagaagaaaaaataaaagcattaa

SEQ ID NO: 78853 - DNA, 80 bp, synthetic construct
  source 1..80: mol_type = other DNA
atttttcagttcccttagatgaaaattttagaaagtatacagcattcactatacccagtttaaacaatgagacaccaggg

SEQ ID NO: 78854 - DNA, 80 bp, synthetic construct
  source 1..80: mol_type = other DNA
agagccttttagagcaaaaaatccagaaatagtgatctatcagtacatggatgatttatatgtaggatctgacttagaga

SEQ ID NO: 78855 - DNA, 80 bp, synthetic construct
  source 1..80: mol_type = other DNA
tagggcagcatagaacaaaaatagaggaactaagagaacatctgttggggtggggatttaccacaccagacaagaaacat

SEQ ID NO: 78856 - DNA, 80 bp, synthetic construct
  source 1..80: mol_type = other DNA
cctcaaatcactctttggcaacgacccttagtcacagtaagaatagagggacagctaatagaagctctgttagatacagg

SEQ ID NO: 78857 - DNA, 80 bp, synthetic construct
  source 1..80: mol_type = other DNA
agagccttttagagtaaaaaacccagagatagtgatctaccaatatatggatgatttatatgtagggtcagacttagaga

SEQ ID NO: 78858 - DNA, 80 bp, synthetic construct
  source 1..80: mol_type = other DNA
attagatatcagtacaatgtgcttccacaaggatggaaagggtcaccggcaatatttcaagcaagcatgacaaaaatctt

SEQ ID NO: 78859 - DNA, 80 bp, synthetic construct
  source 1..80: mol_type = other DNA
tagggcaacatagagcaaaaatagaggagttaagagaacatttactgaaatggggattgaccaccccagataaaaaacat

SEQ ID NO: 78860 - DNA, 80 bp, synthetic construct
  source 1..80: mol_type = other DNA
cagacatttgtatggagatggagaaggaaggaaaaatttcaaaaattggacctgaaaatccatacaatactccaatattt

SEQ ID NO: 78861 - DNA, 80 bp, synthetic construct
  source 1..80: mol_type = other DNA
agagccttttagagcaaaaaatccagaactaattatctatcaatacatggatgacttgtatgtaggatctgatttagaaa

SEQ ID NO: 78862 - DNA, 80 bp, synthetic construct
  source 1..80: mol_type = other DNA
tagggcagcatagagcaaagatagaggaactgagagatcatctcttgagatggggatttactacaccagacaaaaagcat

SEQ ID NO: 78863 - DNA, 80 bp, synthetic construct
  source 1..80: mol_type = other DNA
tagggcagcatagagcaaaagtagaggaattgagaaaccatctactgaaatggggacttaccacaccagacaaaaagcac

SEQ ID NO: 78864 - DNA, 80 bp, synthetic construct
  source 1..80: mol_type = other DNA
acttttcagttcccctagatgaaggctttagaaagtatactgcattcactatacctagtataaataatgagacgccaggg

SEQ ID NO: 78865 - DNA, 80 bp, synthetic construct
  source 1..80: mol_type = other DNA
agatccctttagaacaaaaaatccagagataataatttaccaatatatggatgatttatatgtaggatctgacttagaaa

SEQ ID NO: 78866 - DNA, 80 bp, synthetic construct
  source 1..80: mol_type = other DNA
tagggcagcatagagcaaaaatagaggagctgagagagcatctactgaaatggggactgaccacaccagacaaaaaacat

SEQ ID NO: 78867 - DNA, 80 bp, synthetic construct
  source 1..80: mol_type = other DNA
ttctaaaacaacctgtacatggggtatattatgatccaacaaaagatttagtagcagaagtacagaaacaagggccagac

SEQ ID NO: 78868 - DNA, 80 bp, synthetic construct
  source 1..80: mol_type = other DNA
atttttcagttcccttagataaagaattcagaaagtacacggcattcactatacctagtaaaaataatgagacaccagga

SEQ ID NO: 78869 - DNA, 80 bp, synthetic construct
  source 1..80: mol_type = other DNA
cctcaaatcactctttggcagcgacccttagttatagtaaggataggggaacaactagtagaagccctattagatacagg

SEQ ID NO: 78870 - DNA, 80 bp, synthetic construct
  source 1..80: mol_type = other DNA
taggacagcatagagcaaaagtagaggagttgagagaacatctactgcactggggatttactacgccagacaaaaaacat

SEQ ID NO: 78871 - DNA, 80 bp, synthetic construct
  source 1..80: mol_type = other DNA
aagtaaagcaactatgcaaactcctcaggggagccaaagcactaacagatatagtaacactgactgaggaagcagaacta

SEQ ID NO: 78872 - DNA, 80 bp, synthetic construct
  source 1..80: mol_type = other DNA
cctcaaatcactctttggcaacgaccagtagtcacagtaaaaatagggggacagctaatagaagctttattggacacagg

SEQ ID NO: 78873 - DNA, 80 bp, synthetic construct
  source 1..80: mol_type = other DNA
aaaggataactggactgtcaatgatatacagaaattagtggggaaactaaattgggcaagtcagatttatgcaggaatta

SEQ ID NO: 78874 - DNA, 80 bp, synthetic construct
  source 1..80: mol_type = other DNA
tagggcagcatagagcaaaaatagaggagttgagaggacatctactacaatggggatttaccacaccagataaaaaacat

SEQ ID NO: 78875 - DNA, 80 bp, synthetic construct
  source 1..80: mol_type = other DNA
agcagatgatacagtattggaagatattaatttaccaggaagatggaaaccaaaaatgataggaggaattggaggtttta

SEQ ID NO: 78876 - DNA, 80 bp, synthetic construct
  source 1..80: mol_type = other DNA
aataatcagatctcaaaatatctcagataatgtgaaaaccataatagtacaccttaatgaatctgtacagattaattgtt

SEQ ID NO: 78877 - DNA, 80 bp, synthetic construct
  source 1..80: mol_type = other DNA
caagacctaacaacaatacaagaaaaagtatacgttttggaccaggacaagcattccatacaacaggaggtataacagga

SEQ ID NO: 78878 - DNA, 80 bp, synthetic construct
  source 1..80: mol_type = other DNA
gacataagaaaggcacattgtaacattagtggaacacaatggaatacaactatagaacgggtaaaggaaaagctcaagtc

SEQ ID NO: 78879 - DNA, 80 bp, synthetic construct
  source 1..80: mol_type = other DNA
ttacttcaataaaacaataaaatttcaacaagcctcaggaggggacctaaaaattacaatgcatatgtttaactgtggag

SEQ ID NO: 78880 - DNA, 80 bp, synthetic construct
  source 1..80: mol_type = other DNA
acagtacaatgtacacatggaattaagccagtggtgtcaactcaattgttgttaaatggcagcctagcagagaaaggtat

SEQ ID NO: 78881 - DNA, 80 bp, synthetic construct
  source 1..80: mol_type = other DNA
gacaaggaatacatataggaccagggcaagcactctatactacaggagagataataggagacataagaaaagcatattgt

SEQ ID NO: 78882 - DNA, 80 bp, synthetic construct
  source 1..80: mol_type = other DNA
tgtataaggcccaacaataatacaagacaaggaatacatataggaccagggcaagcactctatactacaggagagataat

SEQ ID NO: 78883 - DNA, 80 bp, synthetic construct
  source 1..80: mol_type = other DNA
gtcaggccagtacaatgtacacacggaattaagccagtggtgtcaacccaattactgttaaatggcagtctagcagaaga

SEQ ID NO: 78884 - DNA, 80 bp, synthetic construct
  source 1..80: mol_type = other DNA
acaaacattctatgcaacaggtgaaataataggagacataagacaggcatattgtgtggtcaacaaaactgaatggaatc

SEQ ID NO: 78885 - DNA, 80 bp, synthetic construct
  source 1..80: mol_type = other DNA
acttcttaacaaaacaacaataatgtttcgtccatcctcaggaggagaccaagaaattacaacacacagttttaattgtg

SEQ ID NO: 78886 - DNA, 80 bp, synthetic construct
  source 1..80: mol_type = other DNA
catgattagatctgaaaatatcacagacaatagtaaaaacataatagtgcagcttaataaaactgtaatcattacttgtg

SEQ ID NO: 78887 - DNA, 80 bp, synthetic construct
  source 1..80: mol_type = other DNA
agaggcccaacaacaacacaagaaaaagtgtacatataggaccagggcaggcattctatgcaacaggcagcataatagga

SEQ ID NO: 78888 - DNA, 80 bp, synthetic construct
  source 1..80: mol_type = other DNA
atttttaactcatcctcaggaggggacccagaaattacaacacacagttttaattgtggaggggaatttttctactgtaa

SEQ ID NO: 78889 - DNA, 80 bp, synthetic construct
  source 1..80: mol_type = other DNA
gacataagagcagcatattgtgagattaatggaacagaatggaataacacgctacaaaaagtagccataaaattaggagg

SEQ ID NO: 78890 - DNA, 80 bp, synthetic construct
  source 1..80: mol_type = other DNA
acttatgaacaaaacaaaaataatttttaactcatcctcaggaggggacccagaaattacaacacacagttttaattgtg

SEQ ID NO: 78891 - DNA, 80 bp, synthetic construct
  source 1..80: mol_type = other DNA
acagtacaatgtacacatggaatcaagccagtggtgtcaactcaattgctgttgaatggcagtttagcagaagaagagat

SEQ ID NO: 78892 - DNA, 80 bp, synthetic construct
  source 1..80: mol_type = other DNA
aataattagatctgaaaatctcacagataatgtaaaaaccctaatagtgcagcttaatgagtctgtagaaattaattgta

SEQ ID NO: 78893 - DNA, 80 bp, synthetic construct
  source 1..80: mol_type = other DNA
caaggcccaacaacaatacaagacaaagcacacatataggaccagggcaggcactctatacaacaagggtaataggaaat

SEQ ID NO: 78894 - DNA, 80 bp, synthetic construct
  source 1..80: mol_type = other DNA
ataagacaagcatattgtaatattaatgaaacaaaatggaatagaactctacaacaggtagcaaaaaaattaggagacct

SEQ ID NO: 78895 - DNA, 80 bp, synthetic construct
  source 1..80: mol_type = other DNA
ttttaaccagacaacagtaatgtttaaaccatcctcaggaggggatccagaaattacaacacacagctttaattgtggag

SEQ ID NO: 78896 - DNA, 80 bp, synthetic construct
  source 1..80: mol_type = other DNA
tgaaactatgattaggtctgaaaatattacaaacaatgccaaaaacataatagtacagtttactcagtctgtacaaatta

SEQ ID NO: 78897 - DNA, 80 bp, synthetic construct
  source 1..80: mol_type = other DNA
attgtaccagacccaacaacaatacaagaaaaagtatacgctttggaccaggacaagccttctatacaaataacataata

SEQ ID NO: 78898 - DNA, 80 bp, synthetic construct
  source 1..80: mol_type = other DNA
aacaataaactttactaaagcctcagggggggacatagaaattacaacacatggttttgattgtggaggggaatttttct

SEQ ID NO: 78899 - DNA, 80 bp, synthetic construct
  source 1..80: mol_type = other DNA
caattaagaaaccacttccctaataaaacaataaactttactaaagcctcagggggggacatagaaattacaacacatgg

SEQ ID NO: 78900 - DNA, 80 bp, synthetic construct
  source 1..80: mol_type = other DNA
ggggatataagacaagcacattgtaatatcagcagaaaccaatggaataacactttaataaggatagttgaacaattaag

SEQ ID NO: 78901 - DNA, 80 bp, synthetic construct
  source 1..80: mol_type = other DNA
aaaccacttccctaataaaacaataaactttactaaagcctcagggggggacatagaaattacaacacatggttttgatt

SEQ ID NO: 78902 - DNA, 80 bp, synthetic construct
  source 1..80: mol_type = other DNA
agcacagtacaatgtacacatggaattaggccagtggtatcaactcagctgctgctgaatggcagtctagcagaaggaaa

SEQ ID NO: 78903 - DNA, 80 bp, synthetic construct
  source 1..80: mol_type = other DNA
acttaataggactgtacaaattacgtgcactagacctaacaacaatacaagaagaagtgtgcgtataggaccagggcaag

SEQ ID NO: 78904 - DNA, 80 bp, synthetic construct
  source 1..80: mol_type = other DNA
ttaagagaggtagctggagaattacggaaacagtttaataataaaacaataatctttgattcatctgcaggaggggatct

SEQ ID NO: 78905 - DNA, 80 bp, synthetic construct
  source 1..80: mol_type = other DNA
ttgaatggcagcctagcagaagaagacataataattagatctgaaaacctcacagacaatggcaagaccataatagtaca

SEQ ID NO: 78906 - DNA, 80 bp, synthetic construct
  source 1..80: mol_type = other DNA
atttaatgaatctgtagaaattacctgtataaggcctggcaacaatacaagaaaaagtatacgtttcggaccagggcagg

SEQ ID NO: 78907 - DNA, 80 bp, synthetic construct
  source 1..80: mol_type = other DNA
cactctatacaaataatataataggagacataagaggagcatattgtaatattagtgggaacaactggactgacactcta

SEQ ID NO: 78908 - DNA, 80 bp, synthetic construct
  source 1..80: mol_type = other DNA
caaaaggtagcaaaaaaattaggaaaagaatataacaaaacaaaaataatttttaagtcagcctcaggaggggacccaga

SEQ ID NO: 78909 - DNA, 80 bp, synthetic construct
  source 1..80: mol_type = other DNA
ttaaatggcagtctagcagaagaagaggtcatgattagatctgaaaatttcacaaacaatgtgaaaaccataatagtgca

SEQ ID NO: 78910 - DNA, 80 bp, synthetic construct
  source 1..80: mol_type = other DNA
gcttaatgtgtctgtaacaattaattgtacaaggccctccaacaatacaagacaaagtgtacatatgggaccagggcaag

SEQ ID NO: 78911 - DNA, 80 bp, synthetic construct
  source 1..80: mol_type = other DNA
ttgaatggcagtctagcagaggaagagataatgattagatctgaaaatctcacagacaatactaaaaatataatagtgca

SEQ ID NO: 78912 - DNA, 80 bp, synthetic construct
  source 1..80: mol_type = other DNA
taatgaatctatacaaattaattgtacaaggccctacaaaaatagaggaagacaaagtacacctataggactagggcaag

SEQ ID NO: 78913 - DNA, 80 bp, synthetic construct
  source 1..80: mol_type = other DNA
tactctatacaaataagccagtaggagacataagacaagcacagtgtaatattagtggagcaaactggaataacacctta

SEQ ID NO: 78914 - DNA, 80 bp, synthetic construct
  source 1..80: mol_type = other DNA
aatggcagtctagcagaagcagaaatcataataagatctgaaaatctcacaaacaatgctaaaaccataatagtgcatct

SEQ ID NO: 78915 - DNA, 80 bp, synthetic construct
  source 1..80: mol_type = other DNA
cataatagtgcaatttaatgagactgtaagaattaattgcaccagacctggcaacaatacaagaaaaagtgtacgtatag

SEQ ID NO: 78916 - DNA, 80 bp, synthetic construct
  source 1..80: mol_type = other DNA
tggaacaaaaccttaggcaaggtagtcgcacaattaagaaaacactttaacaaaacaatagtctttactaattcctcagg

SEQ ID NO: 78917 - DNA, 80 bp, synthetic construct
  source 1..80: mol_type = other DNA
aggggatctagaaattacaacacatagttttaattgtgcaggagaatttttctattgtaatacatcagaattatttaata

SEQ ID NO: 78918 - DNA, 80 bp, synthetic construct
  source 1..80: mol_type = other DNA
gcacttggaacatcacagagtcagaaattaatggcactaataatggcactaatgatagaaatataactctctcatgcaga

SEQ ID NO: 78919 - DNA, 80 bp, synthetic construct
  source 1..80: mol_type = other DNA
actcagatactgttaaatggcagtctagcagaaggagaggtaaaaattagatctgaaaatattacaaacaatgccaaaac

SEQ ID NO: 78920 - DNA, 80 bp, synthetic construct
  source 1..80: mol_type = other DNA
gaccaggacaagcattctatgctacaggtgacataataggggatataagacaagcacattgtaatgtcagtaaaaaagca

SEQ ID NO: 78921 - DNA, 80 bp, synthetic construct
  source 1..80: mol_type = other DNA
tactgtaaacatcacttgtataaggcctggcaacaatacaagaagaagtataaatttcggaccagggcaggcataccatg

SEQ ID NO: 78922 - DNA, 80 bp, synthetic construct
  source 1..80: mol_type = other DNA
tacatagtaaaataataggagacataagacaagcacattgtgagattaatggaacagaatggaataacactctacaaaag

SEQ ID NO: 78923 - DNA, 80 bp, synthetic construct
  source 1..80: mol_type = other DNA
gtagctaacgaattaagaaaactctataataataagacaacaataatctttcaaccatcctcaggaggagatcaagaaat

SEQ ID NO: 78924 - DNA, 80 bp, synthetic construct
  source 1..80: mol_type = other DNA
agtctagcagaagaagacatcatgattagatcagaaaatcttacagacaatgctaaaaccataatagtacagtttaacaa

SEQ ID NO: 78925 - DNA, 80 bp, synthetic construct
  source 1..80: mol_type = other DNA
caacaaagataataggagacataaggaaagcacattgtaatattagtagaaaagactgggagacaactttacggcaagta

SEQ ID NO: 78926 - DNA, 80 bp, synthetic construct
  source 1..80: mol_type = other DNA
gcttaatacatctgtattcattaattgttcaaggcccggcaataatacaaggcaaggtatacatatagggccagggcaag

SEQ ID NO: 78927 - DNA, 80 bp, synthetic construct
  source 1..80: mol_type = other DNA
cactctacacaacaaaggtaataggagacataagaaaagcatattgtaaaattaatagaacagactggaatgcaacttta

SEQ ID NO: 78928 - DNA, 80 bp, synthetic construct
  source 1..80: mol_type = other DNA
ttgaatggcagcctagcaaaaggggagatcaaaattagatctgcaaatctcacagataatggtaaaaacataatagtaca

SEQ ID NO: 78929 - DNA, 80 bp, synthetic construct
  source 1..80: mol_type = other DNA
gcttcatgaatcaatagaaattaattgtacaaggcccagcaaagaatataaaagacaacgtacacctataggacaagggc

SEQ ID NO: 78930 - DNA, 80 bp, synthetic construct
  source 1..80: mol_type = other DNA
aagtactctatacaacaaagtcagtaggagatataagacaagcatattgcaatgttagtgctaggaagtggaatgatacc

SEQ ID NO: 78931 - DNA, 80 bp, synthetic construct
  source 1..80: mol_type = other DNA
ctacaaaaggtagcaaaaaaattaggagaccttattgacagaacagagataatttttaacacatctgcaggaggggatcc

SEQ ID NO: 78932 - DNA, 80 bp, synthetic construct
  source 1..80: mol_type = other DNA
ttaaatggcagcttagcagaagaagagatcataataagatctgagaacatctcaaacaacgttaaaaacataatagtaca

SEQ ID NO: 78933 - DNA, 80 bp, synthetic construct
  source 1..80: mol_type = other DNA
agtctagcagaaggaaacataacaattagatctgaaaatttcacaaacaatgccaaaaccataatagtgcagcttgctaa

SEQ ID NO: 78934 - DNA, 80 bp, synthetic construct
  source 1..80: mol_type = other DNA
atacatgtacaacgaacaagataataggaaacataagacaagcatattgtacaattagtggagcaaaatggaataaaact

SEQ ID NO: 78935 - DNA, 80 bp, synthetic construct
  source 1..80: mol_type = other DNA
aaacaataataaattttgaaccacactcaggaggggacccagaagttacagcacacagttttaactgtggaggggaattt

SEQ ID NO: 78936 - DNA, 80 bp, synthetic construct
  source 1..80: mol_type = other DNA
ttacaacaggtagctacaaaattaaagaaccttcttaacaaaacaataataaattttgaaccacactcaggaggggaccc

SEQ ID NO: 78937 - DNA, 80 bp, synthetic construct
  source 1..80: mol_type = other DNA
ggcagtctagcagaagaagagatcataattagatctgcaaatatctcaagcaatactaaaaacataatagtacagcttaa

SEQ ID NO: 78938 - DNA, 80 bp, synthetic construct
  source 1..80: mol_type = other DNA
gcccaacaacaatacaaggcaaggtgtaggtataggaccaggacaaacgttctttacaacaggcgacataataggagata

SEQ ID NO: 78939 - DNA, 80 bp, synthetic construct
  source 1..80: mol_type = other DNA
taagacaagcacattgtaacattagtggtccaaaatggaatagcactctacacaaggtagctgaagaattaaaagaccgt

SEQ ID NO: 78940 - DNA, 80 bp, synthetic construct
  source 1..80: mol_type = other DNA
cttaacataacaaaaattatttttaaaccacactcaggaggggacccagaaattacaacacacagttttaattgtggagg

SEQ ID NO: 78941 - DNA, 80 bp, synthetic construct
  source 1..80: mol_type = other DNA
attagatctgaaaacattacaagcaatagtaaaaccataatagtgcagcttaatgaatcactaagcattaattgcacaag

SEQ ID NO: 78942 - DNA, 80 bp, synthetic construct
  source 1..80: mol_type = other DNA
aattaggagaccttttaaacaagacaacagtaatctttaaaccatcctcaggaggggacccagaaattacaacacacagc

SEQ ID NO: 78943 - DNA, 80 bp, synthetic construct
  source 1..80: mol_type = other DNA
aaggcccaacaacaatacaagaaagggtatacatataggaccagggcaagcactgtatacaacaggacagataataggac

SEQ ID NO: 78944 - DNA, 80 bp, synthetic construct
  source 1..80: mol_type = other DNA
cgataagacaagcacagtgtgagcttaataagacacaatggaatgaaactttacagcaggtagctagaaaattaggagac

SEQ ID NO: 78945 - DNA, 80 bp, synthetic construct
  source 1..80: mol_type = other DNA
ataattagatctgaaaatctcacaaacaatgctaaaagcataatagtacagcttaatgtatctgtagcgattaactgtac

SEQ ID NO: 78946 - DNA, 80 bp, synthetic construct
  source 1..80: mol_type = other DNA
gcccaaccgaaatgtaagacaaaggacacctataggactagggcaaacactttatacaacaagggtaaacggagacataa

SEQ ID NO: 78947 - DNA, 80 bp, synthetic construct
  source 1..80: mol_type = other DNA
gacaagcacattgtaacattaatagaacaaaatggaataatactttgcaacaggtagctaaaaaattaggaacaattctg

SEQ ID NO: 78948 - DNA, 80 bp, synthetic construct
  source 1..80: mol_type = other DNA
aataagacaataataatttttaactcatcctcaggaggggacccagaagttacaacacacagttttaattgtggagggga

SEQ ID NO: 78949 - DNA, 80 bp, synthetic construct
  source 1..80: mol_type = other DNA
cttagatctgaaaatttcacagacaatactaaaaacataatagtacaattcaatgaatctatagtaattaattgtacaag

SEQ ID NO: 78950 - DNA, 80 bp, synthetic construct
  source 1..80: mol_type = other DNA
aagcatggaacaaagccttagacaaggtagtcacacaattaagaaaacactttaacaaaacaatagtctttactaaatcc

SEQ ID NO: 78951 - DNA, 80 bp, synthetic construct
  source 1..80: mol_type = other DNA
taatagcacttggaacatcacaaagtcagagaataatagcactaatgatgatagaaatgatagaaatataactctctcat

SEQ ID NO: 78952 - DNA, 80 bp, synthetic construct
  source 1..80: mol_type = other DNA
tgcaatttaatagtgcaatttaatgagactgtaagaattaattgcaccagacctagcaacaatacaagaaaaagtgtaca

SEQ ID NO: 78953 - DNA, 80 bp, synthetic construct
  source 1..80: mol_type = other DNA
tgcactgtagatattaattgtacaaggccctacaacaatacaagacaatatacacagataggaccagggcaagcattcta

SEQ ID NO: 78954 - DNA, 80 bp, synthetic construct
  source 1..80: mol_type = other DNA
aacaccagaaagaacctccatttctttggatgggttatgaacttcatcctgacaaatggacagtccagactatacaactg

SEQ ID NO: 78955 - DNA, 80 bp, synthetic construct
  source 1..80: mol_type = other DNA
aattaaagtaaaacaattatgtaaacttcttaggggagctaaggcactaacagaagtagtgccactaacagaagaagcag

SEQ ID NO: 78956 - DNA, 80 bp, synthetic construct
  source 1..80: mol_type = other DNA
aattagaactagcagaaaacagggagattctaaaagaaccagtacatggagtgtattatgacccatcaaaagacttaata

SEQ ID NO: 78957 - DNA, 80 bp, synthetic construct
  source 1..80: mol_type = other DNA
gtatgcaaaagggaggggtactcatactaatgatgtaaaacagttaacagaggcagtgcagaaaatatccatggaaagca

SEQ ID NO: 78958 - DNA, 80 bp, synthetic construct
  source 1..80: mol_type = other DNA
cagcagagagcttcgggtttggggaggagataaccccctctcagaaacaggagcagaaagacaaggagctgtatcctttg

SEQ ID NO: 78959 - DNA, 80 bp, synthetic construct
  source 1..80: mol_type = other DNA
tgcatatttttcagttcccttatatgaagactttaggaagtatacagcatttactatacctagcataaacaatgagacac

SEQ ID NO: 78960 - DNA, 80 bp, synthetic construct
  source 1..80: mol_type = other DNA
attttagagccctttagaacaagaaatccagagatggtgatctaccaatatgtggatgatttatatgtagcatctgactt

SEQ ID NO: 78961 - DNA, 80 bp, synthetic construct
  source 1..80: mol_type = other DNA
atcttagaaccctttagaacaaaaaatccagacatagtcatatgccaatacgtggatgatttgtatgtagcgtctgattt

SEQ ID NO: 78962 - DNA, 80 bp, synthetic construct
  source 1..80: mol_type = other DNA
agaaatagagcaacatagagcaaaaatagaggagctaagagagcatctattgaggtggggatttaccacaccagacaaga

SEQ ID NO: 78963 - DNA, 80 bp, synthetic construct
  source 1..80: mol_type = other DNA
cagcagagagcttcgggttcggagaggagatagccccctccccgaggcaggagccaaagggcaaggagctataccctcct

SEQ ID NO: 78964 - DNA, 80 bp, synthetic construct
  source 1..80: mol_type = other DNA
atatgcaagagtgaggtctgcccacactaatgatgtaaaacaattaacagaagcagtgcaaaaggtagctacagaaagca

SEQ ID NO: 78965 - DNA, 80 bp, synthetic construct
  source 1..80: mol_type = other DNA
aggttttatcaaagtaagacaatatgatcagatacttatagaaattgagggaaaaaaggctataggtacagtattattag

SEQ ID NO: 78966 - DNA, 80 bp, synthetic construct
  source 1..80: mol_type = other DNA
gagactgtaccagtagcattaaagccaggaatggatggcccaaaggttaaacaatggccattgacagaggaaaccaaagc

SEQ ID NO: 78967 - DNA, 80 bp, synthetic construct
  source 1..80: mol_type = other DNA
cgcatatttttcagtccctctagataaagactttagaaaatacactgcattcactatacctagcataaacaatgaaacac

SEQ ID NO: 78968 - DNA, 80 bp, synthetic construct
  source 1..80: mol_type = other DNA
cttagagatagagcagcatagagcaaaaatagaggagttaagagaacacctactaagatggggattcaccacaccagaca

SEQ ID NO: 78969 - DNA, 80 bp, synthetic construct
  source 1..80: mol_type = other DNA
ctgccagaaaaggaggactggactgttaatgatatacaaaaattggtgggaaaactaaattgggcaagtcagatttatgc

SEQ ID NO: 78970 - DNA, 80 bp, synthetic construct
  source 1..80: mol_type = other DNA
agggattaaggtaaagcagttatgtaaactcctcaggggagcaaaaacactaacagatatagtaccactgactgcagaag

SEQ ID NO: 78971 - DNA, 80 bp, synthetic construct
  source 1..80: mol_type = other DNA
caatggagagcttggggacgggggaagagacaacctcctctcaaaagcaggaaccgagggacaaggaactatatcctcct

SEQ ID NO: 78972 - DNA, 80 bp, synthetic construct
  source 1..80: mol_type = other DNA
gaagtatgcaagaacaaagtctgcccacactaatgatgtaaaacaattaacagaagcagtgcaaaagatatccttagaaa

SEQ ID NO: 78973 - DNA, 80 bp, synthetic construct
  source 1..80: mol_type = other DNA
gcatagtaatatgggggaggactcctaaatttagactacccatgcagaaggagacatgggacacatggtggatggagtat

SEQ ID NO: 78974 - DNA, 80 bp, synthetic construct
  source 1..80: mol_type = other DNA
aaaaagggggtctgcccacactaatgatgtgagacaactgacagaagtggtacaaaaaatatgcttagagagcatagtaa

SEQ ID NO: 78975 - DNA, 80 bp, synthetic construct
  source 1..80: mol_type = other DNA
tatggggaaagattcctaagtttaaattacccatccgaaaggaaacatgggaagtatggtggacagagtattggcaggcc

SEQ ID NO: 78976 - DNA, 80 bp, synthetic construct
  source 1..80: mol_type = other DNA
ccagcaatattccagagtagcatgacaaaaattttagagccctttagggcaaagaatccagaatttgttatctatcaata

SEQ ID NO: 78977 - DNA, 80 bp, synthetic construct
  source 1..80: mol_type = other DNA
cgtggatgacttgtatgtagcgtctgatttggacatagggcagcatagagcaaaaatagaggagttgagagctcatctat

SEQ ID NO: 78978 - DNA, 80 bp, synthetic construct
  source 1..80: mol_type = other DNA
ggagctgggggttttatacaccagacaaaaagcatcagaaagaacccccatttctttggatgggatatgaactccatcct

SEQ ID NO: 78979 - DNA, 80 bp, synthetic construct
  source 1..80: mol_type = other DNA
actaaattgggcaagtcaaatttatgcaggaattaaagtaaagcaactgtgtaaactcctcaggggaaccaaagcattaa

SEQ ID NO: 78980 - DNA, 80 bp, synthetic construct
  source 1..80: mol_type = other DNA
cggcagagatcttcgagaggatagaggaaataacctcctctcagaagcaggaaccaattttctctcagaagcaggaacag

SEQ ID NO: 78981 - DNA, 80 bp, synthetic construct
  source 1..80: mol_type = other DNA
agggacaaggaaccactataccctcccttagcttccctcaaatcactctttggcagcgacccctagtcacagtaaaaata

SEQ ID NO: 78982 - DNA, 80 bp, synthetic construct
  source 1..80: mol_type = other DNA
atggccattgacagaagaaaaaataaaggcattaacagaaatttgcaatgaactggaaaaggaaggaaaaatttcaaaaa

SEQ ID NO: 78983 - DNA, 80 bp, synthetic construct
  source 1..80: mol_type = other DNA
ttcagagagctcaataagagaactcaggacttctgggaagtccaattaggaataccgcatccagcggggctaaaaaagaa

SEQ ID NO: 78984 - DNA, 80 bp, synthetic construct
  source 1..80: mol_type = other DNA
aaagtcagtaacagtactagatgtgggggatgcatatttttcagttcctttacatgaaagctttagaaagtatactgcat

SEQ ID NO: 78985 - DNA, 80 bp, synthetic construct
  source 1..80: mol_type = other DNA
tcaccctacccagtacaaacaatgagacaccagggattaggtatcagtacaatgtgcttcctcaaggatggaaagggtca

SEQ ID NO: 78986 - DNA, 80 bp, synthetic construct
  source 1..80: mol_type = other DNA
tgtggatgatttatatgtaggatctgacttagaaatagggcaacatagaacaaaagtagaagaattaagagaacatctaa

SEQ ID NO: 78987 - DNA, 80 bp, synthetic construct
  source 1..80: mol_type = other DNA
tgagatggggatttaccacaccagacgaaaaacatcagaaagaacatccatttctttggatgggatatgaactccatcct

SEQ ID NO: 78988 - DNA, 80 bp, synthetic construct
  source 1..80: mol_type = other DNA
ccgagggacaagggactatatcctcctctaacttccctcaaatcactctttggcaacgaccagtagtcacagtaaaaata

SEQ ID NO: 78989 - DNA, 80 bp, synthetic construct
  source 1..80: mol_type = other DNA
ttgggcctgaaaatccatacaatactccaatatttgccataaagaaaaaaggtggtactagatggagaaaaatagtagat

SEQ ID NO: 78990 - DNA, 80 bp, synthetic construct
  source 1..80: mol_type = other DNA
gcaactgtgtaaactcctcaggggagccaaagcactaacagatatagtaacactgactgaggaagcagaattagaattgg

SEQ ID NO: 78991 - DNA, 80 bp, synthetic construct
  source 1..80: mol_type = other DNA
cagagaacagggaaattctaaaagaacctgtacatggagtatattatgatccaacaaaagacttaatagcagaaatacag

SEQ ID NO: 78992 - DNA, 80 bp, synthetic construct
  source 1..80: mol_type = other DNA
gaggtctgcccacactaatgatgtaaaacaattaacagaggtagtgcaaaaaatatctacagaaagcatagtaatatggg

SEQ ID NO: 78993 - DNA, 80 bp, synthetic construct
  source 1..80: mol_type = other DNA
gaaagacccctaaatttagactacccatacaaaaagaaacatgggaaacatggtggatggactattggcaggctacctgg

SEQ ID NO: 78994 - DNA, 80 bp, synthetic construct
  source 1..80: mol_type = other DNA
ttgtgcagacatggaaaaggaaggaaaaatttcaaaaattgggcctgaaaatccatacaatactccaatatttgccataa

SEQ ID NO: 78995 - DNA, 80 bp, synthetic construct
  source 1..80: mol_type = other DNA
agaagaaagatagcactaaatggagaaaattagtagattttagagaactcaataagagaacccaagatttctgggaggtc

SEQ ID NO: 78996 - DNA, 80 bp, synthetic construct
  source 1..80: mol_type = other DNA
agttcccttagatgaagaatttagaaagtatactgcattcactatacctagtgtaaataatgagacaccagggattagat

SEQ ID NO: 78997 - DNA, 80 bp, synthetic construct
  source 1..80: mol_type = other DNA
atcagtacaatgtgcttccacagggatggaaaggatcaccagcaatatttcaggcaagcctgacaaaaatcttagagccc

SEQ ID NO: 78998 - DNA, 80 bp, synthetic construct
  source 1..80: mol_type = other DNA
tttagatcacaaaatccagaaatagttatctgtcaatacgtggatgacttgtatgtaggatctgatttggaaatagggca

SEQ ID NO: 78999 - DNA, 80 bp, synthetic construct
  source 1..80: mol_type = other DNA
gcatagagcaaaaatagaggagctgagagctcatttattgaaatggggatttactacaccagacaaaaagtatcagaaag

SEQ ID NO: 79000 - DNA, 80 bp, synthetic construct
  source 1..80: mol_type = other DNA
ctgcccaacaaggatagctggactgccaatgatatacagaaattggtgggaaaactaaattgggcaagtcaaatttactc

SEQ ID NO: 79001 - DNA, 80 bp, synthetic construct
  source 1..80: mol_type = other DNA
cagcagagaactttgggatggaggaaaagataacttctgcccagaagcaggaaccggaggacaagggactatatcctcct

SEQ ID NO: 79002 - DNA, 80 bp, synthetic construct
  source 1..80: mol_type = other DNA
gacttctgggaggtacaattaggaatacctcatcccgcgggactaaaaaagaagaaatcggtaacaatactggatgtggg

SEQ ID NO: 79003 - DNA, 80 bp, synthetic construct
  source 1..80: mol_type = other DNA
ggatgcatatttttcaattcccttagatgtagactttagaaagtatactgcattcactatacctaggacaaataatgaga

SEQ ID NO: 79004 - DNA, 80 bp, synthetic construct
  source 1..80: mol_type = other DNA
aagcagaattagaattggcagaaaacagggagattctaaaagaccctgtgcatggggtgtattatgacccatcaaaagac

SEQ ID NO: 79005 - DNA, 80 bp, synthetic construct
  source 1..80: mol_type = other DNA
cagcagaggccctgggaatgggagaggagataacctcctctctgaagcaggagaagaaggacagggaaccttacagggaa

SEQ ID NO: 79006 - DNA, 80 bp, synthetic construct
  source 1..80: mol_type = other DNA
atcaagactgtaccagtaacattaaagccaggaatggatggaccaaaagttaaacaatggccattgtcagaagaaaaaat

SEQ ID NO: 79007 - DNA, 80 bp, synthetic construct
  source 1..80: mol_type = other DNA
cataattagatctgaaaatatctcaaacaatggtaaaaacataatagtacaacttaatagaaccgtacgaattgagtgtg

SEQ ID NO: 79008 - DNA, 80 bp, synthetic construct
  source 1..80: mol_type = other DNA
taaggcccaataataatacaagacaaagtacacatataggaccagggcaagcaatctatacaaataagataataggagac

SEQ ID NO: 79009 - DNA, 80 bp, synthetic construct
  source 1..80: mol_type = other DNA
ataagaaaagcatattgtaagattaatagcacagattggaataccactttacagcaagtagctaaacaattaggaagtct

SEQ ID NO: 79010 - DNA, 80 bp, synthetic construct
  source 1..80: mol_type = other DNA
gctgtataaggccctattactacaataaaagacaacgtacacccataggacaagggcaagcactctatacaatgggaaca

SEQ ID NO: 79011 - DNA, 80 bp, synthetic construct
  source 1..80: mol_type = other DNA
agaggaagtgtaggacgaccacactgtaatattagtacagcaagctggaataaaactttacaacaggtagcaaaaagatt

SEQ ID NO: 79012 - DNA, 80 bp, synthetic construct
  source 1..80: mol_type = other DNA
gtaagcacagtacaatgtacacatggaattaagccagtggtggcaacgcaactgctattgaatggcagtctagcagaaga

SEQ ID NO: 79013 - DNA, 80 bp, synthetic construct
  source 1..80: mol_type = other DNA
tcttaatgagtctgtagtaataaattgtacaaggccctacaacaatacaagaaaaggtatacacctaggaccagggcaag

SEQ ID NO: 79014 - DNA, 80 bp, synthetic construct
  source 1..80: mol_type = other DNA
aagaaaaagtgtacgtataggaccaggacaagcattctatgctacaggtgacataataggggatataagacaggcacatt

SEQ ID NO: 79015 - DNA, 80 bp, synthetic construct
  source 1..80: mol_type = other DNA
gtctttaataaatcctcaggaggggatttagaaattacaacacatagttttaattgtgcaggagaatttttctattgtaa

SEQ ID NO: 79016 - DNA, 80 bp, synthetic construct
  source 1..80: mol_type = other DNA
tctacagacaatgccaaaacaataatagtgcaatttaatgagactgtaagaattaattgcaccagacctggcaacaatac

SEQ ID NO: 79017 - DNA, 80 bp, synthetic construct
  source 1..80: mol_type = other DNA
aagcacattgtaatgtcagtgaaaaagcatggaacaaagccttaggcaaggtagtcgcacaattaagaaaacactttaac

SEQ ID NO: 79018 - DNA, 80 bp, synthetic construct
  source 1..80: mol_type = other DNA
tctgaaaatattacaaacaatgccaaaaccataatagtgcaatttaatgagactgtaagaattaattgcaccagacctag

SEQ ID NO: 79019 - DNA, 80 bp, synthetic construct
  source 1..80: mol_type = other DNA
cataatagtacagcttaatgaatctgtagcaattaattgtacacggcccagcaacaatacaagaaaaagtatacgtttcg

SEQ ID NO: 79020 - DNA, 80 bp, synthetic construct
  source 1..80: mol_type = other DNA
gaccagggcaagcattctatgccacagggaatataataggagatataagagaagcacattgcaatattagtgaaacacta

SEQ ID NO: 79021 - DNA, 80 bp, synthetic construct
  source 1..80: mol_type = other DNA
actcaactattgttgaatggcagtttagcagaaggagacataataattagatctgaaaatctcacagataatgctaaaat

SEQ ID NO: 79022 - DNA, 80 bp, synthetic construct
  source 1..80: mol_type = other DNA
cataatagtgcaacttacaaaatctgtacgaattgagtgtacaaggctccggaataatacaagacaaagtatacatatag

SEQ ID NO: 79023 - DNA, 80 bp, synthetic construct
  source 1..80: mol_type = other DNA
aggggacgcagagattacaacacacagttttaattgtggaggggaatttttctactgcaatacaactaagttgtttaata

SEQ ID NO: 79024 - DNA, 80 bp, synthetic construct
  source 1..80: mol_type = other DNA
actcaattactgttgaatggcagcctagcagaagaagaagtaataattagatcggcaaatatcacacaaaatactaaaaa

SEQ ID NO: 79025 - DNA, 80 bp, synthetic construct
  source 1..80: mol_type = other DNA
atctgtagtaattaattgtacaaggcccaacaataatacaagacaaggtgtacatataggaccagggcaagcactcttta

SEQ ID NO: 79026 - DNA, 80 bp, synthetic construct
  source 1..80: mol_type = other DNA
gcttaatgcatctgtagaaattaattgtacaaggccctacaacaatacaagacaatatacacaaataggaccagggcaag

SEQ ID NO: 79027 - DNA, 80 bp, synthetic construct
  source 1..80: mol_type = other DNA
ttgaatggcagtctagcagaagaagagatcataattggctctgaaaatctcacaaacaatgctaaaaacataatagtatg

SEQ ID NO: 79028 - DNA, 80 bp, synthetic construct
  source 1..80: mol_type = other DNA
atttaatgaatctgtagcaatttattgtataaggcctaacaataatacaagacaaagtatacatataggaccagggcaag

SEQ ID NO: 79029 - DNA, 80 bp, synthetic construct
  source 1..80: mol_type = other DNA
cactctatacaacagacataataggagacataagacaagcacagtgtaatcttactagaacaaaatggaatacaactcta

SEQ ID NO: 79030 - DNA, 80 bp, synthetic construct
  source 1..80: mol_type = other DNA
cagcaagtagcaaaaaaattaggaagccttcttaatataacaacaataatttttaactcatcctcaggaggggacccaga

SEQ ID NO: 79031 - DNA, 80 bp, synthetic construct
  source 1..80: mol_type = other DNA
ttgaatggcagcctagcagaagaagagatcataattagatctgcaaatatcacagacaatagtaacaacataatagtaca

SEQ ID NO: 79032 - DNA, 80 bp, synthetic construct
  source 1..80: mol_type = other DNA
cactctatacaacagacataataggaaacataagagaagcacattgtaacattagtggaacaaaatgggataacactcta

SEQ ID NO: 79033 - DNA, 80 bp, synthetic construct
  source 1..80: mol_type = other DNA
caacaggtagctaaaaaattaggaacacttcttaacaaaacagaaataatttttaactcctcctcaggaggggaccaaga

SEQ ID NO: 79034 - DNA, 80 bp, synthetic construct
  source 1..80: mol_type = other DNA
gcttaatgaaactatagaaattacttgtataaggcccaacaacaatacaagaagaagtgtacatatgggaccagggcagg

SEQ ID NO: 79035 - DNA, 80 bp, synthetic construct
  source 1..80: mol_type = other DNA
gctgttgatggcagtctagcagaagaagagataataattagaaccgaaaatcacacagacaatgctaaaaccataatagt

SEQ ID NO: 79036 - DNA, 80 bp, synthetic construct
  source 1..80: mol_type = other DNA
attaacaagacagaaataaattttgaaccatcctcaggaggggacccagagattacaacacatagttttaattgtggagg

SEQ ID NO: 79037 - DNA, 80 bp, synthetic construct
  source 1..80: mol_type = other DNA
gccctccaacaatacaagacgaagtatacatatgggaccaggacaggcactctttgcaacatcaaatataataggagata

SEQ ID NO: 79038 - DNA, 80 bp, synthetic construct
  source 1..80: mol_type = other DNA
aatagggctacatagaacaaaaatagaggagttaagagctcatctatcgagctggggattaaccaccccagacaaaaagc

SEQ ID NO: 79039 - DNA, 80 bp, synthetic construct
  source 1..80: mol_type = other DNA
cagcagagacctgtgggatgggggaagaagcaaccccctccctgaaacaggaacagaaggacagggacaaggaacagctt

SEQ ID NO: 79040 - DNA, 80 bp, synthetic construct
  source 1..80: mol_type = other DNA
caatatttgctataaagaaaaagaacagcaataggtggaggaaattagtagattttagggagctcaataaaagaactcag

SEQ ID NO: 79041 - DNA, 80 bp, synthetic construct
  source 1..80: mol_type = other DNA
aaaatcttagagccctttagaatcaaatatccagacatagttatctgtcagtacgtggatgacttgtatgtaggctctga

SEQ ID NO: 79042 - DNA, 80 bp, synthetic construct
  source 1..80: mol_type = other DNA
ctaccagacaaagacagttggactgtcaatgatatacagaaattagtgggaaaactaaattgggccagtcagatttatcc

SEQ ID NO: 79043 - DNA, 80 bp, synthetic construct
  source 1..80: mol_type = other DNA
cagcagagaacctggggatgggggaagagataaccccctccctgaaacaggaacagagggacagggaacagcgccctcct

SEQ ID NO: 79044 - DNA, 80 bp, synthetic construct
  source 1..80: mol_type = other DNA
cttagaaatagggcaacatagaataaagatagaggaattaagagctcatctattgagctggggatttactacaccagaca

SEQ ID NO: 79045 - DNA, 80 bp, synthetic construct
  source 1..80: mol_type = other DNA
cagcagaatacttggggatgaaggaagagatagccccctccctgaaacaggaacagaaagacagggaacaacgtcctcct

SEQ ID NO: 79046 - DNA, 80 bp, synthetic construct
  source 1..80: mol_type = other DNA
agggcaacatagaacaaaagtagaggagttgagagctcatctaatgagctggggattaactaccccagacaaaaagcatc

SEQ ID NO: 79047 - DNA, 80 bp, synthetic construct
  source 1..80: mol_type = other DNA
ccaatttatccttccctcaaatcactctttggcaacgaccccttgtcacagtaagaatagaaggacagctaagagaagct

SEQ ID NO: 79048 - DNA, 80 bp, synthetic construct
  source 1..80: mol_type = other DNA
tagtaggacctacccctgtcaacataattggaagaaacctgttgactcaacttggttgtactttaaattttccaataagt

SEQ ID NO: 79049 - DNA, 80 bp, synthetic construct
  source 1..80: mol_type = other DNA
ataccccagtatttgctataaagaaaaaggacagcactaaatggaggaaactagtagacttcagggagctcaataaaaga

SEQ ID NO: 79050 - DNA, 80 bp, synthetic construct
  source 1..80: mol_type = other DNA
tttagaaatagggcaacacagagcaaaaatagaggagttaagagctcatctattgagctggggattaactaccccagaca

SEQ ID NO: 79051 - DNA, 80 bp, synthetic construct
  source 1..80: mol_type = other DNA
aaaatcttagagccctttagagcaaaaaacccagaaatagttatctatcaatacgtggatgacttattagtaggctctga

SEQ ID NO: 79052 - DNA, 80 bp, synthetic construct
  source 1..80: mol_type = other DNA
ggatgcatttttttcaattcctttacatgaagacttcagaaaatatactgcattcactataccaagtataaacaatggga

SEQ ID NO: 79053 - DNA, 80 bp, synthetic construct
  source 1..80: mol_type = other DNA
cagcagagaactttgggatgagggaagagataaccccctccctgaaacaggaacagaaggacagggagctatgtcctcct

SEQ ID NO: 79054 - DNA, 80 bp, synthetic construct
  source 1..80: mol_type = other DNA
tttagaaataaggcaacatagaacaaaagtagaggagttgagagctcatctattaagctggggatttactacaccagaca

SEQ ID NO: 79055 - DNA, 80 bp, synthetic construct
  source 1..80: mol_type = other DNA
tttagaaatagggcaacatagaacaaaaatagaggagttaagagctcatctgtggagctggggattttatacaccagacg

SEQ ID NO: 79056 - DNA, 80 bp, synthetic construct
  source 1..80: mol_type = other DNA
tcagtttccctcaaatcactctttggcaacgaccaattgtaataataaaaatagaaggacagctaaaagaagctctatta

SEQ ID NO: 79057 - DNA, 80 bp, synthetic construct
  source 1..80: mol_type = other DNA
gaaactgtacctgtagcattgaagccaggaatggatgggccaaaggttaaacaatggccattaacagaagagaaaataaa

SEQ ID NO: 79058 - DNA, 80 bp, synthetic construct
  source 1..80: mol_type = other DNA
agcattaagggacatttgtatggaattggaaaaggaaggaaaaatttcaaaaattgggcctgaaaatccatacaatactc

SEQ ID NO: 79059 - DNA, 80 bp, synthetic construct
  source 1..80: mol_type = other DNA
actcaggacttttgggaagtccagttaggaataccccatccagcgggtttaaaaaagaacaaatcagtaacagtactaga

SEQ ID NO: 79060 - DNA, 80 bp, synthetic construct
  source 1..80: mol_type = other DNA
tgtgggagatgcatatttttcagtccctttagatgaaaacttcagaaagtatactgcattcactataccaagtataaaca

SEQ ID NO: 79061 - DNA, 80 bp, synthetic construct
  source 1..80: mol_type = other DNA
cagcagagatgggggaagagatgaccccctccctgaaacaggaacagaaggacagggagccaagacctccttcaatctcc

SEQ ID NO: 79062 - DNA, 80 bp, synthetic construct
  source 1..80: mol_type = other DNA
ccagtaacattaaagccagggatggatggcccaaaggttaaacaatggccattaacagaagaaaaaataaatgcattaat

SEQ ID NO: 79063 - DNA, 80 bp, synthetic construct
  source 1..80: mol_type = other DNA
cagtatttgttataaagagaaaagatagcactaagtggaggaaactagtagatttcagggagctcaacaaaagaactcag

SEQ ID NO: 79064 - DNA, 80 bp, synthetic construct
  source 1..80: mol_type = other DNA
caccagggatcagatatcagtacaatgtactcccacagggatggaagggatcaccatcaatattccagagtagcatgata

SEQ ID NO: 79065 - DNA, 80 bp, synthetic construct
  source 1..80: mol_type = other DNA
aaaatcttagagccattcagaataaaaaatccagaactagttatctatcaatacgtagatgacttgtatgtaggctctga

SEQ ID NO: 79066 - DNA, 80 bp, synthetic construct
  source 1..80: mol_type = other DNA
tcaatttccctcaaatcactctttggcaacgacccattgtcacagtaaagataggaggacagctaaaagaagctctattg

SEQ ID NO: 79067 - DNA, 80 bp, synthetic construct
  source 1..80: mol_type = other DNA
accatgacaaagatcttagagccttttaggaaacaaaatccagacatggtcatctatcagtacgtggatgatttgtatgt

SEQ ID NO: 79068 - DNA, 80 bp, synthetic construct
  source 1..80: mol_type = other DNA
aggatctgacttagaaatagggcagcatagaacaaagatagaggaactaagagaacatctgttaaagtggggatttacaa

SEQ ID NO: 79069 - DNA, 80 bp, synthetic construct
  source 1..80: mol_type = other DNA
caccagacaaaaaacaccaaaaggaacctccatttctttggatgggttatgaactccatcctgatagatggacagtacag

SEQ ID NO: 79070 - DNA, 80 bp, synthetic construct
  source 1..80: mol_type = other DNA
cctcagaaacaggagacgatagacaaggaactgtatcctttagcctccctcagatcactctttggcaacgacccatcgtc

SEQ ID NO: 79071 - DNA, 80 bp, synthetic construct
  source 1..80: mol_type = other DNA
gatttatccagggattaaggtaaggcaattgtgtaaactccttaggggaaccaaagcactaacagaagtagtaccactaa

SEQ ID NO: 79072 - DNA, 80 bp, synthetic construct
  source 1..80: mol_type = other DNA
caagagaagcagagctagaactggcagaaaacagggaaattctaaaagaaccagtacatggagtgtattatgacccatca

SEQ ID NO: 79073 - DNA, 80 bp, synthetic construct
  source 1..80: mol_type = other DNA
cagccccaccagaagagagcttcaggtttggggaggagacaacaactccccctcagaaacaggagacgatagacaaggaa

SEQ ID NO: 79074 - DNA, 80 bp, synthetic construct
  source 1..80: mol_type = other DNA
ctgtatcctttagcctccctcagatcactctttggcaacgacccatcgtctcaataaagataggggggcaactaaaggaa

SEQ ID NO: 79075 - DNA, 80 bp, synthetic construct
  source 1..80: mol_type = other DNA
gctctattagatacaggagcagatgatacagtattagaagacatggagttgccaggaagatggaaaccaaaaatgatagg

SEQ ID NO: 79076 - DNA, 80 bp, synthetic construct
  source 1..80: mol_type = other DNA
gggaattggaggttttatcaaagtaaaacagtatgatcagatacccatagaaatttgtggacataaaactaaaggtacag

SEQ ID NO: 79077 - DNA, 80 bp, synthetic construct
  source 1..80: mol_type = other DNA
ttgttataaagaaaaaagatagcactaagtggaggaaattagtagatttcagggagctcaataaaagaactcaggacttt

SEQ ID NO: 79078 - DNA, 80 bp, synthetic construct
  source 1..80: mol_type = other DNA
cagcagaagacttggggatgagggaagagatagccccctccctgacacagagagacagggagcaacgtcctccttcaatt

SEQ ID NO: 79079 - DNA, 80 bp, synthetic construct
  source 1..80: mol_type = other DNA
tattatgacccatcaaaagaattaatagctgaactacagaaacaagaccagggccaatggacatatcaaatttatcaaga

SEQ ID NO: 79080 - DNA, 80 bp, synthetic construct
  source 1..80: mol_type = other DNA
tagagccaacagccccaccagcagagagcttcaagttcgaggagacaaccccctctcagaggcaggagcagaaagacagg

SEQ ID NO: 79081 - DNA, 80 bp, synthetic construct
  source 1..80: mol_type = other DNA
gaacccttaacttccctcaaatcactctttggcaacgaccccttgtcacaataaaggtagcggggcagctaagagaggct

SEQ ID NO: 79082 - DNA, 80 bp, synthetic construct
  source 1..80: mol_type = other DNA
ctcttagacacaggagcagatgatacagtattagaggaaataaaattgccaggaatttggaaaccaaaaatgataggggg

SEQ ID NO: 79083 - DNA, 80 bp, synthetic construct
  source 1..80: mol_type = other DNA
ctctgatttagaaatagggcaacatagaacaaaaatagaggagttaagagctcatctaatgcgctggggattaactaccc

SEQ ID NO: 79084 - DNA, 80 bp, synthetic construct
  source 1..80: mol_type = other DNA
cagcagaagacctttggaagggggagataaccccctccctgaaacaggaacagaaagacagggaacagcagcctccttca

SEQ ID NO: 79085 - DNA, 80 bp, synthetic construct
  source 1..80: mol_type = other DNA
attaacagacatttgtactgagatggagaaggaaggaaaaatttcaaaaatagggcctgaaaatccatacaatactccag

SEQ ID NO: 79086 - DNA, 80 bp, synthetic construct
  source 1..80: mol_type = other DNA
atcttagagccatttagatcaaaaaatccagaaatagttatctatcaatacgtggatgacttgtatgtaagctcggattt

SEQ ID NO: 79087 - DNA, 80 bp, synthetic construct
  source 1..80: mol_type = other DNA
cagcagaaatccttgggatgggggaagagaaagatgggggaacagagaaagagagagacagggaacagcatcctccttca

SEQ ID NO: 79088 - DNA, 80 bp, synthetic construct
  source 1..80: mol_type = other DNA
acaggggcagatgatacagtgttagaagacatagatttaccaggaaaatggaagccaaaaatgatagggggaattggagg

SEQ ID NO: 79089 - DNA, 80 bp, synthetic construct
  source 1..80: mol_type = other DNA
ctacccctgtcaacataattggaagaaacatgttgactcagcttggttgcactttaaattttccaataagtcctattgaa

SEQ ID NO: 79090 - DNA, 80 bp, synthetic construct
  source 1..80: mol_type = other DNA
tatttgctataaggaaaaaggacagcactaagtggagaaaagtagtagacttcagggagcttaataaaagaactcaagac

SEQ ID NO: 79091 - DNA, 80 bp, synthetic construct
  source 1..80: mol_type = other DNA
ttttgggaaattcaactaggaataccccatccagcgggtttaaaaaagaaaaaatcagtaacagtgctagatgtggggga

SEQ ID NO: 79092 - DNA, 80 bp, synthetic construct
  source 1..80: mol_type = other DNA
aaaggacagctggactgtcaatgacatacagaaactagtgggtaaattgaattgggcaagtcagatttatgcagggatca

SEQ ID NO: 79093 - DNA, 80 bp, synthetic construct
  source 1..80: mol_type = other DNA
aagtaagacaattatgcaaactccttaggggaaccaaatcactaacagaagtagtacaactaacagaagaagcagagcta

SEQ ID NO: 79094 - DNA, 80 bp, synthetic construct
  source 1..80: mol_type = other DNA
tcaaagtaagacagtatgatcagacgcccatagaaatctgtgggcacaaagttgtaggtacagtattaataggacctaca

SEQ ID NO: 79095 - DNA, 80 bp, synthetic construct
  source 1..80: mol_type = other DNA
acttctcagttcccttagatgaagaattcaggaagtatactgcatttactatacctagtacgaacaatgagacaccaggg

SEQ ID NO: 79096 - DNA, 80 bp, synthetic construct
  source 1..80: mol_type = other DNA
agcagatgacacagtattagaagaaatgaacttgtcaggaaaatggaaaccaaaaatgatagggggaattggaggtttta

SEQ ID NO: 79097 - DNA, 80 bp, synthetic construct
  source 1..80: mol_type = other DNA
cagaaagaacctccattcctttggatggggtatgaacttcatcctgataaatggacagtacagcctatagagctaccaga

SEQ ID NO: 79098 - DNA, 80 bp, synthetic construct
  source 1..80: mol_type = other DNA
aagtaaagcaattgtgtagactccttaggggagccaaagcactgacagatatagtgacactgactgaggaagcagaatta

SEQ ID NO: 79099 - DNA, 80 bp, synthetic construct
  source 1..80: mol_type = other DNA
cagagttagaattggcagagaacagagaaattctaaaagagcctgtacatggagtgtattatgacccatcaaaagagtta

SEQ ID NO: 79100 - DNA, 80 bp, synthetic construct
  source 1..80: mol_type = other DNA
aataccttgggatgggggaagagaagaccccctccctgaaacaggaacagaaagagagggaacaacgccctccttcaatt

SEQ ID NO: 79101 - DNA, 80 bp, synthetic construct
  source 1..80: mol_type = other DNA
tccctcaaatcactctttggcaacgacccattgtcacaataagaatagaaggacagctaaaagaagctctattagacaca

SEQ ID NO: 79102 - DNA, 80 bp, synthetic construct
  source 1..80: mol_type = other DNA
ttttttagggagaatttggcctcgagggaggccaggaaatttccctcagagcagaccagaaccatcagccccaccagcag

SEQ ID NO: 79103 - DNA, 80 bp, synthetic construct
  source 1..80: mol_type = other DNA
tgtgaaattcaattaggaataccccatccagcgggtttagagaagaaaaaatcagtaacagtattagatgtgggggatgc

SEQ ID NO: 79104 - DNA, 80 bp, synthetic construct
  source 1..80: mol_type = other DNA
cagcagagaacttcgggatgggggaagagataaccccctccctgaaacaggaacagaaagacagggaacagagagacagg

SEQ ID NO: 79105 - DNA, 80 bp, synthetic construct
  source 1..80: mol_type = other DNA
ttttttaggaagaatttggccttccagcaaagggaggccaggaaattttcctcagagcagaccagagccatcagccccac

SEQ ID NO: 79106 - DNA, 80 bp, synthetic construct
  source 1..80: mol_type = other DNA
cagtgcagcatgacaaagatcttagagccctttaggttaaaaaatccagaaatagttatctatcaatacatggatgactt

SEQ ID NO: 79107 - DNA, 80 bp, synthetic construct
  source 1..80: mol_type = other DNA
taaagtaaggcaattgtgtaagctcctcaggggagccaaagcactgacagatgtagtggcactgactgaggaagcagaat

SEQ ID NO: 79108 - DNA, 80 bp, synthetic construct
  source 1..80: mol_type = other DNA
cagcagaagacctggggatgggggaagagatgaccccctccctgaaacagggacagagagacagggatcctccttcagtt

SEQ ID NO: 79109 - DNA, 80 bp, synthetic construct
  source 1..80: mol_type = other DNA
ggatgcatatttctcagttcccttggatgaaagcttcagaaagtatactgcattcactataccaagtataaacaatgaga

SEQ ID NO: 79110 - DNA, 80 bp, synthetic construct
  source 1..80: mol_type = other DNA
cagcagagaactttgggatgggggagatacccccctccctgaaacaggagcagaaagacagggaacaggatcatccttca

SEQ ID NO: 79111 - DNA, 80 bp, synthetic construct
  source 1..80: mol_type = other DNA
atttccctcaaatcactctttggcaacgaccccttgtcacagtaagagtagaaggacagctaatagaagctctattagat

SEQ ID NO: 79112 - DNA, 80 bp, synthetic construct
  source 1..80: mol_type = other DNA
tgcatttttttcagttcctttagatgaaagcttcagaaagtacactgcatttactataccaagtataaacaatgagacgc

SEQ ID NO: 79113 - DNA, 80 bp, synthetic construct
  source 1..80: mol_type = other DNA
aaaaatccagaactagttatctgtcaatacgtagatgacttgtatgtaggctctgatctagaaatagggcaacatagaat

SEQ ID NO: 79114 - DNA, 80 bp, synthetic construct
  source 1..80: mol_type = other DNA
aaaaatagaggagttaagagcccatttattgagctgggggtttactacaccagacaaaaagcatcagaaagagcctccat

SEQ ID NO: 79115 - DNA, 80 bp, synthetic construct
  source 1..80: mol_type = other DNA
tcctttggatgggatatgaactccatcctgacaaatggacagtccagcctatagtgttaccagataaagacagctggact

SEQ ID NO: 79116 - DNA, 80 bp, synthetic construct
  source 1..80: mol_type = other DNA
gagagattctaaaagaacctgtgcatggagtatattatgacccatcaaaagatttaatagcagaaatacagaaacaagga

SEQ ID NO: 79117 - DNA, 80 bp, synthetic construct
  source 1..80: mol_type = other DNA
cagcagagaactttgccctgaaacaggaacagaaagacagggaacaatgtcctccttcagtttccctcaaatcactcttt

SEQ ID NO: 79118 - DNA, 80 bp, synthetic construct
  source 1..80: mol_type = other DNA
ggcagcgaccccttgtcacagtcagaataggaggacagttaaaagaagctctattagatacaggagcagatgatacagta

SEQ ID NO: 79119 - DNA, 80 bp, synthetic construct
  source 1..80: mol_type = other DNA
tgatcagatacttatagaaatttgtgggaaaaaagctataggtacggtattagtagggcctacccctgtcaacataattg

SEQ ID NO: 79120 - DNA, 80 bp, synthetic construct
  source 1..80: mol_type = other DNA
ccaggaatggatggcccaaaggttaaacaatggccattaacagaagagaaaataaaagcattaatagacatttgtaatga

SEQ ID NO: 79121 - DNA, 80 bp, synthetic construct
  source 1..80: mol_type = other DNA
acatgaaagcttcagaaagtatactgcattcactataccaagtataaacaatgagacaccagggatcagatatcagtaca

SEQ ID NO: 79122 - DNA, 80 bp, synthetic construct
  source 1..80: mol_type = other DNA
atgtactcccacagggatggaaaggatcaccatcaatattccagagtagcatgacaagaatcttagagccatttagatta

SEQ ID NO: 79123 - DNA, 80 bp, synthetic construct
  source 1..80: mol_type = other DNA
aaagaaggacagtactaagtggagaaaattagtagatttcagagaactcaataaaagaactcaagatttttgggaggtcc

SEQ ID NO: 79124 - DNA, 80 bp, synthetic construct
  source 1..80: mol_type = other DNA
catagagcaaagatagaggagttaagagaacatctgttaaagtggggatttaccacaccagacaagaaacatcagaaaga

SEQ ID NO: 79125 - DNA, 80 bp, synthetic construct
  source 1..80: mol_type = other DNA
aattaggaataccacatccttcagggttgaaaaagaaaaaatcagtgacagtattggatgtgggtgatgcatatttctca

SEQ ID NO: 79126 - DNA, 80 bp, synthetic construct
  source 1..80: mol_type = other DNA
gttcccttagataaagatttcaggaagtatactgcatttaccatacctagtataaacaatgagacaccagggattagata

SEQ ID NO: 79127 - DNA, 80 bp, synthetic construct
  source 1..80: mol_type = other DNA
accagaaagaacctccatttctgtggatggggtatgaactccatcctgataaatggacagtacaacctatagtgctgcca

SEQ ID NO: 79128 - DNA, 80 bp, synthetic construct
  source 1..80: mol_type = other DNA
ttagaaaacaaaatccagacatagttatctatcagtacatggatgatttgtatgttggatctgatttagaaatagggccg

SEQ ID NO: 79129 - DNA, 80 bp, synthetic construct
  source 1..80: mol_type = other DNA
catagaacaaaaatagaggaactgagacaacatttattgaagtggggatttaccacaccagacaagaaacaccagaaaga

SEQ ID NO: 79130 - DNA, 80 bp, synthetic construct
  source 1..80: mol_type = other DNA
aattagggataccacacccagcagggttaaaaaagagaaaatcagtgacagtcctagatgtgggggacgcatatttctca

SEQ ID NO: 79131 - DNA, 80 bp, synthetic construct
  source 1..80: mol_type = other DNA
tgtgaagatatggagaaggaaggaaaaatttcaagagtagggcctgaaaatccatataacactccaatatttgccataaa

SEQ ID NO: 79132 - DNA, 80 bp, synthetic construct
  source 1..80: mol_type = other DNA
ttagaaaacaaaatcaagatatagttatttatcaatacatggatgatttgtatgtaggatctgacttagaaataggagag

SEQ ID NO: 79133 - DNA, 80 bp, synthetic construct
  source 1..80: mol_type = other DNA
gaaaaaggacagcaccaaatggagaaaattagtagatttcagagaacttaataagagaactcaagacttttgggaagttc

SEQ ID NO: 79134 - DNA, 80 bp, synthetic construct
  source 1..80: mol_type = other DNA
ttaggacacaaaacccagacatagatatctatcaatacatggatgacttgtatgtaggatctgatttagaaatagggcaa

SEQ ID NO: 79135 - DNA, 80 bp, synthetic construct
  source 1..80: mol_type = other DNA
ttagagcacaaaatccagacataatcatctatcaatatatggatgacttgtatgtaggatctgacttagaaatagggcaa

SEQ ID NO: 79136 - DNA, 80 bp, synthetic construct
  source 1..80: mol_type = other DNA
gttcctttagataaagaatttagaaagtatactgcatttactatacctagtacaaacaatgagacaccaggagttagata

SEQ ID NO: 79137 - DNA, 80 bp, synthetic construct
  source 1..80: mol_type = other DNA
atcagaaagaacccccattcctttggatgggttatgaactccatcctgataaatggacagtacagcccatagtactgcca

SEQ ID NO: 79138 - DNA, 80 bp, synthetic construct
  source 1..80: mol_type = other DNA
catagagaaaaaatagaggaactaagacaacatctgttgaggtggggatttaccacaccagacaaaaaacatcagaaaga

SEQ ID NO: 79139 - DNA, 80 bp, synthetic construct
  source 1..80: mol_type = other DNA
catagaacaaaaatagaagagttgagagctcatctattgagctggggatttactaccccagacaaaaaacatcagaaaga

SEQ ID NO: 79140 - DNA, 80 bp, synthetic construct
  source 1..80: mol_type = other DNA
gaaaaaggacagcaccaaatggaggaaattagtagactttagagagctcaataaaagaactcaggatttttgggaagttc

SEQ ID NO: 79141 - DNA, 80 bp, synthetic construct
  source 1..80: mol_type = other DNA
cacagaacaaaagtagaggagctaagagctcatctattgagctggggattcactacaccagacaaaaagcatcagaagga

SEQ ID NO: 79142 - DNA, 80 bp, synthetic construct
  source 1..80: mol_type = other DNA
cctcaaatcactctttggcaacgacccattgtcacagtaaagataggaggacagctaagggaagctctgttagacacagg

SEQ ID NO: 79143 - DNA, 80 bp, synthetic construct
  source 1..80: mol_type = other DNA
agagccctttagaagaaaaaatccagaaataattatataccaatacatggatgatttgtatgtagggtctgacttagaaa

SEQ ID NO: 79144 - DNA, 80 bp, synthetic construct
  source 1..80: mol_type = other DNA
caatgatatacagaaattagtaggaaagctaaattgggcaagtcagatttatgcagggattaaagaaagcaactgtgaaa

SEQ ID NO: 79145 - DNA, 80 bp, synthetic construct
  source 1..80: mol_type = other DNA
cctcagaaagacagggaacccttaacttccctcaaatcactctttggcaacgacccttagttacaataaaagtagagggt

SEQ ID NO: 79146 - DNA, 80 bp, synthetic construct
  source 1..80: mol_type = other DNA
gtatttcaggcaagcatgacaaaaatcttgcagccctttagaacagaaaatccagatatagtgatctaccaatatatgga

SEQ ID NO: 79147 - DNA, 80 bp, synthetic construct
  source 1..80: mol_type = other DNA
tgatttatatgtagggtcagacttagagatagggcagcatagagcaaaaatagaagagctgagagaacacttactgagat

SEQ ID NO: 79148 - DNA, 80 bp, synthetic construct
  source 1..80: mol_type = other DNA
caaaaatgaggactgcccacactaatgatataaaacagttaacagaggcagtgcaaaaaatagctgtagaaagcatagta

SEQ ID NO: 79149 - DNA, 80 bp, synthetic construct
  source 1..80: mol_type = other DNA
agagccctttagggcacaaaatccagaaatagttatttatcaatatatggatgacttatatgtaggatctgatttagaaa

SEQ ID NO: 79150 - DNA, 80 bp, synthetic construct
  source 1..80: mol_type = other DNA
gatgtaaaaaattggatgacagaaaccttgttggtccaaaatgcgaacccagattgcaagactatcttaaaagcattggg

SEQ ID NO: 79151 - DNA, 80 bp, synthetic construct
  source 1..80: mol_type = other DNA
aaatgcgaacccagattgcaagactatcttaaaagcattgggaccagcagctacactagaagaaatgatgacagcatgtc

SEQ ID NO: 79152 - DNA, 80 bp, synthetic construct
  source 1..80: mol_type = other DNA
taagacaaggaccaaaggaaccctttagagactatgtagaccggttctataaaactctaagagccgagcaagcttcacag

SEQ ID NO: 79153 - DNA, 80 bp, synthetic construct
  source 1..80: mol_type = other DNA
tccagaagtaatacccatgtttacagcattatcagagggagccaccccacaagatttgaatactatgctaaacaccgtgg

SEQ ID NO: 79154 - DNA, 80 bp, synthetic construct
  source 1..80: mol_type = other DNA
gggggcatcaagcagctatgcaaatgctaaaggatactatcaatgaagaagctgcagagtgggatagaatacatccacaa

SEQ ID NO: 79155 - DNA, 80 bp, synthetic construct
  source 1..80: mol_type = other DNA
caggcagggcctattccaccaggccagataagagaaccaaggggaagtgatatcgcaggaactactagtaccctgcagga

SEQ ID NO: 79156 - DNA, 80 bp, synthetic construct
  source 1..80: mol_type = other DNA
acaaataacatggatgaccagcaatccaccaatcccagtgggagaaatttataaaagatggataatcctgggattaaaca

SEQ ID NO: 79157 - DNA, 80 bp, synthetic construct
  source 1..80: mol_type = other DNA
ccatcctaagagcattaggagcaggagctacactagaagaaatgatgaaaggcatgtcaaggaggcgaggcccagtccaa

SEQ ID NO: 79158 - DNA, 80 bp, synthetic construct
  source 1..80: mol_type = other DNA
agattctttaaaactttgagagctgagcaagccacacaggatgtaaaaaattggatgacagacaccttgttagtccaaaa

SEQ ID NO: 79159 - DNA, 80 bp, synthetic construct
  source 1..80: mol_type = other DNA
tgcgaacccagattgtaagaccatcctaagagcattaggagcaggagctacactagaagaaatgatgaaaggcatgtcaa

SEQ ID NO: 79160 - DNA, 80 bp, synthetic construct
  source 1..80: mol_type = other DNA
gcaagggcaatgacacaccagcccatctcacctaggactttaaatgcatgggtaaaagtaatagaagaaaaggccttcag

SEQ ID NO: 79161 - DNA, 80 bp, synthetic construct
  source 1..80: mol_type = other DNA
aggggaagtgacatagcaggaactactagtacccttcaagaacaaatagggtggatgacaagcaatccacctgtcccagt

SEQ ID NO: 79162 - DNA, 80 bp, synthetic construct
  source 1..80: mol_type = other DNA
gggagaaatctataaaagatggatagttctgggattaaataagatagtaagaatgtatagccctgtcagcattttggaca

SEQ ID NO: 79163 - DNA, 80 bp, synthetic construct
  source 1..80: mol_type = other DNA
taaaacaagggccaaaagaaccctttagagattatgtagacaggttctttaaaactttaagagctgaacaatctacgcag

SEQ ID NO: 79164 - DNA, 80 bp, synthetic construct
  source 1..80: mol_type = other DNA
tgtaagtccattttaagagcattaggatcaggggctacattagaagaaatgatgacagcatgtcagggagtgggaggacc

SEQ ID NO: 79165 - DNA, 80 bp, synthetic construct
  source 1..80: mol_type = other DNA
gaggtaaaaaactggatgacagaaaccttgctggtccagaatgcgaatccagactgtaagtccattttaagagcattagg

SEQ ID NO: 79166 - DNA, 80 bp, synthetic construct
  source 1..80: mol_type = other DNA
ttgaatgcctgggtaaaggtgatagaggaaaaggcttttagcccagaagtaatacccatgtttacagcattatcagaggg

SEQ ID NO: 79167 - DNA, 80 bp, synthetic construct
  source 1..80: mol_type = other DNA
tgcaacagatgcttcaaatgacacatcatactcccatgcgaataaacagattataaacatgtggcaggaggtaggacagc

SEQ ID NO: 79168 - DNA, 80 bp, synthetic construct
  source 1..80: mol_type = other DNA
attcaaggagtaagaaactgtgcatcaaacattacagggctcttgctacaggagatggtggtaatatattacaatgacac

SEQ ID NO: 79169 - DNA, 80 bp, synthetic construct
  source 1..80: mol_type = other DNA
ccaattttaccaaaactagtaatagcagtactaataatagcaatatcactactactcctatgagcactaccactgctagt

SEQ ID NO: 79170 - DNA, 80 bp, synthetic construct
  source 1..80: mol_type = other DNA
aagtttgaaacaggtagttaaaaaattaagaaagcactttaataataagacaataatctttaaaccaccttcaggaggag

SEQ ID NO: 79171 - DNA, 80 bp, synthetic construct
  source 1..80: mol_type = other DNA
ccaactttaccaagactagtaatagcagtactaccactgctactcctactatgagctctaccactgctagtcctatgcaa

SEQ ID NO: 79172 - DNA, 80 bp, synthetic construct
  source 1..80: mol_type = other DNA
gaagtacaaaactgttcttttaatatgactacagaactaagagataaacggagggaggtctatgcacttttttataaact

SEQ ID NO: 79173 - DNA, 80 bp, synthetic construct
  source 1..80: mol_type = other DNA
tgatgtagtacaaactggggaagacaattatacttatatgttaataaattgtaatacttcagtcattaagcaagcttgtc

SEQ ID NO: 79174 - DNA, 80 bp, synthetic construct
  source 1..80: mol_type = other DNA
caaaggtgacctttgatccaattcccattcattattgtgctccagctggttatgcgattttaaagtgtaatgagaagaat

SEQ ID NO: 79175 - DNA, 80 bp, synthetic construct
  source 1..80: mol_type = other DNA
tttaatggaacaggactctgcaaaaatgtcagctcagtacaatgcacacatggaattaagccagtggtaccaactcaatt

SEQ ID NO: 79176 - DNA, 80 bp, synthetic construct
  source 1..80: mol_type = other DNA
tgcaatttaaagaatctgtgaacattagttgtatcagaccctccaacaatacaagaacaagtgtacgtataggaccagga

SEQ ID NO: 79177 - DNA, 80 bp, synthetic construct
  source 1..80: mol_type = other DNA
caagtgttctatagaacaggagagataacaggaaatataagacaagcatattgtgagattaatggaacaaaatggaatga

SEQ ID NO: 79178 - DNA, 80 bp, synthetic construct
  source 1..80: mol_type = other DNA
tgtaatcagcttatgggatcaaagtctaaagccatgtgtaaagttaactcccctctgcgttacaatgaattgtaccgcag

SEQ ID NO: 79179 - DNA, 80 bp, synthetic construct
  source 1..80: mol_type = other DNA
ccaattttaccaaaactagtaatagcagtactaattataccagtaccactgctactcctactatgagctctaccactgct

SEQ ID NO: 79180 - DNA, 80 bp, synthetic construct
  source 1..80: mol_type = other DNA
agtcctatgcaagaagtacaaaactgttcttttaatatgactacagaactaagagataaacggaaggaggtctatgcact

SEQ ID NO: 79181 - DNA, 80 bp, synthetic construct
  source 1..80: mol_type = other DNA
tttttataaacttgatatagtacaaactggggaagacaattatacttatatgttaataaattgtaatacttcagtcatta

SEQ ID NO: 79182 - DNA, 80 bp, synthetic construct
  source 1..80: mol_type = other DNA
agcaggcttgtccaaaggtaacctttgatccaattcccattcattattgtgctccagctggttatgcgattttaaagtgt

SEQ ID NO: 79183 - DNA, 80 bp, synthetic construct
  source 1..80: mol_type = other DNA
aatgaggaaaattttagtggaacaggactctgcaaaaatgtcagctcagtacaatgcacacatggaattaagccagtggt

SEQ ID NO: 79184 - DNA, 80 bp, synthetic construct
  source 1..80: mol_type = other DNA
atcaactcaattgctgttaaatggcagtctagcaaaagaggaagtagtaatcagatcagaaaatttcacaaacaatgcca

SEQ ID NO: 79185 - DNA, 80 bp, synthetic construct
  source 1..80: mol_type = other DNA
aaaccataatagtgcaatttaaagaatctgtgaacattagttgtatcagaccccccaacaatacaagaacaagtgtacgt

SEQ ID NO: 79186 - DNA, 80 bp, synthetic construct
  source 1..80: mol_type = other DNA
actttaataataagacaataatctttcaaccaccttcaggaggagatctagaagttacaatgcatagttttaattgtgga

SEQ ID NO: 79187 - DNA, 80 bp, synthetic construct
  source 1..80: mol_type = other DNA
ccacaagaaataaaactggtaaatgtaacagaacattttaacatgtggaaaaataacatggttgaacaaatgcaggagga

SEQ ID NO: 79188 - DNA, 80 bp, synthetic construct
  source 1..80: mol_type = other DNA
ataggaccaggacaagtgttctatagaacaggagagataacaggaaatataagacaagcatattgtgagattaatggaac

SEQ ID NO: 79189 - DNA, 80 bp, synthetic construct
  source 1..80: mol_type = other DNA
aaaatggaatgaaaatttaaaacaggtagttaaaaaattaagaaagcactttaataataagacaataatctttcaaccac

SEQ ID NO: 79190 - DNA, 80 bp, synthetic construct
  source 1..80: mol_type = other DNA
tttttataatctagatgtagtaaaaactagggaaaacagtagtacttatatgttaatacattgtaataattcagtcatta

SEQ ID NO: 79191 - DNA, 80 bp, synthetic construct
  source 1..80: mol_type = other DNA
aagtctaaagccatgtgtaaagttaactcccctctgcgttacaatgaattgtaccgcggccaactttaccaaaaccagta

SEQ ID NO: 79192 - DNA, 80 bp, synthetic construct
  source 1..80: mol_type = other DNA
ataacaatactaatactaccactgctactccttctataagctctaccactgctagtcctatgcaagaagtacaaaactgt

SEQ ID NO: 79193 - DNA, 80 bp, synthetic construct
  source 1..80: mol_type = other DNA
tcttttaatatgactacagaactaagagataaacggaaggaggtctatgcacttttttataaacttgatgtagtacaaac

SEQ ID NO: 79194 - DNA, 80 bp, synthetic construct
  source 1..80: mol_type = other DNA
tggggaagacaattatacttatatgttaataaattgtaatacttcagtcattaagcaggcttgtccaaaggtgacctttg

SEQ ID NO: 79195 - DNA, 80 bp, synthetic construct
  source 1..80: mol_type = other DNA
atccaattcccattcattattgtgctccagctggttatgcgattttaaagtgtaatgaggagaattttaatggaacagga

SEQ ID NO: 79196 - DNA, 80 bp, synthetic construct
  source 1..80: mol_type = other DNA
ctttgcaaaaatgtcagctcagtacaatgcacacatggaattaagccagtggtatcaactcaattgctgttaaatggcag

SEQ ID NO: 79197 - DNA, 80 bp, synthetic construct
  source 1..80: mol_type = other DNA
tctagcaaaagaggagatagtaatcagatcagaaaatctcacaaacaatgccaaaaccataatagtgcaatttaaagaat

SEQ ID NO: 79198 - DNA, 80 bp, synthetic construct
  source 1..80: mol_type = other DNA
ctgtgaacattagttgtatcagaccctccaacaatacaagaacaagtgtacgtataggaccaggacaaatgttctataga

SEQ ID NO: 79199 - DNA, 80 bp, synthetic construct
  source 1..80: mol_type = other DNA
aatgtaacagaaaattttaacatgtggaaaaataacatggtagaacaaatgcaggaggatgtaatcagcttatgggatca

SEQ ID NO: 79200 - DNA, 80 bp, synthetic construct
  source 1..80: mol_type = other DNA
acaggagagataacaggaaatataagacaagcatattgtgagattaatggaacaaaatggaatgaaaatttaaaacaggt

SEQ ID NO: 79201 - DNA, 80 bp, synthetic construct
  source 1..80: mol_type = other DNA
agttaaaaaattaagaaagcactttaataataagacaataatctttaaaccaccttcaggaggagatctagaaattacaa

SEQ ID NO: 79202 - DNA, 80 bp, synthetic construct
  source 1..80: mol_type = other DNA
ccaattttaccaaaactagtaatagcagtactaatgctacccaaacccctactactcctatgagctctaccactgctagt

SEQ ID NO: 79203 - DNA, 80 bp, synthetic construct
  source 1..80: mol_type = other DNA
taatagtgcaatttaaggaatctgtgaacattacttgtattagaccctccaacaatacaagaacaagtgtacgtatagga

SEQ ID NO: 79204 - DNA, 80 bp, synthetic construct
  source 1..80: mol_type = other DNA
ccaattttaccaaaactagtaatagcaatactaatactaccactgctactcctcctacgagcactaccactgctagtcct

SEQ ID NO: 79205 - DNA, 80 bp, synthetic construct
  source 1..80: mol_type = other DNA
gagaattttaatggaacaggactctgcagaaatgtcagctcagtacaatgcacacatggaattaagccagtggtatcaac

SEQ ID NO: 79206 - DNA, 80 bp, synthetic construct
  source 1..80: mol_type = other DNA
tcaattgctgttaaatggcagtctagcaaaagaggaaatagtaatcagatcagaaaatctcacaaacaatgccaaaacca

SEQ ID NO: 79207 - DNA, 80 bp, synthetic construct
  source 1..80: mol_type = other DNA
gaatgaaaatttaaaacaggtggttaaaaaattaagaaagcactttaataataagacaataatctttaaaccaccttcag

SEQ ID NO: 79208 - DNA, 80 bp, synthetic construct
  source 1..80: mol_type = other DNA
tgtaaagttaactcctctctgcgttactttagagtgttataactataacttcaatatcacctctgatatgcaaggggaag

SEQ ID NO: 79209 - DNA, 80 bp, synthetic construct
  source 1..80: mol_type = other DNA
cagggcaaacgttctatgcaacaggtgacataacaggggatataagacaagcacattgtaccgttaatgggacagaatgg

SEQ ID NO: 79210 - DNA, 80 bp, synthetic construct
  source 1..80: mol_type = other DNA
aatggaacagaatggaatgcaactttacaacgggtggctacacaattaaggaagcactttagtaatacaacaacaataat

SEQ ID NO: 79211 - DNA, 80 bp, synthetic construct
  source 1..80: mol_type = other DNA
taaaaaactgctctttcaatatgaccacagaactaagagataagaaatagaaagttcatgcacttttttataaacttgat

SEQ ID NO: 79212 - DNA, 80 bp, synthetic construct
  source 1..80: mol_type = other DNA
tttagagtgtcataactatgacttcaagagcaacacctctgatatgcaaggggtaaaaaactgctctttcaatatgacca

SEQ ID NO: 79213 - DNA, 80 bp, synthetic construct
  source 1..80: mol_type = other DNA
gagcagatgcatgtagatataattagtctatgggaccaaagcctaaagccatgtgtaaagttaactcctctctgcgttac

SEQ ID NO: 79214 - DNA, 80 bp, synthetic construct
  source 1..80: mol_type = other DNA
tgtaaagttaactcctctctgcgttactttagagtgtcatgactatagcttcaatagcagcacccctggcaatcgcagta

SEQ ID NO: 79215 - DNA, 80 bp, synthetic construct
  source 1..80: mol_type = other DNA
gcacttttttataaacttgatgtagtacaaattggtaatggtaataatagtaataatagtaatagtcagtatagattaat

SEQ ID NO: 79216 - DNA, 80 bp, synthetic construct
  source 1..80: mol_type = other DNA
aaattgtaatacctcagccattacacaggcttgtccaaaggtatcctttgagccaattcctatacattattgtgccccag

SEQ ID NO: 79217 - DNA, 80 bp, synthetic construct
  source 1..80: mol_type = other DNA
ctggttttgcaattctaaagtgtagggataaaaggttcaatggaacagggccatgcaagaatgtcagcacagtacaatgc

SEQ ID NO: 79218 - DNA, 80 bp, synthetic construct
  source 1..80: mol_type = other DNA
tgaaaatatcacaaacaatgtcaaaaccataatagtacagttggataagcctgtaaaaattaaatgtgtcagacctagca

SEQ ID NO: 79219 - DNA, 80 bp, synthetic construct
  source 1..80: mol_type = other DNA
acaatacaagaagcagtgtacgtataggaccagggcaaacgttctatgcaacaggtgacataacaggggatataagacaa

SEQ ID NO: 79220 - DNA, 80 bp, synthetic construct
  source 1..80: mol_type = other DNA
acacatggaatcaagccagtagtatcaactcaattgttgttaaatggcagtctagcagaagaagggatagcgattagatc

SEQ ID NO: 79221 - DNA, 80 bp, synthetic construct
  source 1..80: mol_type = other DNA
tgtaaagttaactcctctctgcgttacttttgagtgtcataactatgacttcaagagcaacacctctgatatgcaagggg

SEQ ID NO: 79222 - DNA, 80 bp, synthetic construct
  source 1..80: mol_type = other DNA
gtagtacaaattggtaatgataataatagtaataatcagtatagattaataaattgtaatacctcagccattacacaggc

SEQ ID NO: 79223 - DNA, 80 bp, synthetic construct
  source 1..80: mol_type = other DNA
caattgctgttaaatggcagcctagcagaagaagagatagcgattagatctgaaaatatcacaaacaatgtcaaaaccat

SEQ ID NO: 79224 - DNA, 80 bp, synthetic construct
  source 1..80: mol_type = other DNA
atgggatgcaaatttacaacgggtggctacacaattaaggaagcactttagtaatacaacaacaataatctttactaacc

SEQ ID NO: 79225 - DNA, 80 bp, synthetic construct
  source 1..80: mol_type = other DNA
tttaacatgtggaaaaataccatagtagagcagatgcatgtagatataattagtctatgggaccaaagcctaaagccatg

SEQ ID NO: 79226 - DNA, 80 bp, synthetic construct
  source 1..80: mol_type = other DNA
aaacagaaagttcatgcacttttttataaacttgatgtagtacaaattggtaatgataataatagtaataatcagtatag

SEQ ID NO: 79227 - DNA, 80 bp, synthetic construct
  source 1..80: mol_type = other DNA
atagcttcaatagcagcacccctggcaatcgcagtatacctagtgatatgcaaggggtaaaagactgctctttcaatatg

SEQ ID NO: 79228 - DNA, 80 bp, synthetic construct
  source 1..80: mol_type = other DNA
accacagaactaagagataagaaacagaaagttcatgcacttttttataaacttgatgtagtacaaattggtaatggtaa

SEQ ID NO: 79229 - DNA, 80 bp, synthetic construct
  source 1..80: mol_type = other DNA
taatagtaataatagtaatagtcagtatagattaataaattgtaatacctcagccattacacaggcttgtccaaaggtat

SEQ ID NO: 79230 - DNA, 80 bp, synthetic construct
  source 1..80: mol_type = other DNA
tggcagcctagcagaagaagagatagcgattagatctgaaaatatcacaaacaatgtcaaaaccataatagtacagttgg

SEQ ID NO: 79231 - DNA, 80 bp, synthetic construct
  source 1..80: mol_type = other DNA
ataagcctgtaaaaattaaatgtgtcagacctagcaacaatacaagaagcagtgtacgtatagggccaggacaaacgttc

SEQ ID NO: 79232 - DNA, 80 bp, synthetic construct
  source 1..80: mol_type = other DNA
tatgcaacaggtgacataacaggggatataagacaagcacattgtacagttaatggaacagaatgggatgcaaatttaca

SEQ ID NO: 79233 - DNA, 80 bp, synthetic construct
  source 1..80: mol_type = other DNA
acgggtggctacacaattaaggaagcactttagtaatacaacaacaataatctttactaaccactcaggaggggatttag

SEQ ID NO: 79234 - DNA, 80 bp, synthetic construct
  source 1..80: mol_type = other DNA
taatagtagtagtcagtatagattaataaattgtaatacctcagccattacacaggcttgtccaaaggtatcctttgagc

SEQ ID NO: 79235 - DNA, 80 bp, synthetic construct
  source 1..80: mol_type = other DNA
agcagaagaagagatagcgattagatctgaaaatatcacaaacaatgtcaaaaccataatagtacagttggataagcctg

SEQ ID NO: 79236 - DNA, 80 bp, synthetic construct
  source 1..80: mol_type = other DNA
taaaaattaaatgtgtcagacctagcaacaatacaagaagcagtgtacgtataggaccagggcaaacgttctatgcaaca

SEQ ID NO: 79237 - DNA, 80 bp, synthetic construct
  source 1..80: mol_type = other DNA
ggtgacgtaacaggggatataagacgagcatattgtgtagttaatggaacagaatggaatgcaactttacaacgggtggc

SEQ ID NO: 79238 - DNA, 80 bp, synthetic construct
  source 1..80: mol_type = other DNA
tacacaattaaggaagcactttagtaatacaacaacaataatcttcactaaccattcaggaggggatttagaaattacca

SEQ ID NO: 79239 - DNA, 80 bp, synthetic construct
  source 1..80: mol_type = other DNA
atgacttcaagagcaacacctctgatatgcaaggggaagtaaaaaactgctctttcaatatgaccacagaactaagagat

SEQ ID NO: 79240 - DNA, 80 bp, synthetic construct
  source 1..80: mol_type = other DNA
aagaaacagaaagttcatgcacttttttataaacttgatgtagtacaaattggtaatggtaatagtagtggtagtcagta

SEQ ID NO: 79241 - DNA, 80 bp, synthetic construct
  source 1..80: mol_type = other DNA
gtgccccagctggttttgcaattctaaagtgtaaggataaaaagttcaatggaacagggccatgcaagaatgtcagcaca

SEQ ID NO: 79242 - DNA, 80 bp, synthetic construct
  source 1..80: mol_type = other DNA
aattagatctgaaaatatcacaaacaatgtcaaaaccataatagtacagttggataagcctgtaaaaattaaatgtgtca

SEQ ID NO: 79243 - DNA, 80 bp, synthetic construct
  source 1..80: mol_type = other DNA
gacctagcaacaatacaagaagcagtgtacgtataggaccagggcaaacgttttatgcaacaggtgacataacaggggat

SEQ ID NO: 79244 - DNA, 80 bp, synthetic construct
  source 1..80: mol_type = other DNA
ataagacaagcacattgtacagttaacggaacagaatgggatgcaactttacaacgggtggctacacaattaaggaagca

SEQ ID NO: 79245 - DNA, 80 bp, synthetic construct
  source 1..80: mol_type = other DNA
tcaatatcaacacctctggcaatcgcagcacacctagtgatatgcaaggggaagtaaaaaactgctctttcaatatgacc

SEQ ID NO: 79246 - DNA, 80 bp, synthetic construct
  source 1..80: mol_type = other DNA
ttcccatacattattgtgccccagctggttttgcaactctaaagtgtaaggataaaaagttcaatggaacagggccatgc

SEQ ID NO: 79247 - DNA, 80 bp, synthetic construct
  source 1..80: mol_type = other DNA
aagagtgtcagcacagtacaatgcacacatggaatcaagccagtagtatcaactcaattgttgttaaatggcagtctagc

SEQ ID NO: 79248 - DNA, 80 bp, synthetic construct
  source 1..80: mol_type = other DNA
gacataacaggggatataagacgagcacattgtacagttaatggaacagaatgggatgcaactttacaacgggtggctac

SEQ ID NO: 79249 - DNA, 80 bp, synthetic construct
  source 1..80: mol_type = other DNA
caatgcacacatggaatcaagccagtagtatcaactcaactgttgttaaatggcagtctagcagaagaagagatagcaat

SEQ ID NO: 79250 - DNA, 80 bp, synthetic construct
  source 1..80: mol_type = other DNA
cttttttataaacttgatgtagtacaaattggtaatgataataatagtaataatcagtatagattaataaattgtaatac

SEQ ID NO: 79251 - DNA, 80 bp, synthetic construct
  source 1..80: mol_type = other DNA
ggaccaaagcctaaagccatgtgtaaagttaactcctctctgcgctactttagagtgttataactataacttcaatagca

SEQ ID NO: 79252 - DNA, 80 bp, synthetic construct
  source 1..80: mol_type = other DNA
cctctgatatgcaaggggaagtaaaaaactgctctttcaatatgaccacagaactaagagataagaaacagaaagttcat

SEQ ID NO: 79253 - DNA, 80 bp, synthetic construct
  source 1..80: mol_type = other DNA
gcacttttttataaacttgatgtagtacatattgataagggtaataatagtagtagtcagtatagattaataaattgtaa

SEQ ID NO: 79254 - DNA, 80 bp, synthetic construct
  source 1..80: mol_type = other DNA
caattctaaagtgtagggataaaaggttcaatggaacagggccatgcaagaatgtcagcacagtacaatgcacacatgga

SEQ ID NO: 79255 - DNA, 80 bp, synthetic construct
  source 1..80: mol_type = other DNA
atcaagccagtagtatcaactcaattgttgttaaatggcagtctagcagaagaagagataatgattagatctgaaaatat

SEQ ID NO: 79256 - DNA, 80 bp, synthetic construct
  source 1..80: mol_type = other DNA
cacaaacaatgtcaaaaccataatagtacagttggataagcctgtaaaaattaaatgtgtcagacctagcaacaatacaa

SEQ ID NO: 79257 - DNA, 80 bp, synthetic construct
  source 1..80: mol_type = other DNA
gaagcagtgtacgtatagggccaggacaaacgttctatgcaacaggtgacataacaggggatataagacaagcacattgt

SEQ ID NO: 79258 - DNA, 80 bp, synthetic construct
  source 1..80: mol_type = other DNA
ttggaaaatgtaacagaggattttaacatgtggaaaaataccatagtagagcagatgcatgtagatataattagtctatg

SEQ ID NO: 79259 - DNA, 80 bp, synthetic construct
  source 1..80: mol_type = other DNA
acagttaatggaacagaatgggatgcaaatttacaacgggtggctacacaattaaggaagcactttagtaatacaacaac

SEQ ID NO: 79260 - DNA, 80 bp, synthetic construct
  source 1..80: mol_type = other DNA
tataattagtctatgggaccaaagcctaaagccatgtgtacagttaacccctctctgcgttactttagagtgtcatgacg

SEQ ID NO: 79261 - DNA, 80 bp, synthetic construct
  source 1..80: mol_type = other DNA
tcaccaacagctctatcaacaactctagcaacaactctagcattagaaaattgtctagtgacatacaaggagaaataaaa

SEQ ID NO: 79262 - DNA, 80 bp, synthetic construct
  source 1..80: mol_type = other DNA
aactgctctttcaatatgaccacagaactaagagataagaaacagaaagtacatgcacttttttatagacttgatgtagt

SEQ ID NO: 79263 - DNA, 80 bp, synthetic construct
  source 1..80: mol_type = other DNA
acaaattaatgaaacaattattaataatactcagtatagattaataaattgtaatacctcagccattacacagacttgtc

SEQ ID NO: 79264 - DNA, 80 bp, synthetic construct
  source 1..80: mol_type = other DNA
ttcaatggaacagggccatgcaagaatgtcagcacagtacaatgcacacatggaatcaagccagtagtatcaactcaact

SEQ ID NO: 79265 - DNA, 80 bp, synthetic construct
  source 1..80: mol_type = other DNA
gttgttaaatggcagtctagcagaagaagagatagcaattagatctgaaaatatcacaaacaatgtcaaaaccataatag

SEQ ID NO: 79266 - DNA, 80 bp, synthetic construct
  source 1..80: mol_type = other DNA
tacagttggataagcctgtaaaaattaaatgtgtcagacctagcaacaatacaagaagcagtgtacgtataggaccaggg

SEQ ID NO: 79267 - DNA, 80 bp, synthetic construct
  source 1..80: mol_type = other DNA
ttagtaatacaacaacaataatctttactaaccactcaggaggggatttagaaattaccacacatagttttaattgtgga

SEQ ID NO: 79268 - DNA, 80 bp, synthetic construct
  source 1..80: mol_type = other DNA
ccacaagaaatatacttggaaaatgtaacagaggattttaacatgtggaaaaataccatagtagagcagatgcatgtaga

SEQ ID NO: 79269 - DNA, 80 bp, synthetic construct
  source 1..80: mol_type = other DNA
caaacgttctatgcaacaggtgacataacaggggatataagacgagcacattgtacagttaatggaacagaatgggatgc

SEQ ID NO: 79270 - DNA, 80 bp, synthetic construct
  source 1..80: mol_type = other DNA
aactttacaacgggtggctacacaattaaggaagcactttagtaatacaacaacaataatctttactaaccactcaggag

SEQ ID NO: 79271 - DNA, 80 bp, synthetic construct
  source 1..80: mol_type = other DNA
acagaaataaaagataagaagaagaaagaatacgcgcttttctataaactagatttagtatcaattagtgatgataatag

SEQ ID NO: 79272 - DNA, 80 bp, synthetic construct
  source 1..80: mol_type = other DNA
tataaaactaactcccctctgtgttactttaaactgtactgatgtaaaggaaaatagcactgttagtaggaatgccacag

SEQ ID NO: 79273 - DNA, 80 bp, synthetic construct
  source 1..80: mol_type = other DNA
aggcaaataacactaatagtgggaatggcactgtggaaggaggccaaacagaaataaaaaactgctctttcaatgtaacc

SEQ ID NO: 79274 - DNA, 80 bp, synthetic construct
  source 1..80: mol_type = other DNA
aaagcagaatggataaacacgttagcaaaagtagctacacaattacacagcaagtttaacaaaacaatcatttttgataa

SEQ ID NO: 79275 - DNA, 80 bp, synthetic construct
  source 1..80: mol_type = other DNA
tttaacatgtggaaaaataatatggtagaacagatgaatgaggatataatcagtttatgggatgaaagcctaaaaccatg

SEQ ID NO: 79276 - DNA, 80 bp, synthetic construct
  source 1..80: mol_type = other DNA
tatgcaacaggtgaaataataggagatataagaaaagcaaattgtaccatcaataaaacagaatggataaacacgttaga

SEQ ID NO: 79277 - DNA, 80 bp, synthetic construct
  source 1..80: mol_type = other DNA
tgtaaaactaacccccctctgtgttactttaaactgtactgatgcaaaggacaatagcactgctagtgggaataacactg

SEQ ID NO: 79278 - DNA, 80 bp, synthetic construct
  source 1..80: mol_type = other DNA
tgaatggcaaccaagcagaaataaaaaactgctctttcaatgtaaccacagaaataaaagataagaagaagaaagaatac

SEQ ID NO: 79279 - DNA, 80 bp, synthetic construct
  source 1..80: mol_type = other DNA
gcgcttttctataaacttgatttagtatcaattagtgatgatagtagtcataataatagtaattatagtgattataggtt

SEQ ID NO: 79280 - DNA, 80 bp, synthetic construct
  source 1..80: mol_type = other DNA
aataaattgcaatgtctcagtggtcaaacaggcttgcccaaaagtaacctttgagccaattcccatacattattgtgctc

SEQ ID NO: 79281 - DNA, 80 bp, synthetic construct
  source 1..80: mol_type = other DNA
cagctggttttgcgattctaaagtgtgagaataagaatttcagtggaatagggccatgtaacaatgttagtacagtacaa

SEQ ID NO: 79282 - DNA, 80 bp, synthetic construct
  source 1..80: mol_type = other DNA
tgcacacatggaattaaaccagtagtatcaactcagctattgttaaatggcagtctagcagaaggaggggtgagggtcag

SEQ ID NO: 79283 - DNA, 80 bp, synthetic construct
  source 1..80: mol_type = other DNA
atctgaaaactttacagataatactaaaaccataatagtacagcttgacagtcctgtaagaattaattgtatcaggccta

SEQ ID NO: 79284 - DNA, 80 bp, synthetic construct
  source 1..80: mol_type = other DNA
acaacaatacaagaaaaagtatacgtataggaccaggacaagttttctatgcaacaggtgaaataataggagatataaag

SEQ ID NO: 79285 - DNA, 80 bp, synthetic construct
  source 1..80: mol_type = other DNA
aaagcaaattgtactgtcaataaagcagaatggataaacacgttaaaaaaagtagctacacaattacacagcaagtttaa

SEQ ID NO: 79286 - DNA, 80 bp, synthetic construct
  source 1..80: mol_type = other DNA
gaaataataggagatataaagaaagcaaattgtactgtcgataaaacagaatggataaacacgttaggaaaagtagctaa

SEQ ID NO: 79287 - DNA, 80 bp, synthetic construct
  source 1..80: mol_type = other DNA
tataggaccaggacaagttttctatgcaacaggtgaaataataggagatataaagaaagcaaattgtactgtcaataaag

SEQ ID NO: 79288 - DNA, 80 bp, synthetic construct
  source 1..80: mol_type = other DNA
gaaataataggagatataagaaaagcaagttgtaccatcaataaaacagaatggataaacacgttagaaaaagtagctac

SEQ ID NO: 79289 - DNA, 80 bp, synthetic construct
  source 1..80: mol_type = other DNA
tataaaactaacccccctctgtgtcactttaaactgtactgatgcaaaggcaaataatagcactactggtaagaatgaca

SEQ ID NO: 79290 - DNA, 80 bp, synthetic construct
  source 1..80: mol_type = other DNA
ctgcagatgacaaccaaggaggaataaaaaactgctctttcaatgtaaccacagaaataaaagataagaagaagaaagga

SEQ ID NO: 79291 - DNA, 80 bp, synthetic construct
  source 1..80: mol_type = other DNA
atataaagaaagcaaattgtactgtcgataaaacagaatggataaacacgttaggaaaagtagctaaacaattacaaagc

SEQ ID NO: 79292 - DNA, 80 bp, synthetic construct
  source 1..80: mol_type = other DNA
tactgtcgataaaacagaatggataaacacgttaggaaaagtagctaaacaattacaaagcaaaattaacaaaacaatca

SEQ ID NO: 79293 - DNA, 80 bp, synthetic construct
  source 1..80: mol_type = other DNA
ttgatttagtatcaattagtgataataatagtcataataatggtaattatagtgattataggttaataaattgcaatgtc

SEQ ID NO: 79294 - DNA, 80 bp, synthetic construct
  source 1..80: mol_type = other DNA
tcagtggtcaaacaggcttgtccaaaagtaacctttgagccaattcccgtacattattgtgctccagctggttttgcgat

SEQ ID NO: 79295 - DNA, 80 bp, synthetic construct
  source 1..80: mol_type = other DNA
gataatgctaaaaccataatagtacagcttgacagtcctgtaagaattaattgtaccaggcccaacaacaatacaagaaa

SEQ ID NO: 79296 - DNA, 80 bp, synthetic construct
  source 1..80: mol_type = other DNA
aagtatacgtataggaccaggacaagttttctatgcaacaggtgaaataataggagatataagaaaagcaaattgtacca

SEQ ID NO: 79297 - DNA, 80 bp, synthetic construct
  source 1..80: mol_type = other DNA
taccatcaataaaacagaatggataaacacgttagaaaaagtagctacacaattacaaagcaagtttaacaaaccaatca

SEQ ID NO: 79298 - DNA, 80 bp, synthetic construct
  source 1..80: mol_type = other DNA
tgtgtcactttaaactgtactgatgcaaaggcaaataatagcactactggtaagaatgacactgcagatgacaaccaagg

SEQ ID NO: 79299 - DNA, 80 bp, synthetic construct
  source 1..80: mol_type = other DNA
taatagcactactggtaagaatgacactgcagatgacaaccaaggaggaataaaaaactgctctttcaatgtaaccacag

SEQ ID NO: 79300 - DNA, 80 bp, synthetic construct
  source 1..80: mol_type = other DNA
aaataaaagataagaagaagaaagaatacgcgctcttctatagacttgatttagtatcaattagtgataataatagtcat

SEQ ID NO: 79301 - DNA, 80 bp, synthetic construct
  source 1..80: mol_type = other DNA
tgagccaattcccatacattattgtgctccagctggttttgcgattctaaagtgtgagaataagaatttcagtggaatag

SEQ ID NO: 79302 - DNA, 80 bp, synthetic construct
  source 1..80: mol_type = other DNA
agtctagcagaaggaggggtgagggtcagatctaaaaactttacagataatactaaaatcataatagtacagcttgacag

SEQ ID NO: 79303 - DNA, 80 bp, synthetic construct
  source 1..80: mol_type = other DNA
taaagtcaatggaacagaatggaaaaaagcgttaggagaagtagctgcacaattacaaaaccagtttaacaaaacaatca

SEQ ID NO: 79304 - DNA, 80 bp, synthetic construct
  source 1..80: mol_type = other DNA
ttatgggatgaaagcctaaaaccatgtataaaactaacccccctctgtgtcactttaaactgtactgatgcaaaggcaaa

SEQ ID NO: 79305 - DNA, 80 bp, synthetic construct
  source 1..80: mol_type = other DNA
tcaataaaacagaatggatggaagcgttaggaaaagtagctacacaattacatagcaagtttaacaaaacaatcattttt

SEQ ID NO: 79306 - DNA, 80 bp, synthetic construct
  source 1..80: mol_type = other DNA
agaaaaagtagctatacaattaaaaagaaagtttaacaaaacaatcatttttgataagtcctcaggaggggatttagaaa

SEQ ID NO: 79307 - DNA, 80 bp, synthetic construct
  source 1..80: mol_type = other DNA
ggaatagggccatgtaacaatgttagtacagtacaatgtacacatggaattaagccagtagtatcaactcaactattgtt

SEQ ID NO: 79308 - DNA, 80 bp, synthetic construct
  source 1..80: mol_type = other DNA
ttctatgcaacaggtgaaataataggagatataagaaaagcaaattgtaccatcaatgcaacagaatggatgaaagcgtt

SEQ ID NO: 79309 - DNA, 80 bp, synthetic construct
  source 1..80: mol_type = other DNA
tgaaagcctaaaaccatgtataaaactaacccccctctgtgttactttaaactgtactgatgcaaaggaaaatagcactg

SEQ ID NO: 79310 - DNA, 80 bp, synthetic construct
  source 1..80: mol_type = other DNA
ttagtaggaatgccacagaggcaaatagcactaatagtaggaatggcactgtggaaggaggtcaaacagaaataaaaaac

SEQ ID NO: 79311 - DNA, 80 bp, synthetic construct
  source 1..80: mol_type = other DNA
tgctctttcaatgtaaccacagaaataaaagataagaagaagaaagaatacgcgcttctctataaacttgatttagtatc

SEQ ID NO: 79312 - DNA, 80 bp, synthetic construct
  source 1..80: mol_type = other DNA
aattagtgatgataatagtcataataatagtaattatagtgattataggttaataaattgcaatgtctcagtggtcaaac

SEQ ID NO: 79313 - DNA, 80 bp, synthetic construct
  source 1..80: mol_type = other DNA
aggcttgcccaaaagtaacctttgagccaattcccatacattattgtgctccagctggttttgcgattctaaagtgtaag

SEQ ID NO: 79314 - DNA, 80 bp, synthetic construct
  source 1..80: mol_type = other DNA
gataaggatttcaatggaacagggccatgtaacaatgttagtacagtacaatgcacacatggaattaaaccagtagtatc

SEQ ID NO: 79315 - DNA, 80 bp, synthetic construct
  source 1..80: mol_type = other DNA
aactcagctattgttaaatggcagtctagcagaaggaggggtgaggatcagatctgaaaatctcacaaataatgctaaaa

SEQ ID NO: 79316 - DNA, 80 bp, synthetic construct
  source 1..80: mol_type = other DNA
ccataatagtacagcttgacagtcctgtaagaattaattgtaccaggcccaacaacaatacaagaaaaagtatacgtata

SEQ ID NO: 79317 - DNA, 80 bp, synthetic construct
  source 1..80: mol_type = other DNA
gcaagtttaacaaaacaatcatttttgataactcctcaggaggggacttagaaattacaacacatagctttaattgtgga

SEQ ID NO: 79318 - DNA, 80 bp, synthetic construct
  source 1..80: mol_type = other DNA
gaaaatgtaacagaaaattttaacatgtggaaaaataatatggtagaacagatgaatgaggatataatcagtttatggaa

SEQ ID NO: 79319 - DNA, 80 bp, synthetic construct
  source 1..80: mol_type = other DNA
ggaccaggacaagttttctatgcaacaggtgaaataataggagatataagaaaagcaaattgtaccatcaataaaacaga

SEQ ID NO: 79320 - DNA, 80 bp, synthetic construct
  source 1..80: mol_type = other DNA
atggatggaagcgttaggaaaagtagctacacaattacatagcaagtttaacaaaacaatcatttttgataactcctcag

SEQ ID NO: 79321 - DNA, 80 bp, synthetic construct
  source 1..80: mol_type = other DNA
caaaggcaaataatagcactactggtaagaatgacactgcagatggcaaccaaggaggaataaaaaactgctctttcaat

SEQ ID NO: 79322 - DNA, 80 bp, synthetic construct
  source 1..80: mol_type = other DNA
gtaaccacagaaataaaagataagaagaagaaagaatacgcgcttttctataaacttgatttagtatcaattagtgataa

SEQ ID NO: 79323 - DNA, 80 bp, synthetic construct
  source 1..80: mol_type = other DNA
taatagtcataataatagtaattatagtgattataggttaataaattgcaatgtctcagttgtcaaacaggcttgtccaa

SEQ ID NO: 79324 - DNA, 80 bp, synthetic construct
  source 1..80: mol_type = other DNA
aagtaacctttgagccaattcccatacattattgtgctccagctggttttgcgattctaaagtgtgaggataaggatttc

SEQ ID NO: 79325 - DNA, 80 bp, synthetic construct
  source 1..80: mol_type = other DNA
aatggaacagggccatgtaacaatgttagtacagtgcaatgcacacatggaattaaaccagtagtatcaactcagctatt

SEQ ID NO: 79326 - DNA, 80 bp, synthetic construct
  source 1..80: mol_type = other DNA
gttaaatggcagtctagcagaaggaggggtgaggatcagatctgaaaatctcacaaataatgctaaaaccataatagtac

SEQ ID NO: 79327 - DNA, 80 bp, synthetic construct
  source 1..80: mol_type = other DNA
agcttgacagtcctgtaagaattaattgctccaggcccaacaacaatacaagaaaaagtatacgtataggaccaggacaa

SEQ ID NO: 79328 - DNA, 80 bp, synthetic construct
  source 1..80: mol_type = other DNA
gctttctatgcaacaggtgacatagtaggagatataaggaaagcacattgtaacgtcagtggagcagaatggacgaaagc

SEQ ID NO: 79329 - DNA, 80 bp, synthetic construct
  source 1..80: mol_type = other DNA
gttaggagaagtagctacacaattacatagcaagtttaacaaaacaatcatttttgataactcctcaggaggggatttag

SEQ ID NO: 79330 - DNA, 80 bp, synthetic construct
  source 1..80: mol_type = other DNA
ttgacagtcctgtaggaattaattgtatcaggcctaacaacaatacaagaaaaagtatacgtataggaccaggacaagct

SEQ ID NO: 79331 - DNA, 80 bp, synthetic construct
  source 1..80: mol_type = other DNA
aggagaagtagctgcacaattacaaaaccagtttaacaaaacaatcatctttgataaatcctcaggaggggatttagaga

SEQ ID NO: 79332 - DNA, 80 bp, synthetic construct
  source 1..80: mol_type = other DNA
cagatttctctgttaaggagaatatcacagtgtatgacaaccaaacaggaataaaaaactgctctttcaatgtaaccaca

SEQ ID NO: 79333 - DNA, 80 bp, synthetic construct
  source 1..80: mol_type = other DNA
gaaataaaagataagaagaaaaaggaatacgcgcttttctataaacttgatttagcaacaattaatgataataatagtca

SEQ ID NO: 79334 - DNA, 80 bp, synthetic construct
  source 1..80: mol_type = other DNA
taataatagtaattatagtgattataggttaataaattgcaatgtctcagtggtcaaacaggcttgcccaaaagtaacct

SEQ ID NO: 79335 - DNA, 80 bp, synthetic construct
  source 1..80: mol_type = other DNA
gggccatgtaacaatgttagtacagtacaatgcacacatggaattaaaccagtagtatcaactcagctattgttaaatgg

SEQ ID NO: 79336 - DNA, 80 bp, synthetic construct
  source 1..80: mol_type = other DNA
cagtctagcagaaggaggggtgaggatcagatctgaaaatttcacaaataatgctaaaaccataatagtacagcttgaca

SEQ ID NO: 79337 - DNA, 80 bp, synthetic construct
  source 1..80: mol_type = other DNA
gcaacaggtgacataataggagatataaagaaagcatattgtaacgtcagtgaaacagaatggaaaaaggcgttaggaga

SEQ ID NO: 79338 - DNA, 80 bp, synthetic construct
  source 1..80: mol_type = other DNA
caaaggacaataacactgctagtgggaagggcaaggtggaagacaaccaagcaggaataaaaaactgctctttcaatgta

SEQ ID NO: 79339 - DNA, 80 bp, synthetic construct
  source 1..80: mol_type = other DNA
aaatggcagtctagcagaaggaggggtgagggtcagatctgaaaactttacagataatactaaaatcataatagtacagc

SEQ ID NO: 79340 - DNA, 80 bp, synthetic construct
  source 1..80: mol_type = other DNA
caaaggacaatagcactgctagtggaaataacactgtgaatgacaaccaagcagaaataaaaaactgctctttcaatgta

SEQ ID NO: 79341 - DNA, 80 bp, synthetic construct
  source 1..80: mol_type = other DNA
ttctatgcaacaggtgacataataggagatataaggaaagcatattgtaatgtcagtggaacagaatgaataaacacgtt

SEQ ID NO: 79342 - DNA, 80 bp, synthetic construct
  source 1..80: mol_type = other DNA
taatcataatggtagtaatagtagtgattataggttaataaattgcaatgtctcagttgtcaaacaggcttgcccaaaag

SEQ ID NO: 79343 - DNA, 80 bp, synthetic construct
  source 1..80: mol_type = other DNA
ttctatgcaacaggtgaaataataggagatataaagaaagcaaattgtactgtcaataaagcagaatggataaacacgtt

SEQ ID NO: 79344 - DNA, 80 bp, synthetic construct
  source 1..80: mol_type = other DNA
cgttactttaaactgtagccacacaatcaccgcccacaacatcaccaacaatgtcacggacatgcgagaagaaatgaaaa

SEQ ID NO: 79345 - DNA, 80 bp, synthetic construct
  source 1..80: mol_type = other DNA
actgttctttcaatatgaccacagagctaagagataaaagcaagaatgtatattcacttttttatagacttgatatagta

SEQ ID NO: 79346 - DNA, 80 bp, synthetic construct
  source 1..80: mol_type = other DNA
ccaattgatggcaataataataacaataatagtgagtatagattaataaattgtaatgtctcaaccattaaacaggcttg

SEQ ID NO: 79347 - DNA, 80 bp, synthetic construct
  source 1..80: mol_type = other DNA
ctgctgttgaatggcagtctagcagaggaagaggtagtaattagatctgaaaatatcacaaacaatgccaagaccataat

SEQ ID NO: 79348 - DNA, 80 bp, synthetic construct
  source 1..80: mol_type = other DNA
agtacagtttgatgagcctgtacaaattacttgtactagacccaacaacaatacaaggcaaggtgtacatataggaccag

SEQ ID NO: 79349 - DNA, 80 bp, synthetic construct
  source 1..80: mol_type = other DNA
atggtagaacagatgcatgaggatataatcagcttatgggatgaaagcctaaagccatgtgtaaaattgacccctctctg

SEQ ID NO: 79350 - DNA, 80 bp, synthetic construct
  source 1..80: mol_type = other DNA
gacaagtattctatgcaacgggtgcaataataggggatataagacaagcacattgtaatgtcagtgcaacagattgggat

SEQ ID NO: 79351 - DNA, 80 bp, synthetic construct
  source 1..80: mol_type = other DNA
ataagacaagcacattgtaatgtcagtgcaacagattgggatagagctttacagaaggtagctacaaagttagggaaaca

SEQ ID NO: 79352 - DNA, 80 bp, synthetic construct
  source 1..80: mol_type = other DNA
ttttaaagtgtaaggataagaatttcaatggagcagggccatgtaaaaatgtcagcacagtacaatgcacacatggaatc

SEQ ID NO: 79353 - DNA, 80 bp, synthetic construct
  source 1..80: mol_type = other DNA
aagccagtagtgtctactcaactgctgttgaatggcagtctagcagaggaagaggtagtaattagatctgaaaatatcac

SEQ ID NO: 79354 - DNA, 80 bp, synthetic construct
  source 1..80: mol_type = other DNA
aaacaatgccaagaccataatagtacagtttgatgagcctgtacaaattacttgtactagacccaacaacaatacaaggc

SEQ ID NO: 79355 - DNA, 80 bp, synthetic construct
  source 1..80: mol_type = other DNA
gtcagtgcaacagattgggatagagctttacagaaggtagctacaaagttagggaaacattttaacaaaaaattaatgaa

SEQ ID NO: 79356 - DNA, 80 bp, synthetic construct
  source 1..80: mol_type = other DNA
tgtaaaattaacccctctctgcgttactttaaactgtagccacacaatcaccacccacaacatcaccaacaatgtcacgg

SEQ ID NO: 79357 - DNA, 80 bp, synthetic construct
  source 1..80: mol_type = other DNA
ttttatagacttgatatagtaccaattgatggcaataataataacaataacagtgggtatagattaataaattgtaatgt

SEQ ID NO: 79358 - DNA, 80 bp, synthetic construct
  source 1..80: mol_type = other DNA
atcagcttatgggatgaaagcctaaagccatgtgtaaaattgacccctctctgcgttactttaagctgtagccacacaat

SEQ ID NO: 79359 - DNA, 80 bp, synthetic construct
  source 1..80: mol_type = other DNA
ctgtagccacacaatcaccgcccacaacatcaccaacaatgtcacggacatgcgagaagaaatgaaaaactgttctttca

SEQ ID NO: 79360 - DNA, 80 bp, synthetic construct
  source 1..80: mol_type = other DNA
atatgaccacagagctaagagataaaagcaagaatgtatattcacttttttatagacttgatatagtaccaattgatggc

SEQ ID NO: 79361 - DNA, 80 bp, synthetic construct
  source 1..80: mol_type = other DNA
aataataataacaataatagtgagtatagattaataaattgtaatgtctcaaccattaaacaggcttgtccaaaggtgac

SEQ ID NO: 79362 - DNA, 80 bp, synthetic construct
  source 1..80: mol_type = other DNA
ttttgacccaattcccattcattattgtgctccagctggttttgcgattttaaagtgtaaggataagaatttcaatggaa

SEQ ID NO: 79363 - DNA, 80 bp, synthetic construct
  source 1..80: mol_type = other DNA
cagggccatgtaaaaatgtcagcacagtacaatgcacacatggaatcaagccagtagtgtctactcaactgctgttgaat

SEQ ID NO: 79364 - DNA, 80 bp, synthetic construct
  source 1..80: mol_type = other DNA
ggcagtctagcagaggaagaggtagtaattagatctgaaaatatcacaaacaatgccaagaccataatagtacagtttga

SEQ ID NO: 79365 - DNA, 80 bp, synthetic construct
  source 1..80: mol_type = other DNA
tgagcctgtacaaattacttgtactagacccaacaacaatacaaggcaaggtgtacatataggaccaggacaagtattct

SEQ ID NO: 79366 - DNA, 80 bp, synthetic construct
  source 1..80: mol_type = other DNA
atgcaacgggtgcaataataggggatataagacaagcacattgtaatgtcagtgcaacagattgggatagagctttacag

SEQ ID NO: 79367 - DNA, 80 bp, synthetic construct
  source 1..80: mol_type = other DNA
atgcatgaggatataatcagcttatgggatgaaagcctaaagccatgtgtaaaattgacccctctctgcgttactttaaa

SEQ ID NO: 79368 - DNA, 80 bp, synthetic construct
  source 1..80: mol_type = other DNA
gccatgtgtaaaattgacccctctctgcgttactttaaactgtggccacacaatcaccgcccacaacatcaccaacaatg

SEQ ID NO: 79369 - DNA, 80 bp, synthetic construct
  source 1..80: mol_type = other DNA
tcacggacatgcgagaagaaatgaaaaactgttctttcaatatgaccacagagctaagagataaaagcaagaatgtatat

SEQ ID NO: 79370 - DNA, 80 bp, synthetic construct
  source 1..80: mol_type = other DNA
tcacttttttatagacttgatatagtaccaattgatggcaataataataacaataatagtgagtatagattaataaattg

SEQ ID NO: 79371 - DNA, 80 bp, synthetic construct
  source 1..80: mol_type = other DNA
ctgtggcgacatcaccatcaccaacaccaccaccaccaactccactgtcgagagtgaaatgcaaagaaaaataaaaaact

SEQ ID NO: 79372 - DNA, 80 bp, synthetic construct
  source 1..80: mol_type = other DNA
gttctttcaatatgaccacagaactaagagataagagaaagagtgtatattcacttttttataaacttgatatagtacca

SEQ ID NO: 79373 - DNA, 80 bp, synthetic construct
  source 1..80: mol_type = other DNA
attaatgacaatagtggtgggtacagattaataaattgtaatgtctcaaccattaaacaggcttgtccaaaggtgacttt

SEQ ID NO: 79374 - DNA, 80 bp, synthetic construct
  source 1..80: mol_type = other DNA
gtgaggtcaatgaaacaaaatggaataatactttacagaaggtagctaaaaagttatggaaacattttaacaaaacaata

SEQ ID NO: 79375 - DNA, 80 bp, synthetic construct
  source 1..80: mol_type = other DNA
gccagtagtaattaattgtactagaccctacaacaatacaaggacaggtgtacatataggaccaggacaagtattctatg

SEQ ID NO: 79376 - DNA, 80 bp, synthetic construct
  source 1..80: mol_type = other DNA
caacaggtgaaataacaggggatataagaaaagcatattgtgaggtcaatgaaacaaaatggaataatactttacagaag

SEQ ID NO: 79377 - DNA, 80 bp, synthetic construct
  source 1..80: mol_type = other DNA
caatcaccacctacaacatcaccaacaatgtcacggacatgcgaggagaaatgaaaaactgttctttcaatatgaccaca

SEQ ID NO: 79378 - DNA, 80 bp, synthetic construct
  source 1..80: mol_type = other DNA
gagctaagagataaaagcaagaatgtatattcacttttttatagacttgatatagtaccaattgatggcaataataataa

SEQ ID NO: 79379 - DNA, 80 bp, synthetic construct
  source 1..80: mol_type = other DNA
aaaaatgtcagctcagtacaatgcacacatggaatcaagccagtagtgtctactcaactgctgttgaatggcagtctagc

SEQ ID NO: 79380 - DNA, 80 bp, synthetic construct
  source 1..80: mol_type = other DNA
attttaacaacaaaacaataatcttcactgaatcctcaggaggggatttaggaattacaacacatagctttaattgtgga

SEQ ID NO: 79381 - DNA, 80 bp, synthetic construct
  source 1..80: mol_type = other DNA
gcagtaacaggggatataagaaaagcatattgtaatgttagtgcaacaaaatggcataaagctttacagaaggtagctac

SEQ ID NO: 79382 - DNA, 80 bp, synthetic construct
  source 1..80: mol_type = other DNA
aaagttagggaaacattttaacaacaaaacaataatcttcactgaatcctcaggaggggatttaggaattacaacacata

SEQ ID NO: 79383 - DNA, 80 bp, synthetic construct
  source 1..80: mol_type = other DNA
ttaattgtactagacccagcaacaatacaaggacaggggtacatataggaccaggacaagtattctatgcaacaggtgca

SEQ ID NO: 79384 - DNA, 80 bp, synthetic construct
  source 1..80: mol_type = other DNA
ccacgagaattagatctggaaaatgtaacagaatattttaatatgtggaaaaataacatggtagaacagatgcatgagga

SEQ ID NO: 79385 - DNA, 80 bp, synthetic construct
  source 1..80: mol_type = other DNA
aaatcaccacccacaacatcaccaacaatggcacggaggacatgctaagagaagtaaaaaactgttctttcaatatgacc

SEQ ID NO: 79386 - DNA, 80 bp, synthetic construct
  source 1..80: mol_type = other DNA
acagaactaagagataagatacagaatgtatattcacttttttataaacttgatatagtaccaattaatagcaatgataa

SEQ ID NO: 79387 - DNA, 80 bp, synthetic construct
  source 1..80: mol_type = other DNA
ccagagtagtgagtatagattaataaattgtaatgtctcaaccattaaacaggcttgtccaaaggtgacttttgacccaa

SEQ ID NO: 79388 - DNA, 80 bp, synthetic construct
  source 1..80: mol_type = other DNA
ttcccattcattattgtgctccagctggttttgcgattttaaagtgtaaggataagaatttcaatggaacaggaccatgt

SEQ ID NO: 79389 - DNA, 80 bp, synthetic construct
  source 1..80: mol_type = other DNA
agaggaagaggtaataattagatctgaaaatctcacaaacaatgccaagaccataatagtacagtttgatgagcctgtac

SEQ ID NO: 79390 - DNA, 80 bp, synthetic construct
  source 1..80: mol_type = other DNA
aaattacttgtactagacccaacaacaatacaaggcaaggtgtacatataggaccaggacaagtattctatgcaacgggt

SEQ ID NO: 79391 - DNA, 80 bp, synthetic construct
  source 1..80: mol_type = other DNA
gcaataataggggatataagacaagcacattgtaatgtcagtgcaacagattgggatagagctttacagaaggtagctac

SEQ ID NO: 79392 - DNA, 80 bp, synthetic construct
  source 1..80: mol_type = other DNA
aaagttagggaaacattttaacaaaaaattaatgaattttactgaatcctcaggaggggatttagaaattacaacacata

SEQ ID NO: 79393 - DNA, 80 bp, synthetic construct
  source 1..80: mol_type = other DNA
tataatcagcttatgggatgaaagcctaaagccatgtgtaacattaacccctctctgcgttaccttaaactgtagcaacg

SEQ ID NO: 79394 - DNA, 80 bp, synthetic construct
  source 1..80: mol_type = other DNA
tcaccacaccaaccacaccaacccccactgtcacaacaacccccaatggcacgggtgcaccaaccacaccaacccccaat

SEQ ID NO: 79395 - DNA, 80 bp, synthetic construct
  source 1..80: mol_type = other DNA
gtcacggatgacataaaaagagaaatgacaaactgttctttcaatatgaccacagaactaagagataagatacagaatgt

SEQ ID NO: 79396 - DNA, 80 bp, synthetic construct
  source 1..80: mol_type = other DNA
atattcacttttttataaacttgatatagtaccaattaatagcaataataacaatagtagtgagtatagattaataaatt

SEQ ID NO: 79397 - DNA, 80 bp, synthetic construct
  source 1..80: mol_type = other DNA
gtaatgtctcaaccattaaacaagcttgtccaaaggtgacttttgacccaattcccattcattattgtgctccagctggt

SEQ ID NO: 79398 - DNA, 80 bp, synthetic construct
  source 1..80: mol_type = other DNA
tttgcgattttaaagtgtaaggataagaatttcaatggaacgggactatgtaaaaatgtcagcacagtacaatgcacaca

SEQ ID NO: 79399 - DNA, 80 bp, synthetic construct
  source 1..80: mol_type = other DNA
tggaatcaagccagtagtgtctactcaactactgttgaatggcagtctagcagaggaagaggtagtaattagatctgaaa

SEQ ID NO: 79400 - DNA, 80 bp, synthetic construct
  source 1..80: mol_type = other DNA
atctcacaaacaatgccaagaccataatagtacagtttgatgagcctgtagaaattaattgtactagacccaacaacaat

SEQ ID NO: 79401 - DNA, 80 bp, synthetic construct
  source 1..80: mol_type = other DNA
attttaacaaaaaattaatgaattttactgaatcctcaggaggggatttagaaattacaacacatagctttaattgtgga

SEQ ID NO: 79402 - DNA, 80 bp, synthetic construct
  source 1..80: mol_type = other DNA
acaaggcaaggtgtacatataggaccaggacaagtattctatgcaacgggtgcaataataggggatataagacaagcaca

SEQ ID NO: 79403 - DNA, 80 bp, synthetic construct
  source 1..80: mol_type = other DNA
ttgtaatgtcagtgcaacagattgggatagaactttacagaaggtagctacaaagttagggaaacattttaacaaaaaat

SEQ ID NO: 79404 - DNA, 80 bp, synthetic construct
  source 1..80: mol_type = other DNA
tcaccacaccaaccacaccaacccccattgccacatcaacccccaataccacaccaacccccaatgtcacggatgacata

SEQ ID NO: 79405 - DNA, 80 bp, synthetic construct
  source 1..80: mol_type = other DNA
aaaagagaaatgacaaactgttctttcaatatgaccacagaactaagagataagatacagaatgtatattcactttttta

SEQ ID NO: 79406 - DNA, 80 bp, synthetic construct
  source 1..80: mol_type = other DNA
taaaattgatgtagtaccaattaatagcaatagtaacaatagtagtgagtatagattaataaattgtaatgtcacaacca

SEQ ID NO: 79407 - DNA, 80 bp, synthetic construct
  source 1..80: mol_type = other DNA
ttaaacaagcttgtccaaaggtgacttttgacccaattcccattcattattgtgctccagctggttttgcgattttaaag

SEQ ID NO: 79408 - DNA, 80 bp, synthetic construct
  source 1..80: mol_type = other DNA
tgtaaggataagaatttcaatggaacaggaccatgtaaaaatgtcagcacggtacaatgcacacatggaatcaagccagt

SEQ ID NO: 79409 - DNA, 80 bp, synthetic construct
  source 1..80: mol_type = other DNA
agtgtctactcaactgctgttgaatggcagtctagcagaggaagaggtaataattagatctgaaaatctcacaaacaatg

SEQ ID NO: 79410 - DNA, 80 bp, synthetic construct
  source 1..80: mol_type = other DNA
ccaagaccataatagtacagtttgatgagcctgtagaaattaattgtactagaccctacaacaatacaaggacaggtgta

SEQ ID NO: 79411 - DNA, 80 bp, synthetic construct
  source 1..80: mol_type = other DNA
catataggaccaggacaagtattctatgcaacgggtgaactaataggggatataagacaagcacattgtaatgttagtgc

SEQ ID NO: 79412 - DNA, 80 bp, synthetic construct
  source 1..80: mol_type = other DNA
aacaaaatggcatgaagctttacagaaggtagctacaaagttagggaaacattttaacaaaacaataattttcactgaat

SEQ ID NO: 79413 - DNA, 80 bp, synthetic construct
  source 1..80: mol_type = other DNA
gcatcaatgtcaatatcacggatggggacatgaaaagagaaataaaaaactgttctttcaatatgaccacagaactaaga

SEQ ID NO: 79414 - DNA, 80 bp, synthetic construct
  source 1..80: mol_type = other DNA
gataagagccagaatgtatattcacttttttataaacttgatgtagtaccaattgatagcaaaaataacaatagtagtga

SEQ ID NO: 79415 - DNA, 80 bp, synthetic construct
  source 1..80: mol_type = other DNA
gtatagattaataaattgtaatgtctcaaccattaaacaagcttgtccaaaggtgacttttgacccaattcccattcatt

SEQ ID NO: 79416 - DNA, 80 bp, synthetic construct
  source 1..80: mol_type = other DNA
attgtgctccagctggttttgcgattttaaagtgtaaggataagggtttcaatggaacaggaccatgtaaaagggtcagc

SEQ ID NO: 79417 - DNA, 80 bp, synthetic construct
  source 1..80: mol_type = other DNA
acggtacaatgcacacatggaatcaagccagtagtgtctactcaactgctgttgaatggcagtctagcagagggagaggt

SEQ ID NO: 79418 - DNA, 80 bp, synthetic construct
  source 1..80: mol_type = other DNA
agtaattagatctgaaaatctcacaaacaatgccaagaccataatagtacagtttgatgagcctgtagaaattaattgta

SEQ ID NO: 79419 - DNA, 80 bp, synthetic construct
  source 1..80: mol_type = other DNA
ctagaccctacaacaatacaaggacaggtgtacatataggaccaggacaaacattctacgcaacaggtggaataataggg

SEQ ID NO: 79420 - DNA, 80 bp, synthetic construct
  source 1..80: mol_type = other DNA
gatataagaaaagcatattgtgaggtcaatgaaacaaattggaatgaagctttaaagaaggtagctaaaaagttatggga

SEQ ID NO: 79421 - DNA, 80 bp, synthetic construct
  source 1..80: mol_type = other DNA
taaagaactgctctttcaatataaccacagaaataaaagataagaagaagaaagaatatgctcttttctatagacttgat

SEQ ID NO: 79422 - DNA, 80 bp, synthetic construct
  source 1..80: mol_type = other DNA
taatatcaatggaacagaatggagcaacactttacaacaggtaaagaaaaaattaggagaaatatttaacaagaacataa

SEQ ID NO: 79423 - DNA, 80 bp, synthetic construct
  source 1..80: mol_type = other DNA
agtacagcttaacagtactgtaagaattatctgtatcagacctagcaacaataccagaaaaagtatacatataggaccag

SEQ ID NO: 79424 - DNA, 80 bp, synthetic construct
  source 1..80: mol_type = other DNA
gacaagctctctatgcaacaggtgccatagtaggggacataagacaagcacattgtaatatcaatggaacagaatggagc

SEQ ID NO: 79425 - DNA, 80 bp, synthetic construct
  source 1..80: mol_type = other DNA
tactgatgtacagaatagaactgtagtgggaaatagcactgcaggggtaaataaaacttatactgtatataacccaggag

SEQ ID NO: 79426 - DNA, 80 bp, synthetic construct
  source 1..80: mol_type = other DNA
agaagttcaatggaacagggccatgcaaaaatgtcagcacggtacagtgcacacatggaatcaagccagtggtatcaact

SEQ ID NO: 79427 - DNA, 80 bp, synthetic construct
  source 1..80: mol_type = other DNA
aatagtacagcttaacaataccgtagcaattaattgtaccagacctaacaacaataccagaaaaagtatacatataggac

SEQ ID NO: 79428 - DNA, 80 bp, synthetic construct
  source 1..80: mol_type = other DNA
ctgtactgatgtacagaatagaactataggggaaaatggcactgcagagaataaaacttatactgtatataacccgggag

SEQ ID NO: 79429 - DNA, 80 bp, synthetic construct
  source 1..80: mol_type = other DNA
gatatagtaccaattgatgataataatagtgcaaataattataggttaataaattgtaatgtctcaactgttagacaggc

SEQ ID NO: 79430 - DNA, 80 bp, synthetic construct
  source 1..80: mol_type = other DNA
ctgtccaaaggtaacctttgagccaattcccatacattattgtactccagctgggtttgcgattctaaagtgtagggata

SEQ ID NO: 79431 - DNA, 80 bp, synthetic construct
  source 1..80: mol_type = other DNA
caggacaagctttctatgcaacaggtgacataataggggacataagacaagcacattgtaatgtcagtagaagagaatgg

SEQ ID NO: 79432 - DNA, 80 bp, synthetic construct
  source 1..80: mol_type = other DNA
aaactgtactgatgtacagaatagaactgtagtggaaaatagcactgcagtgaataaaacttatactgtatataacccag

SEQ ID NO: 79433 - DNA, 80 bp, synthetic construct
  source 1..80: mol_type = other DNA
cctgatgtagtgccaattgatgataataatagtataaataattataggttaataaattgtaatgtctcaactgttaaaca

SEQ ID NO: 79434 - DNA, 80 bp, synthetic construct
  source 1..80: mol_type = other DNA
taatgtcagcagagaaaaatggaacaacactttacaacaggtaaagaaaaaattaaaagaaatatttaaccagagcataa

SEQ ID NO: 79435 - DNA, 80 bp, synthetic construct
  source 1..80: mol_type = other DNA
cttaatagtacagcttaacagtactatacaaattaattgtaccaggcctaacaacaataccagaaaaagtatacatatag

SEQ ID NO: 79436 - DNA, 80 bp, synthetic construct
  source 1..80: mol_type = other DNA
tgctaaaatcttaatagtacagcttaacaaaactgtaacaattaattgtaccagacctaacaacaataccagaaaaagta

SEQ ID NO: 79437 - DNA, 80 bp, synthetic construct
  source 1..80: mol_type = other DNA
agaataaaacttatactgtatataacccaggagaaataaagaactgctctttcaatataaccacagaaataaaagataag

SEQ ID NO: 79438 - DNA, 80 bp, synthetic construct
  source 1..80: mol_type = other DNA
cagctgggtttgcgattctaaagtgtagggataagaagttcaatggaacagggtcatgcaaaaatgtcagcacggtacaa

SEQ ID NO: 79439 - DNA, 80 bp, synthetic construct
  source 1..80: mol_type = other DNA
tgtaaagctaacccctctctgtgtaactttaaactgtactgatgtacagaatagaactgtagtggaaaatagcactgcag

SEQ ID NO: 79440 - DNA, 80 bp, synthetic construct
  source 1..80: mol_type = other DNA
aagaagaaagaatacgcgcttttctatagacctgatatagtaccaattgatgataataatagtataaataattataggtt

SEQ ID NO: 79441 - DNA, 80 bp, synthetic construct
  source 1..80: mol_type = other DNA
cataagacaagcacattgtaatgtcagtagaagagaatggaaggacactttgcaacaggtaaagaaaaaattggaaggaa

SEQ ID NO: 79442 - DNA, 80 bp, synthetic construct
  source 1..80: mol_type = other DNA
atcagaaaacctcacaaacaatgctaaaatcttaatagtacagcttaacaaaactgtaacaattaattgtaccagaccta

SEQ ID NO: 79443 - DNA, 80 bp, synthetic construct
  source 1..80: mol_type = other DNA
ctgcagtgaataaaacttatactgtatataacccaggggaaataaagaactgctctttcaatataaccacagaaataaaa

SEQ ID NO: 79444 - DNA, 80 bp, synthetic construct
  source 1..80: mol_type = other DNA
gataagaagaagaaagaatacgcgcttttctatagacctgatgtagtgccaattgacgataataatagtacaaataatta

SEQ ID NO: 79445 - DNA, 80 bp, synthetic construct
  source 1..80: mol_type = other DNA
taggttaataaattgtaatgtctcaactgttagacaggcctgtccaaaggtaacctttgagccaattcccatacattatt

SEQ ID NO: 79446 - DNA, 80 bp, synthetic construct
  source 1..80: mol_type = other DNA
gattagatctgaaaacctcacaaacaatgctaaaatcttaatagtacagcttaacaatactgtagcaattaattgtacca

SEQ ID NO: 79447 - DNA, 80 bp, synthetic construct
  source 1..80: mol_type = other DNA
ataagacaagcacattgtaatatcagcagagaaaaatggaaggacactttacaacaggtaaagaaaaaattagaaggaat

SEQ ID NO: 79448 - DNA, 80 bp, synthetic construct
  source 1..80: mol_type = other DNA
aaaaccatgtgtaaagctaacccctctctgtgtaactttaaactgtactgatgtacagaatagaactgtatgggaaaata

SEQ ID NO: 79449 - DNA, 80 bp, synthetic construct
  source 1..80: mol_type = other DNA
acactgtacaaaatagcactgcagtgaataaaacttatactgtagatgacccaggagaaataaaaaactgctctttcaat

SEQ ID NO: 79450 - DNA, 80 bp, synthetic construct
  source 1..80: mol_type = other DNA
agcagaagaagagataatgattagatctgaaaacttcacaaacaatgctaaaatattaatagtgcagcttaacagtactg

SEQ ID NO: 79451 - DNA, 80 bp, synthetic construct
  source 1..80: mol_type = other DNA
taatgtcagtagaagagaatggaatgacactttacaacaggtaaagaaaaaattagaaggaatatttaaccagaacataa

SEQ ID NO: 79452 - DNA, 80 bp, synthetic construct
  source 1..80: mol_type = other DNA
acagaaaattttaacatgtggaaaaatagtatggtagaacagatgcatgaggatataatcagtttatgggatgaaagctt

SEQ ID NO: 79453 - DNA, 80 bp, synthetic construct
  source 1..80: mol_type = other DNA
ggaatcaagccagtggtatcaactcaactactgttaaatggcagtctagcagaaggggagataatgattagatctgaaaa

SEQ ID NO: 79454 - DNA, 80 bp, synthetic construct
  source 1..80: mol_type = other DNA
cttcacaaacaatgctaaaaccataatagtacagcttaacagtactgtaagaattaactgtatcagacctagcaacaata

SEQ ID NO: 79455 - DNA, 80 bp, synthetic construct
  source 1..80: mol_type = other DNA
ccagaaaaagtatacatataggaccaggacaagctttatatgcaacaggtgccatagtaggggacataagacaagcacat

SEQ ID NO: 79456 - DNA, 80 bp, synthetic construct
  source 1..80: mol_type = other DNA
cttaaaaccatgtgtaaagctaacccctctctgtgtaactttaaactgtactgatgtagagaagaatagcactgtaatga

SEQ ID NO: 79457 - DNA, 80 bp, synthetic construct
  source 1..80: mol_type = other DNA
tagaaaataaaactgtagatagcctgagagaaataaagaactgctctttcaatataaccacagaaataaaagataagaag

SEQ ID NO: 79458 - DNA, 80 bp, synthetic construct
  source 1..80: mol_type = other DNA
aagaaagaatatgctcttttctatagacttgatatagtaccaattgatgataataaaagtacaaataattatatgttaat

SEQ ID NO: 79459 - DNA, 80 bp, synthetic construct
  source 1..80: mol_type = other DNA
aaattgtaatgtctcaactgttaaacaggcctgtccaaaggtaacctttgagccaattcccatacattattgtgctccag

SEQ ID NO: 79460 - DNA, 80 bp, synthetic construct
  source 1..80: mol_type = other DNA
ctggttttgcgattctaaaatgtagggataagacattcaatggatcagggccatgcaaaaatgtcagcacggtacaatgc

SEQ ID NO: 79461 - DNA, 80 bp, synthetic construct
  source 1..80: mol_type = other DNA
tgaaaacttcacaaacaatgctaaaaccttaatagtacagcttaacagtactgtaagaattatctgtatcagacctagca

SEQ ID NO: 79462 - DNA, 80 bp, synthetic construct
  source 1..80: mol_type = other DNA
acaataccagaaaaagtatacatataggaccaggacaagctctctatgcaacaggtgccatagtaggggacataagacaa

SEQ ID NO: 79463 - DNA, 80 bp, synthetic construct
  source 1..80: mol_type = other DNA
gcacattgtaatatcaatggaacagaatggagcaacactttacaacaggtaaagaaaaaattaggagaaatatttaacaa

SEQ ID NO: 79464 - DNA, 80 bp, synthetic construct
  source 1..80: mol_type = other DNA
acacatggaattaagccagtggtatcaactcaactactgttaaatggcagtctagcagaaggagagataatgattagatc

SEQ ID NO: 79465 - DNA, 80 bp, synthetic construct
  source 1..80: mol_type = other DNA
tggaaaataacaaggcagggaataaaacttatactgtatataacccgggagaaataaagaactgctctttcaatataacc

SEQ ID NO: 79466 - DNA, 80 bp, synthetic construct
  source 1..80: mol_type = other DNA
acagaaatacaagataagaaaaagaaagaatacgcgcttttctatagacctgatatagtatcaattgatgataataatag

SEQ ID NO: 79467 - DNA, 80 bp, synthetic construct
  source 1..80: mol_type = other DNA
ggaatgacactttacaacaggtaaagaaaaaattagaaggaatatttaaccagagcataacctttagtaatcactcagga

SEQ ID NO: 79468 - DNA, 80 bp, synthetic construct
  source 1..80: mol_type = other DNA
ttaattgtaccagacctaacaacaacaccaggaaaagtgtacgtataggaccaggacaagttttctatgcaacaggtgac

SEQ ID NO: 79469 - DNA, 80 bp, synthetic construct
  source 1..80: mol_type = other DNA
tacagaatagaactgtagtggaaaatagcactgcagtgaataaaacttatactgtatataacccaggggaaataaagaac

SEQ ID NO: 79470 - DNA, 80 bp, synthetic construct
  source 1..80: mol_type = other DNA
aattgatgataataatagtgcaaataattataggttaataaattgtaatgtctcaactgtcaaacaggcctgtccaaagg

SEQ ID NO: 79471 - DNA, 80 bp, synthetic construct
  source 1..80: mol_type = other DNA
taacttttgagccaattcccatacattattgtgctccagctggttttgcgattctaaaatgtagggataagacattcaat

SEQ ID NO: 79472 - DNA, 80 bp, synthetic construct
  source 1..80: mol_type = other DNA
ggatcagggccatgcaaaaatgtcagcacggtacaatgcacacatggaatcaagccagtggtatcgactcaactactgtt

SEQ ID NO: 79473 - DNA, 80 bp, synthetic construct
  source 1..80: mol_type = other DNA
aaatggcagtctagcagaaggagagataatgattagatctgaaaacttcacaaacaatgctaaaaccataatagtacagc

SEQ ID NO: 79474 - DNA, 80 bp, synthetic construct
  source 1..80: mol_type = other DNA
ttaacagtactgtaagaattaactgtatcagacctagcaacaataccagaaaaagtatacatataggaccaggacaagct

SEQ ID NO: 79475 - DNA, 80 bp, synthetic construct
  source 1..80: mol_type = other DNA
ttatatgcaacaggtgccatagtaggggacataagacaagcacattgtaatatcaatggaacagaatggagcaacacttt

SEQ ID NO: 79476 - DNA, 80 bp, synthetic construct
  source 1..80: mol_type = other DNA
acaacaggtaaagaaaaaattaggagaaatatttaacaagaacataagctttcagaatcccccaggaggggatttagaaa

SEQ ID NO: 79477 - DNA, 80 bp, synthetic construct
  source 1..80: mol_type = other DNA
gccatagtaggggacataagacaagcacattgtaatatcaatggaacagaatggagcaacactttacaacaggtaaagaa

SEQ ID NO: 79478 - DNA, 80 bp, synthetic construct
  source 1..80: mol_type = other DNA
tacagaatagaactgtatgggaaaataacactgtacaaaatagcactgcagtgaataaagcttatactgtagatgaccca

SEQ ID NO: 79479 - DNA, 80 bp, synthetic construct
  source 1..80: mol_type = other DNA
ggagaaataaaaaactgctctttcaatgtaaccacagaaataaaagataagaagaagaaagaatatgcgcttttctatag

SEQ ID NO: 79480 - DNA, 80 bp, synthetic construct
  source 1..80: mol_type = other DNA
acttgatctagtaccaattaatgatgaggatagtacaaatgattataggttaataaattgtaatgtctcaactgttaaac

SEQ ID NO: 79481 - DNA, 80 bp, synthetic construct
  source 1..80: mol_type = other DNA
gataagacattcaatggatcagggccatgcaaaaatgtcagcacggtacaatgcacacatggaatcaagccagtggtatc

SEQ ID NO: 79482 - DNA, 80 bp, synthetic construct
  source 1..80: mol_type = other DNA
gactcaactactgttaaatggcagtctagcagaaggagagataatgattagatctgaaaacttcacaaacaatgctaaaa

SEQ ID NO: 79483 - DNA, 80 bp, synthetic construct
  source 1..80: mol_type = other DNA
ccataatagtacagcttaacagtactgtaagaattaactgtatcagacctagcaacaataccagaaaaagtatacatata

SEQ ID NO: 79484 - DNA, 80 bp, synthetic construct
  source 1..80: mol_type = other DNA
taggagaaatatttaacaagaacataagctttcagaatcccccaggaggggatttagaaattacagcacatagctttaat

SEQ ID NO: 79485 - DNA, 80 bp, synthetic construct
  source 1..80: mol_type = other DNA
ggaccaggacaagctttatatgcaacaggtgccatagtaggggacataagacaagcacattgtaatatcaatggaacaga

SEQ ID NO: 79486 - DNA, 80 bp, synthetic construct
  source 1..80: mol_type = other DNA
atggagcaacactttacaacaggtaaagaaaaaattaggagaaatatttaacaagaacataagctttcagaatcccccag

SEQ ID NO: 79487 - DNA, 80 bp, synthetic construct
  source 1..80: mol_type = other DNA
aaaaatgtcagcacggtacagtgcacacatggaatcaagccagtggtatcaactcaactgctgttaaatggcagcctagc

SEQ ID NO: 79488 - DNA, 80 bp, synthetic construct
  source 1..80: mol_type = other DNA
agaagaaaagataatgattagatcaaaaaacctcacaaacaacgcaaaaatattaatagtacagcttaacagtactgtaa

SEQ ID NO: 79489 - DNA, 80 bp, synthetic construct
  source 1..80: mol_type = other DNA
tagagaagaatagcactgtaatgataaataataaaactatagatagcctgagagaactaaagaactgctctttcaatata

SEQ ID NO: 79490 - DNA, 80 bp, synthetic construct
  source 1..80: mol_type = other DNA
aaatatttaacaagaatataagctttcagaatcccccaggaggggatttagaaattacaacacatagctttaattgtgga

SEQ ID NO: 79491 - DNA, 80 bp, synthetic construct
  source 1..80: mol_type = other DNA
ttaataaaactgtaacaattaattgtactagacctaacaacaataccagaaaaagtatacatataggaccaggacaagct

SEQ ID NO: 79492 - DNA, 80 bp, synthetic construct
  source 1..80: mol_type = other DNA
aaatatttaaccagaacataacctttagtaatcactcaggaggggatttagaaattacaacacatagctttaattgtgga

SEQ ID NO: 79493 - DNA, 80 bp, synthetic construct
  source 1..80: mol_type = other DNA
ttctatgcaacaggtgacataataggggacataagacaagcacattgtaatgtcagtagaaaagaatggaatgacacttt

SEQ ID NO: 79494 - DNA, 80 bp, synthetic construct
  source 1..80: mol_type = other DNA
acaacaggtaaagaaaaaattaaaagaaatatttaaccagaacataacctttagtaatcactcaggaggggatttagaaa

SEQ ID NO: 79495 - DNA, 80 bp, synthetic construct
  source 1..80: mol_type = other DNA
ttaacaatactgtacaaattaattgtaccagacctaacaacaacaccaggaaaagtgtacgtataggaccaggacaagtt

SEQ ID NO: 79496 - DNA, 80 bp, synthetic construct
  source 1..80: mol_type = other DNA
tactgatgtagagaagaatagcactgtaatgataagtaataaaactgtagatagcctgagagaaataaagaactgctctt

SEQ ID NO: 79497 - DNA, 80 bp, synthetic construct
  source 1..80: mol_type = other DNA
gataataaaagtacaaataattatatgttaataaattgtaatgtctcaactgttaaacaggcctgtccaaaggtaacctt

SEQ ID NO: 79498 - DNA, 80 bp, synthetic construct
  source 1..80: mol_type = other DNA
tactgtaagaattagctgtatcagacctggcaacaataccagaaaaagtatacatataggaccaggacaagctttctatg

SEQ ID NO: 79499 - DNA, 80 bp, synthetic construct
  source 1..80: mol_type = other DNA
catgaggatataatcaatttatgggatgaaagcttaaaaccatgtgtaaagctaacccctctctgtgtaactttaaactg

SEQ ID NO: 79500 - DNA, 80 bp, synthetic construct
  source 1..80: mol_type = other DNA
ccctctctgtgtaactttaaactgtactgatgtagagaagaatagcactgtaatgataagtaataaaactgtagatagcc

SEQ ID NO: 79501 - DNA, 80 bp, synthetic construct
  source 1..80: mol_type = other DNA
agacttgatctagtaccaattgatgataataaaagtacaaataattatatgttaataaattgtaatgtctcaactgtcaa

SEQ ID NO: 79502 - DNA, 80 bp, synthetic construct
  source 1..80: mol_type = other DNA
aaaaataacatggtagaacaaatgcatgaggatataatcagtttatgggatgaaagcttaaaaccatgtgtaaagctaac

SEQ ID NO: 79503 - DNA, 80 bp, synthetic construct
  source 1..80: mol_type = other DNA
agaactgctctttcaatgtaaccacagaaatacaagataaaaagaaaaaagaatatgcgcttttctatagacctgatata

SEQ ID NO: 79504 - DNA, 80 bp, synthetic construct
  source 1..80: mol_type = other DNA
gtaccaattgatgataataatacaaataagagtgcaagagattataggttaataaattgtaatgcctcaactgttaaaca

SEQ ID NO: 79505 - DNA, 80 bp, synthetic construct
  source 1..80: mol_type = other DNA
tgtaactttaaactgtactgatgtacagaatagaactataggggaaaatggcaatacagggaataaaacttatactgtat

SEQ ID NO: 79506 - DNA, 80 bp, synthetic construct
  source 1..80: mol_type = other DNA
tgctaaaaccataatagtacagcttaacagtactgtaagaattaactgtatcagacctagcaacaataccagaaaaagta

SEQ ID NO: 79507 - DNA, 80 bp, synthetic construct
  source 1..80: mol_type = other DNA
tacatataggaccaggacaagctttctatgcaacaggtgccataataggggacataagacaagcacattgtaatatcaat

SEQ ID NO: 79508 - DNA, 80 bp, synthetic construct
  source 1..80: mol_type = other DNA
ggaacagaatggagcaacactttacaacaggtaaagaaaaaattaggagaaatatttaacaagaacataagctttcagaa

SEQ ID NO: 79509 - DNA, 80 bp, synthetic construct
  source 1..80: mol_type = other DNA
ctgtgtaactttaaactgtactgatgtacagaatagaactgtagtggaaaatagcactgcagtgaataaaacttatactg

SEQ ID NO: 79510 - DNA, 80 bp, synthetic construct
  source 1..80: mol_type = other DNA
tatataacccaggggaaataaagaactgctctttcaatataaccacagaaataaaagataagaagaagaaagaatacgcg

SEQ ID NO: 79511 - DNA, 80 bp, synthetic construct
  source 1..80: mol_type = other DNA
cttttctatagacctgatatagtaccaattgatgataataaaagtacaaataattatatgttaataaattgtaatgtctc

SEQ ID NO: 79512 - DNA, 80 bp, synthetic construct
  source 1..80: mol_type = other DNA
aactgtcaaacaggcctgtccaaaggtaacctttgagccaattcccatacattattgtgctccagctggttttgcgattc

SEQ ID NO: 79513 - DNA, 80 bp, synthetic construct
  source 1..80: mol_type = other DNA
taaaatgtagggataagacattcaatggatcagggccatgcaaaaatgtcagcacggtacagtgcacacatggaatcaag

SEQ ID NO: 79514 - DNA, 80 bp, synthetic construct
  source 1..80: mol_type = other DNA
ccagtggtatcaactcaactactgttaaatggcagtctagcagaagaagagataatggttagatctgaaaacctcacaaa

SEQ ID NO: 79515 - DNA, 80 bp, synthetic construct
  source 1..80: mol_type = other DNA
caatgctaaaatcttaatagtacagcttaacaatactgtacaaattaattgtaccagacctaacaacaacaccaggaaaa

SEQ ID NO: 79516 - DNA, 80 bp, synthetic construct
  source 1..80: mol_type = other DNA
agcatggtagaacaaatgcatgaggatataatcagtttatgggatgaaagcttaaaaccacgtgtaaagctaacccctct

SEQ ID NO: 79517 - DNA, 80 bp, synthetic construct
  source 1..80: mol_type = other DNA
agtagaagagaatggaatgacactttacaacaggtaaagaaaaaattaaaaggaatatttaaccagaacataacctttag

SEQ ID NO: 79518 - DNA, 80 bp, synthetic construct
  source 1..80: mol_type = other DNA
tgtaactttaaactgcactgatgtagagaagaatagcactgtaatgataaataaaactgtagatagcctgagagaaataa

SEQ ID NO: 79519 - DNA, 80 bp, synthetic construct
  source 1..80: mol_type = other DNA
gtaccaattgatgataataatagtacaaataattataggctaataaattgtaatgtctcaactgtcagacaggcctgtcc

SEQ ID NO: 79520 - DNA, 80 bp, synthetic construct
  source 1..80: mol_type = other DNA
ctgttaaatggcagtctagcagaagaagagataatggttagatctgaaaacctcacaaacaatgctaaaatcttaatagt

SEQ ID NO: 79521 - DNA, 80 bp, synthetic construct
  source 1..80: mol_type = other DNA
ctgtgtaactttaaactgtactgatgtacagaatagaactgtaggggtaaatagcactgtatatgacccgggagaaataa

SEQ ID NO: 79522 - DNA, 80 bp, synthetic construct
  source 1..80: mol_type = other DNA
gtaccaattgataataataatagtacaaataatagtacaaataattatatgttaataaattgtaatgtctcaactgttaa

SEQ ID NO: 79523 - DNA, 80 bp, synthetic construct
  source 1..80: mol_type = other DNA
aatcttaatagtacagcttcacaaggctgtaaaaattaattgtaccagacctaacaacaataccagaaaaagtatacata

SEQ ID NO: 79524 - DNA, 80 bp, synthetic construct
  source 1..80: mol_type = other DNA
taggaccaggacaagctttctatgcaacaggtgacataataggggacataagacaagcacattgtaatgtcagtggaaaa

SEQ ID NO: 79525 - DNA, 80 bp, synthetic construct
  source 1..80: mol_type = other DNA
gaatggaaggatactttacaaaaggtaaagaaaaaattagaaggaatatttaaccagaacataacctttagtaatcactc

SEQ ID NO: 79526 - DNA, 80 bp, synthetic construct
  source 1..80: mol_type = other DNA
attattgtgctccagctggttttgcgattctaaaatgtagggataagacattcaatggatcagggccatgcaaaaatgtc

SEQ ID NO: 79527 - DNA, 80 bp, synthetic construct
  source 1..80: mol_type = other DNA
agcacggtacaatgcacacatggaatcaagccagtggtatcaactcaactactgttaaatggcagtctagcagaaggaga

SEQ ID NO: 79528 - DNA, 80 bp, synthetic construct
  source 1..80: mol_type = other DNA
gataatgattagatctgaaaacttcacaaacaatgctaaaaccttaatagtacagcttaacagtactgtaaaaattaact

SEQ ID NO: 79529 - DNA, 80 bp, synthetic construct
  source 1..80: mol_type = other DNA
aaataattataggttaataaattgtaatgtctcaactgttagacaggcctgtccaaaggtaacctttgagccaattccca

SEQ ID NO: 79530 - DNA, 80 bp, synthetic construct
  source 1..80: mol_type = other DNA
ataggggacataagacaagcacattgtaatgtcagtagaagagaatggaaggacactttacaaaaggtaaagaaaaaatt

SEQ ID NO: 79531 - DNA, 80 bp, synthetic construct
  source 1..80: mol_type = other DNA
ggatgaaagcttaaaaccatgtgtaaagctaacccctctctgtgtaactttaaactgtactgatgtacagaatagaactg

SEQ ID NO: 79532 - DNA, 80 bp, synthetic construct
  source 1..80: mol_type = other DNA
tagtggaaaatagcactgcagtgaataaaacttatactgtatataacccaggggaaataaagaactgctctttcaatgta

SEQ ID NO: 79533 - DNA, 80 bp, synthetic construct
  source 1..80: mol_type = other DNA
accacagaaataaaagataagaagaagaaagaatatgcgcttttctatagacttgatctagtaccaattgatgataataa

SEQ ID NO: 79534 - DNA, 80 bp, synthetic construct
  source 1..80: mol_type = other DNA
aagtacaaataattatatgttaataaattgtaatgtctcaactgttaaacaggcctgtccaaaggtaacctttgagccaa

SEQ ID NO: 79535 - DNA, 80 bp, synthetic construct
  source 1..80: mol_type = other DNA
agaaggagagataatgattagatctgaaaacttcacaaacaacgctaaaaccataatagtacagcttaacagtactgtaa

SEQ ID NO: 79536 - DNA, 80 bp, synthetic construct
  source 1..80: mol_type = other DNA
gaattaactgtatcagacctagcaacaataccagaaaaagtatacatataggaccaggacaagctttctatgcaacaggt

SEQ ID NO: 79537 - DNA, 80 bp, synthetic construct
  source 1..80: mol_type = other DNA
ctggaaaatgtaacagaaaattttaacatgtggaaaaatagcatggtagaacaaatgcatgaggatataatcagtctatg

SEQ ID NO: 79538 - DNA, 80 bp, synthetic construct
  source 1..80: mol_type = other DNA
gacataataggggacataagacaagcacattgtaatgtcagtagaagagaatggaatgacactttacaacaggtaaagaa

SEQ ID NO: 79539 - DNA, 80 bp, synthetic construct
  source 1..80: mol_type = other DNA
aaaattagaagaaatatttaaccagaacataacctttagtaatcactcaggaggggatttagaaattacaacacatagct

SEQ ID NO: 79540 - DNA, 80 bp, synthetic construct
  source 1..80: mol_type = other DNA
agaagaagagataatggttagatctgaaaacctcacaaacaatgctaaaatcttaatagtacagcttaacaatactataa

SEQ ID NO: 79541 - DNA, 80 bp, synthetic construct
  source 1..80: mol_type = other DNA
agaaggagaggtaaagattagagctgaaggcatcacagacaatgctaaaaccataatagtacagcttaacaaaactgtac

SEQ ID NO: 79542 - DNA, 80 bp, synthetic construct
  source 1..80: mol_type = other DNA
ataataggggacataagaaaagcatattgtaatgtcagtcgaaagaattggactgacgttctaaaacaggtagctacaca

SEQ ID NO: 79543 - DNA, 80 bp, synthetic construct
  source 1..80: mol_type = other DNA
gttaggaaaagagtttaacaaaacaagaataacctttgaaaagccctcaggaggggatttagaaattacatcacatagct

SEQ ID NO: 79544 - DNA, 80 bp, synthetic construct
  source 1..80: mol_type = other DNA
cagtttatgggatgaaagtctaaaaccatgtataaagctaacccctctctgtgttactttaaactgtactgatgtaaaga

SEQ ID NO: 79545 - DNA, 80 bp, synthetic construct
  source 1..80: mol_type = other DNA
taaagaataccaacagtactaatacaactaacattgtgaatgaagagatagaaatgaaaaactgctctttcaatataacc

SEQ ID NO: 79546 - DNA, 80 bp, synthetic construct
  source 1..80: mol_type = other DNA
gccgctaaatggcagtctagcagaaggagaggtaaagattagagctgaaggcatcacagacaatgctaaaaccataatag

SEQ ID NO: 79547 - DNA, 80 bp, synthetic construct
  source 1..80: mol_type = other DNA
tacagcttaacaaaactgtacaaattacttgtgtcagacctaacaacaatacaagaaaaagcatacatataggaccagga

SEQ ID NO: 79548 - DNA, 80 bp, synthetic construct
  source 1..80: mol_type = other DNA
caagctttttatgcaacagatataataggggacataagaaaagcatattgtaatgtcagtcgaaagaattggactgacgt

SEQ ID NO: 79549 - DNA, 80 bp, synthetic construct
  source 1..80: mol_type = other DNA
tctaaaacaggtagctacacagttaggaaaagagtttaacaaaacaagaataacctttgaaaagccctcaggaggggatt

SEQ ID NO: 79550 - DNA, 80 bp, synthetic construct
  source 1..80: mol_type = other DNA
tataatcagtttatgggatgaaggtctaaaaccatgtataaggctaactcctctctgtgttactttgaactgtactgatg

SEQ ID NO: 79551 - DNA, 80 bp, synthetic construct
  source 1..80: mol_type = other DNA
taaggaatcacaacagtactgatgtaaagaatagcagcagtactgatacaaacaacactgtaactgggaataacactgtg

SEQ ID NO: 79552 - DNA, 80 bp, synthetic construct
  source 1..80: mol_type = other DNA
ctataaacttgatatagtaccaattaatgatagtaatagtaataatgtaagtgactataggctaataaattgtaatgttt

SEQ ID NO: 79553 - DNA, 80 bp, synthetic construct
  source 1..80: mol_type = other DNA
tcaacaaaattggactgacactctaaaacaggtagctacacagttaggaaaagagtataacaaaacaagaataacctttg

SEQ ID NO: 79554 - DNA, 80 bp, synthetic construct
  source 1..80: mol_type = other DNA
agaaggagaggtaaagattagatctgaaaacttcacagacaatgttaaaaccataatagtacagcttaacaattctgtag

SEQ ID NO: 79555 - DNA, 80 bp, synthetic construct
  source 1..80: mol_type = other DNA
taaggaataccaacagtactaataaaaataacaatactaatacaactaacattgtgaatgaagagatagaaataaaaaac

SEQ ID NO: 79556 - DNA, 80 bp, synthetic construct
  source 1..80: mol_type = other DNA
aattaatggtaggaataatagtgattataggctaataaattgtaatgtttcagccgttaaacaggcttgtccaaaggtaa

SEQ ID NO: 79557 - DNA, 80 bp, synthetic construct
  source 1..80: mol_type = other DNA
cttttgaaccaattcctatacattattgtgctccagctggttttgcgattctgaaatgtagggatgaggatttcaatgga

SEQ ID NO: 79558 - DNA, 80 bp, synthetic construct
  source 1..80: mol_type = other DNA
acaattctgtagaaattacttgtgtcaggcctaacaacaatacaagaaaaagtatacctataggaccaggacaagctttt

SEQ ID NO: 79559 - DNA, 80 bp, synthetic construct
  source 1..80: mol_type = other DNA
ccacaagagatagctttaaaaaatgtaacagaaaattttaacatgtggaagaatagtatggtagaacagatgcatgagga

SEQ ID NO: 79560 - DNA, 80 bp, synthetic construct
  source 1..80: mol_type = other DNA
tatgcaacaggagatataataggggacataagacaagcacattgtaatgtcagtctaggaaattggagtaacgctttaaa

SEQ ID NO: 79561 - DNA, 80 bp, synthetic construct
  source 1..80: mol_type = other DNA
acaggtagctacacagttaggaaaagagtttaacaaaacaaaaataatctttgatgagccctcaggaggggatttagaaa

SEQ ID NO: 79562 - DNA, 80 bp, synthetic construct
  source 1..80: mol_type = other DNA
taaggaatgccaacagtactaatacaactgacaataacaatgtgaatgaacagatagaattaaaaaactgctctttcaat

SEQ ID NO: 79563 - DNA, 80 bp, synthetic construct
  source 1..80: mol_type = other DNA
gaataagagtgactataggctaataaattgtaatgtttcagccgttaaacaggcttgtccaaaggtaacttttgaaccaa

SEQ ID NO: 79564 - DNA, 80 bp, synthetic construct
  source 1..80: mol_type = other DNA
ttcccatacattattgtgctccagctggttttgcgattctaaaatgtggggataagaatttcaatggaacagggctatgc

SEQ ID NO: 79565 - DNA, 80 bp, synthetic construct
  source 1..80: mol_type = other DNA
aaattacttgtgtcagacctaacaacaatacgagaaaaggtatacatataggaccaggacaagctttttatgcaacagga

SEQ ID NO: 79566 - DNA, 80 bp, synthetic construct
  source 1..80: mol_type = other DNA
gatataataggggacataagacaagcacattgtaatgtcagtctaggaaactggagtaacgctttaaaacaggtagctac

SEQ ID NO: 79567 - DNA, 80 bp, synthetic construct
  source 1..80: mol_type = other DNA
acagttaggaaaagagtttagcaaaacaaacataacctttgagaagccctcaggaggggatttagaaattacaacacata

SEQ ID NO: 79568 - DNA, 80 bp, synthetic construct
  source 1..80: mol_type = other DNA
tagtacagcttaacagttctgtaccaattacttgtgccagacctaacaacaatacaagaagaggtatacatataggacca

SEQ ID NO: 79569 - DNA, 80 bp, synthetic construct
  source 1..80: mol_type = other DNA
taacgctttaaaacaggtagctacacagttaggaaaagagtttaacaaaacaaaaataatctttgatgagccctcaggag

SEQ ID NO: 79570 - DNA, 80 bp, synthetic construct
  source 1..80: mol_type = other DNA
aaaacaggtagctatacagttagaaaaagagtttcacaaaaaaatgatctttgagaagccctcaggaggggatttagaaa

SEQ ID NO: 79571 - DNA, 80 bp, synthetic construct
  source 1..80: mol_type = other DNA
taaagaatgccaacagtactaatacaacaactaacaataacaaagtgaatgaagagatagatataaaaaactgctctttc

SEQ ID NO: 79572 - DNA, 80 bp, synthetic construct
  source 1..80: mol_type = other DNA
acagaaataaaagataaaaagaagcaagaatatgcgcttttctataaacttgatatagtaccaattaatggtaggaataa

SEQ ID NO: 79573 - DNA, 80 bp, synthetic construct
  source 1..80: mol_type = other DNA
tagtgattataggctaataaattgtaatgtttcagccgttaagcaggcttgtccaaaggtaacttttgaaccaattccta

SEQ ID NO: 79574 - DNA, 80 bp, synthetic construct
  source 1..80: mol_type = other DNA
gtcagcacagtacaatgcacacatggcatcaagccagtagtatctactcaactgctgttaaatggcagtctagcagaagg

SEQ ID NO: 79575 - DNA, 80 bp, synthetic construct
  source 1..80: mol_type = other DNA
agaggtaaagattagatctgaaaacttcacagacaatgctaaaaccataatagtacagcttaacagttctgtaccaatta

SEQ ID NO: 79576 - DNA, 80 bp, synthetic construct
  source 1..80: mol_type = other DNA
cttgtgccagacctaacaacaatacaagaaaaggtatacatataggaccaggacaagctttttatgcaacaggagatata

SEQ ID NO: 79577 - DNA, 80 bp, synthetic construct
  source 1..80: mol_type = other DNA
aggaaaagagtttagcaaaacaaacataatctttgatgagccctcaggaggggatttagaaattacaacacatagcttta

SEQ ID NO: 79578 - DNA, 80 bp, synthetic construct
  source 1..80: mol_type = other DNA
taaagaatgccaacagtactaatacaactcaaagtaatagagtgaatgaagagatagatataaaaaactgctctttcaat

SEQ ID NO: 79579 - DNA, 80 bp, synthetic construct
  source 1..80: mol_type = other DNA
ataaccacagaaataaaagataaaaagaagcaagaatatgcgcttttctataaacttgatatagtaccaattaatgctaa

SEQ ID NO: 79580 - DNA, 80 bp, synthetic construct
  source 1..80: mol_type = other DNA
taatgataataatactagtagtagaaataatgtaagtgaatataggctaataaattgtaatgtttcagccgttaaacagg

SEQ ID NO: 79581 - DNA, 80 bp, synthetic construct
  source 1..80: mol_type = other DNA
cttgcccaaaggtaacttttgaaccaattcccatacattattgtgccccagctggttttgcgattctaaaatgtagggat

SEQ ID NO: 79582 - DNA, 80 bp, synthetic construct
  source 1..80: mol_type = other DNA
aagaatttcaatggaacagggctatgcaaggatgtcagcacagtacaatgcacacatggaatcaagccagtagtatctac

SEQ ID NO: 79583 - DNA, 80 bp, synthetic construct
  source 1..80: mol_type = other DNA
tcaactgctgttaaatggcagtctagcagaaggagaggtaaagcttagatctgaaaacttcacagacaatgctaaaacca

SEQ ID NO: 79584 - DNA, 80 bp, synthetic construct
  source 1..80: mol_type = other DNA
taatagtacagcttaacaattctgtagaaattacttgtgtcaggcctaacaacaatacaagaaaaagtatacctatagga

SEQ ID NO: 79585 - DNA, 80 bp, synthetic construct
  source 1..80: mol_type = other DNA
ccaggacaagctttttatgcaacaggagatataataggggacataagacaagcacattgtaatgtcagtcgaggaaattg

SEQ ID NO: 79586 - DNA, 80 bp, synthetic construct
  source 1..80: mol_type = other DNA
gactgacactttaaaacaggtagttacacaattaggaaaagtgtttattaacaaaacagaaataatctttgataagccct

SEQ ID NO: 79587 - DNA, 80 bp, synthetic construct
  source 1..80: mol_type = other DNA
agataataatactagtgactataggctaataaattgtaatgtttcagccgttaaacaggcttgtccaaaggtaacttttg

SEQ ID NO: 79588 - DNA, 80 bp, synthetic construct
  source 1..80: mol_type = other DNA
aaccaattcctatacattattgtgccccagctggttttgcgattctaaaatgtagggataagaatttcaatggaacaggg

SEQ ID NO: 79589 - DNA, 80 bp, synthetic construct
  source 1..80: mol_type = other DNA
tctagcagaaggagaggtaaagattagatctgaaaacttcacagacaatgctaaaaccataatagtacagcttaacagtt

SEQ ID NO: 79590 - DNA, 80 bp, synthetic construct
  source 1..80: mol_type = other DNA
ctgtacaaattacttgtgtcagacctaacaacaatacaagaaaaagtatacctataggaccaggacaagctttttatgca

SEQ ID NO: 79591 - DNA, 80 bp, synthetic construct
  source 1..80: mol_type = other DNA
agctatacagttaagaaaaaagtttaacaaaacaataatctttgataagccctcaggaggggatttagaaattacaacac

SEQ ID NO: 79592 - DNA, 80 bp, synthetic construct
  source 1..80: mol_type = other DNA
taaggaatagaaacagtactaagacaaacagcactgggactgggaatatcactgtgaatgatgaacagtcagatatgaaa

SEQ ID NO: 79593 - DNA, 80 bp, synthetic construct
  source 1..80: mol_type = other DNA
accacttaatgatagtagtagtaataatgtaagtgactataggctaataaattgtaatgtttcagccgttaaacaggctt

SEQ ID NO: 79594 - DNA, 80 bp, synthetic construct
  source 1..80: mol_type = other DNA
tgacgctttaaaacaggtagctatacagttaagaaaagagtataacaaaacaataatctttgataagccctcaggagggg

SEQ ID NO: 79595 - DNA, 80 bp, synthetic construct
  source 1..80: mol_type = other DNA
accacttaatggtaaagataataatactagtgactataggctaataaattgtaatgtttcagctgttaaacaggcttgcc

SEQ ID NO: 79596 - DNA, 80 bp, synthetic construct
  source 1..80: mol_type = other DNA
caaaggtaacttttgaaccaattcccatacattattgtgctccagctggttttgcgattctaaaatgtggggataagaat

SEQ ID NO: 79597 - DNA, 80 bp, synthetic construct
  source 1..80: mol_type = other DNA
taaggaataggaacagtactaagacaaacagtactgggactgggaataacagcagtgctgatacaaataacactgtggat

SEQ ID NO: 79598 - DNA, 80 bp, synthetic construct
  source 1..80: mol_type = other DNA
agtttaataaaacaagaataacctttgaaaagccctcaggaggggatttagaaattacatcacatagctttaattgtgga

SEQ ID NO: 79599 - DNA, 80 bp, synthetic construct
  source 1..80: mol_type = other DNA
aaagataaaaagaagcaagaatatgcgcttttctataaacttgatatagtaccaattaataataataatgaaaataataa

SEQ ID NO: 79600 - DNA, 80 bp, synthetic construct
  source 1..80: mol_type = other DNA
accatgtataaagctaaccccgctctgtgttactttgaactgtactgatgtaaggaatcacaacagtactgatgtaagga

SEQ ID NO: 79601 - DNA, 80 bp, synthetic construct
  source 1..80: mol_type = other DNA
ataacagcagtgctgatacaaataacactgtgaagaatgaagagatagatataaaaaactgctctttcaatataaccaca

SEQ ID NO: 79602 - DNA, 80 bp, synthetic construct
  source 1..80: mol_type = other DNA
taataatagtagtaataatgtaagtgactataggctaataaattgtaatgtttcatcagttaaacaggcttgtccaaagg

SEQ ID NO: 79603 - DNA, 80 bp, synthetic construct
  source 1..80: mol_type = other DNA
taatgtcagtcgaggaaattggagtaacgctttaaaacaggtagctatacagttagaaaaagagtttcacaaaacaataa

SEQ ID NO: 79604 - DNA, 80 bp, synthetic construct
  source 1..80: mol_type = other DNA
gaaaagtttaacatgtggaaaaataatatggtagaacaaatgcatgaggatataatcagtttatgggatgaaagtctaaa

SEQ ID NO: 79605 - DNA, 80 bp, synthetic construct
  source 1..80: mol_type = other DNA
tataaagctaacccctctctgtgttactttaaactgtactgatgtaaggaatcacaacagtactgatgtaaggaacaaca

SEQ ID NO: 79606 - DNA, 80 bp, synthetic construct
  source 1..80: mol_type = other DNA
gcagtgctgatacaaataacactgtggataatgtagatatgaaaaactgctctttcaatataaccacagaaataaaagat

SEQ ID NO: 79607 - DNA, 80 bp, synthetic construct
  source 1..80: mol_type = other DNA
cttttctataaacttgatatagtaccaattaataataataatgaaaataataatagtagtaataatgtaagtgactatag

SEQ ID NO: 79608 - DNA, 80 bp, synthetic construct
  source 1..80: mol_type = other DNA
gctaataaattgtaatgtttcatcagttaaacaggcttgtccaaaggtaacttttgaaccaattcccatacattattgtg

SEQ ID NO: 79609 - DNA, 80 bp, synthetic construct
  source 1..80: mol_type = other DNA
caatgcacacatggaatcaagccagtggtatctactcaactgctgttaaatggcagtctagcagaaggggaggtaaagat

SEQ ID NO: 79610 - DNA, 80 bp, synthetic construct
  source 1..80: mol_type = other DNA
tagatctgaaaacttcacagacaatgctaaaaccataatagtacagcttaacagttctgtaccaattacttgtgccagac

SEQ ID NO: 79611 - DNA, 80 bp, synthetic construct
  source 1..80: mol_type = other DNA
ctaacaacaatacaagaaaaggtatacatataggaccaggacaagctttttatgcaacaggagatataataggggacata

SEQ ID NO: 79612 - DNA, 80 bp, synthetic construct
  source 1..80: mol_type = other DNA
aagaagcaagaatatgcgcttttctataaacttgatatagtaccaattaataataataatgaaaataataatagtagtaa

SEQ ID NO: 79613 - DNA, 80 bp, synthetic construct
  source 1..80: mol_type = other DNA
ctgtgaagaatgaagagatagatataaaaaactgctctttcaatataaccacagaaataaaagataaaaagaagcaagaa

SEQ ID NO: 79614 - DNA, 80 bp, synthetic construct
  source 1..80: mol_type = other DNA
tatgcacttttctataaacttgatatagtaccaattaataataataatgataataaaactggtagtagtaataatgtaag

SEQ ID NO: 79615 - DNA, 80 bp, synthetic construct
  source 1..80: mol_type = other DNA
atggtagaacaaatgcatgaggatataatcagtttatgggatgaaagtctaaaaccatgtataaagctaaccccgctctg

SEQ ID NO: 79616 - DNA, 80 bp, synthetic construct
  source 1..80: mol_type = other DNA
ggggacataagacaagcacattgtaatgtcagtcgaggaaattggagtaacgctttaaaacaggtagctatacagttaag

SEQ ID NO: 79617 - DNA, 80 bp, synthetic construct
  source 1..80: mol_type = other DNA
acatacgacaagcacattgtaatgtcagccgaggaaattggagtaacgctttaaaacaggtagctatacagttagaaaaa

SEQ ID NO: 79618 - DNA, 80 bp, synthetic construct
  source 1..80: mol_type = other DNA
agtttagcaaaacaaacataacctttgatgagccctcaggaggggatttagaaatcacaacacatagctttaattgtgga

SEQ ID NO: 79619 - DNA, 80 bp, synthetic construct
  source 1..80: mol_type = other DNA
cagtctaggaaattggagtaacgctttaaaacaggtagctacacagttaggaaaagagtttagcaaaacaaacataacct

SEQ ID NO: 79620 - DNA, 80 bp, synthetic construct
  source 1..80: mol_type = other DNA
aaatgtggggataagaatttcaatggaacaggactatgcaaaaatgtcagcacagtacaatgcacacatggaatcaagcc

SEQ ID NO: 79621 - DNA, 80 bp, synthetic construct
  source 1..80: mol_type = other DNA
atgctaaaaccataatagtacagcttaacaaaactgtacaaattacttgtgtcagacctcacaacaatacaagaaaaagc

SEQ ID NO: 79622 - DNA, 80 bp, synthetic construct
  source 1..80: mol_type = other DNA
atacatataggaccaggacaagctttttatgcaacagatataataggggacataagaaaagcatattgtaatgtcagtcg

SEQ ID NO: 79623 - DNA, 80 bp, synthetic construct
  source 1..80: mol_type = other DNA
aaaaaattggactgacgttctaaaacaggtagctatacagttaggaaaagagtttaacaaaacaataatctttgataagc

SEQ ID NO: 79624 - DNA, 80 bp, synthetic construct
  source 1..80: mol_type = other DNA
taaggaatcacaacagtactgatgtaaggaataacagcagtgctgatacaaataacactgtggataatgtagatatgaaa

SEQ ID NO: 79625 - DNA, 80 bp, synthetic construct
  source 1..80: mol_type = other DNA
aactgctctttcaatataaccacagaaataaaagataaaaagaagcaagaatatgcgcttttctataaacttgatatagt

SEQ ID NO: 79626 - DNA, 80 bp, synthetic construct
  source 1..80: mol_type = other DNA
accaattaataataataatgataagaatactggtagtagtaataatgtaagtgactataggctaataaattgtaatgttt

SEQ ID NO: 79627 - DNA, 80 bp, synthetic construct
  source 1..80: mol_type = other DNA
cagccgctaaacaggcttgcccaaaggtaacttttgaaccaattcccatacattattgtgctccagctggttttgcgatt

SEQ ID NO: 79628 - DNA, 80 bp, synthetic construct
  source 1..80: mol_type = other DNA
ctaaaatgtagggataaggacttcaatggaacagggctatgcaagaatgtcagcacagtacaatgcacacatggaatcaa

SEQ ID NO: 79629 - DNA, 80 bp, synthetic construct
  source 1..80: mol_type = other DNA
gccggtagtatctactcaactgctgttaaatggcagcctagcagaaggagaggtaaagattagatctgaaaacttcacag

SEQ ID NO: 79630 - DNA, 80 bp, synthetic construct
  source 1..80: mol_type = other DNA
acaacgctaaaaccataatagtacagcttaacagtactgtaccaattacttgtgccagacctaacaacaatacaagaaaa

SEQ ID NO: 79631 - DNA, 80 bp, synthetic construct
  source 1..80: mol_type = other DNA
ttactaacaaaacaacaataatctttgataagccctcaggaggggatttagaaattacaacacatagctttaattgtgga

SEQ ID NO: 79632 - DNA, 80 bp, synthetic construct
  source 1..80: mol_type = other DNA
ggtatacatataggaccaggacaagctttttatgcaacaggagatataataggggacataagacaagcacattgtaatgt

SEQ ID NO: 79633 - DNA, 80 bp, synthetic construct
  source 1..80: mol_type = other DNA
cagtcgaggaaattggaatgacactttaaaacaggtagctacacagttaagagaagtgtttactaacaaaacaacaataa

SEQ ID NO: 79634 - DNA, 80 bp, synthetic construct
  source 1..80: mol_type = other DNA
taaggaacaacagcagtactgatacaaacagcactgtggataatgtagatatgaaaaactgctctttcaatataaccaca

SEQ ID NO: 79635 - DNA, 80 bp, synthetic construct
  source 1..80: mol_type = other DNA
gaaataaaagataaaaggaagcaagaatatgcgcttttctataaacttgatgtagtaccaattaataataataatgataa

SEQ ID NO: 79636 - DNA, 80 bp, synthetic construct
  source 1..80: mol_type = other DNA
gaatactggtagtagtaataatgtaagtgactataggctaataaattgtaatgtttcagccgttaaacaggcttgtccaa

SEQ ID NO: 79637 - DNA, 80 bp, synthetic construct
  source 1..80: mol_type = other DNA
agcttaacagttctgtactaattacttgtgccagacctaacaacaatacaagaaaaggtatacatataggaccaggacaa

SEQ ID NO: 79638 - DNA, 80 bp, synthetic construct
  source 1..80: mol_type = other DNA
gctttttatgcaacaggagatataataggggacataagacaagcacattgtaatgtcagtcgaggaaattggagtaatgc

SEQ ID NO: 79639 - DNA, 80 bp, synthetic construct
  source 1..80: mol_type = other DNA
cagtcgaggaaattggagtcacgctttaaaacaggtagctatacagttaagaaaagagtttaacaaaaccataatctttg

SEQ ID NO: 79640 - DNA, 80 bp, synthetic construct
  source 1..80: mol_type = other DNA
ctgtgttacttcgaactgtactgatgtaaggaatcacaacagtactgatgtaaggaataacagcagtgctgatacaaata

SEQ ID NO: 79641 - DNA, 80 bp, synthetic construct
  source 1..80: mol_type = other DNA
acactgtggataatgtagaaataaaaaactgctctttcaatataaccacagaaataaaagataaaaagaagcaagaatat

SEQ ID NO: 79642 - DNA, 80 bp, synthetic construct
  source 1..80: mol_type = other DNA
gcgcttttctataaacttgatatagtaccaattaatggtaggaataatagtgattataggctaataaattgtaatgtttc

SEQ ID NO: 79643 - DNA, 80 bp, synthetic construct
  source 1..80: mol_type = other DNA
taaggactaacaagactgatgtaggggataaaaacagtactaatacaaccagcactgtgaatggaaataacactgtggat

SEQ ID NO: 79644 - DNA, 80 bp, synthetic construct
  source 1..80: mol_type = other DNA
gatgtagatatgaaaaactgctctttcaatataaccacagaaataaaagataaaaagaagcaagaatatgcgcttttcta

SEQ ID NO: 79645 - DNA, 80 bp, synthetic construct
  source 1..80: mol_type = other DNA
taaacttgatatagtaccaattaataataataatgaaaatattaatagtagtaataatgtaagtgactataggctaataa

SEQ ID NO: 79646 - DNA, 80 bp, synthetic construct
  source 1..80: mol_type = other DNA
attgtaatgtttcagccgttaaacaggcttgtccaaaggtaacttttgaaccaattcccatacactattgtgctccagct

SEQ ID NO: 79647 - DNA, 80 bp, synthetic construct
  source 1..80: mol_type = other DNA
acatggaatcaagccagtagtatctactcaactgctgttaaatggcagtctagcagaaggagaggtaaagattagatctg

SEQ ID NO: 79648 - DNA, 80 bp, synthetic construct
  source 1..80: mol_type = other DNA
aaaacttcacaaacaatgctaaaaccataatagtacagcttaacagttctgtactaattacttgtgccagacctaacaac

SEQ ID NO: 79649 - DNA, 80 bp, synthetic construct
  source 1..80: mol_type = other DNA
aaaagtttaacaaaacaataatctttgataagccctcaggaggggatttaaaaattacaacacatagctttaattgtgga

SEQ ID NO: 79650 - DNA, 80 bp, synthetic construct
  source 1..80: mol_type = other DNA
aatacaagaaaaggtatacatataggaccaggacaagctttttatgcaacaggagatataataggggacataagacaagc

SEQ ID NO: 79651 - DNA, 80 bp, synthetic construct
  source 1..80: mol_type = other DNA
acattgtaatgtcagtcgaggaaattggagtaacgctttaaaacaggtagctatacagttaagaaaaaagtttaacaaaa

SEQ ID NO: 79652 - DNA, 80 bp, synthetic construct
  source 1..80: mol_type = other DNA
taaggaatcacaacagtactgatgtaaggaataacagcagtgctgatacaaataaaactgtgaagaatgaagagatagat

SEQ ID NO: 79653 - DNA, 80 bp, synthetic construct
  source 1..80: mol_type = other DNA
tatagtaccacttaatgatagtaatagtaataatgtaagtgaatataggctaataaattgtaatgtttcagccgttaaac

SEQ ID NO: 79654 - DNA, 80 bp, synthetic construct
  source 1..80: mol_type = other DNA
tacagaataagaacagcactatgaaggggaatagcactgtgaataacaagacacagtcagatatgaaaaactgctctttc

SEQ ID NO: 79655 - DNA, 80 bp, synthetic construct
  source 1..80: mol_type = other DNA
taataataataataatactggtaatagtaataatgtaagtgaatataggctaataaattgtaatgtttcagcagttaaac

SEQ ID NO: 79656 - DNA, 80 bp, synthetic construct
  source 1..80: mol_type = other DNA
ccataatagtacagcttaacagttctgtaccaattacttgtgccagacctaacaacaatacaagaaaaagtatacctata

SEQ ID NO: 79657 - DNA, 80 bp, synthetic construct
  source 1..80: mol_type = other DNA
ttggagtcacgctttaaaacaggtagctatacagttaagaaaagagtttaacaaaacaataatctttgatgagccctcag

SEQ ID NO: 79658 - DNA, 80 bp, synthetic construct
  source 1..80: mol_type = other DNA
ggatagcaagggccaagcagaactaaaaagctgctctttcaatgtagccacagaaataagagataggagtaggaaagaac

SEQ ID NO: 79659 - DNA, 80 bp, synthetic construct
  source 1..80: mol_type = other DNA
acgcgcttttctatagacttgatctagtacaaattgatagtgctaatgacaaagagtataggttaataaattgtaatgtc

SEQ ID NO: 79660 - DNA, 80 bp, synthetic construct
  source 1..80: mol_type = other DNA
tctaaagtgtaataatgatacgttcaatggaacagggccatgcaggaatgtcagcacagtacaatgcacacatggaatca

SEQ ID NO: 79661 - DNA, 80 bp, synthetic construct
  source 1..80: mol_type = other DNA
agccagtagtgtcaacccaattgctgttaaatggcagtttagcagaaggaggggtaagggttagatctgcaaacttctca

SEQ ID NO: 79662 - DNA, 80 bp, synthetic construct
  source 1..80: mol_type = other DNA
gacaatactaagaacataatagtacagtttgacaagcctgtagcaattaattgtaccagacctaacaacaatacaagaag

SEQ ID NO: 79663 - DNA, 80 bp, synthetic construct
  source 1..80: mol_type = other DNA
aggtatacatataggaccaggacaagctctctatacaacaggtgaaataataggaagaataagagacgcatattgtacca

SEQ ID NO: 79664 - DNA, 80 bp, synthetic construct
  source 1..80: mol_type = other DNA
ttaaactgtactgatgcaactgaaactgtgggaactactggggcaactataactacaattaaaactacaactagaactgt

SEQ ID NO: 79665 - DNA, 80 bp, synthetic construct
  source 1..80: mol_type = other DNA
aggaggagaaaagaacacgcgcttttctatagacttgatctagtaaaaattgatagtactaatgataatgagtataggtt

SEQ ID NO: 79666 - DNA, 80 bp, synthetic construct
  source 1..80: mol_type = other DNA
tataaagttaacccctctctgtgttactttaaactgtactgatgcaactgaaaatggaactgtgggaactactaggtcaa

SEQ ID NO: 79667 - DNA, 80 bp, synthetic construct
  source 1..80: mol_type = other DNA
ccgcaaataacactgtggatagcaagggccaagcagaactaaaaaactgctctttcaatataaccacagaaataaaagat

SEQ ID NO: 79668 - DNA, 80 bp, synthetic construct
  source 1..80: mol_type = other DNA
cagctggttttgcgattctaaagtgtaataatgatacgttcaatggaacagggccatgcaggaatgtcagtacagtacaa

SEQ ID NO: 79669 - DNA, 80 bp, synthetic construct
  source 1..80: mol_type = other DNA
tgcacacatggaatcaagccagtagtatcaacccaattgctgttaaatggcagtttagcagaaggaggggtaagggttag

SEQ ID NO: 79670 - DNA, 80 bp, synthetic construct
  source 1..80: mol_type = other DNA
atctgcaaacttctcagacaatactaaaaacataatagtacagtttgacaagcctgtagcaattaattgtaccagaccta

SEQ ID NO: 79671 - DNA, 80 bp, synthetic construct
  source 1..80: mol_type = other DNA
acaacaatacaagaagaggtatacatataggaccaggacaagctttatatacaacaggtgaaataataggaagaataaga

SEQ ID NO: 79672 - DNA, 80 bp, synthetic construct
  source 1..80: mol_type = other DNA
ataagagacgcatattgtaccatcaataaaacagaatgggaggaagctttacaaaaggtagctggacaactacaaactat

SEQ ID NO: 79673 - DNA, 80 bp, synthetic construct
  source 1..80: mol_type = other DNA
ggtaagggttagatctgcaaacttctcagacaatactaagaacataatagtacagtttgacaagcctgtagcaattaatt

SEQ ID NO: 79674 - DNA, 80 bp, synthetic construct
  source 1..80: mol_type = other DNA
gtaccagacctaacaacaatgcaagaagaggtatacatataggaccaggacaagctctctatacaacaggtgaaataata

SEQ ID NO: 79675 - DNA, 80 bp, synthetic construct
  source 1..80: mol_type = other DNA
accatgtataaagttaacccctctctgtgtcactttaaactgtactgatgcaactgaaactgtgggaactactggggcaa

SEQ ID NO: 79676 - DNA, 80 bp, synthetic construct
  source 1..80: mol_type = other DNA
ctataactacaattaaaactacaactagaactgtggatagcaagggccaagcagaactaaaaaactgctctttcaatgta

SEQ ID NO: 79677 - DNA, 80 bp, synthetic construct
  source 1..80: mol_type = other DNA
accacagaaataagagataggagtaggaaagaacacgcgcttttctatagacttgatctagtacaaattgatagtgctaa

SEQ ID NO: 79678 - DNA, 80 bp, synthetic construct
  source 1..80: mol_type = other DNA
tgacaaagagtataggttaataaattgtaatgtctcagtagttaaacaggcttgtccaaaggtatcctttgagccaattc

SEQ ID NO: 79679 - DNA, 80 bp, synthetic construct
  source 1..80: mol_type = other DNA
caatacattattgtgctccagctggttttgcgattctaaagtgtaataatgatacgttcaatggaacagggccatgcagg

SEQ ID NO: 79680 - DNA, 80 bp, synthetic construct
  source 1..80: mol_type = other DNA
taccatcaataaaacagaatgggaggaagctttacaaaaggtagctggacaactacaaactatcttcaacaaaacaataa

SEQ ID NO: 79681 - DNA, 80 bp, synthetic construct
  source 1..80: mol_type = other DNA
acttgatctagtacaaattgatagtgctaatgataaagagtataggttaataaattgtaatgtctcagtagttaagcagg

SEQ ID NO: 79682 - DNA, 80 bp, synthetic construct
  source 1..80: mol_type = other DNA
cttgtccaaaggtatcctttgagccaattccaatacattattgtgctccagctggttttgcgattctaaagtgtaataat

SEQ ID NO: 79683 - DNA, 80 bp, synthetic construct
  source 1..80: mol_type = other DNA
gatacgttcaatggaacagggccatgcaggaatgtcagtacagtacaatgcacacatggaatcaagccagtagtatcaac

SEQ ID NO: 79684 - DNA, 80 bp, synthetic construct
  source 1..80: mol_type = other DNA
ccaattgctgttaaatggcagtttggcagaaggaggggtaagggttagatctgcaaacttctcagacaatactaaaaaca

SEQ ID NO: 79685 - DNA, 80 bp, synthetic construct
  source 1..80: mol_type = other DNA
taatagtacagtttgacaagcctgtagcaattaattgtaccagacctaacaacaatactagaagaagtatacgtatagga

SEQ ID NO: 79686 - DNA, 80 bp, synthetic construct
  source 1..80: mol_type = other DNA
ccaggacaggctttctatgcaacagataatataataggggatataagaaaagcacattgtaacatcagtatagcagaatg

SEQ ID NO: 79687 - DNA, 80 bp, synthetic construct
  source 1..80: mol_type = other DNA
gaatagcactttaaaaaaggtagttgatcagttaagaaatatcactatctttaacaacaaaacaataatctttaggaacc

SEQ ID NO: 79688 - DNA, 80 bp, synthetic construct
  source 1..80: mol_type = other DNA
aaagataggaggagaaaagaacacgcgcttttctatagacttgatctagtacaaattgatagtgctaatgataaagagta

SEQ ID NO: 79689 - DNA, 80 bp, synthetic construct
  source 1..80: mol_type = other DNA
taggttaataaattgtaatgtctcagtagttaagcaggcttgtccaaaggtatcctttgagccaattccaatacattatt

SEQ ID NO: 79690 - DNA, 80 bp, synthetic construct
  source 1..80: mol_type = other DNA
ggttagatctgcaaacttctcagacaatactaaaaacataatagtacagtttgacacacctgtagcaattaattgtacca

SEQ ID NO: 79691 - DNA, 80 bp, synthetic construct
  source 1..80: mol_type = other DNA
gacctaacaacaatactagaagaagtatacgtataggaccaggacaggctttctatgcaacagatgatataataggggat

SEQ ID NO: 79692 - DNA, 80 bp, synthetic construct
  source 1..80: mol_type = other DNA
taatagtagtagtaacgatagtagtaagaatgaggtaagtgattatgtgctaataaattgcaatgtctcagcagttaaac

SEQ ID NO: 79693 - DNA, 80 bp, synthetic construct
  source 1..80: mol_type = other DNA
taaatagaactggggaaaacagaactgtggatggccgagaagaattaaaaaactgctctttcaatgtaaccacagaaata

SEQ ID NO: 79694 - DNA, 80 bp, synthetic construct
  source 1..80: mol_type = other DNA
agagataggagtaggaaagaacacgcgcttttctataaacttgatgtagtaccaattaatgatagtagaattaagaaaac

SEQ ID NO: 79695 - DNA, 80 bp, synthetic construct
  source 1..80: mol_type = other DNA
ttaaacaggcttgtccaaaggtatcctttgagccaattcctatacattattgtgctccagctggttttgcgattctaaag

SEQ ID NO: 79696 - DNA, 80 bp, synthetic construct
  source 1..80: mol_type = other DNA
tgtaatgataaggagttcaatggaacagggccatgcaggaatgtcagcacagtacaatgcacacatggaatcaagccagt

SEQ ID NO: 79697 - DNA, 80 bp, synthetic construct
  source 1..80: mol_type = other DNA
agtatcaacccaattactgttaaatggcagtttagcagaaggaggggtaagggttagatctgcaaacttctcagacaata

SEQ ID NO: 79698 - DNA, 80 bp, synthetic construct
  source 1..80: mol_type = other DNA
ctaaaaacataatagtacagtttgacacacctgtagcaattaattgtaccagacctaacaacaatactagaagaagtata

SEQ ID NO: 79699 - DNA, 80 bp, synthetic construct
  source 1..80: mol_type = other DNA
cgtataggaccaggacaggctttctatgcaacagatgatataataggggatataagaaaagcacattgtaacatcagtat

SEQ ID NO: 79700 - DNA, 80 bp, synthetic construct
  source 1..80: mol_type = other DNA
agcagaatggaataacactttaaaaaaggtagttgatcagttaagaaatatcactatcttcaacaaaacaataatcttta

SEQ ID NO: 79701 - DNA, 80 bp, synthetic construct
  source 1..80: mol_type = other DNA
acttgatgtagtaccaattaatgataatagaattaagaataatagtagtagtaatgatagtagtaagagtgaggtaagtg

SEQ ID NO: 79702 - DNA, 80 bp, synthetic construct
  source 1..80: mol_type = other DNA
attatgtgctaataaattgcaatgtctcagcagttaaacaggcttgtccaaaggtatcctttgagccaattcctatacat

SEQ ID NO: 79703 - DNA, 80 bp, synthetic construct
  source 1..80: mol_type = other DNA
tattgtgctccagctggttttgcgattctaaagtgtaatgataaggagttcaatggaacagggccatgcaggaatgtcag

SEQ ID NO: 79704 - DNA, 80 bp, synthetic construct
  source 1..80: mol_type = other DNA
cacagtacaatgcacacatggaatcaagccagtagtatcaactcaattgctgttaaatggcagtttagcagaaggagggg

SEQ ID NO: 79705 - DNA, 80 bp, synthetic construct
  source 1..80: mol_type = other DNA
taagggttagatctgaaaacttctcaaacaatgctaaaaatataatagtacagtttgacacacctgtagcaattaattgt

SEQ ID NO: 79706 - DNA, 80 bp, synthetic construct
  source 1..80: mol_type = other DNA
accagacctaacaacaatacaagaagaggtatacatataggaccagggcaggctttctatgcaacagatgatataatagg

SEQ ID NO: 79707 - DNA, 80 bp, synthetic construct
  source 1..80: mol_type = other DNA
ggatataagaaaagcacattgtaacatcagtatagcagaatggaataacactttaaaaaaggtagttgatcagttaagaa

SEQ ID NO: 79708 - DNA, 80 bp, synthetic construct
  source 1..80: mol_type = other DNA
tataatcagtttatgggatgaaagcttaaaaccatgtataaagttaacccctctctgtgtcactttaaactgtactgatg

SEQ ID NO: 79709 - DNA, 80 bp, synthetic construct
  source 1..80: mol_type = other DNA
caactgaaactgtgggaactactgggacaactataactacaattaaaactacaactagaactgtggatagcaagggccaa

SEQ ID NO: 79710 - DNA, 80 bp, synthetic construct
  source 1..80: mol_type = other DNA
gcagaactaaaaaactgctctttcaatgtaaccacagaaataagagataggagtaggaaagaacacgcgcttttctataa

SEQ ID NO: 79711 - DNA, 80 bp, synthetic construct
  source 1..80: mol_type = other DNA
acttgatgtagtaccaattaatgataataaaattaagagtacgaacaatactgatagtagtagtaataagagtagtaaga

SEQ ID NO: 79712 - DNA, 80 bp, synthetic construct
  source 1..80: mol_type = other DNA
cagaaggaggggtgagggttagatctgaaaacttctcagacaatactaaaaacataatagtacagtttgacaagcctgta

SEQ ID NO: 79713 - DNA, 80 bp, synthetic construct
  source 1..80: mol_type = other DNA
gcaattaattgtaccagacctaacaacaatacaagaagaggtatacatataggaccaggacaagctttatatacaacagg

SEQ ID NO: 79714 - DNA, 80 bp, synthetic construct
  source 1..80: mol_type = other DNA
ctatcttcaacaaaacaataatctttaggaaccactcaggaggggatttagaaattacaacacatagctttaattgtgga

SEQ ID NO: 79715 - DNA, 80 bp, synthetic construct
  source 1..80: mol_type = other DNA
tgaaataataggaagaataagagacgcatattgtaccatcaataaaacagaatgggaggaagctttacaaaaggtagctg

SEQ ID NO: 79716 - DNA, 80 bp, synthetic construct
  source 1..80: mol_type = other DNA
gacaactacaaactatcttcaacaaaacaataatctttaggaaccactcaggaggggatttagaaattacaacacatagc

SEQ ID NO: 79717 - DNA, 80 bp, synthetic construct
  source 1..80: mol_type = other DNA
caactgaaaatggaactgtgggaactgctaggacacaaacagatagcactgtggatagcaagggccaagcagaactaaaa

SEQ ID NO: 79718 - DNA, 80 bp, synthetic construct
  source 1..80: mol_type = other DNA
aactgctctttcaatataaccacagaaataaaagataggaggaggaaagaacacgcgcttttctatagacttgatctagt

SEQ ID NO: 79719 - DNA, 80 bp, synthetic construct
  source 1..80: mol_type = other DNA
accaattaatagtagtaatattaatgagtataggttaataaattgtaatgtctcagtagttaaacaggcttgtccaaagg

SEQ ID NO: 79720 - DNA, 80 bp, synthetic construct
  source 1..80: mol_type = other DNA
tatcctttgagccaattccaatacattattgtgctccagctggttttgcgattctaaagtgtaataatgatacgttcagt

SEQ ID NO: 79721 - DNA, 80 bp, synthetic construct
  source 1..80: mol_type = other DNA
ggaaaagggctatgcaggaatgtcagcacagtacaatgcacacatggaatcaagccagtagtatcaactcaattgctgtt

SEQ ID NO: 79722 - DNA, 80 bp, synthetic construct
  source 1..80: mol_type = other DNA
aaatggcagtttggcagaaggaggggtaagggttaggtctgaaaacttcgaagacaatactaaaaacatcatagtacagt

SEQ ID NO: 79723 - DNA, 80 bp, synthetic construct
  source 1..80: mol_type = other DNA
ttgacaaacctgtagcaatcaattgtaccagacctaataacaatacaagaagaggtatacatataggaccaggacaagct

SEQ ID NO: 79724 - DNA, 80 bp, synthetic construct
  source 1..80: mol_type = other DNA
ttatatacaacaggtgaaataataggaagaataagagacgcatattgtaccatcaataaaacagaatgggaggaagcttt

SEQ ID NO: 79725 - DNA, 80 bp, synthetic construct
  source 1..80: mol_type = other DNA
acaaaaggtagctgaacaactacaaactatcttcaacaaaacaataatctttaggaaccactcaggaggggatttagaaa

SEQ ID NO: 79726 - DNA, 80 bp, synthetic construct
  source 1..80: mol_type = other DNA
tagagaaaaatataactagggagatttgggagaagggaactatggataacaaagcagaattaaaaaactgctctttcaat

SEQ ID NO: 79727 - DNA, 80 bp, synthetic construct
  source 1..80: mol_type = other DNA
taacattaatgataacagtaatagtagtgctagtaatgtaagtgattatgtgctaataaattgcaatgtctcagcagtta

SEQ ID NO: 79728 - DNA, 80 bp, synthetic construct
  source 1..80: mol_type = other DNA
atcaacccaattgctgttaaatggcagtttatcagaaggagaggtgagggttagatctgaaaacttctcaaacaatgcta

SEQ ID NO: 79729 - DNA, 80 bp, synthetic construct
  source 1..80: mol_type = other DNA
tataatcagtttatgggatgaaagcttaaaaccatgtgtaaaattaacccctctctgtgttactttacgctgtgctaagg

SEQ ID NO: 79730 - DNA, 80 bp, synthetic construct
  source 1..80: mol_type = other DNA
tagagagagaaataattagggagaattgggaaaatggaactatggatggccaaggagaattaaaaaactgctctttcaat

SEQ ID NO: 79731 - DNA, 80 bp, synthetic construct
  source 1..80: mol_type = other DNA
gtaaccacagaaataagagataggagtaggaaagaacatgcgcttttctatagacttgatatagtaccaattaatgatag

SEQ ID NO: 79732 - DNA, 80 bp, synthetic construct
  source 1..80: mol_type = other DNA
tgaaattaacgataacagtaataatagtacttgtaataatggtagtagtgatagtacttgtaataatagtaatagtagta

SEQ ID NO: 79733 - DNA, 80 bp, synthetic construct
  source 1..80: mol_type = other DNA
aggtaggtgattatgtgctaataaattgcaatgtctcaacagttaaacaggcttgtccaaaggtatcctttgagccaatt

SEQ ID NO: 79734 - DNA, 80 bp, synthetic construct
  source 1..80: mol_type = other DNA
cctatacattattgtgctccagcgggttttgcgattctaaagtgtaatgataaggagttcaatggaacagggccatgcag

SEQ ID NO: 79735 - DNA, 80 bp, synthetic construct
  source 1..80: mol_type = other DNA
gaatgtcggcacagtacaatgcacacatggaattaagccagtagtatcaacccaattgctgttaaatggcagtttggcag

SEQ ID NO: 79736 - DNA, 80 bp, synthetic construct
  source 1..80: mol_type = other DNA
aaggaggggtaagggtcagatctgcaaacttctcagacaatactaaaaacataatagtacagtttgacacacctgtagca

SEQ ID NO: 79737 - DNA, 80 bp, synthetic construct
  source 1..80: mol_type = other DNA
ccacaagagatattgctggaaaatgtaacagaaaattttaacatgtggaaaaataatatggtagaacagatgcatgagga

SEQ ID NO: 79738 - DNA, 80 bp, synthetic construct
  source 1..80: mol_type = other DNA
attaattgtaccagacccaacaacaatactagaagaagtatacgtataggaccaggacaggctttctatgcagcagatga

SEQ ID NO: 79739 - DNA, 80 bp, synthetic construct
  source 1..80: mol_type = other DNA
tctttaacaacaaaacaataaactttactagctcctcaggaggggatttagaaattacaacacatagctttaattgtgga

SEQ ID NO: 79740 - DNA, 80 bp, synthetic construct
  source 1..80: mol_type = other DNA
tataatagggaatataagaagagcacattgtaacatcagtatagcagaatggaatagcactttacaaaaagtagctgaca

SEQ ID NO: 79741 - DNA, 80 bp, synthetic construct
  source 1..80: mol_type = other DNA
aattaaggaatatcactatctttaacaacaaaacaataaactttactagctcctcaggaggggatttagaaattacaaca

SEQ ID NO: 79742 - DNA, 80 bp, synthetic construct
  source 1..80: mol_type = other DNA
agtaatacaaataagactgtcactaaatttgacaatgacactcctgatgatggccaaatgaaaaactgttctttcaatat

SEQ ID NO: 79743 - DNA, 80 bp, synthetic construct
  source 1..80: mol_type = other DNA
cataaagctaacccctctctgtgttactttaaactgtactgatactataacaaaggatgataaggattcccagatgaaaa

SEQ ID NO: 79744 - DNA, 80 bp, synthetic construct
  source 1..80: mol_type = other DNA
actgttctttcaatataaccacagaaataagagataagaagaagcgagaatatgcgctattctatagacttgatgtagta

SEQ ID NO: 79745 - DNA, 80 bp, synthetic construct
  source 1..80: mol_type = other DNA
ccaattaatagtagcacaggtgagtataggctaataaattgtaatgtctcaactgttaaacaagcttgcccaaaggtaac

SEQ ID NO: 79746 - DNA, 80 bp, synthetic construct
  source 1..80: mol_type = other DNA
tagcccagtaagaattaattgtaccagggccaacaacaatacaagaaaaagtatacatataggaccaggacaagctttct

SEQ ID NO: 79747 - DNA, 80 bp, synthetic construct
  source 1..80: mol_type = other DNA
accatgcataaagctaacccctctctgtgttactttaaactgtagtaatacaaataagactgtcactaaatttgacaatg

SEQ ID NO: 79748 - DNA, 80 bp, synthetic construct
  source 1..80: mol_type = other DNA
acactcctgatgatggccaaatgaaaaactgttctttcaatataaccacagaaataagagataagcagaagcaagaatat

SEQ ID NO: 79749 - DNA, 80 bp, synthetic construct
  source 1..80: mol_type = other DNA
gcgctattctataaacctgatgtaataccaataaataataataaaaatagtactacaggagattataggctaataaattg

SEQ ID NO: 79750 - DNA, 80 bp, synthetic construct
  source 1..80: mol_type = other DNA
caagaaaaagtatacatatgggaccaggacaagttctatatgcaacaggtgatataataggggatataagacaagcacat

SEQ ID NO: 79751 - DNA, 80 bp, synthetic construct
  source 1..80: mol_type = other DNA
tgtaatgtcagtagagcagactgggagaacactttacaaaaggtagctaacaaattaaatgagacctttaaaaataaaat

SEQ ID NO: 79752 - DNA, 80 bp, synthetic construct
  source 1..80: mol_type = other DNA
aagccagtagtatcaactcaactactgttaaatggcagtctatcagaaggaaatgtaacgattagatctaaaaacatcac

SEQ ID NO: 79753 - DNA, 80 bp, synthetic construct
  source 1..80: mol_type = other DNA
agacaatactaagaacataatagtacagcttgatagcccggtaagaattaattgttccaggcccaacaacaatacaagaa

SEQ ID NO: 79754 - DNA, 80 bp, synthetic construct
  source 1..80: mol_type = other DNA
cataaagttaacccctctctgtgttactttaaactgtactgatactataaaaaagtatgatgcaaaaaatgaaactgtag

SEQ ID NO: 79755 - DNA, 80 bp, synthetic construct
  source 1..80: mol_type = other DNA
gaaaggattcccaaatgaaaaactgttctttcaatataaccacagaaataaaagataagaagaagcaagaatatgcgcta

SEQ ID NO: 79756 - DNA, 80 bp, synthetic construct
  source 1..80: mol_type = other DNA
ttctatagacttgatgtagtaccaattaatagtagcacaagtgagtataggctaataaattgcaatgtctcaactgttaa

SEQ ID NO: 79757 - DNA, 80 bp, synthetic construct
  source 1..80: mol_type = other DNA
gggataaggagttcaatggaacagggccatgcaataatgtcagcacagtacaatgcacacatggaatcaagccagtagta

SEQ ID NO: 79758 - DNA, 80 bp, synthetic construct
  source 1..80: mol_type = other DNA
tcaactcaactactgttaaatggcagtctatcagaaggaaatgtaacgattagatctaaaaacatcacagacagtactaa

SEQ ID NO: 79759 - DNA, 80 bp, synthetic construct
  source 1..80: mol_type = other DNA
gatataagacaagcacattgtaatgtcagtggagaagaatgggaacaagctttaggaaaggtaactaaaaaattaagaga

SEQ ID NO: 79760 - DNA, 80 bp, synthetic construct
  source 1..80: mol_type = other DNA
attgtaccagggccaacaacaatacaagaaaaagtatacatataggaccaggacaagctttctatgcaacaggtgaaata

SEQ ID NO: 79761 - DNA, 80 bp, synthetic construct
  source 1..80: mol_type = other DNA
actttaaactgtactgatactataacaaagaataaaagtgtcactgtaaaggattcccaaatgaaaaactgttctttcaa

SEQ ID NO: 79762 - DNA, 80 bp, synthetic construct
  source 1..80: mol_type = other DNA
gcacaagtgagtataggctaataaattgtaatgtctcaactgttaaacaagcttgcccaaaggtaacctttgagccaatt

SEQ ID NO: 79763 - DNA, 80 bp, synthetic construct
  source 1..80: mol_type = other DNA
taatgtcagtggagaagaatgggaacgagctttaaaaaaggtagctacaaaattaagagagacttttaacaaaacaggga

SEQ ID NO: 79764 - DNA, 80 bp, synthetic construct
  source 1..80: mol_type = other DNA
aatagtaggggatataagacaagcacattgtaatgtcagtggagaagaatgggaacgagctttaaaaaaggtagctacaa

SEQ ID NO: 79765 - DNA, 80 bp, synthetic construct
  source 1..80: mol_type = other DNA
tagaccagatgcatgaggatataattagtttatgggatgaaagcctaaaaccatgtataaagctaacccctctctgtgtt

SEQ ID NO: 79766 - DNA, 80 bp, synthetic construct
  source 1..80: mol_type = other DNA
cataaagttaacccctctctgtgttactttaaaatgtactgataatataaagaatgtcactgtaggaaaggattcccaaa

SEQ ID NO: 79767 - DNA, 80 bp, synthetic construct
  source 1..80: mol_type = other DNA
gtagtaccaattaatagtagcacaagtgagtataggctaataaattgcaatgtctcaactgttagacaggcttgcccaaa

SEQ ID NO: 79768 - DNA, 80 bp, synthetic construct
  source 1..80: mol_type = other DNA
ttaaatggcagtctagcagaaggaaatgtaacgattagatctaaaaacatcacagaccatactaagaacataatagtaca

SEQ ID NO: 79769 - DNA, 80 bp, synthetic construct
  source 1..80: mol_type = other DNA
taatgtcagtggaaaagaatggggacaagctttagaaaaggtagctgaaaaattaaaagagacttttaacaaagcaggga

SEQ ID NO: 79770 - DNA, 80 bp, synthetic construct
  source 1..80: mol_type = other DNA
acttgataagcctgtaagaattaattgtaccagggccaacaataatacaagaaaaagtatacatataggaccaggacaag

SEQ ID NO: 79771 - DNA, 80 bp, synthetic construct
  source 1..80: mol_type = other DNA
ccttctatgcaacaggtgcaataatagggaatataagacaagcacattgtaatgtcagtggaaaagaatggggacaagct

SEQ ID NO: 79772 - DNA, 80 bp, synthetic construct
  source 1..80: mol_type = other DNA
ctataacaaaggatgttataaataagaattctacaaataagaatgtcactgtaaaggattcccaaatgaaaaattgttct

SEQ ID NO: 79773 - DNA, 80 bp, synthetic construct
  source 1..80: mol_type = other DNA
ttcaatataaccacagaaataaaagataagaagaagcaagaatatgcgctattctatagacttgatgtagtaccaattaa

SEQ ID NO: 79774 - DNA, 80 bp, synthetic construct
  source 1..80: mol_type = other DNA
tagtagcacaagtgagtataggctaataaattgcaatgtctcaactgttaaacaggcttgcccaaaggtatcctttgagc

SEQ ID NO: 79775 - DNA, 80 bp, synthetic construct
  source 1..80: mol_type = other DNA
caattcccatacattattgtgctccagctggttttgcgattctaaagtgtagggataaggagtccaatggaacagggcca

SEQ ID NO: 79776 - DNA, 80 bp, synthetic construct
  source 1..80: mol_type = other DNA
tgcaataatgtcagcacagtacaatgcacacatggaatcaagccagtagtatcaactcaactactgttaaatggcagtct

SEQ ID NO: 79777 - DNA, 80 bp, synthetic construct
  source 1..80: mol_type = other DNA
atcagaaggaaatgtaacgattagatctaaaaacatcacagaccatactaagaacataatagtacagcttgatagcccgg

SEQ ID NO: 79778 - DNA, 80 bp, synthetic construct
  source 1..80: mol_type = other DNA
taagaattaattgtaccagggccaacaacaatacaagaaaaagtatacctataggaccaggacaagctttctatgcaaca

SEQ ID NO: 79779 - DNA, 80 bp, synthetic construct
  source 1..80: mol_type = other DNA
ggatcttgtaccaaacaataatctttagtaaccgctcaggaggggatttagaagttacaacacatagctttaattgtgga

SEQ ID NO: 79780 - DNA, 80 bp, synthetic construct
  source 1..80: mol_type = other DNA
ggtgaaatagtaggggatataagacaagcacattgtaatgtcagtggaaaagaatgggaacaagctttaggaaaggtagc

SEQ ID NO: 79781 - DNA, 80 bp, synthetic construct
  source 1..80: mol_type = other DNA
tacaaaattaagagagacttttcacaaaacagggatcttgtaccaaacaataatctttagtaaccgctcaggaggggatt

SEQ ID NO: 79782 - DNA, 80 bp, synthetic construct
  source 1..80: mol_type = other DNA
taaagaaaaatgaaactgataaaattgattcccaaatgaaaaactgttctttcaatataaccacagaaataaaagataag

SEQ ID NO: 79783 - DNA, 80 bp, synthetic construct
  source 1..80: mol_type = other DNA
aagaagcaagaatatgcgctattctatagacttgatgtagtaccaattaatagtagcaaaagtgagtataggttaataaa

SEQ ID NO: 79784 - DNA, 80 bp, synthetic construct
  source 1..80: mol_type = other DNA
ttgcaatgtctcaactgttaaacaggcttgcccaaaggtatcttttgagccaattcccatacattattgtgctccagctg

SEQ ID NO: 79785 - DNA, 80 bp, synthetic construct
  source 1..80: mol_type = other DNA
gttttgcgattctaaaatgtagggataaggagttcaatggaacagggccatgcaataatgtcagcacagtacaatgcaca

SEQ ID NO: 79786 - DNA, 80 bp, synthetic construct
  source 1..80: mol_type = other DNA
catggaatcaagccagtagtatcaactcaactactgttaaatggcagtctatcagagggaaatgtaacgattagatctaa

SEQ ID NO: 79787 - DNA, 80 bp, synthetic construct
  source 1..80: mol_type = other DNA
aaacatcacagacagtactaagaacataatagtacagcttgatagcccggtaagaattaattgtaccagggccaacaaca

SEQ ID NO: 79788 - DNA, 80 bp, synthetic construct
  source 1..80: mol_type = other DNA
atacaagaaaaagtatacatataggaccaggacaagccttctatgcaacaggtgaaatagtaggggatataagacaagca

SEQ ID NO: 79789 - DNA, 80 bp, synthetic construct
  source 1..80: mol_type = other DNA
ccacaagagattagtctggaaaatgtgacagaaaattttaacatgtggaacaatagtatggtagaccagatgcatgagga

SEQ ID NO: 79790 - DNA, 80 bp, synthetic construct
  source 1..80: mol_type = other DNA
cattgtaatgtcagtggaaaagaatgggaacaagctttaggaaaggtagctacaaaattaaaagagacttttaacatgta

SEQ ID NO: 79791 - DNA, 80 bp, synthetic construct
  source 1..80: mol_type = other DNA
gaaataagagataagcagaagcaagaatatgcgctattctataaacctgatgtaataccaataaataataataaaaatag

SEQ ID NO: 79792 - DNA, 80 bp, synthetic construct
  source 1..80: mol_type = other DNA
tactacaggagattataggctaataaattgcaatgtctcaactgttaaacaggcttgcccaaaggtatcctttgagccaa

SEQ ID NO: 79793 - DNA, 80 bp, synthetic construct
  source 1..80: mol_type = other DNA
gaattaattgttccaggcccaacaacaatacaagaaaaagtatacatatgggaccaggacaagttctatatgcaacaggt

SEQ ID NO: 79794 - DNA, 80 bp, synthetic construct
  source 1..80: mol_type = other DNA
gatataataggggatataagacaagcacattgtaatgtcagtagagcagactgggagaacactttacaaaaggtagctaa

SEQ ID NO: 79795 - DNA, 80 bp, synthetic construct
  source 1..80: mol_type = other DNA
caaattaaatgagacctttaaaaataaaataatctttagtagccacacaggaggggatttagaagttacaacacatatct

SEQ ID NO: 79796 - DNA, 80 bp, synthetic construct
  source 1..80: mol_type = other DNA
tataattagtttatgggatgaaagcctagaaccgtgcataaagctaacccctctctgtgttactttaaactgtagtaata

SEQ ID NO: 79797 - DNA, 80 bp, synthetic construct
  source 1..80: mol_type = other DNA
caaataagactgtcactaaatttgacaatgacactcctgatgatggccaaatgaaaaactgttctttcaatacaaccaca

SEQ ID NO: 79798 - DNA, 80 bp, synthetic construct
  source 1..80: mol_type = other DNA
gaaatacacgataagaaaaagcaagaatatgcgctattctataaacttgatgtagtaccactagatggtaagaaaaataa

SEQ ID NO: 79799 - DNA, 80 bp, synthetic construct
  source 1..80: mol_type = other DNA
taatgataatactacaagagattataggctaataaattgcaatgtctcaactgttagacaggcttgcccaaaggtatcct

SEQ ID NO: 79800 - DNA, 80 bp, synthetic construct
  source 1..80: mol_type = other DNA
ttgagccaattcccatacattattgtgctccagctggttttgcgattctaaagtgtagggataaggagttcaatggaaaa

SEQ ID NO: 79801 - DNA, 80 bp, synthetic construct
  source 1..80: mol_type = other DNA
gggccatgcaataatgtcagcacagtacaatgcacacatggaatcaagccagtagtatcaattcaactactgttacatgg

SEQ ID NO: 79802 - DNA, 80 bp, synthetic construct
  source 1..80: mol_type = other DNA
gcccggtaagaattaattgttccaggcccaacaacaatacaagaaaaagtatacatatgggaccaggacaagttctatat

SEQ ID NO: 79803 - DNA, 80 bp, synthetic construct
  source 1..80: mol_type = other DNA
agacctttaaaaataaaataatctttagtagccacacaggaggggatttagaagttacaacacatatctttaattgtgga

SEQ ID NO: 79804 - DNA, 80 bp, synthetic construct
  source 1..80: mol_type = other DNA
gcaacaggtgatataataggggatataagacaagcacattgtaatgtcagtagagcagactgggagaacactttgcaaaa

SEQ ID NO: 79805 - DNA, 80 bp, synthetic construct
  source 1..80: mol_type = other DNA
ggtagctaacaaattaaatgagacctttaaaaataaaataatctttagtagccacacaggaggggatttagaagttacaa

SEQ ID NO: 79806 - DNA, 80 bp, synthetic construct
  source 1..80: mol_type = other DNA
cagtctagcagaaggaaatgtaacgattagatctaaaaacatcacagacaatactaagaacataatagtacagcttgata

SEQ ID NO: 79807 - DNA, 80 bp, synthetic construct
  source 1..80: mol_type = other DNA
gcaacaggtgatataataggggatataagacaagcacattgtaatgtcagtggaaaagaatggggacaagctttagaaaa

SEQ ID NO: 79808 - DNA, 80 bp, synthetic construct
  source 1..80: mol_type = other DNA
tagtgattataggctaataaattgtaatgtttcaactgttaaacaggcttgcccaaaggtatcctttgagccaattccca

SEQ ID NO: 79809 - DNA, 80 bp, synthetic construct
  source 1..80: mol_type = other DNA
tacattattgtgctccagctggttttgcgattctaaagtgtagggataaggagttcaatggaaaagggccatgcaataat

SEQ ID NO: 79810 - DNA, 80 bp, synthetic construct
  source 1..80: mol_type = other DNA
aaatgtaacgattagatctaaaaacatcacagacaatactaagaacataatagtacagcttgatagcccggtaagaatta

SEQ ID NO: 79811 - DNA, 80 bp, synthetic construct
  source 1..80: mol_type = other DNA
gaaataaaagataagaagaagcaagaatatgcgttattctatagacttgatgtagtaccaattaatagtagcacaagtga

SEQ ID NO: 79812 - DNA, 80 bp, synthetic construct
  source 1..80: mol_type = other DNA
gtatagactaataaattgcaatgtctcaactgttaaacaggcttgcccaaaggtatcctttgagccaattcccatacatt

SEQ ID NO: 79813 - DNA, 80 bp, synthetic construct
  source 1..80: mol_type = other DNA
attgtgctccagctggttttgcgattctaaagtatagggataaggagttcaagggaacaggaccatgcaataatgtcagc

SEQ ID NO: 79814 - DNA, 80 bp, synthetic construct
  source 1..80: mol_type = other DNA
aacgattagatctaaaaacttcacagacaatactaagaacataatagtacagtttgatagcccggtaagaattaattgtt

SEQ ID NO: 79815 - DNA, 80 bp, synthetic construct
  source 1..80: mol_type = other DNA
ccaggcccaacaacaatacaagaaaaagtatacatatgggaccaggacaagttctatatgcaacaggtgatataataggg

SEQ ID NO: 79816 - DNA, 80 bp, synthetic construct
  source 1..80: mol_type = other DNA
gatataagacaagcacattgtaatgtcagtagagcagactgggagaacactttacaaaaggtagctaacaaattaaatga

SEQ ID NO: 79817 - DNA, 80 bp, synthetic construct
  source 1..80: mol_type = other DNA
taaatattaccactataaatagcactgtggagaacagcgaagaaatgaaaaactgctcttttaatgcaaccacagaaata

SEQ ID NO: 79818 - DNA, 80 bp, synthetic construct
  source 1..80: mol_type = other DNA
actttgttaataaaacagtaacatttgccaattcctcaggaggagatgtagaagttacaacacacagttttaattgtgga

SEQ ID NO: 79819 - DNA, 80 bp, synthetic construct
  source 1..80: mol_type = other DNA
caagcacattgtaatgttactagaacacaatggaataagactttacaagcagtaactgcacaattaagtaaatactttgt

SEQ ID NO: 79820 - DNA, 80 bp, synthetic construct
  source 1..80: mol_type = other DNA
gttagtagaacacaatggaataagactttacaagcagtaggtgcacaattaagtaaatactttgttaataaaacaataac

SEQ ID NO: 79821 - DNA, 80 bp, synthetic construct
  source 1..80: mol_type = other DNA
ggatgaaagcctaaaaccatgtgtaaaactaacccctctttgtgttactttaaactgtaccaatgtaaatagaaccacta

SEQ ID NO: 79822 - DNA, 80 bp, synthetic construct
  source 1..80: mol_type = other DNA
taaatggcactgtggagaacaacaaagaaatgaaaaactgctcttttaatataaccacagaactaagggataagagaaag

SEQ ID NO: 79823 - DNA, 80 bp, synthetic construct
  source 1..80: mol_type = other DNA
aaagaacgtgcacttttctatagacttcatgtagtatcaattgataatagtactagttataggctaataaattgtaatga

SEQ ID NO: 79824 - DNA, 80 bp, synthetic construct
  source 1..80: mol_type = other DNA
ttctaaaatgtagagataaaaattttaatggaacaggaccatgtaaaaatgtcagtacagtgcaatgcacacatggaatc

SEQ ID NO: 79825 - DNA, 80 bp, synthetic construct
  source 1..80: mol_type = other DNA
aggccagtagtatcaactcaattactgttaaatggcagtctagcagaggatgagatagtaattaaatctgaaaatattac

SEQ ID NO: 79826 - DNA, 80 bp, synthetic construct
  source 1..80: mol_type = other DNA
agacaataccaaaaatataatagtgcagttaaatgagactgtacaaattaattgtatcagacctaacaacaatacaagga

SEQ ID NO: 79827 - DNA, 80 bp, synthetic construct
  source 1..80: mol_type = other DNA
aaagtgtacgtatagggccaggacaaacattctatgcaacaggtgacataataggagatataagacaagcacattgtaat

SEQ ID NO: 79828 - DNA, 80 bp, synthetic construct
  source 1..80: mol_type = other DNA
gttagtaaaacacaatgggagaagactttacaagcagtaggtgcacaattaagaaaataccttaatattaatggaacagt

SEQ ID NO: 79829 - DNA, 80 bp, synthetic construct
  source 1..80: mol_type = other DNA
gataagagaaagaaagaacgtgcacttttctatagatttgatgtaataccaattgataatagtactaattataggctaat

SEQ ID NO: 79830 - DNA, 80 bp, synthetic construct
  source 1..80: mol_type = other DNA
taaatagaaccactataaatggcactgtggagaacaacaaagaaatgaaaaactgctcttttaatataaccacagaacta

SEQ ID NO: 79831 - DNA, 80 bp, synthetic construct
  source 1..80: mol_type = other DNA
agggataggagaaagaaagaacgtgcacttttctatagacttgatgtagtaccaattaataatagtactagttataggct

SEQ ID NO: 79832 - DNA, 80 bp, synthetic construct
  source 1..80: mol_type = other DNA
aataaattgtaatgactcaaccattaaacaggcttgtccaaaggtatcctttgagccaattcccatacattattgtgctc

SEQ ID NO: 79833 - DNA, 80 bp, synthetic construct
  source 1..80: mol_type = other DNA
cagctggttttgcgattctaaaatgtagagataaaaattttaatggaacaggaccatgtaaaaatgtcagtacagtgcaa

SEQ ID NO: 79834 - DNA, 80 bp, synthetic construct
  source 1..80: mol_type = other DNA
tgcacacatggaatcaggccagtagtatcaactcaattactgttaaatggcagtctagcagaggatgagatagtaattag

SEQ ID NO: 79835 - DNA, 80 bp, synthetic construct
  source 1..80: mol_type = other DNA
atctgaaaatattacagacaataccaaaaatataatagtgcagttaaatgaaactgtacaaattaattgtatcagaccta

SEQ ID NO: 79836 - DNA, 80 bp, synthetic construct
  source 1..80: mol_type = other DNA
ttaatattaatggaacagtaacatttgctaattcctcaggaggagatttagaaattacaacacacagttttaattgtgga

SEQ ID NO: 79837 - DNA, 80 bp, synthetic construct
  source 1..80: mol_type = other DNA
acaacaatacaaggagaagtgtacgtatagggccaggacaaacattctatgcaacaggtgacataataggaaagataaga

SEQ ID NO: 79838 - DNA, 80 bp, synthetic construct
  source 1..80: mol_type = other DNA
caagcacattgtaatgttagtaaaacacaatgggagaagactttacaagcagtaggtgcacaattaagaaaataccttaa

SEQ ID NO: 79839 - DNA, 80 bp, synthetic construct
  source 1..80: mol_type = other DNA
cagtaggtgcacaattaagtaaatactttgttaataaaacaataacatttgctaattcctcaggaggagatgtagaagtt

SEQ ID NO: 79840 - DNA, 80 bp, synthetic construct
  source 1..80: mol_type = other DNA
aggtgcacaattaagaaaataccttaatattaatggaacagtaaaatttgctaattcctcaggaggagatttagaagttg

SEQ ID NO: 79841 - DNA, 80 bp, synthetic construct
  source 1..80: mol_type = other DNA
ctcaaccattaaacaggcttgtccaaaggcatcctttgagccaattcccatacattattgtgctccagctggttttgcga

SEQ ID NO: 79842 - DNA, 80 bp, synthetic construct
  source 1..80: mol_type = other DNA
aagactttacaagcagtaggtgcacaattaagtaaatactttgttaataaaacaataacatttgctaattcctcaggagg

SEQ ID NO: 79843 - DNA, 80 bp, synthetic construct
  source 1..80: mol_type = other DNA
ctttacaagcagtaggtgcacaattaagaaaataccttaatattaatggaacagtaacatttgctaattcctcaggaggg

SEQ ID NO: 79844 - DNA, 80 bp, synthetic construct
  source 1..80: mol_type = other DNA
taagtaaatactttgttaataaaacaataaaatttgctaattcctcaggaggagatgtagaagttacaacacacagtttt

SEQ ID NO: 79845 - DNA, 80 bp, synthetic construct
  source 1..80: mol_type = other DNA
ataccttaatattaatggaacagtaaaatttgctaattcctcagggggagatttagaagttgcaacacacagttttaatt

SEQ ID NO: 79846 - DNA, 80 bp, synthetic construct
  source 1..80: mol_type = other DNA
tgagaatattacaaacaatgctaaaaccataatagtacattttaacagttctgtagtaataaattgcaccagacctaaca

SEQ ID NO: 79847 - DNA, 80 bp, synthetic construct
  source 1..80: mol_type = other DNA
gaaataagagataggaggaaacaagaatatgctcttttttacagaattgatgtaatggcacttgataatagtagtagata

SEQ ID NO: 79848 - DNA, 80 bp, synthetic construct
  source 1..80: mol_type = other DNA
tatactgataaattgtaatgaatcagccattagacaggcttgtccaaaggtaacctttgagccaattcccatacattatt

SEQ ID NO: 79849 - DNA, 80 bp, synthetic construct
  source 1..80: mol_type = other DNA
aattagatctgagaatattacaaacaatgctaaaaccataatagtgcattttaacagttctgtagtaataaattgtacca

SEQ ID NO: 79850 - DNA, 80 bp, synthetic construct
  source 1..80: mol_type = other DNA
gacctaacaacaatacaaggaaaagtgtacgtataggaccaggacaaacattctatgcaagaggtgatataataggagat

SEQ ID NO: 79851 - DNA, 80 bp, synthetic construct
  source 1..80: mol_type = other DNA
ataagaaaagcatattgtactgttagtagacaacaatggaataagactttacaagaagtagctacacaattaggaaaaca

SEQ ID NO: 79852 - DNA, 80 bp, synthetic construct
  source 1..80: mol_type = other DNA
ctttcggaacgcaacaacaatacaatttactaattcctcaggaggagatttagagattacaacacacagttttaattgtg

SEQ ID NO: 79853 - DNA, 80 bp, synthetic construct
  source 1..80: mol_type = other DNA
acgcatggaatcaagccagtagtatcaactcaattgctgttaaatggtagcctagcagaagaagaaatagtaattagatc

SEQ ID NO: 79854 - DNA, 80 bp, synthetic construct
  source 1..80: mol_type = other DNA
tagctaaacaattaagaaagcactttcagaacgcaacaacaatacactttgctagttcctcaggaggagatttagaaatt

SEQ ID NO: 79855 - DNA, 80 bp, synthetic construct
  source 1..80: mol_type = other DNA
gacctggcaacaatacaggaaaaagtgtacgtatagggccaggacaaacattctatgcaacaggtgacataataggaaat

SEQ ID NO: 79856 - DNA, 80 bp, synthetic construct
  source 1..80: mol_type = other DNA
gtgctccagctggttttgcgattctaaaatgcagggataaaaagttcaatggaacaggaccatgtaacaatgttagtgta

SEQ ID NO: 79857 - DNA, 80 bp, synthetic construct
  source 1..80: mol_type = other DNA
gtgcaatgcacacatggaatcaagccagtagtatcaactcaattgctgttaaatggtagcctagcagaggaagagatagt

SEQ ID NO: 79858 - DNA, 80 bp, synthetic construct
  source 1..80: mol_type = other DNA
ctgaggtaaatgttactaatattgatggcactaaagaaaaagtacaaaactgctctttcaataccaccacagaaataaga

SEQ ID NO: 79859 - DNA, 80 bp, synthetic construct
  source 1..80: mol_type = other DNA
gataggaagaaacaagaatatgctcttttttataaaattgatgtaatggcacttgataatagtagtagatatatactgat

SEQ ID NO: 79860 - DNA, 80 bp, synthetic construct
  source 1..80: mol_type = other DNA
aaattgtaatgaatcagccattagacaggcttgtccaaaggtaacctttgggccaattcccatacattattgtgctccag

SEQ ID NO: 79861 - DNA, 80 bp, synthetic construct
  source 1..80: mol_type = other DNA
ctggttttgcgatactaaaatgcagggataaaaagttcaatggaacaggaccatgtaacaatgttagtgtagtgcaatgc

SEQ ID NO: 79862 - DNA, 80 bp, synthetic construct
  source 1..80: mol_type = other DNA
tgagaatattacaaataatgccaaaaccataatagtgcagtttaacagttctgtaggaatagattgtaccagacctggca

SEQ ID NO: 79863 - DNA, 80 bp, synthetic construct
  source 1..80: mol_type = other DNA
ataatacaagaaaaagtgtacgtatagggccaggacaaacattctatgcaaaaggtgacataataggaaatataagacaa

SEQ ID NO: 79864 - DNA, 80 bp, synthetic construct
  source 1..80: mol_type = other DNA
gcacattgtaatgttaatagacaacaatggaataagactttacaagaagtagctatacaattaagaaaacactttcagaa

SEQ ID NO: 79865 - DNA, 80 bp, synthetic construct
  source 1..80: mol_type = other DNA
ctgaggtaaatagtactagacttgatggcgttatgaagaacagaggagaaatacaaaactgctctttcaatacaaccaca

SEQ ID NO: 79866 - DNA, 80 bp, synthetic construct
  source 1..80: mol_type = other DNA
ctgaggtaaatgttactaatattgatggctctgtggaggacaaagaagaaatacaaaactgctcttttaatacaaccaca

SEQ ID NO: 79867 - DNA, 80 bp, synthetic construct
  source 1..80: mol_type = other DNA
ttggggacaacacaacaatacaatttactagttcctcaggaggagatttagaaattacaacacacagttttaattgtgga

SEQ ID NO: 79868 - DNA, 80 bp, synthetic construct
  source 1..80: mol_type = other DNA
tataatcagtttatgggatgaaagcctaaaaccatgtgtaaaactaacccctatgtgtgttactttaaactgtactaatg

SEQ ID NO: 79869 - DNA, 80 bp, synthetic construct
  source 1..80: mol_type = other DNA
ctaatgtaactaagagtgctaatgtaactaagagtgctaatgcaactactcctagtgttgatggtaatattgctaatatc

SEQ ID NO: 79870 - DNA, 80 bp, synthetic construct
  source 1..80: mol_type = other DNA
actgtggaggacaaaggagaagtaaaaaactgctctttcaataccaccacagaaataagagataggaagaaacaggaata

SEQ ID NO: 79871 - DNA, 80 bp, synthetic construct
  source 1..80: mol_type = other DNA
tgctcttttttataaaattgatgtaatggcacttgataatagtagtagatatatactgataaattgtaatgaatcagcca

SEQ ID NO: 79872 - DNA, 80 bp, synthetic construct
  source 1..80: mol_type = other DNA
tgcagggataaaaagttcaatggaacaggaccatgtaacaatgttagtgtagtgcaatgcacacatggaatcaagccagt

SEQ ID NO: 79873 - DNA, 80 bp, synthetic construct
  source 1..80: mol_type = other DNA
agtatcaactcaactgctgttaaatggtagcctagcagaagaagagatagtaattagatctgagaatattacaaataatg

SEQ ID NO: 79874 - DNA, 80 bp, synthetic construct
  source 1..80: mol_type = other DNA
ccaaaaccataatagtgcattttaacaggactgtaggaataaattgtaccagacctggcaacaatacaagaaaaagtgta

SEQ ID NO: 79875 - DNA, 80 bp, synthetic construct
  source 1..80: mol_type = other DNA
ttcagaacgcaacaacaatacactttgctagttcctcaggaggagatttagaaattacaacacatagttttaattgtgga

SEQ ID NO: 79876 - DNA, 80 bp, synthetic construct
  source 1..80: mol_type = other DNA
ccacaagaaatggaattgaaaaatgtaacagagaattttaatatgtggaaaaataatatggtagaacagatgcatgagga

SEQ ID NO: 79877 - DNA, 80 bp, synthetic construct
  source 1..80: mol_type = other DNA
cgtatagggccaggacaaacattctatgcaacaggtgacataataggaaatataagacaagcacattgtaatgttaataa

SEQ ID NO: 79878 - DNA, 80 bp, synthetic construct
  source 1..80: mol_type = other DNA
acaacaatggaataagactttacaagaagtagctatacaattaagaaaacactttcagaacgcaacaacaatacactttg

SEQ ID NO: 79879 - DNA, 80 bp, synthetic construct
  source 1..80: mol_type = other DNA
aattagatctgagaatattacaaataatgccaaaaccataatagtgcagtttaaccagtctgtaggaatagattgtacca

SEQ ID NO: 79880 - DNA, 80 bp, synthetic construct
  source 1..80: mol_type = other DNA
atattgatggcactaaagaagaagtacaaaactgctctttcaataccaccacagaaataagagataggaagaaacaagaa

SEQ ID NO: 79881 - DNA, 80 bp, synthetic construct
  source 1..80: mol_type = other DNA
tgccaaaaccataatagtacagtttaacaagtctgtaggaatagattgtaccagacctggcaataatacaagaaaaagtg

SEQ ID NO: 79882 - DNA, 80 bp, synthetic construct
  source 1..80: mol_type = other DNA
agacaacaatggaataagactttacaagaagtagctaaacaattaagaaaacactttgggagcaacacaacagtacaatt

SEQ ID NO: 79883 - DNA, 80 bp, synthetic construct
  source 1..80: mol_type = other DNA
ggatgaaagcctaaaaccatgtgtaaaactaacccctctatgtgttactttaaactgttctaatgctgaggtaaatatta

SEQ ID NO: 79884 - DNA, 80 bp, synthetic construct
  source 1..80: mol_type = other DNA
ctagcattgataacactgtggagaacaaagaagaagtacaaaactgctctttcaataccaccacagaaataagagatagg

SEQ ID NO: 79885 - DNA, 80 bp, synthetic construct
  source 1..80: mol_type = other DNA
ggaatcaagccagtagtatcaactcaattgctgttaaatggtagcctagcagaggaagagatagtaattagatctgagaa

SEQ ID NO: 79886 - DNA, 80 bp, synthetic construct
  source 1..80: mol_type = other DNA
tattacaaataatgctaaaaccataatagtgcagtttaacgggtctgtaggaatagattgtaccagacctggcaataata

SEQ ID NO: 79887 - DNA, 80 bp, synthetic construct
  source 1..80: mol_type = other DNA
ctgaggtaaatattactagcattgataacactgtggagaacaaagaagaagtacaaaactgctctttcaataccaccaca

SEQ ID NO: 79888 - DNA, 80 bp, synthetic construct
  source 1..80: mol_type = other DNA
gaaataagagataggaagaaacaagaatatgcgcttttctatagacctgatatagtaccacttgatccacctgataatat

SEQ ID NO: 79889 - DNA, 80 bp, synthetic construct
  source 1..80: mol_type = other DNA
tagttatatactgataaattgtaatgactcaaccattaaatagacttgtccaaaggtatcctttgagccaattcctatac

SEQ ID NO: 79890 - DNA, 80 bp, synthetic construct
  source 1..80: mol_type = other DNA
attattgtgctccagctggttttgcgattctaaaatgcagggataaaaagttcaatggaacaggaccatgtaatgatgtc

SEQ ID NO: 79891 - DNA, 80 bp, synthetic construct
  source 1..80: mol_type = other DNA
agtatagtacaatgcacacatgggatcaagccagtagtatcaactcaactgctgttgaatggtagcctagcagaagaaga

SEQ ID NO: 79892 - DNA, 80 bp, synthetic construct
  source 1..80: mol_type = other DNA
gatagtaattagatctgagaatattacaaataatgccaaaaccataatagtgcagtttaacaggtctgtagaaataaatt

SEQ ID NO: 79893 - DNA, 80 bp, synthetic construct
  source 1..80: mol_type = other DNA
gtaccagacctggcaataatacaagaaaaagtgtacgtatagggccaggacaaacattctatgcaaaaggtgacataata

SEQ ID NO: 79894 - DNA, 80 bp, synthetic construct
  source 1..80: mol_type = other DNA
ggaaatataagacaagcacattgtaatgttagtagacaacaatggaataagactttacaagaagtagctaaacaattaag

SEQ ID NO: 79895 - DNA, 80 bp, synthetic construct
  source 1..80: mol_type = other DNA
aaaacactttgggagcaacacaacaatacaatttactaattcctcaggaggagatttagaggttacaacacacagtttta

SEQ ID NO: 79896 - DNA, 80 bp, synthetic construct
  source 1..80: mol_type = other DNA
ctaatgtaactaagagtgctaatgcaactactcctagtgttaataatactattgctaatagcattatggaggacaaagga

SEQ ID NO: 79897 - DNA, 80 bp, synthetic construct
  source 1..80: mol_type = other DNA
gaagtaaaaaactgctctttcaatacaaccacagaaataagagataggaagaaacaagaatatgcgcttttctatagacc

SEQ ID NO: 79898 - DNA, 80 bp, synthetic construct
  source 1..80: mol_type = other DNA
tgatatagtaccacttgatccacctgataatattagttatatactgataaattgtaatgactcaaccattaaacagactt

SEQ ID NO: 79899 - DNA, 80 bp, synthetic construct
  source 1..80: mol_type = other DNA
aagttcaatggaacaggaccatgtaacaatgttagtgtagtgcaatgcacacatggaatcaagccagtagtatcaactca

SEQ ID NO: 79900 - DNA, 80 bp, synthetic construct
  source 1..80: mol_type = other DNA
attgctgttaaatggtagcctagcagaagaagagatagtaattagatctgagaatattacaaataatgccaaaaccataa

SEQ ID NO: 79901 - DNA, 80 bp, synthetic construct
  source 1..80: mol_type = other DNA
tagtgcattttaacaggactgtgggaataaattgtaccaggcctggcaataatacaagaaaaagtgtacgtatagggcca

SEQ ID NO: 79902 - DNA, 80 bp, synthetic construct
  source 1..80: mol_type = other DNA
ggacaaacattctatgcaacaggtgacataataggaaatataagacaagcacattgtaatgttaatagacaacaatggaa

SEQ ID NO: 79903 - DNA, 80 bp, synthetic construct
  source 1..80: mol_type = other DNA
taagactttacaagaagtagctatacaattaagaaaacactttcagaacgcaacaacagtacactttgctagttcctcag

SEQ ID NO: 79904 - DNA, 80 bp, synthetic construct
  source 1..80: mol_type = other DNA
aaatggaagcctagtagaagaaagggtagtaattagatctgaaaatatcacagacgataacaaaaacataatagtacagc

SEQ ID NO: 79905 - DNA, 80 bp, synthetic construct
  source 1..80: mol_type = other DNA
ttctttgcaacggatgttataggagatataagagaagcacattgtaatattaatgaaaaagattggaacaagactttatc

SEQ ID NO: 79906 - DNA, 80 bp, synthetic construct
  source 1..80: mol_type = other DNA
cgaggtagctgaacaattaagaacacacttgaacaacatcacagtaaaatttcaaccatccgcaggaggggacatggaag

SEQ ID NO: 79907 - DNA, 80 bp, synthetic construct
  source 1..80: mol_type = other DNA
ttgtaaggcctgtaaacattacctgtataagacccaacaataatacaagaaaaagtatacctatagggccaggacgagca

SEQ ID NO: 79908 - DNA, 80 bp, synthetic construct
  source 1..80: mol_type = other DNA
acagccatgtgtaaagttaaccccactctgtgttactctaaactgtactgatgcaaaaaataatgtcaccacagataatg

SEQ ID NO: 79909 - DNA, 80 bp, synthetic construct
  source 1..80: mol_type = other DNA
ctacaaatgcaacaagtacctccatgggaggggaactaaaaaattgctctttcaatgtaactacagtattaaaggataag

SEQ ID NO: 79910 - DNA, 80 bp, synthetic construct
  source 1..80: mol_type = other DNA
aagaaaaaagtacaagcactcttttataaacttgatgtagtacaaattgataggaataggactaatgatagttatagtga

SEQ ID NO: 79911 - DNA, 80 bp, synthetic construct
  source 1..80: mol_type = other DNA
gtataggctaataaattgtaatacctcagtcattacacaggcctgtccaaaggtaacctttgaaccaattcctatacatt

SEQ ID NO: 79912 - DNA, 80 bp, synthetic construct
  source 1..80: mol_type = other DNA
attgtgctccagctggttttgcgattctaaagtgtagagataaagggtttagtggattagggccatgcacaaatgtcagc

SEQ ID NO: 79913 - DNA, 80 bp, synthetic construct
  source 1..80: mol_type = other DNA
acagtacaatgtacacatggaattaagccagtggtatcaactcaactactattaaatggaagcctagcagaagaaagggt

SEQ ID NO: 79914 - DNA, 80 bp, synthetic construct
  source 1..80: mol_type = other DNA
agtaattagatctgaaaatatcacagacgataacaaaaacataatagtacagcttgtaaagcctgtaaacattacctgta

SEQ ID NO: 79915 - DNA, 80 bp, synthetic construct
  source 1..80: mol_type = other DNA
taagacccaacaataacacaagaaaaagtatacctatagggccaggacgagcattctttgcaacggatgttataggagat

SEQ ID NO: 79916 - DNA, 80 bp, synthetic construct
  source 1..80: mol_type = other DNA
acagagaatttttatatgtgggacaatgacatggtagaacagatgcatgaagacataatcagtttatgggatcaaagctt

SEQ ID NO: 79917 - DNA, 80 bp, synthetic construct
  source 1..80: mol_type = other DNA
ataagagaagcacattgtaatattaatgaaaaagattggaacaagactttatccgaggtagctgaacaattaagaacaca

SEQ ID NO: 79918 - DNA, 80 bp, synthetic construct
  source 1..80: mol_type = other DNA
caaaaaataatgtcaccactgatgtcattacaaatgcaaccatggcaggggaactaaaaaattgctctttcaatgtaact

SEQ ID NO: 79919 - DNA, 80 bp, synthetic construct
  source 1..80: mol_type = other DNA
acagtgttaaatgataagaagaaaaaagtacaagcactcttttataaacttgatgtaataccaattaatgagaataagaa

SEQ ID NO: 79920 - DNA, 80 bp, synthetic construct
  source 1..80: mol_type = other DNA
tgagactaatagtagtagttatggtaattatagactaataaattgtaatacctcagtcattacacaggcctgtccaaagg

SEQ ID NO: 79921 - DNA, 80 bp, synthetic construct
  source 1..80: mol_type = other DNA
ttaaaggataagaagaaaaaagtacaagcacttttttataaacttgatgtagtacaaattgatgggaataaaactaagga

SEQ ID NO: 79922 - DNA, 80 bp, synthetic construct
  source 1..80: mol_type = other DNA
aaaaatgtcagcacagtacaatgtacacatggaattaagccagtggtgtcaactcaactactattaaatggaagcctggc

SEQ ID NO: 79923 - DNA, 80 bp, synthetic construct
  source 1..80: mol_type = other DNA
gttataggagatataagacaagcacattgtaatattagtgaaaaagattggaacaagactttagcccaggtagctgaaca

SEQ ID NO: 79924 - DNA, 80 bp, synthetic construct
  source 1..80: mol_type = other DNA
caaaaaataatgtcaccaatgccactgcaacaagttcccccatggaactaaaaaattgctctttcaatgtaactacagtg

SEQ ID NO: 79925 - DNA, 80 bp, synthetic construct
  source 1..80: mol_type = other DNA
ttaaatgataagaagaaaaaagtacaagcactcttttataaacttgatgtaataccaattaatgaagatgagactaatgg

SEQ ID NO: 79926 - DNA, 80 bp, synthetic construct
  source 1..80: mol_type = other DNA
tagtagttatagtaattatagactaataaattgtaatacctcagtcgttacgcaggcctgtccaaaggtaacctttgaac

SEQ ID NO: 79927 - DNA, 80 bp, synthetic construct
  source 1..80: mol_type = other DNA
caattcctatacattattgtgctccagctggttttgcgattctaaagtgtaacgagaaagagtttaatggatcaggacca

SEQ ID NO: 79928 - DNA, 80 bp, synthetic construct
  source 1..80: mol_type = other DNA
agcagaagaaaaggtagtaattagatctgaaaatatcacagacgatggcaaaaacataatagtacagcttgtaaagcctg

SEQ ID NO: 79929 - DNA, 80 bp, synthetic construct
  source 1..80: mol_type = other DNA
taaacattacctgtataagacccaacaataatacaagaaaaagtatacctatagggccaggacgagcattctttgcaacg

SEQ ID NO: 79930 - DNA, 80 bp, synthetic construct
  source 1..80: mol_type = other DNA
gatgttataggagatataagagaagcacattgtaatattagtgaaacagattggaacaagactttatccgaggtagctgc

SEQ ID NO: 79931 - DNA, 80 bp, synthetic construct
  source 1..80: mol_type = other DNA
acaattaagaacacacctgaacaacatcacagtaaaatttcaaccatcctcaggaggggacatggaagttacaatgcata

SEQ ID NO: 79932 - DNA, 80 bp, synthetic construct
  source 1..80: mol_type = other DNA
atgccactgcaacaagttcccccatggaactaaaaaattgctctttcaatgtaactacagtgttaaatgataagaagaaa

SEQ ID NO: 79933 - DNA, 80 bp, synthetic construct
  source 1..80: mol_type = other DNA
aaagtacaagcactcttttataaacttgatgtaataccaattaatgaagatgagactaatggtagtagttatagtaatta

SEQ ID NO: 79934 - DNA, 80 bp, synthetic construct
  source 1..80: mol_type = other DNA
gtgctccagctggttttgcgattctaaagtgtaacgagaaagagtttaatggatcaggaccatgcaaaaatgtcagcaca

SEQ ID NO: 79935 - DNA, 80 bp, synthetic construct
  source 1..80: mol_type = other DNA
acttagatctaaagatatcacagacaataccaaaaacataatagtacagcttgtaaagcctgtaaacattacccgtatca

SEQ ID NO: 79936 - DNA, 80 bp, synthetic construct
  source 1..80: mol_type = other DNA
cataatcagtttatgggatcaaagcttacagccatgtgtaaagttaaccccactctgtgttactctaaactgtactgatg

SEQ ID NO: 79937 - DNA, 80 bp, synthetic construct
  source 1..80: mol_type = other DNA
caaaaaataatgtcaccacagataatacaaatgcaacaagtacctccatgggaggggaactaaaaaattgctctttcaat

SEQ ID NO: 79938 - DNA, 80 bp, synthetic construct
  source 1..80: mol_type = other DNA
gtaactacagtattagaggataagaagaaaaaagtacaagcactcttttataaacttgatgtagtacaaattgataggaa

SEQ ID NO: 79939 - DNA, 80 bp, synthetic construct
  source 1..80: mol_type = other DNA
taggactaatgatagttatagtgagtataggctaataaattgtaatacctcagtcattacacaggcctgtccaaaggtaa

SEQ ID NO: 79940 - DNA, 80 bp, synthetic construct
  source 1..80: mol_type = other DNA
cctttgaaccaattcctatacattattgtgctccagctggttttgcgattctaaagtgtagagataaagggtttagtgga

SEQ ID NO: 79941 - DNA, 80 bp, synthetic construct
  source 1..80: mol_type = other DNA
ttagggccatgcacaaatgtcagcacagtacaatgtacacatggaattaagccagtggtatcaactcaactactattaaa

SEQ ID NO: 79942 - DNA, 80 bp, synthetic construct
  source 1..80: mol_type = other DNA
tggaagcctagcagaagaaaaggtagtacttagatctaaagatatcacagaccatctcaaaaacataatagtacagcttg

SEQ ID NO: 79943 - DNA, 80 bp, synthetic construct
  source 1..80: mol_type = other DNA
tagagcctgtaaaaattacctgtatcagacccaacaataacacaagaaaaagtatacctatagggccaggacgagcattc

SEQ ID NO: 79944 - DNA, 80 bp, synthetic construct
  source 1..80: mol_type = other DNA
atataagcaacagcaaagtaaaatttcaaccatcctcaggaggggacatggaagttacaatgcatacctttaattgtgga

SEQ ID NO: 79945 - DNA, 80 bp, synthetic construct
  source 1..80: mol_type = other DNA
ccacaagagatgtccctagagaatgtaacagagaattttaatatgtgggacaataacatggtagagcagatgcatgaaga

SEQ ID NO: 79946 - DNA, 80 bp, synthetic construct
  source 1..80: mol_type = other DNA
tttgcaacggatgttataggagatataagacaagcacattgtaatgttagtaaaggaaattggtccaagactttatccca

SEQ ID NO: 79947 - DNA, 80 bp, synthetic construct
  source 1..80: mol_type = other DNA
ggtaattgaacaattagaaaaacacctgaataaaagcctgaatataagcaacagcaaagtaaaatttcaaccatcctcag

SEQ ID NO: 79948 - DNA, 80 bp, synthetic construct
  source 1..80: mol_type = other DNA
tcaaagcttacagccatgtgtaaagttaaccccactctgtgttactctaaactgtactgatgtaaaaaataatgtcaccg

SEQ ID NO: 79949 - DNA, 80 bp, synthetic construct
  source 1..80: mol_type = other DNA
caaatgagggaacaaataacagtgccactacaagttcccccatgacaggggaactaaaaaattgctctttcaatgtaact

SEQ ID NO: 79950 - DNA, 80 bp, synthetic construct
  source 1..80: mol_type = other DNA
taataatagtaggtatagtgattatagactaataaattgtaatacctcagtcgttacgcaggcctgtccaagggtaacct

SEQ ID NO: 79951 - DNA, 80 bp, synthetic construct
  source 1..80: mol_type = other DNA
gagaatgtaacagagaattttaatatgtgggacaatgacatggtagaacagatgcatgaagacataatcagtttatggga

SEQ ID NO: 79952 - DNA, 80 bp, synthetic construct
  source 1..80: mol_type = other DNA
gcaacagatgttataggagatataagacaggcacattgtaatattagtgaaaaggattggaacgagactttatcccagat

SEQ ID NO: 79953 - DNA, 80 bp, synthetic construct
  source 1..80: mol_type = other DNA
aactgaacaactaaaaagacacttgaacaacatcacagtaaaatttcaaccatcctcaggaggggacatggaaattacaa

SEQ ID NO: 79954 - DNA, 80 bp, synthetic construct
  source 1..80: mol_type = other DNA
taaaaaataatgtcaccgcaaatgagggaacaaataacagtgccactacaagttcccccatgacaggggaactaaaaaat

SEQ ID NO: 79955 - DNA, 80 bp, synthetic construct
  source 1..80: mol_type = other DNA
tgctctttcaatgtaactacagtgttaaatgataagaagaaaaaggtacaagcactcttttataaacttgatgtagtaca

SEQ ID NO: 79956 - DNA, 80 bp, synthetic construct
  source 1..80: mol_type = other DNA
aattgatgggaataagactaataatagtaggtatagtgattataggctaataaattgtaatacctcagtcgttacgcagg

SEQ ID NO: 79957 - DNA, 80 bp, synthetic construct
  source 1..80: mol_type = other DNA
aaagggtttagtggatcagggccatgcaaaaatgtcagcacagtacaatgtacacatggaattaagccagtggtatcaac

SEQ ID NO: 79958 - DNA, 80 bp, synthetic construct
  source 1..80: mol_type = other DNA
tcaactactattaaatggaagcctagcagaagaagaggtagtacttagatctaaaaatatcacagaccatctccaaaaca

SEQ ID NO: 79959 - DNA, 80 bp, synthetic construct
  source 1..80: mol_type = other DNA
taatagtacagcttgtaaagcctgtaaacattacctgtataagacccaacaataacacaagaaaaagtatacctataggg

SEQ ID NO: 79960 - DNA, 80 bp, synthetic construct
  source 1..80: mol_type = other DNA
acttgaacaacatcacagtaaaatttcaaccatcctcaggaggggacatggaaattacaatgcatacttttaattgtgga

SEQ ID NO: 79961 - DNA, 80 bp, synthetic construct
  source 1..80: mol_type = other DNA
ccaggacgagcattctttgcaacagatgttataggagatataagacaggcacattgtaatattagtgaaaaggattggaa

SEQ ID NO: 79962 - DNA, 80 bp, synthetic construct
  source 1..80: mol_type = other DNA
cgagactttatcccagataactgaacaactaaaaagacacttgaacaacatcacagtaaaatttcaaccatcctcaggag

SEQ ID NO: 79963 - DNA, 80 bp, synthetic construct
  source 1..80: mol_type = other DNA
caagaaatgatcctagagaatgtaacagagaattttaatatgtgggacaatgacatggtagaacagatgcatgaagacat

SEQ ID NO: 79964 - DNA, 80 bp, synthetic construct
  source 1..80: mol_type = other DNA
taatacctcagtcattacacaggcctgtccaaaggtaacctttgaaccaattcctatacattattgtgctccagctggtt

SEQ ID NO: 79965 - DNA, 80 bp, synthetic construct
  source 1..80: mol_type = other DNA
ttgcgattctaaagtgtagagataaagggtttagtggattagggccatgcacaaatgtcagcacagtacaatgtacacat

SEQ ID NO: 79966 - DNA, 80 bp, synthetic construct
  source 1..80: mol_type = other DNA
ggaattaagccagtggtatcaactcaactactattaaatggaagcctagcagaaaaaaaggtagtaattagatctgaaaa

SEQ ID NO: 79967 - DNA, 80 bp, synthetic construct
  source 1..80: mol_type = other DNA
tatcacagacgatggcaaaaacataatagtacagcttgtaaggcctgtaaacattacctgtataagacccaacaataata

SEQ ID NO: 79968 - DNA, 80 bp, synthetic construct
  source 1..80: mol_type = other DNA
caagaaaaagtatacctatagggccaggacgagcattctttgcaacggatgttataggagatataagagaggcacattgt

SEQ ID NO: 79969 - DNA, 80 bp, synthetic construct
  source 1..80: mol_type = other DNA
caagcactcttttataaacttgatgtagtacaaattgataggaataggactaatgatagttatagtgagtataggctaat

SEQ ID NO: 79970 - DNA, 80 bp, synthetic construct
  source 1..80: mol_type = other DNA
cattgtaatattaataaaaaagattggaatgagactttatccgaggtagctgaacaattaagaacacacttgaacaacat

SEQ ID NO: 79971 - DNA, 80 bp, synthetic construct
  source 1..80: mol_type = other DNA
aatgaaaaagattggaacaagactttatccgaggtagctgaacaattagaaacacacttgaacaacaacagcacagtaag

SEQ ID NO: 79972 - DNA, 80 bp, synthetic construct
  source 1..80: mol_type = other DNA
tttaatatgtgggacaatgacatggtagaacagatgcatgaagacataatcagtttatgggatcaaagcttacagccatg

SEQ ID NO: 79973 - DNA, 80 bp, synthetic construct
  source 1..80: mol_type = other DNA
gaagcacattgtaatgttaatgaaaaaaattggaacgagactttatccgaggtagctgaacaattaagaacacacttgaa

SEQ ID NO: 79974 - DNA, 80 bp, synthetic construct
  source 1..80: mol_type = other DNA
tgtacacatgggattaagccagtggtatcaactcaactactattaaatggaagcctggcagaagaaagggtagtaattag

SEQ ID NO: 79975 - DNA, 80 bp, synthetic construct
  source 1..80: mol_type = other DNA
atgtgtaaagttaaccccactctgtgttactctaaactgtgctgatgcaaaaaataatgtcaccacagataatacaaatg

SEQ ID NO: 79976 - DNA, 80 bp, synthetic construct
  source 1..80: mol_type = other DNA
caacaagtacctccatgggaggggaactaaaaaattgctctttcaatgtaactacagtattaaaggataagaagaaaaaa

SEQ ID NO: 79977 - DNA, 80 bp, synthetic construct
  source 1..80: mol_type = other DNA
gtacaagcactcttttataaacttgatgtagtacaaattgatgggaataaaactaaggatagttatagtgaatataggct

SEQ ID NO: 79978 - DNA, 80 bp, synthetic construct
  source 1..80: mol_type = other DNA
aataaattgtaatacctcagtcattacacaagcctgtccaaaggtaacctttgaaccaattcctatacattattgtgctc

SEQ ID NO: 79979 - DNA, 80 bp, synthetic construct
  source 1..80: mol_type = other DNA
cagctggttttgcgattctaaagtgtagagataaagggtttagtggattagggccatgcacaaatgtcagcacagtacaa

SEQ ID NO: 79980 - DNA, 80 bp, synthetic construct
  source 1..80: mol_type = other DNA
atctgaaaatatcacagacgatggcaaaaacataatagtacagcttgtaaggcctgtaaacattacctgtataagaccca

SEQ ID NO: 79981 - DNA, 80 bp, synthetic construct
  source 1..80: mol_type = other DNA
ttggaacaagactttatccgaggtagctgaacaattagaaacacacttgaacaacaacagcacagtaagatttcaaccat

SEQ ID NO: 79982 - DNA, 80 bp, synthetic construct
  source 1..80: mol_type = other DNA
acaataatacaagaaaaagtatacctatagggccaggacgagcattctttgcaacggatgttataggagatataagagaa

SEQ ID NO: 79983 - DNA, 80 bp, synthetic construct
  source 1..80: mol_type = other DNA
gcacattgtaatattaatgaaaaagattggaacaagactttatccgaggtagctgaacaattagaaacacacttgaacaa

SEQ ID NO: 79984 - DNA, 80 bp, synthetic construct
  source 1..80: mol_type = other DNA
atgcaacaagtacctctataggaggggaactaaaaaattgctctttcagtgtaactacagtactaaaagataagaagaaa

SEQ ID NO: 79985 - DNA, 80 bp, synthetic construct
  source 1..80: mol_type = other DNA
agattggaacaagactttatccgaggtagctgaacaattaagaacatacttgaacaacatcacagtaaaatttcaaccat

SEQ ID NO: 79986 - DNA, 80 bp, synthetic construct
  source 1..80: mol_type = other DNA
caccacagataatacaaatgcaacaagtacctccatgggaggggaactaaaaaattgctctttcaatgtaactacagtat

SEQ ID NO: 79987 - DNA, 80 bp, synthetic construct
  source 1..80: mol_type = other DNA
agttatagtgaatatgggctaataaattgtaatacctcagtcattacacaggcctgtccaaaggtaacctttgaaccaat

SEQ ID NO: 79988 - DNA, 80 bp, synthetic construct
  source 1..80: mol_type = other DNA
tcctatacattattgtgctccagctggttttgcgattctaaagtgtagagataaagggtttagtggattagggccatgca

SEQ ID NO: 79989 - DNA, 80 bp, synthetic construct
  source 1..80: mol_type = other DNA
ctgtactgatgcaaaaaataatgtcaccacagataatacaaatgcaacaagtacctccatgggaggggaactaaaaaact

SEQ ID NO: 79990 - DNA, 80 bp, synthetic construct
  source 1..80: mol_type = other DNA
attgatgaaaataaaactaaggatagttatagtgaatataggctaataaattgtaatacctcagtcattacacaggcctg

SEQ ID NO: 79991 - DNA, 80 bp, synthetic construct
  source 1..80: mol_type = other DNA
ctactattaaatggaagcctggcagaagaaagggtagtaattagatctgaaaatatcacagacgatggcaaaaacataat

SEQ ID NO: 79992 - DNA, 80 bp, synthetic construct
  source 1..80: mol_type = other DNA
gacgagcattctttgcaacggatgttataggagatataagagaagcacattgtaatattaatgaaaaagattggaacaag

SEQ ID NO: 79993 - DNA, 80 bp, synthetic construct
  source 1..80: mol_type = other DNA
atgcatgaagacataatcagtttatgggatcaaagcttacagccatgtgtaaagttaaccccactctgtgttactctaaa

SEQ ID NO: 79994 - DNA, 80 bp, synthetic construct
  source 1..80: mol_type = other DNA
gttataggagatataagaggagcacattgtaatgttaatgaagaaaattggaacgagactttatccgaggtagctgaaca

SEQ ID NO: 79995 - DNA, 80 bp, synthetic construct
  source 1..80: mol_type = other DNA
tagggccaggacgagcattctttgcaacggatgttataggagatataagagaagcacattgtaatattaatgaaaaagat

SEQ ID NO: 79996 - DNA, 80 bp, synthetic construct
  source 1..80: mol_type = other DNA
aaaaaaataatattgccactacaagtccccccatggcaggggagctaaaaaattgctctttcaatgtaactacagtgtta

SEQ ID NO: 79997 - DNA, 80 bp, synthetic construct
  source 1..80: mol_type = other DNA
agaagaaaaggtagtacttagatctgaaaatatcacagaccatctcaaaaacataatagtacagcttgtagagcctgtaa

SEQ ID NO: 79998 - DNA, 80 bp, synthetic construct
  source 1..80: mol_type = other DNA
actttatcccaggtaattgaacaattagaaaaacacctgaataaaagcctgaatataagcaacagcaaagtaaaatttca

SEQ ID NO: 79999 - DNA, 80 bp, synthetic construct
  source 1..80: mol_type = other DNA
gttataggagatataagacaagcacattgtaatattagtaaaggaaattggtccaagactttatcccaggtaattgaaca

SEQ ID NO: 80000 - DNA, 80 bp, synthetic construct
  source 1..80: mol_type = other DNA
acaagactttatccgaggtagctgaacaattaagaacacacttgaacaacatcacagtaaaatttcaaccatcctcagga

SEQ ID NO: 80001 - DNA, 80 bp, synthetic construct
  source 1..80: mol_type = other DNA
aacaatacaagaaaaagtatacacatagcaccaggacaagcatactatgcaacaggtgacataataggggacatagggaa

SEQ ID NO: 80002 - DNA, 80 bp, synthetic construct
  source 1..80: mol_type = other DNA
tgatttagtggagattaatgaaaatagtgaaaagaataatggtagtaataataatagtagtaataataagtatatactaa

SEQ ID NO: 80003 - DNA, 80 bp, synthetic construct
  source 1..80: mol_type = other DNA
atatcacggttcataatagcagcaccagtagtaccaccaacagcactcctaataccaccaccacgcctcctgccacacag

SEQ ID NO: 80004 - DNA, 80 bp, synthetic construct
  source 1..80: mol_type = other DNA
cacacatggaatcaagccagtagtatcaactcaactgctgttaaatggcagtctagcagaaggaaatgtaaccatcagat

SEQ ID NO: 80005 - DNA, 80 bp, synthetic construct
  source 1..80: mol_type = other DNA
ctgaaaatatcacagacaatgcaaaaaacataatagtacagcttgccgagccagtaaagattaattgtttcaggcctaac

SEQ ID NO: 80006 - DNA, 80 bp, synthetic construct
  source 1..80: mol_type = other DNA
gccaggtagcaagaaaattaggggaatactggaacaactcaacaataacattcaatagctcctcaggaggggatgtagaa

SEQ ID NO: 80007 - DNA, 80 bp, synthetic construct
  source 1..80: mol_type = other DNA
tcacggttcacaataacagcaccagtagtgccaccaacggcaccaataataccacccccacgcctcccagcatcaatgcc

SEQ ID NO: 80008 - DNA, 80 bp, synthetic construct
  source 1..80: mol_type = other DNA
tagaattgatttagtagaaattaatgaaaatagtgaaaagaataatggtagtaataataatagtagtaataataagtata

SEQ ID NO: 80009 - DNA, 80 bp, synthetic construct
  source 1..80: mol_type = other DNA
tactaataaattgtaatacctcagccattacacaagcttgtccaaaggtatcttttgagccaattcccatacattattgt

SEQ ID NO: 80010 - DNA, 80 bp, synthetic construct
  source 1..80: mol_type = other DNA
gccccagctggttttgcgattctaaagtgtaatgataagaatttcaatggaacaggcctatgcaagaatgtcagcacagt

SEQ ID NO: 80011 - DNA, 80 bp, synthetic construct
  source 1..80: mol_type = other DNA
acaatgcacacatggaatcaaaccagtagtatcgactcaactgctgttaaatggcagtctagcagaaggaaatgtaacca

SEQ ID NO: 80012 - DNA, 80 bp, synthetic construct
  source 1..80: mol_type = other DNA
aagaaaagcatattgtcaggtcaatgaaacaaaatggaacaaaactttaagccaggtagtaagaaaattaggggaatact

SEQ ID NO: 80013 - DNA, 80 bp, synthetic construct
  source 1..80: mol_type = other DNA
atatcacggttcacaataacagcaccaataataccaccgccacgcctcccagcgtcgatgccaagcttgagatgaaaaac

SEQ ID NO: 80014 - DNA, 80 bp, synthetic construct
  source 1..80: mol_type = other DNA
tgctctttcaatataaccacagaaataagagataagagaaagaaagtatattcacttttctatagaattgatttagtgga

SEQ ID NO: 80015 - DNA, 80 bp, synthetic construct
  source 1..80: mol_type = other DNA
aattaatgaaaatagtgaaaagaataatggtagtagtaataatagtagtaataataagtatatactaataaattgtaata

SEQ ID NO: 80016 - DNA, 80 bp, synthetic construct
  source 1..80: mol_type = other DNA
gccacgcttgagatgaaaaactgctctttcaatataaccacagaaataagagataggagaaagaaagtatattcactttt

SEQ ID NO: 80017 - DNA, 80 bp, synthetic construct
  source 1..80: mol_type = other DNA
ctatagaattgatttagtagaaattaatgaaaatagtgaaagtactattaataagagtagtagtagtagtaataggaggt

SEQ ID NO: 80018 - DNA, 80 bp, synthetic construct
  source 1..80: mol_type = other DNA
aaagccatgtgtaaagttaacccctatctgcgttaccttagagtgtagtgacaatatcacggttcacaatagcagcacca

SEQ ID NO: 80019 - DNA, 80 bp, synthetic construct
  source 1..80: mol_type = other DNA
gtaataccaccaacaacagcaatagtaataccaccgccacgcctcccagcatcgatgccaagcttgagatgaaaaactgc

SEQ ID NO: 80020 - DNA, 80 bp, synthetic construct
  source 1..80: mol_type = other DNA
cagccattacacaagcttgtccaaagatatcctttgagccaattcccatacattattgtgccccagctggttttgcgatt

SEQ ID NO: 80021 - DNA, 80 bp, synthetic construct
  source 1..80: mol_type = other DNA
gccagtagtatcaactcaattgctgttaaatggcagtctagcagaaggaaatgtaaccatcagatctaaaaatatcacag

SEQ ID NO: 80022 - DNA, 80 bp, synthetic construct
  source 1..80: mol_type = other DNA
acagaaaagtttaacatgtgggaaaatagtatggtagagcagatgcaggaagatgtaatcagtctatgggaccaaagctt

SEQ ID NO: 80023 - DNA, 80 bp, synthetic construct
  source 1..80: mol_type = other DNA
tgtaaagttaacccctatctgcgttacctcagagtgtagtgacaatatcacggttcacaatagcagcaccagtaatacca

SEQ ID NO: 80024 - DNA, 80 bp, synthetic construct
  source 1..80: mol_type = other DNA
ccaacaacagcaatagtaataccaccgccacgcctcccagcatcgatgccaagcttgaaatgaaaaactgctctttcaat

SEQ ID NO: 80025 - DNA, 80 bp, synthetic construct
  source 1..80: mol_type = other DNA
ataaccacagaaataagagataagagaaagaaagtatattcacttttctatagaattgatttagtggaaattaatgaaaa

SEQ ID NO: 80026 - DNA, 80 bp, synthetic construct
  source 1..80: mol_type = other DNA
aacgataagaatttcaatggaacaggcctatgcaagaatgtcagcacagtacaatgcacacatggaatcaaaccagtagt

SEQ ID NO: 80027 - DNA, 80 bp, synthetic construct
  source 1..80: mol_type = other DNA
tttgacatgtggaaaaatagtatggtagagcagatgcaggaagatgtaatcagtctatgggaccaaagcttaaagccatg

SEQ ID NO: 80028 - DNA, 80 bp, synthetic construct
  source 1..80: mol_type = other DNA
ccaacagcagcactcatgataccgccaccacgcctcctgccacacaggaaatgaaaaactgctctttcaatataaccaca

SEQ ID NO: 80029 - DNA, 80 bp, synthetic construct
  source 1..80: mol_type = other DNA
taatagtactgagagtaaggataataggactagtagtaataataagtatatactaataaattgtaatacctcagccatta

SEQ ID NO: 80030 - DNA, 80 bp, synthetic construct
  source 1..80: mol_type = other DNA
cacaagcttgtccaaaggtatcttttgagccaattcccatacattattgtgccccagctggttttgcgattctaaagtgt

SEQ ID NO: 80031 - DNA, 80 bp, synthetic construct
  source 1..80: mol_type = other DNA
ataagagataagagaaagaaagtatattcacttttctataggattgatttagtagaaattaatgaaaatagtgaaaataa

SEQ ID NO: 80032 - DNA, 80 bp, synthetic construct
  source 1..80: mol_type = other DNA
aatagcagcgccagtaataccaccaacagcagcaatagtaataccaccgccacgcctcccagcatcgatgccaagcttga

SEQ ID NO: 80033 - DNA, 80 bp, synthetic construct
  source 1..80: mol_type = other DNA
cgccacgcctcccagcatcgatgccaagcttgagatgaaaaactgctctttcaatataaccacagaaataagagataaga

SEQ ID NO: 80034 - DNA, 80 bp, synthetic construct
  source 1..80: mol_type = other DNA
gaaagaaagtatattcacttttctatagaattgatttagtggaaattaatgaaaatagtgaaaagaataatggtagtagt

SEQ ID NO: 80035 - DNA, 80 bp, synthetic construct
  source 1..80: mol_type = other DNA
aataatagtagtaataataagtatatactagtaaattgtaatacctcagccattacacaagcttgtccaaaggtatcctt

SEQ ID NO: 80036 - DNA, 80 bp, synthetic construct
  source 1..80: mol_type = other DNA
agtctagcagaaggaaatgtaaccatcagatctaaaaatatcacagacaatggaaaaaacataatagtacagcttgccga

SEQ ID NO: 80037 - DNA, 80 bp, synthetic construct
  source 1..80: mol_type = other DNA
accttagagtgtagtgacaatatcacggttcacaatagcagcaccagtaataccaccaacaacagcaatagtaataccac

SEQ ID NO: 80038 - DNA, 80 bp, synthetic construct
  source 1..80: mol_type = other DNA
caggtgacataataggggacataagaaaagcatattgccaggtcaatgaaacaaaatggaacaaaactttaggccaggta

SEQ ID NO: 80039 - DNA, 80 bp, synthetic construct
  source 1..80: mol_type = other DNA
gaattgatttagtagaaattaatgaaaatagtgaaaagaataatgatagtggtagtaatagtagtgatagtagtaataat

SEQ ID NO: 80040 - DNA, 80 bp, synthetic construct
  source 1..80: mol_type = other DNA
tatcacggttcacaatagcagcaccagtaataccaccaacaacagcaatagtaataccaccgccacgcctcccagcatcg

SEQ ID NO: 80041 - DNA, 80 bp, synthetic construct
  source 1..80: mol_type = other DNA
gtatatactggtaaattgtaatacctcagccattacacaagcttgtccaaaggtatcctttgagccaattcccatacatt

SEQ ID NO: 80042 - DNA, 80 bp, synthetic construct
  source 1..80: mol_type = other DNA
aacataaggaaagcatattgtctggtcaatgaaacagcatggaacaaaactttaagccaggtagcaagaaaattagggga

SEQ ID NO: 80043 - DNA, 80 bp, synthetic construct
  source 1..80: mol_type = other DNA
agtgtagtgacaatatcacggttcataatagcagcaccagtagtaccaccaacagcagcactcatgataccgccaccacg

SEQ ID NO: 80044 - DNA, 80 bp, synthetic construct
  source 1..80: mol_type = other DNA
cctcctgccacacaggaaatgaaaaactgctctttcaatataaccacagaaataagagataagagaaagaaagtatattc

SEQ ID NO: 80045 - DNA, 80 bp, synthetic construct
  source 1..80: mol_type = other DNA
acttttctataggattgatttagtagaaattaatgaaaatagtgaaaataatagtactgagagtaaggataataggacta

SEQ ID NO: 80046 - DNA, 80 bp, synthetic construct
  source 1..80: mol_type = other DNA
gtagtaataataagtatatactaataaattgtaatacctcagccattacacaagcttgtccaaaggtatcttttgagcca

SEQ ID NO: 80047 - DNA, 80 bp, synthetic construct
  source 1..80: mol_type = other DNA
cagaaggaaatgtaaccatcagatctgaaaatatcacagacaatgcaaaaaacataatagtacagcttgccgagcctgta

SEQ ID NO: 80048 - DNA, 80 bp, synthetic construct
  source 1..80: mol_type = other DNA
aatattacttgtttcaggcctaacaacaatacaagaaaaagtatacatataggaccaggacaagcattctatgcaacagg

SEQ ID NO: 80049 - DNA, 80 bp, synthetic construct
  source 1..80: mol_type = other DNA
gatgcaggaagatgtaatcagtctatgggaccaaagcttaaagccatgtgtaaagttaacccctctctgcgttaccttag

SEQ ID NO: 80050 - DNA, 80 bp, synthetic construct
  source 1..80: mol_type = other DNA
tgacataatagggaacataaggaaagcatattgtctggtcaatgaaacagcatggaacaaaactttaagccaggtagcaa

SEQ ID NO: 80051 - DNA, 80 bp, synthetic construct
  source 1..80: mol_type = other DNA
ataccaccaaaagcaccaatcccaccaccacgcctcctgccacacaggagatgaaaaactgctctttcaacataaccaca

SEQ ID NO: 80052 - DNA, 80 bp, synthetic construct
  source 1..80: mol_type = other DNA
gaaataagagataagaaacggaaagtctattcacttttctatagaattgatttagtagaaattaatgaaaatagtgaaaa

SEQ ID NO: 80053 - DNA, 80 bp, synthetic construct
  source 1..80: mol_type = other DNA
aagtgtaatgataagaatttcaatggaacaggcctatgcaagaatgtcagcacagtgcaatgcacacatggaatcaaatc

SEQ ID NO: 80054 - DNA, 80 bp, synthetic construct
  source 1..80: mol_type = other DNA
tgtaaagttaacccctctctgcgttaccttagaatgtaataataccaacagcactaaggatgccggcaacacgcttgaca

SEQ ID NO: 80055 - DNA, 80 bp, synthetic construct
  source 1..80: mol_type = other DNA
tgggtaaagaaataaaaaactgctctttcaatataaccacagaaataagagataagagacggaaagtatattcacttttc

SEQ ID NO: 80056 - DNA, 80 bp, synthetic construct
  source 1..80: mol_type = other DNA
tatagacttgatatagtagaaattaatgcaaataataatgatagtaagtatagactaataaattgtaatacctcagccat

SEQ ID NO: 80057 - DNA, 80 bp, synthetic construct
  source 1..80: mol_type = other DNA
tttaacatatggaaaaatagtatggtagagcagatgcaggcagatataattagcttatgggaccaaagcctaaagccatg

SEQ ID NO: 80058 - DNA, 80 bp, synthetic construct
  source 1..80: mol_type = other DNA
acagcaccaataataccaccgccacgcctcccagcatcgatgccaagcttgagatgaaaaactgctctttcaatataacc

SEQ ID NO: 80059 - DNA, 80 bp, synthetic construct
  source 1..80: mol_type = other DNA
aaagaataatggtagtagtaataatagtagtaataataagtatatactagtaaattgtaatacctcagccattacacaag

SEQ ID NO: 80060 - DNA, 80 bp, synthetic construct
  source 1..80: mol_type = other DNA
tcaactgctgttgaatggcagtctagcagaaggaaatgtaaccatcagatctgaaaatatcacagacaatggaaaaaaca

SEQ ID NO: 80061 - DNA, 80 bp, synthetic construct
  source 1..80: mol_type = other DNA
taatagtacagcttgccgagcctgtaaatattactcgtttcaggcctagcaacaatacaagaaaaagtatacatatagga

SEQ ID NO: 80062 - DNA, 80 bp, synthetic construct
  source 1..80: mol_type = other DNA
ccaggacaagcattctatgcaacaggtgacgtaataggggacataagaaaagcatattgccaggtcaatgaaacagcatg

SEQ ID NO: 80063 - DNA, 80 bp, synthetic construct
  source 1..80: mol_type = other DNA
aaatagtgaaaagaataatggtagtagtaataatagtagtaataataagtatatactagtaaattgtaatacctcagcca

SEQ ID NO: 80064 - DNA, 80 bp, synthetic construct
  source 1..80: mol_type = other DNA
agtatcaactcaactgctgttaaatggcagtctagcagaaggaaatgtaaccatcagatctgaaaatatcacagacaatg

SEQ ID NO: 80065 - DNA, 80 bp, synthetic construct
  source 1..80: mol_type = other DNA
caaaaaacataatagtacagcttgccgagcctgtaaatattacttgtttcaggcctagcaacaatacaagaaaaagtata

SEQ ID NO: 80066 - DNA, 80 bp, synthetic construct
  source 1..80: mol_type = other DNA
catataggaccaggacaagcattctatgcaacaggtgacataatagggaacataagaaaagcatattgtctggtcaatga

SEQ ID NO: 80067 - DNA, 80 bp, synthetic construct
  source 1..80: mol_type = other DNA
aacagcatggaacaaaactttaagccaggtagcaagaaaattaggggaatactggaaaaactcaacaataacattcaata

SEQ ID NO: 80068 - DNA, 80 bp, synthetic construct
  source 1..80: mol_type = other DNA
tgatttagtagaaattgatgaaaatagtaaaaagaataatgatagtggtaataatactagtgatagtagtaataataagt

SEQ ID NO: 80069 - DNA, 80 bp, synthetic construct
  source 1..80: mol_type = other DNA
tgatttagtagagattaatgaaagaagtgaaaacagtaatgacagtactaatagtagtaatagtggtaataataagtata

SEQ ID NO: 80070 - DNA, 80 bp, synthetic construct
  source 1..80: mol_type = other DNA
ccaacatcacgtctcataataacagcaccagtaccaccagtagtcccaccaccacgcctcccagcgtcaacgacacgctt

SEQ ID NO: 80071 - DNA, 80 bp, synthetic construct
  source 1..80: mol_type = other DNA
gaaatgaaaaactgctctttcaatataaccacagaaataagagataagagaaagaaagtatattcacttttctatagaat

SEQ ID NO: 80072 - DNA, 80 bp, synthetic construct
  source 1..80: mol_type = other DNA
aaactttaagccaggtagcaagaaaattaggggaatactggaaaaactcaacaataacattcaatagctcctcaggaggg

SEQ ID NO: 80073 - DNA, 80 bp, synthetic construct
  source 1..80: mol_type = other DNA
gcagcaccaatagtaccaccaacagcaatcataataccaccaccacgcctcctgccacacaggagatgaaaaactgctct

SEQ ID NO: 80074 - DNA, 80 bp, synthetic construct
  source 1..80: mol_type = other DNA
ttcaatataaccacagaaataagagataagaaacggaaagtatattcacttttctatagaattgatttagtagaaattaa

SEQ ID NO: 80075 - DNA, 80 bp, synthetic construct
  source 1..80: mol_type = other DNA
attgtaatacctcagccattacacaagcttgtccaaaggtactttttgaaccaattcccatacattattgtgccccagct

SEQ ID NO: 80076 - DNA, 80 bp, synthetic construct
  source 1..80: mol_type = other DNA
ggttttgcgattctaaagtgtaatgataagaatttcaatgggacagggctatgcaagaatgtcagcacagtacaatgcac

SEQ ID NO: 80077 - DNA, 80 bp, synthetic construct
  source 1..80: mol_type = other DNA
aatacaagaaaaagtatacatatagggccaggacaagcattctatgcaacaggtgacataatagggaacataagaaaagc

SEQ ID NO: 80078 - DNA, 80 bp, synthetic construct
  source 1..80: mol_type = other DNA
agaaaaagtatacatataggaccaggacaagcattctatgcaacaggtgacataataggggacataagaaaagcatattg

SEQ ID NO: 80079 - DNA, 80 bp, synthetic construct
  source 1..80: mol_type = other DNA
tgaaaatagtgaaaataatagtactgaaagtaaggataataggactagtagtaataataagtatatactaataaattgta

SEQ ID NO: 80080 - DNA, 80 bp, synthetic construct
  source 1..80: mol_type = other DNA
gcgattctaaagtgtaatgataagaatttcaatggaacaggcctatgcaagaatgtcagcacagtacaatgcacacatgg

SEQ ID NO: 80081 - DNA, 80 bp, synthetic construct
  source 1..80: mol_type = other DNA
aatcaaaccagtagtatcaactcaactgctgttaaatggcagtctagcagaaggaaatgtaaccatcagatctgaaaata

SEQ ID NO: 80082 - DNA, 80 bp, synthetic construct
  source 1..80: mol_type = other DNA
tcacagacaatggaaaaaacataatagtacagcttgccgagcctgtaaatattacttgtttcaggcctagcaacaataca

SEQ ID NO: 80083 - DNA, 80 bp, synthetic construct
  source 1..80: mol_type = other DNA
tcaggtcaatgaaacaaaatggaacaaaactttaagccaggtagcaagaaaattaggggaatactggaaaaactcaaaaa

SEQ ID NO: 80084 - DNA, 80 bp, synthetic construct
  source 1..80: mol_type = other DNA
ccaaagcttaaagccatgtgtaaagttaacccctatctgcgttaccttagagtgtagtgacaatatcacggttcacaata

SEQ ID NO: 80085 - DNA, 80 bp, synthetic construct
  source 1..80: mol_type = other DNA
gcagcaccagtaataccacctacaacaccaacagtaataccaccgccacgcctcccagcatcaatgccacgctggagatg

SEQ ID NO: 80086 - DNA, 80 bp, synthetic construct
  source 1..80: mol_type = other DNA
aaaaactgctctttcaatataaccacagaaataagagataagagacggaaagtatattcacttttctatagaattgattt

SEQ ID NO: 80087 - DNA, 80 bp, synthetic construct
  source 1..80: mol_type = other DNA
gatctgaaaatatcacagacaatggaaaaaacataatagtacagcttgccgagcctgtaaatattacttgtgttagacct

SEQ ID NO: 80088 - DNA, 80 bp, synthetic construct
  source 1..80: mol_type = other DNA
gtcaatgtaacagaaaagtttaacatgtggaaaaatagtatggtagagcagatgcaggaagatgtaatcagtctatggga

SEQ ID NO: 80089 - DNA, 80 bp, synthetic construct
  source 1..80: mol_type = other DNA
aacaacaatacaagaaaaagtatacatataggaccaggacaagcattctttgcaacaggtgacataatagggaacataag

SEQ ID NO: 80090 - DNA, 80 bp, synthetic construct
  source 1..80: mol_type = other DNA
gaaagcatactgtctggtcaatgaaacagcatggaacaaaactttaagccaggtagcaagaaaattaggggaatactgga

SEQ ID NO: 80091 - DNA, 80 bp, synthetic construct
  source 1..80: mol_type = other DNA
ccaaagcttaaagccatgtgtaaagttaacccctctctgcgttaccttagagtgtagtgatgccaacatcacgtctcata

SEQ ID NO: 80092 - DNA, 80 bp, synthetic construct
  source 1..80: mol_type = other DNA
ataacagcaccagtagtaccaccagtagtccccccaccactcccagcgtcaatgacacgcttgaaatgaaaaactgctct

SEQ ID NO: 80093 - DNA, 80 bp, synthetic construct
  source 1..80: mol_type = other DNA
tgaaaatagtgaaaagaataataaggataatgatagtagtactagtagtaataataagtatatactaataaattgtaata

SEQ ID NO: 80094 - DNA, 80 bp, synthetic construct
  source 1..80: mol_type = other DNA
tgtaatcagtctatgggaccaaagcttaaagccatgtgtaaagttaacccctatctgcgttaccttagagtgtagtgaca

SEQ ID NO: 80095 - DNA, 80 bp, synthetic construct
  source 1..80: mol_type = other DNA
atatcacggttcacaatagcagctccaataataataccaccacgcggccttccaccacgcctcccagcgtcaatgacacg

SEQ ID NO: 80096 - DNA, 80 bp, synthetic construct
  source 1..80: mol_type = other DNA
cttgagatgaaaaactgctctttcaatataaccacagaaataagagataggaaacggaaagtatattcacttttctatag

SEQ ID NO: 80097 - DNA, 80 bp, synthetic construct
  source 1..80: mol_type = other DNA
aattgatttagtagaaattaatgaaaatagtgaaagtaatagtgataatagtaatgataataggactagtaataataata

SEQ ID NO: 80098 - DNA, 80 bp, synthetic construct
  source 1..80: mol_type = other DNA
taaccatcagatctgaaaatatcacagacaatgcaaaaaacataatagtacagcttgccgagcctgtaaatattacttgt

SEQ ID NO: 80099 - DNA, 80 bp, synthetic construct
  source 1..80: mol_type = other DNA
ccacaagaggtaactttggtcaatgtaacagaaaagtttaacatgtggaaaaatagtatggtagagcagatgcaggaaga

SEQ ID NO: 80100 - DNA, 80 bp, synthetic construct
  source 1..80: mol_type = other DNA
tacaggcctagcaacaatacaagaaaaagtatacatataggaccaggacaagcattctatgcaacaggtgacataatagg

SEQ ID NO: 80101 - DNA, 80 bp, synthetic construct
  source 1..80: mol_type = other DNA
ggacataagaaaagcatattgccaggtcaatgaaacaaaatggaacaaaactttaagccaagtagcaagaaaattagggg

SEQ ID NO: 80102 - DNA, 80 bp, synthetic construct
  source 1..80: mol_type = other DNA
agtattggaaaaactcaacaataacattcaatagctcctcaggaggggatgtagaaattacaacacatagttttaattgt

SEQ ID NO: 80103 - DNA, 80 bp, synthetic construct
  source 1..80: mol_type = other DNA
gatataagaaaaacatactgtgtggtcaataaaacagaatgggacaaagctttaaaacaggtagtacaaaaattaagaga

SEQ ID NO: 80104 - DNA, 80 bp, synthetic construct
  source 1..80: mol_type = other DNA
acaggtgacataataggggatataagaaaaacatactgtgtggtcaataaaacagaatgggacaaagctttaaaacaggt

SEQ ID NO: 80105 - DNA, 80 bp, synthetic construct
  source 1..80: mol_type = other DNA
tttaaaacaggtagtacaaaaattaagagaacaatacgggaacaaaacaataaacttcactagctcctcaggaggggatt

SEQ ID NO: 80106 - DNA, 80 bp, synthetic construct
  source 1..80: mol_type = other DNA
taaacagcaccaggcctaacagcactgctgaagggggacaagaactaaaaaaccgctcttacaatataaccacagaacta

SEQ ID NO: 80107 - DNA, 80 bp, synthetic construct
  source 1..80: mol_type = other DNA
ctatagactcataaattgtaatacctcagccattacacagagttgtccaaaggtaacctttgacccaattcccatacatt

SEQ ID NO: 80108 - DNA, 80 bp, synthetic construct
  source 1..80: mol_type = other DNA
ccctctctgtgttattttgaattgctctgatttaaacagcaccagtgctaacagcaccaacagcactggtgctgaaaggg

SEQ ID NO: 80109 - DNA, 80 bp, synthetic construct
  source 1..80: mol_type = other DNA
tataatcagtctatgggaccaaagcttaaagccatgtgtaaagctaacccctctctgtgttattttgaattgctctgatt

SEQ ID NO: 80110 - DNA, 80 bp, synthetic construct
  source 1..80: mol_type = other DNA
taaacagcaccagtgctaacagcaccaacagcactggtgctgaaaggggggttgagggggttgaagggagtcaagaacta

SEQ ID NO: 80111 - DNA, 80 bp, synthetic construct
  source 1..80: mol_type = other DNA
agtacaaataaaggatagtaataataatgagagctatagactcataaattgtaatacctcagccattacacaggcttgtc

SEQ ID NO: 80112 - DNA, 80 bp, synthetic construct
  source 1..80: mol_type = other DNA
caaaggtaacctttgagccaattcccatacattattgtgctccagctggttttgcaattctagagtgtaaagagaaaggg

SEQ ID NO: 80113 - DNA, 80 bp, synthetic construct
  source 1..80: mol_type = other DNA
gctgttaaatggcagtctagcagaaggaaatgtaagcatcagatctgaaaatttcacaaacaatgcaaaaacaataatag

SEQ ID NO: 80114 - DNA, 80 bp, synthetic construct
  source 1..80: mol_type = other DNA
tacagcttgttgagcctgtaaatattacttgtatcagacctaataataatacaagaagaagtgtacgtataggaccagga

SEQ ID NO: 80115 - DNA, 80 bp, synthetic construct
  source 1..80: mol_type = other DNA
atggaaggaacaaaacaataaacttcactagcccctcaggaggggatttagaaattacaacccatagttttaattgtgga

SEQ ID NO: 80116 - DNA, 80 bp, synthetic construct
  source 1..80: mol_type = other DNA
ccacgagaaataaatttggtcaatgtgacagaaaagtttaacatgtggaaaaatcctatggtagagcaaatgcatacaga

SEQ ID NO: 80117 - DNA, 80 bp, synthetic construct
  source 1..80: mol_type = other DNA
caaaccttctatgcaacaggtgacataataggggatataagaaaagcatattgtgtggtcaatgaaacagaatggtataa

SEQ ID NO: 80118 - DNA, 80 bp, synthetic construct
  source 1..80: mol_type = other DNA
agctttaaaacaggtagtacaaaaattaagagaacaatatggaaggaacaaaacaataaacttcactagcccctcaggag

SEQ ID NO: 80119 - DNA, 80 bp, synthetic construct
  source 1..80: mol_type = other DNA
acaacagcactggtactggagggggggttgaagggagacaagaactaaaaaactgctcttacaatataaccacagaacta

SEQ ID NO: 80120 - DNA, 80 bp, synthetic construct
  source 1..80: mol_type = other DNA
gtgctccagctggttttgcaattctagagtgtaaagaaaaggggttcaatggatcagggctatgcaagaatgtcagcaca

SEQ ID NO: 80121 - DNA, 80 bp, synthetic construct
  source 1..80: mol_type = other DNA
catcagatctgagaattttacaaacaatgcaaaaacaataatagtacagattgttgagcctgtaaatattacttgtatca

SEQ ID NO: 80122 - DNA, 80 bp, synthetic construct
  source 1..80: mol_type = other DNA
tgaagggagacaagaactaaaaaactgctcttacaatataaccacagaactaagggataagaaacagaaagtatatgcac

SEQ ID NO: 80123 - DNA, 80 bp, synthetic construct
  source 1..80: mol_type = other DNA
ctaacagcactaatgctgaaggagggggggttgaagggagacaagaactaaaaaactgctcttacaatataaccacagaa

SEQ ID NO: 80124 - DNA, 80 bp, synthetic construct
  source 1..80: mol_type = other DNA
ctaagggataagaaacagaaagtatatgcacttttttataggcttgatatagtacaaataaaggatagtaatagcaatga

SEQ ID NO: 80125 - DNA, 80 bp, synthetic construct
  source 1..80: mol_type = other DNA
attattgtgctccagctggttttgcaattctagagtgtaaagagaaagggttcaatggatcagggctatgcaagaatgtc

SEQ ID NO: 80126 - DNA, 80 bp, synthetic construct
  source 1..80: mol_type = other DNA
tgtaagcatcagatctgaaaatttcacaaacaatgcaaaaacaataatagtacagcttgttgagcctgtaaatattactt

SEQ ID NO: 80127 - DNA, 80 bp, synthetic construct
  source 1..80: mol_type = other DNA
gtatcagacctaataataatacaagaagaagtgtacgtataggaccaggacaaaccttctatgcaacaggtgacataata

SEQ ID NO: 80128 - DNA, 80 bp, synthetic construct
  source 1..80: mol_type = other DNA
ggggatataagaaaagcatattgtgtggtcaatgaaacagaatggtataaagctttaaaacaggtagtacaaaaattaag

SEQ ID NO: 80129 - DNA, 80 bp, synthetic construct
  source 1..80: mol_type = other DNA
ccaaagcttaaagccatgtgtaaagctaacccctctctgtgttattttgaattgctctgatttaaacagcaccagtgctg

SEQ ID NO: 80130 - DNA, 80 bp, synthetic construct
  source 1..80: mol_type = other DNA
ctaacagcactggtactgaaaggggggttgaagggagagaagaactaaaaaatgaagggagagaagaactaaaaaactgc

SEQ ID NO: 80131 - DNA, 80 bp, synthetic construct
  source 1..80: mol_type = other DNA
tctttcaatataaccacagaactaagagataagaaacagaaagtatattcacttttttataggcttgatatagtacaaat

SEQ ID NO: 80132 - DNA, 80 bp, synthetic construct
  source 1..80: mol_type = other DNA
aaaggatagtaatagcaatgagagctatagactcataaattgtaatacctcagccattacacagagttgtccaaaggtaa

SEQ ID NO: 80133 - DNA, 80 bp, synthetic construct
  source 1..80: mol_type = other DNA
cctttgacccaattcccatacattattgtgctccagctggttttgcaattctagagtgtaaagaaaaagggttcaatgga

SEQ ID NO: 80134 - DNA, 80 bp, synthetic construct
  source 1..80: mol_type = other DNA
tcagggctatgcaagaatgtcagcacagtacaatgcacacatggaatcaaaccagtagtatcaactcaactgctgttaaa

SEQ ID NO: 80135 - DNA, 80 bp, synthetic construct
  source 1..80: mol_type = other DNA
tggcagtctagcagaaagaaatgtaagcatcagatctgagaattttacaaacaatgcaaaaacaataatagtacagcttg

SEQ ID NO: 80136 - DNA, 80 bp, synthetic construct
  source 1..80: mol_type = other DNA
ttgagcctgtaaatattacttgtatcagacctaataataatacaagaagaagtgtacgtataggaccaggacaaaccttc

SEQ ID NO: 80137 - DNA, 80 bp, synthetic construct
  source 1..80: mol_type = other DNA
gtcaatgtgacagaaaagtttaacatgtggaaaaatcctatggtagagcaaatgcatacagatataattagtctatggga

SEQ ID NO: 80138 - DNA, 80 bp, synthetic construct
  source 1..80: mol_type = other DNA
tatgcaacaggtgacataataggggatataagaaaagcatattgtgtggtcaatgaaacagaatggtataaagctttaaa

SEQ ID NO: 80139 - DNA, 80 bp, synthetic construct
  source 1..80: mol_type = other DNA
acaggtagtacaaagattaagagaacaatatggaaggaacaaaacaataaacttcactagcccctcaggaggggatttag

SEQ ID NO: 80140 - DNA, 80 bp, synthetic construct
  source 1..80: mol_type = other DNA
gcactaatgctgaagggggggttgaagggagacaagaactaaaaaactgctctttcaatataaccacagaactaagagat

SEQ ID NO: 80141 - DNA, 80 bp, synthetic construct
  source 1..80: mol_type = other DNA
aagaaacagaaagtatattcacttttttataggcttgatatagtacaaataaaggatagtaataacagtgagagctatag

SEQ ID NO: 80142 - DNA, 80 bp, synthetic construct
  source 1..80: mol_type = other DNA
ctaataataatacaagaagaagtgtacgtataggaccaggacaaaccttctatgcaacaggtgacataataggggatata

SEQ ID NO: 80143 - DNA, 80 bp, synthetic construct
  source 1..80: mol_type = other DNA
gtgacagaaaagtttaacatgtggaaaaatcctatggtagagcagatgcatacagatataatcagtctatgggaccaaag

SEQ ID NO: 80144 - DNA, 80 bp, synthetic construct
  source 1..80: mol_type = other DNA
agaaaagcatattgtgtggtcaatgaaacagaatggtataaagctttaaaacaggtagtacaaaaattaagagaacaata

SEQ ID NO: 80145 - DNA, 80 bp, synthetic construct
  source 1..80: mol_type = other DNA
attgtgctccagctggttttgcaattctagaatgtaaagaaaaagggttcaatggctcagggctatgtaaaaatgtcagc

SEQ ID NO: 80146 - DNA, 80 bp, synthetic construct
  source 1..80: mol_type = other DNA
ctaacaatactgatgctggagggggggttgaagggagtcaagaactaaaaaactgctctttcaatataaccacagaacta

SEQ ID NO: 80147 - DNA, 80 bp, synthetic construct
  source 1..80: mol_type = other DNA
agagataagaaacagaaagtacattcacttttttataggcttgatatagtacaaatgaaagatagtaatagcaatgagag

SEQ ID NO: 80148 - DNA, 80 bp, synthetic construct
  source 1..80: mol_type = other DNA
tttacaacaggtagcacaaaaattaagagaacagtacatgaacaaaacaataatcttcactaactcctcaggaggagatt

SEQ ID NO: 80149 - DNA, 80 bp, synthetic construct
  source 1..80: mol_type = other DNA
aatataaccacagaactaagggataagaaacagaaagtatactcacttttttataggcttgatatagtacaaataaagga

SEQ ID NO: 80150 - DNA, 80 bp, synthetic construct
  source 1..80: mol_type = other DNA
agccaattcccatacattattgtgctccagctggttttgcaattctagagtgtaaagagaaagggttcaatggatcaggg

SEQ ID NO: 80151 - DNA, 80 bp, synthetic construct
  source 1..80: mol_type = other DNA
gagaacaatacgggaacaaaacaataatcttcactaactcctcaggaggggatttagaaattacaacacatagttttaat

SEQ ID NO: 80152 - DNA, 80 bp, synthetic construct
  source 1..80: mol_type = other DNA
acagcaccagtgctgctaacaacactgatgctggagggggggttgaagggggacaagaactaaaaaactgctcttacaat

SEQ ID NO: 80153 - DNA, 80 bp, synthetic construct
  source 1..80: mol_type = other DNA
taaacagcaccagtgctgctaacagcactggtactggaagggggtttgaagggagagaagaactaaaaaactgctctttc

SEQ ID NO: 80154 - DNA, 80 bp, synthetic construct
  source 1..80: mol_type = other DNA
tagtaataacaatgagagctatagactcataaattgtaatacctcagccattacacaggcttgtccaaaggtaacctttg

SEQ ID NO: 80155 - DNA, 80 bp, synthetic construct
  source 1..80: mol_type = other DNA
tctagcagaaggaaaggtaagcatcagatctgaaaatttcacaaacaatgcaaaaacaataatagtacagcttgttgagc

SEQ ID NO: 80156 - DNA, 80 bp, synthetic construct
  source 1..80: mol_type = other DNA
ctgtaaatattacttgtgtcagacctaataataatacaagaagaagtgtacgtataggaccaggacaagccttctatgca

SEQ ID NO: 80157 - DNA, 80 bp, synthetic construct
  source 1..80: mol_type = other DNA
acaggtgacatagtaggggatataagacaagcatattgtgaggtcaatgaaacacaatggaataaaactttacaacaggt

SEQ ID NO: 80158 - DNA, 80 bp, synthetic construct
  source 1..80: mol_type = other DNA
agcacaaaaattaagagaacaatacgggaacaaaacaataatcttcactaactcctcaggaggagatttagaaattacaa

SEQ ID NO: 80159 - DNA, 80 bp, synthetic construct
  source 1..80: mol_type = other DNA
aaaaactgctctttcaatataaccacagaactaagggataagaaacagaaagtatattcacttttttataggcttgatat

SEQ ID NO: 80160 - DNA, 80 bp, synthetic construct
  source 1..80: mol_type = other DNA
taaaaaacaccagtgctgctaacagcactaatgctgaagggggggttgaagggagacaagaactaaaaaactgctcttac

SEQ ID NO: 80161 - DNA, 80 bp, synthetic construct
  source 1..80: mol_type = other DNA
taaacagcaccaggcataacaacaccggtgctgaagaactacaaaactgctctttcagtgtgaccacagaactgagagat

SEQ ID NO: 80162 - DNA, 80 bp, synthetic construct
  source 1..80: mol_type = other DNA
aagaaacagaaagtatattcacttttttataagcttgatatagtaaaaataaatgatactaatagtactacaaatgggat

SEQ ID NO: 80163 - DNA, 80 bp, synthetic construct
  source 1..80: mol_type = other DNA
gatataagacaagcatattgtgaggtcaatgaaacacaatggaataaaactttacaacaggtagcacaaaaattaagaga

SEQ ID NO: 80164 - DNA, 80 bp, synthetic construct
  source 1..80: mol_type = other DNA
tctgtgttattttgaagtgctctgacttaaacagcaccagtgctaacagcaccaggtctaacagcactgatgctggaggg

SEQ ID NO: 80165 - DNA, 80 bp, synthetic construct
  source 1..80: mol_type = other DNA
taaacagcaccagtgctaacagcaccaggtctaacagcactgatgctggagggggggttgaagggggacaagaactaaaa

SEQ ID NO: 80166 - DNA, 80 bp, synthetic construct
  source 1..80: mol_type = other DNA
aaaaataaatgatactaatagtactacaaatgggatatatagattaataaattgtaatacctcagccattacacaggcct

SEQ ID NO: 80167 - DNA, 80 bp, synthetic construct
  source 1..80: mol_type = other DNA
aatacgggaacaaaacaataatcttcactaactcctcaggaggagatttagaaattacaacccatagttttaattgtgga

SEQ ID NO: 80168 - DNA, 80 bp, synthetic construct
  source 1..80: mol_type = other DNA
ggacaagccttctatgcaacaggtgacatagtaggggatataagacaagcatattgtgaggtcaatgaaacacaatggaa

SEQ ID NO: 80169 - DNA, 80 bp, synthetic construct
  source 1..80: mol_type = other DNA
taaaactttacaacaggtagcacaaaaattaagagaacaatacgggaacaaaacaataatcttcactaactcctcaggag

SEQ ID NO: 80170 - DNA, 80 bp, synthetic construct
  source 1..80: mol_type = other DNA
cagatctgaaaatttcacaaacagtgcaaaaacaatgatagtacagcttgctgagcctgtaaatattacttgtgtcagac

SEQ ID NO: 80171 - DNA, 80 bp, synthetic construct
  source 1..80: mol_type = other DNA
gaattgctctgatttaaacagcaccagtgctaacagcaccaacagcactggtgctgaaaggggggttgagggggctgaag

SEQ ID NO: 80172 - DNA, 80 bp, synthetic construct
  source 1..80: mol_type = other DNA
tgtaaagctaacccctctctgtgttattttgaattgctctgatttaaacagcaccagtgctaacagcaccaacagcactg

SEQ ID NO: 80173 - DNA, 80 bp, synthetic construct
  source 1..80: mol_type = other DNA
gtgctgaaaggggggttgagggggctgaagggagtcaagaactaaaaaactgctcttacaatataaccacagaactaagg

SEQ ID NO: 80174 - DNA, 80 bp, synthetic construct
  source 1..80: mol_type = other DNA
atgctattgaagagagacaagaactaaaaaactgcccttacaatataaccacagaactaagggataagaaacagaaagta

SEQ ID NO: 80175 - DNA, 80 bp, synthetic construct
  source 1..80: mol_type = other DNA
aacagcaccaacagcactggtgctgaaaggggggttgagggggttgaagggagtcaagaactaaaaaactgctctttcaa

SEQ ID NO: 80176 - DNA, 80 bp, synthetic construct
  source 1..80: mol_type = other DNA
ctctgacttaaacagcaccaggtccaacagcactggtgctggagggggggttgaagggaaagaagaactaaaaaactgct

SEQ ID NO: 80177 - DNA, 80 bp, synthetic construct
  source 1..80: mol_type = other DNA
tttaaattgctctgacttaaacagcaccaggtccaacagcactggtgctggagggggggttgaagggaaagaagaactaa

SEQ ID NO: 80178 - DNA, 80 bp, synthetic construct
  source 1..80: mol_type = other DNA
catacagatataatcagtttatgggaccaaagcttaaagccatgtgtaaagctaacccctctttgtgttattttaaattg

SEQ ID NO: 80179 - DNA, 80 bp, synthetic construct
  source 1..80: mol_type = other DNA
tgttattttgaattgctctgacttaaacagcaccaggcctaacagcactgctgaagggggacaagaactaaaaaactgct

SEQ ID NO: 80180 - DNA, 80 bp, synthetic construct
  source 1..80: mol_type = other DNA
atggtagagcaaatgcatacagatataattagtctatgggaccaaagcttaaagccatgtgtaaagctaacccctctctg

SEQ ID NO: 80181 - DNA, 80 bp, synthetic construct
  source 1..80: mol_type = other DNA
gaattgctctgacttaaacagcaccagtgctgctaacaaaactgatgctggagggggggttgaagggggacaagaactaa

SEQ ID NO: 80182 - DNA, 80 bp, synthetic construct
  source 1..80: mol_type = other DNA
tgtaaagctaacccctctctgtgttattttgaattgctctgacttaaacagcaccagtgctgctaacaaaactgatgctg

SEQ ID NO: 80183 - DNA, 80 bp, synthetic construct
  source 1..80: mol_type = other DNA
gagggggggttgaagggggacaagaactaaaaaactgctctttcaatataaccacagaactaagagataagaaacagaaa

SEQ ID NO: 80184 - DNA, 80 bp, synthetic construct
  source 1..80: mol_type = other DNA
atatattcacttttttataggcttgatatagtacaaataaaggatagtaataacaatgagagctatagactcataaattg

SEQ ID NO: 80185 - DNA, 80 bp, synthetic construct
  source 1..80: mol_type = other DNA
tttaaacagcaccagtgcaaacagcaccaagcctaacaacactggtgctgaaaggggggttgaagggagacaagagcttg

SEQ ID NO: 80186 - DNA, 80 bp, synthetic construct
  source 1..80: mol_type = other DNA
aaagctaacccctctctgtgttattttgaattgctctgatttaaacagcaccagtgcaaacagcaccaagcctaacaaca

SEQ ID NO: 80187 - DNA, 80 bp, synthetic construct
  source 1..80: mol_type = other DNA
ctggtgctgaaaggggggttgaagggagacaagagcttgaagggagacaagaactaaaaaactgctctttcaatataacc

SEQ ID NO: 80188 - DNA, 80 bp, synthetic construct
  source 1..80: mol_type = other DNA
acagaactaagagataagaaacaaaaagtatattcacttttttataggcttgatatagtacaaataaaggatagtaatag

SEQ ID NO: 80189 - DNA, 80 bp, synthetic construct
  source 1..80: mol_type = other DNA
caatgagagctatagactcataaattgtaatacctcagccattacacaggcttgtccaaaggtaacctttgagccaattc

SEQ ID NO: 80190 - DNA, 80 bp, synthetic construct
  source 1..80: mol_type = other DNA
aggaaatgtaagcatcagatctgaaaatttcacaaacaatgcaaaaacaatgatagtacagcttgctgagcctgtaaata

SEQ ID NO: 80191 - DNA, 80 bp, synthetic construct
  source 1..80: mol_type = other DNA
gtcaatgaaacacaatggaataaaactttacaacaggtagcacaaaaattaagagaacaatacgggaacaaaacaataat

SEQ ID NO: 80192 - DNA, 80 bp, synthetic construct
  source 1..80: mol_type = other DNA
ttacttgtatcagacctaataataatacaagaaagagtgtacgtataggacctggacaagccttctatgcaacaggtgac

SEQ ID NO: 80193 - DNA, 80 bp, synthetic construct
  source 1..80: mol_type = other DNA
aacatgtggaaaaatcctatggtagagcaggtgcatacagatataatcagtctatggggccaaagcttaaagccatgtgt

SEQ ID NO: 80194 - DNA, 80 bp, synthetic construct
  source 1..80: mol_type = other DNA
atagtaggggatataagacaagcatattgtgaggtcaatgaaacacaatggaataaaactttacaacaggtagcacaaaa

SEQ ID NO: 80195 - DNA, 80 bp, synthetic construct
  source 1..80: mol_type = other DNA
tgtgaggtcaatgaaacacaatggaacaaaactttacaacaggtagcacaaaaattaagagaacaatatgggaacaaaac

SEQ ID NO: 80196 - DNA, 80 bp, synthetic construct
  source 1..80: mol_type = other DNA
atggtgctaaagggagggttgaagggggacaagaactaaaaaactgctctttcaatataaccacagaactaagagataag

SEQ ID NO: 80197 - DNA, 80 bp, synthetic construct
  source 1..80: mol_type = other DNA
caagcatattgtgaggtcaatgagacacaatggaataaaactttacaacaggtagcacaaaaattaagagaacaatacgg

SEQ ID NO: 80198 - DNA, 80 bp, synthetic construct
  source 1..80: mol_type = other DNA
tgtaaagctagcccctctctgtgttattttgagttgctctgatttaaacagcaccagtgctaacagcaccaggtctaaca

SEQ ID NO: 80199 - DNA, 80 bp, synthetic construct
  source 1..80: mol_type = other DNA
tttgaattgctctgacttaaacagcaccagtgctgctaacagcactggtactgaagggggggttgaagggagagaagaac

SEQ ID NO: 80200 - DNA, 80 bp, synthetic construct
  source 1..80: mol_type = other DNA
gccatgtgtaaagctaacccctctctgtgttattttgaattgctctgacttaaacagcaccagtgctgctaacagcactg

SEQ ID NO: 80201 - DNA, 80 bp, synthetic construct
  source 1..80: mol_type = other DNA
gtactgaagggggggttgaagggagagaagaactaaaagggagagaagaactaaaaaactgctctttcaatataaccaca

SEQ ID NO: 80202 - DNA, 80 bp, synthetic construct
  source 1..80: mol_type = other DNA
gaaaagtttaacatgtggaaaaatcctatggtagagcaaatgcatacagatataattagtctatgggaccaaagcttaaa

SEQ ID NO: 80203 - DNA, 80 bp, synthetic construct
  source 1..80: mol_type = other DNA
gctaacccctctctgtgttattttgaattgctctgacttaaacagcaccaggcataacaacaccggtgctgaagaactac

SEQ ID NO: 80204 - DNA, 80 bp, synthetic construct
  source 1..80: mol_type = other DNA
acaacaccggtgctgaagaactacaaaactgctctttcagtgtgaccacagaactgagagataagaaacagaaagtatat

SEQ ID NO: 80205 - DNA, 80 bp, synthetic construct
  source 1..80: mol_type = other DNA
tcacttttttataagcttgatatagtaaaaataaataatactaatagtactacaaatgggatatatagattaataaattg

SEQ ID NO: 80206 - DNA, 80 bp, synthetic construct
  source 1..80: mol_type = other DNA
ttgcaattctagagtgtaaagaaaaaggattcaatggatcagggctatgcaaaaatgtcagcacagtacaatgcacacat

SEQ ID NO: 80207 - DNA, 80 bp, synthetic construct
  source 1..80: mol_type = other DNA
ttttacaaacaatgcaaaaacaataatagtacagcttgttgagcctgtaaatattacttgtatcagacctaataataata

SEQ ID NO: 80208 - DNA, 80 bp, synthetic construct
  source 1..80: mol_type = other DNA
caagaagaagtgtacgtataggaccaggacaaaccttctatgcaacaggtgacataataggggatataagaaaagcatat

SEQ ID NO: 80209 - DNA, 80 bp, synthetic construct
  source 1..80: mol_type = other DNA
tgtgtggtcaatgaaacaaaatggtataaagctttaaaacaggtagtacaaaaattaagagaacaatacgggaacaaaac

SEQ ID NO: 80210 - DNA, 80 bp, synthetic construct
  source 1..80: mol_type = other DNA
tataatcagtctatgggatcaaagcctaaagccatgtgtaagtttaacccctctctgtgttaccttaaggtgtagtaatg

SEQ ID NO: 80211 - DNA, 80 bp, synthetic construct
  source 1..80: mol_type = other DNA
tcaatagtagcaaagtgaatgaaagcaaagtggatggaaagaactttacagaaataaaaagttgttcctataatatgacc

SEQ ID NO: 80212 - DNA, 80 bp, synthetic construct
  source 1..80: mol_type = other DNA
acagaaataagagataagagaaggacagtatattcacttttttatagacttgatatagtaccaattaatgaagctagtga

SEQ ID NO: 80213 - DNA, 80 bp, synthetic construct
  source 1..80: mol_type = other DNA
tattagtgagtatagattaataaattgtaatacttcagtcattaaacaggcttgtccaaaggtaacctttgagccaattc

SEQ ID NO: 80214 - DNA, 80 bp, synthetic construct
  source 1..80: mol_type = other DNA
aatgtcagctcagttcagtgtacacatggaatcaaaccagtagtatcaactcaactactgttaaatggcagtctagcaga

SEQ ID NO: 80215 - DNA, 80 bp, synthetic construct
  source 1..80: mol_type = other DNA
aggaaacaaggtaaagattagatctgaaaacttcacaaacaatgctaaaaccataatagtacagcttgtcaaccctgtaa

SEQ ID NO: 80216 - DNA, 80 bp, synthetic construct
  source 1..80: mol_type = other DNA
atattacttgtatcagacctaacaacaatacaagaaaaagtgtacgtataggaccaggacaagtattctatgcaacggac

SEQ ID NO: 80217 - DNA, 80 bp, synthetic construct
  source 1..80: mol_type = other DNA
atggaaatggcacaacaataatctttaataaaagttcaggaggggatttagaaattacaacacatagttttaattgtgga

SEQ ID NO: 80218 - DNA, 80 bp, synthetic construct
  source 1..80: mol_type = other DNA
ccacaagaaataaatttggtcaatgtaacagaagagtttaacatatggaaaaataaaatggtagagcagatgcatgcaga

SEQ ID NO: 80219 - DNA, 80 bp, synthetic construct
  source 1..80: mol_type = other DNA
ataataggggatataagacaagcatattgtgagatcaataggacagcatggaatgaagctttacaaaaggtagttggagc

SEQ ID NO: 80220 - DNA, 80 bp, synthetic construct
  source 1..80: mol_type = other DNA
attaagaggaaactttgaaaatggaaatggcacaacaataatctttaataaaagttcaggaggggatttagaaattacaa

SEQ ID NO: 80221 - DNA, 80 bp, synthetic construct
  source 1..80: mol_type = other DNA
tcaatagtagcgaagtggagggaaagaactttacagaaataaaaaattgttcctataatatgaccacagaaataagagat

SEQ ID NO: 80222 - DNA, 80 bp, synthetic construct
  source 1..80: mol_type = other DNA
aagagaaggacagtatattcacttttttatagacttgatatagtaccaattaatgaagctaatgatgttagtgagtatag

SEQ ID NO: 80223 - DNA, 80 bp, synthetic construct
  source 1..80: mol_type = other DNA
attaataaattgtaatacttcagtcattaaacaggcttgtccaaaggtaacctttgagccaattcccatacattactgtg

SEQ ID NO: 80224 - DNA, 80 bp, synthetic construct
  source 1..80: mol_type = other DNA
ccccggctggttttgcgattctaaagtgtaatgataaggattttaatggaacagggacatgcagcaatgtcagctcagtt

SEQ ID NO: 80225 - DNA, 80 bp, synthetic construct
  source 1..80: mol_type = other DNA
cagtgtacacatggaatcagaccagtagtatcaactcaactactgttaaatggcagtctagcagaaggaaacaaggtaaa

SEQ ID NO: 80226 - DNA, 80 bp, synthetic construct
  source 1..80: mol_type = other DNA
gattagatctgaaaacttcacaaacaatgctaaaaccataatagtacagcttgtcaaccctgtaaatattacttgtatca

SEQ ID NO: 80227 - DNA, 80 bp, synthetic construct
  source 1..80: mol_type = other DNA
gacctaacaacaatacaagaaaaagtgtacgtataggaccaggacaagtattctatgcaacaaacatagtaggggatata

SEQ ID NO: 80228 - DNA, 80 bp, synthetic construct
  source 1..80: mol_type = other DNA
agacaagcatattgtgagatcaataggacagcatggaatgaagctttacaaaaggtagttggagcattaagaggaaactt

SEQ ID NO: 80229 - DNA, 80 bp, synthetic construct
  source 1..80: mol_type = other DNA
ataagagataagagaaggaaagtatattcacttttttatagacttgatatagtaccaattaatgaagatagtgatattag

SEQ ID NO: 80230 - DNA, 80 bp, synthetic construct
  source 1..80: mol_type = other DNA
attactgtgccccggctggttttgcgattctaaagtgtaatgataaggattttaatggaacagggacatgcagcaatgtc

SEQ ID NO: 80231 - DNA, 80 bp, synthetic construct
  source 1..80: mol_type = other DNA
cttgtatcagacctaacaacaatacaagaaaaagtgtacgtataggaccaggacaagtattctatgcaacaaacataata

SEQ ID NO: 80232 - DNA, 80 bp, synthetic construct
  source 1..80: mol_type = other DNA
gaaatagatttggttaatgtaacagaagagtttaacatatggagaaataaaatagtagagcagatgcatgcagatataat

SEQ ID NO: 80233 - DNA, 80 bp, synthetic construct
  source 1..80: mol_type = other DNA
actttgaaaatggaaatggcacaacaataatctttaataaaagttcaggaggggatttagaaattacaacacatagtttt

SEQ ID NO: 80234 - DNA, 80 bp, synthetic construct
  source 1..80: mol_type = other DNA
ttggagcattaagaggaaactttgaaaatggaaatggcacaacaataatctttaataaaggttcaggaggggatttagaa

SEQ ID NO: 80235 - DNA, 80 bp, synthetic construct
  source 1..80: mol_type = other DNA
ttacaaaaggtagttggagcattaagaggaaactttgaaaatggaaatggcacaacaataatctttaataaaagttcagg

SEQ ID NO: 80236 - DNA, 80 bp, synthetic construct
  source 1..80: mol_type = other DNA
ccatacattattgtgccccggctggttttgcgattctaaagtgtaatgataaggattttaatggaacagggccatgcaac

SEQ ID NO: 80237 - DNA, 80 bp, synthetic construct
  source 1..80: mol_type = other DNA
gaaagaactttacagaaataaaaaattgttcctataatatgaccgcagaaataagagataagagaaggacagtatattca

SEQ ID NO: 80238 - DNA, 80 bp, synthetic construct
  source 1..80: mol_type = other DNA
cttttttatagacttgatataataccaattaatgaaactagtaatattagtgagtatagattaataaattgtaatacttc

SEQ ID NO: 80239 - DNA, 80 bp, synthetic construct
  source 1..80: mol_type = other DNA
taaagtgtaatgataaggattttaatggaacagggaaatgcagcaatgtcagttcagttcaatgtacacatggaatcaaa

SEQ ID NO: 80240 - DNA, 80 bp, synthetic construct
  source 1..80: mol_type = other DNA
ccagtagtatcaactcaactactgttaaatggcagtctagcagaaggaaacaaggtaaagattagatctgaaaacttcac

SEQ ID NO: 80241 - DNA, 80 bp, synthetic construct
  source 1..80: mol_type = other DNA
aaacaatgctaaaaccataatagtacagcttgtcaaccctgtaaatattacttgtatcagacctaacaacaatacaagaa

SEQ ID NO: 80242 - DNA, 80 bp, synthetic construct
  source 1..80: mol_type = other DNA
aaagtgtacgtataggaccaggacaagtattctatgcaacagacataataggggatataagacaagcatattgtgagatc

SEQ ID NO: 80243 - DNA, 80 bp, synthetic construct
  source 1..80: mol_type = other DNA
aataggacagcatggaatgaagctttacaaaaggtagttggagcattaagaggaaactttgaaaatggaaatggcacaac

SEQ ID NO: 80244 - DNA, 80 bp, synthetic construct
  source 1..80: mol_type = other DNA
aagcctaaagccatgtgtaagtttaacccctctctgtgttaccttaaggtgtagtaatgtcaatagtagcaaagtgaatg

SEQ ID NO: 80245 - DNA, 80 bp, synthetic construct
  source 1..80: mol_type = other DNA
aaagcaaagtggatggaaagaactttacagaaataaaaaattgttcctataatatgaccacagaaataagagataagaga

SEQ ID NO: 80246 - DNA, 80 bp, synthetic construct
  source 1..80: mol_type = other DNA
aggacagtatattcacttttttatagacttgatatagtaccaattaatgaagctagtgatattagtgagtatagattaat

SEQ ID NO: 80247 - DNA, 80 bp, synthetic construct
  source 1..80: mol_type = other DNA
acaacaatacaagaaaaagtgtacgtataggaccaggacaagtattctatgcaacagacataataggggatataagacaa

SEQ ID NO: 80248 - DNA, 80 bp, synthetic construct
  source 1..80: mol_type = other DNA
aatgtaacagaagagtttaacatatggaaaaataaaatggtagagcagatgcatgcagatataatcagtctatgggatca

SEQ ID NO: 80249 - DNA, 80 bp, synthetic construct
  source 1..80: mol_type = other DNA
tcaaagtaaggcagtataatgatgtaatcatagaaattgagggaaaaaaggctataggtacagtattagtaggacccaca

SEQ ID NO: 80250 - DNA, 80 bp, synthetic construct
  source 1..80: mol_type = other DNA
cctcaaatcactctttggcaacgaccaatagttgctgtaagaatagcggggcagctaaaggaagctctattagatacagg

SEQ ID NO: 80251 - DNA, 80 bp, synthetic construct
  source 1..80: mol_type = other DNA
agaaccctttagagcaagaaatccagacatagttatatgccagtacgtggatgacttgtatgtagggtctgacttagaga

SEQ ID NO: 80252 - DNA, 80 bp, synthetic construct
  source 1..80: mol_type = other DNA
tagggcaacatagaacaaaaatagaggaactaagggaacatctcttgaaatggggatttaccacaccagacaaaaagcat

SEQ ID NO: 80253 - DNA, 80 bp, synthetic construct
  source 1..80: mol_type = other DNA
tcaaagtaagacagtatgataacatactcatagaaatctgtggacataaggctacaggtacagtattagtaggacccacc

SEQ ID NO: 80254 - DNA, 80 bp, synthetic construct
  source 1..80: mol_type = other DNA
tcaaagtaagagagtatgaccaaataatggtagaaatctgtggacataaagctatgggtacagtattagtaggacctaca

SEQ ID NO: 80255 - DNA, 80 bp, synthetic construct
  source 1..80: mol_type = other DNA
gccagtaaaattaaagccaggaatggatgggccaaaggttgaacaatggccattgacagaggaaaaaataaaagcattaa

SEQ ID NO: 80256 - DNA, 80 bp, synthetic construct
  source 1..80: mol_type = other DNA
cctcaaatcactctttggcaacgacccgttgtcacagtaagaataggaggacagctaagagaggctctattggatacagg

SEQ ID NO: 80257 - DNA, 80 bp, synthetic construct
  source 1..80: mol_type = other DNA
agaaccctttagggcaagaaacccagacatagtaatttatcaatatatggatgacttatatgttggatctgatctagaaa

SEQ ID NO: 80258 - DNA, 80 bp, synthetic construct
  source 1..80: mol_type = other DNA
aaatactgctacagctacagccatcccttcagacagggtcagaagaacttagatcattatataatacagtagcaaccctc

SEQ ID NO: 80259 - DNA, 80 bp, synthetic construct
  source 1..80: mol_type = other DNA
tattgtgtgcatcaaaggatagatgtaaaggacaccaaggaagcactagagaaggtagaggaagagcaaaacaaaagtaa

SEQ ID NO: 80260 - DNA, 80 bp, synthetic construct
  source 1..80: mol_type = other DNA
ggtacatcaagccctgtcacctagaactctaaatgcatgggtaaaagtaatagaagagagggcttcagcccagacgtcga

SEQ ID NO: 80261 - DNA, 80 bp, synthetic construct
  source 1..80: mol_type = other DNA
gaaaaaggcacagcaagcagcacagcaaacaacagctgccacaggaaacagcagccaagtcagccaaaattaccctatag

SEQ ID NO: 80262 - DNA, 80 bp, synthetic construct
  source 1..80: mol_type = other DNA
tgcagaatcttcaggggcaaatggtacatcaagccctgtcacctagaactctaaatgcatgggtaaaagtaatagaagag

SEQ ID NO: 80263 - DNA, 80 bp, synthetic construct
  source 1..80: mol_type = other DNA
gcataatgtatggggcagcagggaactagaaagatttgcagttaatcctggcctgttagaaacatcagacggctgtagac

SEQ ID NO: 80264 - DNA, 80 bp, synthetic construct
  source 1..80: mol_type = other DNA
acaaatatttccacagctacaaccaccccttcagacagcttccgaagcacgttcatcattatataattcagtagcaaccc

SEQ ID NO: 80265 - DNA, 80 bp, synthetic construct
  source 1..80: mol_type = other DNA
tatattgtgtacatcaaaggatagagctaaaagacgacaaggaagccctcgagaggatagaggaagagcaaaacaaaagt

SEQ ID NO: 80266 - DNA, 80 bp, synthetic construct
  source 1..80: mol_type = other DNA
aaaacttttagtatgggccagcaggggggcaaccgattcgcagaaaatcttgcccttttagaaacatcagaaggcagtaa

SEQ ID NO: 80267 - DNA, 80 bp, synthetic construct
  source 1..80: mol_type = other DNA
ttcggttaaggccaggaggaaagaaaaaatataaattaaaacatccaagtatggcaagcagggagctagaacggttcgcg

SEQ ID NO: 80268 - DNA, 80 bp, synthetic construct
  source 1..80: mol_type = other DNA
gttaatcctggcctgttagaaacatcagaaggctgtagacaaatattggaacttctacagccatcccttcagacaggatc

SEQ ID NO: 80269 - DNA, 80 bp, synthetic construct
  source 1..80: mol_type = other DNA
agaagaacttagatcattatttaatgcagtagcgaccctctggtgtgtacatcaaaggatagaggtaaaagacaccaagg

SEQ ID NO: 80270 - DNA, 80 bp, synthetic construct
  source 1..80: mol_type = other DNA
tacatcaggccatatcacctagaactttaaatgcatgggtaaaagtaatagaagagaaggcttcagccctgaagttcgga

SEQ ID NO: 80271 - DNA, 80 bp, synthetic construct
  source 1..80: mol_type = other DNA
aagcactagagaaaatagaggaagagcaaaacaaaagtaagaaaaaggcacagcaagcagcggcggccacaggaaacagc

SEQ ID NO: 80272 - DNA, 80 bp, synthetic construct
  source 1..80: mol_type = other DNA
agccaggtcagccaaaattaccctatagtgcaaaatcttcaggggcaaatggtacatcaggccatatcacctagaacttt

SEQ ID NO: 80273 - DNA, 80 bp, synthetic construct
  source 1..80: mol_type = other DNA
ttaatcctggcctgttagaaacagcagaaggctgtagacaattactgggacagctacagtcatcccttaagacaggatca

SEQ ID NO: 80274 - DNA, 80 bp, synthetic construct
  source 1..80: mol_type = other DNA
gccaagtcagtcaaaattaccctatagtgcagaacttacaggggcaaatggtacatcaggccctatcacccagaacttta

SEQ ID NO: 80275 - DNA, 80 bp, synthetic construct
  source 1..80: mol_type = other DNA
tacaggggcaaatggtacatcaggccctatcacccagaactttaaatgcatgggtgaaagtagtagaagagaaggcttca

SEQ ID NO: 80276 - DNA, 80 bp, synthetic construct
  source 1..80: mol_type = other DNA
agacaaatactgggacagctacaaccatctcttcagacaggatcagaagaactcaaatccttatttaatgcagtagcagt

SEQ ID NO: 80277 - DNA, 80 bp, synthetic construct
  source 1..80: mol_type = other DNA
cctctattgtgtgcatagaaagatagatgtacaagacaccaaggaagctttagaaaagatagaggaagaacaaaacaaaa

SEQ ID NO: 80278 - DNA, 80 bp, synthetic construct
  source 1..80: mol_type = other DNA
gtaagaaaaaggcacagcaagacacaggaaacagcggaaacaacacccaggtcagtcaaaattaccccatagtgcagaac

SEQ ID NO: 80279 - DNA, 80 bp, synthetic construct
  source 1..80: mol_type = other DNA
taaaacatatagtatgggcaagcagggaactagaacgattcgcagttaaccctggccttttagagacatcagaaggctgt

SEQ ID NO: 80280 - DNA, 80 bp, synthetic construct
  source 1..80: mol_type = other DNA
tacaacagctacatccagctcttcagacaggaacagaggaacttagatcgttatataacaccatagcagttctttattgt

SEQ ID NO: 80281 - DNA, 80 bp, synthetic construct
  source 1..80: mol_type = other DNA
agatataaaggtacaagacaccaaggaagccttagataagatagaagaagaacaaaagaaaagtcagcaaaaagcacaac

SEQ ID NO: 80282 - DNA, 80 bp, synthetic construct
  source 1..80: mol_type = other DNA
aggcagaagggactggcggaaaggtcagtcaaaattaccctatagtacagaatctacaagggcaaatggtacaccaatgt

SEQ ID NO: 80283 - DNA, 80 bp, synthetic construct
  source 1..80: mol_type = other DNA
acagcagcaacaaccacctattcagacagcgacagcggaagaacgatcatcataatacacagcagcagctccactctgtg

SEQ ID NO: 80284 - DNA, 80 bp, synthetic construct
  source 1..80: mol_type = other DNA
ttcaaggacagatggatacaccaagtccatatcacctagaactttgaatgcatgggtaaaagtagtagaggagaagggtt

SEQ ID NO: 80285 - DNA, 80 bp, synthetic construct
  source 1..80: mol_type = other DNA
acgcaacaagcagcagcacatcaagcaggagcggctggcggtcaggtcagtcaaaattatccttcataagtacagaatct

SEQ ID NO: 80286 - DNA, 80 bp, synthetic construct
  source 1..80: mol_type = other DNA
tagtaggagcaccacgaggaattaagattttttgctcaccctcccctccttttaacagcatccgacggctgtcaactaat

SEQ ID NO: 80287 - DNA, 80 bp, synthetic construct
  source 1..80: mol_type = other DNA
aaattatcctatagtacagaatcttcaaggacaaatggtacaccagtccttatcacctagaactttgaatgcatgggtaa

SEQ ID NO: 80288 - DNA, 80 bp, synthetic construct
  source 1..80: mol_type = other DNA
taaaacacattgtatgggccagcagggagctggaaagatttgcactcaaccctagccttttagaaacagcagaaggatgt

SEQ ID NO: 80289 - DNA, 80 bp, synthetic construct
  source 1..80: mol_type = other DNA
aacaaatactacaacagttacaaccagctcttcagacagggacagaggagattagatcattatataacacagtagcaact

SEQ ID NO: 80290 - DNA, 80 bp, synthetic construct
  source 1..80: mol_type = other DNA
ctctactgtgtacataaaaacataaaggtacaagacaccaaggaagccttagataagatagaggaagaacaaagcaaaag

SEQ ID NO: 80291 - DNA, 80 bp, synthetic construct
  source 1..80: mol_type = other DNA
tcagcaaaaaacacaacaagcaaaaacacaacaagcaggagcggctggcggaacggtcagtcaaaattatcctatagtac

SEQ ID NO: 80292 - DNA, 80 bp, synthetic construct
  source 1..80: mol_type = other DNA
agaatcttcaaggacaaatggtacaccagtctctatcacctagaactttgaatgcatgggtaaaagtagtagtaggagaa

SEQ ID NO: 80293 - DNA, 80 bp, synthetic construct
  source 1..80: mol_type = other DNA
taaaacacatagtatgggcagcagggagctggaaagatttgcagttaaccctggcctcttagagacagcagaaggctgta

SEQ ID NO: 80294 - DNA, 80 bp, synthetic construct
  source 1..80: mol_type = other DNA
tgaacaaataataagacaaccacaaccatcccttcagacaggatcagaagagcttaaatcattatataatttagtagtag

SEQ ID NO: 80295 - DNA, 80 bp, synthetic construct
  source 1..80: mol_type = other DNA
ccatagtacagaatcctcagggacaaatggtacatcagtctatatcaccgagaactttaaatgcatgggtaaaagtagtt

SEQ ID NO: 80296 - DNA, 80 bp, synthetic construct
  source 1..80: mol_type = other DNA
ttctcaattttgtacatcaaaagatagatgtaagagacaccaatgaagcagaagataagctaaaggaagaacaacccaaa

SEQ ID NO: 80297 - DNA, 80 bp, synthetic construct
  source 1..80: mol_type = other DNA
actcagccaaaagcacagcaagcagcgggtggcgcaggggtcagtcaaaattaccccatagtacagaatcctcagggaca

SEQ ID NO: 80298 - DNA, 80 bp, synthetic construct
  source 1..80: mol_type = other DNA
tatgggcaagcagggagggcaagcagggagctagaacgattggcagttaatcctggcctgttagaaacaccagaaggctg

SEQ ID NO: 80299 - DNA, 80 bp, synthetic construct
  source 1..80: mol_type = other DNA
aaaacagctacacccagctcttcagacaggaacagaggaacttagatcattatttaacacagtagcaactctttattgtg

SEQ ID NO: 80300 - DNA, 80 bp, synthetic construct
  source 1..80: mol_type = other DNA
aacaggtcagtcaaaattatcctatagtacagaatctccaagggcaaatggtacaccagtctatatcacctagaactttk

SEQ ID NO: 80301 - DNA, 80 bp, synthetic construct
  source 1..80: mol_type = other DNA
cacaacaggcagaagcggctggcaagaaggtcagtcagaattacccgatagtacagaatctccaagggcaaatggtacac

SEQ ID NO: 80302 - DNA, 80 bp, synthetic construct
  source 1..80: mol_type = other DNA
tacaacagctgcaaccagctcttcagacaggaacagaggaatttagatcattatataacacactagcaactctatattgt

SEQ ID NO: 80303 - DNA, 80 bp, synthetic construct
  source 1..80: mol_type = other DNA
ggggccagcattatcagaaggttctccctttcagagggttcagcgtttcagagggttcgaggatacagagagccagcatt

SEQ ID NO: 80304 - DNA, 80 bp, synthetic construct
  source 1..80: mol_type = other DNA
aacacaacaggcagaagcggctggcggaaaggtcagtcaaaattgacggatagtacagtatctgaaggggccagcattat

SEQ ID NO: 80305 - DNA, 80 bp, synthetic construct
  source 1..80: mol_type = other DNA
tacataaagacatcaaggtacaagacaccaaggaagccttagacaaaatagaggaagaacaaaacaaaagtcagcaaaaa

SEQ ID NO: 80306 - DNA, 80 bp, synthetic construct
  source 1..80: mol_type = other DNA
acacaaaaggcagaagcggctggcgggaaggtcagtcaaaattaccctatagtgcagaatcttcaagggcaaatggtaca

SEQ ID NO: 80307 - DNA, 80 bp, synthetic construct
  source 1..80: mol_type = other DNA
gtatgggcaagcagggagctggaaagatttgcagttaaccctggccttttagagacagcagaaggctgtaaacaaataat

SEQ ID NO: 80308 - DNA, 80 bp, synthetic construct
  source 1..80: mol_type = other DNA
cttttagagacagcagacggctgtaaacaaatcatacaagcgctacaaccagctcttcagacaggatcagaggaacttag

SEQ ID NO: 80309 - DNA, 80 bp, synthetic construct
  source 1..80: mol_type = other DNA
atcgttatttaacacagtagcaactctctattgtgtacatcgaaacataaaggtacaagacaccaaggaagccttagaca

SEQ ID NO: 80310 - DNA, 80 bp, synthetic construct
  source 1..80: mol_type = other DNA
atctccaagggcaaatggtacaccagactatatcacctagaactttgaatgcatgggtaaaagtaatagaggagaagggt

SEQ ID NO: 80311 - DNA, 80 bp, synthetic construct
  source 1..80: mol_type = other DNA
agatagaggaagaacaaaataaaagtcagcaaaaaacacaacaggcagaagcggctggcggaaaggtcagtcaaaattat

SEQ ID NO: 80312 - DNA, 80 bp, synthetic construct
  source 1..80: mol_type = other DNA
cctgtagtacagaatctccaagggcaaatggtacaccagactatatcacctagaactttgaatgcatgggtaaaagtaat

SEQ ID NO: 80313 - DNA, 80 bp, synthetic construct
  source 1..80: mol_type = other DNA
cagggggaaagaaacactatatgctaaaacatttagtatgggcaagcagggagctggaaagatttgcaattaaccctggc

SEQ ID NO: 80314 - DNA, 80 bp, synthetic construct
  source 1..80: mol_type = other DNA
aaatactacaacagctacaaccagctcttaagacaggaacagaggaacttagatcgttatttaacacagtagcaaccctc

SEQ ID NO: 80315 - DNA, 80 bp, synthetic construct
  source 1..80: mol_type = other DNA
tggtgtgtacatcaaggcataaaggtacaagacaccaaggaagccttagacaaaatagaggaagaacaaaacaaaagaca

SEQ ID NO: 80316 - DNA, 80 bp, synthetic construct
  source 1..80: mol_type = other DNA
gcaaaaaacacaacaagcagaaacaagacagcagaaaacacaacaggcagaagcggctggcggaaaggtcagtcaaaatt

SEQ ID NO: 80317 - DNA, 80 bp, synthetic construct
  source 1..80: mol_type = other DNA
atcctatagtacagaatcaccaggggcaaatggtacaccagtcccgatcacctagaactttgaatgcatgggtaaaagta

SEQ ID NO: 80318 - DNA, 80 bp, synthetic construct
  source 1..80: mol_type = other DNA
acacctagtatgggcaagcagggagctggaaagatttgcacttaaccctggccttttagagacatcagaaggctgtaacc

SEQ ID NO: 80319 - DNA, 80 bp, synthetic construct
  source 1..80: mol_type = other DNA
aaacaaataatacaacagctacaaccagctcttcagacaggaacggaggaactgagatcattacataacacagtagcaac

SEQ ID NO: 80320 - DNA, 80 bp, synthetic construct
  source 1..80: mol_type = other DNA
gtcagcaaaaaacacaacagcaggcagaagcggctggcggaaaggtcagtcaaaattatcctatagtacagaatcttcaa

SEQ ID NO: 80321 - DNA, 80 bp, synthetic construct
  source 1..80: mol_type = other DNA
taaaacacttagtatgggcaagcagggagctggaaagatttgcacttaaccctagccttttagagacagccgccggctgt

SEQ ID NO: 80322 - DNA, 80 bp, synthetic construct
  source 1..80: mol_type = other DNA
ccttagacaagatagaagaagaaaaaacaaatgtaagtaaaaaacacaacaggcagaagcggctggcaaacaggtcagtc

SEQ ID NO: 80323 - DNA, 80 bp, synthetic construct
  source 1..80: mol_type = other DNA
agaagaagaaaaaacaaatgtaagtaaaaaacacaacaggcagaagcggctggcaaacaggtcagtcaaaattatcctat

SEQ ID NO: 80324 - DNA, 80 bp, synthetic construct
  source 1..80: mol_type = other DNA
ggaacttagatcattatttaacacagtagcaactctttattgtgtacatcaaaacataaaggttaaagacaccaaggaag

SEQ ID NO: 80325 - DNA, 80 bp, synthetic construct
  source 1..80: mol_type = other DNA
aacagttacaaccagctattcagacagggacagaggaacttagatcattatataacacagtagcaactctctactgtgta

SEQ ID NO: 80326 - DNA, 80 bp, synthetic construct
  source 1..80: mol_type = other DNA
cataacaacataaaggtacaagacaccaaggaagccttagataagatagaggaagaacaaaacaaaagtcagcaaagaac

SEQ ID NO: 80327 - DNA, 80 bp, synthetic construct
  source 1..80: mol_type = other DNA
acaacaagcaaaaacacaacaagcaggagcggctggcggaacggtcagtcaaaattatcctatagtacagaatcttcaag

SEQ ID NO: 80328 - DNA, 80 bp, synthetic construct
  source 1..80: mol_type = other DNA
gacaaatggtacaccagtccttatcacctagaactttgaatgcatgggtaaaagtagtagaggagaagggtttcaaccca

SEQ ID NO: 80329 - DNA, 80 bp, synthetic construct
  source 1..80: mol_type = other DNA
atgggcaagcagggagctagaaagatttgcacttaaccctagccttttagagacaacagaaggttgtaaacaaatactac

SEQ ID NO: 80330 - DNA, 80 bp, synthetic construct
  source 1..80: mol_type = other DNA
aggtgcaacacgccaacaaggcagccttagacaaaatagaggaagaacaaaacaatagtcagcaaacaccacaaaaggca

SEQ ID NO: 80331 - DNA, 80 bp, synthetic construct
  source 1..80: mol_type = other DNA
accagctcttccgacagcaacagaggaacttaaatcattatataacacagtagcaacttattatggtgtacataaagaca

SEQ ID NO: 80332 - DNA, 80 bp, synthetic construct
  source 1..80: mol_type = other DNA
taataatacaacagctacaaccagcttttccgacagcaacagaagaaattaaatcattatacaccgcagcagcaacttat

SEQ ID NO: 80333 - DNA, 80 bp, synthetic construct
  source 1..80: mol_type = other DNA
aatggtacaccagtctctatcacctagaaccttgaatgcatgggtaaaagtaatagaggagaagggttcaacccagagat

SEQ ID NO: 80334 - DNA, 80 bp, synthetic construct
  source 1..80: mol_type = other DNA
cctactagtatcgggcagcagggagctggaaagatttgcacttcccccccgccttttagcgacagcagaaggttgtaaac

SEQ ID NO: 80335 - DNA, 80 bp, synthetic construct
  source 1..80: mol_type = other DNA
acaaaaggcaggagagactggcggaaaggtcagtcaaaattaccctatagtacagaatctccaagggcaaatggtacacc

SEQ ID NO: 80336 - DNA, 80 bp, synthetic construct
  source 1..80: mol_type = other DNA
agctcttcagacaggaacagaggaacttagatcattatataacacagtagcaactctctattgtgtacatcgaaacataa

SEQ ID NO: 80337 - DNA, 80 bp, synthetic construct
  source 1..80: mol_type = other DNA
aggtacaggacaccaaggaagccttagacaagatagaggaagaacaaaagaaaagtcagcaaaaaacacaacaggcacaa

SEQ ID NO: 80338 - DNA, 80 bp, synthetic construct
  source 1..80: mol_type = other DNA
gcggctggcggaatggtcagtcaaaattatcctatagtacaaaatcttcaagggcaaatggtacaccaggctctatcacc

SEQ ID NO: 80339 - DNA, 80 bp, synthetic construct
  source 1..80: mol_type = other DNA
aaccagctcttaagacaggaacagaggaatttaaatcgttatataacacagtagcaactctctattgtgtacatcgagac

SEQ ID NO: 80340 - DNA, 80 bp, synthetic construct
  source 1..80: mol_type = other DNA
ataaaggtacaagacgccaaggaagccttagataagatagaggaagaacaaaacaaaagtcagcaaaaaacacaacagca

SEQ ID NO: 80341 - DNA, 80 bp, synthetic construct
  source 1..80: mol_type = other DNA
gaaaacacaggcagaagcggctggcggaaaggtcagtcaaaattatcctatagtacagaatctccaagggcaaatggtac

SEQ ID NO: 80342 - DNA, 80 bp, synthetic construct
  source 1..80: mol_type = other DNA
cagggagctggaaagatttgcacttaaccctggcctcttagagacagcagaaggctgtaaacaaatattacaacagctac

SEQ ID NO: 80343 - DNA, 80 bp, synthetic construct
  source 1..80: mol_type = other DNA
tacaaccagctcttcagacaggaacagaggaacttagatcgctatataacaccttagcaactctctattgtgtacatcaa

SEQ ID NO: 80344 - DNA, 80 bp, synthetic construct
  source 1..80: mol_type = other DNA
gacataaaggtacaagacaccaaggaagccttagacaaaatagaggaagaacaaaacaaaagtcagcaaaacacaagaca

SEQ ID NO: 80345 - DNA, 80 bp, synthetic construct
  source 1..80: mol_type = other DNA
ggcagaagcggctggcgggaaggtcagtcaaaattatcctatagtacagaatctccaaggacaaatggtacaccagtctt

SEQ ID NO: 80346 - DNA, 80 bp, synthetic construct
  source 1..80: mol_type = other DNA
cagcagggagctggaaaaatttgcacttaaccctggccttttagaaacaggagaaggctgtaaaaaactaatgcaacagc

SEQ ID NO: 80347 - DNA, 80 bp, synthetic construct
  source 1..80: mol_type = other DNA
caactaataatgagacagttgcaaccagctctccagacaggatcagaggagcttaaatcattatttaatacagtagcaac

SEQ ID NO: 80348 - DNA, 80 bp, synthetic construct
  source 1..80: mol_type = other DNA
tgcagaatgcacaagggcaaatgatacaccaggccgtatcacctagaactttggatgcatgggtaaaaggaggagacgac

SEQ ID NO: 80349 - DNA, 80 bp, synthetic construct
  source 1..80: mol_type = other DNA
cctctattgtgtacatcaaaggatagaggtaagagataccaaagaagctttagatgaagtggagaaaatacaaaagaaaa

SEQ ID NO: 80350 - DNA, 80 bp, synthetic construct
  source 1..80: mol_type = other DNA
gtcagcaaaaaacacagcaggcagcaaaggacgaaggaaacagcaaacaagtcagtcaaaattatcctatagtgcagaat

SEQ ID NO: 80351 - DNA, 80 bp, synthetic construct
  source 1..80: mol_type = other DNA
agaaggagctagtatgggcaagcagggaactggaaagatttgcacttaaccctggccttttagaaacagcagaagggtgt

SEQ ID NO: 80352 - DNA, 80 bp, synthetic construct
  source 1..80: mol_type = other DNA
gatgcagttgcagccagctctccagacaggaacagaggagattaaatcattatttaatacaatagcaaccctctattgtg

SEQ ID NO: 80353 - DNA, 80 bp, synthetic construct
  source 1..80: mol_type = other DNA
tacatcggaggataggggtaaaagacaccaaggaagctctagaggaagtggaaaaaatacagaagaaaagtcagcaaaaa

SEQ ID NO: 80354 - DNA, 80 bp, synthetic construct
  source 1..80: mol_type = other DNA
aatggtacatcaggccatatcacctagaaccttgaatgcatgggtaaaagtagttgtaagagattaccgcgtcctcagca

SEQ ID NO: 80355 - DNA, 80 bp, synthetic construct
  source 1..80: mol_type = other DNA
ctgtgagcaaataatgcaacagctgcaaccagctctccaaacaggaacagaggaaattaaatcattatataatacagtag

SEQ ID NO: 80356 - DNA, 80 bp, synthetic construct
  source 1..80: mol_type = other DNA
caaccctctattgtgtacatcaaaggatagaggtaaaagacaccaaagaggctctagatgaagtggaaaaaatacaaaaa

SEQ ID NO: 80357 - DNA, 80 bp, synthetic construct
  source 1..80: mol_type = other DNA
aagaaaagtcagcaagaaacacagaagacagcaatgggaaaaagcagccaagttagccaaaattatcccatagtgcagaa

SEQ ID NO: 80358 - DNA, 80 bp, synthetic construct
  source 1..80: mol_type = other DNA
tgcacaagggcaaatgactcaccagcccatatcacctagaactttaaagcatgttaaaagtaatagacgacaaaccgcag

SEQ ID NO: 80359 - DNA, 80 bp, synthetic construct
  source 1..80: mol_type = other DNA
tatcagagggagccagtatgggcaagcagggagctggagagatttgcacttaaccctgacctcttagaaacatcagaagg

SEQ ID NO: 80360 - DNA, 80 bp, synthetic construct
  source 1..80: mol_type = other DNA
acaagtaagtagacagttgcaaccagctctccagacaggatcagaggcacgttcatcagtacttaaatcagtagcaaccc

SEQ ID NO: 80361 - DNA, 80 bp, synthetic construct
  source 1..80: mol_type = other DNA
cccctatagtgcaaaatattcaggggcaaatggtacaacaggccatatcacctagaacgttgaatgcatgggaaaaggtg

SEQ ID NO: 80362 - DNA, 80 bp, synthetic construct
  source 1..80: mol_type = other DNA
tattagcagtacatcaaaggatagatgtaagagaagacaaagaagccttcgatgaagtggaggaaatacaaaagaaaagt

SEQ ID NO: 80363 - DNA, 80 bp, synthetic construct
  source 1..80: mol_type = other DNA
cagcaaaaaacacagcaaacagcacaggcaaaggaagcagcagaggggtcagtcaaaattacccctatagtgcaaaatat

SEQ ID NO: 80364 - DNA, 80 bp, synthetic construct
  source 1..80: mol_type = other DNA
agaagatctagtatgggcaatagtaaagcaagcagggatgtagttcaccctggcctttttgaaacagcagaaggatgtca

SEQ ID NO: 80365 - DNA, 80 bp, synthetic construct
  source 1..80: mol_type = other DNA
atagaacagttactgtcaactctcaagacaggatcagaagaaattaaatcattatttaatacattagcagtcctctggtg

SEQ ID NO: 80366 - DNA, 80 bp, synthetic construct
  source 1..80: mol_type = other DNA
aaacacagcaaaaggcaggcgcacaggaagcagcagcaaagtcagccaaaaggggcctatagtgcaaaaaggggaagcgc

SEQ ID NO: 80367 - DNA, 80 bp, synthetic construct
  source 1..80: mol_type = other DNA
caaataatagaacagttacagccaactctcaagacaggatcagaagaagttaaatccttatttaatacagtagcagtcct

SEQ ID NO: 80368 - DNA, 80 bp, synthetic construct
  source 1..80: mol_type = other DNA
ctattgcgtacaccaaaggatagaggtaaaagacaccaaggaagctttagataaaatagaggaagcacaaaagaagagtc

SEQ ID NO: 80369 - DNA, 80 bp, synthetic construct
  source 1..80: mol_type = other DNA
tacatcaatctttatcacctagaactttgaatgcatgggtaaaagtagtagaagaaaaaggtgtagccagagcgttaagc

SEQ ID NO: 80370 - DNA, 80 bp, synthetic construct
  source 1..80: mol_type = other DNA
agcaaaaaacacagcaggcagcagctgacacaggaagcagcagcaaagtcagccaaaattaccctatagtgcaaaatgca

SEQ ID NO: 80371 - DNA, 80 bp, synthetic construct
  source 1..80: mol_type = other DNA
caagggcaaatggtacatcaatctttatcacctagaactttgaatgcatgggtaaaagtagtagaagaaaaaggtgtagc

SEQ ID NO: 80372 - DNA, 80 bp, synthetic construct
  source 1..80: mol_type = other DNA
aggagcatgtatgggcaagcagggagttggaaagattcgcacttaaccctggccttttagaaacagcagaaggatgtcaa

SEQ ID NO: 80373 - DNA, 80 bp, synthetic construct
  source 1..80: mol_type = other DNA
ttggtgtgtacatcaaaggatagagataagagacaccaaggaagccttagataaaatagagaacatgcaagataagagca

SEQ ID NO: 80374 - DNA, 80 bp, synthetic construct
  source 1..80: mol_type = other DNA
caactaatgcaacagttacaatcagctctcgggacaggaacagaagaacttaaatcattatataatacaatagcaaccct

SEQ ID NO: 80375 - DNA, 80 bp, synthetic construct
  source 1..80: mol_type = other DNA
aacagttacagccagctctcaaggcaggatcagaagaacttagatccttatataatacactagcaaccctttggtgtgta

SEQ ID NO: 80376 - DNA, 80 bp, synthetic construct
  source 1..80: mol_type = other DNA
catcaaaggataggaataaatgacaccaaggaagccttagataaaatagaggaagtacaaaataagagcaagcaaaaggc

SEQ ID NO: 80377 - DNA, 80 bp, synthetic construct
  source 1..80: mol_type = other DNA
acaacaggcagaagctgccacaggaagcagcagccaaaattacccagtagtgcaaaatgcacaagggcaaatggtacatc

SEQ ID NO: 80378 - DNA, 80 bp, synthetic construct
  source 1..80: mol_type = other DNA
caacaactattaaaacagttacaatcaactctcaagacaggatcagaggaacttaaatcattatttaatacaatagcaac

SEQ ID NO: 80379 - DNA, 80 bp, synthetic construct
  source 1..80: mol_type = other DNA
cgcaaatggtacaacaggccctctctcctaggacgggacatccatgttcaaagggggcccgagtatctccgaagacctca

SEQ ID NO: 80380 - DNA, 80 bp, synthetic construct
  source 1..80: mol_type = other DNA
cctctggtgcgtacatcaaagaataaatataaaagacgccaagaaagccttaaataaaatagaggaagcacaaaataaga

SEQ ID NO: 80381 - DNA, 80 bp, synthetic construct
  source 1..80: mol_type = other DNA
gcaagaaaaaaacggggcaggcagcagctgccacaggaagcagcagtcaaaatttccctctagtgcaaaaaaagggagcg

SEQ ID NO: 80382 - DNA, 80 bp, synthetic construct
  source 1..80: mol_type = other DNA
agggggggcttgtatgggcaagcagggagttggaaaaatttgcacttaaccctggtcttctagaaacagcaaaaaaatgt

SEQ ID NO: 80383 - DNA, 80 bp, synthetic construct
  source 1..80: mol_type = other DNA
cctctggtgcgtacatcaaaggatagacataagagacaccaaggaagccttagataaaatagaggaaatgcaaaataaga

SEQ ID NO: 80384 - DNA, 80 bp, synthetic construct
  source 1..80: mol_type = other DNA
gcaaacaaaagccacagcaagcagcagttgccgcagcaagtagcagccaaaattaccctatagtacaaaatgcacaaggg

SEQ ID NO: 80385 - DNA, 80 bp, synthetic construct
  source 1..80: mol_type = other DNA
taaaacatttagtatggggccacagggagttggaaagatttgcgcttaaccctggccttttagaaacagcagaaggatgt

SEQ ID NO: 80386 - DNA, 80 bp, synthetic construct
  source 1..80: mol_type = other DNA
gcaaaaagcaccccaggaagcagctagcacaagcggcagccaaaattaccctatagtgcaaaatgcacaagggcaaatgg

SEQ ID NO: 80387 - DNA, 80 bp, synthetic construct
  source 1..80: mol_type = other DNA
tgcaaaatgcacaagggcaaatggcacatcagaatatgtcacctaggactttaaatgcatgggtgaaggtaatagaagaa

SEQ ID NO: 80388 - DNA, 80 bp, synthetic construct
  source 1..80: mol_type = other DNA
tattgcgtacatcaaaggttagatataaaagacgccaaggaaaacaaaggcaaaatagaagaaatacaaaataagggcaa

SEQ ID NO: 80389 - DNA, 80 bp, synthetic construct
  source 1..80: mol_type = other DNA
ctgtatgggcaagcagggagctggaaagattcgcacttaaccctggtcttttagaaacagcagagggatgtcaacaacta

SEQ ID NO: 80390 - DNA, 80 bp, synthetic construct
  source 1..80: mol_type = other DNA
cgagggacacaatcggcagcagctgccacaggaagcagcagccaaaattaccctatagtgcaaaatgcacaagggcaaat

SEQ ID NO: 80391 - DNA, 80 bp, synthetic construct
  source 1..80: mol_type = other DNA
caggatcagcagaactgctatcaccattttatacagcagcaacccttttgtgtgtacaccaaagaataaaaaaaataagc

SEQ ID NO: 80392 - DNA, 80 bp, synthetic construct
  source 1..80: mol_type = other DNA
ggatagacataaaagacaccaaggaagccttagataaagtagaggaaatgcaaaataagagcaaacgaggaacacagcag

SEQ ID NO: 80393 - DNA, 80 bp, synthetic construct
  source 1..80: mol_type = other DNA
gcagcagctgccacaggaagcagcagccaaaattaccctatagtgcaaaatgcacaagggcaaatggtacatcagtgcat

SEQ ID NO: 80394 - DNA, 80 bp, synthetic construct
  source 1..80: mol_type = other DNA
attggaacaattacaaccagctctcaggacaggatcagaagaactcaaatcgttatataacctagtagcaaccctctatt

SEQ ID NO: 80395 - DNA, 80 bp, synthetic construct
  source 1..80: mol_type = other DNA
gtgtacatcaaaggatagagataagagacaccaaggaagctgtagataaagtagaggaaatgcaagaaaagagcaagcaa

SEQ ID NO: 80396 - DNA, 80 bp, synthetic construct
  source 1..80: mol_type = other DNA
aagacacaacaggcagcagctaacacaggaaacaacagcagtgttagccaaaattacccaatagtgcaaaatgcacaagg

SEQ ID NO: 80397 - DNA, 80 bp, synthetic construct
  source 1..80: mol_type = other DNA
agggagatggagagatttgcacttaaccctgacctgctagaaacagcagatggttgtcagcaaataatgatgcagttgca

SEQ ID NO: 80398 - DNA, 80 bp, synthetic construct
  source 1..80: mol_type = other DNA
tgggttgttaatgatctgtagtgctgaagaaaaattgtgggtcacagtctattatggggtacctgtatggagagaagcaa

SEQ ID NO: 80399 - DNA, 80 bp, synthetic construct
  source 1..80: mol_type = other DNA
ttgcagaagacagtggcaatgagagtgatggggatcaagaagaattgtcagcacttgtggagatggggcacgatgctcct

SEQ ID NO: 80400 - DNA, 80 bp, synthetic construct
  source 1..80: mol_type = other DNA
tgggttgttgatgatctatagtgctgcagaaccaatgtgggtcacagtctattatggggtacctgtgtggaaggaagcaa

SEQ ID NO: 80401 - DNA, 80 bp, synthetic construct
  source 1..80: mol_type = other DNA
ctaccactctcttttgtgcatcagatgctaaagcatatgatacagaggtgcataatgtttgggccacacatgcctctgta

SEQ ID NO: 80402 - DNA, 80 bp, synthetic construct
  source 1..80: mol_type = other DNA
ttgcagaagacagtggcaatgagagcgaaggggatcaggacgagttgtcaaaacttgtggaaatggggcacgatgctctt

SEQ ID NO: 80403 - DNA, 80 bp, synthetic construct
  source 1..80: mol_type = other DNA
gggatgttgctgatgacatatagtgcagaagataagttgtgggtcacagtatactatggggtgcctgtatggaaagaagc

SEQ ID NO: 80404 - DNA, 80 bp, synthetic construct
  source 1..80: mol_type = other DNA
tgcagaagatagtggcaatgagagtgatggggatagagaggaattatcagcacttatggaaatggggcatgatgctcctt

SEQ ID NO: 80405 - DNA, 80 bp, synthetic construct
  source 1..80: mol_type = other DNA
aaactactctattttgtgcttcaaatgctaaagcatatgaggaagaagtgcataatgtttgggccacacatgcctctgta

SEQ ID NO: 80406 - DNA, 80 bp, synthetic construct
  source 1..80: mol_type = other DNA
caaaaaccactctattttgtgcatcagatgctaaagcatatgaaaaagaagtgcacaatgtttgggccacacatgcctct

SEQ ID NO: 80407 - DNA, 80 bp, synthetic construct
  source 1..80: mol_type = other DNA
tttttgcagaagacagtggcaatgagagtgacggggatgttgaggaattggcaaccatggtggatatggggcatcttggg

SEQ ID NO: 80408 - DNA, 80 bp, synthetic construct
  source 1..80: mol_type = other DNA
ttggatgctaatgattgtataatgtgggggggaacgggaacttgtgggtcacagtttattatggggtacctgtgtggaaa

SEQ ID NO: 80409 - DNA, 80 bp, synthetic construct
  source 1..80: mol_type = other DNA
gaagcaacaactactctattttgtgcatcagatgctaaagcatataaggatgaagtgcataatgtttgggccacacatgc

SEQ ID NO: 80410 - DNA, 80 bp, synthetic construct
  source 1..80: mol_type = other DNA
tgcagaagacagtggcaatgagagtgatggggatgttgaggaatcatcaaccatggtggatatggggcatccttaggctt

SEQ ID NO: 80411 - DNA, 80 bp, synthetic construct
  source 1..80: mol_type = other DNA
tactctattttgtgcatcagatgctaaagcatataaggatgaagtgcataatgtttgggccacacatgcctgtgtaccaa

SEQ ID NO: 80412 - DNA, 80 bp, synthetic construct
  source 1..80: mol_type = other DNA
aggcttttggatgctaatgatttataatgtgggagggaacttgtgggtcacagtctattatggggtacctgtgtggaaag

SEQ ID NO: 80413 - DNA, 80 bp, synthetic construct
  source 1..80: mol_type = other DNA
tataatgtggggggaaacttgtgggtcacagtctattatggggtacctgtgtggaaagaagcaaaaaccactctattttg

SEQ ID NO: 80414 - DNA, 80 bp, synthetic construct
  source 1..80: mol_type = other DNA
tttggatgctaatgatctataatgtggggggaaacttgtgggtcacagtctattatggggtacctgtgtggaaagaagca

SEQ ID NO: 80415 - DNA, 80 bp, synthetic construct
  source 1..80: mol_type = other DNA
caatgagagtgacggggatgttgaggaattatcaactatggtggatatggggcatcttaggcttttggatgctaatgatc

SEQ ID NO: 80416 - DNA, 80 bp, synthetic construct
  source 1..80: mol_type = other DNA
tgggtcacaatttattatggggtacctgtgtggaaagaagcaaaaactactctattttgtgcatcagatgctaaagcata

SEQ ID NO: 80417 - DNA, 80 bp, synthetic construct
  source 1..80: mol_type = other DNA
attttggagtttaataatatgtaatgctgaaaacttgtgggtcacagtctattatggggtacctgtgtggaaagacgcaa

SEQ ID NO: 80418 - DNA, 80 bp, synthetic construct
  source 1..80: mol_type = other DNA
aaactaccctattttgtgcatcagatgctaaagcatatgatacagaaatgcataatgtctgggccacacatgcctctgta

SEQ ID NO: 80419 - DNA, 80 bp, synthetic construct
  source 1..80: mol_type = other DNA
tttttgcagaagatagtggcaatgagagtgatggggatacagaagaattatccacgcttatggagatggggtctgataat

SEQ ID NO: 80420 - DNA, 80 bp, synthetic construct
  source 1..80: mol_type = other DNA
attttggatattggtgatttgtaatgctgaaaatttgtgggtcactgtttactatggggtacctgtgtggagagatgcaa

SEQ ID NO: 80421 - DNA, 80 bp, synthetic construct
  source 1..80: mol_type = other DNA
agaccaccctattttgtgcatcagatgctaaatcatataagaaagaggcacataatatttgggccacacatgcctctgta

SEQ ID NO: 80422 - DNA, 80 bp, synthetic construct
  source 1..80: mol_type = other DNA
attttggataatgatgatttgtaatgctaacaacttgtgggtcacggtctactatggggtacctgtgtggaaagatgcag

SEQ ID NO: 80423 - DNA, 80 bp, synthetic construct
  source 1..80: mol_type = other DNA
ggtatgataatgttttggatcatgatgttttgtagtgctaaaaacttgtgggtcacggtatactatggggtacctgtgtg

SEQ ID NO: 80424 - DNA, 80 bp, synthetic construct
  source 1..80: mol_type = other DNA
ccttgggatgttaatgatctatagtggtgcagaaaatacgtgggtcacagtctattatggggtacctgtgtggaaagaag

SEQ ID NO: 80425 - DNA, 80 bp, synthetic construct
  source 1..80: mol_type = other DNA
caactactacactcttttgtgcatcagatgctaaggcatatgatacagaggcacataatgtttgggctacacatgcctct

SEQ ID NO: 80426 - DNA, 80 bp, synthetic construct
  source 1..80: mol_type = other DNA
tttttgcagaagacagtggcaatgagagtgagggggatcaggaagaattatcagcacttatggagatggggcatcatgct

SEQ ID NO: 80427 - DNA, 80 bp, synthetic construct
  source 1..80: mol_type = other DNA
gatcatgatgttttgtaatgctcaaaacttgtgggtcacggtatactatggggtacctgtgtggaaagacgcagagacca

SEQ ID NO: 80428 - DNA, 80 bp, synthetic construct
  source 1..80: mol_type = other DNA
cagaagatagtggcaatgagagtgatggggatacagatgaattatccaagcttatggagatggggtacgataatgttttg

SEQ ID NO: 80429 - DNA, 80 bp, synthetic construct
  source 1..80: mol_type = other DNA
tttgggataataataatttgtaatgctcaaaatttgtgggtcacggtatactatggggtacctgtgtggaaagatgcaaa

SEQ ID NO: 80430 - DNA, 80 bp, synthetic construct
  source 1..80: mol_type = other DNA
tttgtataataataatttgtaatgctaaaaatttgtgggtcggggtctactatagggtacctgtggaagaaacgcagaga

SEQ ID NO: 80431 - DNA, 80 bp, synthetic construct
  source 1..80: mol_type = other DNA
tttgcagaagatagtggcaatgagagtaataggaataaagaagaattatccactcttatggagagggggtttgataatcc

SEQ ID NO: 80432 - DNA, 80 bp, synthetic construct
  source 1..80: mol_type = other DNA
gttggataatgatgatttgtagtgctggaaatttgtgggtcacggtctactatggagtacctgtgtggaaagacgcagat

SEQ ID NO: 80433 - DNA, 80 bp, synthetic construct
  source 1..80: mol_type = other DNA
tggaaatttgtgggtcacggtctactatggagtacctgtgtggaaagacgcagataccaccctatttgtgcatcagatgc

SEQ ID NO: 80434 - DNA, 80 bp, synthetic construct
  source 1..80: mol_type = other DNA
ttggattatgataatttgtaatgctgaaaaattgtgggtcacggtttattatggggtacctgtgtggaaagaagcagaga

SEQ ID NO: 80435 - DNA, 80 bp, synthetic construct
  source 1..80: mol_type = other DNA
ccaccctattttgtgcatcagatgctaaagcatatgagacagaagtacataatgtttgggccacacatgcctctgtacca

SEQ ID NO: 80436 - DNA, 80 bp, synthetic construct
  source 1..80: mol_type = other DNA
tggaatgttgatgatttgtaatgctacagacaaattgtgggtcacagtctattatggggtacctgtgtggagagatgcag

SEQ ID NO: 80437 - DNA, 80 bp, synthetic construct
  source 1..80: mol_type = other DNA
agaccaccctattttgtgcatcagatagtaaagcatactccacagaaaaacataatgtctgggccacacatgcctctgta

SEQ ID NO: 80438 - DNA, 80 bp, synthetic construct
  source 1..80: mol_type = other DNA
ttgcagaagacagtggcaatgagagtgaaggggatgaagaggaattggcaaaacttgtggaaatggggcctcatgatctt

SEQ ID NO: 80439 - DNA, 80 bp, synthetic construct
  source 1..80: mol_type = other DNA
tgtgggtcacagtctattatggggtgcctgtgtggagagatgcagaaaccaccctatttgcgcatccagatagtaaagca

SEQ ID NO: 80440 - DNA, 80 bp, synthetic construct
  source 1..80: mol_type = other DNA
agcagatgatacagtaatacaggaaataagtttatcaggaaaatggaaaccaaaaatgataggaggaattggaggtttta

SEQ ID NO: 80441 - DNA, 80 bp, synthetic construct
  source 1..80: mol_type = other DNA
tcaaagtaagacagtatgatcagatacctatggaaataggtggaaaaagggccctaggtacagtattggtaggacccaca

SEQ ID NO: 80442 - DNA, 80 bp, synthetic construct
  source 1..80: mol_type = other DNA
gttagatatcagtacaatgtgcttccacagggatggaaaggatcaccagccatatttcagtcaagcatgttaaaaatctt

SEQ ID NO: 80443 - DNA, 80 bp, synthetic construct
  source 1..80: mol_type = other DNA
agatcccttcagagcaaaaaatccagatatagtgatctgtcaatatgtggatgatttatatgtagggtcagacttagaga

SEQ ID NO: 80444 - DNA, 80 bp, synthetic construct
  source 1..80: mol_type = other DNA
tcgaagtaagacggtatgaggacgtaactgtagaaatctgtggtcatcaggctataggtacagtattaataggacctaca

SEQ ID NO: 80445 - DNA, 80 bp, synthetic construct
  source 1..80: mol_type = other DNA
cctcagatcactctttggcaacgacccgttgtcacagtaaaggtagaggggcagctaaaagaagctctgttagacacagg

SEQ ID NO: 80446 - DNA, 80 bp, synthetic construct
  source 1..80: mol_type = other DNA
cagagatttgtatggatatggaaaaggaagggaaaatttcaaggattgggcctgaaaatccatacaatactcctgtattt

SEQ ID NO: 80447 - DNA, 80 bp, synthetic construct
  source 1..80: mol_type = other DNA
ggaggttcaattagggataccgcacccagcgggcttgaaaaagaaaaaatcagtaacagtactggatgtgggagacgcat

SEQ ID NO: 80448 - DNA, 80 bp, synthetic construct
  source 1..80: mol_type = other DNA
gctgtgcagaaaatagcccaagaaagcatagtaatatggggaaagattcctaaatttagattaccaatccagaaagaaac

SEQ ID NO: 80449 - DNA, 80 bp, synthetic construct
  source 1..80: mol_type = other DNA
atgggagacatggtggacagattactggcaagccacctggattcctgagtgggaatttgttaacacccctcccttagtaa

SEQ ID NO: 80450 - DNA, 80 bp, synthetic construct
  source 1..80: mol_type = other DNA
ccagcagagagcttcaggccagagccaacagccccaccagcagagagtttcaggttcgaggagacaaccccagctccgaa

SEQ ID NO: 80451 - DNA, 80 bp, synthetic construct
  source 1..80: mol_type = other DNA
acaggaaccgaaagacagggaaaccttaacttccctcagatcactctttggcagcgaccccttgtctcaataaaagtagg

SEQ ID NO: 80452 - DNA, 80 bp, synthetic construct
  source 1..80: mol_type = other DNA
gggccagataaaagaggctctcttagacacaggagcagatgatacagtattagaagaagtaaatttgccaggaaaatgga

SEQ ID NO: 80453 - DNA, 80 bp, synthetic construct
  source 1..80: mol_type = other DNA
aaccaaaaatgataggaggaattggaggttttatcaaagtaagacaatatgaacaaatacctatagaaatttgtggaaaa

SEQ ID NO: 80454 - DNA, 80 bp, synthetic construct
  source 1..80: mol_type = other DNA
aaggctataggtacagtattagtgggacccacacctgtcaacataattggaagaaatttgttgacccagcttggatgcac

SEQ ID NO: 80455 - DNA, 80 bp, synthetic construct
  source 1..80: mol_type = other DNA
actaaattttccaatcagtcccattgaaactgtaccagtaaaattaaagccagggatggatggcccaaaggttaaacaat

SEQ ID NO: 80456 - DNA, 80 bp, synthetic construct
  source 1..80: mol_type = other DNA
ggccattgacagaagagaaaataaaagcattaacagcaatttgtgaggaaatggagaaggaaggaaaaattacaaaaatt

SEQ ID NO: 80457 - DNA, 80 bp, synthetic construct
  source 1..80: mol_type = other DNA
cagggaactcaataaaagaactcaagatttttgggaagttcaattaggaataccacacccagcagggttaaaaaagaaaa

SEQ ID NO: 80458 - DNA, 80 bp, synthetic construct
  source 1..80: mol_type = other DNA
accatacctagtataaacaatgcgacaccagggattagatatcagtacaatgtgcttccacagggatggaaaggatcacc

SEQ ID NO: 80459 - DNA, 80 bp, synthetic construct
  source 1..80: mol_type = other DNA
tggatgacttgtatgtaggatctgacttagaaatagggcagcatagaacaaaaatagaggaactgagagaacatctgtta

SEQ ID NO: 80460 - DNA, 80 bp, synthetic construct
  source 1..80: mol_type = other DNA
caaatggacagtacagcctataaagttgccagaaaaggatagctggactgtcaatgatatacagaagttagtgggaaaac

SEQ ID NO: 80461 - DNA, 80 bp, synthetic construct
  source 1..80: mol_type = other DNA
ctattgagctggggatttactacaccagacaaaaagcatcagaaggaacctccattcctttggatgggatatgaactcca

SEQ ID NO: 80462 - DNA, 80 bp, synthetic construct
  source 1..80: mol_type = other DNA
gaaagctaaattgggcaagtcaaatttatccaggcattaaggtaaagcaactgtgtaaactcatcaggggaactaaagga

SEQ ID NO: 80463 - DNA, 80 bp, synthetic construct
  source 1..80: mol_type = other DNA
atcaagagccatttaaaaatctaaaaacaggaaaatatgccaaaaagaggtctgctcacactaatgatgtaagacaatta

SEQ ID NO: 80464 - DNA, 80 bp, synthetic construct
  source 1..80: mol_type = other DNA
agaaacatgggagacatggtggacggagtattggcaggctacctggattcctgaatgggagtttgttaatactcctcctc

SEQ ID NO: 80465 - DNA, 80 bp, synthetic construct
  source 1..80: mol_type = other DNA
ccagcagaaaactgggggatggaggagaaggtaaccccctactgggggatgggggaaaaggtaacccccttactgaagca

SEQ ID NO: 80466 - DNA, 80 bp, synthetic construct
  source 1..80: mol_type = other DNA
ggagcagaagaacgaggaacaccctcctccttcagtttccctcaaatcactctttggcaacgaccccttgtcacagtaaa

SEQ ID NO: 80467 - DNA, 80 bp, synthetic construct
  source 1..80: mol_type = other DNA
ttgtactttaaatttcccaattagtcctattgatactataccagtaaaattaaagccaggaatggatggaccaaaagtta

SEQ ID NO: 80468 - DNA, 80 bp, synthetic construct
  source 1..80: mol_type = other DNA
aacagtggccattgacagaagaaaaaataaaagcattaacagaaatctgtaatgacatggaaaaggaaggaaaaatctca

SEQ ID NO: 80469 - DNA, 80 bp, synthetic construct
  source 1..80: mol_type = other DNA
attttttagggaaaatttggccttccaacaaggggaggccaggaaattttcatcagagcagaccagagccgacagcccca

SEQ ID NO: 80470 - DNA, 80 bp, synthetic construct
  source 1..80: mol_type = other DNA
agaaaaaatcagtaacagtactagatgtgggagatgcatatttttcagttcctttagatgaaagttttagaaagtatact

SEQ ID NO: 80471 - DNA, 80 bp, synthetic construct
  source 1..80: mol_type = other DNA
gcattcaccatacctagtacaaacaatgagacaccaggagtcagatatcagtacaatgtgctgccacagggatggaaagg

SEQ ID NO: 80472 - DNA, 80 bp, synthetic construct
  source 1..80: mol_type = other DNA
atcaccggcaatattccagagtagcatgacaagaatcttagagccctttagaataaaaaatccagaaatagttatctatc

SEQ ID NO: 80473 - DNA, 80 bp, synthetic construct
  source 1..80: mol_type = other DNA
agatttatcctggaattaaagtaaggcaactttgtaagctccttagggggaccaaagcactaacagacatagtatcacta

SEQ ID NO: 80474 - DNA, 80 bp, synthetic construct
  source 1..80: mol_type = other DNA
aaaagacttgatagctgaagtacagaaacaggggcagggccagtggacatatcaaatttaccaagaacaattcaaaaatc

SEQ ID NO: 80475 - DNA, 80 bp, synthetic construct
  source 1..80: mol_type = other DNA
tgaaaacaggaaagtatgcaaaaatgaggactgcccacactaatgatgtaaaacagttaacagaggttgtgcagaaaata

SEQ ID NO: 80476 - DNA, 80 bp, synthetic construct
  source 1..80: mol_type = other DNA
ccaccaccaccagaggagagcttcaggtttggggaagagacaacagctccagctcagaagcaggagccgagagacaggga

SEQ ID NO: 80477 - DNA, 80 bp, synthetic construct
  source 1..80: mol_type = other DNA
gacagactattggcaagccacctggattcctgaatgggaatttgttaacacccctcccttagtaaaattatggtaccagc

SEQ ID NO: 80478 - DNA, 80 bp, synthetic construct
  source 1..80: mol_type = other DNA
actatatcccttgacttccctcaaatcactctttggcaacgacccctcgtcacaataaaaatagggggacaattaaaaga

SEQ ID NO: 80479 - DNA, 80 bp, synthetic construct
  source 1..80: mol_type = other DNA
ggggaattggaggttttatcaaagttagacagtatgaacagatacccctagaaatctgcggacacaaagctataggtaca

SEQ ID NO: 80480 - DNA, 80 bp, synthetic construct
  source 1..80: mol_type = other DNA
gtgttagtaggacctacacctgtcaatataattgggagaaatttgttgactcagattggttgcactttaaactttccaat

SEQ ID NO: 80481 - DNA, 80 bp, synthetic construct
  source 1..80: mol_type = other DNA
tggatgtgggagatgcatatttttcagttcctttatatgaagacttcaggaaatatactgcattcaccatacccagtata

SEQ ID NO: 80482 - DNA, 80 bp, synthetic construct
  source 1..80: mol_type = other DNA
taggatctgacttagagatagggcagcatagaataaaaatagaggaactgagacaacatttgttgaggtggggatttacc

SEQ ID NO: 80483 - DNA, 80 bp, synthetic construct
  source 1..80: mol_type = other DNA
gacaataatcttagagccttttagaaaacaaaatccagacatggtaatctatcaatacatggatgatttgtatgtaggat

SEQ ID NO: 80484 - DNA, 80 bp, synthetic construct
  source 1..80: mol_type = other DNA
ctgacttagaaatagggcaacatagggcaaaagtagaggaactgagacagcatctgttgaagtggggattaaccacacca

SEQ ID NO: 80485 - DNA, 80 bp, synthetic construct
  source 1..80: mol_type = other DNA
gacaaaaaacatcagaaagagcctccattcctttggatgggttatgaactccatcctgataaatggacagtacagcctat

SEQ ID NO: 80486 - DNA, 80 bp, synthetic construct
  source 1..80: mol_type = other DNA
aatgctgccagaaaaggacagctggactgtcaatgacatacagaagttaataggaaaattgaattgggcaagtcagattt

SEQ ID NO: 80487 - DNA, 80 bp, synthetic construct
  source 1..80: mol_type = other DNA
atgcagggattaaagtaaggcaattatgtaaactccttaggggaaccaaagcattaacagaagtagtaccactaacagaa

SEQ ID NO: 80488 - DNA, 80 bp, synthetic construct
  source 1..80: mol_type = other DNA
gaagcagagctagaactggcagaaaacagggagattctaaaagaatcagtacatggagtgtattatgacccatccaagga

SEQ ID NO: 80489 - DNA, 80 bp, synthetic construct
  source 1..80: mol_type = other DNA
gataatagcagaattacagaagcaggagcaaggccagtggacatatcaaatttatcaagagcaatttaaaaatctgaaaa

SEQ ID NO: 80490 - DNA, 80 bp, synthetic construct
  source 1..80: mol_type = other DNA
ccaccaatagagagcttcgggtttggggaggagacaacaactccccctcagaagcaggaaccggtagacaaggatctgta

SEQ ID NO: 80491 - DNA, 80 bp, synthetic construct
  source 1..80: mol_type = other DNA
caggaaagtatgcaaggatgaggggtgcccataccaatgatgtaaaacaattaacagaggcagtgcaaaaaatagccaca

SEQ ID NO: 80492 - DNA, 80 bp, synthetic construct
  source 1..80: mol_type = other DNA
tacccctcccttagtgaaattgtggtaccagttagaaaaggaacccatagtaggagcagaaaccttctatgtagatgggg

SEQ ID NO: 80493 - DNA, 80 bp, synthetic construct
  source 1..80: mol_type = other DNA
gtattggcaggccacctggattcctgaatgggagtttgtcaatacccctcccttagtgaaattgtggtaccagttagaaa

SEQ ID NO: 80494 - DNA, 80 bp, synthetic construct
  source 1..80: mol_type = other DNA
tcccttagcttccctcaaatcactctttggcagcgacccctcgtctcaataaagatagggggacaaataaaggaagctct

SEQ ID NO: 80495 - DNA, 80 bp, synthetic construct
  source 1..80: mol_type = other DNA
attagatacaggagcagatgatacagtattagaagaaatgagtttgccaggaaggtggaaaccaaaaatgatagggggaa

SEQ ID NO: 80496 - DNA, 80 bp, synthetic construct
  source 1..80: mol_type = other DNA
ttggaggttttattaaagtaagacaatatgatcagatacccatagaaatctgtggacacaaagctataggtacagtatta

SEQ ID NO: 80497 - DNA, 80 bp, synthetic construct
  source 1..80: mol_type = other DNA
gtaggacctacacctgtcaacataattggaagaaatttgttgactcagcttggctgcactttaaattttcccattagtcc

SEQ ID NO: 80498 - DNA, 80 bp, synthetic construct
  source 1..80: mol_type = other DNA
tattaaaactgtaccagtaaaattaaagcctggcatggatggcccaaaagttaaacaatggccattgacagaggaaaaaa

SEQ ID NO: 80499 - DNA, 80 bp, synthetic construct
  source 1..80: mol_type = other DNA
actccagtatttgccataaagaaaaaagacagtactaaatggagaaaactagtagatttcagagaacttaacaaaagaac

SEQ ID NO: 80500 - DNA, 80 bp, synthetic construct
  source 1..80: mol_type = other DNA
attttttagggaaaatctggccttcccacaagggggggaggccggggaattttcttcagagcagaccagagccaacagcc

SEQ ID NO: 80501 - DNA, 80 bp, synthetic construct
  source 1..80: mol_type = other DNA
tcaagacttttgggaggttcagttaggaataccacatcccgcagggttaaaaaggaaaagatcaataacagtactggatg

SEQ ID NO: 80502 - DNA, 80 bp, synthetic construct
  source 1..80: mol_type = other DNA
tgggtgatgcatatttctcaattcctttagatgaagacttcaggaagtatactgcatttaccatacctagtagaaacaat

SEQ ID NO: 80503 - DNA, 80 bp, synthetic construct
  source 1..80: mol_type = other DNA
gaaacaccagggattagatatcagtacaatgtacttccacagggatggaaaggatcaccagcaatattccaaagtagcat

SEQ ID NO: 80504 - DNA, 80 bp, synthetic construct
  source 1..80: mol_type = other DNA
acttagaaataaggcaacatagggcaaaggtagaagaattaagagaacatctgttaaagtggggatttaccacaccagac

SEQ ID NO: 80505 - DNA, 80 bp, synthetic construct
  source 1..80: mol_type = other DNA
gctgccagaaaaggatagctggactgttaatgatatacaaaagttagtggggaaactaaactgggcaagtcagatttacc

SEQ ID NO: 80506 - DNA, 80 bp, synthetic construct
  source 1..80: mol_type = other DNA
caggaattaaagtaaagcaactgtgtaaactcctcaggggaactaaagcactaacagaagtagtaccactgactgaagaa

SEQ ID NO: 80507 - DNA, 80 bp, synthetic construct
  source 1..80: mol_type = other DNA
gcagaattagaattggcagagaacagggaaattctaaaaacccctgtgcatggagtatattatgacccatcaaaagaatt

SEQ ID NO: 80508 - DNA, 80 bp, synthetic construct
  source 1..80: mol_type = other DNA
gcagaagactgggggaagggggaagagataaattccttaccgaagcaggagcagaaagaccaagagggtcatcatcctcc

SEQ ID NO: 80509 - DNA, 80 bp, synthetic construct
  source 1..80: mol_type = other DNA
gaaaatatgcaagaaaaaggtctgcccacactaatgatgtaagacaattagcagatgtggtgcagaaaatatccctagaa

SEQ ID NO: 80510 - DNA, 80 bp, synthetic construct
  source 1..80: mol_type = other DNA
tgcatagtaatatggggaaagattcctaaatttagactacccatacaaaaagaaacgtgggacatatggtggacggagta

SEQ ID NO: 80511 - DNA, 80 bp, synthetic construct
  source 1..80: mol_type = other DNA
ctcagtctccctcaaatcactctttggcaacgacccatggtcacagtaaaaatagaaggacagctgagagaagctctatt

SEQ ID NO: 80512 - DNA, 80 bp, synthetic construct
  source 1..80: mol_type = other DNA
gaggttttatcaaggtaaggcaatatgatgagatacttatagaaatttgtggaaaaagggctataggtacagtgttagta

SEQ ID NO: 80513 - DNA, 80 bp, synthetic construct
  source 1..80: mol_type = other DNA
ggacctacacctgtcaacataattggacgaaacatgttgacccaggttggttgtactttaaatttcccaatcagtcctat

SEQ ID NO: 80514 - DNA, 80 bp, synthetic construct
  source 1..80: mol_type = other DNA
tgacactataccagtaaaattaaagccaggaatggatggaccaagggttaaacagtggccattgacagaggaaaaaataa

SEQ ID NO: 80515 - DNA, 80 bp, synthetic construct
  source 1..80: mol_type = other DNA
gatgacttgtatgtcggatctgatttagaaatagagcagcacagagcaaaaatagaggagttgagagctcatctattgat

SEQ ID NO: 80516 - DNA, 80 bp, synthetic construct
  source 1..80: mol_type = other DNA
ttgggggtttattacaccagacaaaaagcatcaaaaggaacctccatttctctggatgggatatgaactccatcctgaca

SEQ ID NO: 80517 - DNA, 80 bp, synthetic construct
  source 1..80: mol_type = other DNA
gagacagggaacagactcctcctttaatttccctcaaatcactctttggcaacgacctcttgtcacagtaaaagtaggag

SEQ ID NO: 80518 - DNA, 80 bp, synthetic construct
  source 1..80: mol_type = other DNA
gagaactcaataaaagaactcaggacttctgggaagtccaattaggaataccacatccagcaggtttacaaaagaacaaa

SEQ ID NO: 80519 - DNA, 80 bp, synthetic construct
  source 1..80: mol_type = other DNA
caatattccagtgtagcatgacaaaaatcttagatccctttagagcaaaaaatccagaaatggttatctatcaatacgtg

SEQ ID NO: 80520 - DNA, 80 bp, synthetic construct
  source 1..80: mol_type = other DNA
gatggaaaaagaaggaaaaatttcaaaaattgggccagaaaatccatacaatactccagtatttgccataaagaaaaagg

SEQ ID NO: 80521 - DNA, 80 bp, synthetic construct
  source 1..80: mol_type = other DNA
acagtactaaatggagaaagttagtagactttagagagcttaataaaagaactcaggatttttgggaggttcaattagga

SEQ ID NO: 80522 - DNA, 80 bp, synthetic construct
  source 1..80: mol_type = other DNA
atgtgcttcctcagggatggaaagggtcaccagcaatattccaatgtagcatgacaagaattttagaaccatttagggca

SEQ ID NO: 80523 - DNA, 80 bp, synthetic construct
  source 1..80: mol_type = other DNA
aaaagtagaggaattaagagaacatctattgagatggggatttaccacaccagataaaaaacatcagaaagaacccccat

SEQ ID NO: 80524 - DNA, 80 bp, synthetic construct
  source 1..80: mol_type = other DNA
agaagaaaaaataaaagcattaacagaaatttgtaccgaaatggaaaaggaagggaaaattacaagaatcgggcctgaaa

SEQ ID NO: 80525 - DNA, 80 bp, synthetic construct
  source 1..80: mol_type = other DNA
gtgtaaacaatgcgacaccaggaatcaggtatcagtacaatgtgcttccacagggatggaaaggatctccggcaatattc

SEQ ID NO: 80526 - DNA, 80 bp, synthetic construct
  source 1..80: mol_type = other DNA
cagagtagcatgacaaaaatcttagagccctttagatcacaaaatccagaaatatttatctgtcaatacgtggatgactt

SEQ ID NO: 80527 - DNA, 80 bp, synthetic construct
  source 1..80: mol_type = other DNA
tttttacaccagacaaaaagcatcagaaagaacctccattcctttggatgggatatgaattacatcctgataaatggaca

SEQ ID NO: 80528 - DNA, 80 bp, synthetic construct
  source 1..80: mol_type = other DNA
ccaattagtccaattgagactgtaccagtaaaattaaagccagggatggatggcccaaaagttaaacaatggccgttgac

SEQ ID NO: 80529 - DNA, 80 bp, synthetic construct
  source 1..80: mol_type = other DNA
aagtcagatttatccaggcattaaagtaaagcaactgtgtagactccttaggggaactaaagcactaacagatgtagtaa

SEQ ID NO: 80530 - DNA, 80 bp, synthetic construct
  source 1..80: mol_type = other DNA
agtactggatgtgggggacgcatatttttcagtgcccttagatgaaagcttcaggaaatatactgcatttaccataccta

SEQ ID NO: 80531 - DNA, 80 bp, synthetic construct
  source 1..80: mol_type = other DNA
gtatgtgagctctgacttagagatagggcaacatagggcaaaaatagaagagctaagagatcatttattgaagtggggac

SEQ ID NO: 80532 - DNA, 80 bp, synthetic construct
  source 1..80: mol_type = other DNA
gaattcagttactgtcaggcaagaccttgagagacagcttggagacttaagagaagaattcaactcattatcgcaagaaa

SEQ ID NO: 80533 - DNA, 80 bp, synthetic construct
  source 1..80: mol_type = other DNA
agaaaagtttattccaaaaaggtcataccgtgttctgaaagatgatgaggttatggaagctagcgttgacggaaagttct

SEQ ID NO: 80534 - DNA, 80 bp, synthetic construct
  source 1..80: mol_type = other DNA
cagccatttgtgaagagatggaaaaggaaggaaaaattgaaaaaattggacctgaaaacccatacaatactccaatattt

SEQ ID NO: 80535 - DNA, 80 bp, synthetic construct
  source 1..80: mol_type = other DNA
gccataaagaaaaagaatagtacaagatggagaaaattaatggacttcagagaactcaataaaagaactcaagacttctg

SEQ ID NO: 80536 - DNA, 80 bp, synthetic construct
  source 1..80: mol_type = other DNA
cctcaaatcactctttggcaacgacccatagttgaagcaaggatagggggacagctaatagaagttctattagacacagg

SEQ ID NO: 80537 - DNA, 80 bp, synthetic construct
  source 1..80: mol_type = other DNA
agagccctttagaacaaaaaatccagaggtggtgatctatcaatatgtggatgacttatatgtaggatctgatttagaaa

SEQ ID NO: 80538 - DNA, 80 bp, synthetic construct
  source 1..80: mol_type = other DNA
agagtagcatgacaaaaatcttagagccttttagaacaaaaaatccagaactagtgatctgccaatacgtggatgattta

SEQ ID NO: 80539 - DNA, 80 bp, synthetic construct
  source 1..80: mol_type = other DNA
gaaaaaataaaagctttaatggatatttgttcagagatggaaaaggaaggaaaaatttcaaaaattgggcctgaaaatcc

SEQ ID NO: 80540 - DNA, 80 bp, synthetic construct
  source 1..80: mol_type = other DNA
aacagccccaccagcagagagcctggggatgggggaagagataacctcctccccgaagcaggaaccgaaggaccagggac

SEQ ID NO: 80541 - DNA, 80 bp, synthetic construct
  source 1..80: mol_type = other DNA
caagcatgacaaaaattttacagccttttagaacaaaaaatccagagatagtgatctaccaatatgtggatgatttactt

SEQ ID NO: 80542 - DNA, 80 bp, synthetic construct
  source 1..80: mol_type = other DNA
agagccttttagaaagcaaaatccagacatagttatctgtcaatacgtggatgatctgtatgtaggatctgatttagaaa

SEQ ID NO: 80543 - DNA, 80 bp, synthetic construct
  source 1..80: mol_type = other DNA
tagggcagcatagagcaaaaatagaggaactgagacaacacctgtcaaagtggggattttacaccccagataaaaaatat

SEQ ID NO: 80544 - DNA, 80 bp, synthetic construct
  source 1..80: mol_type = other DNA
tagaacagcatagagcaaagatagaggagctgagagctcatctattaagatggggattgactacaccagacaacaagcat

SEQ ID NO: 80545 - DNA, 80 bp, synthetic construct
  source 1..80: mol_type = other DNA
tagggcagcatagagcaaaaatagaagagttaagagaacatctactgagatgggggtttttcacaccagataaaaaacac

SEQ ID NO: 80546 - DNA, 80 bp, synthetic construct
  source 1..80: mol_type = other DNA
aagtatactgcgttcaccatacctagtacaaacaatgagagaccaggaatcagatatcagtacaatgtactaccacaggg

SEQ ID NO: 80547 - DNA, 80 bp, synthetic construct
  source 1..80: mol_type = other DNA
ggaggtccaactaggaataccacatcccgcgggattaaaaaggaacaaatcagtaacagtaatagatgtgggggatgcat

SEQ ID NO: 80548 - DNA, 80 bp, synthetic construct
  source 1..80: mol_type = other DNA
agaaccctttagaaaagaaaatccagagatagtgatctatcaatatgtggatgatttacttgtaggatcagacttagaga

SEQ ID NO: 80549 - DNA, 80 bp, synthetic construct
  source 1..80: mol_type = other DNA
tagggcagcatagagcaaaaatagaagagttgagagaacatctatggaaatggggattttacacaccagacaagaaacat

SEQ ID NO: 80550 - DNA, 80 bp, synthetic construct
  source 1..80: mol_type = other DNA
ataagagaactcaagacttctgggaagttcaattaggaataccgcatccagggggtttgaaaaagaacaaatcagtaaca

SEQ ID NO: 80551 - DNA, 80 bp, synthetic construct
  source 1..80: mol_type = other DNA
cggaaatttgcaaagacatggcaaacgaggggaaaatttcaaaaattgggcctgaaaatccatacaatactccaatattt

SEQ ID NO: 80552 - DNA, 80 bp, synthetic construct
  source 1..80: mol_type = other DNA
ggaagttcaattaggaataccacatcctgctgggttgaagaaaaagaaatcggtaacagtattggatgtgggggatgcat

SEQ ID NO: 80553 - DNA, 80 bp, synthetic construct
  source 1..80: mol_type = other DNA
agaaaaaataagagcattaacagaaatttgtggcgaaatggagaaggaaggaaaaatttcaaaaattgggcctgaaaatc

SEQ ID NO: 80554 - DNA, 80 bp, synthetic construct
  source 1..80: mol_type = other DNA
agtagcatgacaagaatcctagaaccctttagggcacgaaaccccgacatagtaatttatcaatatatggatgacttata

SEQ ID NO: 80555 - DNA, 80 bp, synthetic construct
  source 1..80: mol_type = other DNA
tgttggatctgatctagaaataatgcaacatagagcaaaagtagaagagttaagagaacacttattgaaatggggattta

SEQ ID NO: 80556 - DNA, 80 bp, synthetic construct
  source 1..80: mol_type = other DNA
cagcctatacagctgccagataaggagagctggactgtcaatgatatacaaaagatagtaggaaaattaaactgggcaag

SEQ ID NO: 80557 - DNA, 80 bp, synthetic construct
  source 1..80: mol_type = other DNA
atttctcaatccccttagatgaagaatttagaaagtatacagcatttactatacctagtacaaataatgaaacaccaggg

SEQ ID NO: 80558 - DNA, 80 bp, synthetic construct
  source 1..80: mol_type = other DNA
taggacaacatagagcaaaaatagatgagttaagagaacatctgttacaatggggacttaccacaccagataaaaagcat

SEQ ID NO: 80559 - DNA, 80 bp, synthetic construct
  source 1..80: mol_type = other DNA
tgatatacagaaattggtgggaaagctaaattgggcaagtcagatttatccaggaattaaagaaaacaattatgaacccc

SEQ ID NO: 80560 - DNA, 80 bp, synthetic construct
  source 1..80: mol_type = other DNA
tggacctgaaaatccatataacactccagtgtttgccataaaaaagaaggatggtactaaatggagaaaattagtagatt

SEQ ID NO: 80561 - DNA, 80 bp, synthetic construct
  source 1..80: mol_type = other DNA
aaatcagtgacagtactggatgtgggggatgcatatttctcagttcctttagatgaagactttaggaagtatactgcatt

SEQ ID NO: 80562 - DNA, 80 bp, synthetic construct
  source 1..80: mol_type = other DNA
cagcaatatttcaaagtagtatgacaaaaatcctagagccctttagggcaaaaaaccccgagatagtgatttatcaatat

SEQ ID NO: 80563 - DNA, 80 bp, synthetic construct
  source 1..80: mol_type = other DNA
atggatgatttatatgttggatctgatttagaaataatgcaacatagagcaaaagtggaagagttaagagcacatttatt

SEQ ID NO: 80564 - DNA, 80 bp, synthetic construct
  source 1..80: mol_type = other DNA
agtattggtgggacctactcctgtcaacataattggaagaaacatgttgactcagattggttgtactttaaatttcccaa

SEQ ID NO: 80565 - DNA, 80 bp, synthetic construct
  source 1..80: mol_type = other DNA
ctggatgtgggggatgcatatttttctgttcctctagacgaaagctttagaaagtatactgcattcaccatacctagtat

SEQ ID NO: 80566 - DNA, 80 bp, synthetic construct
  source 1..80: mol_type = other DNA
gtaggatctgatttagaaatagggcaacatagggcaaaaatagaggaactaagagctcatctattgagatggggatttac

SEQ ID NO: 80567 - DNA, 80 bp, synthetic construct
  source 1..80: mol_type = other DNA
attcctttggctgggatatgaactccatcctgataaatggaccgtccagcctatagagctgcctgaaaaagaaagctgga

SEQ ID NO: 80568 - DNA, 80 bp, synthetic construct
  source 1..80: mol_type = other DNA
gaatcccccatcccgcaggattaaagaagaacaaatcagtaacagtactagatgtaggagatgcatatttttcagttccc

SEQ ID NO: 80569 - DNA, 80 bp, synthetic construct
  source 1..80: mol_type = other DNA
tcagaagcaggaaccgagggacaagcaggaaccgagggacaaggagctataccctcctttaacttccctcaaatcactct

SEQ ID NO: 80570 - DNA, 80 bp, synthetic construct
  source 1..80: mol_type = other DNA
taggacagcatagaacaaaaatagaggagttgagagctcacctattgagctgggggcttactacaccagacaaaaagcat

SEQ ID NO: 80571 - DNA, 80 bp, synthetic construct
  source 1..80: mol_type = other DNA
tgttaatgatatacagaaattagtgggaaagctaaattgggcaagtcagatttatccaggaattaaaggaaatgcaactg

SEQ ID NO: 80572 - DNA, 80 bp, synthetic construct
  source 1..80: mol_type = other DNA
acgaaaaacatcaaaaggagcccccatttctctggatggggtatgaactccatcctgacaaatggacagtccagcagata

SEQ ID NO: 80573 - DNA, 80 bp, synthetic construct
  source 1..80: mol_type = other DNA
taggacaacatagagcaaaaatagaggagctaagaactcatctgttgaaatggggactaaccacaccagacgaaaaacat

SEQ ID NO: 80574 - DNA, 80 bp, synthetic construct
  source 1..80: mol_type = other DNA
tagggcagcatagagcaaaaatagaggagttgagagagcatttactaaggtggggattcaccacaccagacaaaaagcat

SEQ ID NO: 80575 - DNA, 80 bp, synthetic construct
  source 1..80: mol_type = other DNA
atttttcagttcctttagatgaaagctttagaaaatatacagcattcactatacctagtgtaaataatgaaacaccgggg

SEQ ID NO: 80576 - DNA, 80 bp, synthetic construct
  source 1..80: mol_type = other DNA
agaaccctttagaacaaaaaacccagagatagtaatctaccaatatgtggatgatttatatgtgggatcagacttagaga

SEQ ID NO: 80577 - DNA, 80 bp, synthetic construct
  source 1..80: mol_type = other DNA
tagggcaacataggacaaaaatagaggagttaagagaacatctgttgaaatggggattttacacaccagacaaaaaacat

SEQ ID NO: 80578 - DNA, 80 bp, synthetic construct
  source 1..80: mol_type = other DNA
cctcagatcactctttggcaacgaccagtagtcacagtaaaaatagaaggacagccaatagaagccctgttagacacagg

SEQ ID NO: 80579 - DNA, 80 bp, synthetic construct
  source 1..80: mol_type = other DNA
agagccctttaggacaagaaatccagagataattatttgccaatatgtggatgatttgtatgtaggatcagacttagaga

SEQ ID NO: 80580 - DNA, 80 bp, synthetic construct
  source 1..80: mol_type = other DNA
taggacagcacagagcaaaaatagaggagctcagagaacatctgttaaaatggggatttaccacaccagataaaaaatat

SEQ ID NO: 80581 - DNA, 80 bp, synthetic construct
  source 1..80: mol_type = other DNA
cagaaatttgtacagaattggagaaagacggaaaaatttcaaaaattgggcctgagaatccatacaacactccaatattt

SEQ ID NO: 80582 - DNA, 80 bp, synthetic construct
  source 1..80: mol_type = other DNA
atttttcaatccctttgtgtgaagactttaggaagtatactgcattcactttacctagtataaacaatgagacaccaggg

SEQ ID NO: 80583 - DNA, 80 bp, synthetic construct
  source 1..80: mol_type = other DNA
agatccctttaggaaacaaaatcctgaattagttatttaccagtatgtggatgatttgtatgtaggatctgacttagaaa

SEQ ID NO: 80584 - DNA, 80 bp, synthetic construct
  source 1..80: mol_type = other DNA
atttttcagttcccttagatgaagggttcagaaagtatacagcattcacaatacctagtacaaataatgaaacaccaggg

SEQ ID NO: 80585 - DNA, 80 bp, synthetic construct
  source 1..80: mol_type = other DNA
atttttcagttcccttagacccggattttaggaaatatactgcattcactatacctagtatgaataatgagacgccaggg

SEQ ID NO: 80586 - DNA, 80 bp, synthetic construct
  source 1..80: mol_type = other DNA
agggatggaaaggatcaccagcaatatttcaggcaagcatgacaaaaatcttagagccctttagaacacaaaatccagag

SEQ ID NO: 80587 - DNA, 80 bp, synthetic construct
  source 1..80: mol_type = other DNA
cctcaaatcactctttggcagcgaccaatgagcacagtaaaaatagggggacaactaatagaagccctattagatacagg

SEQ ID NO: 80588 - DNA, 80 bp, synthetic construct
  source 1..80: mol_type = other DNA
agagccctttagaacaaaaaatccagaactagatatctaccaatacatggatgatttacttgtaggatctgacttagaga

SEQ ID NO: 80589 - DNA, 80 bp, synthetic construct
  source 1..80: mol_type = other DNA
ggaggtccagttaggaatacctcatcccgcaggattgaaggagaacaaatcagtaacagtactagatgtgggagatgcat

SEQ ID NO: 80590 - DNA, 80 bp, synthetic construct
  source 1..80: mol_type = other DNA
ggaggttcaattaggaataccacatccggctgggctaaagaagaacaaatcagtaacagtgttggatgtgggggatgcat

SEQ ID NO: 80591 - DNA, 80 bp, synthetic construct
  source 1..80: mol_type = other DNA
agagccctttagaaaaaaggctccagaaatagtgatctaccaatacatggatgatctatatgtaggatctgacttagaaa

SEQ ID NO: 80592 - DNA, 80 bp, synthetic construct
  source 1..80: mol_type = other DNA
kttggatgggatatgaactccatcctgataaatggacagtccagcctatagtgctgccagacaaagacagctggactgtc

SEQ ID NO: 80593 - DNA, 80 bp, synthetic construct
  source 1..80: mol_type = other DNA
gtactagatgtgggagatgcatatttttcagttcctttacatgaagactttagaaagtacacagcattcactatacctag

SEQ ID NO: 80594 - DNA, 80 bp, synthetic construct
  source 1..80: mol_type = other DNA
gactatatcctcctttaacctccctcagatcactctttggcaacgacccatagtcacagtaaaaatagaaggacagccaa

SEQ ID NO: 80595 - DNA, 80 bp, synthetic construct
  source 1..80: mol_type = other DNA
tatgtaggatcagacttagagatagggcaacataggacaaaaatagaagagttgagacaacatctgctgaaatgggggtt

SEQ ID NO: 80596 - DNA, 80 bp, synthetic construct
  source 1..80: mol_type = other DNA
ctcaagacttctgggaggttcaattaggaatacctcatccagcgggattaaaaaggaaaaaatcagtaacagtattagat

SEQ ID NO: 80597 - DNA, 80 bp, synthetic construct
  source 1..80: mol_type = other DNA
gccaacagccccaccagcagagatgggggaagagatagcctcctctcagaagcaggaaccgagggacgagggactatatc

SEQ ID NO: 80598 - DNA, 80 bp, synthetic construct
  source 1..80: mol_type = other DNA
caagtatgacaaaaatcttagagccctttagagcaagaaatccagagataataatctaccaatatgtggatgatttatat

SEQ ID NO: 80599 - DNA, 80 bp, synthetic construct
  source 1..80: mol_type = other DNA
agcagatgatacagtattagaagacataaatttaccagggaaatggaaaccaaaaatgatagggggtattgggggtttta

SEQ ID NO: 80600 - DNA, 80 bp, synthetic construct
  source 1..80: mol_type = other DNA
ggaggtccaattaggaatacctcatccagcaggattaaaaaagaacaagtcagtgacagtactagatgtgggggatgcat

SEQ ID NO: 80601 - DNA, 80 bp, synthetic construct
  source 1..80: mol_type = other DNA
aaaagacagctggactgtcaatgatatacagaaattagtaggaaaactaaattgggcaagtcaaatttatgctggcatta

SEQ ID NO: 80602 - DNA, 80 bp, synthetic construct
  source 1..80: mol_type = other DNA
agatgatacagtattagaagaaacaaatttaaatttaccaggaaaatggagaccaaaaatgatagggggaattggaggtt

SEQ ID NO: 80603 - DNA, 80 bp, synthetic construct
  source 1..80: mol_type = other DNA
cttagagccctttagaaaagacaatccagagatagtgatctatcaatatatggatgatttatatgtaggatcagacttag

SEQ ID NO: 80604 - DNA, 80 bp, synthetic construct
  source 1..80: mol_type = other DNA
ggcagatgacacagtattagaacaagtagatttaccaggaagatggaaaccaaaaatgatagggggaattggaggtttta

SEQ ID NO: 80605 - DNA, 80 bp, synthetic construct
  source 1..80: mol_type = other DNA
agagcccttcagactaaaaaatccagagatagtaatctaccaatatgtggatgatctatatgtaggatctgacttagaga

SEQ ID NO: 80606 - DNA, 80 bp, synthetic construct
  source 1..80: mol_type = other DNA
agagccctttagcttgcaaaacccagagataattatctatcaatacatggatgacttgtatgtaggatctgatttagaaa

SEQ ID NO: 80607 - DNA, 80 bp, synthetic construct
  source 1..80: mol_type = other DNA
gagaaaattagtagattttagagaactcaacaaaagaactcaggacttctgggaagttcaattaggaataccgcatccag

SEQ ID NO: 80608 - DNA, 80 bp, synthetic construct
  source 1..80: mol_type = other DNA
tcagaagcaggaggcgaaggaggacaagggactatatcctcctttaacttccctcaaatcactctttggcagcgaccctt

SEQ ID NO: 80609 - DNA, 80 bp, synthetic construct
  source 1..80: mol_type = other DNA
ctgagagctcatctattgagatggggatttactacacctgataaaaagcatcagaaggaacctccatttctttggatggg

SEQ ID NO: 80610 - DNA, 80 bp, synthetic construct
  source 1..80: mol_type = other DNA
ttcagtccctctagatgaagacttcaggaagtatactgcattcactatacccagtataaataatgagacaccagggatta

SEQ ID NO: 80611 - DNA, 80 bp, synthetic construct
  source 1..80: mol_type = other DNA
gatatcagtacaatgtgctaccacagggatggaaaggatcgccagccatattccaaagtaccatgataaaaatcttagaa

SEQ ID NO: 80612 - DNA, 80 bp, synthetic construct
  source 1..80: mol_type = other DNA
gcagcatagagaaaaggtagaggaattgagggagcatctcttgaaatggggattcaccacaccagacaaaaaacatcaga

SEQ ID NO: 80613 - DNA, 80 bp, synthetic construct
  source 1..80: mol_type = other DNA
caattaggaatacctcatcccgcgggaccaaaaaagaataaatcagtaacagtattagatgtgggggatgcatatttttc

SEQ ID NO: 80614 - DNA, 80 bp, synthetic construct
  source 1..80: mol_type = other DNA
gcatagagaaaaaatagaggagttgagagaacatctcttgaaatggggacttaccacaccagacaaaaaacatcagaagg

SEQ ID NO: 80615 - DNA, 80 bp, synthetic construct
  source 1..80: mol_type = other DNA
caactgtccagtacattaaaaccaggaatggatggaccaaaggttaaacaatggccattgacagaagaaaaaataaaagc

SEQ ID NO: 80616 - DNA, 80 bp, synthetic construct
  source 1..80: mol_type = other DNA
tttagagatggaaaaggaaggaaaaattacaaaaattgggcctgaaaacccatacaatactccaatatttgccataaaga

SEQ ID NO: 80617 - DNA, 80 bp, synthetic construct
  source 1..80: mol_type = other DNA
tcccctagataaggactttagaaagtacactgcattcactatacctagtataaataatgagacaccagggattaggtatc

SEQ ID NO: 80618 - DNA, 80 bp, synthetic construct
  source 1..80: mol_type = other DNA
tagagccaaaatagaagagttgagagaacatctactgaagtggggatttaccacaccagacaaaaaacatcagaaagaac

SEQ ID NO: 80619 - DNA, 80 bp, synthetic construct
  source 1..80: mol_type = other DNA
gcaggactaaaaaagaagaaatcagtaacagtattggatgtgggtgatgcatatttttcagttccattatatgaagactt

SEQ ID NO: 80620 - DNA, 80 bp, synthetic construct
  source 1..80: mol_type = other DNA
tagaaagtatacagcatttactatacccagtacaaacaatgagacaccagggattagatatcagtacaatgtgcttccac

SEQ ID NO: 80621 - DNA, 80 bp, synthetic construct
  source 1..80: mol_type = other DNA
ggcccaaagattaaacaatggccattgacagaagaaaagataaaagcattgacagcaatttgtaaagaaatggaagagga

SEQ ID NO: 80622 - DNA, 80 bp, synthetic construct
  source 1..80: mol_type = other DNA
atatttcaagccagtatgacaaaaatcttagaaccctttagaataaaaaatccagagatagtaatctaccaatatatgga

SEQ ID NO: 80623 - DNA, 80 bp, synthetic construct
  source 1..80: mol_type = other DNA
tgatttatatgtaggatctgacttagagatagggcaacataggacaaaaatagaggaattaagagaacatctactgaagt

SEQ ID NO: 80624 - DNA, 80 bp, synthetic construct
  source 1..80: mol_type = other DNA
tgcaaaagatatccctagaaagtatagtgatatggggaaagattcctaaatttagactacccatacaaaaggaaacatgg

SEQ ID NO: 80625 - DNA, 80 bp, synthetic construct
  source 1..80: mol_type = other DNA
agagtagcatgacaaaaatcttagagccctttagaaaaagaaacccagaaatggtgatctatcaatacatggatgattta

SEQ ID NO: 80626 - DNA, 80 bp, synthetic construct
  source 1..80: mol_type = other DNA
tatgtaggatctgacttagaaatagggcagcatagagcaaaaatagaggagctaagacaacacttattgaaatgggggtt

SEQ ID NO: 80627 - DNA, 80 bp, synthetic construct
  source 1..80: mol_type = other DNA
cagcaaaagacttaatatcagaagtacaaaaacaagggcaagaccaatggacatatcagatttatcaggagccatacaaa

SEQ ID NO: 80628 - DNA, 80 bp, synthetic construct
  source 1..80: mol_type = other DNA
agagccaacagccccacctgcagagaacctcaggttcggggaggagataaccccctccccgaacccggagccgagggaaa

SEQ ID NO: 80629 - DNA, 80 bp, synthetic construct
  source 1..80: mol_type = other DNA
aatctgaaaacaggaaagtatgcaaaaagggggtcaacccacactaatgatgtaaaacaattaacagaggtggtacaaaa

SEQ ID NO: 80630 - DNA, 80 bp, synthetic construct
  source 1..80: mol_type = other DNA
aatatgcttagaaagcatagtaatatggggaaagattcctaagtttaaactacccataagaaaagagacatgggaagtat

SEQ ID NO: 80631 - DNA, 80 bp, synthetic construct
  source 1..80: mol_type = other DNA
aggagtcatatcccttaacttccctcaaatcactctttggcagcgacccctagtcacagtaaaaatagggggacagctaa

SEQ ID NO: 80632 - DNA, 80 bp, synthetic construct
  source 1..80: mol_type = other DNA
tagaagccctattagatacaggagcagatgacacagtattagaagacataaatttaccaggaagatggagaccaaaaatg

SEQ ID NO: 80633 - DNA, 80 bp, synthetic construct
  source 1..80: mol_type = other DNA
atagggggaattggaggatttatcaaagtaagacagtatgatcaaatacccatagaaattgagggaaaaaaggctatagg

SEQ ID NO: 80634 - DNA, 80 bp, synthetic construct
  source 1..80: mol_type = other DNA
tccatacaacactccagtatttgccataaagaaaaaggacagtaccaaatggagaaaattagtagattttagagagctta

SEQ ID NO: 80635 - DNA, 80 bp, synthetic construct
  source 1..80: mol_type = other DNA
aaaatttggccttccaacaaagggaggccagggaattttcttcagaacagaccagagccaacagccccacagaacaggcc

SEQ ID NO: 80636 - DNA, 80 bp, synthetic construct
  source 1..80: mol_type = other DNA
ccagacaaggaacaatggactgttaatgatatacaaaaattggtgggaaaactcaattgggcaagtcagatatatgcagg

SEQ ID NO: 80637 - DNA, 80 bp, synthetic construct
  source 1..80: mol_type = other DNA
gcagaagtacagaaacaggggcttgatcaatggacatatcaaatttatcaagagccatacagaaatctaaaaacaggaaa

SEQ ID NO: 80638 - DNA, 80 bp, synthetic construct
  source 1..80: mol_type = other DNA
cagagagtctagggatggaggaagagatagcctcctctccgaagcaggaaccgagggacaagggactatatcctcctttg

SEQ ID NO: 80639 - DNA, 80 bp, synthetic construct
  source 1..80: mol_type = other DNA
gtatgccaagagggggtctgcccacactaatgatgtaaggcaattaacagaagcagtgcaaaaaatagccacagagagta

SEQ ID NO: 80640 - DNA, 80 bp, synthetic construct
  source 1..80: mol_type = other DNA
tagtaatatggggaagaattcctaaatttaaactacctataaggaaagaaacatgggatgtatggtggacagaatattgg

SEQ ID NO: 80641 - DNA, 80 bp, synthetic construct
  source 1..80: mol_type = other DNA
ctacacctatcaacataattgggaggaatatattgactcaaattggttgtactctaaattttccaattagtcctattgag

SEQ ID NO: 80642 - DNA, 80 bp, synthetic construct
  source 1..80: mol_type = other DNA
tttagggaaaatttggccttccaacaaagggaggccaggaaatttcccccagagcagactagaaccaacagccccaccag

SEQ ID NO: 80643 - DNA, 80 bp, synthetic construct
  source 1..80: mol_type = other DNA
gatttatccaggaattaaagtaaagcacttatgtaagctcctcaggggagcaaaagcactcacagacatagtaccattaa

SEQ ID NO: 80644 - DNA, 80 bp, synthetic construct
  source 1..80: mol_type = other DNA
ccgcagagagcttcgggttcggagaagagatagtcacctccccgaagcaggacgcgaagcaggacacgaaggacaaggag

SEQ ID NO: 80645 - DNA, 80 bp, synthetic construct
  source 1..80: mol_type = other DNA
aaagacagggaagtatgcaagaataaagtctgcccacaccaatgatgtaaaacaattaacagaagtagtgcaaaagatat

SEQ ID NO: 80646 - DNA, 80 bp, synthetic construct
  source 1..80: mol_type = other DNA
ttttttagggaaaatctggccttccaacaaggggaggccagggaattttcttcagaacaggccagagccatcagccccgc

SEQ ID NO: 80647 - DNA, 80 bp, synthetic construct
  source 1..80: mol_type = other DNA
agatgtgggggatgcctatttttcagttcccttagatgaaaactttagaaagtacacagcattcactatacctagtgtaa

SEQ ID NO: 80648 - DNA, 80 bp, synthetic construct
  source 1..80: mol_type = other DNA
ataatgaaacaccaggaattagatatcagtacaatgtactcccacagggatggaaaggatcaccagcaatctttcaggca

SEQ ID NO: 80649 - DNA, 80 bp, synthetic construct
  source 1..80: mol_type = other DNA
atcttagatccctttagaacaaaaaatccagaaataattatctatcaatacatggatgacttgtatgtaggatctgattt

SEQ ID NO: 80650 - DNA, 80 bp, synthetic construct
  source 1..80: mol_type = other DNA
agaaatagagcagcatagagcaaaaatagaagagctgagagctcatctgttgaaatgggggtttactacaccagataaaa

SEQ ID NO: 80651 - DNA, 80 bp, synthetic construct
  source 1..80: mol_type = other DNA
agcatcagaaggaacctccatttctttggatgggatatgaactccatcctgacaaatggacagtccagccaatacagttg

SEQ ID NO: 80652 - DNA, 80 bp, synthetic construct
  source 1..80: mol_type = other DNA
aattaaagtaaaacaattgtgtaaactcctcaggggagccaaagcactaacagatatagtaacattgactgaggaggcag

SEQ ID NO: 80653 - DNA, 80 bp, synthetic construct
  source 1..80: mol_type = other DNA
aattagaattggcagaaaacagggagattctaaaagaacccgtgcatggggtatattatgacccatcaaaagacttggta

SEQ ID NO: 80654 - DNA, 80 bp, synthetic construct
  source 1..80: mol_type = other DNA
cagcagagaatttcgggatgggggaagagataacctcctctccacagcagaaaccgagggacaaggagttatatcctcta

SEQ ID NO: 80655 - DNA, 80 bp, synthetic construct
  source 1..80: mol_type = other DNA
atatgcaaaaaagaggtctgctcacactaatgatgtaagacaattagtagaagtggtgcaaaaggtgatcacagaaagca

SEQ ID NO: 80656 - DNA, 80 bp, synthetic construct
  source 1..80: mol_type = other DNA
attgacagcaatttgtaaagagatggaagaggaaggaaaaatttcaaaaattgggcctgaaaatccatacaatactccag

SEQ ID NO: 80657 - DNA, 80 bp, synthetic construct
  source 1..80: mol_type = other DNA
tatttgctataaagaaaaaagacagtactaaatggaggaaattagtagatttcagagaactcaataaaagaactcaagac

SEQ ID NO: 80658 - DNA, 80 bp, synthetic construct
  source 1..80: mol_type = other DNA
gattaaggtaaggcaattatgtaaactcctcaggggagcaaaagcactaacagacatagtaccactaactgcagaagcag

SEQ ID NO: 80659 - DNA, 80 bp, synthetic construct
  source 1..80: mol_type = other DNA
gcagaaatacagaagcaggggcaaggccagtggacatatcaaatatatcaggagccacataaaaacctgaaaacagggaa

SEQ ID NO: 80660 - DNA, 80 bp, synthetic construct
  source 1..80: mol_type = other DNA
cagcggagagcttcagcttcggagaggagatagctccctccccgaagcaggagccgaagggaaaggagccacctccctta

SEQ ID NO: 80661 - DNA, 80 bp, synthetic construct
  source 1..80: mol_type = other DNA
gtatgcaagaatgaagtctgcccacactaatgatgtaaaacaattaacagaggcagtacaaaagatagccctagaaagca

SEQ ID NO: 80662 - DNA, 80 bp, synthetic construct
  source 1..80: mol_type = other DNA
gcttccctcaaatcactctttggcagcgacccctagtcacagtaaaaatagggggacaactaatagaagccttattagac

SEQ ID NO: 80663 - DNA, 80 bp, synthetic construct
  source 1..80: mol_type = other DNA
ttttatcaaagtaagacagtatgatcaaatacagatagaaattagtgggaaaaaggctatagggacagtgttagtaggac

SEQ ID NO: 80664 - DNA, 80 bp, synthetic construct
  source 1..80: mol_type = other DNA
ctacacctatcaacataattgggagaaatatgttgactcagatcggctgtactttaaactttccaataagtcctattgaa

SEQ ID NO: 80665 - DNA, 80 bp, synthetic construct
  source 1..80: mol_type = other DNA
gcaatattccagtatagcatgacaaaaatcttagagccctttaggacaagaaatccagacatagagatctaccaatatat

SEQ ID NO: 80666 - DNA, 80 bp, synthetic construct
  source 1..80: mol_type = other DNA
atatagtgacattgactgaggaagcagaattagaattggcagagaacagggagattttaaaagaccctgtacatggggta

SEQ ID NO: 80667 - DNA, 80 bp, synthetic construct
  source 1..80: mol_type = other DNA
gcagaccagaaccaacagctcctccagcagagcacttggggatggaggaagagatagcctcctctccaaagcaggaaccg

SEQ ID NO: 80668 - DNA, 80 bp, synthetic construct
  source 1..80: mol_type = other DNA
tagtgcaaaaaatagctgtagaaagcatagtaatatggggaaagacccctaaatttagactacccatacaaaaagaaaca

SEQ ID NO: 80669 - DNA, 80 bp, synthetic construct
  source 1..80: mol_type = other DNA
ggcctgaaaatccatacaatactccaatatttgctataaagaaaaaggacagtactaaatggaggaaattagtagatttt

SEQ ID NO: 80670 - DNA, 80 bp, synthetic construct
  source 1..80: mol_type = other DNA
atatttcagagtagcatgacaaaaatcttagagccctttagaacaaaaaatccagaaatggtgatctaccagtacatgga

SEQ ID NO: 80671 - DNA, 80 bp, synthetic construct
  source 1..80: mol_type = other DNA
tgatttatatgtaggatctgacttagaaatagggcaacatagagcaaaaatagaagagttgagaggacatctattgcaat

SEQ ID NO: 80672 - DNA, 80 bp, synthetic construct
  source 1..80: mol_type = other DNA
ttgggcaagtcaaatttatccagggattaaagtaaagcaattatgtaaactcctcaggggagcaaaagccctaacagaca

SEQ ID NO: 80673 - DNA, 80 bp, synthetic construct
  source 1..80: mol_type = other DNA
tagtaccgctaactgcagaggcagaattagaattggcagagaacagggaaattctaaaagagccagtgcatggggtatat

SEQ ID NO: 80674 - DNA, 80 bp, synthetic construct
  source 1..80: mol_type = other DNA
tatgacccatcgaaagacttaatagcagaaatacagaagcaggggcaaggccagtggacatatcaaatatatcaggagcc

SEQ ID NO: 80675 - DNA, 80 bp, synthetic construct
  source 1..80: mol_type = other DNA
cagcagagagctttgggttcggggaggagatagccccctccccgaagcaggagatagccccctctccaaagcaggagcag

SEQ ID NO: 80676 - DNA, 80 bp, synthetic construct
  source 1..80: mol_type = other DNA
acataagaacttgaaaacagggaagtatgcgagaatgaagtctgcccacactaatgatgtaaagcaattaacagaagcag

SEQ ID NO: 80677 - DNA, 80 bp, synthetic construct
  source 1..80: mol_type = other DNA
gtcaatacccctcccctagtaaaattatggtatcagttagaaacagagcccatagtaggagtagaaactttctatgtaga

SEQ ID NO: 80678 - DNA, 80 bp, synthetic construct
  source 1..80: mol_type = other DNA
tgcagaaggtagcccaagaaagcatagtaatatggggaaagactcctaaatttagactccccatacaaaaagaaacatgg

SEQ ID NO: 80679 - DNA, 80 bp, synthetic construct
  source 1..80: mol_type = other DNA
gagacgtggtggacagaatattggcaagccacctggatccctgaatgggaatttgtcaatacccctcccctagtaaaatt

SEQ ID NO: 80680 - DNA, 80 bp, synthetic construct
  source 1..80: mol_type = other DNA
aaggaaaaggagctgtatcccttagcctccctcaaatcactctttggcaacgacccctagtcacagtaaaaataggggaa

SEQ ID NO: 80681 - DNA, 80 bp, synthetic construct
  source 1..80: mol_type = other DNA
aaaaatgatagggggaattggaggttttatcaaagtaagacagtatgatcaaatacttatggaaatttgtggaaaaaggg

SEQ ID NO: 80682 - DNA, 80 bp, synthetic construct
  source 1..80: mol_type = other DNA
actgacagacgagaaaataaaagcattaacagaaatttgtaaagaaatggaaaaagaaggaaaaatttcaaaaattgggc

SEQ ID NO: 80683 - DNA, 80 bp, synthetic construct
  source 1..80: mol_type = other DNA
gaacttaataaaagaactcaagacttttgggaagttcagttaggaataccacacccagctgggttgaagaagaaaaaatc

SEQ ID NO: 80684 - DNA, 80 bp, synthetic construct
  source 1..80: mol_type = other DNA
tacctagcataaataatgagacaccagggattagatatcagtacaatgtacttccacagggatggaaaggatcaccagca

SEQ ID NO: 80685 - DNA, 80 bp, synthetic construct
  source 1..80: mol_type = other DNA
gcaatttttcaggcaagcatgataaaaatcttagagccctttagaacaaaaaatccagagatagtaatctaccaatatat

SEQ ID NO: 80686 - DNA, 80 bp, synthetic construct
  source 1..80: mol_type = other DNA
acgcagaaccaacagccccaccagcagagagcttcgggttcggaggggagataaccccctccctgaagcaggagcagaag

SEQ ID NO: 80687 - DNA, 80 bp, synthetic construct
  source 1..80: mol_type = other DNA
gccatttaaaaatctaaaaacaggaaaatatgcaaaaagaaggaccgctcacacaaatgatgtaaaacaattagcagagg

SEQ ID NO: 80688 - DNA, 80 bp, synthetic construct
  source 1..80: mol_type = other DNA
tagcgcaaaaggtgaccatggaaagcatagtaatatggggaaaggctcctaaatttagactacccatacaaaaagaaaca

SEQ ID NO: 80689 - DNA, 80 bp, synthetic construct
  source 1..80: mol_type = other DNA
gagccgaaggagctatatcccttagcctccctcaaatcactctttggcagcgacccctagtcacagtaagaataggagga

SEQ ID NO: 80690 - DNA, 80 bp, synthetic construct
  source 1..80: mol_type = other DNA
accaaagatgatagggggaattggaggttttatcaaagtaagacagtatgatcaaataggtatagaaatttatggaaaaa

SEQ ID NO: 80691 - DNA, 80 bp, synthetic construct
  source 1..80: mol_type = other DNA
gccattgacagaagaaaaaataaaagcattatcagaaatttgtatggaaatggaaaaagaaggaaaaatttcaaaaattg

SEQ ID NO: 80692 - DNA, 80 bp, synthetic construct
  source 1..80: mol_type = other DNA
agagaacttaataaaagaactcaagacttttgggaggttcaattaggaataccgcatcctgctggattaaaaaagaaaaa

SEQ ID NO: 80693 - DNA, 80 bp, synthetic construct
  source 1..80: mol_type = other DNA
atcagtaacagttttagatgtgggagatgcatatttttcaattcccttagataaagattttagaaagtatacagcattca

SEQ ID NO: 80694 - DNA, 80 bp, synthetic construct
  source 1..80: mol_type = other DNA
gataactgcccctccgaagcaggagccgaaggacttaatttccctcaaatcactctttggcaacgacccattgtcacagt

SEQ ID NO: 80695 - DNA, 80 bp, synthetic construct
  source 1..80: mol_type = other DNA
tggactgtcaatgatatacagaaattagtgggaaaactaaattgggcaagtcagatttatccaggaattaaagtaaagca

SEQ ID NO: 80696 - DNA, 80 bp, synthetic construct
  source 1..80: mol_type = other DNA
cagcagagctcctggggatggggggagagataactgcccctccgaagcaggagccgaaggacttaatttccctcaaatca

SEQ ID NO: 80697 - DNA, 80 bp, synthetic construct
  source 1..80: mol_type = other DNA
agagtaaagaatccagaaatggtgatctatcaatacatggatgatttatatgtaggatctgatttagaactagagctaca

SEQ ID NO: 80698 - DNA, 80 bp, synthetic construct
  source 1..80: mol_type = other DNA
agaaatagggcagcatagaacaaaaatagaggagttgagagctcatctgttgagctggggatttactacaccagacaaaa

SEQ ID NO: 80699 - DNA, 80 bp, synthetic construct
  source 1..80: mol_type = other DNA
agcatcagaaagaacctccattcctttggatgggatatgaattacatcccgacaaatggacagtccagcctatacaactg

SEQ ID NO: 80700 - DNA, 80 bp, synthetic construct
  source 1..80: mol_type = other DNA
cagagctcctggggatgggggaagaaatgacctcccctccgaagcgggagcaggagaacagggaacgggacccaccttta

SEQ ID NO: 80701 - DNA, 80 bp, synthetic construct
  source 1..80: mol_type = other DNA
ttttttagggaaaatttggccttccaaggggaggccaggaaattttccccagagcagaccagtgccaacagctccgccag

SEQ ID NO: 80702 - DNA, 80 bp, synthetic construct
  source 1..80: mol_type = other DNA
ttttgggaggttcaattaggaataccgcatccagcgggtctaaaaaagaaaaagtcagtgacagtactagatgtggggga

SEQ ID NO: 80703 - DNA, 80 bp, synthetic construct
  source 1..80: mol_type = other DNA
caggaatcaggtatcagtacaatgtgcttccacagggatggaagggatcaccagcaatattccagagtagcatgacaaaa

SEQ ID NO: 80704 - DNA, 80 bp, synthetic construct
  source 1..80: mol_type = other DNA
cttagaaataggacaacatagagcaaaaatagaggagttaagagaacatttattgaggtgggggtttactacaccagaca

SEQ ID NO: 80705 - DNA, 80 bp, synthetic construct
  source 1..80: mol_type = other DNA
ttgccaaacaaggacagctggactgtcaatgatatacagaaattagtgggaaaattaaactgggcaagtcagatttaccc

SEQ ID NO: 80706 - DNA, 80 bp, synthetic construct
  source 1..80: mol_type = other DNA
cagcagagctctttgggatgagggaagagatagctccccctccaaagcaggagcagaaagacagggaacagggatcacct

SEQ ID NO: 80707 - DNA, 80 bp, synthetic construct
  source 1..80: mol_type = other DNA
aaaatatgcaaaaaggaagtctgctcacactaatgatgtaaaacaattaacagacgcggtgcaaaaaatagccatggaaa

SEQ ID NO: 80708 - DNA, 80 bp, synthetic construct
  source 1..80: mol_type = other DNA
aaaagcatcagaaagaacctccattcctttggatgggatatgaattacatcctgacaaatggacagttcaacccatacag

SEQ ID NO: 80709 - DNA, 80 bp, synthetic construct
  source 1..80: mol_type = other DNA
ctaccagaaaaggacagctggactgtcaatgatatacagaaattagttgggaaactgaattgggcaagtcaaatttatcc

SEQ ID NO: 80710 - DNA, 80 bp, synthetic construct
  source 1..80: mol_type = other DNA
cagaattagagttggcagaaaacagggagattttaaaagaccctgtgcatggagtatattatgatccatcaaaagactta

SEQ ID NO: 80711 - DNA, 80 bp, synthetic construct
  source 1..80: mol_type = other DNA
ggacgcttatttttcagtccctttagatgaaaactttagaaagtatactgcattcaccatacccagtacaaacaatgcga

SEQ ID NO: 80712 - DNA, 80 bp, synthetic construct
  source 1..80: mol_type = other DNA
tttagaaatagggcagcatagaacaaaaatagaagagttgagagctcatctattgagatgggggtttactactccagaca

SEQ ID NO: 80713 - DNA, 80 bp, synthetic construct
  source 1..80: mol_type = other DNA
aaaatatgcaagaaagagggcggctcacactaatgatgtaagacaattaacagaagtggtgcaaaaggtggtcatggaaa

SEQ ID NO: 80714 - DNA, 80 bp, synthetic construct
  source 1..80: mol_type = other DNA
cagcagagatctttggaatggaggaaaagataacctcccctctgaagcaggaacagaaagacagggaaccggtgccacct

SEQ ID NO: 80715 - DNA, 80 bp, synthetic construct
  source 1..80: mol_type = other DNA
ttagtttccctcaaatcactctttggcagcgaccccttgtcacagtaaaagtaggaggacagctaaaagaagctctctta

SEQ ID NO: 80716 - DNA, 80 bp, synthetic construct
  source 1..80: mol_type = other DNA
gatacaggagcagatgatacagtattagaagatataaatttgccaggaaaatggaaaccgaaaatgatagggggaattgg

SEQ ID NO: 80717 - DNA, 80 bp, synthetic construct
  source 1..80: mol_type = other DNA
aggctttatcaaggtaaaacagtatgatcagatacttatagaaatttgtggaaaaaaggctataggtacagtattagtag

SEQ ID NO: 80718 - DNA, 80 bp, synthetic construct
  source 1..80: mol_type = other DNA
cagtatttgctataaagaaaaaagacagcactaagtggaggaaattagtagacttcagagagctcaataaaagaacccag

SEQ ID NO: 80719 - DNA, 80 bp, synthetic construct
  source 1..80: mol_type = other DNA
ctccgaagcaggagcagaaaagcagggaacagacatcaccttcaatctccctcaaatcactctttggcaacgacctcttg

SEQ ID NO: 80720 - DNA, 80 bp, synthetic construct
  source 1..80: mol_type = other DNA
agggattaaagtaaggcaactgtgtagactccttaggggggccaaggcactaacagacatagtaccactgactgaagaag

SEQ ID NO: 80721 - DNA, 80 bp, synthetic construct
  source 1..80: mol_type = other DNA
gaaatatgcaaaaatgaggactgcccacaccaatgatgtaagacagttaacagaggcagtgcaaaaagtagcccaggaat

SEQ ID NO: 80722 - DNA, 80 bp, synthetic construct
  source 1..80: mol_type = other DNA
cagcagagatagtggggatgggggaagagctagcctcccctccgaagcaggagcagaaaagcagggaacagacatcacct

SEQ ID NO: 80723 - DNA, 80 bp, synthetic construct
  source 1..80: mol_type = other DNA
gttaatacccctcccctagtaaagttgtggtatcagctggaaaaagaacccatattaggagcagaaactttctatgtaga

SEQ ID NO: 80724 - DNA, 80 bp, synthetic construct
  source 1..80: mol_type = other DNA
tcaatctccctcaaatcactctttggcaacgacctcttgtcacagtaagaataggggggcagctaaaagaagctctatta

SEQ ID NO: 80725 - DNA, 80 bp, synthetic construct
  source 1..80: mol_type = other DNA
gccctacacctgtcaacataattggaaggaatatgttgacccagattggttgtactttaaattttccaattagtcctatt

SEQ ID NO: 80726 - DNA, 80 bp, synthetic construct
  source 1..80: mol_type = other DNA
gtacagcctatagagctgccaaacaaggatagctggactgtcaatgatatacagaagttagtgggaaaattaaactgggc

SEQ ID NO: 80727 - DNA, 80 bp, synthetic construct
  source 1..80: mol_type = other DNA
aagtcagatttacccagggattaaagtaaggcaactgtgtaaactccttaggggagccaaagcactaacagaaatagtac

SEQ ID NO: 80728 - DNA, 80 bp, synthetic construct
  source 1..80: mol_type = other DNA
ccatcaaaagacttaatagctgaaatacagaaacagggaaatgaccaatggacgtatcaaatttatcaagaaccattcaa

SEQ ID NO: 80729 - DNA, 80 bp, synthetic construct
  source 1..80: mol_type = other DNA
aaatctgaaaacagggaaatatgcaaaaatgaggactgcccacactaatgatgtaaagcagttaacagaggcagtgcaaa

SEQ ID NO: 80730 - DNA, 80 bp, synthetic construct
  source 1..80: mol_type = other DNA
cagcgccaacagtcccaacagccccaccagcagagagcttcaggttcgaggagacaaccccctctccgaagcagaagcag

SEQ ID NO: 80731 - DNA, 80 bp, synthetic construct
  source 1..80: mol_type = other DNA
atgtcaatacccctcccctagtaaagttatggtaccagctagagaaagaacccatggcaggagtagaaactttctatgta

SEQ ID NO: 80732 - DNA, 80 bp, synthetic construct
  source 1..80: mol_type = other DNA
gaagacagggaagccttaacttccctcaaatcactctttggcagcgaccccttgttaccataagagtagggggacagtca

SEQ ID NO: 80733 - DNA, 80 bp, synthetic construct
  source 1..80: mol_type = other DNA
agggaggctctcttagacacaggagcagatgatacagtattagaagaaataaaattgccagggaattggaaaccaaaaat

SEQ ID NO: 80734 - DNA, 80 bp, synthetic construct
  source 1..80: mol_type = other DNA
acccatataacactccagtatttgctataaaaaagaaagacagtactaagtggagaaaattagtagatttcagggaactc

SEQ ID NO: 80735 - DNA, 80 bp, synthetic construct
  source 1..80: mol_type = other DNA
aataaaagaactcaagacttttgggaagttcaattaggaattccacacccagcagggttaaaaaagaaaaaatcagtgac

SEQ ID NO: 80736 - DNA, 80 bp, synthetic construct
  source 1..80: mol_type = other DNA
agtactggatgtgggggatgcatatttttcagttcctttagatgaagatttcaggaagtatactgcattcaccataccca

SEQ ID NO: 80737 - DNA, 80 bp, synthetic construct
  source 1..80: mol_type = other DNA
gtataaacaatgaaacaccaggaattagatatcaatataatgtgcttccacagggatggaaaggatcaccatcaatattc

SEQ ID NO: 80738 - DNA, 80 bp, synthetic construct
  source 1..80: mol_type = other DNA
caaagcagcatgacaaaaatcttagagccctttagggcacaaaacccagaaatagttatctatcaatatatggatgactt

SEQ ID NO: 80739 - DNA, 80 bp, synthetic construct
  source 1..80: mol_type = other DNA
gtatgtaggatctgacttagaaatagggcaacatagagcaaaaatagaggagttaagagaacatctattaaggtggggat

SEQ ID NO: 80740 - DNA, 80 bp, synthetic construct
  source 1..80: mol_type = other DNA
aaaatcttaacaccctttagaacaaaaaatccagaaatggttatataccaatacatggatgatttgtatgtagggtctga

SEQ ID NO: 80741 - DNA, 80 bp, synthetic construct
  source 1..80: mol_type = other DNA
agaaacatcaaaaggaacctccgtttctctggatggggtatgagctccatcctgacaaatggacagtacagcctatacag

SEQ ID NO: 80742 - DNA, 80 bp, synthetic construct
  source 1..80: mol_type = other DNA
atagctgaaatacaaaaacaagggcatgaccagtggacatatcagatttaccaagaaccattcaagaatctaaaaacagg

SEQ ID NO: 80743 - DNA, 80 bp, synthetic construct
  source 1..80: mol_type = other DNA
cagcagagagcttggggatgggggaagagataacctcctctccgaagcaggaacagagggacagggaacagccccctccc

SEQ ID NO: 80744 - DNA, 80 bp, synthetic construct
  source 1..80: mol_type = other DNA
tttgtcaatacccctcccctagtaaaactatggtaccagttagaaacagaacccatagcaggagcagaaaccttctatgt

SEQ ID NO: 80745 - DNA, 80 bp, synthetic construct
  source 1..80: mol_type = other DNA
gacctacacctgtcaacatcattgggcgaaatatgttgactcagattggttgtactctaaattttccaattagtccaatt

SEQ ID NO: 80746 - DNA, 80 bp, synthetic construct
  source 1..80: mol_type = other DNA
ggacgcatatttttcagtccccttagatgaagatttcaggaagtatactgcattcaccatacccagtattaataatgaga

SEQ ID NO: 80747 - DNA, 80 bp, synthetic construct
  source 1..80: mol_type = other DNA
ttagagccctttagattaaaaaatccagacatagtcatctatcaatacatggatgatttgtatgtaggatctgatttaga

SEQ ID NO: 80748 - DNA, 80 bp, synthetic construct
  source 1..80: mol_type = other DNA
aatagggcagcatagaacaaaaatagaggaattaagaactcatttattgaaatggggatttaccacaccagacaagaagc

SEQ ID NO: 80749 - DNA, 80 bp, synthetic construct
  source 1..80: mol_type = other DNA
gaaatacaaaaacaggggaatgaccaatggacatatcaaatttaccaagaaccatttaaaaatctgaaaacaggaaagta

SEQ ID NO: 80750 - DNA, 80 bp, synthetic construct
  source 1..80: mol_type = other DNA
cagcagaggacttggggatgggggaagagatgacttccactcagaagcaggagcagaaagaggggggaccactttatcct

SEQ ID NO: 80751 - DNA, 80 bp, synthetic construct
  source 1..80: mol_type = other DNA
tgcaaaaaggaggactgcccacactaatgatgtaaagcagttagcagaggcagtgcaaaagatagccctggaaagcatag

SEQ ID NO: 80752 - DNA, 80 bp, synthetic construct
  source 1..80: mol_type = other DNA
taatatggggaaggactcctaaatttaggttacccatccagagagaaacatgggaagcatggtggacggattattggcaa

SEQ ID NO: 80753 - DNA, 80 bp, synthetic construct
  source 1..80: mol_type = other DNA
tccctcagatcactctttggcaacgaccccttgtcacaataaaagtagggggacaattaaaggaggctctcttagacaca

SEQ ID NO: 80754 - DNA, 80 bp, synthetic construct
  source 1..80: mol_type = other DNA
tatcaaagtaagacagtatgatcaaatagttatggaaatttgtggaaaaaaggctataggtacagtattggtaggaccta

SEQ ID NO: 80755 - DNA, 80 bp, synthetic construct
  source 1..80: mol_type = other DNA
ttgctataaagaaaaaggacagtactaagtggagaaaattagtagatttcagagagctcaacaagagaactcaggacttc

SEQ ID NO: 80756 - DNA, 80 bp, synthetic construct
  source 1..80: mol_type = other DNA
agggaagccttaacttccctcaaatcactctttggcagcgacccttagttacaataaaagtagggggacagctaagggag

SEQ ID NO: 80757 - DNA, 80 bp, synthetic construct
  source 1..80: mol_type = other DNA
aggaattggaggttttatcaaagtaaaacagtatgatcaaataatgatagaaatttgtggaaaaaaggctataggtacag

SEQ ID NO: 80758 - DNA, 80 bp, synthetic construct
  source 1..80: mol_type = other DNA
caatggaaccaacagctcctccagcagagagcttcaggttcgaggagacaaccccctcctcgaagcaggagccgaaagaa

SEQ ID NO: 80759 - DNA, 80 bp, synthetic construct
  source 1..80: mol_type = other DNA
gatagagcagcatagaacaaaaatagaggagttgagagctcatctattgagctgggggtttactacaccagacaagaaac

SEQ ID NO: 80760 - DNA, 80 bp, synthetic construct
  source 1..80: mol_type = other DNA
taaagtaaagcaactgtgtaaactccttaggggagctaaagcactaacagatatagtaccactgactgaagaagcagaat

SEQ ID NO: 80761 - DNA, 80 bp, synthetic construct
  source 1..80: mol_type = other DNA
cagcagagatcttggggatgggggaagagataacctcccctccgaagcaggagcagagagacagggatcctcctttagtt

SEQ ID NO: 80762 - DNA, 80 bp, synthetic construct
  source 1..80: mol_type = other DNA
aacagaaatttgtgaagaaatggaaaaggaaggaaaaatttcaaaaattgggcctgaaaatccatacaatactccaatat

SEQ ID NO: 80763 - DNA, 80 bp, synthetic construct
  source 1..80: mol_type = other DNA
atatttctcagttcctttgcataaagattttagaaagtatactgcattcactatacctagtacaaataatgagacaccag

SEQ ID NO: 80764 - DNA, 80 bp, synthetic construct
  source 1..80: mol_type = other DNA
aggttttatcaaagtaaaacagtatgaacaaatacctatagaaatttgtggacaaaaggctataggtacagtactagtgg

SEQ ID NO: 80765 - DNA, 80 bp, synthetic construct
  source 1..80: mol_type = other DNA
caatatttgctataaagaaaaaagatagcactaaatggaggaaattagtagatttcagagagctaaacaaaagaactcaa

SEQ ID NO: 80766 - DNA, 80 bp, synthetic construct
  source 1..80: mol_type = other DNA
taatatggggaagagttcctaaatttagattacccatccagaaagagacatgggatacatggtggacagactattggcaa

SEQ ID NO: 80767 - DNA, 80 bp, synthetic construct
  source 1..80: mol_type = other DNA
gaaccttttagaaaacaaaatccagaaatgattatctatcaatacatggatgatttgtatgtaggatctgacttagaaat

SEQ ID NO: 80768 - DNA, 80 bp, synthetic construct
  source 1..80: mol_type = other DNA
aaagatagctggactgtcaatgatatacagaagttagtgggaaaattaaattgggcaagtcagatttacgcagggattaa

SEQ ID NO: 80769 - DNA, 80 bp, synthetic construct
  source 1..80: mol_type = other DNA
atacagaagcaagaaccaggccaatggacataccaaatctatcaggagccatttaaaaatctaaaaacaggaaaatatgc

SEQ ID NO: 80770 - DNA, 80 bp, synthetic construct
  source 1..80: mol_type = other DNA
aagaaagaggtctgctcacactaatgatgtaagacaattagtagaagtggtgcaaaaggtgaccatggaaagcatagtaa

SEQ ID NO: 80771 - DNA, 80 bp, synthetic construct
  source 1..80: mol_type = other DNA
cagcagagagcttcgggtttggggaggagatagccccctctcagaagcagggacagaaggacaaagaacctttaacttcc

SEQ ID NO: 80772 - DNA, 80 bp, synthetic construct
  source 1..80: mol_type = other DNA
caaagtaaggcagtatgatcaaatacccatagaaatctgtggacataaagctataggtacagtattagtaggacctacac

SEQ ID NO: 80773 - DNA, 80 bp, synthetic construct
  source 1..80: mol_type = other DNA
agggatcaaagtaagacaactgtgtaaattacttaggggaaccaaagcactaacagaagtagtatcaatgactgaagaag

SEQ ID NO: 80774 - DNA, 80 bp, synthetic construct
  source 1..80: mol_type = other DNA
cagcagagagcttcaagttcgaggagacaaccccctccccgaagcaggagcagaaagacaaggaaccctacaaggaagct

SEQ ID NO: 80775 - DNA, 80 bp, synthetic construct
  source 1..80: mol_type = other DNA
aaaatcttagagccctttagggcacgaaacccagagatagttatctatcaatacatggatgacttgtatgtaggatctga

SEQ ID NO: 80776 - DNA, 80 bp, synthetic construct
  source 1..80: mol_type = other DNA
agtaaagcaattgtgtaaactcctcagaggagccaaagcactaacagatatagtaaccttaactgaggaagcagaattag

SEQ ID NO: 80777 - DNA, 80 bp, synthetic construct
  source 1..80: mol_type = other DNA
atacaaaaacaagggcaagaccaatggacctatcaaatttttcaggagccatttaaaaatttaaaaacaggaaaatatgc

SEQ ID NO: 80778 - DNA, 80 bp, synthetic construct
  source 1..80: mol_type = other DNA
gcagatgatacagtattagaagacataaaattgccaggaaattggaaaccaaaaatgataggaggaattggaggttttat

SEQ ID NO: 80779 - DNA, 80 bp, synthetic construct
  source 1..80: mol_type = other DNA
agaaatttgtacagatatggaaaaggaaggaaaaatttcaagaattgggcctgaaaatccatacaatactcccatatttg

SEQ ID NO: 80780 - DNA, 80 bp, synthetic construct
  source 1..80: mol_type = other DNA
atagagcaaaaatagaggagctaagagagcatctattgaggtggggatttactacaccagacaaaaagcatcagaaggaa

SEQ ID NO: 80781 - DNA, 80 bp, synthetic construct
  source 1..80: mol_type = other DNA
cctccatttctttggatgggatatgaactccatcctgacaagtggacagtccagcctatagaactgccagaaaaggaaag

SEQ ID NO: 80782 - DNA, 80 bp, synthetic construct
  source 1..80: mol_type = other DNA
ctggactgtcaatgatatacaaaagttagtgggaaaattaaattgggcaagtcagatttactcagggatcaaagtaaagc

SEQ ID NO: 80783 - DNA, 80 bp, synthetic construct
  source 1..80: mol_type = other DNA
acaggggcaggatcaatggacatatcaaatttaccaagaaccattcaaaaatctgaaaacagggaaatatgcaaaaatga

SEQ ID NO: 80784 - DNA, 80 bp, synthetic construct
  source 1..80: mol_type = other DNA
ggggaagagacagcctcccctccgaagcaggagccgaaagacaaggaaccatacaaggaacccttaatttccctcaaatc

SEQ ID NO: 80785 - DNA, 80 bp, synthetic construct
  source 1..80: mol_type = other DNA
agaatgcccacactaatgatgtaaagcagctaacagaggcggtgcaaaaaatagccatggaaagcatagtaatatggggg

SEQ ID NO: 80786 - DNA, 80 bp, synthetic construct
  source 1..80: mol_type = other DNA
aagattcctaaatttagattacccatgcagaaagaaacatgggagacatggtggacagactattggcaagccacctggat

SEQ ID NO: 80787 - DNA, 80 bp, synthetic construct
  source 1..80: mol_type = other DNA
actctttggcaacgaccccttgtcacagtaaaaatagagggacaactgagggaagctctattagatacaggagcagatga

SEQ ID NO: 80788 - DNA, 80 bp, synthetic construct
  source 1..80: mol_type = other DNA
tacagtattagaagacataaatttgccaggaaaatggaaaccaagaatgatagggggaattggaggtttcatcaaagtaa

SEQ ID NO: 80789 - DNA, 80 bp, synthetic construct
  source 1..80: mol_type = other DNA
ataattggaaggaatatgttgacccagattggttgtactttaaatttcccaataagtcctattgaaactgtaccagtaaa

SEQ ID NO: 80790 - DNA, 80 bp, synthetic construct
  source 1..80: mol_type = other DNA
attaaagccaggaatggatggcccaaaggtcaaacaatggccattgacagaagaaaaaataaaagcattaacagcaattt

SEQ ID NO: 80791 - DNA, 80 bp, synthetic construct
  source 1..80: mol_type = other DNA
cttccaacaaggggaggccagggaattttcctcagagcagatcagagccgacagccccaccagcagagctcttcgggatg

SEQ ID NO: 80792 - DNA, 80 bp, synthetic construct
  source 1..80: mol_type = other DNA
tccccttacatgaagattttagaaaatacactgcgttcaccatacctagtataaacaatgagacaccaggagtcaggtat

SEQ ID NO: 80793 - DNA, 80 bp, synthetic construct
  source 1..80: mol_type = other DNA
caatataatgtgcttccacagggatggaaaggatcaccatcgatattccaaagtagcatgacaaaaatcttagagccctt

SEQ ID NO: 80794 - DNA, 80 bp, synthetic construct
  source 1..80: mol_type = other DNA
agacatagagcggcatagaagaaaaatagaggaattaagggaacatctattgaagtggggatttaccacaccagacaaaa

SEQ ID NO: 80795 - DNA, 80 bp, synthetic construct
  source 1..80: mol_type = other DNA
agcatcagaaagaacctccatttctttggatgggttatgagctccatcctgataaatggacagtgcagcctatagaactg

SEQ ID NO: 80796 - DNA, 80 bp, synthetic construct
  source 1..80: mol_type = other DNA
aattagagtaaggcaattatgcaaatgcattaggggaaccaaagcactgacagaagtagtaccactgacagaagaagcag

SEQ ID NO: 80797 - DNA, 80 bp, synthetic construct
  source 1..80: mol_type = other DNA
cagcagagagctttgggtttggggaggagggagcaccctctcagaaacaggaacagaaggacaaggagctgtatccgtta

SEQ ID NO: 80798 - DNA, 80 bp, synthetic construct
  source 1..80: mol_type = other DNA
gtatgcaaaagtaaggggtacccacactaatgatgtaaaacaattaacagcggcagtgcaaaaaatagcccaagaatgta

SEQ ID NO: 80799 - DNA, 80 bp, synthetic construct
  source 1..80: mol_type = other DNA
ctttatcaaagtaagacaatatgatcaaatactagtagaaatctgtgggcataaagctataggtacaatattagtaggac

SEQ ID NO: 80800 - DNA, 80 bp, synthetic construct
  source 1..80: mol_type = other DNA
ttctgggaagtgcagctaggaataccacatcctgcagggctaaaaaagaaaaagtcagtaacagtactggatgtgggtga

SEQ ID NO: 80801 - DNA, 80 bp, synthetic construct
  source 1..80: mol_type = other DNA
caggaattagatatcagtacaatgtgcttccacaagggtggaaaggatcaccggccatattccaaagtagcatgacaaga

SEQ ID NO: 80802 - DNA, 80 bp, synthetic construct
  source 1..80: mol_type = other DNA
ttagagccctttagaaaacaaaaccctgaactagttatttaccaatacatggatgatttatatgtaggatcagacttaga

SEQ ID NO: 80803 - DNA, 80 bp, synthetic construct
  source 1..80: mol_type = other DNA
aatagagcaacatagagcaaaaatagaggagttgagagctcatttgttaaagtggggatttaccacaccagacaaaaaac

SEQ ID NO: 80804 - DNA, 80 bp, synthetic construct
  source 1..80: mol_type = other DNA
atcagaaagaacccccatttctgtggatgggatatgaacttcatcctgacaaatggacagtacagcctgtcaagctgcca

SEQ ID NO: 80805 - DNA, 80 bp, synthetic construct
  source 1..80: mol_type = other DNA
taaagtaaggcaactatgtaaacttcttagaggggccaaagcactaacagacatagtacaactgacaagggaggcagaat

SEQ ID NO: 80806 - DNA, 80 bp, synthetic construct
  source 1..80: mol_type = other DNA
gaaatacagaagcaaggggagggccaatggacatatcaaatttatcaagagccatttaaaaatctgaagacaggaaaata

SEQ ID NO: 80807 - DNA, 80 bp, synthetic construct
  source 1..80: mol_type = other DNA
cagcagagagcttcgggttcggggaggagatgaccccctctccgaagcaggagttgaagaacagggaacctcccttagct

SEQ ID NO: 80808 - DNA, 80 bp, synthetic construct
  source 1..80: mol_type = other DNA
tgcaaaaatgagagctgcccacactaatgatgtaaaacaattaacagaagcagtgcaaaagatagctgtagaatgcattg

SEQ ID NO: 80809 - DNA, 80 bp, synthetic construct
  source 1..80: mol_type = other DNA
taatatggggaaaaattcctaaatttagactacctatacaaaaagaaacatgggagacgtggtggatagagtattggcaa

SEQ ID NO: 80810 - DNA, 80 bp, synthetic construct
  source 1..80: mol_type = other DNA
gccacatggattcctgagtgggagtttgttaacacccctcatctagtaaagttatggtatcagttagaaacagaacccaa

SEQ ID NO: 80811 - DNA, 80 bp, synthetic construct
  source 1..80: mol_type = other DNA
tatcaaagtaagacagtatgagcaagtaaacatggaaatcgaaggaaaaaaggctgtaggtacagtattagtaggaccta

SEQ ID NO: 80812 - DNA, 80 bp, synthetic construct
  source 1..80: mol_type = other DNA
aacagaaatttgtacagatatggaaaaagaaggaaaaatttcaagagtaggacctgaaaatccatacaacactccaatat

SEQ ID NO: 80813 - DNA, 80 bp, synthetic construct
  source 1..80: mol_type = other DNA
ttgccataaaaaagaaggacagtactaaatggagaaaattagtggatttcagagaactcaataaaagaactcaagatttc

SEQ ID NO: 80814 - DNA, 80 bp, synthetic construct
  source 1..80: mol_type = other DNA
atatttttcagtccccttgcatgaagaattcaggaagtacactgcattcaccatacctagtataaacaatgagacaccag

SEQ ID NO: 80815 - DNA, 80 bp, synthetic construct
  source 1..80: mol_type = other DNA
actgtgtaaactcatcaggggaaccaaagcactaacagaaatagtaccactgactgaagaagcagaattagaattggcag

SEQ ID NO: 80816 - DNA, 80 bp, synthetic construct
  source 1..80: mol_type = other DNA
gactgcccacactaatgatgtaaaacagttaacagaggcagtacaaaagatagccatggaaagcatagtaatatggggaa

SEQ ID NO: 80817 - DNA, 80 bp, synthetic construct
  source 1..80: mol_type = other DNA
cagcagagagcttcaatttcgagacccctcctcagaaacaggagcagaaggacaaggagcccttaatttccctcaaatca

SEQ ID NO: 80818 - DNA, 80 bp, synthetic construct
  source 1..80: mol_type = other DNA
aaaaagacagcactaaatggagaaaattagtagatttcagagagctcaacaaaagaacacaagacttttgggaagttcaa

SEQ ID NO: 80819 - DNA, 80 bp, synthetic construct
  source 1..80: mol_type = other DNA
ttgggaataccgcatccagcgggcctaaaaaagaaaaaatcagtaacagtactggatgtgggggatgcatatttttcagt

SEQ ID NO: 80820 - DNA, 80 bp, synthetic construct
  source 1..80: mol_type = other DNA
tcctttacatgagagctttagaaagtatactgcattcaccatacctagtacaaacaatgaggcaccaggaatcaggtatc

SEQ ID NO: 80821 - DNA, 80 bp, synthetic construct
  source 1..80: mol_type = other DNA
agtacaatgtgctaccacagggatggaaaggatcgccagcaatattccagagtagcatgacaaaaatcttagagcccttt

SEQ ID NO: 80822 - DNA, 80 bp, synthetic construct
  source 1..80: mol_type = other DNA
agatcaaaaaatccagaaataattatctatcaatacatggatgacttgtatgtaggatctgatctagaaatagggcagca

SEQ ID NO: 80823 - DNA, 80 bp, synthetic construct
  source 1..80: mol_type = other DNA
ccctttagatcaaaaaatccagacataataatttatcaatacatggatgacttgtatgtaggatctgatttagaaattgg

SEQ ID NO: 80824 - DNA, 80 bp, synthetic construct
  source 1..80: mol_type = other DNA
cagcagagagcttcaagttcgaggaggcaacccctgctccgaagcaggagtcgaaagacaaggaaaccttaacctccctc

SEQ ID NO: 80825 - DNA, 80 bp, synthetic construct
  source 1..80: mol_type = other DNA
agtaaaacagtatgatgacatagatatagaaatttgtgggaaaaaggctacaggtacagtactagtaggacctacacctg

SEQ ID NO: 80826 - DNA, 80 bp, synthetic construct
  source 1..80: mol_type = other DNA
ttcagttccgttagatgaaggcttcagaaaatatactgcattcaccatacctagtataaataatgaaacaccaggagtta

SEQ ID NO: 80827 - DNA, 80 bp, synthetic construct
  source 1..80: mol_type = other DNA
actacttagagctttcacagaagaaggaacaatcgtgggagaaatctcaccattaccttctcttccaggacacactaatg

SEQ ID NO: 80828 - DNA, 80 bp, synthetic construct
  source 1..80: mol_type = other DNA
acagataacgtttatgcaagccttacaactactgcttgaagtggagcaagagataagaaccttctcgtttcagcttattt

SEQ ID NO: 80829 - DNA, 80 bp, synthetic construct
  source 1..80: mol_type = other DNA
ccctatccctggtgctggaagaattgatgatggagaaataaagaactgctctttcaacatcaccacaagcacaagcgaca

SEQ ID NO: 80830 - DNA, 80 bp, synthetic construct
  source 1..80: mol_type = other DNA
agtaacactacccctagtagtttggaaccgggagaaatgaaaaactgctctttcaatttcaccacaagcacaatggaaaa

SEQ ID NO: 80831 - DNA, 80 bp, synthetic construct
  source 1..80: mol_type = other DNA
ctgctgacactgagatctctacaagggactttccactggggactttccggggaggcgtggcctgggcgggactggggagt

SEQ ID NO: 80832 - DNA, 80 bp, synthetic construct
  source 1..80: mol_type = other DNA
ttggagagctggatctatatagaggaacgaaactacacgcagcgcctcattttgtgggtcaccatattcttgggaacaag

SEQ ID NO: 80833 - DNA, 80 bp, synthetic construct
  source 1..80: mol_type = other DNA
atggagggcgggtatattatataagagagaaactacacgcagcgcctcattttgtgggtcaccatattcttgggaacaag

SEQ ID NO: 80834 - DNA, 80 bp, synthetic construct
  source 1..80: mol_type = other DNA
tttacataatagattggtggtgtttacatttccaaatgagtttccatttgacgaaaacggaaatccagtgtatgagctta

SEQ ID NO: 80835 - DNA, 80 bp, synthetic construct
  source 1..80: mol_type = other DNA
gttttttaataaacatgcgacacaaacgttctgcaaaacgcacaaaacgtgcatcggccacccaactttataaaacatgc

SEQ ID NO: 80836 - DNA, 80 bp, synthetic construct
  source 1..80: mol_type = other DNA
tttaaatgcttgtgtaactattgtgtcatgcaacataaataaacttattgtttcaacacctactaattgtgttgtggtta

SEQ ID NO: 80837 - DNA, 80 bp, synthetic construct
  source 1..80: mol_type = other DNA
atcaatcaagatggaagcaaaactgtttgtgctattctgtacattcactatactgaaagctgatactatctgtgtgggct

SEQ ID NO: 80838 - DNA, 80 bp, synthetic construct
  source 1..80: mol_type = other DNA
cccgaccaccagtgagcaagaggaattataccagaacactaatgcatacgtctcagttgggtcatcaaagtacaaccgga

SEQ ID NO: 80839 - DNA, 80 bp, synthetic construct
  source 1..80: mol_type = other DNA
tctcttctggatacaaagatgttatactgtggtttagcttcggggcgtcatgctttgtacttttggctgtcatcatgggg

SEQ ID NO: 80840 - DNA, 80 bp, synthetic construct
  source 1..80: mol_type = other DNA
ttgggatgataatagggactcctgcttgtgacttacacctcaccggaacatgggacactttaatagagagaggcaattcc

SEQ ID NO: 80841 - DNA, 80 bp, synthetic construct
  source 1..80: mol_type = other DNA
acttctttaaaaaatctgctgtcttcaccctacctattattaatgatgcgacacgggggattaaatatcactatgtggtg

SEQ ID NO: 80842 - DNA, 80 bp, synthetic construct
  source 1..80: mol_type = other DNA
gagagaagcatccggagtattacaaagactgctgatatagaagtacaaagactgctgacacagaagggacttttcgctgg

SEQ ID NO: 80843 - DNA, 80 bp, synthetic construct
  source 1..80: mol_type = other DNA
gtgggaggtcttgttcaaatccaatttacaaagggcagtatgaactacagaccttggaactaaacatggaaacactaaat

SEQ ID NO: 80844 - DNA, 80 bp, synthetic construct
  source 1..80: mol_type = other DNA
caaaattacaaataaggtcaattccatcatcgacaaaatgaacacacaatttgaagctgtcgaccacgaattttcaaatc

SEQ ID NO: 80845 - DNA, 80 bp, synthetic construct
  source 1..80: mol_type = other DNA
tcccccgaagcacctggcaaggagttgacaccaacagtggaacaacaagatcctgcccctattctactggtgattcgtct

SEQ ID NO: 80846 - DNA, 80 bp, synthetic construct
  source 1..80: mol_type = other DNA
ttctacagaaatctcctatggataataaaaaccaagacagcagaatatccagtaattaatggaacttacaacaacactgg

SEQ ID NO: 80847 - DNA, 80 bp, synthetic construct
  source 1..80: mol_type = other DNA
gccacatgattcagatcgagcacccaaaccagcatgggccatgcaatcaaagcatcaatctttacactgagcgggctgca

SEQ ID NO: 80848 - DNA, 80 bp, synthetic construct
  source 1..80: mol_type = other DNA
gagcgggtttgaaatggtttgggatccaaatggatggaccgaaacagatagtaacttctcattgaaacaagacatcatag

SEQ ID NO: 80849 - DNA, 80 bp, synthetic construct
  source 1..80: mol_type = other DNA
gccccagagaaattatcgggcaattcctctctctgccctattagtggatgggccatatacagtaaagacaatagtataag

SEQ ID NO: 80850 - DNA, 80 bp, synthetic construct
  source 1..80: mol_type = other DNA
tattcgtcagagagggaaagattgtccatataagcccattgtcagggagtgctcagcacatagaagaatgttcctgttat

SEQ ID NO: 80851 - DNA, 80 bp, synthetic construct
  source 1..80: mol_type = other DNA
atgaatgcaatataacagaggtagtgtatttgaataatactaccattgaaaaagaaatttgtcctaaagtggtagaatac

SEQ ID NO: 80852 - DNA, 80 bp, synthetic construct
  source 1..80: mol_type = other DNA
tattgcgtgcggccgcatgaatccagatcagaagataatatcaattggtgtagtgaatactattctatcaacaaaagccc

SEQ ID NO: 80853 - DNA, 80 bp, synthetic construct
  source 1..80: mol_type = other DNA
tcaatggaggacccggagtcaaaggatttggcttcaaaacgggtaatgatgtatggttgggaaggactgtatccaacagt

SEQ ID NO: 80854 - DNA, 80 bp, synthetic construct
  source 1..80: mol_type = other DNA
ggaagatcaggctttgagatcatcaaagtcacagaggggtggatcaactcccccaatcatgccaaatcagttacacaaac

SEQ ID NO: 80855 - DNA, 80 bp, synthetic construct
  source 1..80: mol_type = other DNA
attggtgtcaaacaatgattggtcaggttactcagggagtttcattgttgagagcaatggatgtttccagccctgcttct

SEQ ID NO: 80856 - DNA, 80 bp, synthetic construct
  source 1..80: mol_type = other DNA
atattgagcttataagggggaagcccaataagaatgataacgtttcctggacaagcaatagtatagttactttctgtgga

SEQ ID NO: 80857 - DNA, 80 bp, synthetic construct
  source 1..80: mol_type = other DNA
gcctgatggttccaatattgggtttatgcccaagtaacagaaaaaagctccttgtttctacttatagtgagtcgtattaa

SEQ ID NO: 80858 - DNA, 80 bp, synthetic construct
  source 1..80: mol_type = other DNA
acagtaacatccccagtggtaccaaactgcagtgacaccataattacctacaacagcactgtagtaaacaacataacaac

SEQ ID NO: 80859 - DNA, 80 bp, synthetic construct
  source 1..80: mol_type = other DNA
aacaatagtaactgaagcggaaaggcatttcaagtcctcactgccactgtgccccttccgaggtttcttcccttttcaca

SEQ ID NO: 80860 - DNA, 80 bp, synthetic construct
  source 1..80: mol_type = other DNA
aggacaatgcaatacgattgggtgagaacaaagacgtaatagtcacaagggagccttatgttagttgtgactataatgat

SEQ ID NO: 80861 - DNA, 80 bp, synthetic construct
  source 1..80: mol_type = other DNA
tgctggtcttttgccctcgcccaaggggctctactggggactaaccacagcaatggaaccatcaaagacagaacaccgta

SEQ ID NO: 80862 - DNA, 80 bp, synthetic construct
  source 1..80: mol_type = other DNA
tagatcgctgattcggttcccaataggagtagctccagtgctgggtaattacaaggagatatgtgttgcttggtcaagta

SEQ ID NO: 80863 - DNA, 80 bp, synthetic construct
  source 1..80: mol_type = other DNA
gcagttgcttcgatggaaaggaatggatgcatgtttgcatgactgggaacgacaatgatgcaagtgcccaaataatatat

SEQ ID NO: 80864 - DNA, 80 bp, synthetic construct
  source 1..80: mol_type = other DNA
gcagggaaaatgacagactccattaaatcatggaggaaggacatactaagaactcaagagtctgaatgtcaatgcattga

SEQ ID NO: 80865 - DNA, 80 bp, synthetic construct
  source 1..80: mol_type = other DNA
cgggacttgtgttgtcgctgttacagatggtcctgcggctaataatgcagaccaccgaatttactggatacgaaaaggga

SEQ ID NO: 80866 - DNA, 80 bp, synthetic construct
  source 1..80: mol_type = other DNA
ttcttattggaattgggaatctggttttcaacaccgttatacatgagaaagtaggagaacaaaaaactgtggcatatcca

SEQ ID NO: 80867 - DNA, 80 bp, synthetic construct
  source 1..80: mol_type = other DNA
gagtaataaagtatgaaaacattcccaaaacaaagataaaacatttagaggagtgttcttgttatgtggacattgatgta

SEQ ID NO: 80868 - DNA, 80 bp, synthetic construct
  source 1..80: mol_type = other DNA
tactgcatatgcagggacaattggaaaggttccaacaggccttggatgaggatcaacaatgagaccatactagaaacggg

SEQ ID NO: 80869 - DNA, 80 bp, synthetic construct
  source 1..80: mol_type = other DNA
gtatgtatgcagcaaattccattcagacactcccaggccagatgatccttcaacagtatcatgtgattccccaagtaatg

SEQ ID NO: 80870 - DNA, 80 bp, synthetic construct
  source 1..80: mol_type = other DNA
ccactcactcaaccaaccaacggaaatgaatccaaatcaaaggataatggcacttggctctgtttctctaactattgcga

SEQ ID NO: 80871 - DNA, 80 bp, synthetic construct
  source 1..80: mol_type = other DNA
atctccagcagaacgagtgcaccaaccccccgaacaaccaagcagtgccacacgaaccaatcataatagaaaagaacaga

SEQ ID NO: 80872 - DNA, 80 bp, synthetic construct
  source 1..80: mol_type = other DNA
atggattccaatactgtgtcaagctttcaggtagactgctttctttggcatgtccgcaagcgattcagtaccagagaact

SEQ ID NO: 80873 - DNA, 80 bp, synthetic construct
  source 1..80: mol_type = other DNA
tgaattcagtgaaatgtacaggtggaagttatgattttagtataccagtaggtgcatggccagtaatagatgggcgctct

SEQ ID NO: 80874 - DNA, 80 bp, synthetic construct
  source 1..80: mol_type = other DNA
gagattataattagatttaaatttggtaatagttcttgtaaactagggggactaggttataaatggtccgaaatatcata

SEQ ID NO: 80875 - DNA, 80 bp, synthetic construct
  source 1..80: mol_type = other DNA
aacagttttgtttacattacttaaagcttcaattccaacaatgaaaatagcattgaaaacatcaaaatgttcatataaag

SEQ ID NO: 80876 - DNA, 80 bp, synthetic construct
  source 1..80: mol_type = other DNA
gctgtggatgttgacgatggtcattttgtcaacatagagctggagtaaaaaactaccttgtttctacttatagtgagtcg

SEQ ID NO: 80877 - DNA, 80 bp, synthetic construct
  source 1..80: mol_type = other DNA
agaatggaaacatgcggtgcactatttgtatataagtttggaaaaaacacccttgtttctacttatagtgagtcgtatta

SEQ ID NO: 80878 - DNA, 80 bp, synthetic construct
  source 1..80: mol_type = other DNA
gtagtgtgctgtggacttctaatagcattgtagccctctgtggatccaaagagcgattaggatcatggtcctggcatgtg

SEQ ID NO: 80879 - DNA, 80 bp, synthetic construct
  source 1..80: mol_type = other DNA
tatatgctgtcatttgacccggctaagcagactatggccgctggcccgcatagcctcagctacactctaacgcctgcagg

SEQ ID NO: 80880 - DNA, 80 bp, synthetic construct
  source 1..80: mol_type = other DNA
tctcgaggtttctattgtctctgctggacttgattgtaaggttgtctttccacccggcgtcgcaacgccctcagcccctg

SEQ ID NO: 80881 - DNA, 80 bp, synthetic construct
  source 1..80: mol_type = other DNA
gggaggtgtctgcattttgctcggctttatacaggttcaaccgctgtgtccagcggcactctcttatcggtggcttgtgg

SEQ ID NO: 80882 - DNA, 80 bp, synthetic construct
  source 1..80: mol_type = other DNA
cctgtgccccggatctgccgccatccactaacattgatatgcctactaatgcccctcttcctgtaacccctgcacagacc

SEQ ID NO: 80883 - DNA, 80 bp, synthetic construct
  source 1..80: mol_type = other DNA
acattgatatgcctactaatgcccctcttcctgtaacccctgcacagacccagccaccgacccctgagcgggtggcaccc

SEQ ID NO: 80884 - DNA, 80 bp, synthetic construct
  source 1..80: mol_type = other DNA
cagccaccgacccctgagcgggtggcaccccccccggatttgcctgaccgtggtaccggccccatgaccggtgcccctgc

SEQ ID NO: 80885 - DNA, 80 bp, synthetic construct
  source 1..80: mol_type = other DNA
ggcgtcccctacgccgccgcagtccataacccatttgtcagggccccgccggcgactacttcatacctacccagatggct

SEQ ID NO: 80886 - DNA, 80 bp, synthetic construct
  source 1..80: mol_type = other DNA
cgggagtattgatttattttccttgtgcctcccttcagttttgtttctttatttctcttttctgcgtctcgcgctccccc

SEQ ID NO: 80887 - DNA, 80 bp, synthetic construct
  source 1..80: mol_type = other DNA
aaaaataatttcagaacccaggagtcggaaagcgtttttaccaaaggaactgccccagtagtaatgacagatggaagcgg

SEQ ID NO: 80888 - DNA, 80 bp, synthetic construct
  source 1..80: mol_type = other DNA
ttcagggaaagctgtaactaaaatattattcattgagaaggggaagatcgttcatattagcacattgtcaggaagtgctc

SEQ ID NO: 80889 - DNA, 80 bp, synthetic construct
  source 1..80: mol_type = other DNA
agcaaggaccccaaagatttccgcgatttgggcatctgtccccagctccctggtcccgggggtctccctggaggcaatca

SEQ ID NO: 80890 - DNA, 80 bp, synthetic construct
  source 1..80: mol_type = other DNA
gctccctggtcccgggggtctccctgggggcaatcagtttcccgattggctccaatgggtctttacaatgcagaatatcg

SEQ ID NO: 80891 - DNA, 80 bp, synthetic construct
  source 1..80: mol_type = other DNA
ggctagaaaggtggcatccaccctcactggggatcaaagagtcggactcataccgaggaatggtgtggaccattgggatg

SEQ ID NO: 80892 - DNA, 80 bp, synthetic construct
  source 1..80: mol_type = other DNA
tcgaccgaaacagaatcaccgcctttagacaattggctgcagaaaacaaatatgggttggtggacaccatgagagttggc

SEQ ID NO: 80893 - DNA, 80 bp, synthetic construct
  source 1..80: mol_type = other DNA
tatcctccaaagacattaaggaggaaggaaagaagggcaaaaacaaaaccggccgtggcaagaaacacactgcattttct

SEQ ID NO: 80894 - DNA, 80 bp, synthetic construct
  source 1..80: mol_type = other DNA
ggtaaacccccaaagcccaatgtgctggaggcagctaaacaaaccatcatcaacgtcctcgagcaaactttggatccccc

SEQ ID NO: 80895 - DNA, 80 bp, synthetic construct
  source 1..80: mol_type = other DNA
cttggaacctgtgttactcccaatgcctgatgtcagaagtactttgtttcatttcaatcaaaaggatgaacctaaaatga

SEQ ID NO: 80896 - DNA, 80 bp, synthetic construct
  source 1..80: mol_type = other DNA
ggcttattgctatgctttacactcctctccgctctaatggttctggtgatgatgttttcaccgtttcatgtaggatcctt

SEQ ID NO: 80897 - DNA, 80 bp, synthetic construct
  source 1..80: mol_type = other DNA
ccctctccattgatgagatggtcaccagtcctaatgagtccatagttgtccagccacagaatggcagagtcacgctggac

SEQ ID NO: 80898 - DNA, 80 bp, synthetic construct
  source 1..80: mol_type = other DNA
ggtgagctgttgggcacaactcaattgcaagcatgcaacatctgctctttgagagggaggatcacagggcaggttcccaa

SEQ ID NO: 80899 - DNA, 80 bp, synthetic construct
  source 1..80: mol_type = other DNA
tgaacaacacatgtggaacctgcagatcacaaacctaaatggtacacaatttgaccccacggatgatgtcccagcccccc

SEQ ID NO: 80900 - DNA, 80 bp, synthetic construct
  source 1..80: mol_type = other DNA
ttggtgtgcccgattttgcaggtgaggtttttggtgtacttagtcagagaaacaggggtgagggcaacccagcaaacagg

SEQ ID NO: 80901 - DNA, 80 bp, synthetic construct
  source 1..80: mol_type = other DNA
gctcacgatgcagtcgtggccacttatagtgacaagtacacccccaaattgggcttagtgcaaattggaacttggaacac

SEQ ID NO: 80902 - DNA, 80 bp, synthetic construct
  source 1..80: mol_type = other DNA
caatgatgttgaaaatcagccaacaaaattcacaccaattggcctgaatgaggttagtgatggccatcggttcgaacagt

SEQ ID NO: 80903 - DNA, 80 bp, synthetic construct
  source 1..80: mol_type = other DNA
ggaccctgcctaggtactctggtgccctaactctaaatatgaacttggctcctgctgtagccccactctttcctggagag

SEQ ID NO: 80904 - DNA, 80 bp, synthetic construct
  source 1..80: mol_type = other DNA
cgccttctcttcttccgctcttatgtaccattgaaaggtggatttgggaaccctgctatagattgtctggtgcctcaaga

SEQ ID NO: 80905 - DNA, 80 bp, synthetic construct
  source 1..80: mol_type = other DNA
tagtcaggtatgtcaacccagacaccgggcgtgtcctctttgaggccaaactccacaagggtgggttcttaactgtgtca

SEQ ID NO: 80906 - DNA, 80 bp, synthetic construct
  source 1..80: mol_type = other DNA
agcaccagtacagggcctgttgtggtgccagccaatggttatttcagatttgattcttgggttaatcaattttattctct

SEQ ID NO: 80907 - DNA, 80 bp, synthetic construct
  source 1..80: mol_type = other DNA
gtttagcaggtgatgtgcttagtaatggcctcggttcgttgatcaatgccggagccaatgctattaatcaaagagcagaa

SEQ ID NO: 80908 - DNA, 80 bp, synthetic construct
  source 1..80: mol_type = other DNA
tatgattttaatagacaattgcagcaaaattcttttaatcatgataaagaaatgttgaatgcccagatccaagcaacaaa

SEQ ID NO: 80909 - DNA, 80 bp, synthetic construct
  source 1..80: mol_type = other DNA
acaattgcaggctgatatgatagcaatcaaacaaggagtgctggctgctgggggcttttccccaactgacgcggccagag

SEQ ID NO: 80910 - DNA, 80 bp, synthetic construct
  source 1..80: mol_type = other DNA
gagctgtcaatgcacccatgacccaagcactggattggagcggcactaggtactgggcccctggatcaatgaagaccacc

SEQ ID NO: 80911 - DNA, 80 bp, synthetic construct
  source 1..80: mol_type = other DNA
agctactctgggaagtttgtgtccatgaaccctgtcaggcaggttgaattctcgcaacccagaaagagtgcaactacacc

SEQ ID NO: 80912 - DNA, 80 bp, synthetic construct
  source 1..80: mol_type = other DNA
atcaagtgccagttctgtgtcttccggtagaactaactcaacaaactccactcaatcaactgttgtcagtgcttcttcag

SEQ ID NO: 80913 - DNA, 80 bp, synthetic construct
  source 1..80: mol_type = other DNA
tgccaccttccagaggctcccctgcttcctctactttgtcaagggctacagctagaacatccaattgggttgaagaacaa

SEQ ID NO: 80914 - DNA, 80 bp, synthetic construct
  source 1..80: mol_type = other DNA
agcccttacccactgtggatgactctaaaattaagaaggtggcaaacatattcttatgctcattgtccacgctgttcacc

SEQ ID NO: 80915 - DNA, 80 bp, synthetic construct
  source 1..80: mol_type = other DNA
aataggaatttggagccctacatgaagggtgccctccaaacagcatttgtcactcctccctccagcagagcatctagcaa

SEQ ID NO: 80916 - DNA, 80 bp, synthetic construct
  source 1..80: mol_type = other DNA
aggcctataaaggacatcatagggaaaatcaaaccattaaacatcttgaacatcctggcaacgtgtgactggacgttcgc

SEQ ID NO: 80917 - DNA, 80 bp, synthetic construct
  source 1..80: mol_type = other DNA
tttcaacattaaccgattcattgtcagatgctgcttcgtcagtgtcaagaaactcatcaataaggtctataggaacagca

SEQ ID NO: 80918 - DNA, 80 bp, synthetic construct
  source 1..80: mol_type = other DNA
acgtcggcttggacagaggtggcatcagtggcgtccgatataaatgaaatgacaaacacgatatcaacgcaaacgtcaac

SEQ ID NO: 80919 - DNA, 80 bp, synthetic construct
  source 1..80: mol_type = other DNA
gctgtattaaagacgaaaatagataaatcaacacaaataaccacaaacacgctgccggaaatagttacggaagcttcaga

SEQ ID NO: 80920 - DNA, 80 bp, synthetic construct
  source 1..80: mol_type = other DNA
tgctactagcgccaacgaatccaggagtggtagttgaaggaacaaatggcacaaataggtggttagcaacaatattagta

SEQ ID NO: 80921 - DNA, 80 bp, synthetic construct
  source 1..80: mol_type = other DNA
gagcctaacgtacagtcagtagaacgcacttatacattattcggtcagcagatacaaattacagtggaaaacaattcgca

SEQ ID NO: 80922 - DNA, 80 bp, synthetic construct
  source 1..80: mol_type = other DNA
gacaaaatggagatttatagatgttagtaagcagtcaccggatgctaactattctcaacatggaccattgctatcaactc

SEQ ID NO: 80923 - DNA, 80 bp, synthetic construct
  source 1..80: mol_type = other DNA
aacgacgagaacacagaatgtcacaataaacccaggaccattcgcacaaactacttatgcaccagtgagttggggacctg

SEQ ID NO: 80924 - DNA, 80 bp, synthetic construct
  source 1..80: mol_type = other DNA
agcaaagtgcgttgaattccattcaaaatgcctagaatattcaaagaaaggtttgagtctgaagagtttgtttattgaat

SEQ ID NO: 80925 - DNA, 80 bp, synthetic construct
  source 1..80: mol_type = other DNA
ataaagatgtaacagaaaaagcaactctactatccatattatcatactcatatgataaatataatgcagttgaaagaaaa

SEQ ID NO: 80926 - DNA, 80 bp, synthetic construct
  source 1..80: mol_type = other DNA
ttacaatcaatgacattctacacgacatcaaaccattctttgtgactagtgaatctagtttaccaatccaatatcaaaaa

SEQ ID NO: 80927 - DNA, 80 bp, synthetic construct
  source 1..80: mol_type = other DNA
ctatatcaagacttatttccaaatattcagtatacagaccttcaatagaggagttatataaagtgatatcattacatgag

SEQ ID NO: 80928 - DNA, 80 bp, synthetic construct
  source 1..80: mol_type = other DNA
ctgatcgaatatgcaaaaggaaaaccacttgaagctgacctaaaagcgaatgaacttgattatgaaaacaataaaattac

SEQ ID NO: 80929 - DNA, 80 bp, synthetic construct
  source 1..80: mol_type = other DNA
gatgaacttcaagaaatgttggataatatgaaaaaagccggtttagtagatatacctaaaatgatacaagattggctggt

SEQ ID NO: 80930 - DNA, 80 bp, synthetic construct
  source 1..80: mol_type = other DNA
tatcgaccttaactgattcattatcagatgcagcgtcgtcaatttcaagaggctcttcagtacgatcaattggttcatca

SEQ ID NO: 80931 - DNA, 80 bp, synthetic construct
  source 1..80: mol_type = other DNA
tgttactagctccaacagtaccaggtgtagtagtagagggaacaaataacacagatagatggctagctaccatattaatt

SEQ ID NO: 80932 - DNA, 80 bp, synthetic construct
  source 1..80: mol_type = other DNA
gaaccgaatgtatcgtccgaaactagaacttatactatttttggtgttcaagaacagttatcagttgaaaacacctcaca

SEQ ID NO: 80933 - DNA, 80 bp, synthetic construct
  source 1..80: mol_type = other DNA
agatcagtggaagtttattgatgtagttaaaacaacggcaaatggtagcattgggcaatacggaccgttgctatccacac

SEQ ID NO: 80934 - DNA, 80 bp, synthetic construct
  source 1..80: mol_type = other DNA
acaccaaaattatacgcagtaatgaaacacaatggtagattatatacatataacggcactactccaaatgctactactgg

SEQ ID NO: 80935 - DNA, 80 bp, synthetic construct
  source 1..80: mol_type = other DNA
atattattctacaacgaattatgattcagtaaatatgactgcattttgcgatttttacataataccacgcacagaagaag

SEQ ID NO: 80936 - DNA, 80 bp, synthetic construct
  source 1..80: mol_type = other DNA
aatatcataagttaccaagctcaggcaaatgaggatatagtaatttcaaagacgtcattgtggaaagagatgcaacataa

SEQ ID NO: 80937 - DNA, 80 bp, synthetic construct
  source 1..80: mol_type = other DNA
cagcaatctgtgaatcagtgctagcagacgctactgaaacaatgcttgcaaacgtgaccgctgttagacaagaatatgct

SEQ ID NO: 80938 - DNA, 80 bp, synthetic construct
  source 1..80: mol_type = other DNA
atgttgtacaattaagacgggttctaacaactgctactatcacacttttgcctgatgccgagaggtttagttttccaaga

SEQ ID NO: 80939 - DNA, 80 bp, synthetic construct
  source 1..80: mol_type = other DNA
agctgccgtcgctgccctgtttccaaatgctcagcctttcgaacatcatgccacggttggattgactctaagaatcgatt

SEQ ID NO: 80940 - DNA, 80 bp, synthetic construct
  source 1..80: mol_type = other DNA
acaaatttggctctgctataaggaacagaaattggcttgctgatacttctagagcagctaagttggatgaggatgtaaat

SEQ ID NO: 80941 - DNA, 80 bp, synthetic construct
  source 1..80: mol_type = other DNA
tgtcaaatgcacgaaattgatgcgcgataaattggaacgtggtgaagttgaagtggatgatacatttgtggatgaaaaga

SEQ ID NO: 80942 - DNA, 80 bp, synthetic construct
  source 1..80: mol_type = other DNA
acactattgactggaaatcgcgctatgagcaattggaacaaaggtttgaatcactaaagtccagggtaaatgaaaaatat

SEQ ID NO: 80943 - DNA, 80 bp, synthetic construct
  source 1..80: mol_type = other DNA
aataataaactagaacgcgatttgcaaaataaaattggatcccttacttcttcaattgaatggtatttaagatcaatgga

SEQ ID NO: 80944 - DNA, 80 bp, synthetic construct
  source 1..80: mol_type = other DNA
gaaataaaggcagatattgagcagcaaattaactcaattgatgcgattaatccattgcacgcttttgatgatttagaatc

SEQ ID NO: 80945 - DNA, 80 bp, synthetic construct
  source 1..80: mol_type = other DNA
aatttaatatccgattatgacaaattatttcttatgtttaaaggattgatacagagatgtaattatcaatattcatttgg

SEQ ID NO: 80946 - DNA, 80 bp, synthetic construct
  source 1..80: mol_type = other DNA
ctatttcgatacatatcaaataatcaaatacagtgttagcatgttaccatctatgcataaccctctatgagcacaatagt

SEQ ID NO: 80947 - DNA, 80 bp, synthetic construct
  source 1..80: mol_type = other DNA
ataagcttactactagagaaatagagcaagtagaactacttaaaagaatttatgatatgatgattgtcagacctactgaa

SEQ ID NO: 80948 - DNA, 80 bp, synthetic construct
  source 1..80: mol_type = other DNA
aaagttgatatgtctcttgaaactaatcaaaagtattttaaaacgtctggtgaatggaaaaatggagagaatccatacga

SEQ ID NO: 80949 - DNA, 80 bp, synthetic construct
  source 1..80: mol_type = other DNA
atgaacccaaatctatggatcatagctattggctctatcgctctggctatagcgtcagtgtgattgctcttgtcgactga

SEQ ID NO: 80950 - DNA, 80 bp, synthetic construct
  source 1..80: mol_type = other DNA
ggtggacttcaaacagcatcattgtattctgtggaacctcaggtacatatggaacaggctcatggcctgatgagcgaatt

SEQ ID NO: 80951 - DNA, 80 bp, synthetic construct
  source 1..80: mol_type = other DNA
aaccgatcataatagagaggaaaacagtgcatttgaatagtactaccatagagaaggaaatttgtcctaaagtggcagaa

SEQ ID NO: 80952 - DNA, 80 bp, synthetic construct
  source 1..80: mol_type = other DNA
tttgttttcaatttttactacactgctttttaagcagaatgaatgcagcaacccatcaaataatcaagtggtgccatgtg

SEQ ID NO: 80953 - DNA, 80 bp, synthetic construct
  source 1..80: mol_type = other DNA
gcgaagcgcgcgcatgcttcatccaatgatcgaccagcttgcggagaggcgtgaaagaggtggggaagatccgaaaatag

SEQ ID NO: 80954 - DNA, 80 bp, synthetic construct
  source 1..80: mol_type = other DNA
gggttttgcttaatgcatcttggttcaactccttcctcacacatgcactgagatagttgtggcaatgctactatgcagca

SEQ ID NO: 80955 - DNA, 80 bp, synthetic construct
  source 1..80: mol_type = other DNA
attcctcacgaaagtcttttaattaatgaggtaagtgtcccacttcattttggaaccaaacaagtgtgcagagcaggatc

SEQ ID NO: 80956 - DNA, 80 bp, synthetic construct
  source 1..80: mol_type = other DNA
aacgcatcattacatatttgtgtgactggggatgataaaaatgctgctgctagtatcatttatgatagcatgctggttga

SEQ ID NO: 80957 - DNA, 80 bp, synthetic construct
  source 1..80: mol_type = other DNA
aatcagcttctggatgtgttccaatgggtcattgcaatgcagagtatgcatttaagacttgaatcttaagatgtacggaa

SEQ ID NO: 80958 - DNA, 80 bp, synthetic construct
  source 1..80: mol_type = other DNA
ctccaacttatagggaccaacaagccctctaccagaataacaatacatatgttacagttggatcatcgaaatattaccga

SEQ ID NO: 80959 - DNA, 80 bp, synthetic construct
  source 1..80: mol_type = other DNA
tgatccaagattatgacaaaacatttttaatgttgaaaggacttgcgaggcaatgcaactatgaatgtacgtacgaatag

SEQ ID NO: 80960 - DNA, 80 bp, synthetic construct
  source 1..80: mol_type = other DNA
tcacaattaacgatatcttgcgcgatattaagccattctttgtaactactgaagctaatttaccaattcaatataggaag

SEQ ID NO: 80961 - DNA, 80 bp, synthetic construct
  source 1..80: mol_type = other DNA
ctctgcgggaacaggaaatacaattatatttagtttcgttgggagttccaccagttgatgcaggcacgtatgttggatcc

SEQ ID NO: 80962 - DNA, 80 bp, synthetic construct
  source 1..80: mol_type = other DNA
agaatatattcacaagataaatataaaatacttgaatcttacgtgtataatttgttatccatcaattatggatgttatca

SEQ ID NO: 80963 - DNA, 80 bp, synthetic construct
  source 1..80: mol_type = other DNA
tattcgtctcagggagcaaaagcagggtgaaaatgaatccaaatcaaaagataacatgcatttcagcaacaggagtaaca

SEQ ID NO: 80964 - DNA, 80 bp, synthetic construct
  source 1..80: mol_type = other DNA
ctcgtcctcggttcccggcgatcctctggagatttattcgtctcagggagcaaaagcaggggttcactctgtcaaaatgg

SEQ ID NO: 80965 - DNA, 80 bp, synthetic construct
  source 1..80: mol_type = other DNA
acaaatgtaataatgaatgtatggaaagtgtaagaaacggaacgtatgactacccgcagtattcagaagaagcaagatta

SEQ ID NO: 80966 - DNA, 80 bp, synthetic construct
  source 1..80: mol_type = other DNA
aaataagtggagtaaaattggaatcaataggaatctaccaaatactgtcaatttattcaacagtggcgagttccctagtt

SEQ ID NO: 80967 - DNA, 80 bp, synthetic construct
  source 1..80: mol_type = other DNA
tcagattgtagttaaaaacacccttgtttctactaatacgagacgatataatcgtccacttgccgtcatgcttcttgcac

SEQ ID NO: 80968 - DNA, 80 bp, synthetic construct
  source 1..80: mol_type = other DNA
aggccaatccagccaatgacctctgttacccagggactttcaacgattatgaagaattgaaacacctattgagcaggata

SEQ ID NO: 80969 - DNA, 80 bp, synthetic construct
  source 1..80: mol_type = other DNA
ttgggggtgagcgcagcatgttcataccagggaaattcctccttcttcagaaatgtggtatggcttatcaaaaaggacaa

SEQ ID NO: 80970 - DNA, 80 bp, synthetic construct
  source 1..80: mol_type = other DNA
taataccaaccaagaagatctcttggtactttgggggattcaccatcctaatgatgaggcagagcagacaaggctctatc

SEQ ID NO: 80971 - DNA, 80 bp, synthetic construct
  source 1..80: mol_type = other DNA
aaagtggcaggatagatttcttctggacaattttgaaaccgaatgatgcaatccacttcgagagtaatggaaatttcatt

SEQ ID NO: 80972 - DNA, 80 bp, synthetic construct
  source 1..80: mol_type = other DNA
aaaggagactccacaattatgaaaagtgaagtggaatatggtaactgcaacaccaggtgtcagactccgataggagcgat

SEQ ID NO: 80973 - DNA, 80 bp, synthetic construct
  source 1..80: mol_type = other DNA
aaactctagtatgccattccacaacatacaccctctcaccatcggagaatgtcccaaatatgtgaaatcaaacaaattag

SEQ ID NO: 80974 - DNA, 80 bp, synthetic construct
  source 1..80: mol_type = other DNA
ttcggatggccatcaattagtgtcgaattatttaaaaacgaccttgtttctactaatacgagaccttgtttctactaata

SEQ ID NO: 80975 - DNA, 80 bp, synthetic construct
  source 1..80: mol_type = other DNA
tctctaacctttgccacagtatgtttcctcatgcaaatggccattctagcaacgacggtaacactgcatttcaagcaaaa

SEQ ID NO: 80976 - DNA, 80 bp, synthetic construct
  source 1..80: mol_type = other DNA
ggttggaccacaggtaattcaaaatcacaagtgaacagacaagttattgtagacaataaaaactggtttggttactttgg

SEQ ID NO: 80977 - DNA, 80 bp, synthetic construct
  source 1..80: mol_type = other DNA
gtttttatgtggagttgataagaggaaggccacaagaaaatagagtatggtggacctcaaacagtattgttgtgttttgt

SEQ ID NO: 80978 - DNA, 80 bp, synthetic construct
  source 1..80: mol_type = other DNA
tactatcaaaaagaaaaaactgtgccctaaagtggtaaaatataaaatttggtcaaaaccgcattgtcaaatcacagggt

SEQ ID NO: 80979 - DNA, 80 bp, synthetic construct
  source 1..80: mol_type = other DNA
ctgggaatgataaaaatgcaactgctagtttcatttataatggaacgctggctgacactatgggctcagggtcacagaat

SEQ ID NO: 80980 - DNA, 80 bp, synthetic construct
  source 1..80: mol_type = other DNA
ttattttcattaaagaggggaagattgtttatttagcccccttttccgtaagtgctcaaaatatagaggaaagcttttgt

SEQ ID NO: 80981 - DNA, 80 bp, synthetic construct
  source 1..80: mol_type = other DNA
tgaaggcagcattccctcgaacaatcaagtatttccttgtgaaccaatcaaaataaaagggaacataacaaaaatagtgt

SEQ ID NO: 80982 - DNA, 80 bp, synthetic construct
  source 1..80: mol_type = other DNA
tatccccgacatccagatcttagatgtttgtgcagagacaattggaaagggttcaataggccccttatagatataaataa

SEQ ID NO: 80983 - DNA, 80 bp, synthetic construct
  source 1..80: mol_type = other DNA
agagggaacccgggagtaaaagggtgggcctttgattatggagatgaagtttggatgggaagaacaataagcaaagattc

SEQ ID NO: 80984 - DNA, 80 bp, synthetic construct
  source 1..80: mol_type = other DNA
ccgcagaaggcaaaaacagggttaataggcgtttttctttggagttgataagaggaaggccacaggagactaaagtatgg

SEQ ID NO: 80985 - DNA, 80 bp, synthetic construct
  source 1..80: mol_type = other DNA
aacagggttaataggcgtttttctttggagttgataagaggaaggccacaggagactaaagtatggtggacttcaaatag

SEQ ID NO: 80986 - DNA, 80 bp, synthetic construct
  source 1..80: mol_type = other DNA
tattaccatagaaaaagaaatttgtccaggaatgccagaatacaggaactggttgaaaccacagtgtcaaattacagggt

SEQ ID NO: 80987 - DNA, 80 bp, synthetic construct
  source 1..80: mol_type = other DNA
tgccagagaggcaacattaggtgcaacatttgcatttgagtatactaatagttaaaaacacccttgtttctacttatagt

SEQ ID NO: 80988 - DNA, 80 bp, synthetic construct
  source 1..80: mol_type = other DNA
gtaggcagaagataatcaaactagaagagacaactaatcaaaaggcagaattagaagcagtgttgttagccttaaaagaa

SEQ ID NO: 80989 - DNA, 80 bp, synthetic construct
  source 1..80: mol_type = other DNA
tcaggagaacaggctaacatagtaacagactcccaatatgtgttagggattatctcagcaactccagatcaaagtgactc

SEQ ID NO: 80990 - DNA, 80 bp, synthetic construct
  source 1..80: mol_type = other DNA
gtggatgctacaaaccttagaggaactcaaggaggaagcagtaagacacttccctaggccttggttacactcattaggac

SEQ ID NO: 80991 - DNA, 80 bp, synthetic construct
  source 1..80: mol_type = other DNA
tggaacaccctagtagttctatggtgtgttcacaaaagaatagagataagtgacacacagcaggccattacaaaatggaa

SEQ ID NO: 80992 - DNA, 80 bp, synthetic construct
  source 1..80: mol_type = other DNA
atcctgatctgcctccatggcaacagccagggagtcagccctcaagcccatgtaacaattgctactgcaaagcctgctgc

SEQ ID NO: 80993 - DNA, 80 bp, synthetic construct
  source 1..80: mol_type = other DNA
tatcattgctatgtttgtttcacaaagaagggtttgggaatctcctatggcaggaagaagcgacgaagacctgcgagagc

SEQ ID NO: 80994 - DNA, 80 bp, synthetic construct
  source 1..80: mol_type = other DNA
tgataacaacaatcagaatcatcaagatcctgtatcaaagtagtaagtagaaataataagctgtgttaatgcatcctagg

SEQ ID NO: 80995 - DNA, 80 bp, synthetic construct
  source 1..80: mol_type = other DNA
gatgaggcagtattaataatagctggggtgttattactttgctgtatagtagcttgggggaaggtcctcctattagtgct

SEQ ID NO: 80996 - DNA, 80 bp, synthetic construct
  source 1..80: mol_type = other DNA
atgaagaagaagaagaacagcttagggaacttggaaatctgcttggctttgatcatgtactttaatgctattagctatac

SEQ ID NO: 80997 - DNA, 80 bp, synthetic construct
  source 1..80: mol_type = other DNA
tagtggaacacgttatgttactgtatattatggggttccagtttggagagatgctaaaattaccttattctgtgcagcag

SEQ ID NO: 80998 - DNA, 80 bp, synthetic construct
  source 1..80: mol_type = other DNA
ggaggaaatgcagaaaagaaagaaaacatcagagggcagcactggaacaagtcaaaactatcctatcgtgcagaatgccc

SEQ ID NO: 80999 - DNA, 80 bp, synthetic construct
  source 1..80: mol_type = other DNA
gattgtagcgactgcagcacggttgactgtactaataactcctccagggttaataacagcaccgacagcaccaacaccag

SEQ ID NO: 81000 - DNA, 80 bp, synthetic construct
  source 1..80: mol_type = other DNA
caaaaccaatccattagaattatttcagtgcagttttaatacaaccacaatagtaaaagataaacagcagacacagcaag

SEQ ID NO: 81001 - DNA, 80 bp, synthetic construct
  source 1..80: mol_type = other DNA
cactcttttatagagcagacctaacaaaattggataatgacaatagtacatatagattaattaattgcaacaccactacc

SEQ ID NO: 81002 - DNA, 80 bp, synthetic construct
  source 1..80: mol_type = other DNA
attacacaggcatgcccaaaagtgaactttgagccgctacccatacagtattgtgcaccagcagggtatgcactaatgaa

SEQ ID NO: 81003 - DNA, 80 bp, synthetic construct
  source 1..80: mol_type = other DNA
atgcaatcagacaggatttaatggtacaggaccttgtaataagacagttataacacactgtacacatggaattaagccaa

SEQ ID NO: 81004 - DNA, 80 bp, synthetic construct
  source 1..80: mol_type = other DNA
cagtgtcaacacaattaatactcaatggaactctagcaaagggagagcccttagtaattactcagaatgtgtcagataca

SEQ ID NO: 81005 - DNA, 80 bp, synthetic construct
  source 1..80: mol_type = other DNA
ggaaaagtcatcatagtaaaattaaatgagagtgtgtcactcacctgtataagaccaggtaataacacaagaggacaagt

SEQ ID NO: 81006 - DNA, 80 bp, synthetic construct
  source 1..80: mol_type = other DNA
gcaactaggagtcatgacatggtataatatgaaacactacgtaggcgatatcagggcagctcattgtaatgtttctaggg

SEQ ID NO: 81007 - DNA, 80 bp, synthetic construct
  source 1..80: mol_type = other DNA
aaaattggaaaagaaccttagaatgggtcagtgaggccatctggaaggcttatcctcaacattccaaccatacatccaaa

SEQ ID NO: 81008 - DNA, 80 bp, synthetic construct
  source 1..80: mol_type = other DNA
cacaaccatacatttgtttttaaaaacagtacagggggagacccagaggtttcttcgctgcacttcagttgtcatgggga

SEQ ID NO: 81009 - DNA, 80 bp, synthetic construct
  source 1..80: mol_type = other DNA
attcttttattgtaacaccagcagcctgtttaactttagttatacttggaatgacaccacctggcgggctgcaggcaatc

SEQ ID NO: 81010 - DNA, 80 bp, synthetic construct
  source 1..80: mol_type = other DNA
ataatacaagtgaaaatataacactgtcttgtagactgaagcaagtagttaattcatggatgagagtgggatcaggcttg

SEQ ID NO: 81011 - DNA, 80 bp, synthetic construct
  source 1..80: mol_type = other DNA
tttgcgacacctattgagggggaattaaagtgtcaatccaacattacaggtttaatgttagaaagagaactaccttacaa

SEQ ID NO: 81012 - DNA, 80 bp, synthetic construct
  source 1..80: mol_type = other DNA
tgacagcagcaagaacaccactttaagtcctatagggggagacatgacaaatatctggagaagtgagttatatccctaca

SEQ ID NO: 81013 - DNA, 80 bp, synthetic construct
  source 1..80: mol_type = other DNA
aagtagttcaagtaaaagctctggccgtggcacctacaaaaatttccagacctacaattatggctcatgatggacatagg

SEQ ID NO: 81014 - DNA, 80 bp, synthetic construct
  source 1..80: mol_type = other DNA
agtgggacaaactggtggataattacactgacacaatttacttggaaatacagaaagcacaagagcagcagaaggaaaat

SEQ ID NO: 81015 - DNA, 80 bp, synthetic construct
  source 1..80: mol_type = other DNA
gaaagaaagctattagaattagacaaatgggcacaattgtggagctggatggacataacaaaatggttgtggtacataaa

SEQ ID NO: 81016 - DNA, 80 bp, synthetic construct
  source 1..80: mol_type = other DNA
aattttcattatgatagtaggaggaattataggactaaaaatcttaatggctataggtaatgtagtcaggaaagtcaggc

SEQ ID NO: 81017 - DNA, 80 bp, synthetic construct
  source 1..80: mol_type = other DNA
agggatattcacctgtatcgttgcagacccttcgcctgcacgggggcccagcaggaatagcaccaggaacagacgaagaa

SEQ ID NO: 81018 - DNA, 80 bp, synthetic construct
  source 1..80: mol_type = other DNA
ggtggagaagcaggcaacggcagatcgatcagattgctggaaggattattgcctctcatctgggacgacctgaggaactt

SEQ ID NO: 81019 - DNA, 80 bp, synthetic construct
  source 1..80: mol_type = other DNA
ggtggtgcagatctaccagatattagtcagctgcatattgaggatcaaggacctcctgacaattctgtggatacacctgg

SEQ ID NO: 81020 - DNA, 80 bp, synthetic construct
  source 1..80: mol_type = other DNA
gccaactactgaacagtaactgcctgcgagactgctttgctgcgtgtggctattggactcaagaattaaaacagagtgca

SEQ ID NO: 81021 - DNA, 80 bp, synthetic construct
  source 1..80: mol_type = other DNA
accagcctgttgaacactgttgctatatcagttgcaaattggactgatcaagtaatagcagtagggcaacaaataggaag

SEQ ID NO: 81022 - DNA, 80 bp, synthetic construct
  source 1..80: mol_type = other DNA
aggcttcttgaacataccaagaaggttaagacaagggctagaaagaagcttactgtaaaatggggaatgcatggaagaaa

SEQ ID NO: 81023 - DNA, 80 bp, synthetic construct
  source 1..80: mol_type = other DNA
agtagcttagtgggctggccagcagtcagggaaaaaataaagcagactaccccgactacccctgacccgactaccccagt

SEQ ID NO: 81024 - DNA, 80 bp, synthetic construct
  source 1..80: mol_type = other DNA
aacacctgcacccggggttggggaaatttccaaagaattagcacaaggaaaaggaatacccagtaaatttagttcaaaga

SEQ ID NO: 81025 - DNA, 80 bp, synthetic construct
  source 1..80: mol_type = other DNA
ataaggagatcctagtgtggaagtttgacagctcacttggaagagaacatgttgccttacaaaagcacccggaactgttt

SEQ ID NO: 81026 - DNA, 80 bp, synthetic construct
  source 1..80: mol_type = other DNA
attaaagactaaattgctgacgccacgtagctgctaaagctgctgacactgcagggactttccggggacggaaagtcccg

SEQ ID NO: 81027 - DNA, 80 bp, synthetic construct
  source 1..80: mol_type = other DNA
aggaaccactagtaccaaacaggaacagataacctggatgacaaggaacaatcctgtaccagtaggggacatctatagaa

SEQ ID NO: 81028 - DNA, 80 bp, synthetic construct
  source 1..80: mol_type = other DNA
atcaattaaaacttgaatgcatttttgacatttttctagaggatgatgggtcaattgcatatacatgttacatgaaattg

SEQ ID NO: 81029 - DNA, 80 bp, synthetic construct
  source 1..80: mol_type = other DNA
tggtgtttaaattgatgtaataataggaattatgacgttcagtccagaatatacggagcactaagttaccgacttgactg

SEQ ID NO: 81030 - DNA, 80 bp, synthetic construct
  source 1..80: mol_type = other DNA
cattgatgattctggtgtgtataatgcatgcataggtagagccaagactatagataaagcattaaataatccaaaagcag

SEQ ID NO: 81031 - DNA, 80 bp, synthetic construct
  source 1..80: mol_type = other DNA
tgaagaatggtatacaaatgtagcaacaatcagtagacttgatttagagttagcagaattaaaattgatgttatccaatc

SEQ ID NO: 81032 - DNA, 80 bp, synthetic construct
  source 1..80: mol_type = other DNA
aagggaggaacgagtgttaaattcaatgttctctgtggtgagagaaaaaggcagatcatcaaacgtaattatgatgaaac

SEQ ID NO: 81033 - DNA, 80 bp, synthetic construct
  source 1..80: mol_type = other DNA
gaaaatgattgaagaaggaaagttaaaaattaaagtggaaagaaatgaaacatatactgaatcacttaaaaataaaatag

SEQ ID NO: 81034 - DNA, 80 bp, synthetic construct
  source 1..80: mol_type = other DNA
atgtataatagatgcattcgaaaaaggaaaagatatcacaattgatttagatgcaatgaacggtgaggttaaattggatg

SEQ ID NO: 81035 - DNA, 80 bp, synthetic construct
  source 1..80: mol_type = other DNA
ttcatataatgcaactgctgcttttgtttcgactattttgggtacacctattaaaatgtataatgagtctggacaacctt

SEQ ID NO: 81036 - DNA, 80 bp, synthetic construct
  source 1..80: mol_type = other DNA
gggaaattacatgaatccaaaaaccattatcgaaaaaatgactgaattagaaattccaattttcaaatcagattatagga

SEQ ID NO: 81037 - DNA, 80 bp, synthetic construct
  source 1..80: mol_type = other DNA
ttctttagatagagcgatcaaggatgcaggagggagtgaaagcttctcaaaatatgttattacaaaattctatgataatt

SEQ ID NO: 81038 - DNA, 80 bp, synthetic construct
  source 1..80: mol_type = other DNA
agtttgagaataactggtggtgttttgatgatggaagattaaaaaagcataatggtactggttaccctctgattgtcgca

SEQ ID NO: 81039 - DNA, 80 bp, synthetic construct
  source 1..80: mol_type = other DNA
ttcagattgataaaattttaatttccggagacatcgaattaaatcctggacctgatatactagttacactaaatgactac

SEQ ID NO: 81040 - DNA, 80 bp, synthetic construct
  source 1..80: mol_type = other DNA
aaagaactgcactttcaatatcacctcaaaaataggaaataaggtgcgaaaacaatatgcactttttactaatattgatg

SEQ ID NO: 81041 - DNA, 80 bp, synthetic construct
  source 1..80: mol_type = other DNA
cagcagatggggtgggaccagcatctcggaacttggcagaacgcggagcaatcacaattaacaacacagataatgttgat

SEQ ID NO: 81042 - DNA, 80 bp, synthetic construct
  source 1..80: mol_type = other DNA
aagaagtacgacatagattagagattacagaaaaacagcttcgagcggataacatttctgcaagctcttacaactattgc

SEQ ID NO: 81043 - DNA, 80 bp, synthetic construct
  source 1..80: mol_type = other DNA
gtggatgttgacgatggtcattttgtcaacatagagctggaataaaaaactaccttgtttctattagaaaagacgtgtat

SEQ ID NO: 81044 - DNA, 80 bp, synthetic construct
  source 1..80: mol_type = other DNA
tttacgaaaaggatgactgagtctatgagggaagagtatcggcaggagcagcagaatgctgtggatgttgacgatggtca

SEQ ID NO: 81045 - DNA, 80 bp, synthetic construct
  source 1..80: mol_type = other DNA
gctgagatcatgaagatctgttccaccattgaagagctcagacggcaaaaatagtgaatttagcttgtcccttccaatga

SEQ ID NO: 81046 - DNA, 80 bp, synthetic construct
  source 1..80: mol_type = other DNA
agacacaggcaaaagcaggggaaaatcaaatcaatcaagatggaagcaaaactactcgtattattctgcatgttcactgc

SEQ ID NO: 81047 - DNA, 80 bp, synthetic construct
  source 1..80: mol_type = other DNA
cattccttccattcaatctagaggactcttcggtgcaattgctgggttcattgaagggggatggacaggaatgatagatg

SEQ ID NO: 81048 - DNA, 80 bp, synthetic construct
  source 1..80: mol_type = other DNA
gtaaggagttcaacaatctggaaaggagaattgagaatctgaataagaaggttgacgatggatttctggatgtttggaca

SEQ ID NO: 81049 - DNA, 80 bp, synthetic construct
  source 1..80: mol_type = other DNA
tacaatgcagaattgcttgttctgctcgagaatgaaaggaccttggatttccatgactccaatgtgaggaatctgtatga

SEQ ID NO: 81050 - DNA, 80 bp, synthetic construct
  source 1..80: mol_type = other DNA
aaaaggtcaaatcacagctgaggaataatgccaaagagattgggaatgggtgcttcgagttctaccacaaatgtgatgac

SEQ ID NO: 81051 - DNA, 80 bp, synthetic construct
  source 1..80: mol_type = other DNA
gagtgcatggagagtgtgaagaatggcacatatgactatcctaagtactcagaggagtccaaactgaacagagaagaaat

SEQ ID NO: 81052 - DNA, 80 bp, synthetic construct
  source 1..80: mol_type = other DNA
ggcggggtaaaattggaatcaatgggggtttaccagattttggcgatttactccacagtcgccagctctctggtcttgtt

SEQ ID NO: 81053 - DNA, 80 bp, synthetic construct
  source 1..80: mol_type = other DNA
agtctccctgggggcaatcagtttttggatgtgttctaatggatcattgcaatgcagaatatgcatttagaactgggatt

SEQ ID NO: 81054 - DNA, 80 bp, synthetic construct
  source 1..80: mol_type = other DNA
ctcactcagttaatttactcgaagacaatcataatggaaaactctgcaacctgaacggaatagccccattacagctaggg

SEQ ID NO: 81055 - DNA, 80 bp, synthetic construct
  source 1..80: mol_type = other DNA
ggatcattgcaatgcagaatatgcatttagaactgggattttaaattatatggaaggcaaacaactgaaaatcaatgcta

SEQ ID NO: 81056 - DNA, 80 bp, synthetic construct
  source 1..80: mol_type = other DNA
aaatgcaacgttgcggggtggctcctcggcaacccggaatgtgacctgctgctcactgcgaattcatggtcctatataat

SEQ ID NO: 81057 - DNA, 80 bp, synthetic construct
  source 1..80: mol_type = other DNA
agaaacttcaaattcagaaaatggaacatgctaccccggggaattcatcgattatgaagaattgagagaacaactaagtt

SEQ ID NO: 81058 - DNA, 80 bp, synthetic construct
  source 1..80: mol_type = other DNA
cagtgtcttcatttgagaaatttgagattttcccgaaggcaaactcgtggccaaatcatgagacaaccaaaggtgtcaca

SEQ ID NO: 81059 - DNA, 80 bp, synthetic construct
  source 1..80: mol_type = other DNA
gctgcatgctcttactctggagctagcagtttttatcgaaatttgctatggataacaaagaagggaacttcctatcctaa

SEQ ID NO: 81060 - DNA, 80 bp, synthetic construct
  source 1..80: mol_type = other DNA
actcagtaaatcatacacaaacaacaagggaaaagaagtgcttgtactttggggagtgcatcatcctccaactacaaatg

SEQ ID NO: 81061 - DNA, 80 bp, synthetic construct
  source 1..80: mol_type = other DNA
aacagcaaacactctatcagaatactgatgcatatgtttcagttgggtcatcaaaatacaaccggagattcacacctgaa

SEQ ID NO: 81062 - DNA, 80 bp, synthetic construct
  source 1..80: mol_type = other DNA
atagctgccagacctaaagtcagagggcaagcgggtaggatgaattattattggacactattggatcagggagacacaat

SEQ ID NO: 81063 - DNA, 80 bp, synthetic construct
  source 1..80: mol_type = other DNA
attaaaagccgataccatctgtataggctaccatgcaaacaattctacagacactatcgacacagtgctagagaagaatg

SEQ ID NO: 81064 - DNA, 80 bp, synthetic construct
  source 1..80: mol_type = other DNA
aacctttgaagcaactgggaatttaatagcaccatggtatgcttttgcactaaacaagggttctgattctggtattataa

SEQ ID NO: 81065 - DNA, 80 bp, synthetic construct
  source 1..80: mol_type = other DNA
catcagatgctccagttcataattgtgacacaaaatgccaaacccctcatggtgctattaacagtagtctccctttccag

SEQ ID NO: 81066 - DNA, 80 bp, synthetic construct
  source 1..80: mol_type = other DNA
aatgtgcatcccatcactattggagagtgccctaaatatgttaaaagcaccaaactaaggatggcaacaggcctgagaaa

SEQ ID NO: 81067 - DNA, 80 bp, synthetic construct
  source 1..80: mol_type = other DNA
ccctacccttagtcttttcaaattcttctttaatctttcttaggataattttaaaacggttttcttgagagctattatgt

SEQ ID NO: 81068 - DNA, 80 bp, synthetic construct
  source 1..80: mol_type = other DNA
tttagataatacaacagccactagttctgctgaagagatgaaaaactgttctttcaatatgactacaggaggccagaaga

SEQ ID NO: 81069 - DNA, 80 bp, synthetic construct
  source 1..80: mol_type = other DNA
agaaagagtatgcgatcttctataaagcagatgtagtatcaagtaataataattctagtgagtatattctagtacattgt

SEQ ID NO: 81070 - DNA, 80 bp, synthetic construct
  source 1..80: mol_type = other DNA
tcaatataaatacaagaggcaagatgaggatagactacgcgcttttctatgaagcagacatagtaccaattaataatagt

SEQ ID NO: 81071 - DNA, 80 bp, synthetic construct
  source 1..80: mol_type = other DNA
aaactgttctttcaatataactacaggagataagaagaagaaagaatacgcgtttttctataaaacagatataagaccaa

SEQ ID NO: 81072 - DNA, 80 bp, synthetic construct
  source 1..80: mol_type = other DNA
tggctggatttgattactcatgcgccataaatgcaccagcgaacatacagcaatttgagcataccgttcagcttaggcgc

SEQ ID NO: 81073 - DNA, 80 bp, synthetic construct
  source 1..80: mol_type = other DNA
gcactgactacagctactataactttattacctgatgcagagagatttagttttccaagagtaattaattcagctgatgg

SEQ ID NO: 81074 - DNA, 80 bp, synthetic construct
  source 1..80: mol_type = other DNA
gagtagtatacgagagtacaaataatagtgacttttggactgcagtcattgctgtagaaccgcacgtcaacccagtagaa

SEQ ID NO: 81075 - DNA, 80 bp, synthetic construct
  source 1..80: mol_type = other DNA
gagtacagtaatgggagtgattggtttttctttcttcgttaaagactggccagaaaaaattagggagtttatggagaaag

SEQ ID NO: 81076 - DNA, 80 bp, synthetic construct
  source 1..80: mol_type = other DNA
ttcagatttattactaattgtaggtatagtatattactaatctcagattatatcatgtattcagggatttttgattgatt

SEQ ID NO: 81077 - DNA, 80 bp, synthetic construct
  source 1..80: mol_type = other DNA
ggcaaggaacttaatcagtcctgtgatgagtgtgattgggtttttagcccttgcaaaggactggacagagcgggttgagg

SEQ ID NO: 81078 - DNA, 80 bp, synthetic construct
  source 1..80: mol_type = other DNA
acacagggagaatctacttttggacagtcaaaatggaaaattaagtctactcagagggcgatctccacaacaagtcgcca

SEQ ID NO: 81079 - DNA, 80 bp, synthetic construct
  source 1..80: mol_type = other DNA
gttgcatcgttgtcggatggatctccgggaacccagagtgcgaattgctgttttccaaggaatcatggtcttacattgca

SEQ ID NO: 81080 - DNA, 80 bp, synthetic construct
  source 1..80: mol_type = other DNA
agacagtagtgatactggggaggatatggttgactttattgacaattgtaatgtatacaacaatcaggcagaagcagaga

SEQ ID NO: 81081 - DNA, 80 bp, synthetic construct
  source 1..80: mol_type = other DNA
aataaacttttttactttttttttattattaccatgcggtccaaacgctctacaaaacgcactaaacgtgcgtctgctac

SEQ ID NO: 81082 - DNA, 80 bp, synthetic construct
  source 1..80: mol_type = other DNA
atatacaggaaggggaggatgatttaaatgctgtgtgtgcactaaaacgaaagtttgccgcatgttcacaaagtgctgcg

SEQ ID NO: 81083 - DNA, 80 bp, synthetic construct
  source 1..80: mol_type = other DNA
tggggtgggggatgattcagaagtaagctgtgaaacaaatgtagatagctgtgaaaatgttacgttgcaggaaattagta

SEQ ID NO: 81084 - DNA, 80 bp, synthetic construct
  source 1..80: mol_type = other DNA
agcagcggccaaacgacgacgacctgcagacaccacagacaccgcccagccccttacaaagctgttctgtgcagaccccg

SEQ ID NO: 81085 - DNA, 80 bp, synthetic construct
  source 1..80: mol_type = other DNA
tcttaaatatggcagtttaggggttttttttggtggtttaggtattggcacaggctctggttcaggtggaaggactggct

SEQ ID NO: 81086 - DNA, 80 bp, synthetic construct
  source 1..80: mol_type = other DNA
gggctgggatggggtgtactggttggtttgaggtagaagcagtcatagagagaagaacaggagataatatttcagaagat

SEQ ID NO: 81087 - DNA, 80 bp, synthetic construct
  source 1..80: mol_type = other DNA
tttttttgtattactaataaatacctttatattttagcagtgtattattatgagacacaaacgatctacaaggcgcaagc

SEQ ID NO: 81088 - DNA, 80 bp, synthetic construct
  source 1..80: mol_type = other DNA
ccctataaaaaaaaaagggagtaaccgaaaacggtcgtaccgaaaacggttgccataaaagcaaaagtgcacaaaaaagc

SEQ ID NO: 81089 - DNA, 80 bp, synthetic construct
  source 1..80: mol_type = other DNA
cagatacaacaggtagaggggcatgatacagttgaacaatgtagtatgggcagtggggatagtataacctctagtagcga

SEQ ID NO: 81090 - DNA, 80 bp, synthetic construct
  source 1..80: mol_type = other DNA
aatttaaagaactatttggtattagttttacagaacttattagaccatttaagagtgataaatccacatgtacagattgg

SEQ ID NO: 81091 - DNA, 80 bp, synthetic construct
  source 1..80: mol_type = other DNA
tatacaatgtttatcgtgttcatggggtatggtaattctagcattattacgatttaaatgtgcaaaaaacagaacaacaa

SEQ ID NO: 81092 - DNA, 80 bp, synthetic construct
  source 1..80: mol_type = other DNA
gatttgtgtatagtatatagagaaggccagccatatggagtttgcatgaaatgtttaaaattttattcaaaaataagtga

SEQ ID NO: 81093 - DNA, 80 bp, synthetic construct
  source 1..80: mol_type = other DNA
gaggaggtaccgagctcccctgcaaccccaccaagcgagtgcgactcagtgccgtggacagtgttgacagaggggtctac

SEQ ID NO: 81094 - DNA, 80 bp, synthetic construct
  source 1..80: mol_type = other DNA
tctacatctgactgcacaaacaaagaccggtgtggtagttgtagtacaactacacctatagtacatttaaaaggtgatgc

SEQ ID NO: 81095 - DNA, 80 bp, synthetic construct
  source 1..80: mol_type = other DNA
ttaatattactggttttaatactgtgggttactgtagcaacaccactacgttgcttttgttgttttctttgctttttgta

SEQ ID NO: 81096 - DNA, 80 bp, synthetic construct
  source 1..80: mol_type = other DNA
cgcagtggaaaagctataggggcacgggtacattattatcaggatttaagtagtattactgaagatatagaattacaacc

SEQ ID NO: 81097 - DNA, 80 bp, synthetic construct
  source 1..80: mol_type = other DNA
ctatagataatgaggaagatattatattttcagcatcttctaacaatactttatatactacatctaacactgcatatgtt

SEQ ID NO: 81098 - DNA, 80 bp, synthetic construct
  source 1..80: mol_type = other DNA
ttggggaaaaggcacaccttgtaatgctaaccaggtaaaagcaggtgaatgtcctcctttggagttactaaacactgtac

SEQ ID NO: 81099 - DNA, 80 bp, synthetic construct
  source 1..80: mol_type = other DNA
tatatgcacacaggtgtgtccaaccgatttggattacagttttataagcatttctttttattatagttagtaacaattat

SEQ ID NO: 81100 - DNA, 80 bp, synthetic construct
  source 1..80: mol_type = other DNA
aggggaggggacgggatgtaatggatggttttttgtagaagcagtagttagtagacgtacggaggatccagtgtcagagg

SEQ ID NO: 81101 - DNA, 80 bp, synthetic construct
  source 1..80: mol_type = other DNA
ctttgtaaggggcgatatgtttcaggacccagctgaaagaccttacaaactgcatgatttgtgcaacgaggtagaagaaa

SEQ ID NO: 81102 - DNA, 80 bp, synthetic construct
  source 1..80: mol_type = other DNA
agataactgtgacaggggggaggatatggtggactttataaatgatacagatatattaaacatacaggcagaaacagaga

SEQ ID NO: 81103 - DNA, 80 bp, synthetic construct
  source 1..80: mol_type = other DNA
gatatattaaacatacaggcagaaacagagacagcacaagcattatttcatgcacaggaggagcaaacacacaaagaggc

SEQ ID NO: 81104 - DNA, 80 bp, synthetic construct
  source 1..80: mol_type = other DNA
ggacaacaatccgtggacactactacacggggactcgtcactgcagctgagtgcacaaacaaagggcgtgctgtgcatac

SEQ ID NO: 81105 - DNA, 80 bp, synthetic construct
  source 1..80: mol_type = other DNA
tactgctgtacatatgcacaatatacttttttacttttgtagtttgtctaataaatacttttatattttttaatagcttg

SEQ ID NO: 81106 - DNA, 80 bp, synthetic construct
  source 1..80: mol_type = other DNA
taggggcacgggtacattattatcatgatattagtcctatacagcctgctgaagttcaggaagacatagaattgcaacct

SEQ ID NO: 81107 - DNA, 80 bp, synthetic construct
  source 1..80: mol_type = other DNA
ctgatgtcccgcctaaactgactcacactcctgcagtgcagctaaacaatacattgcctaacattgcatgttttaaactg

SEQ ID NO: 81108 - DNA, 80 bp, synthetic construct
  source 1..80: mol_type = other DNA
agcaaaagcaggggaaaataaaagcaaccaacatgaaggcaatactggtaatcttgctatatgcatttacaaggggaaat

SEQ ID NO: 81109 - DNA, 80 bp, synthetic construct
  source 1..80: mol_type = other DNA
ctgggggcaatcagtttctggatgtgctctaatgggtctctacagtgtagaatatgtatttaacattaggatataagaga

SEQ ID NO: 81110 - DNA, 80 bp, synthetic construct
  source 1..80: mol_type = other DNA
agcaaaagcaggagtttaaaatgaatacaaaccaaagaataataactatcgggacagcctgcctgataattggaatagtt

SEQ ID NO: 81111 - DNA, 80 bp, synthetic construct
  source 1..80: mol_type = other DNA
gcattaactgattggtcaggatatagtggaagttttgttcaacaccctgagttaacaggaatgaattgcataaggccttg

SEQ ID NO: 81112 - DNA, 80 bp, synthetic construct
  source 1..80: mol_type = other DNA
agtctattgttgcagataggaaatatagtctcattatggaaaagccattcgattcagactggagaaaaaaatcactctga

SEQ ID NO: 81113 - DNA, 80 bp, synthetic construct
  source 1..80: mol_type = other DNA
atgcacatctgccactgccattgcgataggcacaattgctgtattaataggaatagcaaacttaggtttaaacataggac

SEQ ID NO: 81114 - DNA, 80 bp, synthetic construct
  source 1..80: mol_type = other DNA
agagggccttctacggaaggggtacctgagtctatgagggaagagtaccggcaggagcagcagagtgctgtggatgttga

SEQ ID NO: 81115 - DNA, 80 bp, synthetic construct
  source 1..80: mol_type = other DNA
tcgactcgtcgcatgcggaattataaaagtgctcgccgacctcaactacacattgagtgtaatcactttaatgaatgaca

SEQ ID NO: 81116 - DNA, 80 bp, synthetic construct
  source 1..80: mol_type = other DNA
gatcagtaatctgttatgatctagcctgtaatagtacattctgtaagccgactgtttacatgattgttcctatacatgct

SEQ ID NO: 81117 - DNA, 80 bp, synthetic construct
  source 1..80: mol_type = other DNA
agtaatggccagtttagtctggccagcctttgcactgagaaatgtttatgacatgaaaattgagtgccctcacacagtca

SEQ ID NO: 81118 - DNA, 80 bp, synthetic construct
  source 1..80: mol_type = other DNA
taacttgttatgatctgtcttgcaatagtacctactgcaagccaacactttacatgattgtcccaatccatgcatgtaat

SEQ ID NO: 81119 - DNA, 80 bp, synthetic construct
  source 1..80: mol_type = other DNA
taacctgttacgacctgtcttgcaatagcacttactgcaagccaacactatacatgattgtaccaattcatgcatgcaat

SEQ ID NO: 81120 - DNA, 80 bp, synthetic construct
  source 1..80: mol_type = other DNA
cacaccagggaggtatagaacagcaatttgtggactctaccctgcacagattaaggccagacaaatgattagtcctgtca

SEQ ID NO: 81121 - DNA, 80 bp, synthetic construct
  source 1..80: mol_type = other DNA
tatggcctcaaagacagtgggaacatctgaagaaaagttgcgaaagaaatcatcgttctatcagtcttatctcaggcgaa

SEQ ID NO: 81122 - DNA, 80 bp, synthetic construct
  source 1..80: mol_type = other DNA
caagcaggggagaagcagtttttatagaaatctgctatggctgactgagaaaaatggctcttatccaaatctgagcatgt

SEQ ID NO: 81123 - DNA, 80 bp, synthetic construct
  source 1..80: mol_type = other DNA
taatcttattatggagtttttgagaattctggtcaagtctaatactaatgttggacattgctcatctatggaaagagtat

SEQ ID NO: 81124 - DNA, 80 bp, synthetic construct
  source 1..80: mol_type = other DNA
ataattttataccacagttattcaatccatatcgagaaccacaatataccaatgcagttaataagttgtttaaatactta

SEQ ID NO: 81125 - DNA, 80 bp, synthetic construct
  source 1..80: mol_type = other DNA
gaaccagtagaagttaatggagttgaatacgttttgatgaatcatccaatgaatctcacattatatgagatttctaaagt

SEQ ID NO: 81126 - DNA, 80 bp, synthetic construct
  source 1..80: mol_type = other DNA
cattggaaacggacgcgtacctaccataatgtctcaggtgtcagttgagtgtatgattaagagtattatatcaagatggt

SEQ ID NO: 81127 - DNA, 80 bp, synthetic construct
  source 1..80: mol_type = other DNA
ttgacattgataatatacgaaagataccgttaacgctgtccgaaaccaattctttatacgcattggaaagatttgataaa

SEQ ID NO: 81128 - DNA, 80 bp, synthetic construct
  source 1..80: mol_type = other DNA
ttgattgatgaatacgcccttcaaatttcagatagtgaagaataaatttaaaacataatgaaatcgcattttatgccaac

SEQ ID NO: 81129 - DNA, 80 bp, synthetic construct
  source 1..80: mol_type = other DNA
aaaacataatgaaatcgcattttatgccaacactcagcctctcgcaccggagtagcgcccgggcgacataaaatgtgacc

SEQ ID NO: 81130 - DNA, 80 bp, synthetic construct
  source 1..80: mol_type = other DNA
actgttgtcaacatactaatctcacctattgtacaggttgttctttgtatcatgtgtgtcagtggtgttcgcaggataag

SEQ ID NO: 81131 - DNA, 80 bp, synthetic construct
  source 1..80: mol_type = other DNA
cgctgctttttagatgatgaacctcattttcttaggatgcgtacatttaaagaacctataactagaggagatttggataa

SEQ ID NO: 81132 - DNA, 80 bp, synthetic construct
  source 1..80: mol_type = other DNA
tttaattataatgtattcattacttttcccaatcaacgaaatgattgtaaagaaatttactagtaatgttagacagaata

SEQ ID NO: 81133 - DNA, 80 bp, synthetic construct
  source 1..80: mol_type = other DNA
gatgcagaagtgaatatgaggttgagtggtataaccaattgctactacctataactttgcaagcacttcgtatacatatt

SEQ ID NO: 81134 - DNA, 80 bp, synthetic construct
  source 1..80: mol_type = other DNA
ttttatgaatcacctaataaaattaatcagactccatttgcttttaccaatttaatcgatcgctatgataaattgatact

SEQ ID NO: 81135 - DNA, 80 bp, synthetic construct
  source 1..80: mol_type = other DNA
tgattcaataaactttgatagaatgggacacctaccaattgcgttacgtaacgaatatgcattgagatattttcaaaaaa

SEQ ID NO: 81136 - DNA, 80 bp, synthetic construct
  source 1..80: mol_type = other DNA
caagattcatatcccaaccacaaattagtctttgtagaagtcattttactgaaaatactctagaaaatcaagacgcacca

SEQ ID NO: 81137 - DNA, 80 bp, synthetic construct
  source 1..80: mol_type = other DNA
acttcaccaatacaggtaatgcgcaactgcgttcgtggacatagaacttggagaaatgaggaatggaataagcagtgtat

SEQ ID NO: 81138 - DNA, 80 bp, synthetic construct
  source 1..80: mol_type = other DNA
aaatcatagagttctgaaattgggcgcaaattcggtttggattccatcaccattaactaaatataaaggatggtgtctag

SEQ ID NO: 81139 - DNA, 80 bp, synthetic construct
  source 1..80: mol_type = other DNA
gaaaatttgggattcagaattgtatttaaaggaaatttccacaagttatactgaacattatttggtatcacaacaaaatg

SEQ ID NO: 81140 - DNA, 80 bp, synthetic construct
  source 1..80: mol_type = other DNA
taatttttctcgactatagattacaaattctagtttcaaaagtgcgaccaaattatgtgtcttcaaatcacggacgtaat

SEQ ID NO: 81141 - DNA, 80 bp, synthetic construct
  source 1..80: mol_type = other DNA
gcatatagagtgaaacgctgtaaatggtgtactttgcaaccaagcacgttctggaatgactttagaatggttgagatcta

SEQ ID NO: 81142 - DNA, 80 bp, synthetic construct
  source 1..80: mol_type = other DNA
caccagatagatgtcctccaacatgtatttacatagcagggatggctgagctagcgaaattcttttctatcctacaagac

SEQ ID NO: 81143 - DNA, 80 bp, synthetic construct
  source 1..80: mol_type = other DNA
gatgtgaatgctattgacatcgatgaaccaagtgggcaaacagctgactggttttctatcggtcaatatgttatggggtt

SEQ ID NO: 81144 - DNA, 80 bp, synthetic construct
  source 1..80: mol_type = other DNA
cggacagatgccctccaacatgcatttatatagcagggatggctgagctgggagctttcttttctattttacaagacatg

SEQ ID NO: 81145 - DNA, 80 bp, synthetic construct
  source 1..80: mol_type = other DNA
cctgattgtccaggggtaggtacaggttgtactgcttgtggtgtatatttagataagctccggtctgttgggaaagttta

SEQ ID NO: 81146 - DNA, 80 bp, synthetic construct
  source 1..80: mol_type = other DNA
ccacattaccatcatgccaatatgatgggaacacagtatcaggttatcaaagaatgatagcaactaaagactcatttcaa

SEQ ID NO: 81147 - DNA, 80 bp, synthetic construct
  source 1..80: mol_type = other DNA
tgtacagcatgtggtgtctatctggataagttacgatctgttggtaaagtctataaaatcctgtcattaaagtatacaag

SEQ ID NO: 81148 - DNA, 80 bp, synthetic construct
  source 1..80: mol_type = other DNA
aatgctcatttgctacacttccctcatgccagtatgatggaaatacagtctcaggataccagcggataattgctacaaaa

SEQ ID NO: 81149 - DNA, 80 bp, synthetic construct
  source 1..80: mol_type = other DNA
ttgccacacttccgtcttgtcaatatgatggtaatacagtttcaggataccaacggatgattgccacaaaagattcattc

SEQ ID NO: 81150 - DNA, 80 bp, synthetic construct
  source 1..80: mol_type = other DNA
acaggctgcacagcctgtggagtatatttggacaagctgaggtctgttggtaaagtgtataagatattatcacttaaata

SEQ ID NO: 81151 - DNA, 80 bp, synthetic construct
  source 1..80: mol_type = other DNA
catggaagcagataatgaataaaaaattagaaccaaagcagataaacaatgctcttgtcttatgggaacaacagttcatg

SEQ ID NO: 81152 - DNA, 80 bp, synthetic construct
  source 1..80: mol_type = other DNA
acgatgtagacacttcaaagcctaaaatattggattttgacgaccctgacatgtatttagcaagcttaactatgatggaa

SEQ ID NO: 81153 - DNA, 80 bp, synthetic construct
  source 1..80: mol_type = other DNA
caaagcaaaagaatactttctaaagatagtggtctaaagccagacaatttcattttgaatgaatttggctccagaattaa

SEQ ID NO: 81154 - DNA, 80 bp, synthetic construct
  source 1..80: mol_type = other DNA
ggatgccaataaagaaacatatgaaaatatgcatagaatttttgagactagatactggcaatgcatatcagacttctcta

SEQ ID NO: 81155 - DNA, 80 bp, synthetic construct
  source 1..80: mol_type = other DNA
gatgaagatagtgtattcaatccaggatgtcttcatggcacatttaaatgtgcaaatggctacatatctatctctagggc

SEQ ID NO: 81156 - DNA, 80 bp, synthetic construct
  source 1..80: mol_type = other DNA
tataagattggataaagagaggtgccagcgtattgtgtcatctccaggactattcctgactacctgcctgttgtttaaac

SEQ ID NO: 81157 - DNA, 80 bp, synthetic construct
  source 1..80: mol_type = other DNA
atgacaaccctaccttggtaatgagcgacattatgaatttttctattttcacgagcctgtctataacaaaaagtgtacta

SEQ ID NO: 81158 - DNA, 80 bp, synthetic construct
  source 1..80: mol_type = other DNA
tcattaactgagcctgcacgctatatgattatgaattcactagccatttctagtaacgttaaggattatatagcagagaa

SEQ ID NO: 81159 - DNA, 80 bp, synthetic construct
  source 1..80: mol_type = other DNA
agagcataaaagaaatttggtcaacagattgcactaagcaaacagttaatttaaaggtgctattacactctttatgtaag

SEQ ID NO: 81160 - DNA, 80 bp, synthetic construct
  source 1..80: mol_type = other DNA
aatctgcttgcagacacttctaggcacaaccaccttcgcaataggatagaaaaccggaataatttcagaaggtcaattac

SEQ ID NO: 81161 - DNA, 80 bp, synthetic construct
  source 1..80: mol_type = other DNA
acaggctgtatgaactattagataaagaagttctgaccgataaaccagtcatagaacaaataatggatatcatgatcaat

SEQ ID NO: 81162 - DNA, 80 bp, synthetic construct
  source 1..80: mol_type = other DNA
cacaagaaattttacttcactttcttcaataagggacaaaaaacgtctaaagacagggaaatctttgtaggggaatacga

SEQ ID NO: 81163 - DNA, 80 bp, synthetic construct
  source 1..80: mol_type = other DNA
tagagaaattgatgaggcaatagaagcgttagctgctgagggttatgagaacaacttagaaaagatagaaagattgtcag

SEQ ID NO: 81164 - DNA, 80 bp, synthetic construct
  source 1..80: mol_type = other DNA
ccagcaaggcgaggggcctgaagatggaaataaatgcagatatgtcgaaatggagcgctcaagatgtcttctataaatat

SEQ ID NO: 81165 - DNA, 80 bp, synthetic construct
  source 1..80: mol_type = other DNA
aaaagaattgattttaccagatgaactactttttaatctactggaccagaagattgtatatcagaacgatattataacta

SEQ ID NO: 81166 - DNA, 80 bp, synthetic construct
  source 1..80: mol_type = other DNA
ctaatacagtcccaattaagaggaattggctccagggcaattttaactatacatctagctatgtgcacagttgtgctatg

SEQ ID NO: 81167 - DNA, 80 bp, synthetic construct
  source 1..80: mol_type = other DNA
ccctctcaatgataagtacagtaggtttagaatcaggaaatctatacttcttaataaaattactcaacaaatatacacca

SEQ ID NO: 81168 - DNA, 80 bp, synthetic construct
  source 1..80: mol_type = other DNA
gtcatgtctaaaagggaatcagttgtcaatcagatagcagaggtgaaaaattggaagatagatgatttgacagacaatga

SEQ ID NO: 81169 - DNA, 80 bp, synthetic construct
  source 1..80: mol_type = other DNA
aatctttaggctgaagatactccggtacttagtgctagatgctgaaatggatccaagcgacattatgggcgaaacaagtg

SEQ ID NO: 81170 - DNA, 80 bp, synthetic construct
  source 1..80: mol_type = other DNA
acatgagagggagatccatacttacacctaggaaattcactactgctggtagcttgaggaagctgtactcatttggcaag

SEQ ID NO: 81171 - DNA, 80 bp, synthetic construct
  source 1..80: mol_type = other DNA
tatcaggacagactctcatcccctggaggcatgcttgagctatttgcttatctgcttgaaaagccagaattacttgtaac

SEQ ID NO: 81172 - DNA, 80 bp, synthetic construct
  source 1..80: mol_type = other DNA
acagattactaattagagatttagccagcctagatttaaacaatgatgatatccaagtcatctactcgtatataatttta

SEQ ID NO: 81173 - DNA, 80 bp, synthetic construct
  source 1..80: mol_type = other DNA
aatgacccgatgatgataactattgcaaacacgcacatactgtctatatatggaagtcctcagaaaaggatgggcatgtc

SEQ ID NO: 81174 - DNA, 80 bp, synthetic construct
  source 1..80: mol_type = other DNA
gttcaactatgccggagttcaggaatctaaaattaatccatcattctcctgctttggttctaagggcatatagtaaaaac

SEQ ID NO: 81175 - DNA, 80 bp, synthetic construct
  source 1..80: mol_type = other DNA
gattggaagaaaaaatgaaagccagaatagcattgaatgaagcagaaaaagggcaaagagacattgttttcgagctaaaa

SEQ ID NO: 81176 - DNA, 80 bp, synthetic construct
  source 1..80: mol_type = other DNA
gaaatgactagattttaccaagtttgttatgagtatgtaaaatcaacagagcacaaaataaaggtctttattctcccggc

SEQ ID NO: 81177 - DNA, 80 bp, synthetic construct
  source 1..80: mol_type = other DNA
ctctactttttagaaccggggaccttaaacaaacagatctagataagtatgatgcaatgaaaagtcacgaaagggttaca

SEQ ID NO: 81178 - DNA, 80 bp, synthetic construct
  source 1..80: mol_type = other DNA
tggaatgactggcagacatctcgtcacttagatatgggatctataaatttaacaatcactggatacaataggtctataac

SEQ ID NO: 81179 - DNA, 80 bp, synthetic construct
  source 1..80: mol_type = other DNA
atataacattcagaaggaaagaccggcatcaatttgtatatcaaatacattcccacgagtctattacaagaagaaacgaa

SEQ ID NO: 81180 - DNA, 80 bp, synthetic construct
  source 1..80: mol_type = other DNA
agagaatcctgataaggtcactagactatctaaataatgacgtattttccttgtctagaattaaagtgggcctcgaggag

SEQ ID NO: 81181 - DNA, 80 bp, synthetic construct
  source 1..80: mol_type = other DNA
tttgcaacaataaaaaaagcacacttcagtaagatggtttcttttgaaggccctccaatcaagacaggtcttctagatct

SEQ ID NO: 81182 - DNA, 80 bp, synthetic construct
  source 1..80: mol_type = other DNA
aatcaaaatgttgatagaaagagagacaaaggtatttgaggaggcatttaccttcagcagtaacggctttgtatccccag

SEQ ID NO: 81183 - DNA, 80 bp, synthetic construct
  source 1..80: mol_type = other DNA
agaatctcggctgtttagaggctatagtctccttaattaagttattgaagactaatgagtggtctacagtcatagacaaa

SEQ ID NO: 81184 - DNA, 80 bp, synthetic construct
  source 1..80: mol_type = other DNA
aaaatggtatggatcatatgtaccattctttcgacatcccaaaatgcttcatggaaaatcccataaccagggacataaac

SEQ ID NO: 81185 - DNA, 80 bp, synthetic construct
  source 1..80: mol_type = other DNA
atgtcatgacagaaaatttcaagaaaaagtgcatagcattaataacttcaagattagagacccaaagagatttttcggag

SEQ ID NO: 81186 - DNA, 80 bp, synthetic construct
  source 1..80: mol_type = other DNA
tttgctaaactaatgaagaaggaaggtggcagaagcaatatagaatttgattaataaagagaaagattagaaaatgacgg

SEQ ID NO: 81187 - DNA, 80 bp, synthetic construct
  source 1..80: mol_type = other DNA
taaagagaaagattagaaaatgacggggttagcaaaataaaaatgacttatcataaaattggggggttgggttgattggc

SEQ ID NO: 81188 - DNA, 80 bp, synthetic construct
  source 1..80: mol_type = other DNA
gacggggttagcaaaataaaaatgacttatcataaaattggggggttgggttgattggctaattttcaaaaagaggggaa

SEQ ID NO: 81189 - DNA, 80 bp, synthetic construct
  source 1..80: mol_type = other DNA
taacgtttaaatactaaagttttaaaacaaagccaaagatgattttcatattagtactgcttgcagtcagtactgcgagt

SEQ ID NO: 81190 - DNA, 80 bp, synthetic construct
  source 1..80: mol_type = other DNA
taaattcaatggttataggagaaagcaaggaagttttcgaactagaagaactcccagatgacatgctagaaatggctttg

SEQ ID NO: 81191 - DNA, 80 bp, synthetic construct
  source 1..80: mol_type = other DNA
aaaataaatttttactattttgtttgcgtcataaactatgctgtgacttggggtctcatagttgttgctttgctaattgg

SEQ ID NO: 81192 - DNA, 80 bp, synthetic construct
  source 1..80: mol_type = other DNA
gctggtatttaaaaagtaccagcatagatttttaaacctttatgcgatgtattgtgaagagtgcgacatgtatcacgata

SEQ ID NO: 81193 - DNA, 80 bp, synthetic construct
  source 1..80: mol_type = other DNA
gaactggattgaaaaggaatggagactttacaaataaatgtagacagtgcacatgtggacagtatgaagatgccactggt

SEQ ID NO: 81194 - DNA, 80 bp, synthetic construct
  source 1..80: mol_type = other DNA
ctaataacgcacaggaagacatataactgccttgtgaaatataagtctaaatggatattaaatttcctaataacttatat

SEQ ID NO: 81195 - DNA, 80 bp, synthetic construct
  source 1..80: mol_type = other DNA
ggtcttaactttgattaaggattcagctatagttgtgcaggctgctggaacagatttcagtgcttgtttagaagcacaga

SEQ ID NO: 81196 - DNA, 80 bp, synthetic construct
  source 1..80: mol_type = other DNA
gtgtggattggaattgcacaggaccatttttgaaccttggtaattgtcaaaaacagcagaagaaggagtcttatgcaaac

SEQ ID NO: 81197 - DNA, 80 bp, synthetic construct
  source 1..80: mol_type = other DNA
atcgcaacacaactcaaaggcctacaggcgatctcagtactcgacatgcccatgatagcgagtataccagaagatatagc

SEQ ID NO: 81198 - DNA, 80 bp, synthetic construct
  source 1..80: mol_type = other DNA
aggggcattaagatatatagaagaaaaagaaactttccatgttcaactaactgcagaatatgctatgttaaccagatatt

SEQ ID NO: 81199 - DNA, 80 bp, synthetic construct
  source 1..80: mol_type = other DNA
gcgattattatactcaatttgcagacaactcgggctacagtcagactacatggagagtttatctgagatcacatgacttt

SEQ ID NO: 81200 - DNA, 80 bp, synthetic construct
  source 1..80: mol_type = other DNA
gatgcttgtatactttatccaaatcaacacttttgccgatgcgttaagcatggagacaaatgcagtagttctaactggga

SEQ ID NO: 81201 - DNA, 80 bp, synthetic construct
  source 1..80: mol_type = other DNA
ttttgctaatgagatgaaaaactactactcagggaaacaaagtaaatttgataaggatttaaatttggccctgatgacag

SEQ ID NO: 81202 - DNA, 80 bp, synthetic construct
  source 1..80: mol_type = other DNA
tacatcatgcattcagagggacctcatctgcatacattgcaacaatgctatctaaaaaatcaaataatgacctagttgca

SEQ ID NO: 81203 - DNA, 80 bp, synthetic construct
  source 1..80: mol_type = other DNA
atacaaataagataaaagagaaattccctggaaatgctttgttgaaggctgtcatggattacatatcgtacatgaagagt

SEQ ID NO: 81204 - DNA, 80 bp, synthetic construct
  source 1..80: mol_type = other DNA
ctatccgaaatgacaaatttcaaatacgatgagttctgggacgatctcttgtacaggccgaatcctacaaaagctccttc

SEQ ID NO: 81205 - DNA, 80 bp, synthetic construct
  source 1..80: mol_type = other DNA
cctctcaagagaaagcgaaacatcgtacaactttaaactggtcatttctcctaaatccatgaaaagctgcaaaaatgtta

SEQ ID NO: 81206 - DNA, 80 bp, synthetic construct
  source 1..80: mol_type = other DNA
aaagtgtagtatgcttatcacccagatctggagcatcatatgattcaatattagcatgtggcgagccaaatgggccaagc

SEQ ID NO: 81207 - DNA, 80 bp, synthetic construct
  source 1..80: mol_type = other DNA
gtgtatagaaaaccatctggcggtgtattccaatccaattcagataaaacaatgtattgcctagctgatagccattgctt

SEQ ID NO: 81208 - DNA, 80 bp, synthetic construct
  source 1..80: mol_type = other DNA
ggaggattttgaggtaattggtcaagaagagttggatgcaataaagaaatccgtgtgttgggcagtagaatatccagatg

SEQ ID NO: 81209 - DNA, 80 bp, synthetic construct
  source 1..80: mol_type = other DNA
tgacattgtctaagttgagcgatggggttaagagttgcagaatgaaggattcaggaaagtgcaatgttgcagctaacaga

SEQ ID NO: 81210 - DNA, 80 bp, synthetic construct
  source 1..80: mol_type = other DNA
tggccgataatacaatgtgaaaatgacaaattctattattcagagctgcaaaatgattatgataaaacacaggacatcgg

SEQ ID NO: 81211 - DNA, 80 bp, synthetic construct
  source 1..80: mol_type = other DNA
ccatttctgtcttagtcctgggtgctcaacagtaagattcccaatcaatcagaagcatatatctaattgcaattggcagg

SEQ ID NO: 81212 - DNA, 80 bp, synthetic construct
  source 1..80: mol_type = other DNA
ttagccggtctagcatagcaaagattgatgtgcatgatattgaagatatcgatcagtacagaaaggctataactcagaag

SEQ ID NO: 81213 - DNA, 80 bp, synthetic construct
  source 1..80: mol_type = other DNA
attgaaggcactgaaactgctgaaggtatagaaagcgcatatattgaatctgaaatacctgcattagctggaacgtcagt

SEQ ID NO: 81214 - DNA, 80 bp, synthetic construct
  source 1..80: mol_type = other DNA
tgggttcaaaatcaattccaaggagggtaagcacttactggacatcattggttatgttaaaagtgcatcatactcttctg

SEQ ID NO: 81215 - DNA, 80 bp, synthetic construct
  source 1..80: mol_type = other DNA
tatatactaagctctactcaacaggtccgacatcgggcataaatacaaaacatgatgaattatgcaccggaccatgccct

SEQ ID NO: 81216 - DNA, 80 bp, synthetic construct
  source 1..80: mol_type = other DNA
gcaaatatcaaccaccaaaatgggtggttgacctttgcaaaggagagaacaagctcttggggttgtgaggaatttggttg

SEQ ID NO: 81217 - DNA, 80 bp, synthetic construct
  source 1..80: mol_type = other DNA
ccttgccatcagtgatggatgtgtctttgggtcatgccaagatatagtgagggatgagttgtcagtatataggaaggaaa

SEQ ID NO: 81218 - DNA, 80 bp, synthetic construct
  source 1..80: mol_type = other DNA
cagaagaggttaccgatgtagaactgtgtttaacattctcagacaagacttattgcaccaacttaaaccccataacgcct

SEQ ID NO: 81219 - DNA, 80 bp, synthetic construct
  source 1..80: mol_type = other DNA
gataatgattatcaggcttgcaaattcttacaaacgccagctagttacagacttgaagaaaatagtggtacaataacagt

SEQ ID NO: 81220 - DNA, 80 bp, synthetic construct
  source 1..80: mol_type = other DNA
gattgactacaaaaagatactaggaacaatcaagatgaaagccatcctaggggatgttaagtataagacatttgcagaca

SEQ ID NO: 81221 - DNA, 80 bp, synthetic construct
  source 1..80: mol_type = other DNA
agtatgcgatgaaagttgtctgcacagaaaagccaggcaatacactaactctcaaggtttgcaatactaaagtagatgca

SEQ ID NO: 81222 - DNA, 80 bp, synthetic construct
  source 1..80: mol_type = other DNA
tcactagctcttattgatgccaaaccaatattagaattagcgccagttgatcagacagcctacatcagggaaaaagatga

SEQ ID NO: 81223 - DNA, 80 bp, synthetic construct
  source 1..80: mol_type = other DNA
ttatatagggatattttatactattatcatctctataattgtgctattaattgttatctacattatcttgcctgtttgtt

SEQ ID NO: 81224 - DNA, 80 bp, synthetic construct
  source 1..80: mol_type = other DNA
tcaagttaagggatactctaaggcagcatgaggacgcctacaagagagagatgaaagttagatagaagagtctagcagat

SEQ ID NO: 81225 - DNA, 80 bp, synthetic construct
  source 1..80: mol_type = other DNA
acaagagagagatgaaagttagatagaagagtctagcagatttcttttaggcctttgttaagtggccaatttgtagtttt

SEQ ID NO: 81226 - DNA, 80 bp, synthetic construct
  source 1..80: mol_type = other DNA
tttcttttaggcctttgttaagtggccaatttgtagttttttattattaaaaagtggggggtggggaactaacaacagcg

SEQ ID NO: 81227 - DNA, 80 bp, synthetic construct
  source 1..80: mol_type = other DNA
cctaagggaattacttagaagtgtgatgtccgatttggtgttttatgatgtcgcatcaacaggtgcaaatggatttgatc

SEQ ID NO: 81228 - DNA, 80 bp, synthetic construct
  source 1..80: mol_type = other DNA
aagaggagggctaagtgacaccgcaagaacattcctgcagaagttcggtattagactcccataaacaaagaattggggcg

SEQ ID NO: 81229 - DNA, 80 bp, synthetic construct
  source 1..80: mol_type = other DNA
ttgtaaattagggttcaaattcaaaattttgtattaatttggttcaattggctatccaaaagggttttcctaagggaacc

SEQ ID NO: 81230 - DNA, 80 bp, synthetic construct
  source 1..80: mol_type = other DNA
tggctatccaaaagggttttcctaagggaacccacaacaatagcagctaaatgggtgggtggtaggggacagcaaaaaat

SEQ ID NO: 81231 - DNA, 80 bp, synthetic construct
  source 1..80: mol_type = other DNA
gtcagaaatcagtaaaattccatgcatgctttagacaacataggggttgtataagattctttaaaggaacatatatgcca

SEQ ID NO: 81232 - DNA, 80 bp, synthetic construct
  source 1..80: mol_type = other DNA
ttcaaggaagcattggaattcaaatcatttggggcagaaaaatggaatatccttttgaaggtggtgatgtcaaagtatgg

SEQ ID NO: 81233 - DNA, 80 bp, synthetic construct
  source 1..80: mol_type = other DNA
tattagcaaaagcaggggaaaataaaagcaaccaacatgaaggcaatactggtagttttgctatatgcattcacaagagg

SEQ ID NO: 81234 - DNA, 80 bp, synthetic construct
  source 1..80: mol_type = other DNA
ttgtaggtttcagacttcgctacgattgtgtgtatcactttaatgaatagtacattacacacaatactagaggatccagg

SEQ ID NO: 81235 - DNA, 80 bp, synthetic construct
  source 1..80: mol_type = other DNA
tatcgcgtgtggcttaagccttaatcccgtttaactaatccggtcagcaccggacgttaatgagggggaatggttcaact

SEQ ID NO: 81236 - DNA, 80 bp, synthetic construct
  source 1..80: mol_type = other DNA
tagaaattatttagaacaaagaaaacaagatagaagggagcaggaaatacttgaaagattaagaagagtaagggaaatca

SEQ ID NO: 81237 - DNA, 80 bp, synthetic construct
  source 1..80: mol_type = other DNA
aggatgacagtgactatgacagtaatggagaagaagagcaagaagtcatggatcttatgcatagccatggctttgataat

SEQ ID NO: 81238 - DNA, 80 bp, synthetic construct
  source 1..80: mol_type = other DNA
atgcatcatagggacctgctagccataatagctttaagtgctttgtgccttataagtataattgtatggataatcaacct

SEQ ID NO: 81239 - DNA, 80 bp, synthetic construct
  source 1..80: mol_type = other DNA
acagtaatggagaagaagagcaagaagtcatggatcttatgcatagccatggctttgataatcccatgtttgagttgtag

SEQ ID NO: 81240 - DNA, 80 bp, synthetic construct
  source 1..80: mol_type = other DNA
ctattgaggacagaaacagtagagattcatgatgataactatggtggcccaggtgataaaataactatctgtaacggttc

SEQ ID NO: 81241 - DNA, 80 bp, synthetic construct
  source 1..80: mol_type = other DNA
catgaccttaactgcagttacaatatatgcccttattgtgcatcaagattgacttctgacgggctagctaggcatgtgcc

SEQ ID NO: 81242 - DNA, 80 bp, synthetic construct
  source 1..80: mol_type = other DNA
agcaaaagcaggggaatttcataaccagccaaaatggaaataatagcactaatagctatactggtagtgacaaaaacaag

SEQ ID NO: 81243 - DNA, 80 bp, synthetic construct
  source 1..80: mol_type = other DNA
aaggggttggaatggccgcagatagggaatcaactcaagaagcagttgacaagataacatccaaagtaaataacataatc

SEQ ID NO: 81244 - DNA, 80 bp, synthetic construct
  source 1..80: mol_type = other DNA
caaatacaggacatctgggcgtacaatgcagaattactggtactgcttgaaaatcagaaaacactcgatgagcatgatgc

SEQ ID NO: 81245 - DNA, 80 bp, synthetic construct
  source 1..80: mol_type = other DNA
ataatctgtataataaggtgaagagagcattgggttcaaatgcaatagaggatggaaagggatgcttcgagttgtatcac

SEQ ID NO: 81246 - DNA, 80 bp, synthetic construct
  source 1..80: mol_type = other DNA
aaatgtgatgatcaatgcatggaaacaattagaaacgggacttatgacaggctaaagtatgaagaagaatcaaaactaga

SEQ ID NO: 81247 - DNA, 80 bp, synthetic construct
  source 1..80: mol_type = other DNA
agaaggggtgaaactggagtctgaagaaacttacaagagccttaccatttattcgactgtcgcctcatctcttgtgcttg

SEQ ID NO: 81248 - DNA, 80 bp, synthetic construct
  source 1..80: mol_type = other DNA
atgtccaatggatcttgcagatgcaacatttgtatataattagcaaaaacacccttgtttctactaatacgagacgatat

SEQ ID NO: 81249 - DNA, 80 bp, synthetic construct
  source 1..80: mol_type = other DNA
tgctatgtgcaacaaacctggggcaccctctcatcctagacacctgcaccatcgaagggttggtgtacggcaacccttcc

SEQ ID NO: 81250 - DNA, 80 bp, synthetic construct
  source 1..80: mol_type = other DNA
tactgggagggaaagaatggtcttacattgtcgaaagatcatcagctgtcaatgggatatgttaccctggaaaggtagag

SEQ ID NO: 81251 - DNA, 80 bp, synthetic construct
  source 1..80: mol_type = other DNA
tcaagacgcccaatatactaacgattggggaaagaatattctcttcatgtggggcatacaccacccacctactgatactg

SEQ ID NO: 81252 - DNA, 80 bp, synthetic construct
  source 1..80: mol_type = other DNA
agcaaataaatctatacaaaaaagctgatacaacaacaagtataacaacggaagatatcaatcgaactttcaaaccagtg

SEQ ID NO: 81253 - DNA, 80 bp, synthetic construct
  source 1..80: mol_type = other DNA
atagggccaaggcctcttgtcaatggtcaacaagggagaattgattattattggtcagtactaaagccaggccagacact

SEQ ID NO: 81254 - DNA, 80 bp, synthetic construct
  source 1..80: mol_type = other DNA
tgagtagtggcaactgcgtagtacaatgccaaactgagaaaggtggtttgaacacgaccttgccattccacaatgtcagc

SEQ ID NO: 81255 - DNA, 80 bp, synthetic construct
  source 1..80: mol_type = other DNA
tcaagattgacctccgatgggttagccaggcatgtaacgcaatgccccaaacgaaaagagaaagttgaggagactgaact

SEQ ID NO: 81256 - DNA, 80 bp, synthetic construct
  source 1..80: mol_type = other DNA
gatctgactttgaaacaaatgactggcgacagagaagaaaattgatagaagaagaaacgaaaaaatggttggaagtttct

SEQ ID NO: 81257 - DNA, 80 bp, synthetic construct
  source 1..80: mol_type = other DNA
attagaaaataaaaaagtagaagcagtattattgaaaatgactgcaatggatggagagatacctgatggatattttatac

SEQ ID NO: 81258 - DNA, 80 bp, synthetic construct
  source 1..80: mol_type = other DNA
tatttacttattgataagcacatcatcagaaaacgcaaaataaaagtcacaaaatccttaatgtataatgctataaatac

SEQ ID NO: 81259 - DNA, 80 bp, synthetic construct
  source 1..80: mol_type = other DNA
gataatgtgttcatttcaggtaagtattcattaagaggtaaaactgaaggcgtattggcgttatattgtctatcgaatac

SEQ ID NO: 81260 - DNA, 80 bp, synthetic construct
  source 1..80: mol_type = other DNA
gattttaaaacaaattttgatcatacttttttaccgtcagattttacatgctcattaaatacggttttaacttcatatag

SEQ ID NO: 81261 - DNA, 80 bp, synthetic construct
  source 1..80: mol_type = other DNA
caaatcaagtagctacgacagtcatattatatctggatgttatagacataaaagaagtcaacaaagcatttgaattattg

SEQ ID NO: 81262 - DNA, 80 bp, synthetic construct
  source 1..80: mol_type = other DNA
tgagaataatttcgacacgttcgcatcacatttaggattatcaagatattcacattccaaaagattttcagaatcagcaa

SEQ ID NO: 81263 - DNA, 80 bp, synthetic construct
  source 1..80: mol_type = other DNA
ggctggccaatttaaagttaagtcagatatatataaagaacatacggacgatgagatacggaatgcaattgaatcagcct

SEQ ID NO: 81264 - DNA, 80 bp, synthetic construct
  source 1..80: mol_type = other DNA
tttattagatggtgataaagttggtgagaaatatgcaaagaaaataatggagatttgggaaattcaagtgtgaggctaat

SEQ ID NO: 81265 - DNA, 80 bp, synthetic construct
  source 1..80: mol_type = other DNA
tgagaaatatgcaaagaaaataatggagatttgggaaattcaagtgtgaggctaatcacctctaccatatgatgtggcta

SEQ ID NO: 81266 - DNA, 80 bp, synthetic construct
  source 1..80: mol_type = other DNA
acataagatagtgtactttcatgagtatacctattataaaaataatgagtttattgtaagtgatgaattctggctatata

SEQ ID NO: 81267 - DNA, 80 bp, synthetic construct
  source 1..80: mol_type = other DNA
ttaccttataaaatactttattatgaacgaggaatgagagaactatatgttggtaaagaatatacattgtataatacagc

SEQ ID NO: 81268 - DNA, 80 bp, synthetic construct
  source 1..80: mol_type = other DNA
atgacatcttatataaatatatttatgaaaaagattcaattgtgaacagtgctgattataagaaattatatgacaataat

SEQ ID NO: 81269 - DNA, 80 bp, synthetic construct
  source 1..80: mol_type = other DNA
ggattaattattctgcaaatggaatagtgatttcagaattgaaaggattaggaagttactctgaaaaaaagataagtgaa

SEQ ID NO: 81270 - DNA, 80 bp, synthetic construct
  source 1..80: mol_type = other DNA
gcaaaaaaatatctctatcttctgtcataccagatggacacgctttatataacaacattgatagattacgaatttctctt

SEQ ID NO: 81271 - DNA, 80 bp, synthetic construct
  source 1..80: mol_type = other DNA
agtgtaaagtttgtccatgtgattattgtggaatacggcacaagtgtgaaaattgtttaaactcagactgttttatgaat

SEQ ID NO: 81272 - DNA, 80 bp, synthetic construct
  source 1..80: mol_type = other DNA
cattatgtattgctgaaattaatgcacgtagaccaatttctgggtgtgattatttaattgaagcatgcctgtgtaatgaa

SEQ ID NO: 81273 - DNA, 80 bp, synthetic construct
  source 1..80: mol_type = other DNA
ttgatagaaaattaccatgtgtaaatgtaaacatgtggagaagagagacagaatatagagtaaatggaatctgtcttaac

SEQ ID NO: 81274 - DNA, 80 bp, synthetic construct
  source 1..80: mol_type = other DNA
tgttttattacggtcattcaaagtgtcacgtcgtttcagaatgcccaagatggaatcagcaattaagagtgttaaatgcg

SEQ ID NO: 81275 - DNA, 80 bp, synthetic construct
  source 1..80: mol_type = other DNA
gaaatagctaatctgttagcagatatattaaatatggtgtctatgccaaccgaaaaatttcaatttgacatagttaaaac

SEQ ID NO: 81276 - DNA, 80 bp, synthetic construct
  source 1..80: mol_type = other DNA
gttaggcatcttgaaaacttgctttacagaataaaagatgttaacgatattttgaatacaaatgtaaaattaagagtaaa

SEQ ID NO: 81277 - DNA, 80 bp, synthetic construct
  source 1..80: mol_type = other DNA
agacgtgtattggtcaattatgtggtggtagtacattcgaagttgctaaaacatcactatatagcataaatccatcaaaa

SEQ ID NO: 81278 - DNA, 80 bp, synthetic construct
  source 1..80: mol_type = other DNA
gcatgcctgcaggtcgactctagaggggatccagatctggctttaaaattttcagatcactttgctctacgaagtaatgg

SEQ ID NO: 81279 - DNA, 80 bp, synthetic construct
  source 1..80: mol_type = other DNA
taaatggagggataaattttacaagagctaaaaacaaagtgaaagaaacagaaaatgagattactgaaatgaaatcaaag

SEQ ID NO: 81280 - DNA, 80 bp, synthetic construct
  source 1..80: mol_type = other DNA
gacattaattcaaacataggaacatttagtccaattaatcaaaaagtaaaaacagaagcggtattagacatgttcgaaga

SEQ ID NO: 81281 - DNA, 80 bp, synthetic construct
  source 1..80: mol_type = other DNA
caatggacacatatgaaccacatgttagggagtttttagacttcttccctgatgggcaccacggagaagtgcggggaaac

SEQ ID NO: 81282 - DNA, 80 bp, synthetic construct
  source 1..80: mol_type = other DNA
taacgattttagtctccctgggggcaatcagcttttggatgtgttctaatgggtctttgcagtgcaaaatatgcatctga

SEQ ID NO: 81283 - DNA, 80 bp, synthetic construct
  source 1..80: mol_type = other DNA
ttgtattatggggtatacaccatccggctaacatagaggatcaaagggccatataccacaaagaaactgcttatgtttct

SEQ ID NO: 81284 - DNA, 80 bp, synthetic construct
  source 1..80: mol_type = other DNA
agagaggaatacaacggagacagtgtacttggttaacaccaccatagaaagggaaacatgccccaaaatagtggaataca

SEQ ID NO: 81285 - DNA, 80 bp, synthetic construct
  source 1..80: mol_type = other DNA
cctgttaccccagatatcctggtgtaaggtgtgtctgcagagataactggaaaggctctaacaggccagttgtagatata

SEQ ID NO: 81286 - DNA, 80 bp, synthetic construct
  source 1..80: mol_type = other DNA
atgcaaacaattcaaccgacactgttgacacagtactcaaaaagaacgtgacagtgacacactctgtcaacctactcgag

SEQ ID NO: 81287 - DNA, 80 bp, synthetic construct
  source 1..80: mol_type = other DNA
cgccagttcactggtgcttttagtctccctgggggcagtcagcttttggatgtgttctaatgggtctttgcaatcaaaag

SEQ ID NO: 81288 - DNA, 80 bp, synthetic construct
  source 1..80: mol_type = other DNA
tcaaactatatgagtgcagctcccctgtgaacaaccaaacaataacatgtgagccagtaataatagagagaaacaaaacg

SEQ ID NO: 81289 - DNA, 80 bp, synthetic construct
  source 1..80: mol_type = other DNA
aatgagaaactgttctttcaatgtcacagcacccttaagagataaggtaaagacagaatatgcacttctttataaacttg

SEQ ID NO: 81290 - DNA, 80 bp, synthetic construct
  source 1..80: mol_type = other DNA
ctgttctttcaatgtcacagcacccttaagagataaggtaaagacagaatatgcacttctttataaacttgatataacac

SEQ ID NO: 81291 - DNA, 80 bp, synthetic construct
  source 1..80: mol_type = other DNA
ggaagagccaggagaaataaaaaactgttctttcaatgttaccacaaacataagaggcaagatgcagacagaatatgcat

SEQ ID NO: 81292 - DNA, 80 bp, synthetic construct
  source 1..80: mol_type = other DNA
ttgcacgagttggaatgctacgggtttgaatgctactggtgacaatgagtgcgctgctttgaagaatattactgacttta

SEQ ID NO: 81293 - DNA, 80 bp, synthetic construct
  source 1..80: mol_type = other DNA
tgacaatgagtgcgctgctttgaagaatattactgactttaatagaacaataatagaggggggagaagagataaaaaact

SEQ ID NO: 81294 - DNA, 80 bp, synthetic construct
  source 1..80: mol_type = other DNA
cataggggaagaaatgaaaacagagataaaaaactgcactttcaatgtcactggaggcataagagataaggtacagaaag

SEQ ID NO: 81295 - DNA, 80 bp, synthetic construct
  source 1..80: mol_type = other DNA
acatcgagctctttgcatgggactttccactggggactttccaaggaggcgtggcctgggcgggactggggagtggcgag

SEQ ID NO: 81296 - DNA, 80 bp, synthetic construct
  source 1..80: mol_type = other DNA
tgaaataaaaaactgctctttcaatattaccacagacataaaaaatcaggtgaggaaacaagatgcactttttaatgagc

SEQ ID NO: 81297 - DNA, 80 bp, synthetic construct
  source 1..80: mol_type = other DNA
aggaggagtaaaaaactgctctttcaacgtctcctcaatcatgagagataaggtgaagaaagaatatgcacttttttatg

SEQ ID NO: 81298 - DNA, 80 bp, synthetic construct
  source 1..80: mol_type = other DNA
ggacaaatcagcagactataataccgaacattggatctagaccctggataaggcgccagtcaggcagaataagcatctac

SEQ ID NO: 81299 - DNA, 80 bp, synthetic construct
  source 1..80: mol_type = other DNA
cgtattccttcatgaagcatgggttaggaagcttggccatcatagatgacccatattccccagagcctcgtaaaggcttt

SEQ ID NO: 81300 - DNA, 80 bp, synthetic construct
  source 1..80: mol_type = other DNA
atgacctccaaacctgggtctggcttttgggtaaactgtttcctttggcacatccgcaaacggtttgcagacaatggatt

SEQ ID NO: 81301 - DNA, 80 bp, synthetic construct
  source 1..80: mol_type = other DNA
tatatactcgtacttggtcggaggttgacgccgtctctagtccggcccggccggatttaggttttatgtctgagccttct

SEQ ID NO: 81302 - DNA, 80 bp, synthetic construct
  source 1..80: mol_type = other DNA
gccgccacacctatcctcgcggcccctttacctttctctgcaccggacccctccccccccccctctgccccggcgcttga

SEQ ID NO: 81303 - DNA, 80 bp, synthetic construct
  source 1..80: mol_type = other DNA
cgacggcgcggccgcgtacacattaacccctcggccaataattcatgctgtcgcccctgattataggttggaacataacc

SEQ ID NO: 81304 - DNA, 80 bp, synthetic construct
  source 1..80: mol_type = other DNA
ccccggggatgagttgtacctccctgagcttgctgccagatggtttgaggccaatcggccgacccgcccaactctcacta

SEQ ID NO: 81305 - DNA, 80 bp, synthetic construct
  source 1..80: mol_type = other DNA
acccaggggcgccgggttgtcattgatgaggctccgtccctccctcctcacctgctgctgctccacatgcagcgggccgc

SEQ ID NO: 81306 - DNA, 80 bp, synthetic construct
  source 1..80: mol_type = other DNA
cgggggctgctgtcctgatcgccggctgtggcttaaagttgaaggtagactttcgcccgattggtctgtatgcaggtgtt

SEQ ID NO: 81307 - DNA, 80 bp, synthetic construct
  source 1..80: mol_type = other DNA
ggggccctggccctgagcgggcggagcagctccgcctcgctgtgagtgattttctccgcaagctcacgaatgtagcacag

SEQ ID NO: 81308 - DNA, 80 bp, synthetic construct
  source 1..80: mol_type = other DNA
atgttgtttcccgtgtttatggggtttcccctgggctcgttcataacctgattggcatgctacaggctgttgctgatggc

SEQ ID NO: 81309 - DNA, 80 bp, synthetic construct
  source 1..80: mol_type = other DNA
cggggtggctgaggaggaagctacctctggtctcgttatgctttgcatacacggctcacccgtaaactcttatactaata

SEQ ID NO: 81310 - DNA, 80 bp, synthetic construct
  source 1..80: mol_type = other DNA
tgttgttcggggccaccctggacgaccaagccttttgctgctcccgtttaatgacctatcttcgcggcattagctacaag

SEQ ID NO: 81311 - DNA, 80 bp, synthetic construct
  source 1..80: mol_type = other DNA
agctcactccaggcagattccggacaattgtatgtggtctcttcccaactcagattcaggtgcgcaatatcatgagcccc

SEQ ID NO: 81312 - DNA, 80 bp, synthetic construct
  source 1..80: mol_type = other DNA
tccgagtgggcagacagcagattggtatacaattggagtttatgtcattggctttacactcccaatcatactgaaagctc

SEQ ID NO: 81313 - DNA, 80 bp, synthetic construct
  source 1..80: mol_type = other DNA
ggacgattgtgtgtggtctcttcccaactcagattcaagtacgcaatattatgagtcctgtgatgggcgtcatcggctta

SEQ ID NO: 81314 - DNA, 80 bp, synthetic construct
  source 1..80: mol_type = other DNA
aacatccaaagggtggtgaacaatactgggaccgcttccacccttcctttagaacggatcaaaagaactttaatcatttt

SEQ ID NO: 81315 - DNA, 80 bp, synthetic construct
  source 1..80: mol_type = other DNA
tttatacaggaacagtcctcttttgggggcctccaaagaataaggtaaaaaaaccccaggaagcctttaaccagattaaa

SEQ ID NO: 81316 - DNA, 80 bp, synthetic construct
  source 1..80: mol_type = other DNA
gaagaacaaaaccaatgttagaaaaagggaccacaagccaccactgacaccagaaaccaccgccgcccaggcaacccaaa

SEQ ID NO: 81317 - DNA, 80 bp, synthetic construct
  source 1..80: mol_type = other DNA
taaccccgggcttttttaaaccacaaaagggggtcaacaaaaaataaaaaagttacacccccctctcacaacaggaacac

SEQ ID NO: 81318 - DNA, 80 bp, synthetic construct
  source 1..80: mol_type = other DNA
aaaaacttaaatcttttttttatctctagtccctccccttttgtgtacatccccgggtaaaggtaaaaaacacccagaaa

SEQ ID NO: 81319 - DNA, 80 bp, synthetic construct
  source 1..80: mol_type = other DNA
cccgggtaaaggtaaaaaacacccagaaagctcttctgcaaatagagggactttttttttagggaaagcttgggcttccc

SEQ ID NO: 81320 - DNA, 80 bp, synthetic construct
  source 1..80: mol_type = other DNA
gctcttctgcaaatagagggactttttttttagggaaagcttgggcttcccccaagggggggggcggaaattttaaacaa

SEQ ID NO: 81321 - DNA, 80 bp, synthetic construct
  source 1..80: mol_type = other DNA
aaagagggggagccccaactcccccccccaggaaaatttttagggggggaagaagaaacaatctttttcccctagggatt

SEQ ID NO: 81322 - DNA, 80 bp, synthetic construct
  source 1..80: mol_type = other DNA
gggaagaagaaacaatctttttcccctagggatttaaaaggaagggggaagggaacaccggaaaaggcttttagcccagg

SEQ ID NO: 81323 - DNA, 80 bp, synthetic construct
  source 1..80: mol_type = other DNA
acattcccgagcaagataaaaaaaaacataaacctggggcaggggggagcaagatcaacctctgcccctgccggaaccgt

SEQ ID NO: 81324 - DNA, 80 bp, synthetic construct
  source 1..80: mol_type = other DNA
gggagcaagatcaacctctgcccctgccggaaccgtaaccataacatcaagtttaacaggaacaggattgttacgggaag

SEQ ID NO: 81325 - DNA, 80 bp, synthetic construct
  source 1..80: mol_type = other DNA
aaccataacatcaagtttaacaggaacaggattgttacgggaaggagaagggagaaagagcaaacacactaatgagacat

SEQ ID NO: 81326 - DNA, 80 bp, synthetic construct
  source 1..80: mol_type = other DNA
aatccagcagcagtagagccagcagcagcaggggtgggagcagcatctcgagacctggaaaaacatggagcaatcactag

SEQ ID NO: 81327 - DNA, 80 bp, synthetic construct
  source 1..80: mol_type = other DNA
ccccagcagaataaaactaataatcatcatgcggcaggaagtagaagcagcaatgtctcctcctctcatcagacgactaa

SEQ ID NO: 81328 - DNA, 80 bp, synthetic construct
  source 1..80: mol_type = other DNA
gaagatgttcatcaaatactagtgggttgttatcaacagaagaaggaggtggtaatggtacgaacccgaacgacacagag

SEQ ID NO: 81329 - DNA, 80 bp, synthetic construct
  source 1..80: mol_type = other DNA
catgtggcagggagtggggcaggcaatgtatcaggcaatctatgctggaaacattgcaggaaaaataaatagtacatcca

SEQ ID NO: 81330 - DNA, 80 bp, synthetic construct
  source 1..80: mol_type = other DNA
gacccagcagcagagggggcagcagcagaaggggtgggagcagcatctcgagacctagagaaacatggagcaatcacaag

SEQ ID NO: 81331 - DNA, 80 bp, synthetic construct
  source 1..80: mol_type = other DNA
taatgatgaaatgagcacttgctctgttgctgctgccccaaccaatgaaaatgaaaaaaaaatagaacttgttttttttt

SEQ ID NO: 81332 - DNA, 80 bp, synthetic construct
  source 1..80: mol_type = other DNA
atgatcttgttgtaataccaaaaaaggataaaaataatactaatactacttatgtgttgacaagttgtaacacctcatca

SEQ ID NO: 81333 - DNA, 80 bp, synthetic construct
  source 1..80: mol_type = other DNA
attactaaggcctgccccacgataacctttgttccacttcttctactttattgtgccgcggctgcttttgcaattctaat

SEQ ID NO: 81334 - DNA, 80 bp, synthetic construct
  source 1..80: mol_type = other DNA
ctgcaccttcaatattactaatagcataggaaataagctgcaaaaagaatatgcacttttttacaagcttgatataatgt

SEQ ID NO: 81335 - DNA, 80 bp, synthetic construct
  source 1..80: mol_type = other DNA
catcttgcgacagagaagaacaacaaatggacccagcagatcctcatctagaagcctggaatcatccaggaagtcatcct

SEQ ID NO: 81336 - DNA, 80 bp, synthetic construct
  source 1..80: mol_type = other DNA
agtaccagtattgacactagtatccttaatgataccagtaatgcagacttgaagaattgctctttcaatacaaccacaaa

SEQ ID NO: 81337 - DNA, 80 bp, synthetic construct
  source 1..80: mol_type = other DNA
aataagtgataatgaaatttttgagtttgctgttaataatactcttgatgtagaaccaattgatggaacatacacctcca

SEQ ID NO: 81338 - DNA, 80 bp, synthetic construct
  source 1..80: mol_type = other DNA
tcttatgcaaccatcgcggtttcatatagaataggacaaattataaacatgtggcggcaggtaggacgagcaatctatgg

SEQ ID NO: 81339 - DNA, 80 bp, synthetic construct
  source 1..80: mol_type = other DNA
ccctccggtggcacgaaaaatgtcagcccatccaagtaccacaggcctattattggtatgtgatgggggtgagaagagct

SEQ ID NO: 81340 - DNA, 80 bp, synthetic construct
  source 1..80: mol_type = other DNA
aaattgctctttcaatatcaccacaaacatgggctatacgaagcaggaaaatgcagttttttataatctagacgtagtac

SEQ ID NO: 81341 - DNA, 80 bp, synthetic construct
  source 1..80: mol_type = other DNA
agaaaggagaaatgaaaaatttctctttccatatcaacacaggaaaggaaaaaacacaaccgacacgtacaaattatgct

SEQ ID NO: 81342 - DNA, 80 bp, synthetic construct
  source 1..80: mol_type = other DNA
gcagcaagacgtgctcctccagcagcagcaggagtaggagcagtatctcaagatttagataaacatggagcaattacaag

SEQ ID NO: 81343 - DNA, 80 bp, synthetic construct
  source 1..80: mol_type = other DNA
agagtaagagcagcagaaggagcagcagagggagtaggagcagcatctcgagacttagagcagcatggagcactgacaag

SEQ ID NO: 81344 - DNA, 80 bp, synthetic construct
  source 1..80: mol_type = other DNA
ccagcaacaaatgaggaagcagcagcagtaggggtgggagcagcatctcaagatctggcaagacatggagcaatcacagc

SEQ ID NO: 81345 - DNA, 80 bp, synthetic construct
  source 1..80: mol_type = other DNA
agaaggagacgatctgagccagcagcagatggggtgggagcagtatctcgagacctggataaacatggagcaatcacaaa

SEQ ID NO: 81346 - DNA, 80 bp, synthetic construct
  source 1..80: mol_type = other DNA
accgcgtccaggtaaactaaaattaccctatagaggcaaatggacaagtgctactgatacacttaaacttatcgactttg

SEQ ID NO: 81347 - DNA, 80 bp, synthetic construct
  source 1..80: mol_type = other DNA
agagcagaatctcaagatgcaacaagaggagagggagcaacatctcaagatttagatagacaaggagcagcagccacaag

SEQ ID NO: 81348 - DNA, 80 bp, synthetic construct
  source 1..80: mol_type = other DNA
gctgagccagcagcagaggcagcagcagttggggtaggaccagcatctcgagacctggaaaaacatggagcaatcacaag

SEQ ID NO: 81349 - DNA, 80 bp, synthetic construct
  source 1..80: mol_type = other DNA
taattatacaactggtaataaggtggcaggaggtaggaagagcaatatcagccccccccactgcaggagaaaatatctca

SEQ ID NO: 81350 - DNA, 80 bp, synthetic construct
  source 1..80: mol_type = other DNA
ggatcatatatcacacgagtattatggccaaccggagggggaaaaaattgagggcaaaatgacacagagacattcagacc

SEQ ID NO: 81351 - DNA, 80 bp, synthetic construct
  source 1..80: mol_type = other DNA
tttttctgccaccgcttgaggagctacttcttattgatagcgaggacagtagaagttcttgtgggacacatcctcctggg

SEQ ID NO: 81352 - DNA, 80 bp, synthetic construct
  source 1..80: mol_type = other DNA
gcggagggggggggtcatcatgtattttgtgagtaatgttgtgttgtattggagtctagagctaaagaagagtgttagta

SEQ ID NO: 81353 - DNA, 80 bp, synthetic construct
  source 1..80: mol_type = other DNA
aatgttgtgttgtattggagtctagagctaaagaagagtgttagtagtcttgatgatacaacaacaacagcagcagcggg

SEQ ID NO: 81354 - DNA, 80 bp, synthetic construct
  source 1..80: mol_type = other DNA
gtcttgatgatacaacaacaacagcagcagcgggggcagcagatagaatagtagaattgctacgaagaattagtggaatt

SEQ ID NO: 81355 - DNA, 80 bp, synthetic construct
  source 1..80: mol_type = other DNA
atctgcagcattcgtagaagaatacggcggtgcttagcagcagctttacaataaaatgggcaacaagtggtcaagcagct

SEQ ID NO: 81356 - DNA, 80 bp, synthetic construct
  source 1..80: mol_type = other DNA
taaggggatggcctgctataagagagaggatgagacgaactgcgccagcagcagagaggatgagacaaactgagccagca

SEQ ID NO: 81357 - DNA, 80 bp, synthetic construct
  source 1..80: mol_type = other DNA
aggatgagacaaactgagccagcagcagagggagtaggagcagcgtctcgagacttagaaagacatggggcactgacaag

SEQ ID NO: 81358 - DNA, 80 bp, synthetic construct
  source 1..80: mol_type = other DNA
tcacatgtagcaataagacaacaactaacagagcacaagaggaggaggctgtaagtgttccagtcagacctcaagtccac

SEQ ID NO: 81359 - DNA, 80 bp, synthetic construct
  source 1..80: mol_type = other DNA
cagagcacaagaggaggaggctgtaagtgttccagtcagacctcaagtccactctttaaaaaaaaaggggggactggaag

SEQ ID NO: 81360 - DNA, 80 bp, synthetic construct
  source 1..80: mol_type = other DNA
ggttacttccctgattggtagaactacacaccggggccagggatcagatatccactgccctttggatggcgctacaagtg

SEQ ID NO: 81361 - DNA, 80 bp, synthetic construct
  source 1..80: mol_type = other DNA
cactaccactcctaccactcctaccaataccacccctcccactagtatttgcagggagatgatgaactgctctttcaata

SEQ ID NO: 81362 - DNA, 80 bp, synthetic construct
  source 1..80: mol_type = other DNA
cctaccgctaacagaagccaggaggaaggagaaatgaaaaactgttctttctatgtcaccccaagcataagagataaatt

SEQ ID NO: 81363 - DNA, 80 bp, synthetic construct
  source 1..80: mol_type = other DNA
tagtattccggaggattcaggaatgacaaactgctctttcaatgtcaccacactcgtaagaaacaatgtaaagaaggaat

SEQ ID NO: 81364 - DNA, 80 bp, synthetic construct
  source 1..80: mol_type = other DNA
tctgcacccagagttctacaagaactgctgacaccaagctttctgaaaccgctaacactgagctttctacaagggacttt

SEQ ID NO: 81365 - DNA, 80 bp, synthetic construct
  source 1..80: mol_type = other DNA
tggaataagactggattcaacaagaatttaccagattttggcgatatattcaactgtcgccagctcgtcgatactgttag

SEQ ID NO: 81366 - DNA, 80 bp, synthetic construct
  source 1..80: mol_type = other DNA
atgaatacaaatcaaagaataataaccattggaacagtttgtctaataattgggatagttagcctattattgcagatagg

SEQ ID NO: 81367 - DNA, 80 bp, synthetic construct
  source 1..80: mol_type = other DNA
aattaacaggaatgaactgtataaagccttgtttttgggtagagttaatcagaggacagcccaaggagagcactatctgg

SEQ ID NO: 81368 - DNA, 80 bp, synthetic construct
  source 1..80: mol_type = other DNA
actagtggaagcagcatttccttctgtggcgtggacagtgaaactgcaagctggtcatggccagacggagctgatctgcc

SEQ ID NO: 81369 - DNA, 80 bp, synthetic construct
  source 1..80: mol_type = other DNA
aaatatagtctcattgtggataagccactcaattcagactggagagaaaaatcattccaagatttgcagccaaaatacca

SEQ ID NO: 81370 - DNA, 80 bp, synthetic construct
  source 1..80: mol_type = other DNA
gccactcgattcagaccggaaggaaaaatcactctgaaatgtgcaaccaaaatgtcattacatatgtaaataacacatgg

SEQ ID NO: 81371 - DNA, 80 bp, synthetic construct
  source 1..80: mol_type = other DNA
gtcagaatgtgtttgtatgaacggctcatgtttcactgtattaactgatggcccaagcaatgggcaagcctcgtacaaat

SEQ ID NO: 81372 - DNA, 80 bp, synthetic construct
  source 1..80: mol_type = other DNA
gaacatttctgatgaagttagtgaaatcggagctaggaaaacaacaaatgtcacaattaatccaggtccgttcgcacaga

SEQ ID NO: 81373 - DNA, 80 bp, synthetic construct
  source 1..80: mol_type = other DNA
aaaacaccaagaatgtagtgccagtaaatatatcatctagagagattagacatacacgagcacaaatgaatgaagacata

SEQ ID NO: 81374 - DNA, 80 bp, synthetic construct
  source 1..80: mol_type = other DNA
cactgggagcaagggggaggagggagaaatgagaaactgctctttcaatatcaccacgcaaataaaacaaaaggtgcgaa

SEQ ID NO: 81375 - DNA, 80 bp, synthetic construct
  source 1..80: mol_type = other DNA
gacaaactgctctttcgatgtcacaaacatgggaaagaagcataaagaatatgcaattttttataaaactgatgtagtat

SEQ ID NO: 81376 - DNA, 80 bp, synthetic construct
  source 1..80: mol_type = other DNA
agtagtagtactaatgctactgatatggaggcggtggaacaaatgagaaattgctctttcaatgtcaccaaaggcatagg

SEQ ID NO: 81377 - DNA, 80 bp, synthetic construct
  source 1..80: mol_type = other DNA
agataagatgcagaaagaatatgcactttttgataaacttgacataatgccaatagataagaataagacaagctatattc

SEQ ID NO: 81378 - DNA, 80 bp, synthetic construct
  source 1..80: mol_type = other DNA
agtgaatgccagtctagattcttccatttcagtatcaacattttctaataaggagaaatctaaaccggatcataaaagta

SEQ ID NO: 81379 - DNA, 80 bp, synthetic construct
  source 1..80: mol_type = other DNA
gaatttgcatgataactttgagtcgctatgggatacaataaccacatcaaattacatcttagctagatcagtaggggcaa

SEQ ID NO: 81380 - DNA, 80 bp, synthetic construct
  source 1..80: mol_type = other DNA
taacatttctcttcgagcaaaagcaggggatcagtctgtcaaaatggagaaaatagtgcttcttcttgcaataatcagtc

SEQ ID NO: 81381 - DNA, 80 bp, synthetic construct
  source 1..80: mol_type = other DNA
caatgcagaatttgcatttaaatttgtgagttcagattgtagttaaaaacacccttgtttctacttatagtgagttcgta

SEQ ID NO: 81382 - DNA, 80 bp, synthetic construct
  source 1..80: mol_type = other DNA
tcagacttctcttcgagcaaaagcaggggacaaaaacataatggattccaacactgtgtcaagctttcaggtagactgct

SEQ ID NO: 81383 - DNA, 80 bp, synthetic construct
  source 1..80: mol_type = other DNA
atggctacttttaaagatgcatgctttcattatcgtagattaactgctttaaatcggagattatgcaacattggtgcaaa

SEQ ID NO: 81384 - DNA, 80 bp, synthetic construct
  source 1..80: mol_type = other DNA
taaggggtggtgtttagaatgttgtcaaatagctgatttaacccattgttatggttgctcattgccgcatgtttgcaaat

SEQ ID NO: 81385 - DNA, 80 bp, synthetic construct
  source 1..80: mol_type = other DNA
gaaaataatctttattatgtttttgggttatatgagaaatcagtcagtgatatatatgctccatatagaattgttaactt

SEQ ID NO: 81386 - DNA, 80 bp, synthetic construct
  source 1..80: mol_type = other DNA
tttgataaattattgcttgatcatattaactttacaagaatgtccaatctaccaatagagttgagaaaccattacgcaaa

SEQ ID NO: 81387 - DNA, 80 bp, synthetic construct
  source 1..80: mol_type = other DNA
atttaaaaaatgataagaataaattaattgctgcaatgatgacgagtaagtatactcggttctatgctcatgataataat

SEQ ID NO: 81388 - DNA, 80 bp, synthetic construct
  source 1..80: mol_type = other DNA
tggatgttgacgatggtcattttgtcaacatagagctgaagtaaaaaactaccttgttttctactaatacgagacgatat

SEQ ID NO: 81389 - DNA, 80 bp, synthetic construct
  source 1..80: mol_type = other DNA
cgcaccggggatcctaggcgttttgttgcgctattgagctgtacaacttttctctgtagagtggctataagcagtccaga

SEQ ID NO: 81390 - DNA, 80 bp, synthetic construct
  source 1..80: mol_type = other DNA
tctgctacacttggagcctgtaactgacacttcactaagaagatcaatgagaatttccttaaacaatcggcattgttttg

SEQ ID NO: 81391 - DNA, 80 bp, synthetic construct
  source 1..80: mol_type = other DNA
attgtgtgtgaagtccaccgtaactgaaaactccataattccctctgtatttgtaagcatgtagtcccacagatccctta

SEQ ID NO: 81392 - DNA, 80 bp, synthetic construct
  source 1..80: mol_type = other DNA
agacccaaatgcctttgagtttgtcagaccctgcttgatcaacattgcagcattgcacacaatctctcccatccgataag

SEQ ID NO: 81393 - DNA, 80 bp, synthetic construct
  source 1..80: mol_type = other DNA
agaaccacccgaaaccaaactgtaaatcactcctgaacatgggcctctctacatctctgttcactactttcaacacaaat

SEQ ID NO: 81394 - DNA, 80 bp, synthetic construct
  source 1..80: mol_type = other DNA
acggcaacaactgatcttcaaagatctttgggtacagtcgtcttacagactgtattacatggtttagactcactttatcc

SEQ ID NO: 81395 - DNA, 80 bp, synthetic construct
  source 1..80: mol_type = other DNA
tccaacagccttgagctctcaggcttactcgcaacataatcacatcggtacaagtggttaagagttgatgttttcttatt

SEQ ID NO: 81396 - DNA, 80 bp, synthetic construct
  source 1..80: mol_type = other DNA
ctctccttttataggttctgcaagcacccagacacccaactcaaaggaattgcttagtgaaatgcaaatgtagtcccaaa

SEQ ID NO: 81397 - DNA, 80 bp, synthetic construct
  source 1..80: mol_type = other DNA
cacatatgtacagtgttacaccatcctgttttatgaccctcactatatgttcatctgtggccaagtcttcaagtaccttt

SEQ ID NO: 81398 - DNA, 80 bp, synthetic construct
  source 1..80: mol_type = other DNA
ttgatatacagattttccttattcttgttcctcacacatctactccctagtgtcttgcaaagacctatgaaaccagatga

SEQ ID NO: 81399 - DNA, 80 bp, synthetic construct
  source 1..80: mol_type = other DNA
actttatgcatcaaaaccattctcaatgggaacatttcgctcaggttcaaccaattgatgattgctaagagcgttagatc

SEQ ID NO: 81400 - DNA, 80 bp, synthetic construct
  source 1..80: mol_type = other DNA
ctcctcaagaccaaggatttctgtcagttgaagaatagcttcgtaaaattctctgttaaaaatttctagaaaaaattctt

SEQ ID NO: 81401 - DNA, 80 bp, synthetic construct
  source 1..80: mol_type = other DNA
caatagattcacaatttttaagcttatggagtatcctcctcacaagtttcctcacaaccttcgtttcatcgggacacaat

SEQ ID NO: 81402 - DNA, 80 bp, synthetic construct
  source 1..80: mol_type = other DNA
tctacaataagtctttgaattctataacccctagaaccatctaaccaatccttcacatcagtgttgacattcaataagaa

SEQ ID NO: 81403 - DNA, 80 bp, synthetic construct
  source 1..80: mol_type = other DNA
tgacgtcgccagatcaacgctggcagcccgccgcaggaagaaaacacacagaccgacacacacaaacacagcatcccaca

SEQ ID NO: 81404 - DNA, 80 bp, synthetic construct
  source 1..80: mol_type = other DNA
aaacacacagaccgacacacacaaacacagcatcccacacaggacacacgcacacacgcaggcagacacactcccacgcc

SEQ ID NO: 81405 - DNA, 80 bp, synthetic construct
  source 1..80: mol_type = other DNA
aaacaatctgaaggtgatgcagcccttttgtgtctttgaccttctccccaatttcccccccatcaactttttcaagcctc

SEQ ID NO: 81406 - DNA, 80 bp, synthetic construct
  source 1..80: mol_type = other DNA
caggacacacgcacacacgcaggcagacacactcccacgcccaacccccccacacacaccgagggtggcgccccccggag

SEQ ID NO: 81407 - DNA, 80 bp, synthetic construct
  source 1..80: mol_type = other DNA
ctataccgtgttattgtggaatcaaccttgtgtttcagattcttaaaaaaactagtttcttcctctccttcaaagagcac

SEQ ID NO: 81408 - DNA, 80 bp, synthetic construct
  source 1..80: mol_type = other DNA
atttgacggatcgccttctaatttcccttcctccgttaccttagaacctatgaccagtctggaaactaactttgagacct

SEQ ID NO: 81409 - DNA, 80 bp, synthetic construct
  source 1..80: mol_type = other DNA
atctgagtaacctataaaccaccttttcagcagctgtaattaggtcctccctcagtttatccatcaaagatgtcgaagaa

SEQ ID NO: 81410 - DNA, 80 bp, synthetic construct
  source 1..80: mol_type = other DNA
gggcgacgccccccgggggtcggggtggatcccgcgggagacaccgctcagtcgatctcctcaaccaccgatccacccaa

SEQ ID NO: 81411 - DNA, 80 bp, synthetic construct
  source 1..80: mol_type = other DNA
taaactctgtgcagcccttaattgctctgcattaggctgaaagttataatcctcaaattttgtataatacattaaaggat

SEQ ID NO: 81412 - DNA, 80 bp, synthetic construct
  source 1..80: mol_type = other DNA
atggcacatggcactcatgctcaaggtgttcagacaatccgtagtgcccgaagcttagtcccaccactgacaaacatttc

SEQ ID NO: 81413 - DNA, 80 bp, synthetic construct
  source 1..80: mol_type = other DNA
tgaacttttatgataaactcatttatggacactgtaaacaactcttcaagagatactcttctgaaggttttggaccttct

SEQ ID NO: 81414 - DNA, 80 bp, synthetic construct
  source 1..80: mol_type = other DNA
tctgttcctcaaaagcttgatgaattcttctttggtactatggaaactcaccaacctgtcattcacactactgtagcaac

SEQ ID NO: 81415 - DNA, 80 bp, synthetic construct
  source 1..80: mol_type = other DNA
aatgcttgtcatcttttttaaactgtgactttgagtgttttatcaatgaagagagacataagacatccaggttcagcaat

SEQ ID NO: 81416 - DNA, 80 bp, synthetic construct
  source 1..80: mol_type = other DNA
tcaccccctctcttgtacccataagtctccgctgtaacaaacctcatcaaaggacaagactctactgcctccttacttaa

SEQ ID NO: 81417 - DNA, 80 bp, synthetic construct
  source 1..80: mol_type = other DNA
tattgaaatgttatcattatcaggaagggtatcgtaaagttccgaaaattctttgattaagccttcagggctgattttct

SEQ ID NO: 81418 - DNA, 80 bp, synthetic construct
  source 1..80: mol_type = other DNA
aatccggcaccaatgacaatggcaccaagaggacagatctgtccatatgcaactcttgaagaatcacacttatctccgaa

SEQ ID NO: 81419 - DNA, 80 bp, synthetic construct
  source 1..80: mol_type = other DNA
ctcggaagatgctcaccagtcctaaatctatgtaggagaaggtttccgagaacatcactgatcctctcatagccctcaag

SEQ ID NO: 81420 - DNA, 80 bp, synthetic construct
  source 1..80: mol_type = other DNA
gcgccggggatcctaggctttttgcgctattggctgtacaacttttctctgtagagttgctataagatgggccagattgt

SEQ ID NO: 81421 - DNA, 80 bp, synthetic construct
  source 1..80: mol_type = other DNA
tcatcgatttcaacaagactgctctaagcaaattcaaggaggatgtggagtctgctctctccctgttcaaaacaacagta

SEQ ID NO: 81422 - DNA, 80 bp, synthetic construct
  source 1..80: mol_type = other DNA
actcctctgatctctgaccagctgttgatgaggaatcacttaagggatttgatgggggtgccatactgcaattcttcaaa

SEQ ID NO: 81423 - DNA, 80 bp, synthetic construct
  source 1..80: mol_type = other DNA
tccttttattagctggcaggtcttgtggcttgtatggccttgaaggtcctgacatttataagagagtttaccaattcaaa

SEQ ID NO: 81424 - DNA, 80 bp, synthetic construct
  source 1..80: mol_type = other DNA
ggcctgctgctccaggtacctttctgggtgaattatttatgcccctgtcgcgtgtaagaataattgtattcgtctcccac

SEQ ID NO: 81425 - DNA, 80 bp, synthetic construct
  source 1..80: mol_type = other DNA
ccagaaccgcttttagaagatcttcactattgcttggtttaaccaagatgtactccagcatattgcccccatccaacaag

SEQ ID NO: 81426 - DNA, 80 bp, synthetic construct
  source 1..80: mol_type = other DNA
gctgcccctgcctttacagcagcacccaagctgaaagtatagccagaaatgtttatgctggattgctgttcagtgattac

SEQ ID NO: 81427 - DNA, 80 bp, synthetic construct
  source 1..80: mol_type = other DNA
tcagtggagtttgatatgtctcacttaaacttgacgatgcccaagcagtgctcagccaataactcccaccacaatattag

SEQ ID NO: 81428 - DNA, 80 bp, synthetic construct
  source 1..80: mol_type = other DNA
attggagttgaccttcactaatgattccatcattaaccacaatcactgcaacttaacctctgccttcaacaagaaaacct

SEQ ID NO: 81429 - DNA, 80 bp, synthetic construct
  source 1..80: mol_type = other DNA
ttgaccacacactcatgagcatagtctcgagtctacaccttagcatcagaggaaacaccgtctacaaggcggtgtcctgt

SEQ ID NO: 81430 - DNA, 80 bp, synthetic construct
  source 1..80: mol_type = other DNA
gggtacgagtcctgagcatgtttagaactgcctttgggggtaaacacatgagaagtggctggggttggaaaagttcagat

SEQ ID NO: 81431 - DNA, 80 bp, synthetic construct
  source 1..80: mol_type = other DNA
ggcaaaaccacttggtgcagccagacagactatcaatatctaatcatacaaaataggacctgggaaaaccattgtagata

SEQ ID NO: 81432 - DNA, 80 bp, synthetic construct
  source 1..80: mol_type = other DNA
tgaatgtgcatgggttagctccactggtattgtgaagaagggactggagtggttcgagaaaaatgcaggaaccattaaat

SEQ ID NO: 81433 - DNA, 80 bp, synthetic construct
  source 1..80: mol_type = other DNA
tccgtgttaatgcaaatacggcagccttgagtcataaggtccttgcagaatataaagtccctggtgaaattgtgatgtca

SEQ ID NO: 81434 - DNA, 80 bp, synthetic construct
  source 1..80: mol_type = other DNA
aataaaaaactgctctttcaatatcaccacaagcataagaactacggtgaaagactatgcacttttcaatagtctggata

SEQ ID NO: 81435 - DNA, 80 bp, synthetic construct
  source 1..80: mol_type = other DNA
aataaaaaactgctctttcaatattaccacaagcataaaaactaaggtgagaggctatgcactttttgataaacttgata

SEQ ID NO: 81436 - DNA, 80 bp, synthetic construct
  source 1..80: mol_type = other DNA
agggggagaagaaatgaaaaactgctctttcaatatcaccacaagcataaaaactaaggtaaaagactatgcactttttt

SEQ ID NO: 81437 - DNA, 80 bp, synthetic construct
  source 1..80: mol_type = other DNA
tactaccagcagtgtgacagggggagaagaaatgaaaaactgctctttcaatatcaccacaagcataggaactaaggtgg

SEQ ID NO: 81438 - DNA, 80 bp, synthetic construct
  source 1..80: mol_type = other DNA
cagaagtactaacagtagtactgataatgccagtagtaataccagtagtacgataaagagaggagaaataaaagaatgct

SEQ ID NO: 81439 - DNA, 80 bp, synthetic construct
  source 1..80: mol_type = other DNA
ctcttttaatatcaccacaagcataggaactaaggtgacagactctgcaatttttaataaacttgatataataccaatag

SEQ ID NO: 81440 - DNA, 80 bp, synthetic construct
  source 1..80: mol_type = other DNA
ggggaatgctactaataacagtggtaatacagaactaaaaaactgctctttcgacaccaccacaagcataggaactaaga

SEQ ID NO: 81441 - DNA, 80 bp, synthetic construct
  source 1..80: mol_type = other DNA
tagtactaccagtagtcccaatagtactgccagtagtataacagagggaggagatataaaaaactgctctttcaatatca

SEQ ID NO: 81442 - DNA, 80 bp, synthetic construct
  source 1..80: mol_type = other DNA
ccacaagcataagaactgaggtgagagattatgcatttttttctaaccttgatatagtaccaataaataatggtaatacc

SEQ ID NO: 81443 - DNA, 80 bp, synthetic construct
  source 1..80: mol_type = other DNA
aaactgctctttcaatatcaccacaagcataggaaataaagtaaaagaccgtgcattttttaatgaacttgatatagaac

SEQ ID NO: 81444 - DNA, 80 bp, synthetic construct
  source 1..80: mol_type = other DNA
gctctttcaatatcaccacaagcatagggaataaggtgaaagactatgcactttttaatacacttgatataggactaata

SEQ ID NO: 81445 - DNA, 80 bp, synthetic construct
  source 1..80: mol_type = other DNA
gggaggagaaatgaaaaactgctctttcaacatcaccacaagcatgaatactaaggtaaaagactatgcactcttttata

SEQ ID NO: 81446 - DNA, 80 bp, synthetic construct
  source 1..80: mol_type = other DNA
gggaagagaaataaaaaactgctctttcaatatcatcacaagcataggaactactgtaaaagactatgcactttttaata

SEQ ID NO: 81447 - DNA, 80 bp, synthetic construct
  source 1..80: mol_type = other DNA
gagagatgaaaaactgctctttcaatatcaccacaagcatgcaaactaaggtgaaagactatgcacttttttataatctt

SEQ ID NO: 81448 - DNA, 80 bp, synthetic construct
  source 1..80: mol_type = other DNA
ctctttcgatatcaccacaagcataaacactaaggtgaaagactatgcatttttttataatcttgatatagtacaaatag

SEQ ID NO: 81449 - DNA, 80 bp, synthetic construct
  source 1..80: mol_type = other DNA
gaaaaactgctcttccaatattaccacaagcataaaaactaaggtgagagactatgcacttttttataaacttgatgtag

SEQ ID NO: 81450 - DNA, 80 bp, synthetic construct
  source 1..80: mol_type = other DNA
agaactaaaaaactgctctttcaatatcaccacaagtataaaaactgtggtgaaagactatgcatttttttataaacttg

SEQ ID NO: 81451 - DNA, 80 bp, synthetic construct
  source 1..80: mol_type = other DNA
cgaaaacactttgtcagatcactccttttgctcctttctccaaggacaactcaatccagctttctgctggtggggacatt

SEQ ID NO: 81452 - DNA, 80 bp, synthetic construct
  source 1..80: mol_type = other DNA
tatagtgaataagaacgaggaaggaacttttcgcaacatgaccaaacctcaatgtgaagtcaaatcaggacatattgtat

SEQ ID NO: 81453 - DNA, 80 bp, synthetic construct
  source 1..80: mol_type = other DNA
ctaaagacattgcaatggagacctgtgaagatgctcatatactagggtgcagggagccttatttgacccgtggtccgcaa

SEQ ID NO: 81454 - DNA, 80 bp, synthetic construct
  source 1..80: mol_type = other DNA
ggcagcaggatgtttgctcatggaaccggcacagacctgagacggcgacaagcccttggaacctggcatgtgggtcacgc

SEQ ID NO: 81455 - DNA, 80 bp, synthetic construct
  source 1..80: mol_type = other DNA
attccgagctcttatagcttggaaaatgggtcaggcaccgtctccatataatgctagggtcgaatgcataggatggtcaa

SEQ ID NO: 81456 - DNA, 80 bp, synthetic construct
  source 1..80: mol_type = other DNA
caatatgtgtggtaggaccaaaacccattgcatcaattctggtgtggtacagggggagaccagtaactcaaaatccatca

SEQ ID NO: 81457 - DNA, 80 bp, synthetic construct
  source 1..80: mol_type = other DNA
tgtgtgtggaacattcttttgactcaagaatcggaatgtgtgtgccataaaggaatctgcccagtagtcatgacagatgg

SEQ ID NO: 81458 - DNA, 80 bp, synthetic construct
  source 1..80: mol_type = other DNA
ggaaactgctcttatactgggagggacgagctgaaaaactgctctttcaatatcaccacaagcacacaagataaggtgcg

SEQ ID NO: 81459 - DNA, 80 bp, synthetic construct
  source 1..80: mol_type = other DNA
aataatactgagggaaactgctcttatactgggagggaagaactgaaaaactgctctttcaatatcaccacaagcacaca

SEQ ID NO: 81460 - DNA, 80 bp, synthetic construct
  source 1..80: mol_type = other DNA
tcttcctataattatactgggagggaagaactgaaaaactgctctttcaatatcaccacaagcacacaagataaggtgcg

SEQ ID NO: 81461 - DNA, 80 bp, synthetic construct
  source 1..80: mol_type = other DNA
tgctcttatactgggagggaagaactgaaaaactgctctttcaatattaccacaagcacacaagataaggtgcgagacta

SEQ ID NO: 81462 - DNA, 80 bp, synthetic construct
  source 1..80: mol_type = other DNA
actgggagggaagaactgaaaaactgctctttcaatatcaccacaagcacacaagataaggtgcgagactatgcaatgtt

SEQ ID NO: 81463 - DNA, 80 bp, synthetic construct
  source 1..80: mol_type = other DNA
tgctcttcctataattatacttatactgggagggaagaactgaaaaactgctctttcaatatcaccacaagcacacaaga

SEQ ID NO: 81464 - DNA, 80 bp, synthetic construct
  source 1..80: mol_type = other DNA
tagcaatagtagtatagaggaaatacagatgaaaaactgctctttcaatatcaccacaagaaggggagataagatgcagc

SEQ ID NO: 81465 - DNA, 80 bp, synthetic construct
  source 1..80: mol_type = other DNA
tccatatcattaggattggttgtattcaacgttctgctgcatgtcgtaagcatcatagtgacagtattagtccttgggag

SEQ ID NO: 81466 - DNA, 80 bp, synthetic construct
  source 1..80: mol_type = other DNA
aggtggaaacagcgggatctgtaacgagacagtagtgagggaatacaatgagacagtcaggatagagaagataactcaat

SEQ ID NO: 81467 - DNA, 80 bp, synthetic construct
  source 1..80: mol_type = other DNA
atgaacacaaatcaaagaataataaccattggagcgatttgtctgatagtaggaacacttaacctattattgcagatagg

SEQ ID NO: 81468 - DNA, 80 bp, synthetic construct
  source 1..80: mol_type = other DNA
gtcacttaattcagacgggagaacaaaaccactctgaaccgtgcaagcaaaatgtcattacatatgaaaataacacatgg

SEQ ID NO: 81469 - DNA, 80 bp, synthetic construct
  source 1..80: mol_type = other DNA
ggaaactgataataatttctctattaggcaggatattatagcattgaccgattggtcagggtacagtggaagttttgtcc

SEQ ID NO: 81470 - DNA, 80 bp, synthetic construct
  source 1..80: mol_type = other DNA
aacaccctgaattaacaggaatgaactgcataaggccttgcttttgggtagaactaatcagaggacaacccaaggagaac

SEQ ID NO: 81471 - DNA, 80 bp, synthetic construct
  source 1..80: mol_type = other DNA
tcttgttgggaaacaaattgtggagtggattctaaaagatgaactcaatgaaacatttaatatgaccactgcatccgtcc

SEQ ID NO: 81472 - DNA, 80 bp, synthetic construct
  source 1..80: mol_type = other DNA
ccacttcgcgctacttagctgacatgacaactgaggaaatgtcacgagagtggttcatgctcatgcccagacaaaaggtg

SEQ ID NO: 81473 - DNA, 80 bp, synthetic construct
  source 1..80: mol_type = other DNA
ggtgacaggccccctttgcgtgcgaatggaccaggcgatcatggaaaagaatatcatactgaaagcaaacttcagtgtgg

SEQ ID NO: 81474 - DNA, 80 bp, synthetic construct
  source 1..80: mol_type = other DNA
ccaaaggagtagaggaaggttctattggaaaggtctgcaggacgttgttggcaaagtcagtttttaattcattgtatgcg

SEQ ID NO: 81475 - DNA, 80 bp, synthetic construct
  source 1..80: mol_type = other DNA
tgtaagaggatctggaatgagaattcttataaggggcaattctcccgtgttcaattataacaagaacacaaaaagactaa

SEQ ID NO: 81476 - DNA, 80 bp, synthetic construct
  source 1..80: mol_type = other DNA
tccagatgaaggaacaaatggaatagagtccgctgtattgagaggattccttattttgggcaaagaagataagagatatg

SEQ ID NO: 81477 - DNA, 80 bp, synthetic construct
  source 1..80: mol_type = other DNA
atatgcatttcagccacaggaatgacactatcggtagtaagcctgctgataggaattgccaatttgggcctaaacatcgg

SEQ ID NO: 81478 - DNA, 80 bp, synthetic construct
  source 1..80: mol_type = other DNA
acaaagagtgcttcaatccttgtttttatgtggaactaatcagagggagacccaaggagagtagtgtactgtggacttca

SEQ ID NO: 81479 - DNA, 80 bp, synthetic construct
  source 1..80: mol_type = other DNA
tgattaatgatccctgggttttgcttaatgcatcttggttcaactccttcctcacacatgcactgaaatagttgtggcaa

SEQ ID NO: 81480 - DNA, 80 bp, synthetic construct
  source 1..80: mol_type = other DNA
aaaataatagccatcggctccatatcattaggattggttgtattcaatgttctgctgcatgtcgtgagcatcatagtgac

SEQ ID NO: 81481 - DNA, 80 bp, synthetic construct
  source 1..80: mol_type = other DNA
tatcatgaagactgtcattgctttaagctacattttctgcctggctttttgtcaggatctttcagaaaatgaaaataata

SEQ ID NO: 81482 - DNA, 80 bp, synthetic construct
  source 1..80: mol_type = other DNA
ctgcaacactatgcctgggacatcatgcagtaccgaacggaacaatagtgaaaacaatcacagacgatcaaattgaggtg

SEQ ID NO: 81483 - DNA, 80 bp, synthetic construct
  source 1..80: mol_type = other DNA
catcacaagaacagatacataatttcattagagatgtttttgatatatgtgacgaaagtaaatggaatgcatctgtagcg

SEQ ID NO: 81484 - DNA, 80 bp, synthetic construct
  source 1..80: mol_type = other DNA
ggtatctttacctgtttagaaccagtggaattggataatactagctatgtcttatttaatcatgaagtaaactgggatgt

SEQ ID NO: 81485 - DNA, 80 bp, synthetic construct
  source 1..80: mol_type = other DNA
agagagcttatgcaacatggacaaccaccaatcactctcaacaataaataaattaaccaaggtaatatggcggaaaaaag

SEQ ID NO: 81486 - DNA, 80 bp, synthetic construct
  source 1..80: mol_type = other DNA
tagtggtcagatgagagaatgccctaaaaataagactgcagatagtggggttcagatgaaaaactgctctttcaagatca

SEQ ID NO: 81487 - DNA, 80 bp, synthetic construct
  source 1..80: mol_type = other DNA
caaacatagggaataaaaggaaaaaagaatatgcacttttttataatcttgatgtagtgcaaatagataatgataaggat

SEQ ID NO: 81488 - DNA, 80 bp, synthetic construct
  source 1..80: mol_type = other DNA
ccaaaggggtggaggagggctccattgggaaggttaacggaacaatccgagcacaatctgtgttcttcagcgtatatgca

SEQ ID NO: 81489 - DNA, 80 bp, synthetic construct
  source 1..80: mol_type = other DNA
aagattctatgcacttcagccactgctatcataataggcacaatcgcaatactcataggaataacaaatctagggttgaa

SEQ ID NO: 81490 - DNA, 80 bp, synthetic construct
  source 1..80: mol_type = other DNA
gcaaaaggaaaggaacgatgttttgcagtacagaattcctgggacaaaggaattggcttgatggggagaaaatagagtag

SEQ ID NO: 81491 - DNA, 80 bp, synthetic construct
  source 1..80: mol_type = other DNA
aaaaggctctgtactataaattcgtggcacatatatgggaaagaccatgctataaaaattgaaaagagctcggatgtttt

SEQ ID NO: 81492 - DNA, 80 bp, synthetic construct
  source 1..80: mol_type = other DNA
cacctatgatcacagcaagtacagggaagaggcaatgcaaaatggaataccaattgatccagtcaaactaagcagcggct

SEQ ID NO: 81493 - DNA, 80 bp, synthetic construct
  source 1..80: mol_type = other DNA
atgaagactgttattgctttaagctacattttctgcgtggctcttggtcagaatcttccaaaaagtgaaaacaatacagc

SEQ ID NO: 81494 - DNA, 80 bp, synthetic construct
  source 1..80: mol_type = other DNA
aaacctttggtctcacaatgccgagcttctcgttgccttacagaatcagcatacaattgatttaactgattcacaaatga

SEQ ID NO: 81495 - DNA, 80 bp, synthetic construct
  source 1..80: mol_type = other DNA
acctatagacccctgcatgtccgaaagtatcaatcagaaccgaaacatccccaataaaaagcccttgcaaaatgtaaaca

SEQ ID NO: 81496 - DNA, 80 bp, synthetic construct
  source 1..80: mol_type = other DNA
agatcacatacggagcatgtcccacatatgttaagcagaacagcctgaaattggcaacaggaatgcggaatatccctgag

SEQ ID NO: 81497 - DNA, 80 bp, synthetic construct
  source 1..80: mol_type = other DNA
aatgtcaccacaagcatacagactaaggtgaaggactatgcacttttttataaagttgatgtagtagaattaaataaaag

SEQ ID NO: 81498 - DNA, 80 bp, synthetic construct
  source 1..80: mol_type = other DNA
gaagtgacataaaaaactgctctttcaatgtcaccacaatgttagaagggaaggtgaagtcaacatatgctttcttcaat

SEQ ID NO: 81499 - DNA, 80 bp, synthetic construct
  source 1..80: mol_type = other DNA
gccagcatggaatagaagacgcagaaagagaagtgctgaggtgggagtttgacagtgctctagcacgaagacacatagcc

SEQ ID NO: 81500 - DNA, 80 bp, synthetic construct
  source 1..80: mol_type = other DNA
ctctttcaacatcaccacaggcatgcaaactaaggtgaaagactatgcattgttttctacatttgatatagtaccaatag

SEQ ID NO: 81501 - DNA, 80 bp, synthetic construct
  source 1..80: mol_type = other DNA
gatggggggagaagaactaaaaaactgctctttcaatatcaccacaagcataaagactaaggtgcaagactatgcacttt

SEQ ID NO: 81502 - DNA, 80 bp, synthetic construct
  source 1..80: mol_type = other DNA
ctttcaatatcaccacaagcataaagactaaggtgcaagactatgcactttttaatgcacttgatataataccaataggg

SEQ ID NO: 81503 - DNA, 80 bp, synthetic construct
  source 1..80: mol_type = other DNA
cattaataatagtagtcgggaaatgatggggggagaaatgaaaaactgctctttcaatattaccacaagcataggagaga

SEQ ID NO: 81504 - DNA, 80 bp, synthetic construct
  source 1..80: mol_type = other DNA
ctgctctttcaatattaccacaagcataggagagaaggcgaagaacgcagcacttttttatagccttgatgttgaaccaa

SEQ ID NO: 81505 - DNA, 80 bp, synthetic construct
  source 1..80: mol_type = other DNA
ccgagaaaagcacccagagttctacaaggactgactgctgacatgaagttgctgacacaaagttgctgacacagatgttg

SEQ ID NO: 81506 - DNA, 80 bp, synthetic construct
  source 1..80: mol_type = other DNA
gaggaggtagaaatgaaaaactgctctttcaatatcaccacaaaaataacaaacagggtgcagacagaatacgcactttt

SEQ ID NO: 81507 - DNA, 80 bp, synthetic construct
  source 1..80: mol_type = other DNA
ttctcccatgtcgaataaaacaaattgtaaacatatggcaggaagtaagacgagcaatgtatacagctcctattgaaaga

SEQ ID NO: 81508 - DNA, 80 bp, synthetic construct
  source 1..80: mol_type = other DNA
atgacctggaggcagtaagaacaagagattagcaatcactcacaggaaatatacaggttaattgaaaagtcgcaattcca

SEQ ID NO: 81509 - DNA, 80 bp, synthetic construct
  source 1..80: mol_type = other DNA
ccttcgccattataagaaactctggatctggtattatcatttcagatgcatcagtccacgattgtaatacaacttgccag

SEQ ID NO: 81510 - DNA, 80 bp, synthetic construct
  source 1..80: mol_type = other DNA
cgccgtgcagaccaacaatgagctggctggtgccctgcaccatctgaggtgcgccagaatcagatactatgtcaagtgtg

SEQ ID NO: 81511 - DNA, 80 bp, synthetic construct
  source 1..80: mol_type = other DNA
tccaggaggccctgtattccatcattcaaattgctggggctgcatttgtcaccacgcgcattgccaagcgcatgaacata

SEQ ID NO: 81512 - DNA, 80 bp, synthetic construct
  source 1..80: mol_type = other DNA
cactgttggaggccagatgggcatgcttctgacaggatccaacgccaagagcatggacctgggtactacaccaggtgatt

SEQ ID NO: 81513 - DNA, 80 bp, synthetic construct
  source 1..80: mol_type = other DNA
gacggggaaatctaccactatggcctgtatgtggagcgaggtcttgtactaggtgtgcacaaaccaccagctgctatcag

SEQ ID NO: 81514 - DNA, 80 bp, synthetic construct
  source 1..80: mol_type = other DNA
tctggggtgccctgcacctcccaatggaactccatcgcccactggcttctcactctctgtgcgctctctgaagtcacaaa

SEQ ID NO: 81515 - DNA, 80 bp, synthetic construct
  source 1..80: mol_type = other DNA
cagtatcccctagaaacgctccaggtgaaatactatggagcgcgcccttaggccctgatttgaatccctacctttcccat

SEQ ID NO: 81516 - DNA, 80 bp, synthetic construct
  source 1..80: mol_type = other DNA
tgccggggacgatgtcttcacagtttcttgtcgagttctcacgagaccatccccccgatttgaatcaagaactaaaccat

SEQ ID NO: 81517 - DNA, 80 bp, synthetic construct
  source 1..80: mol_type = other DNA
tctctgtcccagttttaactgttgaggagatgaccaattcaaggttccccattcctttggaaaagttgttcacgggcccc

SEQ ID NO: 81518 - DNA, 80 bp, synthetic construct
  source 1..80: mol_type = other DNA
tgcaccttcagaggggatgtcacccatattccaggcagtcgtaactacacaatgaatttggcctcccaaaattggaacag

SEQ ID NO: 81519 - DNA, 80 bp, synthetic construct
  source 1..80: mol_type = other DNA
ttacagtggctcatactggccaacatgatttggttatcccccccaatggttattttagatttgattcctgggtcaaccag

SEQ ID NO: 81520 - DNA, 80 bp, synthetic construct
  source 1..80: mol_type = other DNA
cctcgggggcactaccaggaagagctaatcttagggctactgtccccgcccggggttcctccagcacgtcttctaattct

SEQ ID NO: 81521 - DNA, 80 bp, synthetic construct
  source 1..80: mol_type = other DNA
tctattgctacttctgtgtattcaaatcaaaccacctcaacgagacttggttctacagctggttctggtaccagtgtctc

SEQ ID NO: 81522 - DNA, 80 bp, synthetic construct
  source 1..80: mol_type = other DNA
atcaaaaaaggaatttgtcccctttcatggggggggctcacaacatttcttttttcccgcccctatttagcagatccttt

SEQ ID NO: 81523 - DNA, 80 bp, synthetic construct
  source 1..80: mol_type = other DNA
atcaaaaaaggaatttgtcccctttcatggggggggctcacaacatttcttttttcccccccctatttagcagatccttt

SEQ ID NO: 81524 - DNA, 80 bp, synthetic construct
  source 1..80: mol_type = other DNA
actcctggaggggggctttcaacaggggcaggcagccttttttttctcacatttacaagggagggaagtcacgggggtaa

SEQ ID NO: 81525 - DNA, 80 bp, synthetic construct
  source 1..80: mol_type = other DNA
actcctggacgggggctttcaacacgggcaggcagcctttttttgctcacatttgcaagggaggggagtcacgggggtaa

SEQ ID NO: 81526 - DNA, 80 bp, synthetic construct
  source 1..80: mol_type = other DNA
ttctcttcgagcaaaagcaggggaatttctcaactagcaaaatggaagcaatatcgctgatgactatactactagtagtg

SEQ ID NO: 81527 - DNA, 80 bp, synthetic construct
  source 1..80: mol_type = other DNA
aaggggttggtatggcagcagataggggttcaactcagaaagcagttgataagataacatccaaggtgaataatataatt

SEQ ID NO: 81528 - DNA, 80 bp, synthetic construct
  source 1..80: mol_type = other DNA
caaatacaagacgtatgggcatataatgcagagttgctggtactacttgaaaaccagaaaacacttgatgagcatgacgc

SEQ ID NO: 81529 - DNA, 80 bp, synthetic construct
  source 1..80: mol_type = other DNA
tctgggccatgtccaatggatcatgcagatgcaacatttgtatatagttagcaaaaacacccttgtttctacttatagtg

SEQ ID NO: 81530 - DNA, 80 bp, synthetic construct
  source 1..80: mol_type = other DNA
tgctgtgtgcaacaaatctgggacgtcccctcatcttggacacatgcactgtcgaaggactgatctatggcaacccttct

SEQ ID NO: 81531 - DNA, 80 bp, synthetic construct
  source 1..80: mol_type = other DNA
tgttgggaggaagggaatggtcctacattgtcgaaagaccatcagcggtgaatggaacatgttaccctggaaacgtagaa

SEQ ID NO: 81532 - DNA, 80 bp, synthetic construct
  source 1..80: mol_type = other DNA
ggccccttgttaatggtctaattggaagaattaattattattggtcggtactaaaaccaggccagacattgagagtaaga

SEQ ID NO: 81533 - DNA, 80 bp, synthetic construct
  source 1..80: mol_type = other DNA
ctcagacggcaaaaatagtgaatttggcttgtccttcatgaaaaaatgccttgtttctacttatagtgaggtcgtattaa

SEQ ID NO: 81534 - DNA, 80 bp, synthetic construct
  source 1..80: mol_type = other DNA
atgggccaaggcaagtccaaagaaaagatgaaggacaccggcaacacgggcagagctgagattctgccagacaccaccta

SEQ ID NO: 81535 - DNA, 80 bp, synthetic construct
  source 1..80: mol_type = other DNA
gccccctctgcaagtacccattgcctactaagctgatgatatcaacagctcctcgctcaccacccccctacgaggagtga

SEQ ID NO: 81536 - DNA, 80 bp, synthetic construct
  source 1..80: mol_type = other DNA
tcagccaataactcccaccactatattagcatggggaaatcagggttggagttgaccttcactaatgattccatcattaa

SEQ ID NO: 81537 - DNA, 80 bp, synthetic construct
  source 1..80: mol_type = other DNA
cttaacattttcagatgcacaaagtgctatgaatcagtgcaagacctttagaggtagagtcctggacatgtttagaactg

SEQ ID NO: 81538 - DNA, 80 bp, synthetic construct
  source 1..80: mol_type = other DNA
ccacaatcactgcaacttaacctctgccttcagcaaggaaaccttcgaccacacactcatgagcataatctcgagtctac

SEQ ID NO: 81539 - DNA, 80 bp, synthetic construct
  source 1..80: mol_type = other DNA
tcccataaggtccttcaacaacattgtctggctgaactcaaagccacctgaggtgggcctgctgctccaggactggtctg

SEQ ID NO: 81540 - DNA, 80 bp, synthetic construct
  source 1..80: mol_type = other DNA
ccgtttcggctgctgccccggggttgccccatcctaccccacctgctagtgacagccgaggctccaagagtgtggcccgc

SEQ ID NO: 81541 - DNA, 80 bp, synthetic construct
  source 1..80: mol_type = other DNA
cgggtcctccaaaccctgaggtggctgaaaatggtggaaaaggaccaagatggcggccgcaaactgacacctcagggaca

SEQ ID NO: 81542 - DNA, 80 bp, synthetic construct
  source 1..80: mol_type = other DNA
aagagatctggtctgggtgttaccaccgccctccgaggagccccaggttgatgtggtacctgcgctccccccccctgagc

SEQ ID NO: 81543 - DNA, 80 bp, synthetic construct
  source 1..80: mol_type = other DNA
ttgatctccgcggtgggtgtattagccccacactcggcccttgctgttcttgaggacactgttgattaccctgctcgtgc

SEQ ID NO: 81544 - DNA, 80 bp, synthetic construct
  source 1..80: mol_type = other DNA
ggtggaagtggaggtggttgcagtcagcgccatgagactgaaacaccatgtagtcagtatagtggtggaagtgggagtgg

SEQ ID NO: 81545 - DNA, 80 bp, synthetic construct
  source 1..80: mol_type = other DNA
ttgcagtcagtacagtagtggaagtgggggagagggtgttagtgaaagacacactatatgccaaacaccacttacaaata

SEQ ID NO: 81546 - DNA, 80 bp, synthetic construct
  source 1..80: mol_type = other DNA
gtttgtttgtttttaataaactgttatcacttaacaatgcgacacaaacgttctgcaaaacgcacaaaacgtgcatcggc

SEQ ID NO: 81547 - DNA, 80 bp, synthetic construct
  source 1..80: mol_type = other DNA
ggactgcgctctttatataacaccttagcagttctttattgtgtccatagtagaatatcgatacaggatacacaagcagc

SEQ ID NO: 81548 - DNA, 80 bp, synthetic construct
  source 1..80: mol_type = other DNA
tttggacaagataaaagagaaaaaggaacagcacaagcagcccgagccaaaaaacccagaagcaggggcagcggcagcac

SEQ ID NO: 81549 - DNA, 80 bp, synthetic construct
  source 1..80: mol_type = other DNA
ctgacaacaggagaacaaccttggcatctaggacatggagtatccatagaatggagactaagaaaatacaagacacaagt

SEQ ID NO: 81550 - DNA, 80 bp, synthetic construct
  source 1..80: mol_type = other DNA
tgatcctgaaatggcagataagctaatacatctttattattttaattgttttacagcctctgccataaggcaagcggtct

SEQ ID NO: 81551 - DNA, 80 bp, synthetic construct
  source 1..80: mol_type = other DNA
tagggagacaagtaatacctaagtgtgaatatccagcagggcacaaacaggtaggcaccttacaatatatagcactaaca

SEQ ID NO: 81552 - DNA, 80 bp, synthetic construct
  source 1..80: mol_type = other DNA
ggttcatagcagtaggagtagcatttataatagcagtagtaatttgggtattattatatagagaatataagaaaataaaa

SEQ ID NO: 81553 - DNA, 80 bp, synthetic construct
  source 1..80: mol_type = other DNA
agagttattggtcactcttctacctcctgacaagcttgatcaaggtaattgggtctgaacaatattgggtaacagtgtac

SEQ ID NO: 81554 - DNA, 80 bp, synthetic construct
  source 1..80: mol_type = other DNA
aagttaaacaaatgaaaaattgctcatttaaggcaaccactgagagaaaggataaaaagaagacagtttactctctgttt

SEQ ID NO: 81555 - DNA, 80 bp, synthetic construct
  source 1..80: mol_type = other DNA
tataatgaagatatagtacaaataaatgacacagtcaataatagaacagaaacagtatataggctaataaagtgtgatac

SEQ ID NO: 81556 - DNA, 80 bp, synthetic construct
  source 1..80: mol_type = other DNA
agtgcaaaatgttcaaatgtgagtactgtacaatgcacacatggaataaagccagtgatatccactcagctaatcctaaa

SEQ ID NO: 81557 - DNA, 80 bp, synthetic construct
  source 1..80: mol_type = other DNA
tggaagcttaggcacagaaattgttgttagaaatgatagtcgtggtaatctgtgggtgcaatggaatgagacagtgtcaa

SEQ ID NO: 81558 - DNA, 80 bp, synthetic construct
  source 1..80: mol_type = other DNA
ataacaggagacattagacaagcgcactgtaatgtctctaaagaagagtggaaagaaatgtggaataaaacaaaagagga

SEQ ID NO: 81559 - DNA, 80 bp, synthetic construct
  source 1..80: mol_type = other DNA
aataaggaaaatagggaactggaacataaccttcaaggttcgggagaacaatggaggagacccagaagtaacccatttaa

SEQ ID NO: 81560 - DNA, 80 bp, synthetic construct
  source 1..80: mol_type = other DNA
tgctcaattgtggaggagagtttttctattgtaacacttccaacatatttgacgagggcaagaatgaaactacaagtgag

SEQ ID NO: 81561 - DNA, 80 bp, synthetic construct
  source 1..80: mol_type = other DNA
actattactctgccctgtagaataagacaaattgtaaatttgtggacaagggtaggaaaaggaatctatgcaccaccaat

SEQ ID NO: 81562 - DNA, 80 bp, synthetic construct
  source 1..80: mol_type = other DNA
taggggaaatcttacctgtagctccaatattactggactgatgctagaatatagtggtactggtgataatacaacagtat

SEQ ID NO: 81563 - DNA, 80 bp, synthetic construct
  source 1..80: mol_type = other DNA
atccctcagggggaaacatggttaatctttggagacatgaattgtataaatacaaagtagttagtatagaacccatagga

SEQ ID NO: 81564 - DNA, 80 bp, synthetic construct
  source 1..80: mol_type = other DNA
ggaacaatttaacctggcaagaatgggataagaaagtaagagactattcaggtgtcatctttcaacttatagagcaggca

SEQ ID NO: 81565 - DNA, 80 bp, synthetic construct
  source 1..80: mol_type = other DNA
ggagcagcttcgcaagacttagctaatcgaggggccatcaccataaacaatactaaagacaataatcaaagtgtagcttg

SEQ ID NO: 81566 - DNA, 80 bp, synthetic construct
  source 1..80: mol_type = other DNA
gctagaagcacatgaagatgaggaagtaggctttccagtacgccctcaggtaccactgaggccaatgacctttaaaatgg

SEQ ID NO: 81567 - DNA, 80 bp, synthetic construct
  source 1..80: mol_type = other DNA
tcttgcaccccatatgccaacatggagtagatgatgatcacaaagaagtgctggtgtggcgatttgacagctccttagca

SEQ ID NO: 81568 - DNA, 80 bp, synthetic construct
  source 1..80: mol_type = other DNA
agaagacatgtagcaaaagagctgcatccggagtttttcaaggactgctgacaagagactttactgctgacaagggactt

SEQ ID NO: 81569 - DNA, 80 bp, synthetic construct
  source 1..80: mol_type = other DNA
ctttatgcttggggactttccgccagggactttccagggaggtgtggtcgggggagtggtttgccctcagatgctgcata

SEQ ID NO: 81570 - DNA, 80 bp, synthetic construct
  source 1..80: mol_type = other DNA
tgccttggaacaagcaaatcatgttcagattggggcgcattctgcatgagatggctgactcaaaagaacgggtctatgcc

SEQ ID NO: 81571 - DNA, 80 bp, synthetic construct
  source 1..80: mol_type = other DNA
ggttcaagacgcccaatacacaaataataggggaaagagcattcttttcgtgtggggcatacatcatccacccaccgata

SEQ ID NO: 81572 - DNA, 80 bp, synthetic construct
  source 1..80: mol_type = other DNA
gtcgccaaggaatccggctgctccatggtatggacacgttctttcaggagaaagccatggaagaatcctaaagaccgatt

SEQ ID NO: 81573 - DNA, 80 bp, synthetic construct
  source 1..80: mol_type = other DNA
cctggggttggtatggctgcagatagggattcaactcaaaaggcaattgatagaggtccactaaggtgtgtatatgagcc

SEQ ID NO: 81574 - DNA, 80 bp, synthetic construct
  source 1..80: mol_type = other DNA
caaatacaagacatctgtgctgatgatgcagaattgctggtactgcttgaaaaccagaaaacactcgatgagcatgacgc

SEQ ID NO: 81575 - DNA, 80 bp, synthetic construct
  source 1..80: mol_type = other DNA
aaatgatgactgtctgtataacacgggggacggtacactgggtttcaatgcaatggaagatgggaaaggatgtttcgagc

SEQ ID NO: 81576 - DNA, 80 bp, synthetic construct
  source 1..80: mol_type = other DNA
aatgaaggggtcaagctggaatctgagggatcttacccaaaatttgcgtactttagatctgattttacttctcttgtgct

SEQ ID NO: 81577 - DNA, 80 bp, synthetic construct
  source 1..80: mol_type = other DNA
ttacccaaaatttgcgtactttagatctgattttacttctcttgtgcttgcaatggggtttgctgccttcttgttctggg

SEQ ID NO: 81578 - DNA, 80 bp, synthetic construct
  source 1..80: mol_type = other DNA
tgctgtgtgcaacaaacctgggacatcctctcatcctagacacatgctccgttgaaggattgatctatggtcgcccttct

SEQ ID NO: 81579 - DNA, 80 bp, synthetic construct
  source 1..80: mol_type = other DNA
tgttgggagggaaagcatggcccaacatacccgaaagatcatcagcggtaaatggaacggtaatgagcccaggatgggta

SEQ ID NO: 81580 - DNA, 80 bp, synthetic construct
  source 1..80: mol_type = other DNA
aactaaggtctattttattgtccgctcgttcctaccaaaaaatccaaatgttcccagacacaatctggaaggtgacttac

SEQ ID NO: 81581 - DNA, 80 bp, synthetic construct
  source 1..80: mol_type = other DNA
actggaacaagcaaatcattatcggattcattctacaggagtatgagatggctgactcaaaagtacgggtcttacccatt

SEQ ID NO: 81582 - DNA, 80 bp, synthetic construct
  source 1..80: mol_type = other DNA
catttgaatccccacattgctttcaacaaattggtaaaggcattcttaacgtgtggggcatttgtcatccacccaccgat

SEQ ID NO: 81583 - DNA, 80 bp, synthetic construct
  source 1..80: mol_type = other DNA
ggccccatatcaatggtcagcagggaagaattaataattattggttgttactaaaaccaggccagactttatgggtaagg

SEQ ID NO: 81584 - DNA, 80 bp, synthetic construct
  source 1..80: mol_type = other DNA
agaatttgtggatacgctagtagaaaccaatgttcctgtgaagcgtgccaaagagttgctccgcccagagcacatgttta

SEQ ID NO: 81585 - DNA, 80 bp, synthetic construct
  source 1..80: mol_type = other DNA
aaatgcgtagtgcaatgtcagactgaaaaaggtggcttaaacagaacattaccattccacaatgtcagtaaatatgcatt

SEQ ID NO: 81586 - DNA, 80 bp, synthetic construct
  source 1..80: mol_type = other DNA
aatgtcaaggggttggtatggctgcagatcgggattctgcgcaaaaggcaatatttccactgtcacccaaggtgactatt

SEQ ID NO: 81587 - DNA, 80 bp, synthetic construct
  source 1..80: mol_type = other DNA
acaagcaatatttagtaattcttcatggattcagtcaggtggaaactcgactcattatgatcaattttccgatttagtac

SEQ ID NO: 81588 - DNA, 80 bp, synthetic construct
  source 1..80: mol_type = other DNA
cttttactagacttatgggcataatgtgcagtatagctagtactgcttttaaaccagaaaactctccatctgcctttcgc

SEQ ID NO: 81589 - DNA, 80 bp, synthetic construct
  source 1..80: mol_type = other DNA
aaatgtgaacactctatctcccaaggtgaaaggggctctgggttccaatgcaatggaagatgggaaaggatgtttcgagc

SEQ ID NO: 81590 - DNA, 80 bp, synthetic construct
  source 1..80: mol_type = other DNA
agaaggggtcaagctggaatctttgggaacttgcaaaatccttacctattattcgactgtcgcctcatctcttgtgcttg

SEQ ID NO: 81591 - DNA, 80 bp, synthetic construct
  source 1..80: mol_type = other DNA
tccttacctattattcgactgtcgcctcatctcttgtgcttgcaatggggtctgctgccttctagttctgagccatgttt

SEQ ID NO: 81592 - DNA, 80 bp, synthetic construct
  source 1..80: mol_type = other DNA
tgctgtgtgcaacaaaccggggacatcctctcatcatgaacacatgcaccatggaaggattgatctatggcaacccttct

SEQ ID NO: 81593 - DNA, 80 bp, synthetic construct
  source 1..80: mol_type = other DNA
tgttgggagggaaagaatggtcctacatcgtcggatgatcatcgtcggtaaatggaacatgatgccctgggaaggtagaa

SEQ ID NO: 81594 - DNA, 80 bp, synthetic construct
  source 1..80: mol_type = other DNA
attggaacaagatgagcgtgttcagattcattctcatggagtatgagatggctgactcaaaaagttgggtcttacccaga

SEQ ID NO: 81595 - DNA, 80 bp, synthetic construct
  source 1..80: mol_type = other DNA
tcaaggcgcccgattcacaaaatgtgggggaaagagcattcttttcgtgttgggcatacatcatccacccaccgatacat

SEQ ID NO: 81596 - DNA, 80 bp, synthetic construct
  source 1..80: mol_type = other DNA
ggccccttgtcaatggtcagcagcgaagattactttattattggtcggtactaaatcctggccagacattgcgagtaagg

SEQ ID NO: 81597 - DNA, 80 bp, synthetic construct
  source 1..80: mol_type = other DNA
tttttgcataatttaatgtcgtactttaaaatgtggcttaaacagtacattgccattcgatggtgtcagtttatatgcat

SEQ ID NO: 81598 - DNA, 80 bp, synthetic construct
  source 1..80: mol_type = other DNA
atggagacaatatcactaataactatactgctagtagtaactgcatgcaatgctgctaaaatttgcatcggctaccggtc

SEQ ID NO: 81599 - DNA, 80 bp, synthetic construct
  source 1..80: mol_type = other DNA
tggagccatagctggattcagcgacggaggcagaccgggactagtcgctggttggtatggtttccagcattcaaatattc

SEQ ID NO: 81600 - DNA, 80 bp, synthetic construct
  source 1..80: mol_type = other DNA
tattcaaggggttggtatggctgcagatcgggattcaactcaaaaggcaatatgtccaataacatccaaggtgaatatta

SEQ ID NO: 81601 - DNA, 80 bp, synthetic construct
  source 1..80: mol_type = other DNA
acaagcaatatctaattctttttcaagaattctgatgggtatgaactcgactcaatatgatcaacaaaaagatttatcac

SEQ ID NO: 81602 - DNA, 80 bp, synthetic construct
  source 1..80: mol_type = other DNA
caaatacaagacatatggacatatcctgcagaattgctagtactgctaaaaaaccagagcaaactcgcatggcaatgcgc

SEQ ID NO: 81603 - DNA, 80 bp, synthetic construct
  source 1..80: mol_type = other DNA
aaatgtgaacaatctatattacaaggtgtaaggggcactggtccccagtccaatggaagatgggaaaggatgtttcgagc

SEQ ID NO: 81604 - DNA, 80 bp, synthetic construct
  source 1..80: mol_type = other DNA
tttatgtgctctccaatgcatggaaacaattcggaacgggacctatttcaggagaaagtaaaaagaggaatccagatttc

SEQ ID NO: 81605 - DNA, 80 bp, synthetic construct
  source 1..80: mol_type = other DNA
agaaggggtcaagcttttatcttagggaacttacaaaatcctccccatttattcgactgtcgcctcatctcttgtgcttg

SEQ ID NO: 81606 - DNA, 80 bp, synthetic construct
  source 1..80: mol_type = other DNA
aatcctccccatttattcgactgtcgcctcatctcttgtgcttgcaatggggtttgctgccttcttgttctgggccatgt

SEQ ID NO: 81607 - DNA, 80 bp, synthetic construct
  source 1..80: mol_type = other DNA
tgctgtgtgcaacaaacctgggacatcctctcatcctagacacatgcaccattgatagctctatctatgcacaacccttc

SEQ ID NO: 81608 - DNA, 80 bp, synthetic construct
  source 1..80: mol_type = other DNA
ttgatgtctgctgttgggagggacataaaggtcatacatcgtcgaaagatcatcagcggttcatggcacgtgttactctg

SEQ ID NO: 81609 - DNA, 80 bp, synthetic construct
  source 1..80: mol_type = other DNA
agaggaacgggcaaatcatgttcagattcattctacaggagtatgagatggctgactcaaaggcaggggtcttaattggt

SEQ ID NO: 81610 - DNA, 80 bp, synthetic construct
  source 1..80: mol_type = other DNA
tcaagacgcccaatacacaaaatgtctgggaaagagcattcttttcgtgtggggcatacaacaaccacccaccgatacag

SEQ ID NO: 81611 - DNA, 80 bp, synthetic construct
  source 1..80: mol_type = other DNA
cttggccccttgtcactggtccgcagggaagaattttttattattggtcggtactaactccaggccagacattgcgtgta

SEQ ID NO: 81612 - DNA, 80 bp, synthetic construct
  source 1..80: mol_type = other DNA
atttgcgtagtgcaacgtcagactggaaattgtggcttaaacagtacattgcctatccacaatgccggaaaatgtgcatt

SEQ ID NO: 81613 - DNA, 80 bp, synthetic construct
  source 1..80: mol_type = other DNA
cccaaataaagtggagtcaagagtctcggactggaaatcggtctggggaacgtgcctgcgggatcaagatgaggcccctt

SEQ ID NO: 81614 - DNA, 80 bp, synthetic construct
  source 1..80: mol_type = other DNA
cgtctcagggagcaaaagcaggtagatattgaaagatgagccttctaaccgaggtcgaaacgtacgttctctctattgtc

SEQ ID NO: 81615 - DNA, 80 bp, synthetic construct
  source 1..80: mol_type = other DNA
aacctggaacctggtaccttcgatcttggagggctatatgaagcaatcgaggagtgcctgattaatgatccctgggtttt

SEQ ID NO: 81616 - DNA, 80 bp, synthetic construct
  source 1..80: mol_type = other DNA
cgcacagtggatcctaggctttttggattgcgctttcctcttggtgaactgagtgttagactctgtcttgtctaaaaatg

SEQ ID NO: 81617 - DNA, 80 bp, synthetic construct
  source 1..80: mol_type = other DNA
gttcttacttaaacgaaacccacttcagtgatcaaatcgagcaggaagcagacaatatgatcacagagatgttgaggaaa

SEQ ID NO: 81618 - DNA, 80 bp, synthetic construct
  source 1..80: mol_type = other DNA
caccgtttaaccaaaaaaggaatttgtagttgtggtgcttttaaagtccctggtgtggaaactgtttggaaaagacgctg

SEQ ID NO: 81619 - DNA, 80 bp, synthetic construct
  source 1..80: mol_type = other DNA
tcttctcttagctggtaggtcatgcggtatgtacggtctcagtgggcctgacatatacaaaggagtttatcaattcaaat

SEQ ID NO: 81620 - DNA, 80 bp, synthetic construct
  source 1..80: mol_type = other DNA
gccgctccgggtgttggtctgggtgagttaaccatggacctttcatttgtgaggtcaattgttgtgttctcccatgctct

SEQ ID NO: 81621 - DNA, 80 bp, synthetic construct
  source 1..80: mol_type = other DNA
cagtggaatttgacatgtcccacttgaatctgacaatgcccaatgcatgttcagtaaacaattctcaccactacatcagc

SEQ ID NO: 81622 - DNA, 80 bp, synthetic construct
  source 1..80: mol_type = other DNA
cctctgccttcaataagaaaaccttcgatcacacacttatgagcattgtctctagcctacacctcagtataagaggaaac

SEQ ID NO: 81623 - DNA, 80 bp, synthetic construct
  source 1..80: mol_type = other DNA
tccaactataaggcagtgtcctgtgacttcaacaatggtattaccattcaatacaatctaacactctcagactcacaaag

SEQ ID NO: 81624 - DNA, 80 bp, synthetic construct
  source 1..80: mol_type = other DNA
tggtatacaattggagtctatgtcattggctttacacttcccattatcctgaaagctctatatatgttatcaacacgtgg

SEQ ID NO: 81625 - DNA, 80 bp, synthetic construct
  source 1..80: mol_type = other DNA
tggtatacaattggagtttatgttattggtttcacgcttcccatcatcctcaaagccttatacatgttgtcaacacgtgg

SEQ ID NO: 81626 - DNA, 80 bp, synthetic construct
  source 1..80: mol_type = other DNA
aaagaactgctaatcgtaccgatagtataagcataataagtactaacatgcagatatacacatattcagggatatttagt

SEQ ID NO: 81627 - DNA, 80 bp, synthetic construct
  source 1..80: mol_type = other DNA
ttgttatagtaagtgtcatagtcatatatccatatttcgttatttatttaatgggcccataaaatgtgaaactgagctgt

SEQ ID NO: 81628 - DNA, 80 bp, synthetic construct
  source 1..80: mol_type = other DNA
tgcttcttcttgcaacgatcagccttgttagaagtgatcagatttgcattggttaccatgcaaacaactcgacagagcag

SEQ ID NO: 81629 - DNA, 80 bp, synthetic construct
  source 1..80: mol_type = other DNA
caacagttgcgagttctctagcactggcaatcatggtggctggtctatctttatggatgtgctctaatggatcgttacaa

SEQ ID NO: 81630 - DNA, 80 bp, synthetic construct
  source 1..80: mol_type = other DNA
ggatttcctttgagttgctcattgtggaaaagacttgctgaccagtaaaggtagacaatttgcctaggatccactgtgcg

SEQ ID NO: 81631 - DNA, 80 bp, synthetic construct
  source 1..80: mol_type = other DNA
tgtcaagaacctttacgataaggtcagagtacagcctaaggataacggaaaagatttggggaacggatgtgtggagttct

SEQ ID NO: 81632 - DNA, 80 bp, synthetic construct
  source 1..80: mol_type = other DNA
ctcacaaatgtaataatgaaactttccaaagtgtaggaaacgcaatgtatgagcacccgcagtattcagaagaagcaaga

SEQ ID NO: 81633 - DNA, 80 bp, synthetic construct
  source 1..80: mol_type = other DNA
tagggcggacaatcaagaaggctggtctgtccttatggatgtgttgcaacggatcgttacagtgcagaatttgcatttaa

SEQ ID NO: 81634 - DNA, 80 bp, synthetic construct
  source 1..80: mol_type = other DNA
aaatccaaacgaaaagatcatttgagctaaaaaggctatgggagcagacccattcaaaaactggactactaatttcagat

SEQ ID NO: 81635 - DNA, 80 bp, synthetic construct
  source 1..80: mol_type = other DNA
caactctcccaaggacatctggatctgctggtgcaccactaaggggagttgggacgatggtaatggaactgattcagatg

SEQ ID NO: 81636 - DNA, 80 bp, synthetic construct
  source 1..80: mol_type = other DNA
atatggaagctccagactcctccgctccgactaatgatggacgctctgcgggaaagcaggaatcccgggaatgctgagat

SEQ ID NO: 81637 - DNA, 80 bp, synthetic construct
  source 1..80: mol_type = other DNA
aatttttgaaaatgcattcccagggactactgaatccttattttaccagttaatccaaaagaaaaatactacaggagcct

SEQ ID NO: 81638 - DNA, 80 bp, synthetic construct
  source 1..80: mol_type = other DNA
actccagaaaagttgtataaatcaaataataaaggggaagtttggtgttcgaatgatgttcactgcctgaatgattttga

SEQ ID NO: 81639 - DNA, 80 bp, synthetic construct
  source 1..80: mol_type = other DNA
cgtgcaataaaagcatcattcttactgagcaagctgtggtttcagtaacattagcgggtaatgcatctctttgcccaatt

SEQ ID NO: 81640 - DNA, 80 bp, synthetic construct
  source 1..80: mol_type = other DNA
gaagggggcaagatgagccaccagcagagccagcagcaataggggtgggagcagcatctcgagacttggaaaaatatgga

SEQ ID NO: 81641 - DNA, 80 bp, synthetic construct
  source 1..80: mol_type = other DNA
ggatcctaggcgtttagttgcgctatttagttgcacaactgttctctgtgaaaccatcgagcacagctcaagctaacaac

SEQ ID NO: 81642 - DNA, 80 bp, synthetic construct
  source 1..80: mol_type = other DNA
atctttctagagcccatcaattcaagatcaaggtggtcaccaagtatcagggggtcctccatataatcctcaaattcttc

SEQ ID NO: 81643 - DNA, 80 bp, synthetic construct
  source 1..80: mol_type = other DNA
tgttcttaataaatggagacactcatctaatagccttctatccactccacccttaaaaaagtaggaacacgacaaaaact

SEQ ID NO: 81644 - DNA, 80 bp, synthetic construct
  source 1..80: mol_type = other DNA
ctcaaacaatcagtgttgttctgattgtgcgtgaaatccactgttattgaaaattctagcactcctttcgtgttgttgag

SEQ ID NO: 81645 - DNA, 80 bp, synthetic construct
  source 1..80: mol_type = other DNA
aggatccaaatgcactcgggtttgttagaccctgcttgatcagcaaagcagcattgcacacaatatcccctattcgataa

SEQ ID NO: 81646 - DNA, 80 bp, synthetic construct
  source 1..80: mol_type = other DNA
aaggcccgtgttcacatgcttctttccttccaaaggttctgccaggacccaaacacccaactcaaaggaattgctcaatg

SEQ ID NO: 81647 - DNA, 80 bp, synthetic construct
  source 1..80: mol_type = other DNA
gatcagattgagccttaggatgattcaacctatcacaaatgtataacattatgccatcttgtttttgtactcttgtcaca

SEQ ID NO: 81648 - DNA, 80 bp, synthetic construct
  source 1..80: mol_type = other DNA
taatcatccatagccagatcctcaagcaacttttttatgtataagttttctttatttttattcctcacacacctgcttcc

SEQ ID NO: 81649 - DNA, 80 bp, synthetic construct
  source 1..80: mol_type = other DNA
ggatatctcccagttgtaaaatagcatctttcttttctctgttaaagaggtctaaaaagaattcctcattaaattcacca

SEQ ID NO: 81650 - DNA, 80 bp, synthetic construct
  source 1..80: mol_type = other DNA
taaccttccttaaatgagccattctccctgataaaacagtctgaaggtgatgtaatcctttcacatttttgaggtctttc

SEQ ID NO: 81651 - DNA, 80 bp, synthetic construct
  source 1..80: mol_type = other DNA
tcatcatctccctcattaactttcctatttctcttataatttgttattgtggagttaaccttgtcctccaaatttttgaa

SEQ ID NO: 81652 - DNA, 80 bp, synthetic construct
  source 1..80: mol_type = other DNA
gaaacttgtttcctcctctccttcaaaacatatatttgctgggtcatctcccaacttcccagtttccattcccttggagt

SEQ ID NO: 81653 - DNA, 80 bp, synthetic construct
  source 1..80: mol_type = other DNA
ctataaccaatctagaaattagctttgagaccttatattcataatctgagtggcttagcttgtatttttgttttctcaca

SEQ ID NO: 81654 - DNA, 80 bp, synthetic construct
  source 1..80: mol_type = other DNA
acacccacgcgcccccacgctgggaggcgccccccgggaggctgccccccgggacccgacgtggcccacagagacagcca

SEQ ID NO: 81655 - DNA, 80 bp, synthetic construct
  source 1..80: mol_type = other DNA
gaagataccatcaaactaaaaacttccaaattgacacctggagttgtgagctgacaatccagctctttgctggtgaactt

SEQ ID NO: 81656 - DNA, 80 bp, synthetic construct
  source 1..80: mol_type = other DNA
cctcatttgttcatgaaagacactttcttcttcaggtgtgattgcttccttagggttgacaaaaaaaccgaactgacttt

SEQ ID NO: 81657 - DNA, 80 bp, synthetic construct
  source 1..80: mol_type = other DNA
agttgttttaattaggaatctaagcaacttgtacactattttctcagcaggtgtgatcaagtcttccttcaatttgtcca

SEQ ID NO: 81658 - DNA, 80 bp, synthetic construct
  source 1..80: mol_type = other DNA
cgggacccgacggggcccacagagacagccatcagtcaatctcctcggtctcctgcccagtcaaccagtcatcacaagac

SEQ ID NO: 81659 - DNA, 80 bp, synthetic construct
  source 1..80: mol_type = other DNA
gtattaataacaacagagtccttaatgcagtttcaatgtcaacaagactatctttcaaatcgggacacgatctaatccac

SEQ ID NO: 81660 - DNA, 80 bp, synthetic construct
  source 1..80: mol_type = other DNA
tcagtcaatctcctcggtctcctgcccagtcaaccagtcatcacaagactttcccttgagcctgaacctgccccctgctg

SEQ ID NO: 81661 - DNA, 80 bp, synthetic construct
  source 1..80: mol_type = other DNA
gactctgtacacccctcaattgttctgtgtcaggttgaaagttgtaatcttcaaattttgtatagtgcatcactgggtga

SEQ ID NO: 81662 - DNA, 80 bp, synthetic construct
  source 1..80: mol_type = other DNA
gttccaatttttgtaaaactctcaaactcattgtatgttatgtagcactcatgagcaaggtgtttggataatccatagtg

SEQ ID NO: 81663 - DNA, 80 bp, synthetic construct
  source 1..80: mol_type = other DNA
ctcaaaagtaagccccaccattgacaaacatttctgaattttcacaatgaattcatctatagacagcctaaacaactcat

SEQ ID NO: 81664 - DNA, 80 bp, synthetic construct
  source 1..80: mol_type = other DNA
ctagagaaagcttcttgtacatttttgaccttcttctgtttctcaaaagcttaataaattcctccttagtactgtgaaag

SEQ ID NO: 81665 - DNA, 80 bp, synthetic construct
  source 1..80: mol_type = other DNA
gtgtttgtcattcttcaacttttttgcttttgactgtttgattagtgaagaaagacacaagacatctaagttcaatagtt

SEQ ID NO: 81666 - DNA, 80 bp, synthetic construct
  source 1..80: mol_type = other DNA
ctccattttctctcttgaatccatgggtttctgctgtaatgaatctcattaagggacaggactcaactgcctctctactt

SEQ ID NO: 81667 - DNA, 80 bp, synthetic construct
  source 1..80: mol_type = other DNA
ttctctgatcagaacttcaggttttatcctctgaaattttctttctaatttcccacattctagatctcttctgaatctac

SEQ ID NO: 81668 - DNA, 80 bp, synthetic construct
  source 1..80: mol_type = other DNA
tacccagctcctgaagagtaacgcctatctccgatcccggcaggtgttcaccagttcggaatctgtgtagaaagaagctg

SEQ ID NO: 81669 - DNA, 80 bp, synthetic construct
  source 1..80: mol_type = other DNA
catgggtcagggcaagtccaaagagaaaagggaacctagcagtgtgggcagagctgagattctaccagacgccacctatc

SEQ ID NO: 81670 - DNA, 80 bp, synthetic construct
  source 1..80: mol_type = other DNA
ccgagaacatcaccagccctcccatagccttcgagctccgccaaaaaaatcctcatgtccttagtttctaatcttacaag

SEQ ID NO: 81671 - DNA, 80 bp, synthetic construct
  source 1..80: mol_type = other DNA
cactgcttgctaactttgacccacagaatgggtcagattgtgacaatgtttgaggccttgcctcacattattgacgaggt

SEQ ID NO: 81672 - DNA, 80 bp, synthetic construct
  source 1..80: mol_type = other DNA
aactcaagcccacttgaggtgggcctgctgctccgggcactggtctaggtgagttggccataggcttctcacttgttaga

SEQ ID NO: 81673 - DNA, 80 bp, synthetic construct
  source 1..80: mol_type = other DNA
gaagttcaggattggagttgaccttcactaatgaatccatcatcagccacaatcattgcaacctgacatctgccttcaat

SEQ ID NO: 81674 - DNA, 80 bp, synthetic construct
  source 1..80: mol_type = other DNA
ggcaaaaccacctggtgcagtcaaacaaattaccaatacttaatcatacaaaacagaacttgggaaaaccattgtgaata

SEQ ID NO: 81675 - DNA, 80 bp, synthetic construct
  source 1..80: mol_type = other DNA
gctaataaaacagcaaaggaggaagcagtaatgaaaaattgctcttttaatatcaccacaaacgtgagagataaagtaaa

SEQ ID NO: 81676 - DNA, 80 bp, synthetic construct
  source 1..80: mol_type = other DNA
ccttttctgacatatctgggacttacactgttcatgggcaactgttggtagatttatatagagcactcaatgtgccggat

SEQ ID NO: 81677 - DNA, 80 bp, synthetic construct
  source 1..80: mol_type = other DNA
ctggctgctagcccagggcggctagactgccgtactattctgggcaacaagaccttccgtactacaatcgttgatggtgc

SEQ ID NO: 81678 - DNA, 80 bp, synthetic construct
  source 1..80: mol_type = other DNA
ccagttagaggcaaatggtcctgagcagtatgttctctcatttgatgagacccaccagtgtatgggtgccgggccgcaca

SEQ ID NO: 81679 - DNA, 80 bp, synthetic construct
  source 1..80: mol_type = other DNA
gtctcgcgtatgagcttacccccggtgggctgcgggttaaaatttcatctaatggcttggactgtgtggcggtcttcccc

SEQ ID NO: 81680 - DNA, 80 bp, synthetic construct
  source 1..80: mol_type = other DNA
cttgggcgggccccgagcccagcggctgcagaagtaacagccttctgtagcgccctgtataggtacaataggaccatcca

SEQ ID NO: 81681 - DNA, 80 bp, synthetic construct
  source 1..80: mol_type = other DNA
ttttcaccgcctgaggcggctgttgatgcccccccccccgccgacccgccttacgggccggcccctgttagtgcaggcgt

SEQ ID NO: 81682 - DNA, 80 bp, synthetic construct
  source 1..80: mol_type = other DNA
tcgagccccgctgccccccccccttcctgtgacccctagacccaccggcttgcccgccggcatgcccgggcttctctcgc

SEQ ID NO: 81683 - DNA, 80 bp, synthetic construct
  source 1..80: mol_type = other DNA
ttgcccgccggcatgcccgggcttctcccgcataagccacctacgcaaccaccggctcgcaatcgccgccttctctatgt

SEQ ID NO: 81684 - DNA, 80 bp, synthetic construct
  source 1..80: mol_type = other DNA
ataagccacctacgcaaccaccggctcgcaatcgccgccttctctatgtctacccggacggcgccaagatttattcaggg

SEQ ID NO: 81685 - DNA, 80 bp, synthetic construct
  source 1..80: mol_type = other DNA
gactctctacactcactactcaagatatagccccggccgattcccctgcggccggaaccgatccttcgcctgagcctgcc

SEQ ID NO: 81686 - DNA, 80 bp, synthetic construct
  source 1..80: mol_type = other DNA
cgcggtccggcactgcccgccctgaccataacggaggatacagccaggacggccaacctcgcgctggagattgactccag

SEQ ID NO: 81687 - DNA, 80 bp, synthetic construct
  source 1..80: mol_type = other DNA
atgcataatagatgcatttgaaagaggaaaggacatcaccattgatttagatgctatgaacggcgaagttaaattagatg

SEQ ID NO: 81688 - DNA, 80 bp, synthetic construct
  source 1..80: mol_type = other DNA
tatttgggtctcagggagcaaaagcaggagtgaaaatgaatccaaatcaaaaaataatagcacttggctctgcttcccta

SEQ ID NO: 81689 - DNA, 80 bp, synthetic construct
  source 1..80: mol_type = other DNA
aaagagggggcccaggagtgaaagggtgggcttttgacagtggaaatgatgtttggatgtggcgaacaatcgagaaagat

SEQ ID NO: 81690 - DNA, 80 bp, synthetic construct
  source 1..80: mol_type = other DNA
ggttggaacgtggctaattcaaagtcacaaataaataggcaagtcatagttgatagtgataactggtctgggtattctgg

SEQ ID NO: 81691 - DNA, 80 bp, synthetic construct
  source 1..80: mol_type = other DNA
cttagcaacgaatatgacactacatttcaagcagaacgaatacaccaactcctcgaaaaatcaagtagtaccatgtgagc

SEQ ID NO: 81692 - DNA, 80 bp, synthetic construct
  source 1..80: mol_type = other DNA
gcagatatcaatttcatgcctatgtaagctttcgcaattttagaaaaaactccttgtttctactaatacgagaccatata

SEQ ID NO: 81693 - DNA, 80 bp, synthetic construct
  source 1..80: mol_type = other DNA
tggtactatcatagagaaggaaagttgtcccaaagcatcagaatataagaattggtcaaaacctcaatgtcaaattacag

SEQ ID NO: 81694 - DNA, 80 bp, synthetic construct
  source 1..80: mol_type = other DNA
tattcgtctcagggagcgaaagcaggcaaaccatttgaatggatgtcaatccgactttactctttttgaaagtgccagca

SEQ ID NO: 81695 - DNA, 80 bp, synthetic construct
  source 1..80: mol_type = other DNA
taatgagatcatgaagacctgttccaccattgaagagctcagacggcaaaaacagtgaatttggcttgtccttcagtaaa

SEQ ID NO: 81696 - DNA, 80 bp, synthetic construct
  source 1..80: mol_type = other DNA
tgaaagcgatggaggcagacgaagtgaaaaactgttctttcaatgttacaaatacaaacataaaagataaaaggcagagg

SEQ ID NO: 81697 - DNA, 80 bp, synthetic construct
  source 1..80: mol_type = other DNA
tactactgccaacagtaatagtaccagtaatagtagtggggaagtgatggaggaagtagacatgaaaaactgctctttca

SEQ ID NO: 81698 - DNA, 80 bp, synthetic construct
  source 1..80: mol_type = other DNA
ccgttaccaccgaattaaaaaatacggtgagcaaacaatatgctcttttttataaactgcaagccctacctaaagataat

SEQ ID NO: 81699 - DNA, 80 bp, synthetic construct
  source 1..80: mol_type = other DNA
caagaaaaaataccatttcatctgcagataagtaaacaggtaattcatgcagagattcagcacttaggccattggatgga

SEQ ID NO: 81700 - DNA, 80 bp, synthetic construct
  source 1..80: mol_type = other DNA
gaaaaactgctctttcaatgttaccacaaacataggaaataaggtgaagaaagaacgtgctatttttgataaacttgatg

SEQ ID NO: 81701 - DNA, 80 bp, synthetic construct
  source 1..80: mol_type = other DNA
tatttggtctcagggagcaaaagcagggtgacaaaaacataatggattcaaacactgtgtcaagctttcaggtagattgc

SEQ ID NO: 81702 - DNA, 80 bp, synthetic construct
  source 1..80: mol_type = other DNA
agcaagagataagaactttctcgtttcagcttatctaatgataaaaaacacccttgtttctactaatacgagacgatata

SEQ ID NO: 81703 - DNA, 80 bp, synthetic construct
  source 1..80: mol_type = other DNA
ggggtggttgagatggttgtactacttcttgagctctttggcgtgttctggaatccgcccgatgtgtctaattttatagc

SEQ ID NO: 81704 - DNA, 80 bp, synthetic construct
  source 1..80: mol_type = other DNA
acctccaggggccagaagacctagcccgggatctggtgccagtcattcttggtggcatagggctagccattggatttacc

SEQ ID NO: 81705 - DNA, 80 bp, synthetic construct
  source 1..80: mol_type = other DNA
gctccaggggaagatgtatgattttgatgatgatagggtgtcagccttcaccaccatggcacgcgataatgggttgggca

SEQ ID NO: 81706 - DNA, 80 bp, synthetic construct
  source 1..80: mol_type = other DNA
ttacatcaatggagggtctgaagaatgctttgaaggggtacaaaattggtgcgtgcacaatcaagtggcaggccaaggtg

SEQ ID NO: 81707 - DNA, 80 bp, synthetic construct
  source 1..80: mol_type = other DNA
caggactcaagaggaagttcaatacggcatgggatggactgaacggcctatggatcagaatgttaagtcatgggaggaac

SEQ ID NO: 81708 - DNA, 80 bp, synthetic construct
  source 1..80: mol_type = other DNA
agaaggcaagaataaagggaagaacaagaaagggcgcggccgaaagaataactacaatgccttttcccgtagagggctca

SEQ ID NO: 81709 - DNA, 80 bp, synthetic construct
  source 1..80: mol_type = other DNA
taggattagtcacaggttctgacatccggaaaaggaaaccaattgactggaccccccctaagtcagcatgggcagatgat

SEQ ID NO: 81710 - DNA, 80 bp, synthetic construct
  source 1..80: mol_type = other DNA
gggtggggcttttgggttagtcccacagtcttcataaccacaacgcacgtcataccaaccagtgcaaaagagttctttgg

SEQ ID NO: 81711 - DNA, 80 bp, synthetic construct
  source 1..80: mol_type = other DNA
gaaggagagaccacactggaagggggtgacaaaggtcactatgccgggcatgagataatcaagcatggatgtgggccagc

SEQ ID NO: 81712 - DNA, 80 bp, synthetic construct
  source 1..80: mol_type = other DNA
gggcgtatgccagagccaggtctcctggaggccgcagttgagactgtgacctcatcactggagcaggttatggatacccc

SEQ ID NO: 81713 - DNA, 80 bp, synthetic construct
  source 1..80: mol_type = other DNA
tttggggggcagatctaggaacagtgatccgggctgcacgagccttcggcccgttctgtgacgccataaagtcccacaca

SEQ ID NO: 81714 - DNA, 80 bp, synthetic construct
  source 1..80: mol_type = other DNA
tggagtgaatcgcctcacaacggtgagtggccccgagtggaatctctgtcctttaccccccattgacctaaggaatatgg

SEQ ID NO: 81715 - DNA, 80 bp, synthetic construct
  source 1..80: mol_type = other DNA
ggggaggctgccctcctccactacgtggaccctgatacgggccggaacttggtggagttcaaactttaccctgatggatt

SEQ ID NO: 81716 - DNA, 80 bp, synthetic construct
  source 1..80: mol_type = other DNA
ggggaggctgccctcctccactacgtggaccctgatacgggccggaacttgggggagttcaaactttaccctgatggatt

SEQ ID NO: 81717 - DNA, 80 bp, synthetic construct
  source 1..80: mol_type = other DNA
ctggtagcatactaggggcaggtatacaggctggtgctgaggctggtctccaggctcaacggtaccagcaggacctacag

SEQ ID NO: 81718 - DNA, 80 bp, synthetic construct
  source 1..80: mol_type = other DNA
tcttaacactaggtatgctctcctgcaggcaggaggcctgtctagtgctgatgctgcccgggcagtggccggcgcccctg

SEQ ID NO: 81719 - DNA, 80 bp, synthetic construct
  source 1..80: mol_type = other DNA
tgtaataggatgccagtgggcaccatattcagatttggtttaattagattgttttaatcaaatttggcttaattggtgtt

SEQ ID NO: 81720 - DNA, 80 bp, synthetic construct
  source 1..80: mol_type = other DNA
gatttttatcgaggtttaggggtttaggtggtggcgcgagcccccctaaccccataaagattaaaagcacagaaatggca

SEQ ID NO: 81721 - DNA, 80 bp, synthetic construct
  source 1..80: mol_type = other DNA
actaccttgttgcagtactggtctaatagctgatcttcttgaaaatttgcagacctatcagaaacgaatgggggtgcaga

SEQ ID NO: 81722 - DNA, 80 bp, synthetic construct
  source 1..80: mol_type = other DNA
tctatgagggaagaatatcgaaaggaacagcagaatgctgtggatgctgacgacagtcattttgtcagcatagagttgga

SEQ ID NO: 81723 - DNA, 80 bp, synthetic construct
  source 1..80: mol_type = other DNA
cccttctagtattgtcttgtctattattaagtctagtcttgtctttttcttgtctttgttacttgggttcttcttcttgg

SEQ ID NO: 81724 - DNA, 80 bp, synthetic construct
  source 1..80: mol_type = other DNA
gctgacatcgagctttctacagggactttccgctggggactttccggggaggcgtgacctgggcgggacaagggagtggc

SEQ ID NO: 81725 - DNA, 80 bp, synthetic construct
  source 1..80: mol_type = other DNA
caataacgagatggtgggagaaatgaagaactgctctttcaatatcaccacagatgtaggaaaaaaggcgcggacacaat

SEQ ID NO: 81726 - DNA, 80 bp, synthetic construct
  source 1..80: mol_type = other DNA
gattgtcttgtctattattaagtctagttccgttctgggtctctctggtctgagactgggtttctttctttctttggttt

SEQ ID NO: 81727 - DNA, 80 bp, synthetic construct
  source 1..80: mol_type = other DNA
tttggaaatgaaagaacaaataaaaaactgctctttcaatgtctccacattcgggaaaaatgaggtgcagaaaagatatg

SEQ ID NO: 81728 - DNA, 80 bp, synthetic construct
  source 1..80: mol_type = other DNA
ctaataatgccactagtagagggtggggaaaattggaagcaggagaagtacaaaattgctctttcgatgttaccacatac

SEQ ID NO: 81729 - DNA, 80 bp, synthetic construct
  source 1..80: mol_type = other DNA
taccacctataatattagccaggaaatgaaaaactgctctttcaatgtcaccccaaatgtaaatgacagggtggagaaaa

SEQ ID NO: 81730 - DNA, 80 bp, synthetic construct
  source 1..80: mol_type = other DNA
ggagaaataaaaaattgctctttcaatgtcaccataagaagaggagataaggcacagggacactatgcactttttaatag

SEQ ID NO: 81731 - DNA, 80 bp, synthetic construct
  source 1..80: mol_type = other DNA
ccctcagatgctgcatatctattattaagtttcgcctgtatttttcgtccttgttacttgactttgggtttctttctttc

SEQ ID NO: 81732 - DNA, 80 bp, synthetic construct
  source 1..80: mol_type = other DNA
gtactccatacagcaaaaaaagcagaaggaattggaagacagccatattgtaatgttagtagaaaagactggaatgaaac

SEQ ID NO: 81733 - DNA, 80 bp, synthetic construct
  source 1..80: mol_type = other DNA
caacagtagtacgagtaccaacaatagtaattgggaggaattaggaatgaaaaactgctctttcaatgtctctgcagaca

SEQ ID NO: 81734 - DNA, 80 bp, synthetic construct
  source 1..80: mol_type = other DNA
tagtagcatgggaataatagagaagggagaaatgaaaaactgttctttcaatgtcactagtaccctaagagataaggtgc

SEQ ID NO: 81735 - DNA, 80 bp, synthetic construct
  source 1..80: mol_type = other DNA
aataaaaaactgctctttcaatatcacaacaagcataaatgaggtacggaaagaatctgcattttttaatagacttgatg

SEQ ID NO: 81736 - DNA, 80 bp, synthetic construct
  source 1..80: mol_type = other DNA
acttgggttcttcttcttgtccccttatttctttacttatttagttaaagtttttccgttctttcctttactttatttgg

SEQ ID NO: 81737 - DNA, 80 bp, synthetic construct
  source 1..80: mol_type = other DNA
gaatgaaactgatatgaaaaactgctctttcaatgccaccacaaacataggaaagaaggttcagaaagaatatgcacttt

SEQ ID NO: 81738 - DNA, 80 bp, synthetic construct
  source 1..80: mol_type = other DNA
tagcgaggaaaagatggatccaggagaaatgaaaaactgctctttcaacatcacctcaggcataagagataaggtaaagg

SEQ ID NO: 81739 - DNA, 80 bp, synthetic construct
  source 1..80: mol_type = other DNA
gagcacgtgcagttttctattcaattgatctagtcccaatagatgatgatgaacataatagtaccagcaacattaccagc

SEQ ID NO: 81740 - DNA, 80 bp, synthetic construct
  source 1..80: mol_type = other DNA
aacttgtagtgaggaaacagatatgaaaaactgctctttttatgctactgcgggaatacagggtaaggtaaagaaagaat

SEQ ID NO: 81741 - DNA, 80 bp, synthetic construct
  source 1..80: mol_type = other DNA
atgcacttttttataaccttgatatagtatccatagaggaaaagggtaggaaagataaccccacctacaacacctatagg

SEQ ID NO: 81742 - DNA, 80 bp, synthetic construct
  source 1..80: mol_type = other DNA
gtcgttacgttacgggttcggttccttccttcggttcggttcgtaggaacgtacgtccgaaccggaacggaccaaccaac

SEQ ID NO: 81743 - DNA, 80 bp, synthetic construct
  source 1..80: mol_type = other DNA
cggggcgcggcctaaacagccccccccgagggaaataccacaaagacccccacgaccacctactccagaactggtcaaaa

SEQ ID NO: 81744 - DNA, 80 bp, synthetic construct
  source 1..80: mol_type = other DNA
caggagaccagcgtgtaggcctcatcccacgcaatggcgtcgatcactgggatgcgtacaagggggagagggtcgtccta

SEQ ID NO: 81745 - DNA, 80 bp, synthetic construct
  source 1..80: mol_type = other DNA
caggagaccagcgtgtaggcctcatcccacgcaatggcgtcgatcactgggatgcgtacaaggtggagagggtcgtccta

SEQ ID NO: 81746 - DNA, 80 bp, synthetic construct
  source 1..80: mol_type = other DNA
aacggagaggatgaagtagtggtttcttatagtgccaaagatggcgtttccggtttacctgagctttccaccgtcaggca

SEQ ID NO: 81747 - DNA, 80 bp, synthetic construct
  source 1..80: mol_type = other DNA
ttgtgtatagtggttgcacctacacacttgagtctgatggcaagggcaatgtgaaagttgacagagttcagagcacctcc

SEQ ID NO: 81748 - DNA, 80 bp, synthetic construct
  source 1..80: mol_type = other DNA
gttcagaccaacaatgagctggctggcgccctgcaccatctaaggtgcgccagaatcaggtactatgtcaagtgtgttca

SEQ ID NO: 81749 - DNA, 80 bp, synthetic construct
  source 1..80: mol_type = other DNA
ggaggccctgtattctatcatccagattgctggggctgcatttgtcaccacgcgcatcatcaagcgtgtgaacattcaag

SEQ ID NO: 81750 - DNA, 80 bp, synthetic construct
  source 1..80: mol_type = other DNA
gggtctcccccagcctgttcataacatcaacccacgtcataccccagggcgcaaaggagttctttggagtccccatcaaa

SEQ ID NO: 81751 - DNA, 80 bp, synthetic construct
  source 1..80: mol_type = other DNA
ggggtgagggggaagctacacttgaaggtggtgacagtaagggaacatactgtggtgcaccaatcctaggcccagggagt

SEQ ID NO: 81752 - DNA, 80 bp, synthetic construct
  source 1..80: mol_type = other DNA
ggggtgaggtggaagctacacttgaaggtggtgacagtaagggaacatactgtggtgcaccaatcctaggcccagggagt

SEQ ID NO: 81753 - DNA, 80 bp, synthetic construct
  source 1..80: mol_type = other DNA
ggtaagccaccaaagccaagcgtgttagaagctgccaagaaaaccatcatcaatgtccttgaacaaacaattgacccacc

SEQ ID NO: 81754 - DNA, 80 bp, synthetic construct
  source 1..80: mol_type = other DNA
gaacggggaatccttcacaggcaagctggcagaccaggcttccaaggccaacctgatgtttgaagaagggaagaacatga

SEQ ID NO: 81755 - DNA, 80 bp, synthetic construct
  source 1..80: mol_type = other DNA
gatggagaaatctaccattatggcctgtatgttgagcgaggtcttgtgctgggtgtgcacaaaccaccagctgccattag

SEQ ID NO: 81756 - DNA, 80 bp, synthetic construct
  source 1..80: mol_type = other DNA
tggggctcggatttagcaaccatgatccggtgtgctcgagcattcggaggcctaatggatgaactcaaagcacactgtgt

SEQ ID NO: 81757 - DNA, 80 bp, synthetic construct
  source 1..80: mol_type = other DNA
aggtagtagcagaagacctcctttctcctagcgtggtggatgtgggtgacttcacaatatcaatcaacgagggtcttccc

SEQ ID NO: 81758 - DNA, 80 bp, synthetic construct
  source 1..80: mol_type = other DNA
ctgaaggacctcttgttatttctgaagacttagatggtttgactttcctgcggagaactgtgacccgcgacccagctggt

SEQ ID NO: 81759 - DNA, 80 bp, synthetic construct
  source 1..80: mol_type = other DNA
ctaggggccccaaccatgaagatccatctgaatcaatgattccacactctcaaagacccatacaattgatgtccttactg

SEQ ID NO: 81760 - DNA, 80 bp, synthetic construct
  source 1..80: mol_type = other DNA
tggtggagagttcacagtatcccctagaaacgctccaggtgaaatactatggagcgcgcccttaggccctgatctgaatc

SEQ ID NO: 81761 - DNA, 80 bp, synthetic construct
  source 1..80: mol_type = other DNA
ggggaacgcgtttaccgccggaaaaattatatttgcagcagtcccaccaaattttccaactgaaggcttgagtcccagcc

SEQ ID NO: 81762 - DNA, 80 bp, synthetic construct
  source 1..80: mol_type = other DNA
aaattacacggagaaacatttccctacacagccttcgacaacaattgctatgccttttgttgctgggtcctggatctaaa

SEQ ID NO: 81763 - DNA, 80 bp, synthetic construct
  source 1..80: mol_type = other DNA
tgcaccttcagaggggatgtcacccacattgcaggttctcgcaattatacaatgaatttggcttctctaaattggaacaa

SEQ ID NO: 81764 - DNA, 80 bp, synthetic construct
  source 1..80: mol_type = other DNA
ccacaaagggagatggctcgacccgtggccataaagctacagtttacactgggagtgccccctttactccaaagctgggc

SEQ ID NO: 81765 - DNA, 80 bp, synthetic construct
  source 1..80: mol_type = other DNA
agtgttcaattcagtactgatacagaaaatgattttgaaactcaccaaaacacaaaattcaccccagtcggtgtcatcca

SEQ ID NO: 81766 - DNA, 80 bp, synthetic construct
  source 1..80: mol_type = other DNA
tcacagtggctcacaccggccagcatgatttggtcatcccccccaatggttattttaggtttgattcctgggttaatcaa

SEQ ID NO: 81767 - DNA, 80 bp, synthetic construct
  source 1..80: mol_type = other DNA
atgctggggctggggctatcaaccaaaagattgattttgaaaataacagaaaattgcagcaagcttccttccagtttagc

SEQ ID NO: 81768 - DNA, 80 bp, synthetic construct
  source 1..80: mol_type = other DNA
agcccgtggggcaatcaacgcccctatgacaaaggctttggactggagcggaacaaggtactgggcccctgatgctagga

SEQ ID NO: 81769 - DNA, 80 bp, synthetic construct
  source 1..80: mol_type = other DNA
cttcgggggcactgccaggaagaatcaatcccaggactcctacccccgctcggggctcccccagcacattttctaatgct

SEQ ID NO: 81770 - DNA, 80 bp, synthetic construct
  source 1..80: mol_type = other DNA
tctactgctacttctatatattcaaatcaaactgtttcaacgagacttggttctacagctggttctggcaccaatgtctc

SEQ ID NO: 81771 - DNA, 80 bp, synthetic construct
  source 1..80: mol_type = other DNA
accaaaacagaaatttgtcacctttcatgaggggggctcacaacatatcgtttgtcaccccaccatctagcagatcctct

SEQ ID NO: 81772 - DNA, 80 bp, synthetic construct
  source 1..80: mol_type = other DNA
gaggggagtcacgggtgtaatgtgaaaagacaaaattgattatctttccctttctttagtgtcttttaaaaaaaaaaaaa

SEQ ID NO: 81773 - DNA, 80 bp, synthetic construct
  source 1..80: mol_type = other DNA
tgcagaccaacgtatgtggtcgacgccatggaggcccaccagttcataaaggctcctggcgtcactactgctattgagca

SEQ ID NO: 81774 - DNA, 80 bp, synthetic construct
  source 1..80: mol_type = other DNA
gtgccctcgttgccaacgagggctggaatgcctctgaggatgcgttgaccgccgtaatcactgcggcttaccttactatc

SEQ ID NO: 81775 - DNA, 80 bp, synthetic construct
  source 1..80: mol_type = other DNA
tgccatcagaggtacctccgcacgcaggctatttctaaggggatgaaaaggttagagcttgaacacgcacagaagtttat

SEQ ID NO: 81776 - DNA, 80 bp, synthetic construct
  source 1..80: mol_type = other DNA
gctgtggtggttcggcccttcttatcccgcctacagacagagatactaatcaatctgatgcagccccggcagcttgtttt

SEQ ID NO: 81777 - DNA, 80 bp, synthetic construct
  source 1..80: mol_type = other DNA
tttatgctcagtgccgccggtggttatctgcaggttttcacctcgatcctcgtgtgctcgtctttgatgaagccgccccc

SEQ ID NO: 81778 - DNA, 80 bp, synthetic construct
  source 1..80: mol_type = other DNA
tgccgctgccggagtttcctccgtaaagccgctcacaagttttgttgctttatgcggtggctgggtcaagactgcacctg

SEQ ID NO: 81779 - DNA, 80 bp, synthetic construct
  source 1..80: mol_type = other DNA
ttttcttcagcccattgaggggagggttggtgagcagggttatgataatgaggcgttcgaagggtcggatatcgaccctg

SEQ ID NO: 81780 - DNA, 80 bp, synthetic construct
  source 1..80: mol_type = other DNA
ctgaggaagccaccgtgagcatctccgggtcctatattgtcactggccgtcaattgcagcctttataccaagcgcttggc

SEQ ID NO: 81781 - DNA, 80 bp, synthetic construct
  source 1..80: mol_type = other DNA
ataccatctgatttagccgcgcgtgctggtcggcttgctgctactgttgaagtttcagatgctgacggccgccttacctg

SEQ ID NO: 81782 - DNA, 80 bp, synthetic construct
  source 1..80: mol_type = other DNA
caagaccaccttgggtaataaaactttttcaacggtatttactgatggcgctcagctagaggccaacgggccggagcagt

SEQ ID NO: 81783 - DNA, 80 bp, synthetic construct
  source 1..80: mol_type = other DNA
atgttctatcatttgatctgactaaacagactatggctgctggcccgcatagtcttagctacaccttagcatctgcgggc

SEQ ID NO: 81784 - DNA, 80 bp, synthetic construct
  source 1..80: mol_type = other DNA
cttgaagtgcatattgtttctgccgggcttgactgtaaagctgtcttcccccctggtgttgcagccccttccgctcctgg

SEQ ID NO: 81785 - DNA, 80 bp, synthetic construct
  source 1..80: mol_type = other DNA
ggaggtgtctgctttctgctctgctctttacaggtttaaccgctgtgttcagcggcattcccttattggaggtttgtggt

SEQ ID NO: 81786 - DNA, 80 bp, synthetic construct
  source 1..80: mol_type = other DNA
ccggcctgaggtcttgtggaatcaccctatccagcgtgtgatccacaatgagctcgagcagtactgccgagctcgtgccg

SEQ ID NO: 81787 - DNA, 80 bp, synthetic construct
  source 1..80: mol_type = other DNA
actatcctgagagcctggtcggtttgttcccaccgttttcccctggtcatagctgggaatctgccaaccctttttgcggt

SEQ ID NO: 81788 - DNA, 80 bp, synthetic construct
  source 1..80: mol_type = other DNA
gagagcaccctttatactcgcacttggtctgtgtcgggcttttctagctgtttttcccccttcgagcctcgcgccccaga

SEQ ID NO: 81789 - DNA, 80 bp, synthetic construct
  source 1..80: mol_type = other DNA
gctgccgccttccggtgacaccgacacatctgtagctattgatgccccaccattggtttcccctgtacagactcagcccc

SEQ ID NO: 81790 - DNA, 80 bp, synthetic construct
  source 1..80: mol_type = other DNA
ctgcccccagccaggtggcgtccccgccagacttggtcgacgatggtgccggccatcgcctgcctagcgtccctgcggag

SEQ ID NO: 81791 - DNA, 80 bp, synthetic construct
  source 1..80: mol_type = other DNA
cctccggcgtccgtgcagcctgtaatccagcccgggccccgtcgacgattgctccatacttaccccgatggttcgaaggt

SEQ ID NO: 81792 - DNA, 80 bp, synthetic construct
  source 1..80: mol_type = other DNA
gtatgccggatctctttttgaatccgagtgtacatggctggtcaatgcctctaacccaggccaccgccccggcggcggcc

SEQ ID NO: 81793 - DNA, 80 bp, synthetic construct
  source 1..80: mol_type = other DNA
tctgccatgcattctaccagcggtttccagagtccttcgaccctgctgagtttattatgtccgacgggtttgcagcctac

SEQ ID NO: 81794 - DNA, 80 bp, synthetic construct
  source 1..80: mol_type = other DNA
accctgacgcctcggcccataatccacgctgttgcccccgattatcgggttgaacataaccctaagcgacttgaggccgc

SEQ ID NO: 81795 - DNA, 80 bp, synthetic construct
  source 1..80: mol_type = other DNA
ttatcgggagacatgctcccgtcgcgggacagcagcttatcccttgctcggcgctggtatatacaaggtccctgtcggat

SEQ ID NO: 81796 - DNA, 80 bp, synthetic construct
  source 1..80: mol_type = other DNA
tgagctttgacgcctgggaacgtaaccatcgacccggggacgagttgtacttgaccgagccggctatagcctggtttgag

SEQ ID NO: 81797 - DNA, 80 bp, synthetic construct
  source 1..80: mol_type = other DNA
gccgctgccttgaagtgggcgcccacccacgttcgattaatgactaccccaatgttttgcatcgttgctttcttaaacca

SEQ ID NO: 81798 - DNA, 80 bp, synthetic construct
  source 1..80: mol_type = other DNA
gccagccggcctacccttcctgctttaactattactgaggatacggcgcgcacggctaacctagcactggagttggatgc

SEQ ID NO: 81799 - DNA, 80 bp, synthetic construct
  source 1..80: mol_type = other DNA
ggccactgaggtcggccgtgcgtgcgctggctgccgtgttgaacccggcgtggtccattaccagttcacagctggtgtcc

SEQ ID NO: 81800 - DNA, 80 bp, synthetic construct
  source 1..80: mol_type = other DNA
ctggctccggtaaatcccggtcaatccagcagggagatgtggacgtaatagtggtaccaacccgtgagctacgcaattcg

SEQ ID NO: 81801 - DNA, 80 bp, synthetic construct
  source 1..80: mol_type = other DNA
tggcgccgccgtggattcgcagcctacacacctcatactgcagcccgtgttacccgaggccgcagagttgttattgacga

SEQ ID NO: 81802 - DNA, 80 bp, synthetic construct
  source 1..80: mol_type = other DNA
ggccccctcgcttccaccacacttactcctgctgcatatgcagcgggcctcgtcagtccatctgcttggcgaccctaatc

SEQ ID NO: 81803 - DNA, 80 bp, synthetic construct
  source 1..80: mol_type = other DNA
aaattcctgccattgatttcggacatgccggcctcgttccagcaatccggcctgagttggtcccaactaagtggtggcac

SEQ ID NO: 81804 - DNA, 80 bp, synthetic construct
  source 1..80: mol_type = other DNA
cttactcataggtgccctgcggatgtttgtgagctgatccgtggcgcatacccaaagatccaaactgctagccgtgtcct

SEQ ID NO: 81805 - DNA, 80 bp, synthetic construct
  source 1..80: mol_type = other DNA
cgctctttgttttggggggagccccctgtaggccagaagctggtcttcactcaagcggccaaggctgctaaccctggtgc

SEQ ID NO: 81806 - DNA, 80 bp, synthetic construct
  source 1..80: mol_type = other DNA
aatcacggttcatgaggcacagggcgcgacattcactgagactacaattattgccacggcggatgctcgcgggctaattc

SEQ ID NO: 81807 - DNA, 80 bp, synthetic construct
  source 1..80: mol_type = other DNA
agtcctctcgagctcatgctattgtggccctgactcgtcacacggagaagtgcgtggtggttgatgctccggggcttctc

SEQ ID NO: 81808 - DNA, 80 bp, synthetic construct
  source 1..80: mol_type = other DNA
gttggccgtgacgttcagcggtggtatactgcccccacccgtggccctgcggcaaactgccgccggtctgccctccgtgg

SEQ ID NO: 81809 - DNA, 80 bp, synthetic construct
  source 1..80: mol_type = other DNA
cgtgaggtaggtatctctgatgctattgttaacaatttcttcctctctggtggcgagattggccagcaccgcccgtcagt

SEQ ID NO: 81810 - DNA, 80 bp, synthetic construct
  source 1..80: mol_type = other DNA
tgtaccccgtggcactattggcagcaatgtcgacacgcttgatgcgtttcccccctcctgccagtttagcgcgtaccacc

SEQ ID NO: 81811 - DNA, 80 bp, synthetic construct
  source 1..80: mol_type = other DNA
agctagccgaagagcttggccaccgacctgcgccgattgctgctgtcttgcccccctgtccagagcttgaacagggcttg

SEQ ID NO: 81812 - DNA, 80 bp, synthetic construct
  source 1..80: mol_type = other DNA
ccttatatgcctcaggagttaactacatcggacagtgttctcacctttgaactaacggacattgcgcactgccgtatggc

SEQ ID NO: 81813 - DNA, 80 bp, synthetic construct
  source 1..80: mol_type = other DNA
ggcgcccagccagcgtaaggcggttctgtcgacccttgtcggcaggtatggccgccgcacgaagctgtatgaggcagccc

SEQ ID NO: 81814 - DNA, 80 bp, synthetic construct
  source 1..80: mol_type = other DNA
atgcagatgtccgcgggtcccttaatcatttcattcctgagcttggcccaattagcgtcaccacctgcgagctctatgaa

SEQ ID NO: 81815 - DNA, 80 bp, synthetic construct
  source 1..80: mol_type = other DNA
cttgtagaggccatggtagagaagggccaagacggctctgcgatcctggagcttgacctatgtaatcgtgatgtgtcccg

SEQ ID NO: 81816 - DNA, 80 bp, synthetic construct
  source 1..80: mol_type = other DNA
caggtgagacgatagcgcatggcaaagtcgggcagggtatatctgcatggagtaaaaccttctgcgctttatttggcccg

SEQ ID NO: 81817 - DNA, 80 bp, synthetic construct
  source 1..80: mol_type = other DNA
tggttccgcgctatcgagaagaagattttggcggcgcttgcgcccaatatcttttatggtgacgcttatgaggatacagt

SEQ ID NO: 81818 - DNA, 80 bp, synthetic construct
  source 1..80: mol_type = other DNA
gctcccacctgttgatcgtacatactgttttgacggcttctctggctgcacctttgccgccgagacaggtattgctcttt

SEQ ID NO: 81819 - DNA, 80 bp, synthetic construct
  source 1..80: mol_type = other DNA
cttggccgctgctgttgcaggcgcccccggctgtaaggtctttgagaatgatttctctgagtttgatagcacccaaaata

SEQ ID NO: 81820 - DNA, 80 bp, synthetic construct
  source 1..80: mol_type = other DNA
gtatgccacagtggatggtgcgactctaccaccttgttcgctctgcctgggtcttgcaggccccaaaagagtccctgcgt

SEQ ID NO: 81821 - DNA, 80 bp, synthetic construct
  source 1..80: mol_type = other DNA
ggcttctggaagaagcactctggcgagcctggcaccctgctgtggaataccgtttggaacatggcggttatagcgcactg

SEQ ID NO: 81822 - DNA, 80 bp, synthetic construct
  source 1..80: mol_type = other DNA
ttatgagttccgtgacctcaaagttgcggcatttaagggggatgactctgttgtgctctgtagcgattatcggcagagtc

SEQ ID NO: 81823 - DNA, 80 bp, synthetic construct
  source 1..80: mol_type = other DNA
gcaatgcggctgctttaatcgctggatgtgggctgaagcttaaggtggactttaggcctattgggctctatgctggtgtt

SEQ ID NO: 81824 - DNA, 80 bp, synthetic construct
  source 1..80: mol_type = other DNA
gttgtggccccgggtctcgggacccttcccgatgtcgttcggtttgccgggcggctttcagagaagaactggtggccgtg

SEQ ID NO: 81825 - DNA, 80 bp, synthetic construct
  source 1..80: mol_type = other DNA
cttggagagggcggagcagctccggctggccgtctgtgactttttgcggaagttgacgaatgtggctcaggtctgtgtgg

SEQ ID NO: 81826 - DNA, 80 bp, synthetic construct
  source 1..80: mol_type = other DNA
atgttgtttcgcaggtctatggtgttagccccggtttggtacataacctgatagggatgcttcaaactattgcggatggc

SEQ ID NO: 81827 - DNA, 80 bp, synthetic construct
  source 1..80: mol_type = other DNA
aaagcgcactttactgagacgatcaaacctgttcttgaccttaccaattctattatatatcgggtggaatgaataacatg

SEQ ID NO: 81828 - DNA, 80 bp, synthetic construct
  source 1..80: mol_type = other DNA
ttcttttgctccttgcatggcgatgccaccatgcgctctcgggcttttctgtttttgctcctcctgcttttgcctatgct

SEQ ID NO: 81829 - DNA, 80 bp, synthetic construct
  source 1..80: mol_type = other DNA
attcactgcatgatctatggcccgctgatgtcgccgaggcgatggcccgccgtgggatgactcggctctatgcagctctt

SEQ ID NO: 81830 - DNA, 80 bp, synthetic construct
  source 1..80: mol_type = other DNA
tctggggtgaccgggttgattctcagcccttcgccctcccctatattcatccaaccaaccccttcgcatctgacattcca

SEQ ID NO: 81831 - DNA, 80 bp, synthetic construct
  source 1..80: mol_type = other DNA
gccgccgccggggctggagctcgccctcgacagccggcccgcccactcggctccgcttggcgtgaccaatcccagcgccc

SEQ ID NO: 81832 - DNA, 80 bp, synthetic construct
  source 1..80: mol_type = other DNA
cgcccgtcgtcgatctgccccagccggggcttcgccgttgacggctgtagccccggcccctgacactgccccggtccctg

SEQ ID NO: 81833 - DNA, 80 bp, synthetic construct
  source 1..80: mol_type = other DNA
atgttgattcgcgcggcgctatattgcgccgtcagaataatttgtccacatccccacttacatccactattgccactgga

SEQ ID NO: 81834 - DNA, 80 bp, synthetic construct
  source 1..80: mol_type = other DNA
actaatctcgtgctatatgctgccccgcttagccctctactcccgcttcaagacggtactaacactcatatcatggccac

SEQ ID NO: 81835 - DNA, 80 bp, synthetic construct
  source 1..80: mol_type = other DNA
ccgtggatatgaattccatcacttccactgatgtccgtattcttgttcaacccggtatagcctccgagttggtgattccc

SEQ ID NO: 81836 - DNA, 80 bp, synthetic construct
  source 1..80: mol_type = other DNA
cacctcccccctgaagtgctactaccccctggcacatatcacactacttcatatcttctgatccatgatggggaccgtgc

SEQ ID NO: 81837 - DNA, 80 bp, synthetic construct
  source 1..80: mol_type = other DNA
ctggtgttgctgaggaggaggctacctccggccttgttatgctctgcattcatgggtcacctgtgaattcttacaccaat

SEQ ID NO: 81838 - DNA, 80 bp, synthetic construct
  source 1..80: mol_type = other DNA
acaccttacaccggtgctcttggcctgctcgactttgcgcttgagcttgagttccgtaatttgacgcccggcaacacaaa

SEQ ID NO: 81839 - DNA, 80 bp, synthetic construct
  source 1..80: mol_type = other DNA
tacgcgcgtctctcgttattcgagtagtgcgcgccataagttgcgccgaggggccgacggcactgctgagctaactacta

SEQ ID NO: 81840 - DNA, 80 bp, synthetic construct
  source 1..80: mol_type = other DNA
ctgctgccacacggtttatgaaggatcttcattttgcagggactaatggtgttggtgaggttggccgtgggatagcgctt

SEQ ID NO: 81841 - DNA, 80 bp, synthetic construct
  source 1..80: mol_type = other DNA
accttgtttaaccttgctgacacacttctcggcgggcttccgacagaattgatttcgtcggctggaggtcaactctttta

SEQ ID NO: 81842 - DNA, 80 bp, synthetic construct
  source 1..80: mol_type = other DNA
cctttttctgtgcttcgtgctaatgatgtactttggctttcacttacagctgctgagtatgatcagactacctatggttc

SEQ ID NO: 81843 - DNA, 80 bp, synthetic construct
  source 1..80: mol_type = other DNA
tctacaaaccctatgtatgtttctgatactgtgacgttcgtcaatgtggccaccggtgcccagggggtttcgcgctctct

SEQ ID NO: 81844 - DNA, 80 bp, synthetic construct
  source 1..80: mol_type = other DNA
ggactggtctaaagtcacacttgatgggcgcccactaaccactattcaacagtattccaagaccttctatgttttgcctc

SEQ ID NO: 81845 - DNA, 80 bp, synthetic construct
  source 1..80: mol_type = other DNA
agtgattacatatgaaggggattctagtgcggggtacaatcatggtgtgtccattttgcgggcgtggatccgtaccacca

SEQ ID NO: 81846 - DNA, 80 bp, synthetic construct
  source 1..80: mol_type = other DNA
ttcgcggtaagctctctttttgggaggcgggtactactaaggccggctacccctacaattataataccactgctagtgat

SEQ ID NO: 81847 - DNA, 80 bp, synthetic construct
  source 1..80: mol_type = other DNA
caggtcttgattgagaatgcagctggccatcgagtctgcatttctacctatactactaatttgggttctgggcctgtttc

SEQ ID NO: 81848 - DNA, 80 bp, synthetic construct
  source 1..80: mol_type = other DNA
tatttctgctgtcggtgtcctcgcacctcattctgcgctggccgctttagaggacacagttgactaccctgcccgtgctc

SEQ ID NO: 81849 - DNA, 80 bp, synthetic construct
  source 1..80: mol_type = other DNA
atacttttgatgacttctgccctgagtgccgtgcgctcggccttcagggttgtgccttccaatcaactgttgctgagttg

SEQ ID NO: 81850 - DNA, 80 bp, synthetic construct
  source 1..80: mol_type = other DNA
aaatgaaggtgggtaaaacccgggagtattgatttattttgtttgtgccttccttctgccttcttttcttttatcttctt

SEQ ID NO: 81851 - DNA, 80 bp, synthetic construct
  source 1..80: mol_type = other DNA
aggtcaccggcgatcacccgctggtgattgagcgagtccgagcggtggggtgccattttgtgctcctccttactgccgct

SEQ ID NO: 81852 - DNA, 80 bp, synthetic construct
  source 1..80: mol_type = other DNA
cctgaaccatcgccgatgccttacgtcccgtacccacgctcgaccgaggtttatgtccggtctattttcggcccaggtgg

SEQ ID NO: 81853 - DNA, 80 bp, synthetic construct
  source 1..80: mol_type = other DNA
ctcgccatctctttttccatctgcctgctctacgaagtcaacatttcatgccgtccctgtgcacatatgggataggctta

SEQ ID NO: 81854 - DNA, 80 bp, synthetic construct
  source 1..80: mol_type = other DNA
tgctttttggtgcgacccttgatgaccaagccttttgctgttccaggctcatgacgtatctccgtggcattagctataag

SEQ ID NO: 81855 - DNA, 80 bp, synthetic construct
  source 1..80: mol_type = other DNA
ctcaagcggccaaggctgctaaccctggtgcaatcacggttcatgaggcacagggcgcgacattcactgagactacaatt

SEQ ID NO: 81856 - DNA, 80 bp, synthetic construct
  source 1..80: mol_type = other DNA
tatattcatccaaccaaccccttcgcatctgacattccagccgccgccggggctggagctcgccctcgacagccggcccg

SEQ ID NO: 81857 - DNA, 80 bp, synthetic construct
  source 1..80: mol_type = other DNA
tgtagccccggcccctgacactgccccggtccctgatgttgattcgcgcggcgctatattgcgccgtcagaataatttgt

SEQ ID NO: 81858 - DNA, 80 bp, synthetic construct
  source 1..80: mol_type = other DNA
gtattccttctgaccttgctgcccgagccagtcggcttaccgccaccgtcgaagtgacggatgccgatggtcgtcttatc

SEQ ID NO: 81859 - DNA, 80 bp, synthetic construct
  source 1..80: mol_type = other DNA
atatgtgctgtcgtttgattcggccaagcagaccatggctgccggcccacatagtcttagttatgccttgacatctactg

SEQ ID NO: 81860 - DNA, 80 bp, synthetic construct
  source 1..80: mol_type = other DNA
ttgcgccccgggtttgtcaccgcccgttgagactgacgtgcctgttgctattaatgttccatccccaaccatctctgcat

SEQ ID NO: 81861 - DNA, 80 bp, synthetic construct
  source 1..80: mol_type = other DNA
tgcctcagcccccagcctccgaacaggcggccccttcactagacctagttgatagcggtgctgttccggccctaccggac

SEQ ID NO: 81862 - DNA, 80 bp, synthetic construct
  source 1..80: mol_type = other DNA
gctcccgttgcctccccggcgccagtgcagcccgtaacccacctatccgggccccgccggcggttacttcatgcttatcc

SEQ ID NO: 81863 - DNA, 80 bp, synthetic construct
  source 1..80: mol_type = other DNA
tccgtagttccctaaaccactttatccctgagcttagtcctattagtgtcactacttgtgagctttatgagcttgtagag

SEQ ID NO: 81864 - DNA, 80 bp, synthetic construct
  source 1..80: mol_type = other DNA
ccgccgtttctgcccgccgtcgatctgccccagctggggcttcgccgttaacggctgtggctccggcccctgacaccgcc

SEQ ID NO: 81865 - DNA, 80 bp, synthetic construct
  source 1..80: mol_type = other DNA
ttgagtcaccatcatcgatatgggtatttgctggggcacctgaccgttgtccacctacatgtctgtttatagcaggtatt

SEQ ID NO: 81866 - DNA, 80 bp, synthetic construct
  source 1..80: mol_type = other DNA
gtgcgcttgttgctaatgaggggtggaacgcctctgaagatgctcttactgcagtgatcactgcggcttatctgactatc

SEQ ID NO: 81867 - DNA, 80 bp, synthetic construct
  source 1..80: mol_type = other DNA
gctgtggtggttcggccgtttttatcccgtctacaaactgagattcttatcaatttgatgcaaccccggcagttggtttt

SEQ ID NO: 81868 - DNA, 80 bp, synthetic construct
  source 1..80: mol_type = other DNA
gcatgcgccggttggaggttgagcatgcccagaaatttatcacaagactctacagttggctatttgagaagtctggccgt

SEQ ID NO: 81869 - DNA, 80 bp, synthetic construct
  source 1..80: mol_type = other DNA
tttatgcacagtgccgacggtggctatctgcaggattccatctggaccccagggtgcttgtttttgatgaatcagtgcca

SEQ ID NO: 81870 - DNA, 80 bp, synthetic construct
  source 1..80: mol_type = other DNA
tgtcgttgtaggacgttcctgaagaaagtcgcgggtaaattctgctgttttatgcggtggttagggcaggagtgcacctg

SEQ ID NO: 81871 - DNA, 80 bp, synthetic construct
  source 1..80: mol_type = other DNA
cttcctggagccagccgagggtttagttggcgaccatggccatgacaatgaggcttatgaaggttctgaggtcgaccagg

SEQ ID NO: 81872 - DNA, 80 bp, synthetic construct
  source 1..80: mol_type = other DNA
ctgaacctgcccatcttgatgtttcggggacttatgccgtccacgggcaccagcttgtagccctctatagggcacttaat

SEQ ID NO: 81873 - DNA, 80 bp, synthetic construct
  source 1..80: mol_type = other DNA
gtcccacatgatattgccgctcgagcttcccgattaacggctactgttgagcttgttgcaggtccagaccgcttggagtg

SEQ ID NO: 81874 - DNA, 80 bp, synthetic construct
  source 1..80: mol_type = other DNA
ccgcactgtgctcggtaataagaccttccggacgacggtggttgatggcgcccatcttgaagcgaatggcccagagcagt

SEQ ID NO: 81875 - DNA, 80 bp, synthetic construct
  source 1..80: mol_type = other DNA
atgtcctgtcatttgacgcctcctgtcagtctatgggggccgggtcgcacaacctcacttatgagctcacccctgccggt

SEQ ID NO: 81876 - DNA, 80 bp, synthetic construct
  source 1..80: mol_type = other DNA
ttgcaggttaggatctcatctaacggtctggattgcactgctacattcccccccggcggtgcccctagcgccgcgccagg

SEQ ID NO: 81877 - DNA, 80 bp, synthetic construct
  source 1..80: mol_type = other DNA
ggaggtggcagccttctgtgctgccctttacagatataacaggttcacccagcggcactcgctgaccggtggactatggt

SEQ ID NO: 81878 - DNA, 80 bp, synthetic construct
  source 1..80: mol_type = other DNA
ccgccctgaagtgctttggaatcatcctatccagcgggtcatacacaatgaactagaacagtactgccgggcccgtgctg

SEQ ID NO: 81879 - DNA, 80 bp, synthetic construct
  source 1..80: mol_type = other DNA
tacaccctgagggattgctgggtatcttccctccattctcccctgggcatatctgggagtctgctaaccccttttgcggg

SEQ ID NO: 81880 - DNA, 80 bp, synthetic construct
  source 1..80: mol_type = other DNA
gaggggactttgtatacccggacctggtcaacatctggcttttctagtgatttctctccccctgaggcggccgcccctgc

SEQ ID NO: 81881 - DNA, 80 bp, synthetic construct
  source 1..80: mol_type = other DNA
ttcggctgctgccccggggctgccccaccctaccccgcctgctagtgatatttgggcgttaccaccgccctccgaggagt

SEQ ID NO: 81882 - DNA, 80 bp, synthetic construct
  source 1..80: mol_type = other DNA
gctacacgcgcctgggcaacgacttccacacgaacaagcgcgtgtgcgaggagatcgccattatccctagcaaaaagccc

SEQ ID NO: 81883 - DNA, 80 bp, synthetic construct
  source 1..80: mol_type = other DNA
cgcaacaagatggcaggttatgtcacgcatctgatgaagcgaattcagagaggcccagtaagaggtatctccatcaagct

SEQ ID NO: 81884 - DNA, 80 bp, synthetic construct
  source 1..80: mol_type = other DNA
gcaggaggaggctcaggtcgatgcagcatctgtgccccttaccctcgtgcctgctgggtcgcccagccctgttgtgtcac

SEQ ID NO: 81885 - DNA, 80 bp, synthetic construct
  source 1..80: mol_type = other DNA
cttccccaccaccacctccacccgtgcgtaagccatcaacacccccgccttctcgtacccgtcgcctcctctacacctac

SEQ ID NO: 81886 - DNA, 80 bp, synthetic construct
  source 1..80: mol_type = other DNA
cccgacggcgctaaggtgtatgcagggtcattgtttgaatcagactgtgattggctggttaacgcctcaaacccgggcca

SEQ ID NO: 81887 - DNA, 80 bp, synthetic construct
  source 1..80: mol_type = other DNA
tcgccctggaggtggcctctgtcacgcctttcatcaacgttttccggaggcgttttatccgactgaattcattatgcgtg

SEQ ID NO: 81888 - DNA, 80 bp, synthetic construct
  source 1..80: mol_type = other DNA
agggcctagcggcatacaccctgaccccgcgccctatcatccacgcagtggcgcccgactacagggttgagcagaacccg

SEQ ID NO: 81889 - DNA, 80 bp, synthetic construct
  source 1..80: mol_type = other DNA
gccgctgtttggaggtcggagcccatccgagatctattaatgataaccccaacgtcttgcaccggtgcttccttagaccg

SEQ ID NO: 81890 - DNA, 80 bp, synthetic construct
  source 1..80: mol_type = other DNA
aagaggctcgaggcagcgtaccgggaaacttgctcccgtcgtggcaccgctgcttacccgcttttaggctcgggcatata

SEQ ID NO: 81891 - DNA, 80 bp, synthetic construct
  source 1..80: mol_type = other DNA
ctgtcagcctcagttttgatgcctgggaacgcaatcatcgccccggcgatgagctttacttgactgagcccgctgcggct

SEQ ID NO: 81892 - DNA, 80 bp, synthetic construct
  source 1..80: mol_type = other DNA
tggtttgaggctaataagccggcgcagccggcgcttaccataactgaggatacggctcgtacggccagcctggcattaga

SEQ ID NO: 81893 - DNA, 80 bp, synthetic construct
  source 1..80: mol_type = other DNA
gatcgacgccgctacagaggttggccgtgcttgtgccggctgcactatcagtcctgggattgtgcactatcagtttaccg

SEQ ID NO: 81894 - DNA, 80 bp, synthetic construct
  source 1..80: mol_type = other DNA
ctggggtcccgggctcgggcaagtcaaggtccatacaacagggagatgttgatgtggtggttgtgcccacccgggagctc

SEQ ID NO: 81895 - DNA, 80 bp, synthetic construct
  source 1..80: mol_type = other DNA
cgtaacagttggcgccgccggggtttcgcggctttcacacctcacacagcggcccgtgttactaacggccgccgcgttgt

SEQ ID NO: 81896 - DNA, 80 bp, synthetic construct
  source 1..80: mol_type = other DNA
gattgatgaggccccatctctcccgccacacctgttgctgctacatatgcagcgggcctcctcggttcacctactcggtg

SEQ ID NO: 81897 - DNA, 80 bp, synthetic construct
  source 1..80: mol_type = other DNA
gatccctgctatcgattttgaacacgccggcctggtccccgcgatccgccccgagcttgcaccaacgagctggtggcacg

SEQ ID NO: 81898 - DNA, 80 bp, synthetic construct
  source 1..80: mol_type = other DNA
tcacacaccgttgcccggccgatgtgtgcgaactcatacgcggggcctaccccaaaatccagaccacgagccgtgtgcta

SEQ ID NO: 81899 - DNA, 80 bp, synthetic construct
  source 1..80: mol_type = other DNA
gttggcagggatgttcagcgctggtactctgcccccacccgtggccctgcggccaattgccgccgctccgcgctgcgtgg

SEQ ID NO: 81900 - DNA, 80 bp, synthetic construct
  source 1..80: mol_type = other DNA
cggtccctgttttggaatgaaccggctatcggccagaagttggtttttacgcaggctgccaaggccgctaaccctggtgc

SEQ ID NO: 81901 - DNA, 80 bp, synthetic construct
  source 1..80: mol_type = other DNA
gattacggttcacgaagctcagggtgccaccttcactgagaccacagttatagccacggccgacgccaggggcctcattc

SEQ ID NO: 81902 - DNA, 80 bp, synthetic construct
  source 1..80: mol_type = other DNA
agtcatcccgggcccatgctatagttgcacttacccgccacaccgagaagtgcgtcattttggatgctcccggcctgctg

SEQ ID NO: 81903 - DNA, 80 bp, synthetic construct
  source 1..80: mol_type = other DNA
cgtgaagtcggtatctcggatgtgattgtcaataattttttccttgcaggcggagaggtcggccatcaccgcccttctgt

SEQ ID NO: 81904 - DNA, 80 bp, synthetic construct
  source 1..80: mol_type = other DNA
gataccccgcggtaaccccgatcagaacctcgggactttacaagccttcccgccgtcctgccagattagtgcttaccacc

SEQ ID NO: 81905 - DNA, 80 bp, synthetic construct
  source 1..80: mol_type = other DNA
agctggctgaggaattaggccatcgccctgcccctgttgccgccgtcttgcccccttgccccgagcttgagcagggcctg

SEQ ID NO: 81906 - DNA, 80 bp, synthetic construct
  source 1..80: mol_type = other DNA
ctttacatgccacaagagcttaccgtgtctgatagtgtgctggtttttgagctcacggacatagtccactgccgcatggc

SEQ ID NO: 81907 - DNA, 80 bp, synthetic construct
  source 1..80: mol_type = other DNA
cgctccaagccagcgaaaggctgttctttcaacacttgtggggcggtatggccgtaggacgaagttatatgaggcagcac

SEQ ID NO: 81908 - DNA, 80 bp, synthetic construct
  source 1..80: mol_type = other DNA
attcagatgtccgtgagtccctagccaggttcatccccactatcgggcccgttcaggccaccacatgtgagttgtatgag

SEQ ID NO: 81909 - DNA, 80 bp, synthetic construct
  source 1..80: mol_type = other DNA
ttggttgaggccatggtggagaagggtcaggacgggtcagccgtcttagagctagatctctgcaatcgtgatgtctcgcg

SEQ ID NO: 81910 - DNA, 80 bp, synthetic construct
  source 1..80: mol_type = other DNA
ccttccccccgttgaccgcacctactgttttgatggattctcccgctgtgcttttgctgcagagaccggtgtggcccttt

SEQ ID NO: 81911 - DNA, 80 bp, synthetic construct
  source 1..80: mol_type = other DNA
catcacatttttccaaaaggattgcaacaagtttacaactggtgagactattgcccatggcaaggttggtcagggtatat

SEQ ID NO: 81912 - DNA, 80 bp, synthetic construct
  source 1..80: mol_type = other DNA
cggcctggagcaagacattctgcgctttgtttggcccgtggttccgtgccattgagaaagaaatactggccctgctcccg

SEQ ID NO: 81913 - DNA, 80 bp, synthetic construct
  source 1..80: mol_type = other DNA
cgcctaatgtcttttatggcgatgcttatgaggagtcagtgcttgctgccgctgtgtcaggggcggggtcatgcatggta

SEQ ID NO: 81914 - DNA, 80 bp, synthetic construct
  source 1..80: mol_type = other DNA
tttgaaaatgacttttcggagtttgatagcacccagaacaacttctctctcggccttgagtgtgtggttatggaggagtg

SEQ ID NO: 81915 - DNA, 80 bp, synthetic construct
  source 1..80: mol_type = other DNA
gcatgcctcaatggttaattaggttgtatcacctggtacggtcagcctggattctgcaggcgccaaaggagtctcttaag

SEQ ID NO: 81916 - DNA, 80 bp, synthetic construct
  source 1..80: mol_type = other DNA
ctacgagttccgtgactttcgtgttgctgcctttaagggtgatgattcggtggtcctctgtagcgactaccggcagagcc

SEQ ID NO: 81917 - DNA, 80 bp, synthetic construct
  source 1..80: mol_type = other DNA
gcaatgcggcagctttgattgctggctgtgggcttaaattgaaggttgactatcgccccattgggctgtatgctggggtg

SEQ ID NO: 81918 - DNA, 80 bp, synthetic construct
  source 1..80: mol_type = other DNA
gtggtggcccctggcttggggacactgcctgatgtggtgcgttttgctggtcggctgtccgaaaagaattggtgccccgg

SEQ ID NO: 81919 - DNA, 80 bp, synthetic construct
  source 1..80: mol_type = other DNA
cccggaacgtgctgagcagctacgtcttgctgtttgtgatttccttcgagggttgacgaacgttgcgcaggtctgtgttg

SEQ ID NO: 81920 - DNA, 80 bp, synthetic construct
  source 1..80: mol_type = other DNA
actctttgcatgacctttggccagctgatgttgcagaggcgatggcccgtcatgggatgacacggttgtatgccgcacta

SEQ ID NO: 81921 - DNA, 80 bp, synthetic construct
  source 1..80: mol_type = other DNA
atgttgtgtcccgtgtctatggagttagccccgggctggtacataaccttattggcatgttgcagaccattgccgatggc

SEQ ID NO: 81922 - DNA, 80 bp, synthetic construct
  source 1..80: mol_type = other DNA
aaggcccactttacagagactattaaacctgttcttgatcttacaaattccatcatacagcgggtagaatgaataacatg

SEQ ID NO: 81923 - DNA, 80 bp, synthetic construct
  source 1..80: mol_type = other DNA
tttgttgcatcgcccatgggatcaccatgtgccctagggttgttctgctgctgttcttcgtgtttctgcctatgctgccc

SEQ ID NO: 81924 - DNA, 80 bp, synthetic construct
  source 1..80: mol_type = other DNA
cccccgccgtcgatctgccccagctggggctgcgccgttgactgctgtatcaccagcccctgacacagcccctgtacctg

SEQ ID NO: 81925 - DNA, 80 bp, synthetic construct
  source 1..80: mol_type = other DNA
atgttgattcacgtggtgctattctgcgtcggcagtataatttgtccacgtccccgctcacgtcatctgttgcttcgggt

SEQ ID NO: 81926 - DNA, 80 bp, synthetic construct
  source 1..80: mol_type = other DNA
accaatttggttctctacgctgccccgctaaatcccctcttgcccctccaggatggcaccaacacccatatcatggctac

SEQ ID NO: 81927 - DNA, 80 bp, synthetic construct
  source 1..80: mol_type = other DNA
ccgcccgctggtgccgaatgctgttggtggttatgctatttctatttctttttggcctcaaactacaactacccctactt

SEQ ID NO: 81928 - DNA, 80 bp, synthetic construct
  source 1..80: mol_type = other DNA
catcttcctcctgaggtgctgctaccacccggcacctatcacacaacttcgtatctcctgattcacgacggcgatcgcgc

SEQ ID NO: 81929 - DNA, 80 bp, synthetic construct
  source 1..80: mol_type = other DNA
ctgttgatatgaattctattacttccactgatgttaggattttggtccagcccggtattgcctccgagttagtcatccct

SEQ ID NO: 81930 - DNA, 80 bp, synthetic construct
  source 1..80: mol_type = other DNA
cacaggtgtggctgaggaggaggctacctccggtctggtaatgctttgcattcatggctctcctgttaactcttatacta

SEQ ID NO: 81931 - DNA, 80 bp, synthetic construct
  source 1..80: mol_type = other DNA
atacaccttacactggtgcgttggggctccttgattttgcactagagcttgaattcaggaatttgacacccgggaacacc

SEQ ID NO: 81932 - DNA, 80 bp, synthetic construct
  source 1..80: mol_type = other DNA
aacacccgtgtttcccggtataccagcacagcccgtcatcggttgcgtcgcggtgctgatgggaccgctgagcttactac

SEQ ID NO: 81933 - DNA, 80 bp, synthetic construct
  source 1..80: mol_type = other DNA
cacagcagccacacgatttatgaaggatctgcatttcactggcactaatggcgttggtgaggtgggtcgcggtatcgccc

SEQ ID NO: 81934 - DNA, 80 bp, synthetic construct
  source 1..80: mol_type = other DNA
tgacactgttcaatcttgctgatacgcttctaggtggtttaccgacagaattgatttcgtcggctgggggtcagttgttc

SEQ ID NO: 81935 - DNA, 80 bp, synthetic construct
  source 1..80: mol_type = other DNA
ccgacagtgaagttatacacatctgtggagaatgcgcagcaagacaagggcattaccatcccacacgatatagatttggg

SEQ ID NO: 81936 - DNA, 80 bp, synthetic construct
  source 1..80: mol_type = other DNA
tgactcccgtgtggttattcaggattatgataatcagcacgagcaagaccgacccacgccgtcacctgccccctcacgcc

SEQ ID NO: 81937 - DNA, 80 bp, synthetic construct
  source 1..80: mol_type = other DNA
ctttctcagtccttcgcgctaacgatgttttgtggctctccctcactgccgctgagtacgatcaggctacgtatgggtcg

SEQ ID NO: 81938 - DNA, 80 bp, synthetic construct
  source 1..80: mol_type = other DNA
cgttgtaacctatgagggcgataccagtgcgggctataaccatgatgtttccatacttcgtgcgtggatccgtactacta

SEQ ID NO: 81939 - DNA, 80 bp, synthetic construct
  source 1..80: mol_type = other DNA
tctaccaaccctatgtatgtctctgatacagttacctttgtcaatgtggccactggtgctcaggctgttgcccgctctct

SEQ ID NO: 81940 - DNA, 80 bp, synthetic construct
  source 1..80: mol_type = other DNA
tgattggtctaaagttactttggatggtcgcccccttactaccattcagcagtattctaagacattttatgttctcccgc

SEQ ID NO: 81941 - DNA, 80 bp, synthetic construct
  source 1..80: mol_type = other DNA
tccgcgggaagctgtccttttgggaggctggcacaactagggccggctacccatataactataacaccactgctagtgat

SEQ ID NO: 81942 - DNA, 80 bp, synthetic construct
  source 1..80: mol_type = other DNA
caaattctgattgagaatgcggccggccatcgtgtcgctatctccacctacactaccagcctgggtgccggccctgcctc

SEQ ID NO: 81943 - DNA, 80 bp, synthetic construct
  source 1..80: mol_type = other DNA
gtgggtgtattagccccacactcggcccttgctgttcttgaggacactgttgattaccctgctcgtgctcacacttttga

SEQ ID NO: 81944 - DNA, 80 bp, synthetic construct
  source 1..80: mol_type = other DNA
tgatttctgcccggagtgtcgtaccctaggtttgcagggttgtgcattccagtccactattgctgagcttcagcgcctta

SEQ ID NO: 81945 - DNA, 80 bp, synthetic construct
  source 1..80: mol_type = other DNA
aaacggaggtaggcaaaacccgggagtcttaattaattccttccgtgcccccttcgcagtcttccttttggctttatttc

SEQ ID NO: 81946 - DNA, 80 bp, synthetic construct
  source 1..80: mol_type = other DNA
aaatagttggtgaccacccgttggttatagagcgtgtgcgggccattggttgtcatttcgtgctgttgctcaccgcggcc

SEQ ID NO: 81947 - DNA, 80 bp, synthetic construct
  source 1..80: mol_type = other DNA
cctgagccgtcacctatgccttatgtcccctaccctcgttcaacggaggtgtatgttcggtctatatttggccctggcgg

SEQ ID NO: 81948 - DNA, 80 bp, synthetic construct
  source 1..80: mol_type = other DNA
ctctccatctttgtttccgtcagcctgctctactaaatctaccttccacgctgtcccggtccatatctgggatcggctca

SEQ ID NO: 81949 - DNA, 80 bp, synthetic construct
  source 1..80: mol_type = other DNA
tgctctttggtgccaccctggatgatcaggcgttctgttgttcacgactcatgacttacctccgtggtattagctacaag

SEQ ID NO: 81950 - DNA, 80 bp, synthetic construct
  source 1..80: mol_type = other DNA
gttattaactaaacttgtattcagggcattattataaccagggtaatgggcaccaatcaggtttttccttcttgcactag

SEQ ID NO: 81951 - DNA, 80 bp, synthetic construct
  source 1..80: mol_type = other DNA
taattagtgttaaggattatcaattatatttgtattcatgtaagtcttatattagtgttaagttgtactaactctgttaa

SEQ ID NO: 81952 - DNA, 80 bp, synthetic construct
  source 1..80: mol_type = other DNA
gtattgttaagtcttgttaggtcctttaaattttgttaaatctttaggttacgttaagttctgttaagtctttaagtttt

SEQ ID NO: 81953 - DNA, 80 bp, synthetic construct
  source 1..80: mol_type = other DNA
aggtttccgtgtcaatgcaaacacagcggctctgagcaacaaagtcctcgcagagtacaaagttcctggcgagattgtaa

SEQ ID NO: 81954 - DNA, 80 bp, synthetic construct
  source 1..80: mol_type = other DNA
attctaaacaggggtggtgatgagaatccacgtggccctgtgagccgtgagcatgtggactggtgcagggagtttgtcaa

SEQ ID NO: 81955 - DNA, 80 bp, synthetic construct
  source 1..80: mol_type = other DNA
ctttctgtggtgtagatagtggaaccgcaagctggtcgtggccagacggagctgatctgccattcagtattgacaagtag

SEQ ID NO: 81956 - DNA, 80 bp, synthetic construct
  source 1..80: mol_type = other DNA
gcaactcttctctttgcccaataaatggatgggctatatacagcaaagataatagcataaggatcggttccaaaggagac

SEQ ID NO: 81957 - DNA, 80 bp, synthetic construct
  source 1..80: mol_type = other DNA
atacatacccaacaataaaggaaagttaccataataccaatcaagaagatcttttggtgctgtgggggatccaccatcca

SEQ ID NO: 81958 - DNA, 80 bp, synthetic construct
  source 1..80: mol_type = other DNA
taaaaacccaattacctatatttccgttgggacatcaacactaaaccagagattggtaccaaagatagccactagaccta

SEQ ID NO: 81959 - DNA, 80 bp, synthetic construct
  source 1..80: mol_type = other DNA
ctgctcagtgctgaaagcaaaggcatcattttccccaacatagtcaaccactggcctgacactgccatgtccactgtcac

SEQ ID NO: 81960 - DNA, 80 bp, synthetic construct
  source 1..80: mol_type = other DNA
atagtaccttcgggtcactgagaaacgaacgtaatggccctggacgcgctagcttcaatcttggagactgtattgcgcaa

SEQ ID NO: 81961 - DNA, 80 bp, synthetic construct
  source 1..80: mol_type = other DNA
ctggaaacgttgtactgactactcactacctagagatggcagaagcgtctgagttcaactttaccacaaaaagaaagcaa

SEQ ID NO: 81962 - DNA, 80 bp, synthetic construct
  source 1..80: mol_type = other DNA
acggaagaactacaatatcagagtggtgcaatccatgttgcgcaccaatcaaatcaattgcctctgtcgaaaagtgtaca

SEQ ID NO: 81963 - DNA, 80 bp, synthetic construct
  source 1..80: mol_type = other DNA
aacttcttgaatcaataaacatggcaaccacagagcaagaaatcaacttgatcaaaactaatgctcttagaagcatcacc

SEQ ID NO: 81964 - DNA, 80 bp, synthetic construct
  source 1..80: mol_type = other DNA
cgggaagaaccacaatatccgagtggtgcaatccatgctgcgcaccagtcaaatcaactgcctctgtcgaaaaatgtaca

SEQ ID NO: 81965 - DNA, 80 bp, synthetic construct
  source 1..80: mol_type = other DNA
agattcttgaatcaataaatatggcaactacagagcaagacatcaatctgatcaaaaccaatgcccttagaagcattacc

SEQ ID NO: 81966 - DNA, 80 bp, synthetic construct
  source 1..80: mol_type = other DNA
ctttcatgggcgtcgtggagctggttgtgctcctggcagaactgtttgatgtgttctggaccccaccggacatttcaagc

SEQ ID NO: 81967 - DNA, 80 bp, synthetic construct
  source 1..80: mol_type = other DNA
cagaagacctagccaaagacttagtcccccttatattaggtggtataggtctggcaattggtttcacaagagacaaaata

SEQ ID NO: 81968 - DNA, 80 bp, synthetic construct
  source 1..80: mol_type = other DNA
acaaaagtgatgaagagcgccgttgatgggctgcggtcagcaacacagctcggacaatatggattggagatattctcaat

SEQ ID NO: 81969 - DNA, 80 bp, synthetic construct
  source 1..80: mol_type = other DNA
atggcgcttgatcttttacgtcggtcacaaacaccatctccatgtcggcaaactaatgacagtgcccccaaagctcaaag

SEQ ID NO: 81970 - DNA, 80 bp, synthetic construct
  source 1..80: mol_type = other DNA
tggaggcaaagttggccttgtacctcgggagtccatagatcattgggatggatatcatggcgaggatgtcttgctctggg

SEQ ID NO: 81971 - DNA, 80 bp, synthetic construct
  source 1..80: mol_type = other DNA
gtcaacctaggccccgtgtgcaggcgagtggactttttagtctactgttctgcacctgagattgaacaaacgcggagggc

SEQ ID NO: 81972 - DNA, 80 bp, synthetic construct
  source 1..80: mol_type = other DNA
tcatccaggtgacactaatgccatcaaggatctgtttaaaaaggacttctcacacctaaaaatggaattggctccacagg

SEQ ID NO: 81973 - DNA, 80 bp, synthetic construct
  source 1..80: mol_type = other DNA
tccaggggactgtttataactttgatgaggacagagtggccgccttcaccaatttggctcgcgctaatggcctagggctt

SEQ ID NO: 81974 - DNA, 80 bp, synthetic construct
  source 1..80: mol_type = other DNA
ataagcatggcaacgttgggtaagaaactaaggagtgttaagtccatggaaggcctgcgtaatgcactactgggatacaa

SEQ ID NO: 81975 - DNA, 80 bp, synthetic construct
  source 1..80: mol_type = other DNA
ggaccgccccccacggaccgcttcagaggtaaaaagggcactgggatgggatgctgaaccagaacatcaagaaagcacgg

SEQ ID NO: 81976 - DNA, 80 bp, synthetic construct
  source 1..80: mol_type = other DNA
tcagtcaagagtgacgggagcaatgtcataattaaagaaaagcaggtaccgtcctcaccccaacatcaagccatttccac

SEQ ID NO: 81977 - DNA, 80 bp, synthetic construct
  source 1..80: mol_type = other DNA
agccaccctcgcgctctctagactgcgggctgctagagctcttgcgtatgcctcctgtctgcaaagtgcggtgctgtcaa

SEQ ID NO: 81978 - DNA, 80 bp, synthetic construct
  source 1..80: mol_type = other DNA
tggggcttctgggtaagttcaacagtgttcatcactacaacacatgttataccacctggtgctaaggagatctttggtga

SEQ ID NO: 81979 - DNA, 80 bp, synthetic construct
  source 1..80: mol_type = other DNA
ccttgaagaggggtgccctgaaggcacagtgtgcaccataatgataaaaagagactctggagagctgttgccgctagccg

SEQ ID NO: 81980 - DNA, 80 bp, synthetic construct
  source 1..80: mol_type = other DNA
ttcgtatgggagcagtggcctcaatgaagattcaagggaaactcatgcacgggcaatcaggaatgttgctcactggtgct

SEQ ID NO: 81981 - DNA, 80 bp, synthetic construct
  source 1..80: mol_type = other DNA
aggtgtcaccccatcaatcctgcccagcacatttgagaggactgactcaagcggtgccactgacgagcaacaaccagtga

SEQ ID NO: 81982 - DNA, 80 bp, synthetic construct
  source 1..80: mol_type = other DNA
ccagagttgaaggcggtccatctttgcagcaggtgttgcgagaccagctgaagccatttgctgaaccccgtggcaggttg

SEQ ID NO: 81983 - DNA, 80 bp, synthetic construct
  source 1..80: mol_type = other DNA
ctctggggggcggatcttggcactgtcatccgtgccgctagggcttttgggccattttgtgaagcaataaaaccccatgt

SEQ ID NO: 81984 - DNA, 80 bp, synthetic construct
  source 1..80: mol_type = other DNA
ctctggggtgcggatcttggcactgtcatccgtgccgctagggcttttgggccattttgtgaagcaataaaaccccatgt

SEQ ID NO: 81985 - DNA, 80 bp, synthetic construct
  source 1..80: mol_type = other DNA
catggtcttctagtggtggagttgaccttggcatcaatgatttgaccacagttcgtggcccgttttggaacatgtgcccc

SEQ ID NO: 81986 - DNA, 80 bp, synthetic construct
  source 1..80: mol_type = other DNA
tttcaacagatattgaatttgactcaaacagactaacacaggtattaaaagagtatggcctaaaacccacaagacctgat

SEQ ID NO: 81987 - DNA, 80 bp, synthetic construct
  source 1..80: mol_type = other DNA
aaaactgacggcccaatcattgtaaggcaacaggttgatggcttggttttcctccggcgcaccatctcgaaggatgccat

SEQ ID NO: 81988 - DNA, 80 bp, synthetic construct
  source 1..80: mol_type = other DNA
tcgggtaccagggtcggcttgaccgtaattccattgaaagacagctctggtggacccggggacccaatcacgatgatcca

SEQ ID NO: 81989 - DNA, 80 bp, synthetic construct
  source 1..80: mol_type = other DNA
tttgaaaccttagtcccacacacacagaggaaggtccaactgatatccttgctgggtgaagctgcactccatggtgagaa

SEQ ID NO: 81990 - DNA, 80 bp, synthetic construct
  source 1..80: mol_type = other DNA
aagaaggaggattggaaatttacatccctggttggcaggccatgttccgctggatgcgattccatgatttgagcttgtgg

SEQ ID NO: 81991 - DNA, 80 bp, synthetic construct
  source 1..80: mol_type = other DNA
tgcgtgtgaaggtgctgcttgctggcaacgcttttactgcagggaaaataataattagctgcatacccccaggttttacc

SEQ ID NO: 81992 - DNA, 80 bp, synthetic construct
  source 1..80: mol_type = other DNA
tcccaaaatatttctattgcccaaatgacaatgtttcctcatgtcatcgctgacgtgagggttctggaacctatagaaat

SEQ ID NO: 81993 - DNA, 80 bp, synthetic construct
  source 1..80: mol_type = other DNA
accccttgaggatgtgaggaatgtgctgtttcacaccaatgacaaccgcccaacaatgaggcttgtatgcatgttgtata

SEQ ID NO: 81994 - DNA, 80 bp, synthetic construct
  source 1..80: mol_type = other DNA
cccccttgcgagccaatggcagttcttctggcacggacccttttgtcatagctggtcgggttctcacctgcccagattca

SEQ ID NO: 81995 - DNA, 80 bp, synthetic construct
  source 1..80: mol_type = other DNA
aatttcagtttcctatttttagtaccccctaatgtagaacaaaagactagaccttttagtgttcccaatatacctctgaa

SEQ ID NO: 81996 - DNA, 80 bp, synthetic construct
  source 1..80: mol_type = other DNA
aggggacatggtcgagttctatgaaggccacatattccactatgccatttacatcgggcagggcaaaaccattggagtcc

SEQ ID NO: 81997 - DNA, 80 bp, synthetic construct
  source 1..80: mol_type = other DNA
tacattgtcaaattcaagggtaccatcattgatcaagtctatgaccatctctagagatcagaatcaaataattcaattcc

SEQ ID NO: 81998 - DNA, 80 bp, synthetic construct
  source 1..80: mol_type = other DNA
aaaatggcagggtcacattggatggtcagttacagggcaccacacccacatcagtgagccagttgtgtaaaattagaggc

SEQ ID NO: 81999 - DNA, 80 bp, synthetic construct
  source 1..80: mol_type = other DNA
actacataccacgcaactggaggtaatgggataaatttaacagagttgaatggtgagccataccatgcctttgaaagccc

SEQ ID NO: 82000 - DNA, 80 bp, synthetic construct
  source 1..80: mol_type = other DNA
cgccccgatagggtttccagaccttggtggttgcgattggcatctcacagcaacccccacgcaggctttcaatgatggag

SEQ ID NO: 82001 - DNA, 80 bp, synthetic construct
  source 1..80: mol_type = other DNA
cgaaggtcgtgcgcctgtcagtcacccagggcgcagcctttgcaccacacctgggtaccatacattacaccactactgat

SEQ ID NO: 82002 - DNA, 80 bp, synthetic construct
  source 1..80: mol_type = other DNA
actgattacaaccccaacactagcataatttgcacactagattggctgtcccaaactgctggtcagagtaatgttgaccc

SEQ ID NO: 82003 - DNA, 80 bp, synthetic construct
  source 1..80: mol_type = other DNA
ttggcagataccaacttatgggtcgactttaactgaagccgctcagttggcgcctcccatctttccccctgggtttggag

SEQ ID NO: 82004 - DNA, 80 bp, synthetic construct
  source 1..80: mol_type = other DNA
aaacattggttttctttctatcagactttcctatttccaatggcaagaacggactcagtgtaccgtgcactctcccacag

SEQ ID NO: 82005 - DNA, 80 bp, synthetic construct
  source 1..80: mol_type = other DNA
gaatttgtcacccattttgtgaatgaacaggccccaatcagaggagaggccgccctcttacattatgttgatcctgacac

SEQ ID NO: 82006 - DNA, 80 bp, synthetic construct
  source 1..80: mol_type = other DNA
tcatcgtaatcttggagagtttaaattgtatccagaaggttttatgacttgtgttcctaatactagtggtggtggtcccc

SEQ ID NO: 82007 - DNA, 80 bp, synthetic construct
  source 1..80: mol_type = other DNA
cagccggtgcggctcgtaggcttggaatcaggagatcataatggctcaagctgtcttaggagcaattgcagccacagccg

SEQ ID NO: 82008 - DNA, 80 bp, synthetic construct
  source 1..80: mol_type = other DNA
caggcattcaggctggcactgaagctgcactgcaacatcagcgctttcaacaagacttgactctacaaagtaacacattc

SEQ ID NO: 82009 - DNA, 80 bp, synthetic construct
  source 1..80: mol_type = other DNA
aaacatgataaggagatgttggctatgcaggtggaggcttctacttctttattacagaatagcttgaacactcgctataa

SEQ ID NO: 82010 - DNA, 80 bp, synthetic construct
  source 1..80: mol_type = other DNA
cttgttgacccaggcaggtctgacttctgcagatgccgccagagcagtggcgggggcccccgtcactcgtgtggtggact

SEQ ID NO: 82011 - DNA, 80 bp, synthetic construct
  source 1..80: mol_type = other DNA
ggaatggcactcgcatcgccgctccactatcaactgccaccactctccgctctggaggatttatgtctataccggtcatg

SEQ ID NO: 82012 - DNA, 80 bp, synthetic construct
  source 1..80: mol_type = other DNA
tataggggtgcaaaaacagaacagcagaaattgacaggcttctcaaaccccaattacgagactggttcatctgtgtcgcg

SEQ ID NO: 82013 - DNA, 80 bp, synthetic construct
  source 1..80: mol_type = other DNA
cacatcgcaatgggtttcctcacaaaactcaatgcggtctagcgtagcaccattccacccagatgcacttaggacaactt

SEQ ID NO: 82014 - DNA, 80 bp, synthetic construct
  source 1..80: mol_type = other DNA
gggtcacaccgcctggttcgtcttctacatctactgtttcttcagcttcatctatacctagattctttaatactgaaaga

SEQ ID NO: 82015 - DNA, 80 bp, synthetic construct
  source 1..80: mol_type = other DNA
ctatacctagattctttaatactgaaagattacccttgttcgcaaacaataagaggtgatttttgtaatatgaaaatgtg

SEQ ID NO: 82016 - DNA, 80 bp, synthetic construct
  source 1..80: mol_type = other DNA
ccactaatcaacaacgcctcacctacgagcaacttaaggagttggaaaatgaaccatggccctatgcctcaatcaccaac

SEQ ID NO: 82017 - DNA, 80 bp, synthetic construct
  source 1..80: mol_type = other DNA
cgcactgctgtttgtgggctataccctgcacaaataaaggcaaggaatatggtaagtcccgttatgagtgtagttgggtt

SEQ ID NO: 82018 - DNA, 80 bp, synthetic construct
  source 1..80: mol_type = other DNA
actggtggaacacattgaatcaccatcatcaatatgggtgtttgccggggcccctgatcggtgcccaccaacatgtttgt

SEQ ID NO: 82019 - DNA, 80 bp, synthetic construct
  source 1..80: mol_type = other DNA
cccctgttaattcttatactaacacgccctacactggggcactagggctccttgattttgcacttgagcttgaattcaga

SEQ ID NO: 82020 - DNA, 80 bp, synthetic construct
  source 1..80: mol_type = other DNA
ccgtcgagaatgcgcagcaggacaagggtattgctataccgcacgatatagacttgggggattcccgtgtggttattcaa

SEQ ID NO: 82021 - DNA, 80 bp, synthetic construct
  source 1..80: mol_type = other DNA
ctgttgagaatgcgcagcaagacaagggcattaccattccacatgacatagacttgggtgactctcgtgtggttattcag

SEQ ID NO: 82022 - DNA, 80 bp, synthetic construct
  source 1..80: mol_type = other DNA
cccctgttaattcttacaccaatactccctatactggggcgcttggactcctggactttgctttagagcttgagtttagg

SEQ ID NO: 82023 - DNA, 80 bp, synthetic construct
  source 1..80: mol_type = other DNA
ctgtagagaatgcacagcaagataaaggtattgccatcccacatgacattgatcttggtgattctcgtgtggttattcaa

SEQ ID NO: 82024 - DNA, 80 bp, synthetic construct
  source 1..80: mol_type = other DNA
cccctgttaactcctataccaataccccttacaccggggcgcttggactccttgattttgccctagagcttgagttcagg

SEQ ID NO: 82025 - DNA, 80 bp, synthetic construct
  source 1..80: mol_type = other DNA
ctgtagagaatgcacagcaggataaagggattgttattccacatgacatagacctgggtgactctcgtgtggttattcag

SEQ ID NO: 82026 - DNA, 80 bp, synthetic construct
  source 1..80: mol_type = other DNA
acattactttgaatttcttcatcaaagtcacttacaggtctataccatattagcaataacaacatagctattccactgtg

SEQ ID NO: 82027 - DNA, 80 bp, synthetic construct
  source 1..80: mol_type = other DNA
tagtaacacagaagacgcagcggggtcattcttcaaaatggagaaaatagtgcttcttcttgcaatagttggccttgtta

SEQ ID NO: 82028 - DNA, 80 bp, synthetic construct
  source 1..80: mol_type = other DNA
tccaatgggtcgttacaatgcagaatttgcatttaaatttgtgagctcagattgtagttaaaacaccttgtgtttctact

SEQ ID NO: 82029 - DNA, 80 bp, synthetic construct
  source 1..80: mol_type = other DNA
gcgcaccggggatcctaggcttttaattggttgcgcaaagctttggaatggggcagattgttgccgttttccaagctatc

SEQ ID NO: 82030 - DNA, 80 bp, synthetic construct
  source 1..80: mol_type = other DNA
ggggatacattctttaccccgatgttggctggttagtaatgggagttacctcaacgaaacaaaatttactcatgatatgg

SEQ ID NO: 82031 - DNA, 80 bp, synthetic construct
  source 1..80: mol_type = other DNA
ttgccgtgtcccaaaccacacagactcagaaagaatggcacctgtgcctgtggcttctttaagtcaataaacaggtccac

SEQ ID NO: 82032 - DNA, 80 bp, synthetic construct
  source 1..80: mol_type = other DNA
gtcatggggtccgtggagactcacagactcagcttggctgctgttctgaagatcatgtctgcaggcagcaagttccttat

SEQ ID NO: 82033 - DNA, 80 bp, synthetic construct
  source 1..80: mol_type = other DNA
agggggagtctttccaacactgctgtggttagtccaggttgggtggagcaaagctgagtgaaatccatgccatgacagta

SEQ ID NO: 82034 - DNA, 80 bp, synthetic construct
  source 1..80: mol_type = other DNA
ggttcaggtttttcataatgtcatctaagagttgagattggctgaagctcacacccacaggaaattggtggggggctttt

SEQ ID NO: 82035 - DNA, 80 bp, synthetic construct
  source 1..80: mol_type = other DNA
gctctttcgttctgtggaggtgtagggtcctttggagtcatatcaatgactgtgttgtcccaggatctgccttttatgct

SEQ ID NO: 82036 - DNA, 80 bp, synthetic construct
  source 1..80: mol_type = other DNA
cctcggggtgcccataccaatcatgttgaggagctctgacctcctgcccaattgatcctgactcagattccccctataga

SEQ ID NO: 82037 - DNA, 80 bp, synthetic construct
  source 1..80: mol_type = other DNA
tctggcttcggtcctggtcaccttctttttgagtttctccagatctgttgccagaatcatcaactcatcagaggttagtt

SEQ ID NO: 82038 - DNA, 80 bp, synthetic construct
  source 1..80: mol_type = other DNA
acggggagagctctcttctcagagtctgtaaccaaaggaaggatttcacttcttttgattgggacatattgtgagacaag

SEQ ID NO: 82039 - DNA, 80 bp, synthetic construct
  source 1..80: mol_type = other DNA
acaagatgtcgacaagcgcagaagagaaagctcactggaggaagtaagtgtcctataaacgcctaggatccactgtgcgc

SEQ ID NO: 82040 - DNA, 80 bp, synthetic construct
  source 1..80: mol_type = other DNA
cgtgttggggattttcctgttacttctgatctgaaatgctctcacaacaccagctacagagtgatagaatatgaagtcac

SEQ ID NO: 82041 - DNA, 80 bp, synthetic construct
  source 1..80: mol_type = other DNA
gggcgaagcctcaagctcgatcaacttgttgtcggggagaatcaatgccatcatttcagacacacttttgatgagatcat

SEQ ID NO: 82042 - DNA, 80 bp, synthetic construct
  source 1..80: mol_type = other DNA
tctaagagttgagattggctgaagctcacacccacaggaaattggtggggggcttttgctctttcgttctgtggaggtgt

SEQ ID NO: 82043 - DNA, 80 bp, synthetic construct
  source 1..80: mol_type = other DNA
gggcttttgctctttcgttctgtggaggtgtagggtcctttggagtcatatcaatgactgtgttgtcccaggatctgcct

SEQ ID NO: 82044 - DNA, 80 bp, synthetic construct
  source 1..80: mol_type = other DNA
gcgcaccggggatcctaggcgttaattggactacttttctagtacctcacttcagtgagagtgacatgggtcagagacat

SEQ ID NO: 82045 - DNA, 80 bp, synthetic construct
  source 1..80: mol_type = other DNA
ggggtgatgtgcttcaaggttcaaccagcagtctctcaattggggctcatcaaggtcataatgtttgaatagggacttta

SEQ ID NO: 82046 - DNA, 80 bp, synthetic construct
  source 1..80: mol_type = other DNA
ccaagaggcgcccccctctcgggagcggcgccccgccccgccgggcgagggcccgcccaggtgtggcgcagctccgccgt

SEQ ID NO: 82047 - DNA, 80 bp, synthetic construct
  source 1..80: mol_type = other DNA
ggcccccccagggggggcgcagctccgccgtcgcgcgctccacagaccacaccaatcatcgatgcagaagatcattcaat

SEQ ID NO: 82048 - DNA, 80 bp, synthetic construct
  source 1..80: mol_type = other DNA
cgcgcgctccacagaccacaccaatcatcgatgcagaagatcattcaatctcaatagtggatgtcccctctctcaatagt

SEQ ID NO: 82049 - DNA, 80 bp, synthetic construct
  source 1..80: mol_type = other DNA
ggtttgttttaatcttagcaagctcatcaggggtgaagccactggttgaattaacgaaagataacatcagcgatagcatc

SEQ ID NO: 82050 - DNA, 80 bp, synthetic construct
  source 1..80: mol_type = other DNA
ctcttctttcgtaacgtcgttcttggggttgacaaaaacgcttttaaatttcaactttggttccaagaatttttcaaagc

SEQ ID NO: 82051 - DNA, 80 bp, synthetic construct
  source 1..80: mol_type = other DNA
cacctccgaggacattattggcaaaaagtatctcttggggtcagcataaaaagaacagatgtgctcaccatccctattta

SEQ ID NO: 82052 - DNA, 80 bp, synthetic construct
  source 1..80: mol_type = other DNA
cattgagtttaccaaactcaaagataacgaagaaatcatgcggaggtcagttatgtcctcactaaaactggtttcatcca

SEQ ID NO: 82053 - DNA, 80 bp, synthetic construct
  source 1..80: mol_type = other DNA
cctgttcggggtgtccttcatcattcttagagtcaaaataaatgaaattggtgaatgatgttgcttctttgaaatctcgc

SEQ ID NO: 82054 - DNA, 80 bp, synthetic construct
  source 1..80: mol_type = other DNA
aaatcaaagagcttgctaccattgcctttgagtgattctgacagcctaatatactctgactcttccaacatcgcctcatt

SEQ ID NO: 82055 - DNA, 80 bp, synthetic construct
  source 1..80: mol_type = other DNA
agtggcacaagagtgatccctgagtgttcaagatcacccctcagtgatgatagcttcttcatgtcattgttgtatttctg

SEQ ID NO: 82056 - DNA, 80 bp, synthetic construct
  source 1..80: mol_type = other DNA
aggggattcagtctcacaaaacattctagtagaatcaacatgtttcctgacaccttgaatccgtctggagtgacacatgg

SEQ ID NO: 82057 - DNA, 80 bp, synthetic construct
  source 1..80: mol_type = other DNA
aggacttttagcttttggggagctagtctctcatcattaggaaagtttcttgagataagctgcaggagttcattctttaa

SEQ ID NO: 82058 - DNA, 80 bp, synthetic construct
  source 1..80: mol_type = other DNA
tgagataagctgcaggagttcattctttaatgagtccattgtgaattttgtcccataaaagcctaggatcctcggtgcgc

SEQ ID NO: 82059 - DNA, 80 bp, synthetic construct
  source 1..80: mol_type = other DNA
ggcgcagctccgccgtcgcgcgctccacagaccacaccaatcatcgatgcagaagatcattcaatctcaatagtggatgt

SEQ ID NO: 82060 - DNA, 80 bp, synthetic construct
  source 1..80: mol_type = other DNA
gcccgtgatatagcttacaagtatatcaccctagacaaggatgatatcatcaactattataacccacgaatctatttcaa

SEQ ID NO: 82061 - DNA, 80 bp, synthetic construct
  source 1..80: mol_type = other DNA
accaactcagaatgtaaaagaacctggaacttttaaattgaatctttccaatatggacccaaaatcaaaggcattattgg

SEQ ID NO: 82062 - DNA, 80 bp, synthetic construct
  source 1..80: mol_type = other DNA
tatttctagccaagtacagcaaaatgagtgtgcaaaagtggtagaaaagattctttcagatttagaagtcaacgtcggtg

SEQ ID NO: 82063 - DNA, 80 bp, synthetic construct
  source 1..80: mol_type = other DNA
agtcgaatgaagggataggacagccgaaaaagacaacaggaatagatgatatattaaagaaattctatgataatgagctt

SEQ ID NO: 82064 - DNA, 80 bp, synthetic construct
  source 1..80: mol_type = other DNA
attaaatttatggtagccataattaggaaaacaacagcttggcatttagggcatttattgcgtgacattacagagtcgtt

SEQ ID NO: 82065 - DNA, 80 bp, synthetic construct
  source 1..80: mol_type = other DNA
tcttgacaacttggactccaaaatagagattgatggtgttacctggtgcttcagtaagatcatcagtctcgacttaaatc

SEQ ID NO: 82066 - DNA, 80 bp, synthetic construct
  source 1..80: mol_type = other DNA
gcttattagcactaaatattgcatttgaaaagactctgcttgccactgcaacatggtttcagtattatacagaagatcaa

SEQ ID NO: 82067 - DNA, 80 bp, synthetic construct
  source 1..80: mol_type = other DNA
gtatatttatacaatgtcatcaaaacattactggtgaatctagcccagaataataaaatccgattttattcaaaagttag

SEQ ID NO: 82068 - DNA, 80 bp, synthetic construct
  source 1..80: mol_type = other DNA
gaaaaaatgtttggggattatattatggaggagggttatcatcttcaagatgtcatatcaggtcatgtccaagttgaaca

SEQ ID NO: 82069 - DNA, 80 bp, synthetic construct
  source 1..80: mol_type = other DNA
gcagttattttgtcaagaagtagtagagttagctgctcaagaacttaacacatacttacatgcaaaagcccaagtaatgg

SEQ ID NO: 82070 - DNA, 80 bp, synthetic construct
  source 1..80: mol_type = other DNA
tagctgcaagtgtaacactcattgagtccatacgataccttaatcagtcacagtacaatccaactgttcttgaactttat

SEQ ID NO: 82071 - DNA, 80 bp, synthetic construct
  source 1..80: mol_type = other DNA
ttcctgaggaatatatctcttatggtggtgagagaaaaatccttaatatccaacaagcacttgaaaaagcattgaggtgg

SEQ ID NO: 82072 - DNA, 80 bp, synthetic construct
  source 1..80: mol_type = other DNA
gcatctggtgaaagtgaaattcaatcatctttaggtcatacaattaaactaaaaagaaaattaatgtatgtcagtgcaga

SEQ ID NO: 82073 - DNA, 80 bp, synthetic construct
  source 1..80: mol_type = other DNA
ggttgaacggttatatggcacagcagcagggatgataaataacccaactgcatatttgaaagcagatcgtaattctatac

SEQ ID NO: 82074 - DNA, 80 bp, synthetic construct
  source 1..80: mol_type = other DNA
ctatccctttagggggcgatgggtccatgtctatcatggagctagcaacagcaggtatagggatggctgataagaatata

SEQ ID NO: 82075 - DNA, 80 bp, synthetic construct
  source 1..80: mol_type = other DNA
ttacttacaagcacacaaagaaagaaagtgatagatatatacttgggctttttaaatttctgatgacactatcagatgac

SEQ ID NO: 82076 - DNA, 80 bp, synthetic construct
  source 1..80: mol_type = other DNA
atatttcaacatgataaattaggagaatttagctttgttggaaaggtacaatggaaggttttcacacctaaagcagagtt

SEQ ID NO: 82077 - DNA, 80 bp, synthetic construct
  source 1..80: mol_type = other DNA
aaaacatctaaaataccaaggtggcttagagtatattgaacatttactccaagtagaggcacaaaaggggaattgtcagt

SEQ ID NO: 82078 - DNA, 80 bp, synthetic construct
  source 1..80: mol_type = other DNA
ctaagattgcaagaacttttacagtaaaagaacgtgatcaatctatacaaaacccgatcacagctgttattggttataag

SEQ ID NO: 82079 - DNA, 80 bp, synthetic construct
  source 1..80: mol_type = other DNA
agttaatgagagaaggggtgtatagagaactaggcctagatataagcttaccaaatgtattgaagagagttgcacccctt

SEQ ID NO: 82080 - DNA, 80 bp, synthetic construct
  source 1..80: mol_type = other DNA
ttatataagtccggaaaatcacgagtagtcattgttcagggtaatgtggaagggactgcagaatctatttgtagttactg

SEQ ID NO: 82081 - DNA, 80 bp, synthetic construct
  source 1..80: mol_type = other DNA
agtaggtgacttaactcacttggcagccatgcgattgtgtatagaggtctggagatggtgcaaggctaatgaacaggatg

SEQ ID NO: 82082 - DNA, 80 bp, synthetic construct
  source 1..80: mol_type = other DNA
ctactgcatggctcaagtgtttgatgtttgagaataagactctagaacaatggattgatttcttctgttcacgaggagta

SEQ ID NO: 82083 - DNA, 80 bp, synthetic construct
  source 1..80: mol_type = other DNA
accctgaaatacagtgtttgggcttgttgatttttgatctaaagggacaaaaggggctgttacaaattcaagctaatagg

SEQ ID NO: 82084 - DNA, 80 bp, synthetic construct
  source 1..80: mol_type = other DNA
agagggaatatatcctggaaacatccattactcaaagaaatgttctaaagatcttgatggaagaagtaacaaaggaattg

SEQ ID NO: 82085 - DNA, 80 bp, synthetic construct
  source 1..80: mol_type = other DNA
ggggaaagccaaatgtaccctgtatagtttatagaaactgtgctctacggactggtttacgggtacgacgacctacaaac

SEQ ID NO: 82086 - DNA, 80 bp, synthetic construct
  source 1..80: mol_type = other DNA
aaagcctttatgataactgtgcaagctggtgggtttagagctatggcacagttggatgaagagaacccaaggttcctttt

SEQ ID NO: 82087 - DNA, 80 bp, synthetic construct
  source 1..80: mol_type = other DNA
ataaagattttggagcctgtcaaactgattaaaagctgggtgtccaaaggtctttctattgacaagatttataacccagt

SEQ ID NO: 82088 - DNA, 80 bp, synthetic construct
  source 1..80: mol_type = other DNA
caatatcattttaatggctcgttatatgtctaaacattacaactttcatgcgaagcagctttctctcatggacccttatg

SEQ ID NO: 82089 - DNA, 80 bp, synthetic construct
  source 1..80: mol_type = other DNA
atcttacagagtttgaaagtgtggttaaaggatggggagagtgtgtaaaggatcagtttattgaatatgacagagaagct

SEQ ID NO: 82090 - DNA, 80 bp, synthetic construct
  source 1..80: mol_type = other DNA
caaagaaaagtgcatgaagagagggttttaccagaggatgttctgcctgattcattgttctcttttagacatgctgatat

SEQ ID NO: 82091 - DNA, 80 bp, synthetic construct
  source 1..80: mol_type = other DNA
attattcccaaaggactcagcctcatctttctattaacaagtagttttttctatcgctcttttctcggagtctactacta

SEQ ID NO: 82092 - DNA, 80 bp, synthetic construct
  source 1..80: mol_type = other DNA
ggccaagagtgcgtacatttgacataccaaattacagaccacagcaattatgtgaaccaaacatcgataatttggttgat

SEQ ID NO: 82093 - DNA, 80 bp, synthetic construct
  source 1..80: mol_type = other DNA
tactgcaaaaattggcttcagactgatcataaatttgcatttaaggaagtgacaggacagcgtgtctacaatgtatttaa

SEQ ID NO: 82094 - DNA, 80 bp, synthetic construct
  source 1..80: mol_type = other DNA
atgaagaattacagcataaatcaagatatggttgttccagaaagccgagaaattttttgctctgtcagattgggattcaa

SEQ ID NO: 82095 - DNA, 80 bp, synthetic construct
  source 1..80: mol_type = other DNA
gccccttatcttccttccacgatagcatctgaccagtatgacaccagaattgcatgtgctgagttgttgaaaaactatcc

SEQ ID NO: 82096 - DNA, 80 bp, synthetic construct
  source 1..80: mol_type = other DNA
ccggagtactgacatctaaagatgatcctgtgtatgtatgggcccctggtattatcatggaagggaatcattctgtgtgt

SEQ ID NO: 82097 - DNA, 80 bp, synthetic construct
  source 1..80: mol_type = other DNA
ctccttagctgttgaactatgtgttcctggcctgcacggttgggcaaccatgctattactgcttacattttgctttggct

SEQ ID NO: 82098 - DNA, 80 bp, synthetic construct
  source 1..80: mol_type = other DNA
aaatattgttggcttttgcatatgtatgctcaaaatacaatacagactctaagtttaaaatcctcatagagaaagtgaag

SEQ ID NO: 82099 - DNA, 80 bp, synthetic construct
  source 1..80: mol_type = other DNA
gaaatcagtcggaaaagtatttaaaattgtgtcacttcgttacacaaggaaagcatgcatacagttaggtaccgaacaaa

SEQ ID NO: 82100 - DNA, 80 bp, synthetic construct
  source 1..80: mol_type = other DNA
cacaagtactgcaacacagcagtcatttacaaagtggatatgggagtcaaaaaatgatttaactgatagcacacaggcat

SEQ ID NO: 82101 - DNA, 80 bp, synthetic construct
  source 1..80: mol_type = other DNA
aattgacggggcttggggttctggggtgggattcaaccttgtttgttcagtaagcctaacagagtgttttacatttttga

SEQ ID NO: 82102 - DNA, 80 bp, synthetic construct
  source 1..80: mol_type = other DNA
tgcttgtattgtctatttttctgtttgccctatgctgccccagacgtgctgcatataagaaggagcataagccctaactt

SEQ ID NO: 82103 - DNA, 80 bp, synthetic construct
  source 1..80: mol_type = other DNA
tcatgccatttttatacagatacaaactaacaattatatatagttactaacttaactatatcatataatcccccatatat

SEQ ID NO: 82104 - DNA, 80 bp, synthetic construct
  source 1..80: mol_type = other DNA
cattatcacagccaagtcacacctatgatgtagtcacaatgatggtcaggtgtttcttggtagtgaagaaagtgacctct

SEQ ID NO: 82105 - DNA, 80 bp, synthetic construct
  source 1..80: mol_type = other DNA
gcctactactatggagggacggattagccagaaatcttaatgagctgaaaatggagtgtccacatacaatcggattaggg

SEQ ID NO: 82106 - DNA, 80 bp, synthetic construct
  source 1..80: mol_type = other DNA
gtagggaaagttactgggaaagcaccttcttctgagtcatcagatacagtacaaggagtagcattttcagggaacccttt

SEQ ID NO: 82107 - DNA, 80 bp, synthetic construct
  source 1..80: mol_type = other DNA
aatccaatctattaaaccagatattatactaacataggtaggaagtactaacatgcagacatatagtccagtaggtttat

SEQ ID NO: 82108 - DNA, 80 bp, synthetic construct
  source 1..80: mol_type = other DNA
agtttacattacttaggtttaagttaaggttaagtaattataatcacatagcattaataggttattcagggtataaatta

SEQ ID NO: 82109 - DNA, 80 bp, synthetic construct
  source 1..80: mol_type = other DNA
cagcaaattactactaatgacacatgaatgtatcattattatgttgttgctgcagctgcttgtgaaaccagcactattaa

SEQ ID NO: 82110 - DNA, 80 bp, synthetic construct
  source 1..80: mol_type = other DNA
cagaccatatgattgtattctcatttaatgggcccttaatgtgaaactgagctatcccctcacactttcttattctattc

SEQ ID NO: 82111 - DNA, 80 bp, synthetic construct
  source 1..80: mol_type = other DNA
ttagagtttcagcgtgattttccaacctaaatagaacgtcatcgttgcgtttacaacacttttctatttgttcaaacttt

SEQ ID NO: 82112 - DNA, 80 bp, synthetic construct
  source 1..80: mol_type = other DNA
gattttccaacctaaatagaacgtcatcgttgcgtttacaacacttttctatttgttcaaactttgttgttacattagta

SEQ ID NO: 82113 - DNA, 80 bp, synthetic construct
  source 1..80: mol_type = other DNA
aatccattttcccaaatatctttatgaattactttacatataatatcatcaaccgtcacataattacctgtggttaaaac

SEQ ID NO: 82114 - DNA, 80 bp, synthetic construct
  source 1..80: mol_type = other DNA
aagggaaaaagatcgttgaaaacattctgaagagtgaaacagacgaaaatctcaaaatagccattgcctccagccctgct

SEQ ID NO: 82115 - DNA, 80 bp, synthetic construct
  source 1..80: mol_type = other DNA
tagtctttttagtctccctgggggcaatctgcttctggatgtgttccaatgggtctttgcagtgtagaatatgcatctaa

SEQ ID NO: 82116 - DNA, 80 bp, synthetic construct
  source 1..80: mol_type = other DNA
aacaaatgagttcagtatcttcatttaagaggtttgaaatattccccgaagggagctcatggcccaaccacaccgtaacc

SEQ ID NO: 82117 - DNA, 80 bp, synthetic construct
  source 1..80: mol_type = other DNA
ggagcatcagcatcatgctcccataacgggaaaaggagcttttacagaaatttgctatggctaacggggaagaacggttt

SEQ ID NO: 82118 - DNA, 80 bp, synthetic construct
  source 1..80: mol_type = other DNA
aggtttgagatattccccaaagtaaattcatggcccaaccatgatacgaacaggggggttacggcatcaggccctcatgc

SEQ ID NO: 82119 - DNA, 80 bp, synthetic construct
  source 1..80: mol_type = other DNA
aaccatgatacgaacaggggggttacggcatcaggccctcatgcggaggcaaacagcttttacagaaatttattttggtt

SEQ ID NO: 82120 - DNA, 80 bp, synthetic construct
  source 1..80: mol_type = other DNA
agtaaaaaagggaaattcttccccaaagttcagcaaatcttaccttaacaaccagaagaaggaagttctcgtgatatggg

SEQ ID NO: 82121 - DNA, 80 bp, synthetic construct
  source 1..80: mol_type = other DNA
tcgcagactcacaacatcggtttcatagacagatggtgactaccaccaaccccttgatcatgcatgagaacagaatggtg

SEQ ID NO: 82122 - DNA, 80 bp, synthetic construct
  source 1..80: mol_type = other DNA
ggctcacctgtaaattcctatactaatacaccttacactggtgccctcggcctgcttgattttgcactcgagctcgagtt

SEQ ID NO: 82123 - DNA, 80 bp, synthetic construct
  source 1..80: mol_type = other DNA
tcgtgccatagaaaaagaaatactagccctgctcccgcctaatgtcttttatggcgatgcctatgaggagtcagtgtttg

SEQ ID NO: 82124 - DNA, 80 bp, synthetic construct
  source 1..80: mol_type = other DNA
ctgcaggtttaacgaattgcccttagcaaaagcaggggataataaaaacaaccaaaatgaaagtaaaactactggttctg

SEQ ID NO: 82125 - DNA, 80 bp, synthetic construct
  source 1..80: mol_type = other DNA
gaatatgcatctgaggccagaatttcagaaatataagaaaaaacacccttgtttctactaagggcaattcgcggccgcaa

SEQ ID NO: 82126 - DNA, 80 bp, synthetic construct
  source 1..80: mol_type = other DNA
ggccgcgaattgccctttaggagcgaaagcaggtcaaatatattcaatatggagagaataaaggaactaagagatctgat

SEQ ID NO: 82127 - DNA, 80 bp, synthetic construct
  source 1..80: mol_type = other DNA
ggggattgaatctatagacaacgttatgggaatgattgggatactccctgatttaactccaagcaccgagaaatcaatga

SEQ ID NO: 82128 - DNA, 80 bp, synthetic construct
  source 1..80: mol_type = other DNA
agacagcgaccaaaagaattcgaatggccatcaattagtgtaaaatagtttaaaaacgaccttgtttctactccaagggc

SEQ ID NO: 82129 - DNA, 80 bp, synthetic construct
  source 1..80: mol_type = other DNA
agaaactgctctttcaatataaccacaatgttacaagataagaagcagaaaaaatatgcactcttttataaaatggatct

SEQ ID NO: 82130 - DNA, 80 bp, synthetic construct
  source 1..80: mol_type = other DNA
tgcaggtcgacgatttattcgtctcagggagcaaaagcagggtgaaaatgaatccaaatcagaaaataataatcattggg

SEQ ID NO: 82131 - DNA, 80 bp, synthetic construct
  source 1..80: mol_type = other DNA
acaggatcatgcactggccccatgggaaatcaggggtatggagttaagggatttggattcaggcagggcaatgatgtgtg

SEQ ID NO: 82132 - DNA, 80 bp, synthetic construct
  source 1..80: mol_type = other DNA
gatggggaggactattagcagaacatcaagatcagggtttgaaatcttgaaagtcagaaatggttgggtacaaaatagta

SEQ ID NO: 82133 - DNA, 80 bp, synthetic construct
  source 1..80: mol_type = other DNA
aggagcagatcaaagggcaagttgtagtcgataattcaaactggtcaggatacagtggttcttttacattaccagtggag

SEQ ID NO: 82134 - DNA, 80 bp, synthetic construct
  source 1..80: mol_type = other DNA
ttaacaaaaagaaattgtctggttccatgtttttgggttgagatgataagggggaagccggaagaaaagacgatatggac

SEQ ID NO: 82135 - DNA, 80 bp, synthetic construct
  source 1..80: mol_type = other DNA
ctcaagtagctccattgtgatgtgtggagtagaccatgagattgccgattggtcatggcacgatggagctattcttcctt

SEQ ID NO: 82136 - DNA, 80 bp, synthetic construct
  source 1..80: mol_type = other DNA
aaatggaaataatgggaactgcaatggaacagtcattagggaatacaatgaaacagtaagggttgagaaaataacacaat

SEQ ID NO: 82137 - DNA, 80 bp, synthetic construct
  source 1..80: mol_type = other DNA
ggcacaacaccaatgttgttgagtacatagagaggccagagaataatcatttcatgaacaatacagaggcattgtgtgat

SEQ ID NO: 82138 - DNA, 80 bp, synthetic construct
  source 1..80: mol_type = other DNA
gctaagggtttcgcacctttttccaaagacaatggaataagaattggatcgagaggtcatgtatttgtcataagggaacc

SEQ ID NO: 82139 - DNA, 80 bp, synthetic construct
  source 1..80: mol_type = other DNA
atttgtttcttgctcaccaacagaatgcaggacattctttcttactcaaggctccctgctcaatgacaaacattccaatg

SEQ ID NO: 82140 - DNA, 80 bp, synthetic construct
  source 1..80: mol_type = other DNA
gcaccgttaaagaccggagcccctatagaactctaatgagtgtagaaataggacaatcacccaatgtataccaggcaagg

SEQ ID NO: 82141 - DNA, 80 bp, synthetic construct
  source 1..80: mol_type = other DNA
tttgaggcggtagcatggtcagctactgcatgtcatgacgggaagaaatggatgacaattggagtaacgggccctgatgc

SEQ ID NO: 82142 - DNA, 80 bp, synthetic construct
  source 1..80: mol_type = other DNA
caaagcagtggcagtggtgcattatgggggaattcctaccgatgtaatcaattcctgtgcgggagatattctaagaactc

SEQ ID NO: 82143 - DNA, 80 bp, synthetic construct
  source 1..80: mol_type = other DNA
aggaatcatcatgcacttgcattcaaggtgaatgtttttgggtaatgacagatggaccagcaaatagacaagcgcaatac

SEQ ID NO: 82144 - DNA, 80 bp, synthetic construct
  source 1..80: mol_type = other DNA
tcggtatctttaggattagtagtcctcaacattctcctacacatagttagcattacagtaacagtgttggttcttcctgg

SEQ ID NO: 82145 - DNA, 80 bp, synthetic construct
  source 1..80: mol_type = other DNA
agggcattcaaagccaaacaggggaaaatagttgggcaagctgaaatcagtttcaatggaggccatatagaggaatgctc

SEQ ID NO: 82146 - DNA, 80 bp, synthetic construct
  source 1..80: mol_type = other DNA
atgctatcccaatgaagggaaagtagaatgtgtctgtagggacaattggaccggaaccaacaggccagtgttggtgattt

SEQ ID NO: 82147 - DNA, 80 bp, synthetic construct
  source 1..80: mol_type = other DNA
ctccagatttgtcttacaaagtcggatacttgtgtgcaggcctccccagtgacaccccaaggggagaagatagtcagttc

SEQ ID NO: 82148 - DNA, 80 bp, synthetic construct
  source 1..80: mol_type = other DNA
tttttattggcaccagattcgagatacgtgatgccaatgggaaggttgtggctactgtaccaaccagaattaaaaatgta

SEQ ID NO: 82149 - DNA, 80 bp, synthetic construct
  source 1..80: mol_type = other DNA
ctcctgtcaactcctacactaacaccccttacaccggggcattggggcttcttgactttgcactggaacttgaattcagg

SEQ ID NO: 82150 - DNA, 80 bp, synthetic construct
  source 1..80: mol_type = other DNA
ctcctgtcaattcctacactaacaccccttacaccggggcgcttgggcttctcgattttgcactggagcttgagttcagg

SEQ ID NO: 82151 - DNA, 80 bp, synthetic construct
  source 1..80: mol_type = other DNA
ggttgacgccgtctctagccctgcccggcctgatttgggttttatgtctgagccttctttacctagtagggccgccacac

SEQ ID NO: 82152 - DNA, 80 bp, synthetic construct
  source 1..80: mol_type = other DNA
aacatctggtttttctagtgatttttccccccctgaggcagccgtcgcagcgccggctgctaccccgggttcacgtcacc

SEQ ID NO: 82153 - DNA, 80 bp, synthetic construct
  source 1..80: mol_type = other DNA
tacatctggtttctcaagtgagttctccccccctgaggcggcttttgccgccccagctctcgatagggggctgccctcgg

SEQ ID NO: 82154 - DNA, 80 bp, synthetic construct
  source 1..80: mol_type = other DNA
tcggttagtaagcctactagcctgcccagccctgttacatctaagccccccgcttgtaagccgcccccaccgccgccggc

SEQ ID NO: 82155 - DNA, 80 bp, synthetic construct
  source 1..80: mol_type = other DNA
ctgttacatctaagccccccgcttgtaagccgcccccaccgccgccggctcgtacccgccggctcctttacacttacccg

SEQ ID NO: 82156 - DNA, 80 bp, synthetic construct
  source 1..80: mol_type = other DNA
gcaccccttcttctgttagtgacgcctgggtgctcccaccgccctctgaggggtcagtggccaccccactgcctgcagct

SEQ ID NO: 82157 - DNA, 80 bp, synthetic construct
  source 1..80: mol_type = other DNA
tttgggtgctgccgtcacttcctgaagaatcccaggttgatgcgatgccggccacccccgtccccgagcctgctcgaccg

SEQ ID NO: 82158 - DNA, 80 bp, synthetic construct
  source 1..80: mol_type = other DNA
acatccggtttttctagtgacttctccccccccgaggcagccgccgcagcgccggctgctgccccggggttacgccaccc

SEQ ID NO: 82159 - DNA, 80 bp, synthetic construct
  source 1..80: mol_type = other DNA
tacatctggcttttctagtgacttttcaccccccgaggcggctaccgccgtcccggcccctgatatggggttacccttgg

SEQ ID NO: 82160 - DNA, 80 bp, synthetic construct
  source 1..80: mol_type = other DNA
catgcattgaaatagttgtggcaatgctactatttgctatccatactgtccaaaaaagtaccttgttctataactccaga

SEQ ID NO: 82161 - DNA, 80 bp, synthetic construct
  source 1..80: mol_type = other DNA
tccatactgtccaaaaaagtaccttgttctataactccagaaaagaattaaaaaagggggggggggctagagaggagtga

SEQ ID NO: 82162 - DNA, 80 bp, synthetic construct
  source 1..80: mol_type = other DNA
cttaatgattgtacatttgaattatcacagatggtacaatgggcctacgataatgacatagtagacgatagtgaaattgc

SEQ ID NO: 82163 - DNA, 80 bp, synthetic construct
  source 1..80: mol_type = other DNA
aataaccaggaggcaactgagagagaatgctgacgacaagggtaatgtatgcttcatgatagatcacaggggcgttgttg

SEQ ID NO: 82164 - DNA, 80 bp, synthetic construct
  source 1..80: mol_type = other DNA
cttccatagaattaattagaggcgggacttatgaccatgacatataccgatatgaggcactgagcaaccggttccagatc

SEQ ID NO: 82165 - DNA, 80 bp, synthetic construct
  source 1..80: mol_type = other DNA
agaggtgttgaactgaaatctggatacaaagactggattctgaggatttcctttgccatatcatgctttttgctttgtgt

SEQ ID NO: 82166 - DNA, 80 bp, synthetic construct
  source 1..80: mol_type = other DNA
aattcatcactgaaggcttcacttggacaggagtgagccagaatggagggagcggtgcctgcaaaagagggcctgccaac

SEQ ID NO: 82167 - DNA, 80 bp, synthetic construct
  source 1..80: mol_type = other DNA
gaaaaccttaggggctatagtctaaagctaactgctgaaaatgcctttgacagtgatagcccagacaaaaaaatgcttcc

SEQ ID NO: 82168 - DNA, 80 bp, synthetic construct
  source 1..80: mol_type = other DNA
acctaacctgtggaaatctactaatgtgggaggctgtaactgtaaaaacagaggttattggaataactagcatgcttaac

SEQ ID NO: 82169 - DNA, 80 bp, synthetic construct
  source 1..80: mol_type = other DNA
ttaaagcaaagcccagactaaaacgttcggcccctactacccgtgcaccatccaccaaacgcaaaaaggttaaaaaataa

SEQ ID NO: 82170 - DNA, 80 bp, synthetic construct
  source 1..80: mol_type = other DNA
tgttctttttttctagacgtgagcagatgtttgttaaacactttttttatagggctggaaaacttggcgaggctgtcccg

SEQ ID NO: 82171 - DNA, 80 bp, synthetic construct
  source 1..80: mol_type = other DNA
gatgacctttatattaaagggtccggtaatactgcagttatccaaagtagtgcattttttccaactcctagtggctctat

SEQ ID NO: 82172 - DNA, 80 bp, synthetic construct
  source 1..80: mol_type = other DNA
aagagaggattatttggagctatagcaggttttatagagggaggatggcagggaatggtagatggttggtatgggtacca

SEQ ID NO: 82173 - DNA, 80 bp, synthetic construct
  source 1..80: mol_type = other DNA
aatcataacacaggtgtgacggcatcatgtcaacatgctggaacaaacagcttctacagaaatttaatatggctgaccaa

SEQ ID NO: 82174 - DNA, 80 bp, synthetic construct
  source 1..80: mol_type = other DNA
aaaaggaacgtcatacccaaggatcaacaaatactacattaacaataaagagaaggaagttctagtgctatgggccattc

SEQ ID NO: 82175 - DNA, 80 bp, synthetic construct
  source 1..80: mol_type = other DNA
ccgtttttatctcgtgtacaaaccgagattcttattaatttgatgcaaccccggcagttggttttccgccctgaggtgct

SEQ ID NO: 82176 - DNA, 80 bp, synthetic construct
  source 1..80: mol_type = other DNA
cccgggctggtcgttccatggaggttggagctcacccgagatccattaatgataaccccaatgtcttgcatcgtgcttct

SEQ ID NO: 82177 - DNA, 80 bp, synthetic construct
  source 1..80: mol_type = other DNA
cccgggccggtcgttgtttagaggttggagcccacccgaggtccattaacgacaaccctaatgtttgcatcgggcttctt

SEQ ID NO: 82178 - DNA, 80 bp, synthetic construct
  source 1..80: mol_type = other DNA
ggagaccgatcaaggtggcttttcgggcttgtgccaacatataatcatctcaggactattctgcactaatcaatgtgata

SEQ ID NO: 82179 - DNA, 80 bp, synthetic construct
  source 1..80: mol_type = other DNA
tgggaggcaatattacaagggtgggaatgtttacttacatgggttctgggccatattaaggaattgcactataaaccctg

SEQ ID NO: 82180 - DNA, 80 bp, synthetic construct
  source 1..80: mol_type = other DNA
ttgatcaataagttatgaatgtactttaggtaaattaggaactaggttaattataggttaattataggttatcaatagtg

SEQ ID NO: 82181 - DNA, 80 bp, synthetic construct
  source 1..80: mol_type = other DNA
ttatgttgtaggtataatttagatttaagtataagttaagcttatgtatccttagattaagattaggtgtaggtttaagt

SEQ ID NO: 82182 - DNA, 80 bp, synthetic construct
  source 1..80: mol_type = other DNA
atactaacactaactccacacatctctacctcatcccaatacccttccctttaatctacctcatttattctacctcatta

SEQ ID NO: 82183 - DNA, 80 bp, synthetic construct
  source 1..80: mol_type = other DNA
aagaagatagtgattaaaggtggctttccgggcttgtgccagcagttattcatctcagggctattctgcactaatcaatg

SEQ ID NO: 82184 - DNA, 80 bp, synthetic construct
  source 1..80: mol_type = other DNA
agtaattgatttatactttgtttattatatcatgtaattataggatagtgatttgtatgatttgatcgatgatgcatcgc

SEQ ID NO: 82185 - DNA, 80 bp, synthetic construct
  source 1..80: mol_type = other DNA
tgattgatcaaggatcgatgaatacaactcaaacatattatgaatttatacaaatactagtttgtaagtgatttagttgt

SEQ ID NO: 82186 - DNA, 80 bp, synthetic construct
  source 1..80: mol_type = other DNA
aatttcagttatagatatagagtaagtttagaataatcagttaatttagacataattaggttaagttatagacaagtagg

SEQ ID NO: 82187 - DNA, 80 bp, synthetic construct
  source 1..80: mol_type = other DNA
ttaagtataagtataggtgtaagtctttagatcaatttactaacaatcaatgccattggatgtaaatttcgttcctagct

SEQ ID NO: 82188 - DNA, 80 bp, synthetic construct
  source 1..80: mol_type = other DNA
ttaaagagatttccaatcaggaacctctaaaactctaaacagctggaataatcaaagattgctgtttctgatggctttct

SEQ ID NO: 82189 - DNA, 80 bp, synthetic construct
  source 1..80: mol_type = other DNA
ttactggttggtcaatgattaaacctcttattagcattaatatataatcattatatagtagttattgtaagtcttatgta

SEQ ID NO: 82190 - DNA, 80 bp, synthetic construct
  source 1..80: mol_type = other DNA
gatgatgtgtcaagaatgctaaacaagagggagtttctggacttgtgtcaattatttactcatctcaggatctatcctta

SEQ ID NO: 82191 - DNA, 80 bp, synthetic construct
  source 1..80: mol_type = other DNA
atgtgactaatcagatcaatagagatagggggttattactaattacgggtaaggggacattattcttattgcactatggg

SEQ ID NO: 82192 - DNA, 80 bp, synthetic construct
  source 1..80: mol_type = other DNA
ttaagggccattatatcatattgcactatgggtttggtaggtttatattgagttagaatcacattattaatttagaatta

SEQ ID NO: 82193 - DNA, 80 bp, synthetic construct
  source 1..80: mol_type = other DNA
attaggtgtaagttgatgatagactagcagtatgaaatcattgattgattagctatgtctgattatgatgatcattgtat

SEQ ID NO: 82194 - DNA, 80 bp, synthetic construct
  source 1..80: mol_type = other DNA
atgtaagtatagattaattctttttattttttttaggttaaggattactaataattatatatgctatttgatgtaaattt

SEQ ID NO: 82195 - DNA, 80 bp, synthetic construct
  source 1..80: mol_type = other DNA
aagcttatttcctcaacagacaaaggcaagtcaatgaatccactgttcaggacatattggacttaatagatcatgctgag

SEQ ID NO: 82196 - DNA, 80 bp, synthetic construct
  source 1..80: mol_type = other DNA
acaggtgtagatgaattactcaataaattctatgaaaatgagctaggtaaatatatgctatccattctacgtaagactac

SEQ ID NO: 82197 - DNA, 80 bp, synthetic construct
  source 1..80: mol_type = other DNA
tcctcaataggtcacaaactaatccgaatgtgatagatatgtatgagcaaactaagcattgtaaagcccaagcaagaatt

SEQ ID NO: 82198 - DNA, 80 bp, synthetic construct
  source 1..80: mol_type = other DNA
aaaggcattgagatgggcatcaggtatgtcagaaataattaccagtacaggtaaagtgatcaggcttaaaaggaggctga

SEQ ID NO: 82199 - DNA, 80 bp, synthetic construct
  source 1..80: mol_type = other DNA
tgcttggcatctaggtcatctcgtaagagatataactgagagtctcattgcacatgctggtttgcgtaggtctaaatact

SEQ ID NO: 82200 - DNA, 80 bp, synthetic construct
  source 1..80: mol_type = other DNA
gcaacctccctgaagaggcaaaaatccatttagagacaattgaatgggcacgaaaatttcagtgcaaagaatcaaaatat

SEQ ID NO: 82201 - DNA, 80 bp, synthetic construct
  source 1..80: mol_type = other DNA
ggagatattctccttaaagagggatacacaattgattcagtgttgagtggagaggtggatgtggagcagcagttattctg

SEQ ID NO: 82202 - DNA, 80 bp, synthetic construct
  source 1..80: mol_type = other DNA
taccttgtattgtgtataagcattgtgtgttaaggactggtttacgtacaaaacagcctataaataaagaatttatgatt

SEQ ID NO: 82203 - DNA, 80 bp, synthetic construct
  source 1..80: mol_type = other DNA
atggaaaaatatagagagattcatcagagagttaaagatcaagcacctggcactgtatcagcattagagtgtatagatct

SEQ ID NO: 82204 - DNA, 80 bp, synthetic construct
  source 1..80: mol_type = other DNA
atagcatataagtatttaagtctcacaaaagaagagctcattaattactacagtccgaaagtccattttcaggcaagtca

SEQ ID NO: 82205 - DNA, 80 bp, synthetic construct
  source 1..80: mol_type = other DNA
gaatgtaaaagagcccggcactcttaaaatcggattgtcacaactgaacccgacttctaaagcaatcattgataatgttg

SEQ ID NO: 82206 - DNA, 80 bp, synthetic construct
  source 1..80: mol_type = other DNA
ggaaacataaaacagataaaggtatcttcggggagataatagacagtattaatatttcaagtcagatccaactaaacaat

SEQ ID NO: 82207 - DNA, 80 bp, synthetic construct
  source 1..80: mol_type = other DNA
tgttcaaaaactatagagaaaatattgtctaatttagaagttaatattggtgaaactcatataactatcccaacacctaa

SEQ ID NO: 82208 - DNA, 80 bp, synthetic construct
  source 1..80: mol_type = other DNA
taagacaacaggagtagatgagcttttaagtaaattttatgacaatgagatgggaaggtatctgcttagcatcctcagga

SEQ ID NO: 82209 - DNA, 80 bp, synthetic construct
  source 1..80: mol_type = other DNA
aaactgcagcatggcatttgggtcatcttgttagagatatcacagaaagcttaattgctcattctgggctcagaagatca

SEQ ID NO: 82210 - DNA, 80 bp, synthetic construct
  source 1..80: mol_type = other DNA
tcctgccatccaaatctttagaggttgttggctcatatattcgatatttcacagtatttaaggacggaataggattacta

SEQ ID NO: 82211 - DNA, 80 bp, synthetic construct
  source 1..80: mol_type = other DNA
gaccaagaaaatcttgattcaaaggctgagattgacggagttgtgtggtgctattcaaaagtcatgagtattgatctaaa

SEQ ID NO: 82212 - DNA, 80 bp, synthetic construct
  source 1..80: mol_type = other DNA
taaaagctcactagatgtctatctttactctataattaaaactctgctaataaatttagcacagaacaataaaattaggt

SEQ ID NO: 82213 - DNA, 80 bp, synthetic construct
  source 1..80: mol_type = other DNA
ttacaatatagattcagttatcaaaggtgatgtcgttgtagaacagcaattgttttgtcaagaagttgtagaattaagtg

SEQ ID NO: 82214 - DNA, 80 bp, synthetic construct
  source 1..80: mol_type = other DNA
agatatatagatggtatggatgaatgctcaaatgctgtatctgacttcctttcatttttctctggaggtgtatctgccat

SEQ ID NO: 82215 - DNA, 80 bp, synthetic construct
  source 1..80: mol_type = other DNA
tgttaaagggaattggttacaggggaatttaaacaagtgttcgtcattattcggatctgctatctctttactcttcagag

SEQ ID NO: 82216 - DNA, 80 bp, synthetic construct
  source 1..80: mol_type = other DNA
cattggacttaggtgcatgccctcagttagggcaattggctatagttttatgtacaagcaaggttgagaggctgtatggg

SEQ ID NO: 82217 - DNA, 80 bp, synthetic construct
  source 1..80: mol_type = other DNA
gaaacatttaaaatatgaagatgggttaaaatttattgaaagcttgttagatattgagactaaacgtggcaatattccac

SEQ ID NO: 82218 - DNA, 80 bp, synthetic construct
  source 1..80: mol_type = other DNA
actgcagatggtatggtcaattctccaacagcttttttgaaggccaagaaatcatacataccgattcctttaggcggtga

SEQ ID NO: 82219 - DNA, 80 bp, synthetic construct
  source 1..80: mol_type = other DNA
aatcatacagaattacatttgctgtagttgctgtaaagacagatggatctaatatatcaacacaatggcctagtaggaga

SEQ ID NO: 82220 - DNA, 80 bp, synthetic construct
  source 1..80: mol_type = other DNA
caagtgatgaaggagggtgtctacagagaacttggattagatataggttcacctgaagtattaaaaagaatagcaccttt

SEQ ID NO: 82221 - DNA, 80 bp, synthetic construct
  source 1..80: mol_type = other DNA
tgtcattatataaccagaaggagaatattgggttgcaggatgatttagctgcaacacgattgtgtattgaagtatggaga

SEQ ID NO: 82222 - DNA, 80 bp, synthetic construct
  source 1..80: mol_type = other DNA
ttttactttacgatgtattaggctataaaagtgtgctccagatgcaagccaataggcgagcatattcaggaaaacaatat

SEQ ID NO: 82223 - DNA, 80 bp, synthetic construct
  source 1..80: mol_type = other DNA
gtgcgagattggagattttttggtcaaaaagagagtacattcttgagacatctattacacaacggcatgttttaaaatta

SEQ ID NO: 82224 - DNA, 80 bp, synthetic construct
  source 1..80: mol_type = other DNA
agtggggtaaacctaatgtcccatgcattgtttataaacattgtgctttaaggactggtttacggacacgtcagccaatt

SEQ ID NO: 82225 - DNA, 80 bp, synthetic construct
  source 1..80: mol_type = other DNA
cctgttcgactcatcaagagttgggtatctaaaggtcttgccatagacaaagtatacaatcctgttggtattgtgctgat

SEQ ID NO: 82226 - DNA, 80 bp, synthetic construct
  source 1..80: mol_type = other DNA
ctctggaggccatgtttaaccttaaattccatgtgtctggccctaaacttcgattttttagtattcctgattatcgccca

SEQ ID NO: 82227 - DNA, 80 bp, synthetic construct
  source 1..80: mol_type = other DNA
gacattggtaagagagaaagggatacagcctgaagacatattacctgattctttattttcatttaggcatgtagatgtgc

SEQ ID NO: 82228 - DNA, 80 bp, synthetic construct
  source 1..80: mol_type = other DNA
ttcttagaagactttttcctcgtgattccacatccatattctattgattaagcttcttctcttgttcatacaaaatgcat

SEQ ID NO: 82229 - DNA, 80 bp, synthetic construct
  source 1..80: mol_type = other DNA
tccatattctattgattaagcttcttctcttgttcatacaaaatgcataataaactgttcttttcccggagcatactact

SEQ ID NO: 82230 - DNA, 80 bp, synthetic construct
  source 1..80: mol_type = other DNA
atttatgttcaaggaagtcacaggcaacaacgttgcccaggcattcgatcattatgaacaagaacatatgtcaaactatt

SEQ ID NO: 82231 - DNA, 80 bp, synthetic construct
  source 1..80: mol_type = other DNA
ctgagtctcgtaagcccagaaatttcttactattacaactgacggttcaaggtgtctatttgccttctactattagttca

SEQ ID NO: 82232 - DNA, 80 bp, synthetic construct
  source 1..80: mol_type = other DNA
accagtgtgatactcgtcttggctgtttagagatttctaagatccaaccagagacaccagtccaggcattagcactagat

SEQ ID NO: 82233 - DNA, 80 bp, synthetic construct
  source 1..80: mol_type = other DNA
atggaaaaatatagagaaattcatcagagagtgaaagaccaagccccaggcacggtctcagcattagaatgtattgatct

SEQ ID NO: 82234 - DNA, 80 bp, synthetic construct
  source 1..80: mol_type = other DNA
gtctcaataaagatgagctaattaattactatagtccgaagatccattttcaatcaagtgtaaatgttaaagaacctggc

SEQ ID NO: 82235 - DNA, 80 bp, synthetic construct
  source 1..80: mol_type = other DNA
acgcttaagattggtctttcacaacttaatcctgtctcaaaggcagtgatagagaatgtaggtaaacataagtctgaaaa

SEQ ID NO: 82236 - DNA, 80 bp, synthetic construct
  source 1..80: mol_type = other DNA
aaatagtggagaagatattatcaaatttggagattaatattggtgaaacacatgcgtctattcctacacccaataaaact

SEQ ID NO: 82237 - DNA, 80 bp, synthetic construct
  source 1..80: mol_type = other DNA
acaggtgttgatgagttgctaaacaagttttatgacaatgagattggaaagtacatgatttctatattaagaaaaactgc

SEQ ID NO: 82238 - DNA, 80 bp, synthetic construct
  source 1..80: mol_type = other DNA
aggtagtaggctcatatattcgttattttactgtgttcaaagatgggattggattactggatcatgacaacttagactca

SEQ ID NO: 82239 - DNA, 80 bp, synthetic construct
  source 1..80: mol_type = other DNA
aaagttgagattgatggtgtggtttggtgttattcaaaggtaatgagtatagatttaaatagattactagcacttaatat

SEQ ID NO: 82240 - DNA, 80 bp, synthetic construct
  source 1..80: mol_type = other DNA
tgtgtatctttattctgtgattaaattgttgctggtcagccttgcacagaataataaggttagattctattcaaaggtac

SEQ ID NO: 82241 - DNA, 80 bp, synthetic construct
  source 1..80: mol_type = other DNA
gatacaatattgagtctgtaatcaaaggggaagttatagttgaacaacaactattctgtcaggaaatcgtggagttgtgt

SEQ ID NO: 82242 - DNA, 80 bp, synthetic construct
  source 1..80: mol_type = other DNA
gcacaggagttaaataagtatttacaggctaagtctcaaatcctctgtgcaaacatcatgaataaacactgggatagacc

SEQ ID NO: 82243 - DNA, 80 bp, synthetic construct
  source 1..80: mol_type = other DNA
aaaatgtctaaaatatgaagacgggttaagatttatagaaagtttgctggaaacagaagcaaaaaggggtaacctgcctc

SEQ ID NO: 82244 - DNA, 80 bp, synthetic construct
  source 1..80: mol_type = other DNA
aaatctataagatcacattttcagttgtagctgttaaaactgatggttcaaatatatctactcaatggcctagcagaaga

SEQ ID NO: 82245 - DNA, 80 bp, synthetic construct
  source 1..80: mol_type = other DNA
tcatgaaagaaggtatttatcgggaattaggcttagatattgggtcacctgaggtattgaaaagaattgcaccattatta

SEQ ID NO: 82246 - DNA, 80 bp, synthetic construct
  source 1..80: mol_type = other DNA
tgtcactttacactcataaagataatgtaggccttcaggatgacttggcagctactagactttgtattgaagtatggaga

SEQ ID NO: 82247 - DNA, 80 bp, synthetic construct
  source 1..80: mol_type = other DNA
ggggtgtgataaagattttggagccggttcgtcttataaagagttgggtatcaaagggcttggcaatagataaagtctac

SEQ ID NO: 82248 - DNA, 80 bp, synthetic construct
  source 1..80: mol_type = other DNA
tgagccagatatagaaaatgtattacagtactgtagaaactggttgactgaagaacacacatttgtgtttaaggaggtaa

SEQ ID NO: 82249 - DNA, 80 bp, synthetic construct
  source 1..80: mol_type = other DNA
ctggtgcaaatgttgcccaaatttttgaacaacatgagcaacatcacatgttacgatattctgagtccagaaaaccaaga

SEQ ID NO: 82250 - DNA, 80 bp, synthetic construct
  source 1..80: mol_type = other DNA
aacttcttattgatacagctcacagttcaaggagtgtatctaccatctacaatcagttctgatcaatgtgatacgaggat

SEQ ID NO: 82251 - DNA, 80 bp, synthetic construct
  source 1..80: mol_type = other DNA
tggatgtctagagatctcaaagcatcagccagaaactccagtgcaagcattagcattagatattgcatataaatatttaa

SEQ ID NO: 82252 - DNA, 80 bp, synthetic construct
  source 1..80: mol_type = other DNA
tttaagtctaacaaaggatgaacttgtaaacttctatagtccaagggttcatttccaacctagtgccaatgtgaaagaac

SEQ ID NO: 82253 - DNA, 80 bp, synthetic construct
  source 1..80: mol_type = other DNA
gtaagcataaaaaggataaaggggtatttggtgaaatgattgagagtatcaatattgccagtcagatacaaataaatgct

SEQ ID NO: 82254 - DNA, 80 bp, synthetic construct
  source 1..80: mol_type = other DNA
tgtgccaaggtcatagaacagatattgtcaaacctagaaatcaacattggtgagataaatgcaagcatgcccaaccctca

SEQ ID NO: 82255 - DNA, 80 bp, synthetic construct
  source 1..80: mol_type = other DNA
caaaactacaggtgttgatgaactgctcaataaattttatgataatgaattaggtaagtatatgctgtctattttgcgga

SEQ ID NO: 82256 - DNA, 80 bp, synthetic construct
  source 1..80: mol_type = other DNA
ctgtgcatgcttacgaccatggcaatgttattttgtttattctcccttcaaaatccttagaagttgtaggttcttatatc

SEQ ID NO: 82257 - DNA, 80 bp, synthetic construct
  source 1..80: mol_type = other DNA
aggtacttcactgtatttaaggatggcattgggctagttgattcagataatattgattcaaaggccgatgtggatggggt

SEQ ID NO: 82258 - DNA, 80 bp, synthetic construct
  source 1..80: mol_type = other DNA
aatttggtgttactctaaggtcatgagtattgatttgaatagacttttggctttaaatattgcatttgaaaagtcacttc

SEQ ID NO: 82259 - DNA, 80 bp, synthetic construct
  source 1..80: mol_type = other DNA
acaacttgcgttatctaattccatctgttacatccctatattcaggctatgagttattgattgaaaaattctttgaacga

SEQ ID NO: 82260 - DNA, 80 bp, synthetic construct
  source 1..80: mol_type = other DNA
aagtggagaggtagctgtagagcagcaattattttgtcaggaagtatctgagttaagtgcacaggaattaaataagtatt

SEQ ID NO: 82261 - DNA, 80 bp, synthetic construct
  source 1..80: mol_type = other DNA
tggcgacaagaagatattaaacatccaaaatgcacttgaaaaggcattgagatgggcgtcaggtatgtcagagattgtta

SEQ ID NO: 82262 - DNA, 80 bp, synthetic construct
  source 1..80: mol_type = other DNA
ctagcacaggcaaagtcattaggcttaaaagaagactaatgtatgttagtgctgatgcaacgaaatggtcccctggtgat

SEQ ID NO: 82263 - DNA, 80 bp, synthetic construct
  source 1..80: mol_type = other DNA
ttagatcttggtgcatgcccacagctagcacagctggctatagttctctgtacaagtaaagttgaacggttatatggcac

SEQ ID NO: 82264 - DNA, 80 bp, synthetic construct
  source 1..80: mol_type = other DNA
aaaaaaagcttaaatatgaagagggattaaagtttgtagagagtctactagaactagaggcaagacgaggcaatctcaca

SEQ ID NO: 82265 - DNA, 80 bp, synthetic construct
  source 1..80: mol_type = other DNA
atgcatatttggcagactggacaaggcagcaccctgtatatgactatattataccaagaggccgagataacctccttgtt

SEQ ID NO: 82266 - DNA, 80 bp, synthetic construct
  source 1..80: mol_type = other DNA
tgttggctgcagcagacagttttgctacgaattatatcccaactgagagagacatggatttgttcaacacattagttagt

SEQ ID NO: 82267 - DNA, 80 bp, synthetic construct
  source 1..80: mol_type = other DNA
tgcacattctccaaagagtatgcatggaaagactttttgaatgaggttcggtgtgaggtgctaacaaccaggcatattca

SEQ ID NO: 82268 - DNA, 80 bp, synthetic construct
  source 1..80: mol_type = other DNA
gatgaaggatggagtttatcgagagttaggattagacattagttcaccggatgttctcaaaaggatagccccattgttgt

SEQ ID NO: 82269 - DNA, 80 bp, synthetic construct
  source 1..80: mol_type = other DNA
caagcctacaagattacattttcagtagtggcagttaagacagatggctctaatatatctacgcaatggcctagccgtag

SEQ ID NO: 82270 - DNA, 80 bp, synthetic construct
  source 1..80: mol_type = other DNA
aggaggtattaaaggcaatgtcattatacagtatgaaggaaaatataggtttacaagatgatatagctgctagtcggcta

SEQ ID NO: 82271 - DNA, 80 bp, synthetic construct
  source 1..80: mol_type = other DNA
tgctaatccaaactgaagatatagaagttaagaagataagaggggtaacaagggtcttggaacctgttcgcctactaaag

SEQ ID NO: 82272 - DNA, 80 bp, synthetic construct
  source 1..80: mol_type = other DNA
ggcttcacttgaggcaatgtttaatttgaagttccatgtgtcaggtcccaagctcagatatttcaatatccctgactaca

SEQ ID NO: 82273 - DNA, 80 bp, synthetic construct
  source 1..80: mol_type = other DNA
tatccacattctactagactgcagtctgatcttattcatatgtgctgtactttgtagtgttcttttcccggagcatacta

SEQ ID NO: 82274 - DNA, 80 bp, synthetic construct
  source 1..80: mol_type = other DNA
gacctcaacaattatgtgacccgagcatcgataatctcatccattattgtaagggttggttgactgaagagcataagttt

SEQ ID NO: 82275 - DNA, 80 bp, synthetic construct
  source 1..80: mol_type = other DNA
gtcttcaaggaagttactggaggcaatgtcattcaggcctttgaagggcatgaacaatgtcatttggataaatacagcga

SEQ ID NO: 82276 - DNA, 80 bp, synthetic construct
  source 1..80: mol_type = other DNA
aggattggctgtctagaggtctcaaagcatcagcctgaaacaccaattcagatattagccttagatattgcatacaagta

SEQ ID NO: 82277 - DNA, 80 bp, synthetic construct
  source 1..80: mol_type = other DNA
gtagacaataatgttgtagtctactgtaatgggcagaagaaggtgattctaacaaaaacactagttataggacaatgtat

SEQ ID NO: 82278 - DNA, 80 bp, synthetic construct
  source 1..80: mol_type = other DNA
caataaaggtctgtattgtaggaacagtgtcgaaacttcagccatcagacacattattattcctaggtcctttggagcaa

SEQ ID NO: 82279 - DNA, 80 bp, synthetic construct
  source 1..80: mol_type = other DNA
atggtaactggatagttgtggtggtgctagtgattattctctttatttccattattttgtttagctttctttgccctaaa

SEQ ID NO: 82280 - DNA, 80 bp, synthetic construct
  source 1..80: mol_type = other DNA
aagccactcaaagtgctctacaagcccattttggcatatgtaagcttacaggccggtttcacgaagcattaaaaaaatcc

SEQ ID NO: 82281 - DNA, 80 bp, synthetic construct
  source 1..80: mol_type = other DNA
ggacaggctatttgcctatctctggtgaaatggagaaaatcactggttgtacagttttctgcaccttggctggcccaggt

SEQ ID NO: 82282 - DNA, 80 bp, synthetic construct
  source 1..80: mol_type = other DNA
gcagatgttatgtggggcttgtatggggtttcttattaacaattgaactaatcttgtgggcagccagtgcagaaacttct

SEQ ID NO: 82283 - DNA, 80 bp, synthetic construct
  source 1..80: mol_type = other DNA
ctccttgagtctggatggtctgatacagctcatgggataggtgagattcctttaaagacagacttagaactggatttctc

SEQ ID NO: 82284 - DNA, 80 bp, synthetic construct
  source 1..80: mol_type = other DNA
tttgccatcatcatcttcatatagttataggagaaaactaacaaatcctgccaatggagaggagtctgttccttttcact

SEQ ID NO: 82285 - DNA, 80 bp, synthetic construct
  source 1..80: mol_type = other DNA
tgaaagttcatgcaactttgacctctacactacatcttctactcagaagagtttcacacaggtagagtggaaaaagaaaa

SEQ ID NO: 82286 - DNA, 80 bp, synthetic construct
  source 1..80: mol_type = other DNA
caaaactccaaccatcagacacattattatttttaggccctctagagcagggtggtctcatcttaaagcagtggtgtaca

SEQ ID NO: 82287 - DNA, 80 bp, synthetic construct
  source 1..80: mol_type = other DNA
gtgacacaactgatactactgaggctgctgccacaacatttgaggcacaagtgaaaaccacaaacttaagaggaacatgt

SEQ ID NO: 82288 - DNA, 80 bp, synthetic construct
  source 1..80: mol_type = other DNA
tatgccctagacggagccataaaaagactgtgtaaaggtcatcaatatcagctaacagcatatactcacatattacattt

SEQ ID NO: 82289 - DNA, 80 bp, synthetic construct
  source 1..80: mol_type = other DNA
aatacacatactcattattaatcccattatattatatttgtataaacttatgtaggtttaacatcatttcccctataagc

SEQ ID NO: 82290 - DNA, 80 bp, synthetic construct
  source 1..80: mol_type = other DNA
cctataagcaattatattttagttaaaaaaaactaaaactttactatcataaaatctcatatccttttaccgaggctttt

SEQ ID NO: 82291 - DNA, 80 bp, synthetic construct
  source 1..80: mol_type = other DNA
gtgcttgcatcagagttgtatgataccttgaaaagggttaagaagacagtgctatgttatgatttaatttgtaaccagac

SEQ ID NO: 82292 - DNA, 80 bp, synthetic construct
  source 1..80: mol_type = other DNA
acattgtcaacctactgtataccttatagcacctgtcatcacctgtatgacaataaggagttgcatggccaatctcttaa

SEQ ID NO: 82293 - DNA, 80 bp, synthetic construct
  source 1..80: mol_type = other DNA
tatgaggtagttacactttcagtcacctgcttttttactgcaaaaaaagctgaccaatacaagatagtaaagacatttga

SEQ ID NO: 82294 - DNA, 80 bp, synthetic construct
  source 1..80: mol_type = other DNA
ctcaaggggtccttagaatcataggtccaattacagccaaagtcccaagtacaagctctactgataccttacaaggtatt

SEQ ID NO: 82295 - DNA, 80 bp, synthetic construct
  source 1..80: mol_type = other DNA
tcaaaaaattaacaaagtgaatataaaatggaagggtggtatttgatcatcttgggagtctgctctacactgacgcttgc

SEQ ID NO: 82296 - DNA, 80 bp, synthetic construct
  source 1..80: mol_type = other DNA
ttatcgggtcaactgaacttgggttaatatcaattgaatctgcagttgacctaaaactagagagctcatgcaacttcgac

SEQ ID NO: 82297 - DNA, 80 bp, synthetic construct
  source 1..80: mol_type = other DNA
tcccaacaatcacattggctgtcttgaaatgcttgaaagtgttgacattttcatgttcccattacacaaatgaatcaaag

SEQ ID NO: 82298 - DNA, 80 bp, synthetic construct
  source 1..80: mol_type = other DNA
aattaaagtatgcattattgggactgtctcgaaactacgaccatctgacactttgcttttcttgggaccactagaacaag

SEQ ID NO: 82299 - DNA, 80 bp, synthetic construct
  source 1..80: mol_type = other DNA
aatggtaattggatagttgtcgtggtccttgttttgattctaattgtgtccatcatattatttagtatcctgtgtccccg

SEQ ID NO: 82300 - DNA, 80 bp, synthetic construct
  source 1..80: mol_type = other DNA
acgaggacataagaagaacatgtagttataaacttatctaactatttactatacgactgtattaacccattgactgcact

SEQ ID NO: 82301 - DNA, 80 bp, synthetic construct
  source 1..80: mol_type = other DNA
acctcaagggaacttgtgttctggcacctgaactgtatgatacattaaaaaaggtcaagaagactgtcctatgttatgac

SEQ ID NO: 82302 - DNA, 80 bp, synthetic construct
  source 1..80: mol_type = other DNA
tatacatacctacatgaaactattgcactttattcttattaatagcatatagttatatctagtactgacatataaccttt

SEQ ID NO: 82303 - DNA, 80 bp, synthetic construct
  source 1..80: mol_type = other DNA
atctagtactgacatataacctttagctaaaaaaaacaaacactttactaatatacaattccatagtctcttaccgaggc

SEQ ID NO: 82304 - DNA, 80 bp, synthetic construct
  source 1..80: mol_type = other DNA
ccatctatttgattgcaccagtaggaacatgtatgtcaatacggagttgtatggtgagtgtgttttccagtcgaatacaa

SEQ ID NO: 82305 - DNA, 80 bp, synthetic construct
  source 1..80: mol_type = other DNA
gtcatttatgagaagactcattgtgtaactggtcagttgatagaaggccaatgttttaaccctgtacacacattaacatt

SEQ ID NO: 82306 - DNA, 80 bp, synthetic construct
  source 1..80: mol_type = other DNA
aatacagaatgcacaagggcacctgagaatagtagggcctgtcacggctaaagtacccagtactagttcttctgagactc

SEQ ID NO: 82307 - DNA, 80 bp, synthetic construct
  source 1..80: mol_type = other DNA
gaagcagaacatcaacaaaaaaagagacagtatggaagggtggtggttcaccatccttggggtctgctatgccctaacag

SEQ ID NO: 82308 - DNA, 80 bp, synthetic construct
  source 1..80: mol_type = other DNA
ggtctgagcagaagattaacttcatgtgccagcgtattgataataatgtagtggtttattgcaatggccaaaaaaaggtt

SEQ ID NO: 82309 - DNA, 80 bp, synthetic construct
  source 1..80: mol_type = other DNA
attttgacaaagacacttgttatcggccaatgtatatacacatttacaagcttattctcattaatgccagatgtagccca

SEQ ID NO: 82310 - DNA, 80 bp, synthetic construct
  source 1..80: mol_type = other DNA
agttaaggtctgtattatcgggaccgtgtctaaaatccagccctctgatacattgttatttctagggccattagaacaag

SEQ ID NO: 82311 - DNA, 80 bp, synthetic construct
  source 1..80: mol_type = other DNA
ggggttcaggagtagggttcactttaacatgtgtggtgggtctaacagaatgtcctagctttattacatctgttaaagca

SEQ ID NO: 82312 - DNA, 80 bp, synthetic construct
  source 1..80: mol_type = other DNA
acgtagtcataagaagaatgtgtgatctattgtaatatttactaaaagatttactaaaatttactcaaattttaaccatt

SEQ ID NO: 82313 - DNA, 80 bp, synthetic construct
  source 1..80: mol_type = other DNA
attaattcacaaagtccattgtatccagtcacttgaccattatcaaacttactaacttataaactatattgctttattac

SEQ ID NO: 82314 - DNA, 80 bp, synthetic construct
  source 1..80: mol_type = other DNA
ttcataattgacaaatagattaccaaaaaaaacaagatctgtactcccatataattccatatcttttaaccgaggctttt

SEQ ID NO: 82315 - DNA, 80 bp, synthetic construct
  source 1..80: mol_type = other DNA
acttaatttgtaatcagacacagtgtcaacctacagtatacctaattgcccctgtgggaacatgtatgtcgattagaagt

SEQ ID NO: 82316 - DNA, 80 bp, synthetic construct
  source 1..80: mol_type = other DNA
tgcatggccaatttattaactaaccgaattcaaattacgtttgaaaggacacattgcgttacaggtcaattagtagaggg

SEQ ID NO: 82317 - DNA, 80 bp, synthetic construct
  source 1..80: mol_type = other DNA
tatgaattggttactttacctgcaacctgtttttttactgccaaaaaggctgatcaatataaaattgtaaagacttttga

SEQ ID NO: 82318 - DNA, 80 bp, synthetic construct
  source 1..80: mol_type = other DNA
ctgtatcacccaaaacagtttatgagttaaagatggaatgtccacatacagttggtcttggtcaaggttatattatcggc

SEQ ID NO: 82319 - DNA, 80 bp, synthetic construct
  source 1..80: mol_type = other DNA
cacaggctgtattacggattgttggtccaataacagcaaaaatccctagcagtagttcaacagagaccctgcagggtaca

SEQ ID NO: 82320 - DNA, 80 bp, synthetic construct
  source 1..80: mol_type = other DNA
gcatttgcgggtgtaccaatgtatagctctttttctactcttgttcgaaatgctgatccagaatatgttttttcaccagg

SEQ ID NO: 82321 - DNA, 80 bp, synthetic construct
  source 1..80: mol_type = other DNA
acaactccttcagggatcctctccatgcagctgtgaactctgtcttctttcccaatgatgttcgggtgaagtggctgaag

SEQ ID NO: 82322 - DNA, 80 bp, synthetic construct
  source 1..80: mol_type = other DNA
aagagttttagccaaagtgaattcccagacatatgcaagattgatggcattgtgttcaaccagtgtgagagtgagagtct

SEQ ID NO: 82323 - DNA, 80 bp, synthetic construct
  source 1..80: mol_type = other DNA
tcgaactcagcaaaagcagggtagataatcactcactgaggtgacatccacatcatggcgtctcaaggcaccaaacgatc

SEQ ID NO: 82324 - DNA, 80 bp, synthetic construct
  source 1..80: mol_type = other DNA
gctcggactccttgattttgctttagagctcgagtttaggaacctaacacccgggaacactaacactcgtgtctcccggt

SEQ ID NO: 82325 - DNA, 80 bp, synthetic construct
  source 1..80: mol_type = other DNA
actggggctccttgattttgcacttgagcttgagtttagaaatcttacccctgggaacactaacacccgtgtgtcccgtt

SEQ ID NO: 82326 - DNA, 80 bp, synthetic construct
  source 1..80: mol_type = other DNA
atacatacccaccaataaaggtgaactacaccaatgccaaccaaaaagatcttttggtactgtggggaatccaccacccc

SEQ ID NO: 82327 - DNA, 80 bp, synthetic construct
  source 1..80: mol_type = other DNA
cttacgaaaacaacaattgggtgaatcagacatatattaacatcagtaacaacaattttgttgctaaacagacagtaact

SEQ ID NO: 82328 - DNA, 80 bp, synthetic construct
  source 1..80: mol_type = other DNA
cccctgttaattcctataccaacacgccctataccggggcactggggctcctcgactttgccctcgagcttgagtttcga

SEQ ID NO: 82329 - DNA, 80 bp, synthetic construct
  source 1..80: mol_type = other DNA
ctcctgttaattcttataccaataccccttacactggggcgcttgggcttctggactttgctctagagcttgagtttagg

SEQ ID NO: 82330 - DNA, 80 bp, synthetic construct
  source 1..80: mol_type = other DNA
cccctgttaactcttacaccaacaccccttacaccggggcacttggactccttgattttgctttagagctcgagtttagg

SEQ ID NO: 82331 - DNA, 80 bp, synthetic construct
  source 1..80: mol_type = other DNA
cccccgttaactcttataccaacacaccttataccggggcattggggcttcttgattttgcactcgagcttgaatttaga

SEQ ID NO: 82332 - DNA, 80 bp, synthetic construct
  source 1..80: mol_type = other DNA
ctggaagatgtgcaaactggtcgaaggagtggaaagcaaccagtcttacctgtcttgcaagcctaggattcttgccctta

SEQ ID NO: 82333 - DNA, 80 bp, synthetic construct
  source 1..80: mol_type = other DNA
tgcaaactggtcgaaggagtggaaagcaaccagtcttacctgtcttgcaagcctaggattcttgcccttaaccccagtta

SEQ ID NO: 82334 - DNA, 80 bp, synthetic construct
  source 1..80: mol_type = other DNA
agaggaggtggcaactaaccgaaggggtggaaagcagccagacacacttggtttaaaagaatatgaaattttggcttgtc

SEQ ID NO: 82335 - DNA, 80 bp, synthetic construct
  source 1..80: mol_type = other DNA
gcaactaaccgaaggggtggaaagcagccagacacacttggtttaaaagaatatgaaattttggcttgtcccaataaata

SEQ ID NO: 82336 - DNA, 80 bp, synthetic construct
  source 1..80: mol_type = other DNA
atgaagactatcattgctttgagctacatttcatgtctggctctcgctcaaaaccttcctggagatgacagcaacacagc

SEQ ID NO: 82337 - DNA, 80 bp, synthetic construct
  source 1..80: mol_type = other DNA
ttggttgcacaaatcaacaaacaaatatccagcgctgaacgttactatgcccaacattgacaaatttgacaagttgtaca

SEQ ID NO: 82338 - DNA, 80 bp, synthetic construct
  source 1..80: mol_type = other DNA
ccttatcaatttgatgcaaccccggcagcttgtgttccggcctgaagtcctctggaatcacccgatccagcgagtcatac

SEQ ID NO: 82339 - DNA, 80 bp, synthetic construct
  source 1..80: mol_type = other DNA
cccactcgtggccccgcggccaattgtcgccgttccgcactacgtggtttgcctcctgtcgaccgcacttactgttttga

SEQ ID NO: 82340 - DNA, 80 bp, synthetic construct
  source 1..80: mol_type = other DNA
cctactcgtggtcctgcagccaactgccgccgttctgcgctacgcggcttgcctcctgtcgaccgcacttactgttttga

SEQ ID NO: 82341 - DNA, 80 bp, synthetic construct
  source 1..80: mol_type = other DNA
atcaatttgatgcaaccccggcagctcgtgttccgacctgaagtcctctggaaccatccgatccagcgagttatacataa

SEQ ID NO: 82342 - DNA, 80 bp, synthetic construct
  source 1..80: mol_type = other DNA
aatagtgcttcttcttgcaatggtcagtctcgttaaaagtgaccagatttgcattggttaccatgcaaacaactcgacag

SEQ ID NO: 82343 - DNA, 80 bp, synthetic construct
  source 1..80: mol_type = other DNA
caggctcatggcctgatggagcgaacatcaatttcatgcctatataagctctcgcaattttaggcggccgcgcgcggtca

SEQ ID NO: 82344 - DNA, 80 bp, synthetic construct
  source 1..80: mol_type = other DNA
agcaaaagcaggggaaaataaaagcaaccgaaatgaaggcaagactattagtcttgttatgtgcatttgcagctacaaat

SEQ ID NO: 82345 - DNA, 80 bp, synthetic construct
  source 1..80: mol_type = other DNA
aatgatggtctatcagattctggcgatctattcaaccgtcgccagttcactagtactgttagtctccctgggggcaatca

SEQ ID NO: 82346 - DNA, 80 bp, synthetic construct
  source 1..80: mol_type = other DNA
caactggggaaatgtaatattgccggatggctcttgggaaacccagaatgcgatttgctgctcacagtgagctcatggtc

SEQ ID NO: 82347 - DNA, 80 bp, synthetic construct
  source 1..80: mol_type = other DNA
ttgtgctatggggtgttcatcatccgcctaccagtactgatcaacaaagtctctatcaaaatgcagatgcttatgtttct

SEQ ID NO: 82348 - DNA, 80 bp, synthetic construct
  source 1..80: mol_type = other DNA
gtagggtcatcaaaatattacaggaggttcactccagaaatagcagcgagacccaaagtgagaggtcaggcagggaggat

SEQ ID NO: 82349 - DNA, 80 bp, synthetic construct
  source 1..80: mol_type = other DNA
acacctcatggtgccataaacagcagtctccctttccagaatgtacatccagtcacaataggagagtgcccaagatacgt

SEQ ID NO: 82350 - DNA, 80 bp, synthetic construct
  source 1..80: mol_type = other DNA
gggatggactggattgatagatggatggtatggttaccatcatcagaatggacagggatcaggctatgcagcggaccaaa

SEQ ID NO: 82351 - DNA, 80 bp, synthetic construct
  source 1..80: mol_type = other DNA
tcaaggttggcgttctgttgagacctcgggtgtggccgaggaggaggcgacatcgggcttggttatgctttgtattcatg

SEQ ID NO: 82352 - DNA, 80 bp, synthetic construct
  source 1..80: mol_type = other DNA
cacgttggagtaactgtgatatgtctgtctatccgttagatcttacaagtaatggaataggatgtatcccagcttgtaca

SEQ ID NO: 82353 - DNA, 80 bp, synthetic construct
  source 1..80: mol_type = other DNA
ggtagtaactgtaacatcactatctgtccattagatactacaagtaatggaataggatgttcaccagctagtacagaaac

SEQ ID NO: 82354 - DNA, 80 bp, synthetic construct
  source 1..80: mol_type = other DNA
atcattcgaactacaaataatggaatcggatgttcaccagctagtacagaaacttatgaagttgtatcaaatgacaccca

SEQ ID NO: 82355 - DNA, 80 bp, synthetic construct
  source 1..80: mol_type = other DNA
acaatcaatgccctattggcgcggatcgcagccgcccgctccctggtgcatcgggcaaaagaagagctctctagcaggcc

SEQ ID NO: 82356 - DNA, 80 bp, synthetic construct
  source 1..80: mol_type = other DNA
gggtttcaccaagtttgtttataacatccacccatgttatacctcagggatcacaggagttcttcggggtttccattaaa

SEQ ID NO: 82357 - DNA, 80 bp, synthetic construct
  source 1..80: mol_type = other DNA
ggcaaaccaccaaacccaagtgtgctagaagctgccaaaaagaccatcattaatgttcttgaacaaacaatagacccacc

SEQ ID NO: 82358 - DNA, 80 bp, synthetic construct
  source 1..80: mol_type = other DNA
gcaccatcctggagatgtgggacggagagatctaccattatggcctgtacgtggaacggggtctggtgcttggggtacac

SEQ ID NO: 82359 - DNA, 80 bp, synthetic construct
  source 1..80: mol_type = other DNA
gcttaattgcaatgctgtatacacctcttagggcaaacaattccggagatgatgtttttactgtgtcctgtagagtatta

SEQ ID NO: 82360 - DNA, 80 bp, synthetic construct
  source 1..80: mol_type = other DNA
ttgttgtccagtgccaaaatgggcgcgtcactcttgacggtgagttaatgggtaccacccaactcttgccgagtcagata

SEQ ID NO: 82361 - DNA, 80 bp, synthetic construct
  source 1..80: mol_type = other DNA
gtggacacaacatctggtcgcttcaccccgaaattgggttccctagaaatatccactgaatccgatgactttgacccaaa

SEQ ID NO: 82362 - DNA, 80 bp, synthetic construct
  source 1..80: mol_type = other DNA
gctggcggcttttcccccactgatgcagcccgtggggcaattaatgcccccataacaagagttttggactggagtggaac

SEQ ID NO: 82363 - DNA, 80 bp, synthetic construct
  source 1..80: mol_type = other DNA
gaggtactgggcaccaaacgccacctccacaacctcaatgtcaggtggcttcacaagccaaactgtacacagaaccacac

SEQ ID NO: 82364 - DNA, 80 bp, synthetic construct
  source 1..80: mol_type = other DNA
caaattttaaaacgaaccaggcccccaagtccacacccagcagtgggtcttcagtgagatcaaactcaacccaactcact

SEQ ID NO: 82365 - DNA, 80 bp, synthetic construct
  source 1..80: mol_type = other DNA
agcttgagctcacactcatccgggtcgtctcgatccagcgggtctacggttgttagctcattgccatcttccaacaggac

SEQ ID NO: 82366 - DNA, 80 bp, synthetic construct
  source 1..80: mol_type = other DNA
tagggattgggtcaatcaacagaatttcaatttggaaccacacatgcctggatctctcaggacagcttttgtcactccac

SEQ ID NO: 82367 - DNA, 80 bp, synthetic construct
  source 1..80: mol_type = other DNA
tctagtacagcctctaattcagacacggtctcaaccgtgcccaaaagtgttttggactcctggacatctgcgtttaatac

SEQ ID NO: 82368 - DNA, 80 bp, synthetic construct
  source 1..80: mol_type = other DNA
cgcagacagccgctattcgcacaccttcgcagaaggggggagtcaaatgtttagtgaaaagattatcttaaatttagttt

SEQ ID NO: 82369 - DNA, 80 bp, synthetic construct
  source 1..80: mol_type = other DNA
atgattccaaattgaaaaagatggccaatataatactgtgtgctttgtcatcgctgtttaccaggcccattaaggacata

SEQ ID NO: 82370 - DNA, 80 bp, synthetic construct
  source 1..80: mol_type = other DNA
gaggatcatgcatcccagactgaaaatgaggtgagctcagcacttctcaggctcagacaagcaagggccagatattatgt

SEQ ID NO: 82371 - DNA, 80 bp, synthetic construct
  source 1..80: mol_type = other DNA
tcgaatcaaaaacaaaaccctttactttacctatcctaacccttggtgagttgtctaactcccgctttccggctgctata

SEQ ID NO: 82372 - DNA, 80 bp, synthetic construct
  source 1..80: mol_type = other DNA
gatatgctttacactgaccccaatgagtcaatagttgtacagccccaaaatggtaggtgcactcttgatggcaccttgca

SEQ ID NO: 82373 - DNA, 80 bp, synthetic construct
  source 1..80: mol_type = other DNA
atgaagcacacattgacacaactgacccaaagtatgcacccaaattgggcacaattcttattaaatctgattctgatgat

SEQ ID NO: 82374 - DNA, 80 bp, synthetic construct
  source 1..80: mol_type = other DNA
ttctggcagactaaccttgaatatgaacctagcccctgccgtttctccatccttccctggtgaacgaatccttttcttca

SEQ ID NO: 82375 - DNA, 80 bp, synthetic construct
  source 1..80: mol_type = other DNA
tagtagccctgtacacagacctcctgctgctccccagcatactgctccaccaaaaagtaagttgcaaggtgattctgtta

SEQ ID NO: 82376 - DNA, 80 bp, synthetic construct
  source 1..80: mol_type = other DNA
cgcataggcagcctctcttcgcccatttgcgtaggcgaggggagtcacaaatttagtgaaaagagtgattaggttttctt

SEQ ID NO: 82377 - DNA, 80 bp, synthetic construct
  source 1..80: mol_type = other DNA
tactaattgtgttgtggttattcattgtatataaactatatttgctacatcctgtttttgttttatatatactatatttt

SEQ ID NO: 82378 - DNA, 80 bp, synthetic construct
  source 1..80: mol_type = other DNA
acagttatgcacagagctgcaaacaactatacatgagataatattagaatgtgtgtactgcaagcaacagttactgcgac

SEQ ID NO: 82379 - DNA, 80 bp, synthetic construct
  source 1..80: mol_type = other DNA
atactgatagtaatgtagatacaattccttatcttttgggtcttactcttgcattaactaatggatcaagaatacttaga

SEQ ID NO: 82380 - DNA, 80 bp, synthetic construct
  source 1..80: mol_type = other DNA
attagagacggaagtttgtctatgaaatccctacgcttcctgctggtgaacggacgccatcccgtgcattgctagcgagt

SEQ ID NO: 82381 - DNA, 80 bp, synthetic construct
  source 1..80: mol_type = other DNA
tgaagtttgtctatgaaattcctgcgtttcctgctggtgaacggacgccatcccgttcatttctagcgagtagagaaaaa

SEQ ID NO: 82382 - DNA, 80 bp, synthetic construct
  source 1..80: mol_type = other DNA
gactccacccagaataacttttctttgggtctagagtgtgctattatggaggagtgcgggatgccgcagtggctcatccg

SEQ ID NO: 82383 - DNA, 80 bp, synthetic construct
  source 1..80: mol_type = other DNA
ggaatatggctgttattacccactgttatgacttccgcgatttgcaggtagctgcctttaaaggtgatgattcgatagtg

SEQ ID NO: 82384 - DNA, 80 bp, synthetic construct
  source 1..80: mol_type = other DNA
tgcagtgagtatcgtcagagtccaggagctgctgtcctgatcgccggctgtgaagctgctgtcctgatcgccggctgtga

SEQ ID NO: 82385 - DNA, 80 bp, synthetic construct
  source 1..80: mol_type = other DNA
acagctggtacattgggtactacaagaacaaagaggagtcaacggagctaaatgctcttggagaaatgtataagaagatt

SEQ ID NO: 82386 - DNA, 80 bp, synthetic construct
  source 1..80: mol_type = other DNA
ggcactacacaacaaagctagctctagttctttgttggttcatgccagccaaattccacagattcatttgggctgccatt

SEQ ID NO: 82387 - DNA, 80 bp, synthetic construct
  source 1..80: mol_type = other DNA
gctccagtgcctgatgtcgattcgcgtggtgccatactacggcggcagtataatttgtctacctccccacttacatcatc

SEQ ID NO: 82388 - DNA, 80 bp, synthetic construct
  source 1..80: mol_type = other DNA
ttatgaaggacctgcatttcaccggtacgaacggggtcggcgaggtgggtcgcggtattgctttgactttgtttaatctt

SEQ ID NO: 82389 - DNA, 80 bp, synthetic construct
  source 1..80: mol_type = other DNA
tgctaggcatctttccccctttctcccccggacacctttgggagtctgccaaccccttctgcggtgagggaaccctgtat

SEQ ID NO: 82390 - DNA, 80 bp, synthetic construct
  source 1..80: mol_type = other DNA
tgagccgcctcaccctacacctccagttagtgatacttgggtgcccccgcctctttctgaggagcttcaggttgacgcag

SEQ ID NO: 82391 - DNA, 80 bp, synthetic construct
  source 1..80: mol_type = other DNA
tgcctaccccccctgtccccggccccgttcaaccgtccagccttgtcgaacctaagaaccccgtgcgtaagccgtcaaca

SEQ ID NO: 82392 - DNA, 80 bp, synthetic construct
  source 1..80: mol_type = other DNA
ccaccaccctctcgcacccgccgcttgctttacacctatccggacggcgctaaggtgtatgcggggtcactgtttgagtc

SEQ ID NO: 82393 - DNA, 80 bp, synthetic construct
  source 1..80: mol_type = other DNA
aggttgtgattggctggttaatgcgtccaaccctggccaccgccccggtggcggtctctgtcatgctttttaccaacgct

SEQ ID NO: 82394 - DNA, 80 bp, synthetic construct
  source 1..80: mol_type = other DNA
acccggacttggtctacatctggcttttctagtgacttctccccgcctgaggcggctgctcttgtgccgactaccgccct

SEQ ID NO: 82395 - DNA, 80 bp, synthetic construct
  source 1..80: mol_type = other DNA
tggttggcccgtttctttctcgtgtgcagaccgagatccttattaatttaatgcaaccccggcaactggtcttccgtcct

SEQ ID NO: 82396 - DNA, 80 bp, synthetic construct
  source 1..80: mol_type = other DNA
tggttcggccgtttctttctcgtgtgcagaccgagattatctattatttaatgcaccccgggcaacgggtcttccgtccg

SEQ ID NO: 82397 - DNA, 80 bp, synthetic construct
  source 1..80: mol_type = other DNA
acagtactgccgggcccgggccggccgttgcttagaggttggggcccatccaagatccatcaatgataaccctaacgttt

SEQ ID NO: 82398 - DNA, 80 bp, synthetic construct
  source 1..80: mol_type = other DNA
atgagccgcctccgacgaagggatcggggatttggggaggaaagagcccgaggggggttcgaacttaaagaagagaggat

SEQ ID NO: 82399 - DNA, 80 bp, synthetic construct
  source 1..80: mol_type = other DNA
ggcactcgagaaacggaagacttccccctattggctttggaggtgtcctggaacctggaagtgggaaagagatggtagaa

SEQ ID NO: 82400 - DNA, 80 bp, synthetic construct
  source 1..80: mol_type = other DNA
cccacctcgttttctcttcgtatcgggaaggctcatctcggcgagggggcggcttcctcagtactctctaatttcctaag

SEQ ID NO: 82401 - DNA, 80 bp, synthetic construct
  source 1..80: mol_type = other DNA
atgagccaaagttccgaacggagaaaccgcataggaagacagggagtccgagaggggatgaaacaccaagggcccggaac

SEQ ID NO: 82402 - DNA, 80 bp, synthetic construct
  source 1..80: mol_type = other DNA
ctcggagaaaattctcccaagaagcgagaagatcccaaaaatcggaagattttccaaattggatggagacatctcggaat

SEQ ID NO: 82403 - DNA, 80 bp, synthetic construct
  source 1..80: mol_type = other DNA
tgtgcttttaacatgtgagctcattatctgggcagccagtgcagaaactccacttttggaatcaggatggtcagatacag

SEQ ID NO: 82404 - DNA, 80 bp, synthetic construct
  source 1..80: mol_type = other DNA
ataggcagagttgtattaatggtcagtgtccatattgtatgaccatgactgaggcaacagaaagtgcactccaagctcac

SEQ ID NO: 82405 - DNA, 80 bp, synthetic construct
  source 1..80: mol_type = other DNA
ataaacagagctgcattaatggacaatgtccgtattgcatgactatgactgaggcaactgaaagtgctctacaagctcat

SEQ ID NO: 82406 - DNA, 80 bp, synthetic construct
  source 1..80: mol_type = other DNA
ggtgtgtgcttttaacatgtgagctcattatctgggcagccagtgcggaaacaccacttctggaatcaggatggtcagac

SEQ ID NO: 82407 - DNA, 80 bp, synthetic construct
  source 1..80: mol_type = other DNA
aatgggtgctaagtttagcccgtggtgccgtgccattgaatgggaaatattgaggctaatcccgcctgatgggagctatg

SEQ ID NO: 82408 - DNA, 80 bp, synthetic construct
  source 1..80: mol_type = other DNA
gaatttgacagtaatcagaataatgcctccctaggccttcagtgtgtggttatggagaattgtggcatgccccaatggtt

SEQ ID NO: 82409 - DNA, 80 bp, synthetic construct
  source 1..80: mol_type = other DNA
tgccccaatggttaatcaacctgtatcatttggttcggtcaacctggaatctacaaggaaggaaggagtctcttaagcgc

SEQ ID NO: 82410 - DNA, 80 bp, synthetic construct
  source 1..80: mol_type = other DNA
gcgacgcttatgaggagtcagttttcgctgccgaaatgtccggggcggggtcgtgtccgttattccggaaaggtttctcg

SEQ ID NO: 82411 - DNA, 80 bp, synthetic construct
  source 1..80: mol_type = other DNA
accaaaagtgccttatttggcccatggttccgtgccattgagaaggagagcttggctctgctcccacccaatattttcta

SEQ ID NO: 82412 - DNA, 80 bp, synthetic construct
  source 1..80: mol_type = other DNA
catgcctcaatggcttatccgactgtaccatttagtgagatcagcctggattctgcaagctccgaaagtgaaacgactgg

SEQ ID NO: 82413 - DNA, 80 bp, synthetic construct
  source 1..80: mol_type = other DNA
cttctgtgccctgtttggcccttggttccgtgccattgagaaagtaggactggccctactcccgcctaacatcttctacg

SEQ ID NO: 82414 - DNA, 80 bp, synthetic construct
  source 1..80: mol_type = other DNA
tgcctcagtggttaatccggctgtatcatctgcgccgaaggtccaaaggcttacaggcgccgaaggagtcccttaaaggc

SEQ ID NO: 82415 - DNA, 80 bp, synthetic construct
  source 1..80: mol_type = other DNA
ttgtttgtactattctgtgcattcactgcactgaaagctgacaccatttgtgtaggctatcatgctaacaattccacaga

SEQ ID NO: 82416 - DNA, 80 bp, synthetic construct
  source 1..80: mol_type = other DNA
gtacacaaatggcaattgatgggatcagtaacaaagtaaactctataattgagaaaatgaacattcaatttacttcagtg

SEQ ID NO: 82417 - DNA, 80 bp, synthetic construct
  source 1..80: mol_type = other DNA
tgtattattctgtgcattcactgtactgaaagctgacaccatttgtgtaggctaccatgctaacaattccacagacactg

SEQ ID NO: 82418 - DNA, 80 bp, synthetic construct
  source 1..80: mol_type = other DNA
tctcctattgcccgatgtgcttacttatgcaaatcgccatcctggtaactactgtaacattgcatttcaagcaatataaa

SEQ ID NO: 82419 - DNA, 80 bp, synthetic construct
  source 1..80: mol_type = other DNA
cctgtcaattcttatactaatacaccttataccggtgctttggggctccttgattttgcattagagcttgaatttagaaa

SEQ ID NO: 82420 - DNA, 80 bp, synthetic construct
  source 1..80: mol_type = other DNA
cctgttaactcctacaccaatacgccctacaccggggcgttgggacttcttgactttgcacttgagcttgaattcaggaa

SEQ ID NO: 82421 - DNA, 80 bp, synthetic construct
  source 1..80: mol_type = other DNA
aacctatacaacaaaatgaaaagggccttaggctccaatgcgatggaaaaagggaaaggctgcttccagttatcccacaa

SEQ ID NO: 82422 - DNA, 80 bp, synthetic construct
  source 1..80: mol_type = other DNA
aggtgatgatcaatgcatggaaactatctggaacgggacctattttaggagaaaggaaaaagaggaatcaagactaggaa

SEQ ID NO: 82423 - DNA, 80 bp, synthetic construct
  source 1..80: mol_type = other DNA
ctcttttgagggaaaaatttgcctccacaggtgtttttatgtggagttaataagggggagcccccgggtggccagagtat

SEQ ID NO: 82424 - DNA, 80 bp, synthetic construct
  source 1..80: mol_type = other DNA
aatttgcctccacaggtgtttttatgtggagttaataagggggagcccccggggggccagagtatggtggacttcaaata

SEQ ID NO: 82425 - DNA, 80 bp, synthetic construct
  source 1..80: mol_type = other DNA
aaatagcttttttgttttttgtgggatttcgggtacagaggaaacgggctcatggcctgagggggcagatataattttct

SEQ ID NO: 82426 - DNA, 80 bp, synthetic construct
  source 1..80: mol_type = other DNA
ttgttttttgtgggatttcgggtacagaggaaacgggctcatggcctgagggggcagatataattttcttgcctatataa

SEQ ID NO: 82427 - DNA, 80 bp, synthetic construct
  source 1..80: mol_type = other DNA
tgtttgcatcaatggaacgtgtgcagtagtaatgactgatggaagcgcatcaggggggggtgactctagaattttttttt

SEQ ID NO: 82428 - DNA, 80 bp, synthetic construct
  source 1..80: mol_type = other DNA
caggggggggtgactctagaatttttttttttagagaaggtgaaattgtccacttttgtcccctgtcagggagtgctcag

SEQ ID NO: 82429 - DNA, 80 bp, synthetic construct
  source 1..80: mol_type = other DNA
catgtgggggagtgctttttttcccctcggtccccagaatttagatgtttttgcagagacaattggaagggctccaatag

SEQ ID NO: 82430 - DNA, 80 bp, synthetic construct
  source 1..80: mol_type = other DNA
cagggaggagctgcttacccatggaagaccaaaccatgacctcgaaagagaggcaagactgggcacccccgtggcattaa

SEQ ID NO: 82431 - DNA, 80 bp, synthetic construct
  source 1..80: mol_type = other DNA
ctagatccggccttgtacccttgtacgcacaaaacaggattcgccccgcttccaacagctacctgaaagttggataaacc

SEQ ID NO: 82432 - DNA, 80 bp, synthetic construct
  source 1..80: mol_type = other DNA
aaaaaaaatgaagaagtgaaataccaggaggggaaccaacagacacttgtggtggggctagatccggccttgtacccttg

SEQ ID NO: 82433 - DNA, 80 bp, synthetic construct
  source 1..80: mol_type = other DNA
atgaaggcaataatagtagtagtcctgctatatacatttacaaccgcaaatgccgacacattatgtataggttatcatgc

SEQ ID NO: 82434 - DNA, 80 bp, synthetic construct
  source 1..80: mol_type = other DNA
caggaatgggggaactatccctcaagtagtcacaaatattttcagtggacagcaaccaaattgatgtggtttccctttta

SEQ ID NO: 82435 - DNA, 80 bp, synthetic construct
  source 1..80: mol_type = other DNA
tcggttaatcctgatgctatgagctgtcctaagtttagaattgctggtgcacattcaaaatccagccaagcataacctga

SEQ ID NO: 82436 - DNA, 80 bp, synthetic construct
  source 1..80: mol_type = other DNA
gggccgaggttgtcaagcccttccgactcaggaattgaagatctatgtggaaaccaagtaaaagaacctaaagtcctgct

SEQ ID NO: 82437 - DNA, 80 bp, synthetic construct
  source 1..80: mol_type = other DNA
aggggaactggccctgaattctgcaagagctgctggttcgaaaggaggtggttagtcaggtgcaacgatcactacctatg

SEQ ID NO: 82438 - DNA, 80 bp, synthetic construct
  source 1..80: mol_type = other DNA
acaaggctggtaagtttcttgaaggaatctgcggggtctcctgacaagtagatggctgtgaattcttcatgaagctctcc

SEQ ID NO: 82439 - DNA, 80 bp, synthetic construct
  source 1..80: mol_type = other DNA
gggacatcataggcccccacttgctgtgatcgaggctataagagacctgacctagtgaaacattcaatttcatggctaga

SEQ ID NO: 82440 - DNA, 80 bp, synthetic construct
  source 1..80: mol_type = other DNA
tgactgtggggattcttgactgtaaaaacataggttctttagaactgcagttgtacaatttgtcaatgacagtgctttac

SEQ ID NO: 82441 - DNA, 80 bp, synthetic construct
  source 1..80: mol_type = other DNA
catttgtttttgtaatggctgtattttccagccaatttccctgcattcatctgaagaagtagtgacttgaagcactgaaa

SEQ ID NO: 82442 - DNA, 80 bp, synthetic construct
  source 1..80: mol_type = other DNA
gctgttctcggagcacctactcaatgtcgaggggaggccccacctcttcaaagaggggcctgcacagcctccctcttaat

SEQ ID NO: 82443 - DNA, 80 bp, synthetic construct
  source 1..80: mol_type = other DNA
taaattaagttgaaattcccgcttcccatgataaagctttgattaaaagcttccttacaacgtacacgtttgtaccttgc

SEQ ID NO: 82444 - DNA, 80 bp, synthetic construct
  source 1..80: mol_type = other DNA
gggaattgattcccctcttctttctcatagctcattgttggctgaatccctcttttctccattaacataagcctctcgta

SEQ ID NO: 82445 - DNA, 80 bp, synthetic construct
  source 1..80: mol_type = other DNA
gctctcggacagcaactcctccatcaccacacacttgttcctcagaagagagagtcacaatgcctaggatcctcggtgcg

SEQ ID NO: 82446 - DNA, 80 bp, synthetic construct
  source 1..80: mol_type = other DNA
atgttggggttgaagggcaggagtttcctggtcccttcaataaggtatcctgagtcaacaactaaggggatttcaacatg

SEQ ID NO: 82447 - DNA, 80 bp, synthetic construct
  source 1..80: mol_type = other DNA
gcacacaggtgtcgttgttgaaaagaagaaaagaggcggtaaagaggaaataacccctcctgtgcactaatggactgccg

SEQ ID NO: 82448 - DNA, 80 bp, synthetic construct
  source 1..80: mol_type = other DNA
tattccgggggagtgcatcaatgacagcactggtcaagcccggttgtgtagcgaagaggtctgtgacatcaatcccatgt

SEQ ID NO: 82449 - DNA, 80 bp, synthetic construct
  source 1..80: mol_type = other DNA
ctagatcagcggctaagattaataagtcatctgaggttagagtcccaactctcagtatactcttttgttgagttgatttt

SEQ ID NO: 82450 - DNA, 80 bp, synthetic construct
  source 1..80: mol_type = other DNA
tggggatgcagccaaccattgtggtactgttgcaaatggtgtgttacagacttttatgaggatggcttggcgtgggagct

SEQ ID NO: 82451 - DNA, 80 bp, synthetic construct
  source 1..80: mol_type = other DNA
ttgcagtggagtttggtgagcagcagctcaatttgactgagcttgaggacttcgcgagagagctggcctatgaaggcctt

SEQ ID NO: 82452 - DNA, 80 bp, synthetic construct
  source 1..80: mol_type = other DNA
cctcgcacctcattctgtattagccgttttagaggacactgtcgactaccctgcccgcgctcacacttttgatgatttct

SEQ ID NO: 82453 - DNA, 80 bp, synthetic construct
  source 1..80: mol_type = other DNA
tccacatgcgagccgacagtaaaactttacacctcagtcgagaacgctcagcaggataagggtatagctattccacatga

SEQ ID NO: 82454 - DNA, 80 bp, synthetic construct
  source 1..80: mol_type = other DNA
ccgtgtctatttctgctgttggtgtcctcgcacctcatactgcgctggctgttttggaggatactgttgactatcatgtt

SEQ ID NO: 82455 - DNA, 80 bp, synthetic construct
  source 1..80: mol_type = other DNA
tattgaccttggtgagtcccgtgtggttattcaggattatgacaaccaacatgagcaggatcgccccactccttctcctg

SEQ ID NO: 82456 - DNA, 80 bp, synthetic construct
  source 1..80: mol_type = other DNA
cattcggcattggctgccttagaggacactgttgattaccctgcccgcgcccatacttttgatgacttctgcccggaatg

SEQ ID NO: 82457 - DNA, 80 bp, synthetic construct
  source 1..80: mol_type = other DNA
gtcctcgcaccccattctgcattggctgctttggaggacacagttgattatcctgcccgtgctcctacttttgatgactc

SEQ ID NO: 82458 - DNA, 80 bp, synthetic construct
  source 1..80: mol_type = other DNA
tcgcaccccattctgcactggccgctctagaggatactgttgattatcctgcccgcgctcatacttttgatgacttctgc

SEQ ID NO: 82459 - DNA, 80 bp, synthetic construct
  source 1..80: mol_type = other DNA
tcgcgccccattctgtattggccgttttggaggacactgtcgattatcctgcccgcgctcatacttttgatgacttctga

SEQ ID NO: 82460 - DNA, 80 bp, synthetic construct
  source 1..80: mol_type = other DNA
tctccaccaatgccgagccgacagtgaaactttacacctcagtcgagaatgctcagccgaacaaggggattgcaatccca

SEQ ID NO: 82461 - DNA, 80 bp, synthetic construct
  source 1..80: mol_type = other DNA
cagcaatggcgagccgacagtgaaactttacacctcagtcgagaatgctcagcaggataaggggatcgctatcccacatg

SEQ ID NO: 82462 - DNA, 80 bp, synthetic construct
  source 1..80: mol_type = other DNA
gcattggccgttttggaggacactgttgattatcctgctcgcgctcatacttttgatgacttctgccggaaattgccgaa

SEQ ID NO: 82463 - DNA, 80 bp, synthetic construct
  source 1..80: mol_type = other DNA
cgcctggccaccgcgtctgtatttccacctacaccactaatttaggttctgggcccgtttccatttccgctgtgggtgtt

SEQ ID NO: 82464 - DNA, 80 bp, synthetic construct
  source 1..80: mol_type = other DNA
gtgttctagcgccccattcagctttggctgctttggaggacacggtcgattatccagcccgtgcccacacttttgatgac

SEQ ID NO: 82465 - DNA, 80 bp, synthetic construct
  source 1..80: mol_type = other DNA
caatggcgagccgacggtaaaactttacacttcggtcgagaacgctcagcaggataagggtatagccatcccacatgata

SEQ ID NO: 82466 - DNA, 80 bp, synthetic construct
  source 1..80: mol_type = other DNA
ttgatcttggtgagtcccgtgtggttattcaggattatgacaatcagcatgagcaagatcgtcccaccccctcccctgct

SEQ ID NO: 82467 - DNA, 80 bp, synthetic construct
  source 1..80: mol_type = other DNA
tgctcagcaggataggggattgctattccacatgatattgaccttggtgagtcccgagtggttattcaggattatgacaa

SEQ ID NO: 82468 - DNA, 80 bp, synthetic construct
  source 1..80: mol_type = other DNA
tcggagacgctcagcaggacaaggtatagctattccacatgatattgatcttggtgagtcccgtgtggttattcaggatt

SEQ ID NO: 82469 - DNA, 80 bp, synthetic construct
  source 1..80: mol_type = other DNA
accccattctgcattggctgttttggaggatactgttgactatcctgcccgcgcccatacttttgatgacttctgcccgg

SEQ ID NO: 82470 - DNA, 80 bp, synthetic construct
  source 1..80: mol_type = other DNA
cattctgcattggctgttttagaggacaccgtcgattatcctgcccgcgctcacacttttgatgacttctgccggggatg

SEQ ID NO: 82471 - DNA, 80 bp, synthetic construct
  source 1..80: mol_type = other DNA
actctatacgctcagcaggacatgggtatagctgttgcgcatgatattgaccctggtgagtccctggcccttattcagga

SEQ ID NO: 82472 - DNA, 80 bp, synthetic construct
  source 1..80: mol_type = other DNA
tcccagcttgctgttgtatcacacaaggccatgcagtcagtatctctacccacactaccaatttgggctccgggcccgtg

SEQ ID NO: 82473 - DNA, 80 bp, synthetic construct
  source 1..80: mol_type = other DNA
tccgggcccgtgtctatttctgctgttggtgtcctcgcccctcatactgcgctggctgtcttggaggataccgttgactt

SEQ ID NO: 82474 - DNA, 80 bp, synthetic construct
  source 1..80: mol_type = other DNA
ttatgatgactaacctgctcctgaccgtacctttcattctcttggccccgattgtcctttctctgtccttcgggccaacg

SEQ ID NO: 82475 - DNA, 80 bp, synthetic construct
  source 1..80: mol_type = other DNA
tgcgagctgacagtgaaactttacacctcagtcgagaatgcccagcaggataaggggattgctatcccgcatgatattga

SEQ ID NO: 82476 - DNA, 80 bp, synthetic construct
  source 1..80: mol_type = other DNA
cctcgcaccccattctgcattggctgccttagaggacactgtcgattatcccgcccgcgctcacacttttgatgactctg

SEQ ID NO: 82477 - DNA, 80 bp, synthetic construct
  source 1..80: mol_type = other DNA
tgttttcaacccaatgggcgagccgacagtgaaactctacacttcagtcgagaatgcccagcaggataagggtatagcta

SEQ ID NO: 82478 - DNA, 80 bp, synthetic construct
  source 1..80: mol_type = other DNA
tggctgccttggaggacaccgctgactacccccgctcgtgctcatacttttgatgacttctgcacgggaatgccgacccc

SEQ ID NO: 82479 - DNA, 80 bp, synthetic construct
  source 1..80: mol_type = other DNA
gcaccccattctgcgttggccgctttggaggataccgttgactaccctgctcgtgctcataccttcgatgatgtctgagg

SEQ ID NO: 82480 - DNA, 80 bp, synthetic construct
  source 1..80: mol_type = other DNA
tcgagatgctcagcaggataaggggattgctattccacatgatattgatcttggtgagtcccgagttgttatccaggatt

SEQ ID NO: 82481 - DNA, 80 bp, synthetic construct
  source 1..80: mol_type = other DNA
tgtcctcgcacctcatctgcattggctgcttgaagaacactgttgattatcttgcctgctcatactttgatgactttgct

SEQ ID NO: 82482 - DNA, 80 bp, synthetic construct
  source 1..80: mol_type = other DNA
ccattccgctgtgggtgttctggcgccccattcagctttggctgctttggaggacacggtcgattatccggcccgtgccc

SEQ ID NO: 82483 - DNA, 80 bp, synthetic construct
  source 1..80: mol_type = other DNA
ggcgccccattcagctttggctgctttggaggacacggtcgattatccggcccgtgcccacacttttgatgaatttgcgc

SEQ ID NO: 82484 - DNA, 80 bp, synthetic construct
  source 1..80: mol_type = other DNA
accaaccaatggcgagccggctgtgaaactctatacttcagtcgagaatgcccagcaggacaagggtatagctatccccc

SEQ ID NO: 82485 - DNA, 80 bp, synthetic construct
  source 1..80: mol_type = other DNA
ctcgcacctcattctgcgctggctgctttggaggataccgttgactatcccgctcgtgctcatactttgatgactgtgcc

SEQ ID NO: 82486 - DNA, 80 bp, synthetic construct
  source 1..80: mol_type = other DNA
gtgtcctcgcacctcactctgcgctggccgttttagaggataccgttgactatcccgctcgggctcacactttgatgact

SEQ ID NO: 82487 - DNA, 80 bp, synthetic construct
  source 1..80: mol_type = other DNA
ctatttccgctgtcggtgtccttgcaccccattctgcactggctgtttagaggacaactttttatttccggccaatcccc

SEQ ID NO: 82488 - DNA, 80 bp, synthetic construct
  source 1..80: mol_type = other DNA
actaatttgggctctgggcctgtttctatctctgctgtcggtgtcctcgcacctcattctgcattggccgttttgaagac

SEQ ID NO: 82489 - DNA, 80 bp, synthetic construct
  source 1..80: mol_type = other DNA
ttggtgagtcccgagttgttatccaggattatgacaatcaacatgagcaagaccgccctaccccctcccctgctccttct

SEQ ID NO: 82490 - DNA, 80 bp, synthetic construct
  source 1..80: mol_type = other DNA
tgacagtgaaactttacacttcagtcgagatgctcagcaggaccaggggattgctattccacatgatattgaccttggtg

SEQ ID NO: 82491 - DNA, 80 bp, synthetic construct
  source 1..80: mol_type = other DNA
accactaatttaggttctgggcctgtttccatctctgctgtcggtgtcctcgcaccacattctgcatggccgcttggagg

SEQ ID NO: 82492 - DNA, 80 bp, synthetic construct
  source 1..80: mol_type = other DNA
acatgatattgatcttggtgagtcccgagttgttatccaggattatgacaatcaacatgagcaagaccgccctaccccct

SEQ ID NO: 82493 - DNA, 80 bp, synthetic construct
  source 1..80: mol_type = other DNA
cgtatgctgtggaggaaactgttgattaatctgcccgtgctcatactttttatgattgttgccccgaaaaaagcggaaat

SEQ ID NO: 82494 - DNA, 80 bp, synthetic construct
  source 1..80: mol_type = other DNA
gtcttcgggcaatggcgagccgacagtgaaactttacacctcagtcgagaatgcccagcaggataaggggatcgctatcc

SEQ ID NO: 82495 - DNA, 80 bp, synthetic construct
  source 1..80: mol_type = other DNA
ttctgcactggctgttttagaggacactgttgattatcctgcccgcgctcacacttttgatgatttctgcccgaaaaagc

SEQ ID NO: 82496 - DNA, 80 bp, synthetic construct
  source 1..80: mol_type = other DNA
cgggcctgtttctatctctgctgttggtgtcctcgcgccccattccgcattggctgctttggaggatactgtcgagtatt

SEQ ID NO: 82497 - DNA, 80 bp, synthetic construct
  source 1..80: mol_type = other DNA
ctatatctgctgttggtgttctcgctcctcatactgcgttggctgcttggtaagatatcgctgactatccggctcgtgtt

SEQ ID NO: 82498 - DNA, 80 bp, synthetic construct
  source 1..80: mol_type = other DNA
cgctcctcatactgcgttggctgcttggtaagatatcgctgactatccggctcgtgttactgcctgcgatgattttgcag

SEQ ID NO: 82499 - DNA, 80 bp, synthetic construct
  source 1..80: mol_type = other DNA
tcctcgcaccccattctgcactggctgctctggaggacactgttgagtattctgcacgtgctcatactgttgatgattct

SEQ ID NO: 82500 - DNA, 80 bp, synthetic construct
  source 1..80: mol_type = other DNA
cagtgaaactctatacctcagtcgagaacgctcagcaggataaggggattgctatcccacatgatattgatcttggtgag

SEQ ID NO: 82501 - DNA, 80 bp, synthetic construct
  source 1..80: mol_type = other DNA
tcgcacctcactctgcactggccgccttagaggacactgttgactatcctgcccgcgctcatacttttgatgattcggcc

SEQ ID NO: 82502 - DNA, 80 bp, synthetic construct
  source 1..80: mol_type = other DNA
cgacagtgaaactctacacctcagttgagaatgcccagcaggataagggtatagccattccacatgatattgaccttggt

SEQ ID NO: 82503 - DNA, 80 bp, synthetic construct
  source 1..80: mol_type = other DNA
gcgcccatgtctgcgctggtcgctttggaggatatcgttgactacgctgaccgtgctcatactgttgatgacttgtggag

SEQ ID NO: 82504 - DNA, 80 bp, synthetic construct
  source 1..80: mol_type = other DNA
tgtcgagccgacagtgcaactctacacttcagtcgagaatgctcagcaggacaaagggattgctatcgcacatgatattg

SEQ ID NO: 82505 - DNA, 80 bp, synthetic construct
  source 1..80: mol_type = other DNA
ctatttctgctgtcggcgtcctcgcacctcattctgcctggggcgttttagaggaaactgttgaataatgctgaaagtgc

SEQ ID NO: 82506 - DNA, 80 bp, synthetic construct
  source 1..80: mol_type = other DNA
cctcgcacctcattctgcctggggcgttttagaggaaactgttgaataatgctgaaagtgcccccacttttgaagaattt

SEQ ID NO: 82507 - DNA, 80 bp, synthetic construct
  source 1..80: mol_type = other DNA
accttggtgagtcccgagttgttatccaggattatgacaaccaacatgagcaggatcgtcctaccccctctcctgcaccc

SEQ ID NO: 82508 - DNA, 80 bp, synthetic construct
  source 1..80: mol_type = other DNA
ctgcattggctgttttagaggacactgttgattaccctgcccgcgctcacacttttgatgacttttgccttgaaatgcag

SEQ ID NO: 82509 - DNA, 80 bp, synthetic construct
  source 1..80: mol_type = other DNA
acccggacaggggcaaagctatcccacatgatattgaccttggtgagtcccgagtagtcatccaggactatgacaaccag

SEQ ID NO: 82510 - DNA, 80 bp, synthetic construct
  source 1..80: mol_type = other DNA
tgctgggcctgtttctatctctgctgtgggtgttttggcaccccattctgctctagctgcttggaggacactgtgatagt

SEQ ID NO: 82511 - DNA, 80 bp, synthetic construct
  source 1..80: mol_type = other DNA
cctcattctgcattggccgcattagaggacactgttgactaccctgcccgcgctcatacttttgatgacttctgtgggaa

SEQ ID NO: 82512 - DNA, 80 bp, synthetic construct
  source 1..80: mol_type = other DNA
catttgtctcggccaatggcgaggccgacagtgaaacttacacctcagtcgagaatgctcagcaggataaggggattgct

SEQ ID NO: 82513 - DNA, 80 bp, synthetic construct
  source 1..80: mol_type = other DNA
actctgtattggctgctttggaggacactgttgactatcctgcccgtgctcatacttttgatgacttctgcgtggaatgc

SEQ ID NO: 82514 - DNA, 80 bp, synthetic construct
  source 1..80: mol_type = other DNA
ttttagcaccccattctgctttggctgctttagaggacacggctgattatccagcccgcgctcatactttcgatgacttc

SEQ ID NO: 82515 - DNA, 80 bp, synthetic construct
  source 1..80: mol_type = other DNA
gtcgagaatgtccagcaggataagggtatagctatcccccacgatatcgatcttggtgagtcccgagttgtcatccagga

SEQ ID NO: 82516 - DNA, 80 bp, synthetic construct
  source 1..80: mol_type = other DNA
tggctccggccctgtctctatttctgctgtcggtgtcctcgcacctcactctgcgctggctgcttggaggataccgtgat

SEQ ID NO: 82517 - DNA, 80 bp, synthetic construct
  source 1..80: mol_type = other DNA
tggccagttgttctattcccgccctgtcgtctcagccaatggcgagccgacagtgaaactttacacctcagtcgagaatg

SEQ ID NO: 82518 - DNA, 80 bp, synthetic construct
  source 1..80: mol_type = other DNA
ggtcttcagggttgtgcttttcagtcaactgtagctgagttgcagcgtcttaaaatgaatgtgggtaaaacccgggagta

SEQ ID NO: 82519 - DNA, 80 bp, synthetic construct
  source 1..80: mol_type = other DNA
ctcgcccctcatactgcgctggctgttttggaggataccgttgactatcctgctcgcgctcatacttttgatgacttttg

SEQ ID NO: 82520 - DNA, 80 bp, synthetic construct
  source 1..80: mol_type = other DNA
tggtgagtccgtgtggttattcaggattatgacaaccaacatgagcaagatcgtcccactccttctcctgccccttctcg

SEQ ID NO: 82521 - DNA, 80 bp, synthetic construct
  source 1..80: mol_type = other DNA
atgacgagcagacagtaaaactttacacttcagtcgagaacgctcagcaggacaagggtatagctattccacatgatatt

SEQ ID NO: 82522 - DNA, 80 bp, synthetic construct
  source 1..80: mol_type = other DNA
catggcgagccgactgtgaaactctacacctcagtcgagaatgctcagcagggatagggtatagctatcccacatgatat

SEQ ID NO: 82523 - DNA, 80 bp, synthetic construct
  source 1..80: mol_type = other DNA
ctatttctgctgtgggtgtcctagcgccccactcagccttggctgctttggaggacacggtcgattacccggcccgtgcc

SEQ ID NO: 82524 - DNA, 80 bp, synthetic construct
  source 1..80: mol_type = other DNA
tgatcttggtgagtcccgagtagttattcaggattatgataaccaacatgagcaagaccgccctacaccgtcccccgccc

SEQ ID NO: 82525 - DNA, 80 bp, synthetic construct
  source 1..80: mol_type = other DNA
cagtatattgcatcaacaccaggattcaaggaagaagcaaatacctcagttgcacccgagcaaaaattgtgtacctttag

SEQ ID NO: 82526 - DNA, 80 bp, synthetic construct
  source 1..80: mol_type = other DNA
ctttttaatttgtaaaggggttaataaggaatatttgatgtatagtgccttaactagagatccattttctgttattgagg

SEQ ID NO: 82527 - DNA, 80 bp, synthetic construct
  source 1..80: mol_type = other DNA
aaagtttgcctggtgggttaaaggagcatgattttaatccagaagaagcagaggaaactaaacaagtgtcctggaagctt

SEQ ID NO: 82528 - DNA, 80 bp, synthetic construct
  source 1..80: mol_type = other DNA
tggctggagttgcttggctacactgtttgttgcccaaaatggattcagacattttttttgcacactcaggccattgtttg

SEQ ID NO: 82529 - DNA, 80 bp, synthetic construct
  source 1..80: mol_type = other DNA
taaggtcttttttcaaaaatcacctggttaacttctctaaattccacccaaacaactatcaattttacattccccctccc

SEQ ID NO: 82530 - DNA, 80 bp, synthetic construct
  source 1..80: mol_type = other DNA
tgaggttattttttctccttaacacttaatcatcatccgaaatactgtacatttgacttttctgtttattgttttcaggc

SEQ ID NO: 82531 - DNA, 80 bp, synthetic construct
  source 1..80: mol_type = other DNA
catggtgctgcgccggctgtcacgccccagcaggcagaagtatgcaaagcatgcatctcaattagtcagcaaccatagtc

SEQ ID NO: 82532 - DNA, 80 bp, synthetic construct
  source 1..80: mol_type = other DNA
tgggcgtggagggtggggggggactcatacactttggtcacaggatcctttcatgctcttaaaagtgattgaactgcaac

SEQ ID NO: 82533 - DNA, 80 bp, synthetic construct
  source 1..80: mol_type = other DNA
gggactcatacactttggtcacaggatcctttcatgctcttaaaagtgattgaactgcaaccactaatgagttatcagat

SEQ ID NO: 82534 - DNA, 80 bp, synthetic construct
  source 1..80: mol_type = other DNA
cactaatgagttatcagatttaaggatcaccattcctgtcaacttccccaatcagacatcatgtgccttctcatgctagg

SEQ ID NO: 82535 - DNA, 80 bp, synthetic construct
  source 1..80: mol_type = other DNA
agagtatccaggcactattatatgtcaaatatgacttagattctaaaatacagtcctctagagtgggcgtggagggtggg

SEQ ID NO: 82536 - DNA, 80 bp, synthetic construct
  source 1..80: mol_type = other DNA
tttctgaaggaaatatcttctgttcaaaactggagagaagctttctgagaaactgctctgtgttctgttaattcatctca

SEQ ID NO: 82537 - DNA, 80 bp, synthetic construct
  source 1..80: mol_type = other DNA
cagagttacatctttcccttcaagaagcctttcgctaaggctgttcttgtggaattggcaaagggatatttggaagccca

SEQ ID NO: 82538 - DNA, 80 bp, synthetic construct
  source 1..80: mol_type = other DNA
agtcagcaaccatagtcccgcccctaactccgcccacccgcccctaactccgcccagttccgcccattctccgccccatg

SEQ ID NO: 82539 - DNA, 80 bp, synthetic construct
  source 1..80: mol_type = other DNA
aaaggaggagatgaagaaaaaatgaatatgcggataacaaataagcacacgaaaatgctaaaatgcaattgttaggcaca

SEQ ID NO: 82540 - DNA, 80 bp, synthetic construct
  source 1..80: mol_type = other DNA
aacctattggaatgtctaaaagttgagaaaacacaattttctataccactgttgtgaatttaaaatagtacaatcacttt

SEQ ID NO: 82541 - DNA, 80 bp, synthetic construct
  source 1..80: mol_type = other DNA
gtatatcatttgaaaaaccatgatctttacactgggttttctcatacactttggtcacaggatcctttcatgctcttaaa

SEQ ID NO: 82542 - DNA, 80 bp, synthetic construct
  source 1..80: mol_type = other DNA
agtgattgaactgcaaccactaatgagttatcagatttaaggatcaccattcctgtcaacttccccaatcagacatcatg

SEQ ID NO: 82543 - DNA, 80 bp, synthetic construct
  source 1..80: mol_type = other DNA
tgccttctcatgctaggagagtatccaggcactattatatgtcaaatatgacttagattctaaaatacagtcctctagag

SEQ ID NO: 82544 - DNA, 80 bp, synthetic construct
  source 1..80: mol_type = other DNA
tgggcgtggagggtggggggggatggtttgaggacggaaactcttccatgcgcagatcaccaggcattagagtctcataa

SEQ ID NO: 82545 - DNA, 80 bp, synthetic construct
  source 1..80: mol_type = other DNA
gggacggaaactcttccatgcgcagatcaccaggcattagagtctcataaggggcaggcaacctagatttctgaaggaaa

SEQ ID NO: 82546 - DNA, 80 bp, synthetic construct
  source 1..80: mol_type = other DNA
ggggcaggcaacctagatttctgaaggaaatatcttctgttcaaaactggagagaagctttctgagaaactgctctgtgt

SEQ ID NO: 82547 - DNA, 80 bp, synthetic construct
  source 1..80: mol_type = other DNA
tctgttaattcatctcacagagttacatctttcccttcaagaagcctttcgctaaggctgttcttgtggaattggcaaag

SEQ ID NO: 82548 - DNA, 80 bp, synthetic construct
  source 1..80: mol_type = other DNA
ggatatttggaagcccataaggtcttttttcaaaaatcacctggttaacttctctaaattccacccaaacaactatcaat

SEQ ID NO: 82549 - DNA, 80 bp, synthetic construct
  source 1..80: mol_type = other DNA
tttacattccccctccctgaggttattttttctccttaacacttaatcatcatccgaaatactgtacatttgacttttct

SEQ ID NO: 82550 - DNA, 80 bp, synthetic construct
  source 1..80: mol_type = other DNA
gtttattgttttcaggccatggtgctgcgccggctgtcacgccccagcaggcagaagtatgcaaagcatgcatctcaatt

SEQ ID NO: 82551 - DNA, 80 bp, synthetic construct
  source 1..80: mol_type = other DNA
ttttttggaggcctaggcttttgcaaaaagatctctactaaaaatgcaaaaattagctgggtgtggtggcatgcacctgt

SEQ ID NO: 82552 - DNA, 80 bp, synthetic construct
  source 1..80: mol_type = other DNA
tagtgaaccaagatcacaccattgtactccagcctgggcgacagagagcaaagatggataaagttttaaacagagaggaa

SEQ ID NO: 82553 - DNA, 80 bp, synthetic construct
  source 1..80: mol_type = other DNA
aatcctagttactggggaggctgaggcaggagaattgcttgaaccacgaggtggagtttgtagtgaaccaagatcacacc

SEQ ID NO: 82554 - DNA, 80 bp, synthetic construct
  source 1..80: mol_type = other DNA
aatgaagaaaatgaatactctgtacaagaaaatggaagatggagtaaaatctcggctcactacaacatctgtcctccggg

SEQ ID NO: 82555 - DNA, 80 bp, synthetic construct
  source 1..80: mol_type = other DNA
tcctgaagtgctaggattataggcatgaaccactgtgcccggctcattttaggacattttaaaagataggtggtaaaaag

SEQ ID NO: 82556 - DNA, 80 bp, synthetic construct
  source 1..80: mol_type = other DNA
aaagggctgctgaccctgaagccttatgacttaagtttgctatcttgaaaggtctataatagcttttttaacttttaatt

SEQ ID NO: 82557 - DNA, 80 bp, synthetic construct
  source 1..80: mol_type = other DNA
tggaaattcatacttacagaaaagctgcatgaatagtctaaagaacaaccacatatagttggcccttcatctccatgggt

SEQ ID NO: 82558 - DNA, 80 bp, synthetic construct
  source 1..80: mol_type = other DNA
tccacatccatgaattcagtcagcctcagattgaaaatgtttgggaaaaaaattatgtccgtactgaatgtagacagact

SEQ ID NO: 82559 - DNA, 80 bp, synthetic construct
  source 1..80: mol_type = other DNA
tttgtttcttgtcattattccctaaacatttacatatcatttatgttgtattaggtattatgaaagtaatctagagatga

SEQ ID NO: 82560 - DNA, 80 bp, synthetic construct
  source 1..80: mol_type = other DNA
tttaaggtatatggaagaatgtgcataggttatatgcaaatactgtgtcattttatattaatcagggactagaagaaaga

SEQ ID NO: 82561 - DNA, 80 bp, synthetic construct
  source 1..80: mol_type = other DNA
gtgtcattttatattaatcagggactagaagaaagaaccagctgtggaatgtgtgtcagttagggtgtggaaagtcccca

SEQ ID NO: 82562 - DNA, 80 bp, synthetic construct
  source 1..80: mol_type = other DNA
aaagttttaaacagagaggaatctttgcagctaatggaccttctaggtctattccacaagaacagccttagcgaaaggct

SEQ ID NO: 82563 - DNA, 80 bp, synthetic construct
  source 1..80: mol_type = other DNA
gaacggaagatatttcctttttcaccatagccctctacgggcttccaaatatccctttgccaattccacaagaacagcct

SEQ ID NO: 82564 - DNA, 80 bp, synthetic construct
  source 1..80: mol_type = other DNA
tagcaaaaggcttcttgaagggaaagatgtaactctgtgagatgaattaacagaacacagagcagtttctcagaaaactt

SEQ ID NO: 82565 - DNA, 80 bp, synthetic construct
  source 1..80: mol_type = other DNA
ctttccagttttgaaaggaagatatttcctttttcaccatagccctctatgggcttccaaatatccggaaagaaccagct

SEQ ID NO: 82566 - DNA, 80 bp, synthetic construct
  source 1..80: mol_type = other DNA
accatagccctctatgggcttccaaatatccggaaagaaccagctgtggaatgtgtgtcagttagggtgtggaaagtccc

SEQ ID NO: 82567 - DNA, 80 bp, synthetic construct
  source 1..80: mol_type = other DNA
tcttgaagggaaagatgtaactctgtgagatgaattaacagaacacagagcattttctcagaaagcttctttccagtttt

SEQ ID NO: 82568 - DNA, 80 bp, synthetic construct
  source 1..80: mol_type = other DNA
ccagccagaccatgacctcaggaaggaaagtgcatgactgggcagccagccggaaggaaagtgcatgactgggcagccag

SEQ ID NO: 82569 - DNA, 80 bp, synthetic construct
  source 1..80: mol_type = other DNA
agtgcatgactgggcagccagccagaccatgacctcagccagacagacatgttttgcgagcctagaaatcttggccttgt

SEQ ID NO: 82570 - DNA, 80 bp, synthetic construct
  source 1..80: mol_type = other DNA
atggaccttctaggtcttgaaaggagtgcctgggggaatattcctctgattatacctagaataagggctgctgcagccat

SEQ ID NO: 82571 - DNA, 80 bp, synthetic construct
  source 1..80: mol_type = other DNA
acaaaggccactcactaggtttcaatggaggacaaaaatgactatgactgaccatcaccacagtaaaattcacacatcca

SEQ ID NO: 82572 - DNA, 80 bp, synthetic construct
  source 1..80: mol_type = other DNA
gcatccagccaaaaattattaaacatgttaagaaataggaaaatgagacacatttagtttcttattaaaaaatctactaa

SEQ ID NO: 82573 - DNA, 80 bp, synthetic construct
  source 1..80: mol_type = other DNA
tatcttatgacaaatatcatattatttctgagtctgtaggtgcagctatctcttgaggtcataaaagagattatgatatt

SEQ ID NO: 82574 - DNA, 80 bp, synthetic construct
  source 1..80: mol_type = other DNA
ccactatcccaaggtctataaaatgctttgctggaatactaataaatctaatgaaggatgttctaaaacctctgaataca

SEQ ID NO: 82575 - DNA, 80 bp, synthetic construct
  source 1..80: mol_type = other DNA
tacttgttatattattgggagaaattaaaggaaacttgaatcaatgtagaaatgcatcattttcttgattagaaggcagt

SEQ ID NO: 82576 - DNA, 80 bp, synthetic construct
  source 1..80: mol_type = other DNA
tagaaggcagtattgtaaagctgtaacttctctcaattagtcagcaaccatagtcccgcccctaactccgcccatcccgc

SEQ ID NO: 82577 - DNA, 80 bp, synthetic construct
  source 1..80: mol_type = other DNA
aaatagaaaattatacaggaaagatccacttgtgtgggttgattgctactcataacttacaccgagataaatttcatatg

SEQ ID NO: 82578 - DNA, 80 bp, synthetic construct
  source 1..80: mol_type = other DNA
cctttgcaacttaggagttatagaagtaataaattgatgagcttgattccctacaaatggaaaatgttggtgtggcatta

SEQ ID NO: 82579 - DNA, 80 bp, synthetic construct
  source 1..80: mol_type = other DNA
ctgccataaggaaagtcaaaaaacaaatagcagcccagtggaaaggaaatgaggcttcttgccagcaagcagctccgcct

SEQ ID NO: 82580 - DNA, 80 bp, synthetic construct
  source 1..80: mol_type = other DNA
gcaggcgtgtgatgagtcaccttagaagcagcccagttccgcccattctccgccccatggctgactaattttttttattt

SEQ ID NO: 82581 - DNA, 80 bp, synthetic construct
  source 1..80: mol_type = other DNA
gatcagagatttaaatgtaaaaccattaaaaacctaagacgccataggggaatgtttttataatctttaattacaaaagg

SEQ ID NO: 82582 - DNA, 80 bp, synthetic construct
  source 1..80: mol_type = other DNA
tgactgggcagccagccagtggcagttaatagttaaactggacaaaggccatggttctgcgccagctgtcacgacaagct

SEQ ID NO: 82583 - DNA, 80 bp, synthetic construct
  source 1..80: mol_type = other DNA
aattcaatggtagtgggagagagtaaagaagtcttcgagctggaacaacttccagatgacatgctggatatggcactaag

SEQ ID NO: 82584 - DNA, 80 bp, synthetic construct
  source 1..80: mol_type = other DNA
gattaatttctattactttgtctgcatcatgaattatgcagtgacctgggggctcataattatcggcctactaattggat

SEQ ID NO: 82585 - DNA, 80 bp, synthetic construct
  source 1..80: mol_type = other DNA
tgcttttcaagaaataccagcatagattttcgaatctctatgctatgtactgcgaagagtgtgacatgtatcatgataga

SEQ ID NO: 82586 - DNA, 80 bp, synthetic construct
  source 1..80: mol_type = other DNA
tctgggctgaaaaggaatggggacttcacaaacaagtgcaggcagtgtacatgtgggcagtatgaggatgcaacaggact

SEQ ID NO: 82587 - DNA, 80 bp, synthetic construct
  source 1..80: mol_type = other DNA
aatgacccataggaaaacctataattgcttggtacggtataaggcgaagtgggttatgaacttcttgatagcttatatgc

SEQ ID NO: 82588 - DNA, 80 bp, synthetic construct
  source 1..80: mol_type = other DNA
ttttaacattgataaaagactcagctatagtagtgcaagctgctggaacagacttcacaacttgtttagaaacagaaaat

SEQ ID NO: 82589 - DNA, 80 bp, synthetic construct
  source 1..80: mol_type = other DNA
ataaactggaattgcacaggcccctttttaaaccttggaaattgtcaaaaacaacagaaaaaggaaccctacgcaaacat

SEQ ID NO: 82590 - DNA, 80 bp, synthetic construct
  source 1..80: mol_type = other DNA
agccactcagctaaaaggtttgcaagcaatttcagtgctcgatatgcccatgatagcaagcatcccagaggatatagcag

SEQ ID NO: 82591 - DNA, 80 bp, synthetic construct
  source 1..80: mol_type = other DNA
gggcactaagatacatcgaagaaaaagaaacattccatgttcagctaactgcagaatatgccatgctatctagatactgc

SEQ ID NO: 82592 - DNA, 80 bp, synthetic construct
  source 1..80: mol_type = other DNA
ttgccaacgagatgaaaaactactactcaggaaagcaaaacaagtttgacaaagatctaaatttggccttaatggcatta

SEQ ID NO: 82593 - DNA, 80 bp, synthetic construct
  source 1..80: mol_type = other DNA
catcatgcattccggggcacatcgtctgcatatattgcaacaatgctctcaaagaagtcaaacgatgatctaattgcata

SEQ ID NO: 82594 - DNA, 80 bp, synthetic construct
  source 1..80: mol_type = other DNA
atactaataagattaaagaaaagttcccagggaatgcgctactcaaggccattgtggattatatagcgtacatgaaaagt

SEQ ID NO: 82595 - DNA, 80 bp, synthetic construct
  source 1..80: mol_type = other DNA
ttgtcagaaatgtcaagtttcaagtacgatgaattttgggatgatcttttgtacaaatcagctccaacaaaagctccatc

SEQ ID NO: 82596 - DNA, 80 bp, synthetic construct
  source 1..80: mol_type = other DNA
tttgtctagaggtagtgagccatcatataatttcaagttagtggtctcatcaagatcaataaaaagttgcaaaaatgtta

SEQ ID NO: 82597 - DNA, 80 bp, synthetic construct
  source 1..80: mol_type = other DNA
aaagcgttgtttgtctatctcccagatctggggtgtcatatgattcaatcatagcatgtggtgatcctaatggcccaagt

SEQ ID NO: 82598 - DNA, 80 bp, synthetic construct
  source 1..80: mol_type = other DNA
gggttttctccaataatgttgcaattcgaaaatggctggtgtctgattggcatgattgcagaccaaagaaaataacaggt

SEQ ID NO: 82599 - DNA, 80 bp, synthetic construct
  source 1..80: mol_type = other DNA
gtatataggaaaccctcagacggtgtatttcaatcaaatgcagatcaatcaacatactgcttagcagacagccattgcct

SEQ ID NO: 82600 - DNA, 80 bp, synthetic construct
  source 1..80: mol_type = other DNA
tgaagattttgaagtagtcagccaagaagagctggacgcaataaagaaatccaaatgttgggaagcagaatatccagatg

SEQ ID NO: 82601 - DNA, 80 bp, synthetic construct
  source 1..80: mol_type = other DNA
tcaaactatcaaagttgacagatggggttaaaagctgcagaatgaaagattctggaaattgcaatgttgcagctaacaga

SEQ ID NO: 82602 - DNA, 80 bp, synthetic construct
  source 1..80: mol_type = other DNA
tggcctataatacaatgcgaaaatgataaattctattattcagagctgcaaaaggattacgataagacacaagacattgg

SEQ ID NO: 82603 - DNA, 80 bp, synthetic construct
  source 1..80: mol_type = other DNA
tcacttttgcctaagtcctggatgctctacagttcgcttcccgatcaacccaaagcatatttcaaactgcaactggcagg

SEQ ID NO: 82604 - DNA, 80 bp, synthetic construct
  source 1..80: mol_type = other DNA
taagtcgatctagcatagcaaagattgatgtgcacaatattgaagatattgatcaatacaggaaggccataactcagaaa

SEQ ID NO: 82605 - DNA, 80 bp, synthetic construct
  source 1..80: mol_type = other DNA
ttggtttcaagatcacctccaaagaaggcaagcatttattagatgtcataggctatgtaaaaagtgcttcatgctcttct

SEQ ID NO: 82606 - DNA, 80 bp, synthetic construct
  source 1..80: mol_type = other DNA
atatatacgaagctttacacaacaggcccaacatcgggaataaacacaaaacatgatgagttatgtacaggaccttgccc

SEQ ID NO: 82607 - DNA, 80 bp, synthetic construct
  source 1..80: mol_type = other DNA
ggtcatattaatgtcattgaagttggcgatgacctatcattgcacacagaatcgtatgtatgcagtgctgattgtaccat

SEQ ID NO: 82608 - DNA, 80 bp, synthetic construct
  source 1..80: mol_type = other DNA
gctaaaatcaaccaccagactggatggttgacctttgcgaaagagaggacgagttcatggggctgcgaggagttcgggtg

SEQ ID NO: 82609 - DNA, 80 bp, synthetic construct
  source 1..80: mol_type = other DNA
cttagccataagtgacggatgtgtcttcggatcatgtcaagacataataagagatgagttaactgtgtacaggaaggaaa

SEQ ID NO: 82610 - DNA, 80 bp, synthetic construct
  source 1..80: mol_type = other DNA
cagatgaagtaactgatgtagagttatgtctgacattttcagataagacatattgcacaaatttgaacccaattacaccg

SEQ ID NO: 82611 - DNA, 80 bp, synthetic construct
  source 1..80: mol_type = other DNA
cgattataacagatttgttcgaagtgcaatttaaaactgtcgaaacttacagcctgccaaggatcgttgccatccagaat

SEQ ID NO: 82612 - DNA, 80 bp, synthetic construct
  source 1..80: mol_type = other DNA
cacgaaataaagattggccaagtgaatgatttaggagtctactctaagggatgcggaaatgtccaaaaggtaaatgggac

SEQ ID NO: 82613 - DNA, 80 bp, synthetic construct
  source 1..80: mol_type = other DNA
aggagttgacaaagaaacagctcaggttcggcttcagacggacacaactaaccatttcgagatagcagggaccatagtta

SEQ ID NO: 82614 - DNA, 80 bp, synthetic construct
  source 1..80: mol_type = other DNA
aatatgcattaaaagttgtatgcacagagaaaccagggaatacattgaccattaggatatgtaatacaaaagttgaagct

SEQ ID NO: 82615 - DNA, 80 bp, synthetic construct
  source 1..80: mol_type = other DNA
tcattagctcttgttgatgctaaacctatactagagttggcaccagtagatcaaactgcttacataagagagaaagatga

SEQ ID NO: 82616 - DNA, 80 bp, synthetic construct
  source 1..80: mol_type = other DNA
tatgcttcaagctgagagatactctcaggaagcatgaagatgcatacaagagagagatgaagattaggtaagagggtgca

SEQ ID NO: 82617 - DNA, 80 bp, synthetic construct
  source 1..80: mol_type = other DNA
aatctgggtggtttaagagtacaacatatataacccttgaccagacatgtgagcatctaaaagtctcttgtgggcctaag

SEQ ID NO: 82618 - DNA, 80 bp, synthetic construct
  source 1..80: mol_type = other DNA
ttatgtgcaaatcaaagggtcctgcttcaatactatctgtgatcacagcaatattgatcttaacatttgttactccaatc

SEQ ID NO: 82619 - DNA, 80 bp, synthetic construct
  source 1..80: mol_type = other DNA
ctccgtgcagaccaacaacgagctggccggcgccctacaccatctaaggtgcgccagaatcaggtactacgtcaagtgtg

SEQ ID NO: 82620 - DNA, 80 bp, synthetic construct
  source 1..80: mol_type = other DNA
tgcaccttcagaggggatgtcacccacattgcaggcagtcatgactatacaatgaatttggcttctcaaaattggaacaa

SEQ ID NO: 82621 - DNA, 80 bp, synthetic construct
  source 1..80: mol_type = other DNA
ccacaagagaggatggctcgacccgcgcccacaaagccacagtgagcactgggagtgtccactttactccaaagctgggc

SEQ ID NO: 82622 - DNA, 80 bp, synthetic construct
  source 1..80: mol_type = other DNA
agtgttcaatacaccactgacacaaacaatgattttcaaactggccaaaacacgaaattcaccccagtcggcgtcatcca

SEQ ID NO: 82623 - DNA, 80 bp, synthetic construct
  source 1..80: mol_type = other DNA
ggacggtaataaccatcaaaatgaaccccaacaatgggtacttccaaattactcaggtagaactggtcataatgtgcacc

SEQ ID NO: 82624 - DNA, 80 bp, synthetic construct
  source 1..80: mol_type = other DNA
cttcgggggcattgccagggagaaataaccttagggccactgtccccgctcggggctcctctagcacactttctagcatt

SEQ ID NO: 82625 - DNA, 80 bp, synthetic construct
  source 1..80: mol_type = other DNA
tgcatcaagattgacctccgatgggctagccaggcatgtaacacaatgccccaagcggaaagagaaagttgaggagactg

SEQ ID NO: 82626 - DNA, 80 bp, synthetic construct
  source 1..80: mol_type = other DNA
tattggtgtttagagctaaaaaggagtgctattagtctacttgatactgtagccatagcagtagctgaaggaacagatag

SEQ ID NO: 82627 - DNA, 80 bp, synthetic construct
  source 1..80: mol_type = other DNA
gccatggaggcccatcagtttattaaggctcctggcattactactgccattgagcaggctgctctggctgcggccaattc

SEQ ID NO: 82628 - DNA, 80 bp, synthetic construct
  source 1..80: mol_type = other DNA
cacaaggctatatagctggttgtttgaaaagtcaggccgtgattatatccccggtcgccagctccaattttacgcgcagt

SEQ ID NO: 82629 - DNA, 80 bp, synthetic construct
  source 1..80: mol_type = other DNA
ccgatgccggagcttcctaaagaaggtcgccggaaaattttgttgctttatgaagtggttggggcaggagtgcacttgct

SEQ ID NO: 82630 - DNA, 80 bp, synthetic construct
  source 1..80: mol_type = other DNA
cccagatgacattgcggctcgtgcgtcacgtctaacggctaccgtggagcttgccgccagcccaggcagactcgaatgcc

SEQ ID NO: 82631 - DNA, 80 bp, synthetic construct
  source 1..80: mol_type = other DNA
gcacggtgcttgggaataagatctttcgtacatcgataactgatggtgcccatctcgaggccaacggccctgaacagtac

SEQ ID NO: 82632 - DNA, 80 bp, synthetic construct
  source 1..80: mol_type = other DNA
ccggcccgaagtcctctggaatcatccgatccagcgagttatacataatgagctggagcaatactgccgagcccgcgctg

SEQ ID NO: 82633 - DNA, 80 bp, synthetic construct
  source 1..80: mol_type = other DNA
gtcttgacatttgatgattctcgccaagtgctgggggctgggcctcacagccttacgtacgaacttgtccctgctggtct

SEQ ID NO: 82634 - DNA, 80 bp, synthetic construct
  source 1..80: mol_type = other DNA
gcaggttaaaatatcttccaatggcctggactgtaccgccatattccctcctggtggggcgccgagcgctgcaccaggcg

SEQ ID NO: 82635 - DNA, 80 bp, synthetic construct
  source 1..80: mol_type = other DNA
aagtggcggctttctgtagcgccctatacaggtacaataggtttacccagcgccattcgctgactggcgggctgtggctg

SEQ ID NO: 82636 - DNA, 80 bp, synthetic construct
  source 1..80: mol_type = other DNA
catggggttaacttcgggtgccccctcttccgctagtgatatctgggtgtttccaccgccctctgaggggtcggcaacca

SEQ ID NO: 82637 - DNA, 80 bp, synthetic construct
  source 1..80: mol_type = other DNA
tctcgccacccataaccctggtcggtaagccaactaatatcctccccagaccatctgcttcggggagcttggcaaaactg

SEQ ID NO: 82638 - DNA, 80 bp, synthetic construct
  source 1..80: mol_type = other DNA
tccagcaaaatgaaaagactcgcgtgcttttatccgcctggccatactacacctaggccacccgtccgtgagccgtccac

SEQ ID NO: 82639 - DNA, 80 bp, synthetic construct
  source 1..80: mol_type = other DNA
accaccaccggccctaaccccagttagtaagccagctaatccgcctagccctgctgcacctaggccccccgcccatgagc

SEQ ID NO: 82640 - DNA, 80 bp, synthetic construct
  source 1..80: mol_type = other DNA
cgcccacaccgccatcggctcgcaatcgccggcttctttatacatatcctgatggggccaaggtgtatgtaggctctttg

SEQ ID NO: 82641 - DNA, 80 bp, synthetic construct
  source 1..80: mol_type = other DNA
tttgagtcagattgttactggctggttaatgcatctaaccctggccaccgtcctggtggtggtctctgccatgcatttta

SEQ ID NO: 82642 - DNA, 80 bp, synthetic construct
  source 1..80: mol_type = other DNA
ccagcgcttcccagagtcgtttcatccgaccgattttgttatgcgcgagggtctcgccgcatatactttgagcccgcgtc

SEQ ID NO: 82643 - DNA, 80 bp, synthetic construct
  source 1..80: mol_type = other DNA
cgatcattcatgccgtggcccctgactacagggttgagcagaaccccaagaggctggaagcggcatatcgtgagacctgc

SEQ ID NO: 82644 - DNA, 80 bp, synthetic construct
  source 1..80: mol_type = other DNA
tcccgcctcggcacagctgcctacccattactggggtcagggatttaccaggtccctgtaggtctaagctttgacgcctg

SEQ ID NO: 82645 - DNA, 80 bp, synthetic construct
  source 1..80: mol_type = other DNA
ggagcgtaatcatcgcccaggcgatgaactttaccttactgagccagctgccgcctggttcgaggctaataagcctaccc

SEQ ID NO: 82646 - DNA, 80 bp, synthetic construct
  source 1..80: mol_type = other DNA
agccagccctaacaattactgaggacaccgcccgcacagccaaccttgcgcttgaggtcgactccgctactgaggtgggc

SEQ ID NO: 82647 - DNA, 80 bp, synthetic construct
  source 1..80: mol_type = other DNA
cgtgcctgcgccggctgcactattaaccccgggattgtccactaccagttcaccgccggggttcctggctccgggaagtc

SEQ ID NO: 82648 - DNA, 80 bp, synthetic construct
  source 1..80: mol_type = other DNA
taggtctatacagcaggaggatgttgatgttgtggtcgtgccaactcgcgagcttcgcaacagttggcggcgccgcggct

SEQ ID NO: 82649 - DNA, 80 bp, synthetic construct
  source 1..80: mol_type = other DNA
ttgctgcttttacacctcacacagcagctcgtgtcactgccggccggcgtgtggtgatagatgaagcaccttcgcttcca

SEQ ID NO: 82650 - DNA, 80 bp, synthetic construct
  source 1..80: mol_type = other DNA
ccgcacctgctgctgctccatatgcagcgagcctcatcagtccatcttcttggcgaccccaatcagatccctgccattga

SEQ ID NO: 82651 - DNA, 80 bp, synthetic construct
  source 1..80: mol_type = other DNA
ctttgagcacgccggtttggtcccggcgattcgccctgagctagcccctactagttggtggcatgtcacccaccgttgcc

SEQ ID NO: 82652 - DNA, 80 bp, synthetic construct
  source 1..80: mol_type = other DNA
ccgccgatgtatgtgagctcatacgtggggcctacccaaagattcagacgaccagccgtgtgttgagatctctattttgg

SEQ ID NO: 82653 - DNA, 80 bp, synthetic construct
  source 1..80: mol_type = other DNA
aatgagcctgcgataggtcagaggctggttttcacgcaggcagccaaggccgccaatcccggcgcaattaccgttcacga

SEQ ID NO: 82654 - DNA, 80 bp, synthetic construct
  source 1..80: mol_type = other DNA
ggcccagggggccacgtttactgagactactattatagccacggccgacgctagaggtcttattcaatcttcccgcgcac

SEQ ID NO: 82655 - DNA, 80 bp, synthetic construct
  source 1..80: mol_type = other DNA
atgccatcgttgcgcttactcgccatacagaaaagtgcgttattctcgacgctcctggcctattgcgtgaggtcggcatt

SEQ ID NO: 82656 - DNA, 80 bp, synthetic construct
  source 1..80: mol_type = other DNA
tctgatataattgtaaataacttcttcctggctggtggtgaagtgggccaccatcgcccttctatcatcccccgcggcaa

SEQ ID NO: 82657 - DNA, 80 bp, synthetic construct
  source 1..80: mol_type = other DNA
cccagatcagaacttagacaccctccaagcgtttcctccgtcttgccaaatcagcgcttaccaccagttggctgaggagc

SEQ ID NO: 82658 - DNA, 80 bp, synthetic construct
  source 1..80: mol_type = other DNA
tgggccaccggccggccccagtggccgctgtcctgcccccctgccctgagcttgagcaggggttactctacatgccgcag

SEQ ID NO: 82659 - DNA, 80 bp, synthetic construct
  source 1..80: mol_type = other DNA
gagcttacggtgtccgatagtgtcctaattttcgaactcacggacatagttcactgtcgtatggccgcccctagtcaacg

SEQ ID NO: 82660 - DNA, 80 bp, synthetic construct
  source 1..80: mol_type = other DNA
taaggcggttctttctacgctcgtcggcaggtacggccgtcgaacgaagttgtatgaagcggcccattctgatgtccgcg

SEQ ID NO: 82661 - DNA, 80 bp, synthetic construct
  source 1..80: mol_type = other DNA
agtctttagggaggttcatccctactatcggaccggtccaggccaccacatgtgagctatatgaactggttgaggccatg

SEQ ID NO: 82662 - DNA, 80 bp, synthetic construct
  source 1..80: mol_type = other DNA
gtggagaagggccaggacggttccgctgtgcttgagcttgacctctgcaaccgtgatgtctcgcgtattacattcttcca

SEQ ID NO: 82663 - DNA, 80 bp, synthetic construct
  source 1..80: mol_type = other DNA
gaaggattgtaacaaatttacaacaggtgagactattgcccatggtaaggtgggccaggggatttcggcttggagtaaaa

SEQ ID NO: 82664 - DNA, 80 bp, synthetic construct
  source 1..80: mol_type = other DNA
gcatgccccaatggcttatccgactgtaccatttagttagatcagcctggattttgcaagccccgaaagagtctttgaaa

SEQ ID NO: 82665 - DNA, 80 bp, synthetic construct
  source 1..80: mol_type = other DNA
cgtaatgcggccactctgatagccggttgtgggttaaaattgaaggttgattaccggcctataggtttgtatgccggcgt

SEQ ID NO: 82666 - DNA, 80 bp, synthetic construct
  source 1..80: mol_type = other DNA
tgtagtggctccgggcctcggggcacttcctgatgttgtccgctttgcaggtcggttgtctgagaagaattggtgcccgg

SEQ ID NO: 82667 - DNA, 80 bp, synthetic construct
  source 1..80: mol_type = other DNA
gactgttaagcccgtgctggatcttacaaactctatcatacagaggttggaatgaataacatgttctgtgcattgcccat

SEQ ID NO: 82668 - DNA, 80 bp, synthetic construct
  source 1..80: mol_type = other DNA
gggatcgccatgcgccctagggctgttctgttgctgttcttcgtgcttctgcctatgctgcccgcgccaccggccggcca

SEQ ID NO: 82669 - DNA, 80 bp, synthetic construct
  source 1..80: mol_type = other DNA
atgttgattcccgtggcgctatcttgcgccgtcagtataatctgtccacctctcctctaacttcatctgttgcctctgga

SEQ ID NO: 82670 - DNA, 80 bp, synthetic construct
  source 1..80: mol_type = other DNA
cagattctgattgagaatgcagccggtcatcgtgttgctatatctacttacactactagtcttggcgccggccctgtgtc

SEQ ID NO: 82671 - DNA, 80 bp, synthetic construct
  source 1..80: mol_type = other DNA
aaatgaaggtaggtaagacccgggagtcttaattaattcctccttgtgcccccttctaatccctgttttgttatttcttt

SEQ ID NO: 82672 - DNA, 80 bp, synthetic construct
  source 1..80: mol_type = other DNA
cccgagccgtccccaatgccttatgtcccgtaccctcgttcaacagaggtgtacgttagatccatatttggtcctggcgg

SEQ ID NO: 82673 - DNA, 80 bp, synthetic construct
  source 1..80: mol_type = other DNA
tgctttttggtgccaccctagatgaccaggccttttgttgctcacggctcatgacctacctccgcggaattagttataaa

SEQ ID NO: 82674 - DNA, 80 bp, synthetic construct
  source 1..80: mol_type = other DNA
aaatttttgttataaaaaaaccattccattcctggtccccatttgaatgcaaaaccttttttctgaccccaggggctttg

SEQ ID NO: 82675 - DNA, 80 bp, synthetic construct
  source 1..80: mol_type = other DNA
tcggacagtgatgatggtaaatgtaaaaattgtaaatataaaaggaagtatttcgcactaagaatgagaatgaaacaagt

SEQ ID NO: 82676 - DNA, 80 bp, synthetic construct
  source 1..80: mol_type = other DNA
tgggtcaccatattcttgggaacaagagctacatcatgggaggttggtcatcaaaacctcgcaaaggcatggggacgaac

SEQ ID NO: 82677 - DNA, 80 bp, synthetic construct
  source 1..80: mol_type = other DNA
tccctaggacccctgctcgtgttacaggcggggtttttcttgttgacaagaatcatcacaataacgcggagtctagactc

SEQ ID NO: 82678 - DNA, 80 bp, synthetic construct
  source 1..80: mol_type = other DNA
ctgctcgtgttacaggcgtggtttttcttgttgacaagaatcatcacaataacgcggagtctagactccgggggggggga

SEQ ID NO: 82679 - DNA, 80 bp, synthetic construct
  source 1..80: mol_type = other DNA
ctcgtgttataggcggggtttttcttgttgacaagaagatccacaccagcggtaggatctagacccctgcgtgtagagaa

SEQ ID NO: 82680 - DNA, 80 bp, synthetic construct
  source 1..80: mol_type = other DNA
tgggtcaccatattcttgggatcaagagctacagcatgggagcacctctctcaacgacaagaaggggcatgggacagaat

SEQ ID NO: 82681 - DNA, 80 bp, synthetic construct
  source 1..80: mol_type = other DNA
atgaatacaaatcaaagaataataaacattgggacagtttgcaaaataattggaattatccggcctattgttccaaatgg

SEQ ID NO: 82682 - DNA, 80 bp, synthetic construct
  source 1..80: mol_type = other DNA
ttacatatggaaaaaacacatgggttaacccaacttatgtgaaccttagccatatcaaaattggtaacataccgggtgtg

SEQ ID NO: 82683 - DNA, 80 bp, synthetic construct
  source 1..80: mol_type = other DNA
gcttcgattataccagccgggaattcattactttgcccagtaagtgggtgggctggataccgcaaaaaccatagcataag

SEQ ID NO: 82684 - DNA, 80 bp, synthetic construct
  source 1..80: mol_type = other DNA
tatttaaagtggaaaaaggaaaaataattaagtcaattgagctggatgcccccaattaccactatgaggaatgctcatgt

SEQ ID NO: 82685 - DNA, 80 bp, synthetic construct
  source 1..80: mol_type = other DNA
aaaaattagcctctttaggatttaccctttcatttttccctcatgggaaaattacaccgagatgtgcaacccaagtggca

SEQ ID NO: 82686 - DNA, 80 bp, synthetic construct
  source 1..80: mol_type = other DNA
ataaattgatgatacgaacagtagacgaaatagatatgacgaaggaaattaaccaaaagaacgtgagaacgctagaagaa

SEQ ID NO: 82687 - DNA, 80 bp, synthetic construct
  source 1..80: mol_type = other DNA
caagaaaggagaagtccaaaaatgaccataaaagtaggaaacactaccctagaattgaagcagaatccgactcagatgat

SEQ ID NO: 82688 - DNA, 80 bp, synthetic construct
  source 1..80: mol_type = other DNA
taacgttacacacagcgggagtgacattatctacacaattcaccgacttcgtgtcgttgaattcactaagatttaggttt

SEQ ID NO: 82689 - DNA, 80 bp, synthetic construct
  source 1..80: mol_type = other DNA
caagatagatagatcaatacaggtcgaccagaatgcattaccagacgtcattacagaagcgtcagagaaattcattcgta

SEQ ID NO: 82690 - DNA, 80 bp, synthetic construct
  source 1..80: mol_type = other DNA
ggggctctttgccacaggaccatattgtacaaaaaatcaaattatgttttaggaaacttcctgtaaacaggcctattgat

SEQ ID NO: 82691 - DNA, 80 bp, synthetic construct
  source 1..80: mol_type = other DNA
gttggggcaccttgcctcaggaacatattgtacaaaaaatcaaactatgttttaggaaacttcctgtaaacaggcctatt

SEQ ID NO: 82692 - DNA, 80 bp, synthetic construct
  source 1..80: mol_type = other DNA
ggggcaccttaccccaggaacatattgtattgaaaatcaaacaatgttttagaaaacttcctgtaaacaggcccattgat

SEQ ID NO: 82693 - DNA, 80 bp, synthetic construct
  source 1..80: mol_type = other DNA
ggtaccttgccacaggagcatattgtacaaaaattgaaacaatgttttcggaaacttcctataaatagacctattgattg

SEQ ID NO: 82694 - DNA, 80 bp, synthetic construct
  source 1..80: mol_type = other DNA
tcggcgctgaatcccgcggacgacccatctcggggccgtttgggcctctaccgtccccttcttcgtctgccgttccgacc

SEQ ID NO: 82695 - DNA, 80 bp, synthetic construct
  source 1..80: mol_type = other DNA
tgccgttccgaccgaccacggggagcacctctgtttacgcggtctccccgtctgagccttgtcacccgccggtccgtgtg

SEQ ID NO: 82696 - DNA, 80 bp, synthetic construct
  source 1..80: mol_type = other DNA
atgtgtctgcggcgttttatcatcttcctcttcatcctgctgctatgcctcaccttcttgttggttcttctggactatca

SEQ ID NO: 82697 - DNA, 80 bp, synthetic construct
  source 1..80: mol_type = other DNA
gatgtggtattgggggccaggtctgcacaacatcttgagtcggtttttccgctgttccacttttctttatgcttgtggca

SEQ ID NO: 82698 - DNA, 80 bp, synthetic construct
  source 1..80: mol_type = other DNA
tgctagtgtgtgctattctttgtccacagccgtggagtttggaagggacccatgttccgcttaacgggactaaacacaac

SEQ ID NO: 82699 - DNA, 80 bp, synthetic construct
  source 1..80: mol_type = other DNA
ccccttcaccaccgaacccacagcatcagctgtcgaactggaaagctcgggagaagggcacacctccctctcagtcacta

SEQ ID NO: 82700 - DNA, 80 bp, synthetic construct
  source 1..80: mol_type = other DNA
atcagaccagagaggggtatataagtgtttgcctgtttgtgctagggggcatactgtttgtagtctcctgcctgatcaaa

SEQ ID NO: 82701 - DNA, 80 bp, synthetic construct
  source 1..80: mol_type = other DNA
cacaaggtctgacctcgccggaaaccacgccagggctcccaacagtaaccgacacaggagtgtctagcacaagcatcttc

SEQ ID NO: 82702 - DNA, 80 bp, synthetic construct
  source 1..80: mol_type = other DNA
ggcatcggcatacgggtggctggggacactcccacatcgacaacccacacaggtctgcccagcagtcccagcatgccatc

SEQ ID NO: 82703 - DNA, 80 bp, synthetic construct
  source 1..80: mol_type = other DNA
cacagcacagggcccacatcatgcagtaaggggtttactgtcggtttccagcaccaggccaggagaggcatcaacaataa

SEQ ID NO: 82704 - DNA, 80 bp, synthetic construct
  source 1..80: mol_type = other DNA
gttaagccagcagaagaggcctcgaaagggtgatggcagtatactaactaatactattgctcatgctagttccattagct

SEQ ID NO: 82705 - DNA, 80 bp, synthetic construct
  source 1..80: mol_type = other DNA
gtgcctatgctacactgtttccgcactgtgcaacatttaatctattttactatatttataggcaagccctgcaatgttta

SEQ ID NO: 82706 - DNA, 80 bp, synthetic construct
  source 1..80: mol_type = other DNA
cagtcccaggagaagcaggcacagaggccaacagctcaagctcagccattagcaaaaaaccagccccttcaccaacagct

SEQ ID NO: 82707 - DNA, 80 bp, synthetic construct
  source 1..80: mol_type = other DNA
gaagccatcactgaagccaacaactccagcaaccccagacaaccagagctctcaacacaaccagcaatcccaggcctagt

SEQ ID NO: 82708 - DNA, 80 bp, synthetic construct
  source 1..80: mol_type = other DNA
ggttggtctacccctaattccaaattgcaaacaaatagacaagtgatagttgatagcggcaataggtcaggttattctgg

SEQ ID NO: 82709 - DNA, 80 bp, synthetic construct
  source 1..80: mol_type = other DNA
cacataaggggaaaagcagtttttacaggaatttgctgtggctaacagagaaagacggctcatatccaaatctaagcaag

SEQ ID NO: 82710 - DNA, 80 bp, synthetic construct
  source 1..80: mol_type = other DNA
aattcgggatgcggtgcctactatcagtaatatgccccctacgattgaaaacttgcacaaatgcgggaaggatattagga

SEQ ID NO: 82711 - DNA, 80 bp, synthetic construct
  source 1..80: mol_type = other DNA
aacccaaaatgcgaatcactgatttccaagaaatcatggtcctacattgtagaaacaccaaatcctgagaatggagcatg

SEQ ID NO: 82712 - DNA, 80 bp, synthetic construct
  source 1..80: mol_type = other DNA
catcacaagaacaggtacatacttacattagagatgttattgatgtgtgtgatgaagataagtggaatgcatctgttaca

SEQ ID NO: 82713 - DNA, 80 bp, synthetic construct
  source 1..80: mol_type = other DNA
ggtatgtttaattgtttagaaccagtggaattgggtaatgctcactatattttacttaatcatgaggtgaactgggatgt

SEQ ID NO: 82714 - DNA, 80 bp, synthetic construct
  source 1..80: mol_type = other DNA
aacttaccacaacagaatgaacgtctgcaagagaaagaagttgaaaagaatatagacgtaactatggaaagtaaagctaa

SEQ ID NO: 82715 - DNA, 80 bp, synthetic construct
  source 1..80: mol_type = other DNA
ttattccgatttgttagcttttgtttctgcagacacagttgaaccgattaacgcagttgcatttgacaatatgcgcatat

SEQ ID NO: 82716 - DNA, 80 bp, synthetic construct
  source 1..80: mol_type = other DNA
tgagtcattatgggatacgataacaacgtcaaactatatattagctagatcagttgtacccgatctgaaagagaaagagt

SEQ ID NO: 82717 - DNA, 80 bp, synthetic construct
  source 1..80: mol_type = other DNA
aagataataaccattggatcaatcagtatagcaatcggaataattagtctaatgttgcaaataggaaatattatttcaat

SEQ ID NO: 82718 - DNA, 80 bp, synthetic construct
  source 1..80: mol_type = other DNA
ggaggaccaaaagtaacagacttagaaaggggtttgagatgatttgggatcctaatggatggacaaataccgacagtgat

SEQ ID NO: 82719 - DNA, 80 bp, synthetic construct
  source 1..80: mol_type = other DNA
ttctcagtgaaacaggatgttgtagcaataactgattggtcagggtacagcggaagtttcgtccaacatcctgagttaac

SEQ ID NO: 82720 - DNA, 80 bp, synthetic construct
  source 1..80: mol_type = other DNA
catatgttaatattaacaacactaatgttgttgctggagaggacaaaacatcagtgacattggccggcaattcatctctt

SEQ ID NO: 82721 - DNA, 80 bp, synthetic construct
  source 1..80: mol_type = other DNA
ggcgctctattaaatgacaaacattcaaatgggaccgtaaaggacagaagtccttatagggccttaatgagctgtcctct

SEQ ID NO: 82722 - DNA, 80 bp, synthetic construct
  source 1..80: mol_type = other DNA
aggggaaggttactaaatcaatagagttgaatgctcccaattttgacaactggcatggttcaaatcgaccttgggtgtct

SEQ ID NO: 82723 - DNA, 80 bp, synthetic construct
  source 1..80: mol_type = other DNA
atgggctagtcactcaatccaaactgggagtcaaaacaacactggaatatgcaaccaaagaatcatcacatatgaaaaca

SEQ ID NO: 82724 - DNA, 80 bp, synthetic construct
  source 1..80: mol_type = other DNA
atccgcgtcccgaagatggagagggcagctgcaatccagtgactgttgatggagcaaacggagtaaaagggttttcatac

SEQ ID NO: 82725 - DNA, 80 bp, synthetic construct
  source 1..80: mol_type = other DNA
agtatagcaatcggaataattagtctaatgttgcaaataggaaatattatttcaatatgggctagtcactcaatccaaac

SEQ ID NO: 82726 - DNA, 80 bp, synthetic construct
  source 1..80: mol_type = other DNA
ttgttctatcagtaaaggagatgtttttgtcataagagaacctttcatatcatgttctcacttggaatgcagaacctttt

SEQ ID NO: 82727 - DNA, 80 bp, synthetic construct
  source 1..80: mol_type = other DNA
tttctcagtgaaacagttggactgtataagaccttgcttctgggttgagttagtcagagggctgcctagagaaaatacaa

SEQ ID NO: 82728 - DNA, 80 bp, synthetic construct
  source 1..80: mol_type = other DNA
atgaatccaaatcaaaagataataaccattggatcaatcagtatagcaatcggaataattagtctaatgttgcaaatagg

SEQ ID NO: 82729 - DNA, 80 bp, synthetic construct
  source 1..80: mol_type = other DNA
aggggaaggttactaaatcaatagagttgaattcctgttacccagatactggcatagtgatgtgtgtatgcagggacaaa

SEQ ID NO: 82730 - DNA, 80 bp, synthetic construct
  source 1..80: mol_type = other DNA
aaatattatttcaatatgggctagtcactcaatccaaactgggagtcaaaacaacactggaatatgcaaccaaagaatca

SEQ ID NO: 82731 - DNA, 80 bp, synthetic construct
  source 1..80: mol_type = other DNA
tagaaagaaacatagagatgtatctggtattttctctgttgaaggcaaaagctgcatcaatcggtgcttttatgtggagt

SEQ ID NO: 82732 - DNA, 80 bp, synthetic construct
  source 1..80: mol_type = other DNA
acagtattgttgtgttttgtggcacctcaggtacatatggaacaggctcatggcctgatggggcggacatcaatctcaag

SEQ ID NO: 82733 - DNA, 80 bp, synthetic construct
  source 1..80: mol_type = other DNA
cttataacattttataagtatcttgtttaaaaaaagggagtaaccgaaaacggtcaggaccgaaatcggtggatataaaa

SEQ ID NO: 82734 - DNA, 80 bp, synthetic construct
  source 1..80: mol_type = other DNA
ataccaggggaacactacaggaaatttcattaaatgtaagcagtacgcaggcaacacaaacggtgtattccgtgccagac

SEQ ID NO: 82735 - DNA, 80 bp, synthetic construct
  source 1..80: mol_type = other DNA
gggatgctgaaggggaacatggcggcagtgtacgggaggagtgcagtagtgtggatagtgctatagatagtgaaaaccag

SEQ ID NO: 82736 - DNA, 80 bp, synthetic construct
  source 1..80: mol_type = other DNA
gggactggagacccatagtacaattcttaagatatcaaggaatagaatttatatcttttttatgtgcattaaaggaattt

SEQ ID NO: 82737 - DNA, 80 bp, synthetic construct
  source 1..80: mol_type = other DNA
ggaaatataaaagtttactacaaatgaaatgtccaccattattaataacctccaataccaatcctgtggaagacgatagg

SEQ ID NO: 82738 - DNA, 80 bp, synthetic construct
  source 1..80: mol_type = other DNA
atggggacaaatgtaatgctatgaactatgtattatggggtgctatatattataaaaataatatagacatatggtgtaaa

SEQ ID NO: 82739 - DNA, 80 bp, synthetic construct
  source 1..80: mol_type = other DNA
acagaagggtgtgtggactattggggtatatattatatgaacgagcacctaaaagtatactatgaagtgtttattcaaga

SEQ ID NO: 82740 - DNA, 80 bp, synthetic construct
  source 1..80: mol_type = other DNA
cggggtaagggaaccaaaaacgctggcatattaactgttacatatgccacagagtcacaacgccaaaaatttttggacac

SEQ ID NO: 82741 - DNA, 80 bp, synthetic construct
  source 1..80: mol_type = other DNA
tatttactattttttgtattgcccatgtggttgttgcatagactggcaatggatatgatatagtactgtatatgtatgtg

SEQ ID NO: 82742 - DNA, 80 bp, synthetic construct
  source 1..80: mol_type = other DNA
tctagtaaatatgccaatacaactattccttttagtacctcatggaatatgcctgtaaatactggtcctgatattgcttt

SEQ ID NO: 82743 - DNA, 80 bp, synthetic construct
  source 1..80: mol_type = other DNA
ggtggaggtgggcaggggccagccattgggtgttggtattagtggacacccattatataatagacaggatgatactgaaa

SEQ ID NO: 82744 - DNA, 80 bp, synthetic construct
  source 1..80: mol_type = other DNA
ggggtaagggaaaggcatgcaagcccaataatgtatctacggtggactgtcctcctttggaactagtaaacacccctatt

SEQ ID NO: 82745 - DNA, 80 bp, synthetic construct
  source 1..80: mol_type = other DNA
ggatgggtcgggatgtaacggatggtttctagtacaggcaatagtagataaacaaacaggcgacacagtgtcggaggatg

SEQ ID NO: 82746 - DNA, 80 bp, synthetic construct
  source 1..80: mol_type = other DNA
gggatgctgaagaggaacatggcggcagtgatgctgaaggggaacatggcggcagtgtacgggaggagtgcagtagtgtg

SEQ ID NO: 82747 - DNA, 80 bp, synthetic construct
  source 1..80: mol_type = other DNA
tacttatgtgttgagtgtatatgtgtatgtttgtaggtatgtgtgtatatgtttttgttaataaagtatgtatgacagtt

SEQ ID NO: 82748 - DNA, 80 bp, synthetic construct
  source 1..80: mol_type = other DNA
agtaaatgtatacaggaccatattaactattggaattgtgtgcgactggaaaatgcaatatattatgcagcacgagaacg

SEQ ID NO: 82749 - DNA, 80 bp, synthetic construct
  source 1..80: mol_type = other DNA
tatatgtatattgtatacatatgcttgtattggtatttttggtgtggttttgtgtatgcatgtatatatgttgcactgtc

SEQ ID NO: 82750 - DNA, 80 bp, synthetic construct
  source 1..80: mol_type = other DNA
aggggaggcatggtaggggacactattcccactgacatgtatattaagggcactgacattcgtgaaactcctagtagtta

SEQ ID NO: 82751 - DNA, 80 bp, synthetic construct
  source 1..80: mol_type = other DNA
atggcgctatttcacaaccctgaggaacggccatacaaattgccagacctgtgcaggacattggacactacattgcatga

SEQ ID NO: 82752 - DNA, 80 bp, synthetic construct
  source 1..80: mol_type = other DNA
gggcggacggggaggatgaaggggaaaatggcgacagcatacgggaggactgtagtagtgtagacagtgctatagatagt

SEQ ID NO: 82753 - DNA, 80 bp, synthetic construct
  source 1..80: mol_type = other DNA
tgattggcgaccaatagtacagtttttaagatatcaggggctagaattcataacattcttatgtgcattaaaagattttt

SEQ ID NO: 82754 - DNA, 80 bp, synthetic construct
  source 1..80: mol_type = other DNA
atacattttttgcaaggcacaataatttcatatgtaaattcagctagtcacttttggttagagccacttgcagatgcaaa

SEQ ID NO: 82755 - DNA, 80 bp, synthetic construct
  source 1..80: mol_type = other DNA
ggggacaaaagcaactcaatgcactatgtagtatggggtacaatttattttaaaaacagtacagacacatggtgtaaaac

SEQ ID NO: 82756 - DNA, 80 bp, synthetic construct
  source 1..80: mol_type = other DNA
agaagggtgtgtggattattggggtatatattatatgtatgaaaaacagaaaacgtattatgaaaggtttataaatgatg

SEQ ID NO: 82757 - DNA, 80 bp, synthetic construct
  source 1..80: mol_type = other DNA
cggggtaggggatcaaccaatacaggaatattgactgtaacatatagttctgaatcacaacgccaaaaatttttggaaac

SEQ ID NO: 82758 - DNA, 80 bp, synthetic construct
  source 1..80: mol_type = other DNA
cgttatagtatgccttaagttttgtattgtgcatttgtattggtgtatatttttataaataaatatggtatcacaccgtg

SEQ ID NO: 82759 - DNA, 80 bp, synthetic construct
  source 1..80: mol_type = other DNA
ttacacgccggggtacacaaattggggcacaggtgcactattatcatgatattagtggcattgcccctgctgacagcatt

SEQ ID NO: 82760 - DNA, 80 bp, synthetic construct
  source 1..80: mol_type = other DNA
tatttattaccattattgttctttttattaaaaaaacgtaaacgccttccttatttttttgcagatggcattgtggcgct

SEQ ID NO: 82761 - DNA, 80 bp, synthetic construct
  source 1..80: mol_type = other DNA
ggggccgcaagcaggacattcctaaggtgtctgcatatcaatacagggtgtttagggtttccctacctgatcctaataaa

SEQ ID NO: 82762 - DNA, 80 bp, synthetic construct
  source 1..80: mol_type = other DNA
gggagcactgggccaaaggtaaatcttgtaagcctaacaatgtgcagcccggggactgtccaccattagaattagttaat

SEQ ID NO: 82763 - DNA, 80 bp, synthetic construct
  source 1..80: mol_type = other DNA
ggtatcctcagactcccagttatttaacaagccctattggctgcacaaggcacagggacacaacaatggtatttgttggc

SEQ ID NO: 82764 - DNA, 80 bp, synthetic construct
  source 1..80: mol_type = other DNA
atattagaaagggagtgaccgaaaacggtcacgaccgaaaacggtgtatataaagctgaacacagcagttgtctatacca

SEQ ID NO: 82765 - DNA, 80 bp, synthetic construct
  source 1..80: mol_type = other DNA
ggacgggacggggtgtaacggatggttttttgtacaagcaatagtagataaacaaacaggtgacacagtctcagaggatg

SEQ ID NO: 82766 - DNA, 80 bp, synthetic construct
  source 1..80: mol_type = other DNA
cttataacattttacaatcataatttaaaaaaagggaggcaccgaaaacggtcacgaccgaaaacggtgtatataaaacc

SEQ ID NO: 82767 - DNA, 80 bp, synthetic construct
  source 1..80: mol_type = other DNA
tggagggagcaatctaaataaaagtccttgtgcaaaaccgccaggcgtacatagggaacaaagggtaacactacaagagc

SEQ ID NO: 82768 - DNA, 80 bp, synthetic construct
  source 1..80: mol_type = other DNA
tcccggtaaacatatgcaataaacaggcaagaacaaacgtgtattcagtaccagacagcggctatggcaatatggaagtg

SEQ ID NO: 82769 - DNA, 80 bp, synthetic construct
  source 1..80: mol_type = other DNA
gggaagaggaaggggaaaatggcggggaaaatggcggcagcatacgggaggagtgcagtagtgtagacagtgccattgat

SEQ ID NO: 82770 - DNA, 80 bp, synthetic construct
  source 1..80: mol_type = other DNA
agtgagaatcaagatccacagtcacctactgcacagctaaaaacagtgttacaggctaataacaagaaagccatactact

SEQ ID NO: 82771 - DNA, 80 bp, synthetic construct
  source 1..80: mol_type = other DNA
atcacaatttaaacacacatatggattagcatttaacgacctggtacgtacatttaaaagtgataaaactatatgtactg

SEQ ID NO: 82772 - DNA, 80 bp, synthetic construct
  source 1..80: mol_type = other DNA
ttcagccatatgcgttatatacacatatacagtgtttggataccaaatatggagtgtatatattactactaattaaatat

SEQ ID NO: 82773 - DNA, 80 bp, synthetic construct
  source 1..80: mol_type = other DNA
agaaacaaatgactatggcgcaatggattaggtttagatgtgataaatgtgacgatgggggcgactggcgaccaatagtg

SEQ ID NO: 82774 - DNA, 80 bp, synthetic construct
  source 1..80: mol_type = other DNA
agaaaaattgcatagtaatacagggaccaccaaacacaggcaagtcatacttttgtatgagtttaatgcactttctacaa

SEQ ID NO: 82775 - DNA, 80 bp, synthetic construct
  source 1..80: mol_type = other DNA
cacaggcacatgctggtcatatttcgatacgtatatgagaaatgcattagacggaaatcctataagccttgacagaaaac

SEQ ID NO: 82776 - DNA, 80 bp, synthetic construct
  source 1..80: mol_type = other DNA
agtgatttatgtatagtatatagaaacggggaaccatatgctgcatgccaaaaatgtattaaatttcatgctaaagtaag

SEQ ID NO: 82777 - DNA, 80 bp, synthetic construct
  source 1..80: mol_type = other DNA
atggaaacaaggacaattctatgcattatgtagtgtggggagcaatatattataaaacacatacagacacatggtgtaaa

SEQ ID NO: 82778 - DNA, 80 bp, synthetic construct
  source 1..80: mol_type = other DNA
acacaagggtatgtggattactggggtatatattatgtgcacgagcaacataagacatattatgaagtgtttaagcatga

SEQ ID NO: 82779 - DNA, 80 bp, synthetic construct
  source 1..80: mol_type = other DNA
caccaccccggcccataccgccgcaacaaccccatgcaccaaaaaaactaagtcggcgccgtcttgcaagtgtggagttt

SEQ ID NO: 82780 - DNA, 80 bp, synthetic construct
  source 1..80: mol_type = other DNA
ccaggccctcagaaacagacggagtgtccgtggaccttgttacaagtaaaggcttcaacaaacgacggcaccagtgttgt

SEQ ID NO: 82781 - DNA, 80 bp, synthetic construct
  source 1..80: mol_type = other DNA
agggggcaagggaagtaaacatacaggtatactaactgtaacatataatactgaagcacaacgccaaaaatttttggaaa

SEQ ID NO: 82782 - DNA, 80 bp, synthetic construct
  source 1..80: mol_type = other DNA
ttccacctagtgtacatgtatctgtgggatatatgacattgtaacagcacatgctgtatgtatattgtatacatatcaat

SEQ ID NO: 82783 - DNA, 80 bp, synthetic construct
  source 1..80: mol_type = other DNA
tatttactattttttatattgcctatgtggtgtttacacatcctttcagtatctgcctaagttgtgttactacatagtgt

SEQ ID NO: 82784 - DNA, 80 bp, synthetic construct
  source 1..80: mol_type = other DNA
attgtacattactattaccttgtttttacatttatattgtaccaataaacatggtttctagccgtgtgtccaggcgtaag

SEQ ID NO: 82785 - DNA, 80 bp, synthetic construct
  source 1..80: mol_type = other DNA
cggggtacacaaattggggcacaggtacattattatcatgatattagtaatattactgcaacagaagacattgaaatgca

SEQ ID NO: 82786 - DNA, 80 bp, synthetic construct
  source 1..80: mol_type = other DNA
acctttacttacctctgaatctacagatggtttatatgatatatatgcagatgcagatatagataatgcaatgttacata

SEQ ID NO: 82787 - DNA, 80 bp, synthetic construct
  source 1..80: mol_type = other DNA
ctacttctcatacaggttctacaggacctaggtcccatctttcatttccttctataccttctacagtgtctacaaaatat

SEQ ID NO: 82788 - DNA, 80 bp, synthetic construct
  source 1..80: mol_type = other DNA
agtaatacaaccattccatttactacttcttgggacatacctgtaaccactggccctgacatagttttacctactgcatc

SEQ ID NO: 82789 - DNA, 80 bp, synthetic construct
  source 1..80: mol_type = other DNA
ccccaatttgccctttgtccctcctacatctatagataccacagttgcaatagctattcagggctccaattattatttat

SEQ ID NO: 82790 - DNA, 80 bp, synthetic construct
  source 1..80: mol_type = other DNA
tgcctttattatattattttttaaaaaaacgtaaacgtattccctatttttttacagatggctttgtggcggtctagtga

SEQ ID NO: 82791 - DNA, 80 bp, synthetic construct
  source 1..80: mol_type = other DNA
ggaagctctcgcttattaacagtagggcatccttattttaaggtacctgtaaatggtggccgcaagcaggaaatacctaa

SEQ ID NO: 82792 - DNA, 80 bp, synthetic construct
  source 1..80: mol_type = other DNA
gggcaaagggcaaggcctgtaagtccactactgtacaacagggcgattgtccaccattagaattagttaatactgcaatt

SEQ ID NO: 82793 - DNA, 80 bp, synthetic construct
  source 1..80: mol_type = other DNA
tacgtgatcgtcctggtactcatgtatattccccttccccaagtggctctatggtttcttctgattcccagttgtttaat

SEQ ID NO: 82794 - DNA, 80 bp, synthetic construct
  source 1..80: mol_type = other DNA
cattgtctgcctgcaccgaaacagccatacctgctgtatatagccctacaaagtttaaggaatatactaggcatgtggag

SEQ ID NO: 82795 - DNA, 80 bp, synthetic construct
  source 1..80: mol_type = other DNA
acaattggaatataggcgttacccctccaccatctgcaagcttggtggacacgtataggtatttacaatcagcagctata

SEQ ID NO: 82796 - DNA, 80 bp, synthetic construct
  source 1..80: mol_type = other DNA
gccctgcatcagctaaatcgtcttcctcagcctctaaacacaaacggaaacgtgtgtccaagtaatgtatgtatgttgta

SEQ ID NO: 82797 - DNA, 80 bp, synthetic construct
  source 1..80: mol_type = other DNA
tgcttgctgtgtatttatgtactattacatatttctgtttttatgttgtatgcttgcacactgtttacatatttgtgttt

SEQ ID NO: 82798 - DNA, 80 bp, synthetic construct
  source 1..80: mol_type = other DNA
gtatgttgtatgcttgcacactgtactgtatatgtctgtcctggtacatatttgtggttgtatgtgtatatgttgcgtgc

SEQ ID NO: 82799 - DNA, 80 bp, synthetic construct
  source 1..80: mol_type = other DNA
tatgtgtatgttgtagaagtatgtgtgtatgtatgtttttgttaataaagtatgtatggaagtttcatttgtggttgcac

SEQ ID NO: 82800 - DNA, 80 bp, synthetic construct
  source 1..80: mol_type = other DNA
catccttagtttatacatttatattttatagtgggttacttttatacagcaacggccattttgtgtgcaaccgttttcgg

SEQ ID NO: 82801 - DNA, 80 bp, synthetic construct
  source 1..80: mol_type = other DNA
ttgcaattggctttgtaccatcagttacccttataaacgttttgtatcagcaaaaacatgttctgtaacctaagttcacc

SEQ ID NO: 82802 - DNA, 80 bp, synthetic construct
  source 1..80: mol_type = other DNA
tacatacttggcactactaacagtttttgtggcgcacctacacttagtcatcatcctgtccaggtgcactacaacaatgc

SEQ ID NO: 82803 - DNA, 80 bp, synthetic construct
  source 1..80: mol_type = other DNA
gcaagttatattttgtgactaatatttttacagacctgtgtgcaaccgaaataggttgggcagacattcctatactttta

SEQ ID NO: 82804 - DNA, 80 bp, synthetic construct
  source 1..80: mol_type = other DNA
atgcaaaagttgcttgcccatacggaatggcgcgatttcacaatcctgcagaacggccattcaaattgcctgacctgtgc

SEQ ID NO: 82805 - DNA, 80 bp, synthetic construct
  source 1..80: mol_type = other DNA
tgcgatctctactgcagctgtttatggagacactgtcatttgtgtgtccctggtgtgcatcgggaacccagtaacctgca

SEQ ID NO: 82806 - DNA, 80 bp, synthetic construct
  source 1..80: mol_type = other DNA
atggggatgggtcgggatgtaacggatggttcctagtacaggcaatagtagataaacaaacgggcgacactgtgtcagag

SEQ ID NO: 82807 - DNA, 80 bp, synthetic construct
  source 1..80: mol_type = other DNA
aaactagcttttcatcatgtggctaaagaactgcacccagagtatttcaaggactaagaactgctgacatacagagtgct

SEQ ID NO: 82808 - DNA, 80 bp, synthetic construct
  source 1..80: mol_type = other DNA
ctctttcaatatcaccacccaaacgagagggagaaagagagaatatgcacttttttataaccttgatgtagtgcaattag

SEQ ID NO: 82809 - DNA, 80 bp, synthetic construct
  source 1..80: mol_type = other DNA
tacttcttctaataatactgcttctaataatactttaacgtgcaatgatactataggggggcagggctgggcgaaagagg

SEQ ID NO: 82810 - DNA, 80 bp, synthetic construct
  source 1..80: mol_type = other DNA
aacgtgcaatgatactataggggggcagggctgggcgaaagaggaaataaaaaactgctctttcaatgccaccaaaggaa

SEQ ID NO: 82811 - DNA, 80 bp, synthetic construct
  source 1..80: mol_type = other DNA
cactgatgatgcacagaaggactccatctatgcatcggctctggtggaagcaaccaagttctgtgcacccatatatgaat

SEQ ID NO: 82812 - DNA, 80 bp, synthetic construct
  source 1..80: mol_type = other DNA
tgttgccaatcctgatgatgctgctcagggatctggacataccaagtccattctcaaccttcggacaagcacagagacca

SEQ ID NO: 82813 - DNA, 80 bp, synthetic construct
  source 1..80: mol_type = other DNA
cattccgttaggatcttcttccttaatgccgcaaaagccaaggttgctctcgctcgtaagccagaggggaaggctaatcc

SEQ ID NO: 82814 - DNA, 80 bp, synthetic construct
  source 1..80: mol_type = other DNA
agtggatgtcgcagaaaactgtagccattgctaagagcctaaaggaggttgagcagcttaagtggggaagaggtggtctc

SEQ ID NO: 82815 - DNA, 80 bp, synthetic construct
  source 1..80: mol_type = other DNA
acgaagtggtctccaggagataattcagcaaaatttcgaagatttactcaggcattacatgatggtctgcgagatgataa

SEQ ID NO: 82816 - DNA, 80 bp, synthetic construct
  source 1..80: mol_type = other DNA
cttagtaatgactatgacactacatctcaaacagaacgaatgcatcaaccccccgaccaatcaatcagcaccacacgaac

SEQ ID NO: 82817 - DNA, 80 bp, synthetic construct
  source 1..80: mol_type = other DNA
tcgtgatgatatcaggaaaaccagggatagggaagactcaccttgccagagagctggctaagaagatcgcaaccaccctt

SEQ ID NO: 82818 - DNA, 80 bp, synthetic construct
  source 1..80: mol_type = other DNA
acgggagaccagagggtgggcctcatcccacgcaatggtgttgaccattgggacgcgtacaagggagagagggtcgtcct

SEQ ID NO: 82819 - DNA, 80 bp, synthetic construct
  source 1..80: mol_type = other DNA
acgggagaccagagggttggcctcatcccacgcaatggtgttgaccattgggacgcgtacaagggagagagggtcgtcct

SEQ ID NO: 82820 - DNA, 80 bp, synthetic construct
  source 1..80: mol_type = other DNA
ctaacggggaagaggaaccagtggtctcttataacgtcaaggatggcgtttctgggttgcctgagctttccactgtcagg

SEQ ID NO: 82821 - DNA, 80 bp, synthetic construct
  source 1..80: mol_type = other DNA
ttggagggcaactcaagggcgtcagaaccatgccagagctcaaacaagcactcaagaatatctcaattaagaagtgtcag

SEQ ID NO: 82822 - DNA, 80 bp, synthetic construct
  source 1..80: mol_type = other DNA
atagtgtatggtggcagcacctacacgcttgaatctgatggtaagggtagtgtgagggttgacaaagttcagagtgccac

SEQ ID NO: 82823 - DNA, 80 bp, synthetic construct
  source 1..80: mol_type = other DNA
ccgtgcaaaccaacaatgaactagccggcgccctgcatcatctcaggtgcgctaggatcaggtactatgttaagtgtgtc

SEQ ID NO: 82824 - DNA, 80 bp, synthetic construct
  source 1..80: mol_type = other DNA
caaaccacaactggaggacacgggagaagccactagcaaagacggatgcccaaaacccaaagatgaagaggagtttgttg

SEQ ID NO: 82825 - DNA, 80 bp, synthetic construct
  source 1..80: mol_type = other DNA
gatggggagatctatcattatggcttgtatgtggaacgaggcctggtgcttggcgtgcacaaaccgccggcagccattag

SEQ ID NO: 82826 - DNA, 80 bp, synthetic construct
  source 1..80: mol_type = other DNA
ctgaagggcctctgatcatctctgaggatttaaatggtttgaccttcctgcgtaggaccgtgacccgtgatccagctggt

SEQ ID NO: 82827 - DNA, 80 bp, synthetic construct
  source 1..80: mol_type = other DNA
cagtgtcccctagaaacgctccaggtgaaatactgtggagcgcgcctctgagccctgatttgaacccctatctctctcac

SEQ ID NO: 82828 - DNA, 80 bp, synthetic construct
  source 1..80: mol_type = other DNA
atggttatgcaggtggttttgaagtgcaggtgattcttgcggggaatgcgttcaccgcgggaaagatcgtgtttgctgct

SEQ ID NO: 82829 - DNA, 80 bp, synthetic construct
  source 1..80: mol_type = other DNA
attgcatggtgaatccttcccttatacagcctttgacaacaactgttatgccttttgttgctgggttttggacctgaacg

SEQ ID NO: 82830 - DNA, 80 bp, synthetic construct
  source 1..80: mol_type = other DNA
gtcccacccaattttccaactgaaggtctgagtcccagtcaagtcacaatgtttcctcacataatcgtggatgttaggca

SEQ ID NO: 82831 - DNA, 80 bp, synthetic construct
  source 1..80: mol_type = other DNA
tcccacccacagtcgaatcaagaaccaaaccattcactgtcccagtacttactgttgaagagatgactaattcaagattt

SEQ ID NO: 82832 - DNA, 80 bp, synthetic construct
  source 1..80: mol_type = other DNA
cctatccctctagaaagattatttacaggccccagcactgcttttgttgttcagccccaaaatggcagatgcacaactga

SEQ ID NO: 82833 - DNA, 80 bp, synthetic construct
  source 1..80: mol_type = other DNA
tgtaacttcagaggggaagtcaatcacattgccggtactcacgattacaccatgaggctaacttctcagaattggaacaa

SEQ ID NO: 82834 - DNA, 80 bp, synthetic construct
  source 1..80: mol_type = other DNA
ctatgacccaacagaagagattccagcccctcttgggaccccagactttgtagggaggattcaaggtgtgctcactcaga

SEQ ID NO: 82835 - DNA, 80 bp, synthetic construct
  source 1..80: mol_type = other DNA
ccaccagaagtgatggctcgacccgctcccacaaggccacagtgagcacggggagtgttcacttcactccaaaattgggc

SEQ ID NO: 82836 - DNA, 80 bp, synthetic construct
  source 1..80: mol_type = other DNA
agtgttcagttcaccaccgacacaaccaatgatcttaatgctgggcaaaacacaaaattcaccccggtcggtgtcgagca

SEQ ID NO: 82837 - DNA, 80 bp, synthetic construct
  source 1..80: mol_type = other DNA
aaccagcggcgaccaccaaagtgagcctcaacaatggacactcccaaattactcaggtactccaaatcataatgtgcatt

SEQ ID NO: 82838 - DNA, 80 bp, synthetic construct
  source 1..80: mol_type = other DNA
tggcccccgctgttgcgcccactttcccgggtgaacagctgcttttctttaggtccactctacctgggtgtggcgggtac

SEQ ID NO: 82839 - DNA, 80 bp, synthetic construct
  source 1..80: mol_type = other DNA
tgatgtggccttgctgaggtttgttaacccagacacaggaagagtgttgtttgaatgtaagctccatagatcaggcttca

SEQ ID NO: 82840 - DNA, 80 bp, synthetic construct
  source 1..80: mol_type = other DNA
tcacagtggcccactctggttcacatgacttggttattccccctaatggttatttcagatttgattcctgggttaatcag

SEQ ID NO: 82841 - DNA, 80 bp, synthetic construct
  source 1..80: mol_type = other DNA
atgctggagctggggccataaaccaaaaggtggaatttgagaataatagaaaattacaacaagcttcctttcaatttagc

SEQ ID NO: 82842 - DNA, 80 bp, synthetic construct
  source 1..80: mol_type = other DNA
atgctacccacaaattgcaacaaggtttaatgcagatcaaacaggcagtgctcctagagggtgggttttccgcggcagac

SEQ ID NO: 82843 - DNA, 80 bp, synthetic construct
  source 1..80: mol_type = other DNA
gccgctcgcggggcgatcaatgcgcccatgacaaaagccctggattggagtggaactaggtactgggctcccgaggccag

SEQ ID NO: 82844 - DNA, 80 bp, synthetic construct
  source 1..80: mol_type = other DNA
tgacaaaagccctggattggagtggaactaggtactgggctcccgaggccagagtcacaacatacaatgcaggccacttt

SEQ ID NO: 82845 - DNA, 80 bp, synthetic construct
  source 1..80: mol_type = other DNA
aatgataattcaagaggcatgaattttgaaacaattatgtttactaaggtggctatgttgatatgtgaagctctaaattc

SEQ ID NO: 82846 - DNA, 80 bp, synthetic construct
  source 1..80: mol_type = other DNA
catttagaaaatttggtgatacgtaaagaaaatccacaggatattctatttcattcaaaagatttacttttgaaatcaac

SEQ ID NO: 82847 - DNA, 80 bp, synthetic construct
  source 1..80: mol_type = other DNA
gagtaatgttaaaactggagttaataatgattttaacctacttgatcaaagaattatttggcaaaactggtatgcattta

SEQ ID NO: 82848 - DNA, 80 bp, synthetic construct
  source 1..80: mol_type = other DNA
tatgaaaaactgctctttcaatatcacctcaggcataagagataaggtgcagaaaaagtatgcaacattttataaccttg

SEQ ID NO: 82849 - DNA, 80 bp, synthetic construct
  source 1..80: mol_type = other DNA
ctgcatggaatggaggactcggagaaagaagtattagtgtggagatttaacagcagactggcattcgagcacaaggccag

SEQ ID NO: 82850 - DNA, 80 bp, synthetic construct
  source 1..80: mol_type = other DNA
actggtagccatgttgtatacccctttgagatctaatggttccggcgatgatgtcttcactgtttcatgtagagtgctga

SEQ ID NO: 82851 - DNA, 80 bp, synthetic construct
  source 1..80: mol_type = other DNA
atattaaccatttctgaattaaccaattcaagatttcctgcacccatagattcattgtacacagcccaaaacaacaatct

SEQ ID NO: 82852 - DNA, 80 bp, synthetic construct
  source 1..80: mol_type = other DNA
caatgtccaatgtcaaaatggtcggtgcacactggatggtgaactgcagggaaccactcagttgctgccttcaggcatat

SEQ ID NO: 82853 - DNA, 80 bp, synthetic construct
  source 1..80: mol_type = other DNA
gtgctttcaggggcaaattaacagcagatgtacaccaaagccacgatgacagatggcacatgcagctgacaaatcttaat

SEQ ID NO: 82854 - DNA, 80 bp, synthetic construct
  source 1..80: mol_type = other DNA
gggaccccctttgatccaacagaggatgtgccagctccgttaggcaccccagatttcacaggcctcctcttcggagtggc

SEQ ID NO: 82855 - DNA, 80 bp, synthetic construct
  source 1..80: mol_type = other DNA
gagtcagaggaatgttgtatccaatccaaacaccaccagggcacacgaggctgtgatctccacaaccagttcacagtttg

SEQ ID NO: 82856 - DNA, 80 bp, synthetic construct
  source 1..80: mol_type = other DNA
tgccaaaattaggatcaatcaactttggtagtacaagtgatgatttccagttacaacaacccaccaaatttacaccagtt

SEQ ID NO: 82857 - DNA, 80 bp, synthetic construct
  source 1..80: mol_type = other DNA
ggaattaaggttgagagtggacatgattttgaccaatgggccctgcccagatattcaggtcatttaacccttaatatgaa

SEQ ID NO: 82858 - DNA, 80 bp, synthetic construct
  source 1..80: mol_type = other DNA
tcttgccccgcctgttgctccaaatttccctggtgaacagctgttgttctttagatcaaatgttccttgtgctggtggcg

SEQ ID NO: 82859 - DNA, 80 bp, synthetic construct
  source 1..80: mol_type = other DNA
gatgtggcccttatcaggtacgtcaatcctgacacgggtcgcacactcttcgaggcgaaactccacagaacaggctacat

SEQ ID NO: 82860 - DNA, 80 bp, synthetic construct
  source 1..80: mol_type = other DNA
actcagggcagttcacatcaacgcccttgcacacacccacgaaaacaagtcagcctgctcctgtcaaaagaacccaaccc

SEQ ID NO: 82861 - DNA, 80 bp, synthetic construct
  source 1..80: mol_type = other DNA
ccttcttcctcttcaggtagtatctatagccttccaacacagagtactgtcttgagtaagccttctttcggctcttctgt

SEQ ID NO: 82862 - DNA, 80 bp, synthetic construct
  source 1..80: mol_type = other DNA
aatgaagaagctctgatacatattctccgggagtctggcacaatttaccatgagactatgggcatgtcatacatcgggat

SEQ ID NO: 82863 - DNA, 80 bp, synthetic construct
  source 1..80: mol_type = other DNA
aaaatgtaatggagcagcgagcgattgtaggatatctttatcttcattctatgcagagatgaaatggctcctttcatatc

SEQ ID NO: 82864 - DNA, 80 bp, synthetic construct
  source 1..80: mol_type = other DNA
aagacaatgctgctttcccgcagatgactaagtcatacaaaaacacaaggagagacccagctctgatattatggggaatc

SEQ ID NO: 82865 - DNA, 80 bp, synthetic construct
  source 1..80: mol_type = other DNA
tattcgtcgaagaggggaagattattcatattagcccattatcagggagtgctcagcacgtagaggagtgttcctgttat

SEQ ID NO: 82866 - DNA, 80 bp, synthetic construct
  source 1..80: mol_type = other DNA
cctggtaactactgtaaaattgcatttcaagcaatgtgagtgcagctccccctcgaacaaccaaacaataccatgtgagc

SEQ ID NO: 82867 - DNA, 80 bp, synthetic construct
  source 1..80: mol_type = other DNA
ccaaccccgccgggccaaaggcccccgtgcgtaagctgccaatgcttcgagggttaacgaatgttgcgcaggtatgtgtt

SEQ ID NO: 82868 - DNA, 80 bp, synthetic construct
  source 1..80: mol_type = other DNA
gatgttgtatcccgagtttgcggagttagccctggaccgccattttttgaagaatttcaggttggcacagcgcccgctcc

SEQ ID NO: 82869 - DNA, 80 bp, synthetic construct
  source 1..80: mol_type = other DNA
ctagggtcgagctagcaccactctccttgtactggagacctgtgtacactccccagtacctcatctctccagacactctc

SEQ ID NO: 82870 - DNA, 80 bp, synthetic construct
  source 1..80: mol_type = other DNA
tgcaccttcagaggggatgtcacccacattgcaggtactcaagaatacacaatgaatctggcctcccaaaactggaacaa

SEQ ID NO: 82871 - DNA, 80 bp, synthetic construct
  source 1..80: mol_type = other DNA
cctcgggggcactgccaggaagaactaatcttagggctgctgtccccgcctggggctcctccagtacaccttctaactct

SEQ ID NO: 82872 - DNA, 80 bp, synthetic construct
  source 1..80: mol_type = other DNA
aggacgcggtgctggacctcgaggcaattgagaacaaccacatgactgcccttcttaaagacaaagatagcttggcaacc

SEQ ID NO: 82873 - DNA, 80 bp, synthetic construct
  source 1..80: mol_type = other DNA
tggggcttttgggtctcccccagtctgttcataacatcaactcatgtcataccccatggcgcacaggagttctttggggt

SEQ ID NO: 82874 - DNA, 80 bp, synthetic construct
  source 1..80: mol_type = other DNA
ttctatcaaacagattcagatacacaaatcgggtgaattctgtcgcttgaggtttccaaaaccaatcaggactgacgtga

SEQ ID NO: 82875 - DNA, 80 bp, synthetic construct
  source 1..80: mol_type = other DNA
ttctccccagaacctcatctggcccaaaaggttgcagaagaccttctctctcccagcgtgatggatgtaggtgatttcaa

SEQ ID NO: 82876 - DNA, 80 bp, synthetic construct
  source 1..80: mol_type = other DNA
caaattactatgcttccccatttgattgtagatgttagaactttggaacctattatgatacccttgcctgatgttaggaa

SEQ ID NO: 82877 - DNA, 80 bp, synthetic construct
  source 1..80: mol_type = other DNA
tgtgttctatcattttaataatcaacctcaacctagaatgagattagtggctatgctttatacccccttgaggtctaatg

SEQ ID NO: 82878 - DNA, 80 bp, synthetic construct
  source 1..80: mol_type = other DNA
cccccttctgtagagtccaaaactaaaccattcacactaccaatattaaccatttctgaattgaccaactcccggttccc

SEQ ID NO: 82879 - DNA, 80 bp, synthetic construct
  source 1..80: mol_type = other DNA
tattccaatcgagcaattgtatacggctccaaatgagaccaatgttgtccagtgtcagaatggcagatgcaccttagatg

SEQ ID NO: 82880 - DNA, 80 bp, synthetic construct
  source 1..80: mol_type = other DNA
gagagctccagggcacaacccagctgttgtcaagtgcagtttgctcttacaggggcaggactgtggccaataatggggat

SEQ ID NO: 82881 - DNA, 80 bp, synthetic construct
  source 1..80: mol_type = other DNA
aattgggatcaaaatttgctccagctgacctatccaaatggtgcaagctatgaccccactgatgaagtgccggcaccatt

SEQ ID NO: 82882 - DNA, 80 bp, synthetic construct
  source 1..80: mol_type = other DNA
gggcactcaagattttagtgggatgttgtatggagtgttgacccaggacaatgtgaatgtgagcacaggagaggccaaaa

SEQ ID NO: 82883 - DNA, 80 bp, synthetic construct
  source 1..80: mol_type = other DNA
atgctaaggggatatacatatccaccactagtgggaaattcaccccaaaaattgggtcaattggattgcattcaataact

SEQ ID NO: 82884 - DNA, 80 bp, synthetic construct
  source 1..80: mol_type = other DNA
gagcacgtgcaccccaaccaacagtcgcggttcacccccgttggagtcgccgtgaatgagaacaccccctttcagcaatg

SEQ ID NO: 82885 - DNA, 80 bp, synthetic construct
  source 1..80: mol_type = other DNA
ggttctgccacattatgcaggtagtactcgctctcataccaatttgggcactgctcttgccccgactttccctggtgagc

SEQ ID NO: 82886 - DNA, 80 bp, synthetic construct
  source 1..80: mol_type = other DNA
aattgctgttcttcaggtcccgtgtcccatgtgtccaaggcctacaggggcaggatgcgttcatagattgcctcctgccc

SEQ ID NO: 82887 - DNA, 80 bp, synthetic construct
  source 1..80: mol_type = other DNA
caagagtgggtgaatcatttttaccaagaggcagccccttcccaagcagacgtcgcccttattaggtatgtcaaccctga

SEQ ID NO: 82888 - DNA, 80 bp, synthetic construct
  source 1..80: mol_type = other DNA
tactggtcgtacgctgtttgaagccaagttgcatagatcaggtttcatcactgtgtcacatactggtgcttaccctcttg

SEQ ID NO: 82889 - DNA, 80 bp, synthetic construct
  source 1..80: mol_type = other DNA
tagtccccccaaatggtcattttaggtttgattcttgggttaatcaattttactcactcgcccccatgggaactggtaat

SEQ ID NO: 82890 - DNA, 80 bp, synthetic construct
  source 1..80: mol_type = other DNA
gggcagtcaatgccccaatgactagagtgctggattggtcagggacacgttactatgctccaaattctgtgcaaactact

SEQ ID NO: 82891 - DNA, 80 bp, synthetic construct
  source 1..80: mol_type = other DNA
agctattctggacaattcaccccctcgccagtccaccgggtgcaggtgaaatcttcttctaattcatctcagcggaccgc

SEQ ID NO: 82892 - DNA, 80 bp, synthetic construct
  source 1..80: mol_type = other DNA
agctccaagcagcatccgtagtctgtcaactcaatcaacttctgtaacaggctctacctccctaggggggccctctgaaa

SEQ ID NO: 82893 - DNA, 80 bp, synthetic construct
  source 1..80: mol_type = other DNA
cctcctctagctctagaacagcagactgggtacggcaacagagggctcttagcccgtacatgcatggagccctgcggacg

SEQ ID NO: 82894 - DNA, 80 bp, synthetic construct
  source 1..80: mol_type = other DNA
gcatatgtcacaccgccgtcaagcagggcctccagtgtgagctctgtctcaacagtgcccaaaggggttttggactcctg

SEQ ID NO: 82895 - DNA, 80 bp, synthetic construct
  source 1..80: mol_type = other DNA
cacacctcaggaagaggggggagtcacaagtttagtgaaaaggataatcaatgtttaaatgtgattttattttccttgca

SEQ ID NO: 82896 - DNA, 80 bp, synthetic construct
  source 1..80: mol_type = other DNA
atcagggtgactaattatcagggtttattaatcatcaggtttatcagggtttaactggaatttatattcatacataatga

SEQ ID NO: 82897 - DNA, 80 bp, synthetic construct
  source 1..80: mol_type = other DNA
ttatagcaaatactaatgacagttatgaatgtaatcactaatataatagtaatataatctatattgactaattaagtata

SEQ ID NO: 82898 - DNA, 80 bp, synthetic construct
  source 1..80: mol_type = other DNA
ggatttattatacaaattaagtttaggagttatatcttatatccctttatttatttagtgggcccaaaaaatgtgaaact

SEQ ID NO: 82899 - DNA, 80 bp, synthetic construct
  source 1..80: mol_type = other DNA
ttcaaccagatgtagaatgggtacgcggcataaactaaaaagagcatgtacttacatgaaaccaaattatggaggctcat

SEQ ID NO: 82900 - DNA, 80 bp, synthetic construct
  source 1..80: mol_type = other DNA
ttaataattcatcagacatgtacgagaaattatgtaataggagctcaaataatagtggttattttgttaggagtgatttt

SEQ ID NO: 82901 - DNA, 80 bp, synthetic construct
  source 1..80: mol_type = other DNA
aataggagctcaaataatagtggttattttgttaggagtgattttacaattaaatggataaatgaatgtatgacacagtt

SEQ ID NO: 82902 - DNA, 80 bp, synthetic construct
  source 1..80: mol_type = other DNA
aagtatctatcaacaggaaaagcaaaggtgtgttgtgttaaattaactgctatggacctagaattaccaataacacaaaa

SEQ ID NO: 82903 - DNA, 80 bp, synthetic construct
  source 1..80: mol_type = other DNA
aaatatctagcaacaggaaaagccaaagtgtgttgtttaaatttaactgctatggatctagaattgccaatcacaacaaa

SEQ ID NO: 82904 - DNA, 80 bp, synthetic construct
  source 1..80: mol_type = other DNA
cattctggtccaataaaagtttgtcctttaaatccccaaactttgggaatgggttgtttaaccccaaatccaccaccttt

SEQ ID NO: 82905 - DNA, 80 bp, synthetic construct
  source 1..80: mol_type = other DNA
taaggggtaactcccccgtgttcaactacaataaagcaaccaaaagactgacagtcctagggaaggatgcaggcgcattg

SEQ ID NO: 82906 - DNA, 80 bp, synthetic construct
  source 1..80: mol_type = other DNA
tttgtttgagtgtaagctccataaatcaggctatgttacagtggcccacactggccaacatgatttggttatccccccca

SEQ ID NO: 82907 - DNA, 80 bp, synthetic construct
  source 1..80: mol_type = other DNA
cctttagtggatgtcgttgatgggataaatcataaaataaatttgacaactacgacatgtactattcgaaattgtaagaa

SEQ ID NO: 82908 - DNA, 80 bp, synthetic construct
  source 1..80: mol_type = other DNA
ttctgcagctttttatatagagtatagatataccttagattagaattgtatgatgtgaccatcaaccacatccactaaaa

SEQ ID NO: 82909 - DNA, 80 bp, synthetic construct
  source 1..80: mol_type = other DNA
tttttagtggatgtcgttgatggtgtgaaccataaacttgatgtgactacaaatacctgtacaattagaaattgtaaaaa

SEQ ID NO: 82910 - DNA, 80 bp, synthetic construct
  source 1..80: mol_type = other DNA
cagcagctttttactataggatttgatatatcttagattagaattgtatgatgtgaccatcaacgacatccactaaaaaa

SEQ ID NO: 82911 - DNA, 80 bp, synthetic construct
  source 1..80: mol_type = other DNA
tattcataccagcgtcaaaaattataaatattaccccattgtcaggaagtgctctccacgtggaggaatgctcctgttac

SEQ ID NO: 82912 - DNA, 80 bp, synthetic construct
  source 1..80: mol_type = other DNA
cgtgtccgtggtttttttttttccccccccaaaaaaaaggggggggattctttctgataaaaaaccttaaactgagcatc

SEQ ID NO: 82913 - DNA, 80 bp, synthetic construct
  source 1..80: mol_type = other DNA
gggattctttctgataaaaaaccttaaactgagcatcgaagacccgagtcatgagggtgaggggataccactatatgatg

SEQ ID NO: 82914 - DNA, 80 bp, synthetic construct
  source 1..80: mol_type = other DNA
gaagacccgagtcatgagggtgaggggataccactatatgatgcaatcaaatgcatgaagacattttttggctggaaaga

SEQ ID NO: 82915 - DNA, 80 bp, synthetic construct
  source 1..80: mol_type = other DNA
atgaatccaaatcagaagattataaccattggatcaatttgtatggtaattggaacagtcagcttgactttacaaattgg

SEQ ID NO: 82916 - DNA, 80 bp, synthetic construct
  source 1..80: mol_type = other DNA
acgtcagcaacaccaatcttctcgctgggcaagctgtggcttcagtaactttagcaggcaattcctctctttgccctatt

SEQ ID NO: 82917 - DNA, 80 bp, synthetic construct
  source 1..80: mol_type = other DNA
aaacataatctcaatatgggttaaccattcaattcagacatgcattacttatgaaaacaacacctgggtaaatcagacat

SEQ ID NO: 82918 - DNA, 80 bp, synthetic construct
  source 1..80: mol_type = other DNA
ggttaatgatctttgtactaggaggctgtaggcataaattggtctgtctacgcagacttgtcaactttttcacctctgcc

SEQ ID NO: 82919 - DNA, 80 bp, synthetic construct
  source 1..80: mol_type = other DNA
gattaggaatttttgggctaggagattataagcacaggttgctctgtttaccacccccctgcaactttttcacctctttt

SEQ ID NO: 82920 - DNA, 80 bp, synthetic construct
  source 1..80: mol_type = other DNA
ggttaatgatctttgtactaggaggctgtaggcataaattggtctcttcagaatatatatgtaactttttcacctctgcc

SEQ ID NO: 82921 - DNA, 80 bp, synthetic construct
  source 1..80: mol_type = other DNA
ttggatggaccatatcaacctaccacatttaatttaccaattgactattggatgctgcttgcgccaactcaaataggtag

SEQ ID NO: 82922 - DNA, 80 bp, synthetic construct
  source 1..80: mol_type = other DNA
gtgctcaggacttgttggagacacacccagaaagacagacaatcacagcagtagcaattgcctgaatcctaacaatgagg

SEQ ID NO: 82923 - DNA, 80 bp, synthetic construct
  source 1..80: mol_type = other DNA
gttggagacacacccagaaagacagacaatcacagcagtagcaattgcctgaatcctaacaatgaggaagggtggcatgg

SEQ ID NO: 82924 - DNA, 80 bp, synthetic construct
  source 1..80: mol_type = other DNA
tattctcatcaaaccgagcaacagcgaagatctcctgaaagcagtccttggggctaagagaaaactcaacatgtttgttt

SEQ ID NO: 82925 - DNA, 80 bp, synthetic construct
  source 1..80: mol_type = other DNA
agcaaaagcaggggaaaataaaagcaaccacaatggaagcaatactattagtcttgctatgctcacttgcagcagcaaat

SEQ ID NO: 82926 - DNA, 80 bp, synthetic construct
  source 1..80: mol_type = other DNA
tgagggaggatggacagggatgatagacggatggtacggctatcatcaccagaatggacaagggtcaggatatgcagcgg

SEQ ID NO: 82927 - DNA, 80 bp, synthetic construct
  source 1..80: mol_type = other DNA
actcaactgacactgttgataccatattagaaaagaacgttacagtgacacactctgttaaccttttagaagacagacac

SEQ ID NO: 82928 - DNA, 80 bp, synthetic construct
  source 1..80: mol_type = other DNA
aacaagtaaagatccagctaaagaacaatgccaaagagattgggaatggctgctttgaattctatcacaaatgtgatgac

SEQ ID NO: 82929 - DNA, 80 bp, synthetic construct
  source 1..80: mol_type = other DNA
aacaaggctttaccagattttggcgatctattcaactgccgccagttcactggtactgttggtctccctgggggcaatcg

SEQ ID NO: 82930 - DNA, 80 bp, synthetic construct
  source 1..80: mol_type = other DNA
atgggtctttgcagtgcagaatatgtatttaaaactaggatttcagagacatgagaaaaaaccacccttgtttctactaa

SEQ ID NO: 82931 - DNA, 80 bp, synthetic construct
  source 1..80: mol_type = other DNA
atgtaacctaagggggatggccccactgcatttgggtaaatgtaacattgccgggtggctcctgggaaatccagagtgcg

SEQ ID NO: 82932 - DNA, 80 bp, synthetic construct
  source 1..80: mol_type = other DNA
ttcgccaattatgaagagctaagagaacaattgagctcagtgtcatcatttgaaagattcgagatattccccaagacaag

SEQ ID NO: 82933 - DNA, 80 bp, synthetic construct
  source 1..80: mol_type = other DNA
ttgttctatggggcatccaccatccacccaccaatactgatcaacaaagtctctaccaaaatgcagatgcctatgttttt

SEQ ID NO: 82934 - DNA, 80 bp, synthetic construct
  source 1..80: mol_type = other DNA
gtgggatcatcaaaatataacaggaaattcaaaccagaaatagcagagagacccaaggtgaggggtcaagcaggaagaat

SEQ ID NO: 82935 - DNA, 80 bp, synthetic construct
  source 1..80: mol_type = other DNA
cttttgcaatggatagaagccccgaatctggtatcataacatcggatgtaccagtccatgattgtaatacaacctgccaa

SEQ ID NO: 82936 - DNA, 80 bp, synthetic construct
  source 1..80: mol_type = other DNA
acacccaagggtgccataaataccaacctcccatttcagaatatacacccagtctctattggagaatgtccaaaatatgt

SEQ ID NO: 82937 - DNA, 80 bp, synthetic construct
  source 1..80: mol_type = other DNA
cttacattgtggaaacatcaaactcagacaatgggacatgttacccaggagatttcgccaattatgaagagctaagagaa

SEQ ID NO: 82938 - DNA, 80 bp, synthetic construct
  source 1..80: mol_type = other DNA
ctattagtcttgctatgctcacttgcagcagcaaatgcagacacactatgcataggttatcatgcaaataactcaactga

SEQ ID NO: 82939 - DNA, 80 bp, synthetic construct
  source 1..80: mol_type = other DNA
tataatgccgaactgttagttatatttgaaaatgaaagaagtggggagttccatgagttaaatgtaaaaaccctatatga

SEQ ID NO: 82940 - DNA, 80 bp, synthetic construct
  source 1..80: mol_type = other DNA
tggatagaacctgacgaaataggggaggatatagccccaatagagcatattgcgagcatgagaaggaactacttcacagc

SEQ ID NO: 82941 - DNA, 80 bp, synthetic construct
  source 1..80: mol_type = other DNA
atgattgtcgagcttgcggaaaaagcaatgaaagaacatggggaagacccgaaaattgaaactaacaaatttgctgcaat

SEQ ID NO: 82942 - DNA, 80 bp, synthetic construct
  source 1..80: mol_type = other DNA
aggaagtgaatgccaggattaatccgttcttgagaggaacgccacgccctctcaagttacctgatggacctccttgttct

SEQ ID NO: 82943 - DNA, 80 bp, synthetic construct
  source 1..80: mol_type = other DNA
cataagaggaaactcccccgtgttcaactacaataaggtgaccagaagactaacagtcctcggaaaggacgcaggtgcat

SEQ ID NO: 82944 - DNA, 80 bp, synthetic construct
  source 1..80: mol_type = other DNA
tgcctatgcaaaaggtgaaaggctctctttgtgtgcgaatggaccaagcaattatggaaaagaacatcatattgaaagcg

SEQ ID NO: 82945 - DNA, 80 bp, synthetic construct
  source 1..80: mol_type = other DNA
agccaaggtcagtaatgagagtgtagaacatatgaaaaattgctctttcaatgtaaccacaatagtaagagataggcagc

SEQ ID NO: 82946 - DNA, 80 bp, synthetic construct
  source 1..80: mol_type = other DNA
taatgagagtttagaattagaatctatgaaaaattgctctttcaatgtaaccccaatagtaagagataagaagcagacag

SEQ ID NO: 82947 - DNA, 80 bp, synthetic construct
  source 1..80: mol_type = other DNA
cgtttgcactcttttataaaattgatatagtgccacttaaggggaactataagaactctagtaactctagtaactctggt

SEQ ID NO: 82948 - DNA, 80 bp, synthetic construct
  source 1..80: mol_type = other DNA
atctatgaaaaattgctctttcaatgtagcctcaatagtaagagataagcagcagaaagcgtttgcactcttttatgaaa

SEQ ID NO: 82949 - DNA, 80 bp, synthetic construct
  source 1..80: mol_type = other DNA
ttgatatagtgccacttgaggggaaatatagtaactatagtaactctggtaactctagtgagtattatagattaataaat

SEQ ID NO: 82950 - DNA, 80 bp, synthetic construct
  source 1..80: mol_type = other DNA
ggaaatacaaaattgctctttcaatacaaccacaacattaacagataggaagcagacagcgtctgcacttttttatagac

SEQ ID NO: 82951 - DNA, 80 bp, synthetic construct
  source 1..80: mol_type = other DNA
tgtcttacttttggaagagaaactgttcttgagtatttggtgtctttttaagaggactcttggactaagaaacaaattcc

SEQ ID NO: 82952 - DNA, 80 bp, synthetic construct
  source 1..80: mol_type = other DNA
gtacttgaatatttggtctctttcggagtgttaagaggactcttggactaagaaacaaattccacctcccatccttggaa

SEQ ID NO: 82953 - DNA, 80 bp, synthetic construct
  source 1..80: mol_type = other DNA
ctccgaccgccagtgaacaacaaagtttatatcagaacactgatgcatacgtctcagttggatcatcaaagtacaaccgg

SEQ ID NO: 82954 - DNA, 80 bp, synthetic construct
  source 1..80: mol_type = other DNA
ctacagaaggggtgggaagcccttaaatatctgggaagtattgtgcagtattggagtctgaaactaaaaaagagtactgt

SEQ ID NO: 82955 - DNA, 80 bp, synthetic construct
  source 1..80: mol_type = other DNA
tagtagggagatgagaaactgctctttcaatatcaccacaagcataaaaactaaggtgaaagactatgcacttttttata

SEQ ID NO: 82956 - DNA, 80 bp, synthetic construct
  source 1..80: mol_type = other DNA
cttctggatgtgttctaatgggtcattgcaatgcaggatatgcatttaggatttgaatttcaaaatgtaagaaggttacc

SEQ ID NO: 82957 - DNA, 80 bp, synthetic construct
  source 1..80: mol_type = other DNA
atgaaaacaaaactgtttgtattattctgtgtaatcactgcattgaaagctgacaccatttgtgtgggctaccacgctaa

SEQ ID NO: 82958 - DNA, 80 bp, synthetic construct
  source 1..80: mol_type = other DNA
ttggggtactttaccgcaagaacatattgtactcaaaatcaagcaatgttttagaaagttgcctgtaaatagacctattg

SEQ ID NO: 82959 - DNA, 80 bp, synthetic construct
  source 1..80: mol_type = other DNA
tgtagtgaggagtctgacgcctcccgtgaatgtcaacgaccgaccttgaggcatacttcaaagactgtttgtttaaggac

SEQ ID NO: 82960 - DNA, 80 bp, synthetic construct
  source 1..80: mol_type = other DNA
gggtgagttgatgaatgtggcaacctgggtgggaacctgccttacttttggaagagaaactgtgctgagtattgtctagt

SEQ ID NO: 82961 - DNA, 80 bp, synthetic construct
  source 1..80: mol_type = other DNA
cggctatgtcaatgtcaacatgggcctaaaactcagacaactactgtggtttcacctttcttgtcttacttttggaagag

SEQ ID NO: 82962 - DNA, 80 bp, synthetic construct
  source 1..80: mol_type = other DNA
cggctatgtcaacggtaatatgggcctaaaattcagacaactattgtggtttcacatttcctgtcttacttttgggagag

SEQ ID NO: 82963 - DNA, 80 bp, synthetic construct
  source 1..80: mol_type = other DNA
tttcttgttgataaaatcctcacaataccacagagtctagactcgtggcggatttctctcaattttctagggggaacacc

SEQ ID NO: 82964 - DNA, 80 bp, synthetic construct
  source 1..80: mol_type = other DNA
ccaccgacggaaaacgcgcatgtattcccataccatcagctggggatttcccgaaaaatctagacggaggagtctcaccc

SEQ ID NO: 82965 - DNA, 80 bp, synthetic construct
  source 1..80: mol_type = other DNA
ggtttttattgttgcaaagaacctcacaataccacagaatataaactagtggtgaaatctttcaaaggggggggggacac

SEQ ID NO: 82966 - DNA, 80 bp, synthetic construct
  source 1..80: mol_type = other DNA
tcaccaacccgttgtcctccaatttgtcctggttatcgctggatgtgtctgcggcgttttatcatcttcctctgcatcct

SEQ ID NO: 82967 - DNA, 80 bp, synthetic construct
  source 1..80: mol_type = other DNA
ccgtggtcttgaccaggggggcagtccccaatctacaaaaaatcaccaacccgttgtcctccaatttgtcctggttatcg

SEQ ID NO: 82968 - DNA, 80 bp, synthetic construct
  source 1..80: mol_type = other DNA
ctgcagatatcagcaaaagcaggggataatcaaataaaccaagatgaaagcaaaattatttgtattattctgtgcattta

SEQ ID NO: 82969 - DNA, 80 bp, synthetic construct
  source 1..80: mol_type = other DNA
tgaaggaggatggacagggatgatagatggatggtatggatatcaccatcaaaatgagcaaggatctggttacgcagcag

SEQ ID NO: 82970 - DNA, 80 bp, synthetic construct
  source 1..80: mol_type = other DNA
tataacgctgagttactcattttgctcgagaacgaaagaaccctagatttccatgactttaacgtaagaaatttatatga

SEQ ID NO: 82971 - DNA, 80 bp, synthetic construct
  source 1..80: mol_type = other DNA
aaaggtcaaatcacaactgagaaacaatgccaaggaaatcggtaatggctgttttgagttctatcacaaatgtgataatg

SEQ ID NO: 82972 - DNA, 80 bp, synthetic construct
  source 1..80: mol_type = other DNA
taattatcccagatattcagaagaatccaaattaaatagagagaaaatagacggtgttaaactagaatcattaggagtac

SEQ ID NO: 82973 - DNA, 80 bp, synthetic construct
  source 1..80: mol_type = other DNA
aatgttactgttacccattcagttaatttactagaaaacagccacaatggaaaactctgcagcctgaatggaaaggctcc

SEQ ID NO: 82974 - DNA, 80 bp, synthetic construct
  source 1..80: mol_type = other DNA
atcagattttggcaatctactccacagtcgccagttccctggtattgctagtctccctgggggcaatcagcttctggatg

SEQ ID NO: 82975 - DNA, 80 bp, synthetic construct
  source 1..80: mol_type = other DNA
tctaatgggtcattgcaatgccgaatatgcatttgagacttgaatttcaaagtgtacggaaaaacacccttgtttctact

SEQ ID NO: 82976 - DNA, 80 bp, synthetic construct
  source 1..80: mol_type = other DNA
attacaactggagaactgcaacgtagcaggatggatccttggtaacccagaatgtgacttcctgctcacagcgaattcat

SEQ ID NO: 82977 - DNA, 80 bp, synthetic construct
  source 1..80: mol_type = other DNA
ggtcttacataatagagacttcaaattcaaaaaatggaacatgctatcctggagaattcactgattatgaggaactaagg

SEQ ID NO: 82978 - DNA, 80 bp, synthetic construct
  source 1..80: mol_type = other DNA
gagcaactgagtacagtttcttcatttgaaagatttgaaattttcccaaaagcaacctcatggccaaatcatgagacaac

SEQ ID NO: 82979 - DNA, 80 bp, synthetic construct
  source 1..80: mol_type = other DNA
caaaggtaccacagttgcatgctcccactctggagccaacagtttttatcggaacttgttatggatagtaaagaagggaa

SEQ ID NO: 82980 - DNA, 80 bp, synthetic construct
  source 1..80: mol_type = other DNA
actcctatcccaagctcagcaagtcatacacaaacaacaaagggaaagaagtgctcgtaatctggggagtgcatcacccc

SEQ ID NO: 82981 - DNA, 80 bp, synthetic construct
  source 1..80: mol_type = other DNA
cctacagacagtgaccaacaaaccctctatcagaataatcacacatatgtttcagttggatcatcaaaatactaccaaag

SEQ ID NO: 82982 - DNA, 80 bp, synthetic construct
  source 1..80: mol_type = other DNA
gttcacaccagaaatagtagccagacctaaagtcagagagcaagcgggcaggatgaattattattggatactattagatc

SEQ ID NO: 82983 - DNA, 80 bp, synthetic construct
  source 1..80: mol_type = other DNA
ctgcactgaaagctgacaccatttgtgtaggctatcatgctaacaattccacagacactgtcgacacgatactggaaaag

SEQ ID NO: 82984 - DNA, 80 bp, synthetic construct
  source 1..80: mol_type = other DNA
aaggagacaccataacatttgaagccacggggaatttaatagcaccatggcatgcatttgcattggataagggctctagt

SEQ ID NO: 82985 - DNA, 80 bp, synthetic construct
  source 1..80: mol_type = other DNA
tctggaattatgatgtcggatgctcatgttcaaaattgcactacaaagtgccaaacccctcatggggcattgaaaagcaa

SEQ ID NO: 82986 - DNA, 80 bp, synthetic construct
  source 1..80: mol_type = other DNA
tcttccttttcagaatgtgcatcccatcaccattggggaatgccccaaatatgttaaaagcacccaattaagaatggcaa

SEQ ID NO: 82987 - DNA, 80 bp, synthetic construct
  source 1..80: mol_type = other DNA
agctttcaggtagactgctttctttggcatgtccgcaaactgtttgcggactgggggcttggcgatgccccatttctcga

SEQ ID NO: 82988 - DNA, 80 bp, synthetic construct
  source 1..80: mol_type = other DNA
gtctgcggcgtttgatgggcttcctggggttcctgttgcttgttctccttgtaatgttggttcttctggactatcaaggt

SEQ ID NO: 82989 - DNA, 80 bp, synthetic construct
  source 1..80: mol_type = other DNA
attttctagggggaaccccgtgtgtcttgcccaaaattctgatcccaaatctcccgtcactcacactccttttgtcctcc

SEQ ID NO: 82990 - DNA, 80 bp, synthetic construct
  source 1..80: mol_type = other DNA
agtttttttgggttatcgaaaaaatgtgtctgtaacattttatcatcttcctctgcatcctgatgcgatttctccatgtc

SEQ ID NO: 82991 - DNA, 80 bp, synthetic construct
  source 1..80: mol_type = other DNA
tagtcctgatgcgatgttctccatgtttgttggttcttctggactatcaaggtatgttgcccgtttgtcctctaattcca

SEQ ID NO: 82992 - DNA, 80 bp, synthetic construct
  source 1..80: mol_type = other DNA
acgagttcaccctccgggtgtcttccagtttttttgggttatcgaaggatgtgtcctgtaacactttatcatcttcctct

SEQ ID NO: 82993 - DNA, 80 bp, synthetic construct
  source 1..80: mol_type = other DNA
tggacaccttcacaaactcttactccttctgtgaaaatgtacccaacttggacagatttgtgtatcaaatggccagtgca

SEQ ID NO: 82994 - DNA, 80 bp, synthetic construct
  source 1..80: mol_type = other DNA
aggaacatcatccttaacagaggcagtgacgaaaacccacgaggcccagtgagccacgagcacattgagtggtgcaggga

SEQ ID NO: 82995 - DNA, 80 bp, synthetic construct
  source 1..80: mol_type = other DNA
gaaccaaacaggaggagaatttaacatgtaccaaggaaacagatttgaaaactccaagctatctgctgttgaacaagagc

SEQ ID NO: 82996 - DNA, 80 bp, synthetic construct
  source 1..80: mol_type = other DNA
ttcagaagattcacagcagctctacataatggactacctgatgaccgtttaaaaaattgtgtaattgatgcattaaagaa

SEQ ID NO: 82997 - DNA, 80 bp, synthetic construct
  source 1..80: mol_type = other DNA
ataagtgttcatctctttttggtgtagggatgtcgctgctgattaagcaactttggaatgaagtagttcctgaattagac

SEQ ID NO: 82998 - DNA, 80 bp, synthetic construct
  source 1..80: mol_type = other DNA
ataagtgttcatccttgttcggtgctgcagtttccttgctattcaggaaagtctggaatctactctacccagaattagac

SEQ ID NO: 82999 - DNA, 80 bp, synthetic construct
  source 1..80: mol_type = other DNA
aactcagatcttttttcagctctgctaattcctatcgaagaatccagatctttccagacacaatttggaatgtgacttat

SEQ ID NO: 83000 - DNA, 80 bp, synthetic construct
  source 1..80: mol_type = other DNA
actggaacaagcagagcatgttcaaactcattctacaggagtatgagatggctgacacacaagagcaattcctaccctgt

SEQ ID NO: 83001 - DNA, 80 bp, synthetic construct
  source 1..80: mol_type = other DNA
agagagaaacataacagagatagtgtatttgaacaacactactatagagagagagatttgctctgaagtagcggaatata

SEQ ID NO: 83002 - DNA, 80 bp, synthetic construct
  source 1..80: mol_type = other DNA
tcgttggtgacacacccagaaacgatgacagctctagcagtagcaattgcagagatcctaacaatgaaagagggaaccca

SEQ ID NO: 83003 - DNA, 80 bp, synthetic construct
  source 1..80: mol_type = other DNA
agtggaacaagcaaagcatgttcagacacattttacagaaatatgagatggctgacacaaaaaagagactcttatcctgt

SEQ ID NO: 83004 - DNA, 80 bp, synthetic construct
  source 1..80: mol_type = other DNA
ggtccaaccatgatgcctcatcaggagtgagctcagcatgcccatacaataacaggtcctcctttttcaggaatgtagtg

SEQ ID NO: 83005 - DNA, 80 bp, synthetic construct
  source 1..80: mol_type = other DNA
gagcatattgtacagcttcgaagggtgttgactacagctacaataactcttttaccagatgcagaaagatttagttttcc

SEQ ID NO: 83006 - DNA, 80 bp, synthetic construct
  source 1..80: mol_type = other DNA
ggtagcggcgttatttccaaatgcgcagccatttgaacatcacgcaacagtaggactcacgcttagaattgaatctgcag

SEQ ID NO: 83007 - DNA, 80 bp, synthetic construct
  source 1..80: mol_type = other DNA
gaccaactagcgacctccaccatacctgaccatctagcgacctccacacgcagggtgacaaaaacataatggattccaat

SEQ ID NO: 83008 - DNA, 80 bp, synthetic construct
  source 1..80: mol_type = other DNA
accatctagcgacctccacgaaagcaggtcaaatatattcaatatggaaagaataaaagaactaagagatttgatgtcac

SEQ ID NO: 83009 - DNA, 80 bp, synthetic construct
  source 1..80: mol_type = other DNA
tgttactggtaataggagctgtgatgagagtgtgatggaaataaaaaattgcactttcaatgcaaccacggaaataaaag

SEQ ID NO: 83010 - DNA, 80 bp, synthetic construct
  source 1..80: mol_type = other DNA
aaccacaacattaagggataaaaagcagaaagttaatgcatatttctatagagtagatatagtaccacttaataataatg

SEQ ID NO: 83011 - DNA, 80 bp, synthetic construct
  source 1..80: mol_type = other DNA
aagctagtaagaattttagtaagtataattctagtaattgtagtaagtataattttagtaattgtagtaagtataattct

SEQ ID NO: 83012 - DNA, 80 bp, synthetic construct
  source 1..80: mol_type = other DNA
atgaatccaaatcagaaactattcgcattatccggagtggcaatagcgcttagtgtactgaacttattgataggactctc

SEQ ID NO: 83013 - DNA, 80 bp, synthetic construct
  source 1..80: mol_type = other DNA
gacccaaacaggaagagaatttgacatgcatgactaccaaagaaactgaattgggaacaccaagctatctgctgttgaac

SEQ ID NO: 83014 - DNA, 80 bp, synthetic construct
  source 1..80: mol_type = other DNA
aagagtctatgtaatgttgaggggtgggtcgtgatagcaaaagacaatgcagtaagatttggggaaagtgaacaaatcat

SEQ ID NO: 83015 - DNA, 80 bp, synthetic construct
  source 1..80: mol_type = other DNA
ccattgaagagctcagacggcaaaaatagtgaatttagcttgtccttcatgaaaaaaaaccatccgaacccgactgtcct

SEQ ID NO: 83016 - DNA, 80 bp, synthetic construct
  source 1..80: mol_type = other DNA
tattcgtctcagggagcaaaagcaggggataattctattaaccatgaagactatcattgctttgagctacattttatgtc

SEQ ID NO: 83017 - DNA, 80 bp, synthetic construct
  source 1..80: mol_type = other DNA
aaaggcaacattaggtgcaacatttgcatttgagtgcattaattaaaaacacccttgtttctactaatacgagacgatat

SEQ ID NO: 83018 - DNA, 80 bp, synthetic construct
  source 1..80: mol_type = other DNA
gaaattacaaaccaaaccaaaaataatatggaggaccaaatgtatgatcagttcctcaagaggattcagtcagccaaaac

SEQ ID NO: 83019 - DNA, 80 bp, synthetic construct
  source 1..80: mol_type = other DNA
agttttttgagttgaggaaattattactggacaaatttgcagatgatgaggagtttctacttatgattgctcatggtgac

SEQ ID NO: 83020 - DNA, 80 bp, synthetic construct
  source 1..80: mol_type = other DNA
gaacggggagtccttcacaggaaaattagcagaccaggcttccaaggctaacctgatgttcgaggagggaaagaacatga

SEQ ID NO: 83021 - DNA, 80 bp, synthetic construct
  source 1..80: mol_type = other DNA
aatgagggtctcccctccggggtgccctgcacctcccaatggaattccatcgcccactggctcctcactctctgtgcact

SEQ ID NO: 83022 - DNA, 80 bp, synthetic construct
  source 1..80: mol_type = other DNA
ctgaaggaccacttgtcatctctgaagacctgaatggtctaactttcctgcggaggaccgtgacccgcgacccagcgggc

SEQ ID NO: 83023 - DNA, 80 bp, synthetic construct
  source 1..80: mol_type = other DNA
ttattattggcatatacaattggataacctaaatggaactccttatgaccctgcagaagatataccagcccccctaggga

SEQ ID NO: 83024 - DNA, 80 bp, synthetic construct
  source 1..80: mol_type = other DNA
atagacacaacatctggccgcttcaccccaaaactaggttcactagagatttccactgagtctggagattttgaccaaaa

SEQ ID NO: 83025 - DNA, 80 bp, synthetic construct
  source 1..80: mol_type = other DNA
ccaaccaacaagattcaccccagttggcattggggttgaccatgagccagattttcaacaatgggctcttcccgactatg

SEQ ID NO: 83026 - DNA, 80 bp, synthetic construct
  source 1..80: mol_type = other DNA
caggccagttcacccacaacatgaacttagccccagctgttgctcccaacttccctggtgagcagctccttttcttccgc

SEQ ID NO: 83027 - DNA, 80 bp, synthetic construct
  source 1..80: mol_type = other DNA
ccaagaatcagccccctcccaaactcaagtggccctagttaggtatgtcaaccctgacactggtagagtgttatttgagg

SEQ ID NO: 83028 - DNA, 80 bp, synthetic construct
  source 1..80: mol_type = other DNA
ccaagttgcacaaattacgtttcatgactatagccaagagtggtgactccccaataactgtccccccaaatggatacttt

SEQ ID NO: 83029 - DNA, 80 bp, synthetic construct
  source 1..80: mol_type = other DNA
agaatattagtgcagaagtaaaaaactgctctttcaacatcagcacaggaataagagaaaaggtgcagggaaactatgca

SEQ ID NO: 83030 - DNA, 80 bp, synthetic construct
  source 1..80: mol_type = other DNA
cttttttatctagatgatatagtgcaagtaccagtagaagatgataatagcaacaataagggtaagaatcatagcaacaa

SEQ ID NO: 83031 - DNA, 80 bp, synthetic construct
  source 1..80: mol_type = other DNA
ttcggagtgcaatgtcactgatgatagttgtatggaaatgaaaaactgctctttcaatattaacacaaacataggaagta

SEQ ID NO: 83032 - DNA, 80 bp, synthetic construct
  source 1..80: mol_type = other DNA
gctgtatccgcagttctacaaagactgctgacatcgagataaagactgctgacatcgagatttctacaagggactttccg

SEQ ID NO: 83033 - DNA, 80 bp, synthetic construct
  source 1..80: mol_type = other DNA
gcacctgttggtcatggtaagacaatcgaaacatatcagaccagagaaggtttcacaagtatctgtctctttatgttagg

SEQ ID NO: 83034 - DNA, 80 bp, synthetic construct
  source 1..80: mol_type = other DNA
tactgtaggcactgctctgctgacagagaaattcaccagttgcacttgggtatctgcaaaaaaagaaaaacggggagcaa

SEQ ID NO: 83035 - DNA, 80 bp, synthetic construct
  source 1..80: mol_type = other DNA
caggagatcagcgtgtgggcctcatcccacgcaacggcgtcgaccactgggattcgtacagggaggagaggatcgtcctt

SEQ ID NO: 83036 - DNA, 80 bp, synthetic construct
  source 1..80: mol_type = other DNA
caggagatcagcgtgtgggcctcatcccacgcaacggcgtcgaccactgggattcgtacaggggggagaggatcgtcctt

SEQ ID NO: 83037 - DNA, 80 bp, synthetic construct
  source 1..80: mol_type = other DNA
tgggacgactatggaatgagcaatcccatccacgatgccctcagactgcaagaactcgctgacacctgccccctcaccct

SEQ ID NO: 83038 - DNA, 80 bp, synthetic construct
  source 1..80: mol_type = other DNA
tagtatacaatggtagtacctacacacttgagtccgatggcaagggcagtgtgaaagttgacagagttcagagtgcctcc

SEQ ID NO: 83039 - DNA, 80 bp, synthetic construct
  source 1..80: mol_type = other DNA
gtacagaccaacaatgagctggctggcgcactgcaccatctaagaagcgccagaataagatactatgttaagtgtgtcca

SEQ ID NO: 83040 - DNA, 80 bp, synthetic construct
  source 1..80: mol_type = other DNA
gggtctcccccagtctgttcataacatcaacccatgtcataccccagggcgcaaaggaattctttggggtctctgtcaag

SEQ ID NO: 83041 - DNA, 80 bp, synthetic construct
  source 1..80: mol_type = other DNA
cactgtcgggggtcaaatgggcatgcttctgacaggatccaacgccaaaagtatggatctgggtaccacaccaggtgatt

SEQ ID NO: 83042 - DNA, 80 bp, synthetic construct
  source 1..80: mol_type = other DNA
gatggagagatctatcattatggtctgtatgtggagcgaggtctcatattaggtgtgcacaaaccaccagccgccattag

SEQ ID NO: 83043 - DNA, 80 bp, synthetic construct
  source 1..80: mol_type = other DNA
tgcaccttcaggggggatgtcacccgcattggaaattctcgcgagtacagaatgaacctggcctccctaaattggaacaa

SEQ ID NO: 83044 - DNA, 80 bp, synthetic construct
  source 1..80: mol_type = other DNA
ttatgacccaacagaagaaatcccagcccccctgggaaccccagattttgcaggcaagatccaaggtgtgctcacccaga

SEQ ID NO: 83045 - DNA, 80 bp, synthetic construct
  source 1..80: mol_type = other DNA
ccacaaggcatgacggttcgacccgcggtcacaaagccacggtgtacactggaagtgccggattcaccccaaagctaggc

SEQ ID NO: 83046 - DNA, 80 bp, synthetic construct
  source 1..80: mol_type = other DNA
agtgttcaattctccactgacacagacaatgaccttgaggccaaccaaaacacgaggttcaccccagtcggtgtcatcca

SEQ ID NO: 83047 - DNA, 80 bp, synthetic construct
  source 1..80: mol_type = other DNA
aggacggcaacgcccaccaaggagaacctcagcaatgggtgctcccaaactatgcaggcagagatggtcacaatgtacac

SEQ ID NO: 83048 - DNA, 80 bp, synthetic construct
  source 1..80: mol_type = other DNA
atgctggggctggggtcatcaaccaaaaagtcgattttgaaaataataaacaactgcaacaaaactccttccaatttagc

SEQ ID NO: 83049 - DNA, 80 bp, synthetic construct
  source 1..80: mol_type = other DNA
cctcgggggcgttgccaggaagaactaatctcaggactgctgcccccgctcggggctcccccagcatatcttctaatgct

SEQ ID NO: 83050 - DNA, 80 bp, synthetic construct
  source 1..80: mol_type = other DNA
cactgggagcccaggagctcctggggtcaaaggattcggattcctagatagcagcaatacatggttaggccgcacaataa

SEQ ID NO: 83051 - DNA, 80 bp, synthetic construct
  source 1..80: mol_type = other DNA
aaagaaacagagacagcgaggcagcattatctgatgctgaacaaaagcttatgcaaagtcgaagggtgggtagtagtagc

SEQ ID NO: 83052 - DNA, 80 bp, synthetic construct
  source 1..80: mol_type = other DNA
agtcaatacttatgcacagggattctcacagacacaagcaggccatcagacaaatcagcaggggattgtaacaacccaat

SEQ ID NO: 83053 - DNA, 80 bp, synthetic construct
  source 1..80: mol_type = other DNA
atacccagatgaaggcacagctggtgtggagtctgctgtcctgagaggatttctcatcttgggcaaagaagacaagagat

SEQ ID NO: 83054 - DNA, 80 bp, synthetic construct
  source 1..80: mol_type = other DNA
tgtagtattgataggaaacacagaagcctgctgcaaattgtatgcccaccattgcttattacctcaaatatcaatccaaa

SEQ ID NO: 83055 - DNA, 80 bp, synthetic construct
  source 1..80: mol_type = other DNA
ctgatttagatgaagctgaaacaggttttatgcagcctacacaaaccacacctatgcttcgctctccattttctcctttg

SEQ ID NO: 83056 - DNA, 80 bp, synthetic construct
  source 1..80: mol_type = other DNA
taccacaattaaaggacatagtgttggagttaacaccacaacctgaaattgacttgcaatgctacgagcaatttgacagc

SEQ ID NO: 83057 - DNA, 80 bp, synthetic construct
  source 1..80: mol_type = other DNA
tgatactgaaaactctaggtttgccaatggcaacgaccaacaggatgttagggacaacatatctgtggacaacaaacaaa

SEQ ID NO: 83058 - DNA, 80 bp, synthetic construct
  source 1..80: mol_type = other DNA
attctacaattttagaacagtggaattttggattaaccttgcccccctccgctagtttggaggatgcctatcgatttgta

SEQ ID NO: 83059 - DNA, 80 bp, synthetic construct
  source 1..80: mol_type = other DNA
aaaaatgcagcaacatcctgtcacaaggacagtcctccacaggctaaacaagaccctttggcaaaatataaattttggaa

SEQ ID NO: 83060 - DNA, 80 bp, synthetic construct
  source 1..80: mol_type = other DNA
aaaggcctgccccatcctcttccgcttcctcgtctgccaaacgtaaaagggttaaaaaataggttcgccctgcctatgta

SEQ ID NO: 83061 - DNA, 80 bp, synthetic construct
  source 1..80: mol_type = other DNA
ttttctgtatgttttgctgtatggtttctgtgtggtttactaataaagtatgtatgtgtgtgtgtttttgcaatgtgttg

SEQ ID NO: 83062 - DNA, 80 bp, synthetic construct
  source 1..80: mol_type = other DNA
gtggcttgcagcacacttgtatatatatgttcttgctgtattgcatgtaccacaggattccattttgttttttcctgcag

SEQ ID NO: 83063 - DNA, 80 bp, synthetic construct
  source 1..80: mol_type = other DNA
ttcgagtgttgtacagctcgcagtggaaagcagtggagacagccttcgcatattgcagcaaatgttactgggcgacttaa

SEQ ID NO: 83064 - DNA, 80 bp, synthetic construct
  source 1..80: mol_type = other DNA
atactttacaattatcttgtaaaaagtagggtgtaaccgaaaagggttatgaccgaaaacggtttatataaaagcaagca

SEQ ID NO: 83065 - DNA, 80 bp, synthetic construct
  source 1..80: mol_type = other DNA
gcaacccattaggagacattacaaatcaaaccacacaaagcaatagtcagcaacaaacaacacaggcaaaccacccacac

SEQ ID NO: 83066 - DNA, 80 bp, synthetic construct
  source 1..80: mol_type = other DNA
ggcaaaaggagattactggacagttatccggacagtggatatggcaatacacaagtggagactgtggaagcaacgttgca

SEQ ID NO: 83067 - DNA, 80 bp, synthetic construct
  source 1..80: mol_type = other DNA
tggcggggggagcagcgacagaagtacagacatagaccttgaaacaaatgaaaatactaatgtagaactaaacagcgtat

SEQ ID NO: 83068 - DNA, 80 bp, synthetic construct
  source 1..80: mol_type = other DNA
gtgcagtgttaaaatgtagtaatgcaaaggccatgtttatggcaaaattcaaggaagtgtatggtattagttacaatgag

SEQ ID NO: 83069 - DNA, 80 bp, synthetic construct
  source 1..80: mol_type = other DNA
gggtactattgtgctaatgttagctagatttacatgtgctaaaaacagacttaccatagctaaatgtttaggtaccttat

SEQ ID NO: 83070 - DNA, 80 bp, synthetic construct
  source 1..80: mol_type = other DNA
taaatattccacactcacaaatgtttatagaaccacctaagctacgtagtacagcagtggcattatacttttatagaaca

SEQ ID NO: 83071 - DNA, 80 bp, synthetic construct
  source 1..80: mol_type = other DNA
actataaacgtgcacaaagaaaatcactaacaatgtcagcatggattagatatagatgtgacaaggtggcagatgggggc

SEQ ID NO: 83072 - DNA, 80 bp, synthetic construct
  source 1..80: mol_type = other DNA
aactggagagaaatagctaaatttttgcgataccagggtattaattttatgtactttatacaaacatttaaattgttttt

SEQ ID NO: 83073 - DNA, 80 bp, synthetic construct
  source 1..80: mol_type = other DNA
agaagatgcgaatttaatgtatttacacagtagggtgacagtatttcaatttccaaatgcattcctatttgaccccaatg

SEQ ID NO: 83074 - DNA, 80 bp, synthetic construct
  source 1..80: mol_type = other DNA
taatatgccatatgcagtatgcaaaaaatgcttgatgttttattctagaattagagaatacagaaggtatagtaggtctg

SEQ ID NO: 83075 - DNA, 80 bp, synthetic construct
  source 1..80: mol_type = other DNA
ggggcgaggcccctaaacaatgttttaaaaaagagggaaaaactgtaacggttatgtttgatgggaacaaggacaataca

SEQ ID NO: 83076 - DNA, 80 bp, synthetic construct
  source 1..80: mol_type = other DNA
atggactatacatgttggacatatgtgtatatatataaagaggacaggtgggtaaaaacacatggaaacgtggaccatac

SEQ ID NO: 83077 - DNA, 80 bp, synthetic construct
  source 1..80: mol_type = other DNA
caggtatttattataaaccagatgtacacaaagaatattatgtaaaatttatagaggaagcaaaaaaatatggggcacag

SEQ ID NO: 83078 - DNA, 80 bp, synthetic construct
  source 1..80: mol_type = other DNA
caatgggaggtatatatgtgtggcaatgtaataacatgtcctgaatatgtatctagtacctgcagagacccgttaccctc

SEQ ID NO: 83079 - DNA, 80 bp, synthetic construct
  source 1..80: mol_type = other DNA
ttgaacagcactcgaacacccccacgaccaatacctataccacctccgtgggcaccaaagaagcccaggcaccacaacaa

SEQ ID NO: 83080 - DNA, 80 bp, synthetic construct
  source 1..80: mol_type = other DNA
cgaaaacgacagcgaattactgagcccgactcctccacagtcaccccactgtccgtggacacttgtgaccaccaaataca

SEQ ID NO: 83081 - DNA, 80 bp, synthetic construct
  source 1..80: mol_type = other DNA
aagcaggcattgttacaattacatttgatagtgcacaccaacgccaacagtttattgatactgtaaaggtaccaccaagt

SEQ ID NO: 83082 - DNA, 80 bp, synthetic construct
  source 1..80: mol_type = other DNA
gtaacagtgtctttgggaattatgacagtgtaatatatgtattgtacatatatatataggtaatacaagccaatatgtgc

SEQ ID NO: 83083 - DNA, 80 bp, synthetic construct
  source 1..80: mol_type = other DNA
gtgctgctaattgtatatattgaattgcaaccattgcggtatttttggtgtgtctttttgtgctttgcgtgtgtgtgtgt

SEQ ID NO: 83084 - DNA, 80 bp, synthetic construct
  source 1..80: mol_type = other DNA
tggtttgtggttgccacatcacctttaactacatttgctgtatacattatctgtttttatattccatgcttgttattaca

SEQ ID NO: 83085 - DNA, 80 bp, synthetic construct
  source 1..80: mol_type = other DNA
tttatataccttttatattttacaaattccataataaacatttgtatgtttttgtatcatatacaatggtggctgcacgt

SEQ ID NO: 83086 - DNA, 80 bp, synthetic construct
  source 1..80: mol_type = other DNA
gcacggcggcgtaaacgagcatctgtaacacaattatattccacatgcaaagctgctggtacatgtcctgctgatgttat

SEQ ID NO: 83087 - DNA, 80 bp, synthetic construct
  source 1..80: mol_type = other DNA
gtttgggtattggcaccgggtctgggacaggtggcaggactggctatattcctttgggtggtggtggaaggcctggtgtt

SEQ ID NO: 83088 - DNA, 80 bp, synthetic construct
  source 1..80: mol_type = other DNA
gtggatatagccccggctaggcctccaataattattgaacctgtggcccctactgaaccttctattgttaaccttgttga

SEQ ID NO: 83089 - DNA, 80 bp, synthetic construct
  source 1..80: mol_type = other DNA
ggactctagtattattaattcaggatctactatacctacatttactggtactgatggctttgaaataacttcctcttcta

SEQ ID NO: 83090 - DNA, 80 bp, synthetic construct
  source 1..80: mol_type = other DNA
ccactcctggggtgcgccgcattgcagcaccccgtttatatagtaaggcatttacacaggttaaggttactaatccagat

SEQ ID NO: 83091 - DNA, 80 bp, synthetic construct
  source 1..80: mol_type = other DNA
tttattagtaggccctcttcatttgttacctttgataatcctgcttttgaacccattgatgcatccctgtcatttgggga

SEQ ID NO: 83092 - DNA, 80 bp, synthetic construct
  source 1..80: mol_type = other DNA
acctacaactgttgcaccagatcctgattttctagatattattaaactgcaccgccctgcgcttacatctcgcagaggta

SEQ ID NO: 83093 - DNA, 80 bp, synthetic construct
  source 1..80: mol_type = other DNA
cgggacagtgtgcaaattgcagaacagcggcaagacaacgtagcgaaacccaggtgtaataaagccatgcgtggtaatgt

SEQ ID NO: 83094 - DNA, 80 bp, synthetic construct
  source 1..80: mol_type = other DNA
catattctcctttgtctacacaattaccttcactgtcttcctctgtgtcttcatcttatacaaatgttactatccctttt

SEQ ID NO: 83095 - DNA, 80 bp, synthetic construct
  source 1..80: mol_type = other DNA
tctaccacatatcatgtccctatacatacgggtcctgatgtaatattacctacttctcccactgtgtggccctttattcc

SEQ ID NO: 83096 - DNA, 80 bp, synthetic construct
  source 1..80: mol_type = other DNA
acatacatctattgatacacaacatgctattgttatacaaggtggggattactatttgtggccctatacatatttattac

SEQ ID NO: 83097 - DNA, 80 bp, synthetic construct
  source 1..80: mol_type = other DNA
acactgggccacaggcaccacatgcaaaaacgtacctgtacctcagggtgattgtcctcctttggaacttgtgtctacta

SEQ ID NO: 83098 - DNA, 80 bp, synthetic construct
  source 1..80: mol_type = other DNA
ttattgaggatggcgatatgatagacactggttttggagccatggactttgctaatttgcaagctactaaatcagatgtc

SEQ ID NO: 83099 - DNA, 80 bp, synthetic construct
  source 1..80: mol_type = other DNA
cctttagatatagctcagtccgtgtgtaaataccctgattacctaaaaatgtcagctgatacttatggcaactctatgtt

SEQ ID NO: 83100 - DNA, 80 bp, synthetic construct
  source 1..80: mol_type = other DNA
ttttcatctgcgtagggaacaaatatttgctaggcattactataatagggccggtgtggttggtgatgctattccagaca

SEQ ID NO: 83101 - DNA, 80 bp, synthetic construct
  source 1..80: mol_type = other DNA
aagcatatattaagggtactggtactggccgtgaccctattggtagttatatatattcagccactccaagtggctctatg

SEQ ID NO: 83102 - DNA, 80 bp, synthetic construct
  source 1..80: mol_type = other DNA
ccattagcactgctgctactccatcagttgcacagacattcactccaacaaactttaagcagtatattaggcacggggaa

SEQ ID NO: 83103 - DNA, 80 bp, synthetic construct
  source 1..80: mol_type = other DNA
gaatatgaattacaatttatttttcaattgtgtaaaattactctaacaactgaggtaatggcttacctgcacaccatgga

SEQ ID NO: 83104 - DNA, 80 bp, synthetic construct
  source 1..80: mol_type = other DNA
acgggacagccctccacaggctaaacaggaccctttggcaaaatataagttttggaccgtggaccttaaggaacgctttt

SEQ ID NO: 83105 - DNA, 80 bp, synthetic construct
  source 1..80: mol_type = other DNA
ctttagatttagatcagtttgcattgggtcgcaagttcctattacaaattggtgcacaacgcaaggccaggccaggcctt

SEQ ID NO: 83106 - DNA, 80 bp, synthetic construct
  source 1..80: mol_type = other DNA
aaaggcctgccccatcctcttcctcttcctcttcagccaaacgtaaacgggttaaaaaataggtttgtggcctgcatgtg

SEQ ID NO: 83107 - DNA, 80 bp, synthetic construct
  source 1..80: mol_type = other DNA
tgtaataattacaatatccctgtaggttaggttaagggtggtgtttaggtggcgtccctattgccctacccatatttgca

SEQ ID NO: 83108 - DNA, 80 bp, synthetic construct
  source 1..80: mol_type = other DNA
gcttgtagacactttgttctatgctatgttgcatgtatcgtgggtttccattttgtttttactgcagccattttgtggcg

SEQ ID NO: 83109 - DNA, 80 bp, synthetic construct
  source 1..80: mol_type = other DNA
accgatttcggttgctaacatttcactacatttgccaacttttaaaccacagtacctatgtttattggcataaaccttaa

SEQ ID NO: 83110 - DNA, 80 bp, synthetic construct
  source 1..80: mol_type = other DNA
ttcttttggcatactacatacttcccgcccgcccacaccttgttcttggcgcgccttcctggcgcatgtcatgcacacca

SEQ ID NO: 83111 - DNA, 80 bp, synthetic construct
  source 1..80: mol_type = other DNA
gcatgtcataagctaaatttccttgccaagtttctatcctacctataaactgtattactcatttgcaggtgtgctacaca

SEQ ID NO: 83112 - DNA, 80 bp, synthetic construct
  source 1..80: mol_type = other DNA
atgaggagggggcggggtgtactgggtggttttatgtagaggcagtagtggacaaaaaaactggagataatatttcagat

SEQ ID NO: 83113 - DNA, 80 bp, synthetic construct
  source 1..80: mol_type = other DNA
atacacaagtggagactgtggaagcaacgttgcaggtagatgggcaaaatggcgggtcacaacacagtatgtgtagtggc

SEQ ID NO: 83114 - DNA, 80 bp, synthetic construct
  source 1..80: mol_type = other DNA
tggcgggtcacaacacagtatgtgtagtggcggggggagcagcgacagaagtacagacatagaccttgaaacaaatgaaa

SEQ ID NO: 83115 - DNA, 80 bp, synthetic construct
  source 1..80: mol_type = other DNA
taataaagtatgtatgtgtgtgtgtttttgcaatgtgttgtgtgtttgcatgactgcatatgtatgacatatatgggtgt

SEQ ID NO: 83116 - DNA, 80 bp, synthetic construct
  source 1..80: mol_type = other DNA
gaaagtaacaatcctacttttatagacagggagtaaccgaaataggtttaggaccgaaaacggtacatataaaagcactg

SEQ ID NO: 83117 - DNA, 80 bp, synthetic construct
  source 1..80: mol_type = other DNA
acgaggaaggcaccgaatctgatttggatgggtttatagacaatagcaatataatatctacacaggcagaaagggagaca

SEQ ID NO: 83118 - DNA, 80 bp, synthetic construct
  source 1..80: mol_type = other DNA
gctcagcagttgttacatgcccaaaacacacatgcagatatacagacgctgcagaaactaaaacgaaagtatttaggcag

SEQ ID NO: 83119 - DNA, 80 bp, synthetic construct
  source 1..80: mol_type = other DNA
tggcaatactttggaaacagtggaagcaacgcaacaggtacaggaacagtatgtaagggaggcaagtggcgggaaagagc

SEQ ID NO: 83120 - DNA, 80 bp, synthetic construct
  source 1..80: mol_type = other DNA
aaaatggaggctcacaacagagtgtgtgtagcagagatgggagcatagggtcaggaagtgatatggatgtggatagacag

SEQ ID NO: 83121 - DNA, 80 bp, synthetic construct
  source 1..80: mol_type = other DNA
gatacaatgccactgcaacaaatacaagatatactaaaatgtagtaatgtgcaagccaagctatattgtaaatttaaaga

SEQ ID NO: 83122 - DNA, 80 bp, synthetic construct
  source 1..80: mol_type = other DNA
gatatttggcataccattttcagagttggtacgaacatttaaaagtgatagtacatgttgtcacgattggatatgtgcta

SEQ ID NO: 83123 - DNA, 80 bp, synthetic construct
  source 1..80: mol_type = other DNA
tgaagttgtgaataaaccattgctggagctgcaacttggctgtgtgttctgcaagaaggcattgacagcttcagaggtat

SEQ ID NO: 83124 - DNA, 80 bp, synthetic construct
  source 1..80: mol_type = other DNA
catggggcgtggttatattattgttaattagatatacgtgtggcaaaaacagaaaaacaattgtaaagtctttagcatcc

SEQ ID NO: 83125 - DNA, 80 bp, synthetic construct
  source 1..80: mol_type = other DNA
atattaaatgtaccaactgaacaaatgcttgtgcagcctccaaaaatacgtagccctgcggttgcattatacttttataa

SEQ ID NO: 83126 - DNA, 80 bp, synthetic construct
  source 1..80: mol_type = other DNA
aacatctatatccaacattagtgacgtgtatgggagtacaccagaatggatagaaagacaaacacagttacaacatagct

SEQ ID NO: 83127 - DNA, 80 bp, synthetic construct
  source 1..80: mol_type = other DNA
aggtggatgatggtggggactggaagccaatagtacagttcctaaggtatcaaggggtcgagttcatttcatttttaagt

SEQ ID NO: 83128 - DNA, 80 bp, synthetic construct
  source 1..80: mol_type = other DNA
ataattttgcatatacagatttaagagtagtgtatagagacgggtatccgtatggagtgtgcaaattctgtttgttattt

SEQ ID NO: 83129 - DNA, 80 bp, synthetic construct
  source 1..80: mol_type = other DNA
aatggatgtgaatggaaatcctgtataccaattaaataatgcaaactggaaatgtttttttgaaaggacatggtccagat

SEQ ID NO: 83130 - DNA, 80 bp, synthetic construct
  source 1..80: mol_type = other DNA
tgcgttgctatagaactacaaatagcattggaatcactttgtaaaacagaatatagtatggaagagtggacattaaggga

SEQ ID NO: 83131 - DNA, 80 bp, synthetic construct
  source 1..80: mol_type = other DNA
tgtatgtgaaagtatgtggtatacagaacctaaacagtgttttaaaaaacaaggacaacatatagaagtgtggtttgatg

SEQ ID NO: 83132 - DNA, 80 bp, synthetic construct
  source 1..80: mol_type = other DNA
gcagcaaggacaatcgggctgaatatgttgtgtggaaatggatatattattgtggggaggatgggtggtgtaaagtgcct

SEQ ID NO: 83133 - DNA, 80 bp, synthetic construct
  source 1..80: mol_type = other DNA
tctgcagtaaactatgagggcatatattatatacatgacggccataaaacgtattatacaaactttaaagacgaggccac

SEQ ID NO: 83134 - DNA, 80 bp, synthetic construct
  source 1..80: mol_type = other DNA
tatagtaaggtccgaaaattaagatattacaattgttcagtgtacggggctagcctggaagcactaactaaaaaaaagtt

SEQ ID NO: 83135 - DNA, 80 bp, synthetic construct
  source 1..80: mol_type = other DNA
caaatatgggtgcaaaggcacatgggaagtgcatatgggaaaacaaagtatttattgtcccgactctgtgtccagtacct

SEQ ID NO: 83136 - DNA, 80 bp, synthetic construct
  source 1..80: mol_type = other DNA
ggcacctacgaagcctcatcatccctgcggccgggaaaacgtcccagaaccacagagcccgacagtactgactccaccac

SEQ ID NO: 83137 - DNA, 80 bp, synthetic construct
  source 1..80: mol_type = other DNA
acagtccactaccacagccagagagtcctacgcacagtgtgtcgcaaggaacacagacaacacaaacaacaacaccagaa

SEQ ID NO: 83138 - DNA, 80 bp, synthetic construct
  source 1..80: mol_type = other DNA
aacacctccctggtggagcttcgtgtaacaacaccgaaatcgacagtggttataagactgcacctgtagtacatataaaa

SEQ ID NO: 83139 - DNA, 80 bp, synthetic construct
  source 1..80: mol_type = other DNA
ggtgaagcaaacagactaaagtgtttaaggtatcggtttcaaaaacataaacaactgtttgttactgtatcatccaccta

SEQ ID NO: 83140 - DNA, 80 bp, synthetic construct
  source 1..80: mol_type = other DNA
tcattggacaaatgcaaactctgctgtaaataatagttatattactgttgtatataaagatgaaacacaacgccaaaaat

SEQ ID NO: 83141 - DNA, 80 bp, synthetic construct
  source 1..80: mol_type = other DNA
ttttggatattgtaaaaataccccctagtgtatcacttgtactgggacatatgacatgtgttgatatgtaatgttaatgt

SEQ ID NO: 83142 - DNA, 80 bp, synthetic construct
  source 1..80: mol_type = other DNA
aattgttacattatgtaatattgtattacaatagtacgtgttattggtaccgtacacagtatatacaatactacacacgc

SEQ ID NO: 83143 - DNA, 80 bp, synthetic construct
  source 1..80: mol_type = other DNA
tgcctgtttgtctgctttaatgtgccgctattgcagtctgtctctgtgtttgcctcgtgtttattacttatacttttatt

SEQ ID NO: 83144 - DNA, 80 bp, synthetic construct
  source 1..80: mol_type = other DNA
ttggtttgttgtggcatcatcctacataaccacatttacactatatatactttttttttacttcccgttattatgtttct

SEQ ID NO: 83145 - DNA, 80 bp, synthetic construct
  source 1..80: mol_type = other DNA
atagccatgctgtgtggttaattaacacacaataaatcacaggttttttgtattgtatgtatttgtgtgttatatataat

SEQ ID NO: 83146 - DNA, 80 bp, synthetic construct
  source 1..80: mol_type = other DNA
ggttgcccaccgggcacacagacgtaagcgggcatcagcaacgcagctatatcaaacatgtaaacaatctggcacatgtc

SEQ ID NO: 83147 - DNA, 80 bp, synthetic construct
  source 1..80: mol_type = other DNA
acatccgttgacaccagaggaaaaacagttacactgtgactataagaaacggtttcacaaaatttcacatatgtggaccg

SEQ ID NO: 83148 - DNA, 80 bp, synthetic construct
  source 1..80: mol_type = other DNA
ggtagtttatttacattctttggaggccttggtattggcactggctctggcactggggggcgtacaggatatattccttt

SEQ ID NO: 83149 - DNA, 80 bp, synthetic construct
  source 1..80: mol_type = other DNA
agtctggagcttcgttccctaattttacaggtactgcaggatttgaggtaacatcctcctcaactaccacgcctgcagta

SEQ ID NO: 83150 - DNA, 80 bp, synthetic construct
  source 1..80: mol_type = other DNA
ttagatataacgcccacttctacctctgtacatgttagttccactacatatactaatcctacatttgtagaccctccggt

SEQ ID NO: 83151 - DNA, 80 bp, synthetic construct
  source 1..80: mol_type = other DNA
tattgaggtcccccaaacaggtgaggtatctggaaatatattgataagtaccccaacatctggtgttcatagttatgagg

SEQ ID NO: 83152 - DNA, 80 bp, synthetic construct
  source 1..80: mol_type = other DNA
gtcttaggcgtatagctgccccacgtttatataaaaaggcctttcaacaggttaaggtcacagatcctgcatttcttcac

SEQ ID NO: 83153 - DNA, 80 bp, synthetic construct
  source 1..80: mol_type = other DNA
aaacctgaaactttaattaatgttgataatcccatatttcaaaatgctgacacaacattaaccttttcaccatcaggtgt

SEQ ID NO: 83154 - DNA, 80 bp, synthetic construct
  source 1..80: mol_type = other DNA
ggtcgtgcctgacatgctggagacacacaacagcaactgaatcagcagtataatcatgcacggtaacgtaccaacacttc

SEQ ID NO: 83155 - DNA, 80 bp, synthetic construct
  source 1..80: mol_type = other DNA
tgcaaacatagatgatgaggcacctgtgtcatctcgcttttctattgctacaccttctaggttgcctaccaacactgttc

SEQ ID NO: 83156 - DNA, 80 bp, synthetic construct
  source 1..80: mol_type = other DNA
ctttgtcttttagtggtagtacctctaatgttacaataccctttggtacatcttgggatgttcccatttattcaggtccc

SEQ ID NO: 83157 - DNA, 80 bp, synthetic construct
  source 1..80: mol_type = other DNA
gatgtagtattgcccacaggaccccctacatggccttatgcacctcaatctccttttgataccacccatgatgtagttat

SEQ ID NO: 83158 - DNA, 80 bp, synthetic construct
  source 1..80: mol_type = other DNA
ctaaatctggtaaagcagacatccctaaggtgtctgcatttcagtatagggtgtttagagtacgcctcccagatcctaat

SEQ ID NO: 83159 - DNA, 80 bp, synthetic construct
  source 1..80: mol_type = other DNA
cacaatatattatagaacttataccacaaactgagattgacctgcaatgccatgagcaattgaacagctcagaggatgag

SEQ ID NO: 83160 - DNA, 80 bp, synthetic construct
  source 1..80: mol_type = other DNA
gattggccgtggacagcctttaggtgttggtgtaagtggccatccactgttcaataggttggatgacactgaaagctcta

SEQ ID NO: 83161 - DNA, 80 bp, synthetic construct
  source 1..80: mol_type = other DNA
gtatagctattcaagatactgccccagacagtagggataatatttcagtggatcccaaacaaacacaattatgcattatt

SEQ ID NO: 83162 - DNA, 80 bp, synthetic construct
  source 1..80: mol_type = other DNA
ggctgtgcacccgctataggtgaacactggacaaagggtacggcctgtcgttccacacctactacagcgggcgactgccc

SEQ ID NO: 83163 - DNA, 80 bp, synthetic construct
  source 1..80: mol_type = other DNA
cccattggaacttgtaaattcacctattgaggatggagacatggtggacacaggttttggtgcattaaactttaaagctt

SEQ ID NO: 83164 - DNA, 80 bp, synthetic construct
  source 1..80: mol_type = other DNA
tgcaggaatctaaatctgatgtgccattggatattgtacaatccacatgtaaatatcccgattatttaaaaatgagtgca

SEQ ID NO: 83165 - DNA, 80 bp, synthetic construct
  source 1..80: mol_type = other DNA
aaacatgactctttctgcaaccacacagtctatgtccacatataattcaaagcaaattaaacagtatgttagacatgcag

SEQ ID NO: 83166 - DNA, 80 bp, synthetic construct
  source 1..80: mol_type = other DNA
aggaatatgaattacaatttgtgtttcaactatgtaaaatatccctgtctgctgaggttatggcctatttacatactatg

SEQ ID NO: 83167 - DNA, 80 bp, synthetic construct
  source 1..80: mol_type = other DNA
ctcctgttgccactagcttagaggacaaatacagatatgtaaaaagtgcagctataacctgtcaaaaggatcagccccct

SEQ ID NO: 83168 - DNA, 80 bp, synthetic construct
  source 1..80: mol_type = other DNA
cctgaaaagcaggacccactatcaaaatataaattttgggaggtaaatttacaaaacagtttttctgctgatttggatca

SEQ ID NO: 83169 - DNA, 80 bp, synthetic construct
  source 1..80: mol_type = other DNA
tttcctcttggcaggaagtttttaatgcaggttggggtccgtactaaacctcctatatcctctaaaaaacgctctgctcc

SEQ ID NO: 83170 - DNA, 80 bp, synthetic construct
  source 1..80: mol_type = other DNA
tactacatctacctcagccccctcctccaagcgcaaacgcaaatagtatgttgtgtgtttgtattgtgtatgtatggttg

SEQ ID NO: 83171 - DNA, 80 bp, synthetic construct
  source 1..80: mol_type = other DNA
tattatgtactatttatttattgtgtatactgtatgtgtgtatttgttgtatgtgttgtatgactgtatgtatgtgtaat

SEQ ID NO: 83172 - DNA, 80 bp, synthetic construct
  source 1..80: mol_type = other DNA
ggtggtgtccctaggcagttgggtggcatgttaggtggcgtccctgtttatataccaatctccaccctgtattattaata

SEQ ID NO: 83173 - DNA, 80 bp, synthetic construct
  source 1..80: mol_type = other DNA
tatgtactgttatcatgcagttacctatattacatatagtatagcttataggtatccattttagtttggcgcctttttgg

SEQ ID NO: 83174 - DNA, 80 bp, synthetic construct
  source 1..80: mol_type = other DNA
ttgaaacacagtgttgtaggtgtgagtcgttggtgcagttggctgttcagagttcaacaaaagagctgcgtatgttacaa

SEQ ID NO: 83175 - DNA, 80 bp, synthetic construct
  source 1..80: mol_type = other DNA
taccctccattttaccttgcaaccggtttcggtcgttgggacatatcttgtaaataccacaagcatattcagcagaactg

SEQ ID NO: 83176 - DNA, 80 bp, synthetic construct
  source 1..80: mol_type = other DNA
ttaatcctttggcatagtgccgtttcctgtgtttaatgtttttttgtgctatacactatgcctcacctattagtcacgta

SEQ ID NO: 83177 - DNA, 80 bp, synthetic construct
  source 1..80: mol_type = other DNA
ctgtgtgctgccaactatgcttttatctgcatactttagtgcttttgggcacacatttttattgcaaacatctgcacttt

SEQ ID NO: 83178 - DNA, 80 bp, synthetic construct
  source 1..80: mol_type = other DNA
agtgttttggcttgcagcatacgttgtactagccaagtatctgtctagtaaactaggtgtgcaccctattactcatgcac

SEQ ID NO: 83179 - DNA, 80 bp, synthetic construct
  source 1..80: mol_type = other DNA
tgtgcaccctattactcatgcactgcaaccgtttacggttttgcagggttttgcagcaacaggccttttttataattatt

SEQ ID NO: 83180 - DNA, 80 bp, synthetic construct
  source 1..80: mol_type = other DNA
tgtacaacacccaggacatccatggatcgtcagttatttgaaaatacagaggagcgaccacgtacagtgcatcagctatg

SEQ ID NO: 83181 - DNA, 80 bp, synthetic construct
  source 1..80: mol_type = other DNA
gggcacagtggagcttgtgtgccccctctgcgcaacaaggcgataactgcaatggcgtcacctgaaggtacagatgatga

SEQ ID NO: 83182 - DNA, 80 bp, synthetic construct
  source 1..80: mol_type = other DNA
ggggggatgccggggatggtttcacgtggaggcaatagtaaaaaaacgtacaggtgatgtaatatctgaagacgaaacag

SEQ ID NO: 83183 - DNA, 80 bp, synthetic construct
  source 1..80: mol_type = other DNA
gtacaggggatgtaatatctgaagacgaaacagacgaggaaggcaccgaatctgatttggatgggtttatagacaatagc

SEQ ID NO: 83184 - DNA, 80 bp, synthetic construct
  source 1..80: mol_type = other DNA
tttacattctttggaggccttggtattggcactggctctggcactggggggcgtacaggatatattcctttgggtactag

SEQ ID NO: 83185 - DNA, 80 bp, synthetic construct
  source 1..80: mol_type = other DNA
ttggtattggcactggctctggcactggggggcgtacaggatatattcctttgggtactaggccttccactgttgttgat

SEQ ID NO: 83186 - DNA, 80 bp, synthetic construct
  source 1..80: mol_type = other DNA
taacaatcatatatgtaaaaagtaggttggtaccgaaaacggtcggaccgacctgggtacatatataaagaaaccgtagg

SEQ ID NO: 83187 - DNA, 80 bp, synthetic construct
  source 1..80: mol_type = other DNA
acaggatgacgctgcaacggtgcaggcactaaaacgaaagtatacatgtagccctgcaagcagctcctgtgtgtccttgg

SEQ ID NO: 83188 - DNA, 80 bp, synthetic construct
  source 1..80: mol_type = other DNA
tggacagtgaattaagtccccggctggacgccatacgtatacaccggggacaggacagggctaggagaaggctgtttgat

SEQ ID NO: 83189 - DNA, 80 bp, synthetic construct
  source 1..80: mol_type = other DNA
caagatagtggctatggccatacgcaggtggaaattggagcatcagaaagtcaggtaccggaggatgcgcaacatgaggg

SEQ ID NO: 83190 - DNA, 80 bp, synthetic construct
  source 1..80: mol_type = other DNA
ggggggggaatccgtgcagaaagtagagaagtagcgtgggggggggggcggagaggtcgagggagaaaaaaaaaaccatc

SEQ ID NO: 83191 - DNA, 80 bp, synthetic construct
  source 1..80: mol_type = other DNA
ggagaggccgagggcgccacaggtaaccaggaaaagcaagcgcaagagcaggcggcagacatattagaggtgtttaaggt

SEQ ID NO: 83192 - DNA, 80 bp, synthetic construct
  source 1..80: mol_type = other DNA
aaaagcaagcgcaagagcaggcggcagacatattagaggtgtttaaggttagtaatttaaaagcaaaattactgtacaaa

SEQ ID NO: 83193 - DNA, 80 bp, synthetic construct
  source 1..80: mol_type = other DNA
ttcaaggacctatttggactagcatttggagagctagtaaggaattttaaaagtgataagtcaatatgtggggactgggt

SEQ ID NO: 83194 - DNA, 80 bp, synthetic construct
  source 1..80: mol_type = other DNA
aatatgtgcgtttggtgtataccatgctgtggcagaggctgtaaagaccttaatacaacctatatgtgtgtatgcacaca

SEQ ID NO: 83195 - DNA, 80 bp, synthetic construct
  source 1..80: mol_type = other DNA
tgaggatttaaggctgacatgtgtattttgcaaaaatgaattaacaacagaagaattgctggtgtttgcactaaaggagc

SEQ ID NO: 83196 - DNA, 80 bp, synthetic construct
  source 1..80: mol_type = other DNA
tacaaatacagacatgccagtggggaatggtaatattaatgcttgtgcgatacaaatgtgggaagagcagggaaacagta

SEQ ID NO: 83197 - DNA, 80 bp, synthetic construct
  source 1..80: mol_type = other DNA
gcacacagcatgggaaaactgttaaacataccagagagacagatgctaatcgaaccaccaaagattagaagcgcaccgtg

SEQ ID NO: 83198 - DNA, 80 bp, synthetic construct
  source 1..80: mol_type = other DNA
tgcactatattggtatagaacagccatgggaaacgccagcgaggtgtatggggaaacacctgaatggatagtaagacaaa

SEQ ID NO: 83199 - DNA, 80 bp, synthetic construct
  source 1..80: mol_type = other DNA
cagtggtagggcatgcaatgcaagaagcacagtttagtttgtccatgttagtgcaatgggcatatgacaatgacataaca

SEQ ID NO: 83200 - DNA, 80 bp, synthetic construct
  source 1..80: mol_type = other DNA
gatgaaagtgtgctggcctatgaatatgcattgctgggaaatgaggacccaaatgcggcggccttcctggccagtaactg

SEQ ID NO: 83201 - DNA, 80 bp, synthetic construct
  source 1..80: mol_type = other DNA
ccaagcaaagtatattaaagatgcaattacaatgtgtaagcattatagacgtgcagagcaggcaaaaatgacaatggcac

SEQ ID NO: 83202 - DNA, 80 bp, synthetic construct
  source 1..80: mol_type = other DNA
agtggattacacatagaggccgcaaggtggcagacacaggggattggaaggctattgtaaagtatttaagatatcaacag

SEQ ID NO: 83203 - DNA, 80 bp, synthetic construct
  source 1..80: mol_type = other DNA
atagaatttgtaccatttatcagtgccctgaaattgtttttaaagggggtaccaaaaaaaagctgcatggtattttacgg

SEQ ID NO: 83204 - DNA, 80 bp, synthetic construct
  source 1..80: mol_type = other DNA
accaagcgacacagggaagtcgctattttgcatgagcctactaaattttctgggaggtgctgtaatatcatatgtaaatt

SEQ ID NO: 83205 - DNA, 80 bp, synthetic construct
  source 1..80: mol_type = other DNA
cacctatcagtgctggcaatacatagatacatatttacggacggtattagatggcaatgccataagcatagatagaaaac

SEQ ID NO: 83206 - DNA, 80 bp, synthetic construct
  source 1..80: mol_type = other DNA
tatgcattgtgtggagacataactggccattcggagtatgcgcaccatgcttggcacgtgaggtaaaagtgagggagctg

SEQ ID NO: 83207 - DNA, 80 bp, synthetic construct
  source 1..80: mol_type = other DNA
acagaaatttaacacagctgaagtgtcctccattaatgataacaacaaatataaatccactagaggatcctacgtttaaa

SEQ ID NO: 83208 - DNA, 80 bp, synthetic construct
  source 1..80: mol_type = other DNA
tacctgcacagtagaatagtggtgttccagtttttacataagtgtccactaaacagtaatggggacccagtatataccct

SEQ ID NO: 83209 - DNA, 80 bp, synthetic construct
  source 1..80: mol_type = other DNA
gaataatgaaaattggaaatcattcttccgaaggtcctgggcacgcatagagggatctgatcaacaggaggaggaggagg

SEQ ID NO: 83210 - DNA, 80 bp, synthetic construct
  source 1..80: mol_type = other DNA
aggaggaggatgaggatggagtcactagccgaccgtttagatgcgtgccaggagaaattactagacctctatgaaagaga

SEQ ID NO: 83211 - DNA, 80 bp, synthetic construct
  source 1..80: mol_type = other DNA
tagcaacaagcttgaggaccaaatattgcattggcactatgtgcgtttggaaaatgcaatgttatttaaggcacgacaag

SEQ ID NO: 83212 - DNA, 80 bp, synthetic construct
  source 1..80: mol_type = other DNA
caggactaactcatgtgggccaccagatggtgccaacacttagtgttacaaaaggcaaagcacataaagcaattgaagta

SEQ ID NO: 83213 - DNA, 80 bp, synthetic construct
  source 1..80: mol_type = other DNA
catctgtcattgcaagggttacaaacaagtgcatatgcgcatgaaccctggacattgcaaaccacctctttggaaatgtg

SEQ ID NO: 83214 - DNA, 80 bp, synthetic construct
  source 1..80: mol_type = other DNA
gaatacgcagccacaacgatgctggaagaaaaaaggacgcagactaacagttaaatttgatggcgaggaccacaaagcag

SEQ ID NO: 83215 - DNA, 80 bp, synthetic construct
  source 1..80: mol_type = other DNA
tggaatacgttagttgggggtttatttatgtacaaagcacagaaactgatctgtggcataaggtacctggaaaggtgtca

SEQ ID NO: 83216 - DNA, 80 bp, synthetic construct
  source 1..80: mol_type = other DNA
tacaagggcctatattacgaactggagggacaggaacactattatgtgacatttgcacaggaggcccaaaaatatgggga

SEQ ID NO: 83217 - DNA, 80 bp, synthetic construct
  source 1..80: mol_type = other DNA
cgacattgggaccattcctgttacggacccacagtggaacagacaacaggacggtcattagctgaactatatatacggtg

SEQ ID NO: 83218 - DNA, 80 bp, synthetic construct
  source 1..80: mol_type = other DNA
ccaggacgccgtgcgagaagtatccactgctgaaactgctggacacctgcgggacaacaccacacagaccaccaccaccc

SEQ ID NO: 83219 - DNA, 80 bp, synthetic construct
  source 1..80: mol_type = other DNA
ccacgtacgtgggccccacccagacatccaccccagtgcagacgccgcctcataagcgacagcgactcaacagagacaga

SEQ ID NO: 83220 - DNA, 80 bp, synthetic construct
  source 1..80: mol_type = other DNA
gagcagcagcccgacacaacacaaaaagacaactacaagcggttggacagtactgaccagtggatcaacggtcaccgtaa

SEQ ID NO: 83221 - DNA, 80 bp, synthetic construct
  source 1..80: mol_type = other DNA
cagcacagaaacaggggacatctgtgacagttacagttcacctgtaatacacctaaaaggtgatccaaataaattaaagt

SEQ ID NO: 83222 - DNA, 80 bp, synthetic construct
  source 1..80: mol_type = other DNA
gttttcggtataggttacaacattcagtacctgagctgtttgacaaagcatcatccacatggcattgggccggtggacaa

SEQ ID NO: 83223 - DNA, 80 bp, synthetic construct
  source 1..80: mol_type = other DNA
agtacaaccaaagcagcatttgtaacattgtggtatgttaatgtggaacaacgaaaacaatttttaaatcgtgtaaccat

SEQ ID NO: 83224 - DNA, 80 bp, synthetic construct
  source 1..80: mol_type = other DNA
tccaaagggtatacaagccactgcaggctatatgtcaatgtgtatataagtgtgtgtatacaaaaacataaatactgtgt

SEQ ID NO: 83225 - DNA, 80 bp, synthetic construct
  source 1..80: mol_type = other DNA
tgcaattattgagccagctacagctatttacataccacacctgcattattgtgtaaaccataaacaatcctggacgagct

SEQ ID NO: 83226 - DNA, 80 bp, synthetic construct
  source 1..80: mol_type = other DNA
tgtgtgtttgatagatggatggtgtacaatactcctgctgcttatacttttctggctttcctatctttcctcactaaacg

SEQ ID NO: 83227 - DNA, 80 bp, synthetic construct
  source 1..80: mol_type = other DNA
ccatgcatgctgcaaaccgttaagtatacaggaaaaggagcatcaggtacagacatacatccacttccacttgattgctg

SEQ ID NO: 83228 - DNA, 80 bp, synthetic construct
  source 1..80: mol_type = other DNA
catttttggtgtttttctgtgccatatatgtaggattgtggtgcatatacatgcaagtgttgtggtatatggaataactg

SEQ ID NO: 83229 - DNA, 80 bp, synthetic construct
  source 1..80: mol_type = other DNA
tggcgccaccagccatacactgctgctaatatgtaaatagtgttccttgtgtttgttgttagtgtgcactatgtatcccc

SEQ ID NO: 83230 - DNA, 80 bp, synthetic construct
  source 1..80: mol_type = other DNA
ttgtagttagttcccatcaggggtttgcattacttattgtggatcagcaaaactgcggattgttatttttgtttttgcta

SEQ ID NO: 83231 - DNA, 80 bp, synthetic construct
  source 1..80: mol_type = other DNA
ttactgcttattgcaatactgttgtacaggcttttacattaggtggtgtaccttgtgtgttttcctccccacagtttttt

SEQ ID NO: 83232 - DNA, 80 bp, synthetic construct
  source 1..80: mol_type = other DNA
actttgttatatttttatatgtttatggcataataaacattatggctcttaaacgtcgcaagcgtgcatctgcaactgac

SEQ ID NO: 83233 - DNA, 80 bp, synthetic construct
  source 1..80: mol_type = other DNA
ctctatcgtacatgtaaacaatcaggcacatgtccacctgatgttgttccaaaggtggaaggggatacccttgctgaccg

SEQ ID NO: 83234 - DNA, 80 bp, synthetic construct
  source 1..80: mol_type = other DNA
cattttaaagtgggctagtttgggggttttctttgggggattgggtataggcaccggctctggttctggtggtcgtactg

SEQ ID NO: 83235 - DNA, 80 bp, synthetic construct
  source 1..80: mol_type = other DNA
ggtatgtgcctattggcacacggcctcctactgtagtagatattggccctgtgtcccgcccccctgtagttattgatcca

SEQ ID NO: 83236 - DNA, 80 bp, synthetic construct
  source 1..80: mol_type = other DNA
gtgggtgttgccgatccctctatagttacccttgtggaggaatccagcttaattgaggcaggggctacggtccctacatt

SEQ ID NO: 83237 - DNA, 80 bp, synthetic construct
  source 1..80: mol_type = other DNA
ttccgggtccgggggctttaatgtcacgtcgtcttctactaccaccccggctgtgttggacattactccatcgggtgagt

SEQ ID NO: 83238 - DNA, 80 bp, synthetic construct
  source 1..80: mol_type = other DNA
gacagtggacgggaaggtgttgccagtgtagagggccatgcacggccaggtggcaaccataaaggacatagtccttgaag

SEQ ID NO: 83239 - DNA, 80 bp, synthetic construct
  source 1..80: mol_type = other DNA
ctgtgcaggttagcagcaccagttttattaatcctttattcactgagccttctattattgagcctcctcaggcagaggac

SEQ ID NO: 83240 - DNA, 80 bp, synthetic construct
  source 1..80: mol_type = other DNA
cttgccggccatgtcatttccagtacccctaccgctgggtcccacagttttgaggagatcccaatgcacacctttgctac

SEQ ID NO: 83241 - DNA, 80 bp, synthetic construct
  source 1..80: mol_type = other DNA
ctctgagggtcctggaagtagtaccccgctgcctggcatccgtcgccttgcacggccccgcctgaatttatacagtaagg

SEQ ID NO: 83242 - DNA, 80 bp, synthetic construct
  source 1..80: mol_type = other DNA
ctaaccaacaggttaaggttgctaaccctacatttatgtctgatccagcctccttaattacatatgacaatcctatattt

SEQ ID NO: 83243 - DNA, 80 bp, synthetic construct
  source 1..80: mol_type = other DNA
gatcctgaggaaactattatatttgaacatcctagtatatatacacctcctgacccggactttttggatattgtgtcctt

SEQ ID NO: 83244 - DNA, 80 bp, synthetic construct
  source 1..80: mol_type = other DNA
acacaggcccgcgctcacatctcgccagggaactgtacggtttagtcgccttggtcaacgtgccaccttacgtacccgta

SEQ ID NO: 83245 - DNA, 80 bp, synthetic construct
  source 1..80: mol_type = other DNA
gtggtaggcgcattggcgctcgggtacacttttaccatgacattagtcccattccagcggatgctgtggagttacagcct

SEQ ID NO: 83246 - DNA, 80 bp, synthetic construct
  source 1..80: mol_type = other DNA
ttggtgccttcctcgtcccctagtataacatatgatatatatgccgaccctgagatgttggatcttcctgcacaacatac

SEQ ID NO: 83247 - DNA, 80 bp, synthetic construct
  source 1..80: mol_type = other DNA
acaacccacacttacagtacagggcccttccctctctgctgcatctgcatctaccaaggtacacaatgtcactgttccac

SEQ ID NO: 83248 - DNA, 80 bp, synthetic construct
  source 1..80: mol_type = other DNA
tggccacagggcttgatacgcctgtgacatctggccctgatgttgattttgcacatgctcctgcgcctataccagctgta

SEQ ID NO: 83249 - DNA, 80 bp, synthetic construct
  source 1..80: mol_type = other DNA
agcgtcctgaagtggttgacctacattgcaatgagcagttattagacagctcagagtcagaggaggaggatagtgtgcgt

SEQ ID NO: 83250 - DNA, 80 bp, synthetic construct
  source 1..80: mol_type = other DNA
ccatatgtacctgccacccatccacattctatatatattcagggatctgatttttatttgttgcctgcttatgtgttttt

SEQ ID NO: 83251 - DNA, 80 bp, synthetic construct
  source 1..80: mol_type = other DNA
tatacctgcctcccactcctgtgtctaaagttatcagtactgaccgttatgtgcaacgcaccaacctattttattatggg

SEQ ID NO: 83252 - DNA, 80 bp, synthetic construct
  source 1..80: mol_type = other DNA
ggcagttcccgtctgcttactgtaggacatccctattgtagtttgcagcttgatgggctgcagggcaagaaaaacactat

SEQ ID NO: 83253 - DNA, 80 bp, synthetic construct
  source 1..80: mol_type = other DNA
agcaccttgtataatcctgatactgagcgcatggtgtgggcctgcaggggcattgaggttggtaggtggcagccattggg

SEQ ID NO: 83254 - DNA, 80 bp, synthetic construct
  source 1..80: mol_type = other DNA
ggttggtaccagtggtcacccgctgtacaatcgcctggatgacactgaaaacaccacattacttgttgcagagtcctctg

SEQ ID NO: 83255 - DNA, 80 bp, synthetic construct
  source 1..80: mol_type = other DNA
acagtcgtgacaatgtttctgttgattataagcaaacccagctacttattgtaggttgcaaaccccctattggggaacac

SEQ ID NO: 83256 - DNA, 80 bp, synthetic construct
  source 1..80: mol_type = other DNA
tggacaaagggtactgcttgtactaaccccgcgccccggcccactgactgtcctccattggaatttaccaataccaccat

SEQ ID NO: 83257 - DNA, 80 bp, synthetic construct
  source 1..80: mol_type = other DNA
acaggatggcgatatggtggaaacaggctatggggccattgattttgctgcattgcaggaaaataaatctgaagtgccat

SEQ ID NO: 83258 - DNA, 80 bp, synthetic construct
  source 1..80: mol_type = other DNA
gagcaacttgttcaacaagcacagcaagcctacagggtggttactacctgtggcatttgtaagtgtccagttaggctggt

SEQ ID NO: 83259 - DNA, 80 bp, synthetic construct
  source 1..80: mol_type = other DNA
tggatatttgcaccactgtatgcaaatatcctgattatttacaaatggctgctgaaccatatggggactgtatgtttttt

SEQ ID NO: 83260 - DNA, 80 bp, synthetic construct
  source 1..80: mol_type = other DNA
aaatgtttgctcgccactttttcaatcgccagggtaccatgggtgagacactgcctgacacctattatcttaagggtgcg

SEQ ID NO: 83261 - DNA, 80 bp, synthetic construct
  source 1..80: mol_type = other DNA
aatgacaaggcaacccctggtagttatatttattcccctacgcctagtggctctatggtgtcctctgattcccaattatt

SEQ ID NO: 83262 - DNA, 80 bp, synthetic construct
  source 1..80: mol_type = other DNA
ctaatgtaaccatttgtactgctacatccccccctgtatctgaatataaagccacaagctttagggaatatttgcgccat

SEQ ID NO: 83263 - DNA, 80 bp, synthetic construct
  source 1..80: mol_type = other DNA
acagaggagtttgatttgcaattcatttttcagttatgtaaaatacatttaacccctgaaattatggcctacctacataa

SEQ ID NO: 83264 - DNA, 80 bp, synthetic construct
  source 1..80: mol_type = other DNA
tatgaataaagccttgttggatgactggaactttggtgtggtacctccaccctctaccagtctagaagacacatataggt

SEQ ID NO: 83265 - DNA, 80 bp, synthetic construct
  source 1..80: mol_type = other DNA
ttttgcagtccagagctattacatgtcagaagggtgctgctgccccgccgcccaaggaggatcgctatgccaaattatca

SEQ ID NO: 83266 - DNA, 80 bp, synthetic construct
  source 1..80: mol_type = other DNA
ttttggactgttgatttacgagacaagttttccactgatttggatcagtttcctttggggcgcaagtttttattgcaggc

SEQ ID NO: 83267 - DNA, 80 bp, synthetic construct
  source 1..80: mol_type = other DNA
cagtccccgctcagtatctgtgtcacgcaaacgtgctgcccccagctctacccctacatcctcccctgctacaaaacgca

SEQ ID NO: 83268 - DNA, 80 bp, synthetic construct
  source 1..80: mol_type = other DNA
ggtgcagtgcggagacgcagacctgaaggtgctacatgatctactgctgggcgaattgtccatagtgtgtcctggctgcg

SEQ ID NO: 83269 - DNA, 80 bp, synthetic construct
  source 1..80: mol_type = other DNA
aaaagcgtaaacagtagtgatgtttgtctgtatgctgttgttgtgcatgtgttgttttgtattgtgctgtactggccttg

SEQ ID NO: 83270 - DNA, 80 bp, synthetic construct
  source 1..80: mol_type = other DNA
tgcatgtgctgtttgtatggtgcctggtttgtatgaatgtatttgctatggctgtgtattgtatgaccctgtactgaccc

SEQ ID NO: 83271 - DNA, 80 bp, synthetic construct
  source 1..80: mol_type = other DNA
ttgtcccctgtgttgtgtatctgtggaatgtgtgttacactgtgtgtgcattaataaactgtgtgtcatgtgtgtgtggt

SEQ ID NO: 83272 - DNA, 80 bp, synthetic construct
  source 1..80: mol_type = other DNA
gtccggtgcaccctgtgagtaagtgtgtttattgttgcacgccttacacattttatgcagcttccccatttttgtgttct

SEQ ID NO: 83273 - DNA, 80 bp, synthetic construct
  source 1..80: mol_type = other DNA
ttgtgttctttgtaggcttataggtttgggtagccattttgtgttgccgaccgttttcggtctcccgccttttttgttgc

SEQ ID NO: 83274 - DNA, 80 bp, synthetic construct
  source 1..80: mol_type = other DNA
cgaccggtttcggtcgcccgcctttttggttgtggcactatgccactgtacacataacctatgagttacagtttaccaca

SEQ ID NO: 83275 - DNA, 80 bp, synthetic construct
  source 1..80: mol_type = other DNA
tcctgtttaaacaaactttatgtgttgcacctgggtgtgtttgacaggttgctaacacacacagtttggaacaatgctcc

SEQ ID NO: 83276 - DNA, 80 bp, synthetic construct
  source 1..80: mol_type = other DNA
atctatcttttttgacatgttatgcaagtactgtgcttttaggcacatattttgtgctgactactttcccttaattgctg

SEQ ID NO: 83277 - DNA, 80 bp, synthetic construct
  source 1..80: mol_type = other DNA
gtttggcattgcttgtatacttttctagccaaaaaactgtcttgcaacttcgggcatgttttacacacatacaaagccaa

SEQ ID NO: 83278 - DNA, 80 bp, synthetic construct
  source 1..80: mol_type = other DNA
ttgcaacttcgggcatgttttacacacatacaaagccaatccggtcgctccctatgtctcattctttttataatagttta

SEQ ID NO: 83279 - DNA, 80 bp, synthetic construct
  source 1..80: mol_type = other DNA
gtcagcaaagcacactcatctatgggaccgtgcaatccaactaatattttcctgctctgcaaggactacgaggtggactt

SEQ ID NO: 83280 - DNA, 80 bp, synthetic construct
  source 1..80: mol_type = other DNA
cataagggacatggctgacagtgaaggtacagaaagcggggatgggaccgaggccgcggaccgcgcaggttggtggtttt

SEQ ID NO: 83281 - DNA, 80 bp, synthetic construct
  source 1..80: mol_type = other DNA
tggtagaagccgtggtagaccgcaccactggataccaggtgtccagtgatgaggaggacgatagcattgacacaggggaa

SEQ ID NO: 83282 - DNA, 80 bp, synthetic construct
  source 1..80: mol_type = other DNA
gacctagtagacttcatagatacaaggcgccccggggatgggcaggaagtgccgctagcattgtttgttcaacaaaatgc

SEQ ID NO: 83283 - DNA, 80 bp, synthetic construct
  source 1..80: mol_type = other DNA
atgatctactgctgggcgaattgtccatagtgtgtcctggctgcgcataagggacatggctgacagtgaaggtacagaaa

SEQ ID NO: 83284 - DNA, 80 bp, synthetic construct
  source 1..80: mol_type = other DNA
aacaattatcttgtaaaaaatagggtgtaaccgaaaagggttatgaccgaaaacggtgcatataaaagtggagtggtaaa

SEQ ID NO: 83285 - DNA, 80 bp, synthetic construct
  source 1..80: mol_type = other DNA
ttactggacagttatccggacagcggatatggcaatacacaagtggaaactgtggaagcaacgttgcaggtagatgggca

SEQ ID NO: 83286 - DNA, 80 bp, synthetic construct
  source 1..80: mol_type = other DNA
tagcggggggggcagtgttatggatgtggaaacaacagaaagctgtgcaaatgtagaactaaacagtatatgtgaagtat

SEQ ID NO: 83287 - DNA, 80 bp, synthetic construct
  source 1..80: mol_type = other DNA
gggcaccattgtattaatgctaattaggttttcatgtgcaaaaaacagaacaacaattgctaagtgtttaattacattag

SEQ ID NO: 83288 - DNA, 80 bp, synthetic construct
  source 1..80: mol_type = other DNA
taataatccatatgcagtatgcaaacaatgtttactgttttattcaaaaattagagagtatagacgttatagcaggtctg

SEQ ID NO: 83289 - DNA, 80 bp, synthetic construct
  source 1..80: mol_type = other DNA
ggggcacaacagtgggaggtctataagtgtggtactgtaataacatgtcctgaatatgtatctagtacctgcagtgacgc

SEQ ID NO: 83290 - DNA, 80 bp, synthetic construct
  source 1..80: mol_type = other DNA
aaacgacagcgacttactgagcccgactcctccacaatctccccactgtccgtggacaatacaaacaaccaaatacactg

SEQ ID NO: 83291 - DNA, 80 bp, synthetic construct
  source 1..80: mol_type = other DNA
ggggcgtactggatatatccctttaggtggtgggggtcgcccaggtgtggtggatattgctcctgcaaggccacctatta

SEQ ID NO: 83292 - DNA, 80 bp, synthetic construct
  source 1..80: mol_type = other DNA
cggggcaatgcgctaattgctggcaacgtacacgacaacgtaacgaaacccaagtgtaataaagccatgcgtggtaatgt

SEQ ID NO: 83293 - DNA, 80 bp, synthetic construct
  source 1..80: mol_type = other DNA
gacaccaagcattctattgttatactaggtggggattactatttgtggccctatacacatttactacgcaaacgccgtaa

SEQ ID NO: 83294 - DNA, 80 bp, synthetic construct
  source 1..80: mol_type = other DNA
acactggggtattggcactacatgcaaaaacacagctgtacctccaggagactgcccccccctggaacttgtatcctctg

SEQ ID NO: 83295 - DNA, 80 bp, synthetic construct
  source 1..80: mol_type = other DNA
ggtttggggctatggatttcgctgccctacaggccaccaaatcagacgtccctttggatatttcacagtctgtttgtaaa

SEQ ID NO: 83296 - DNA, 80 bp, synthetic construct
  source 1..80: mol_type = other DNA
ttggtagtgttggggaagacattcctaacgattattatattaagggtagtggtaatggccgtgaccctatagaaagttat

SEQ ID NO: 83297 - DNA, 80 bp, synthetic construct
  source 1..80: mol_type = other DNA
atgcaggtgtgctacacaaatgtgttacctaaccgatttgtgttctgcctatgcttgcaacattttttcttataacattt

SEQ ID NO: 83298 - DNA, 80 bp, synthetic construct
  source 1..80: mol_type = other DNA
ggatgagggggcggggtgtaatgggtggttttttgttgaagcaatagtagaaaaaaaaacaggagataatgtttcggatg

SEQ ID NO: 83299 - DNA, 80 bp, synthetic construct
  source 1..80: mol_type = other DNA
tacacaagtggaaactgtggaagcaacgttgcaggtagatgggcaacatggcggttcacagaacagtgtgtgtagtagcg

SEQ ID NO: 83300 - DNA, 80 bp, synthetic construct
  source 1..80: mol_type = other DNA
gcggttcacagaacagtgtgtgtagtagcggggggggcagtgttatggatgtggaaacaacagaaagctgtgcaaatgta

SEQ ID NO: 83301 - DNA, 80 bp, synthetic construct
  source 1..80: mol_type = other DNA
cgccgttccctacgtaggtctcgcgcaccgaggatcctaggcattttgactgtcttgtaagattgtcttatctaaggtca

SEQ ID NO: 83302 - DNA, 80 bp, synthetic construct
  source 1..80: mol_type = other DNA
attcagacatcgaaagagaggggaacaagaacaacaatcaggaaactaaagaatttcaaatgcaatgttggaggtcattc

SEQ ID NO: 83303 - DNA, 80 bp, synthetic construct
  source 1..80: mol_type = other DNA
ttgaacaaagttaagtctctaaggattctaaatacgagaaggaaactcttgttaatttttgacacactaattcttcttgc

SEQ ID NO: 83304 - DNA, 80 bp, synthetic construct
  source 1..80: mol_type = other DNA
gagtaggtacgatcaaacaaaacatgggtgtctacaaggatggctggggtcttcctttgtcagtgtcaatgatagactag

SEQ ID NO: 83305 - DNA, 80 bp, synthetic construct
  source 1..80: mol_type = other DNA
tttctttggagtcaaccaaaaaagaccttaagagatggatagaacggagacaacagattgaggcatcaaaatctgcaaca

SEQ ID NO: 83306 - DNA, 80 bp, synthetic construct
  source 1..80: mol_type = other DNA
tcctcccaaaacccgtcaaataatcaaatcttaagttcaattattcagaagaccatcacaagggctttggctgcactaga

SEQ ID NO: 83307 - DNA, 80 bp, synthetic construct
  source 1..80: mol_type = other DNA
aagtgttgggataagtatggaccattttggcgtagacatgaacgtagtcagtcttgattgttatgattcaattatgaatt

SEQ ID NO: 83308 - DNA, 80 bp, synthetic construct
  source 1..80: mol_type = other DNA
tcgatgtcactggggtaacccccacaattagttaccagaagtcacaagaggagattttcccatatgccatggaggtagtt

SEQ ID NO: 83309 - DNA, 80 bp, synthetic construct
  source 1..80: mol_type = other DNA
gaactgctgcagactactgatttggagagattgtcttcgttaagccttgctttgatcaattcaatgaaaacttcatctac

SEQ ID NO: 83310 - DNA, 80 bp, synthetic construct
  source 1..80: mol_type = other DNA
tgtcaaactgagacaaaatgagttcggggcagcaagatatcaagtggttagatgcaaggaggcttattgtcaggaattta

SEQ ID NO: 83311 - DNA, 80 bp, synthetic construct
  source 1..80: mol_type = other DNA
tgctgaataacaccaagtttcaactaatttatcaaaaaacaggagaatgctctaaatgttatgccattaataatgacaag

SEQ ID NO: 83312 - DNA, 80 bp, synthetic construct
  source 1..80: mol_type = other DNA
aagattgtagtgaattagagaaggaattaactcacattaagctattagcaaagatgattttggtattaatcttagcccac

SEQ ID NO: 83313 - DNA, 80 bp, synthetic construct
  source 1..80: mol_type = other DNA
tcttatggacaaaataaaagagaaattgattaccgagactgagtttctactttatagattaataagggctctaataaacc

SEQ ID NO: 83314 - DNA, 80 bp, synthetic construct
  source 1..80: mol_type = other DNA
ccatgtgagtgtgaaccctgcagatacacctacagaggaggagttgatagacatggttcaccatgcaaagaagtttttaa

SEQ ID NO: 83315 - DNA, 80 bp, synthetic construct
  source 1..80: mol_type = other DNA
tggatcaatatagagaacctattagtctgagctcagtaaagagaagtgatggtcaaccatcaattaatgatttggatgaa

SEQ ID NO: 83316 - DNA, 80 bp, synthetic construct
  source 1..80: mol_type = other DNA
ttaaattcgatgtaggcaagctatcagatgatgtcagaatcagtgaaagagaaagcaattctgaagcattaagcaaggcc

SEQ ID NO: 83317 - DNA, 80 bp, synthetic construct
  source 1..80: mol_type = other DNA
agtgccagatgggtataaattgactggcaatgttttgatcctgctagaatgttttgtgagatcatccccagccaactttg

SEQ ID NO: 83318 - DNA, 80 bp, synthetic construct
  source 1..80: mol_type = other DNA
cgggtctctttgcataagttcagttaaagcctgatcaaataaggaaatttggtcatcactcgaagtgtaggcatctattg

SEQ ID NO: 83319 - DNA, 80 bp, synthetic construct
  source 1..80: mol_type = other DNA
taccctatcgacccatttcttctaaactgtgaaacagacgttagagattgggtagatggtaaccgcagctacagaatcat

SEQ ID NO: 83320 - DNA, 80 bp, synthetic construct
  source 1..80: mol_type = other DNA
gagacagatagagagcttaatccctggagcatgtagtaaggttagatctatgctaaggaaactgtttaacaggctgaaga

SEQ ID NO: 83321 - DNA, 80 bp, synthetic construct
  source 1..80: mol_type = other DNA
ccgggcaacttcatgaagagtttacaacaaactatctttctggtgaacatgcgtcctcacttaggaatttatgtaatatg

SEQ ID NO: 83322 - DNA, 80 bp, synthetic construct
  source 1..80: mol_type = other DNA
ttaggtgttgatcctccatcagaatctgatttagagttttcatggttgaatctggctgcttaccaccctttgagaatggt

SEQ ID NO: 83323 - DNA, 80 bp, synthetic construct
  source 1..80: mol_type = other DNA
agcaaaaatacatagaggatctgaaaaaactggaacagttaaaagaagacttaaaaagtgttgatatcagcctcattcca

SEQ ID NO: 83324 - DNA, 80 bp, synthetic construct
  source 1..80: mol_type = other DNA
tctgagacagaaagttatatattcaggtgctgttaatcttgatgatgagaaaatccccacaattattaagacgatccaga

SEQ ID NO: 83325 - DNA, 80 bp, synthetic construct
  source 1..80: mol_type = other DNA
ttctagcactcagggtgttgagctcttaacgaacaattatgggatccagtattggagggttccatcaaaccttagaaagg

SEQ ID NO: 83326 - DNA, 80 bp, synthetic construct
  source 1..80: mol_type = other DNA
aaaagaatggtgtggttggttattttagaccactgctatgggactatatgtgcatttctctatcaactgcaatagaactg

SEQ ID NO: 83327 - DNA, 80 bp, synthetic construct
  source 1..80: mol_type = other DNA
ctctctcctccaccatgggctcatggatcctgctatgagataaccttaactcagacgataacactatgtaatgttcttcc

SEQ ID NO: 83328 - DNA, 80 bp, synthetic construct
  source 1..80: mol_type = other DNA
gactggtcaattctaaatttgagtcacttgaagacttttttactgctattgaatcacttcccccaggttccgcaaaatta

SEQ ID NO: 83329 - DNA, 80 bp, synthetic construct
  source 1..80: mol_type = other DNA
agtcaaacaataaggtttcaaattaaaagtcaagatgctagctttaaagagaattttgccattcacctcaactttgttgg

SEQ ID NO: 83330 - DNA, 80 bp, synthetic construct
  source 1..80: mol_type = other DNA
gagttcatgaatgacacaaatcagttagggaaggtgacccctgttgaaattgtcattgatgccgatagattacaatttat

SEQ ID NO: 83331 - DNA, 80 bp, synthetic construct
  source 1..80: mol_type = other DNA
tgtctctgtattgaagagggtcatgcccaacaatggcttggagatcctgaacactgtttttgaggtagtggacgattggg

SEQ ID NO: 83332 - DNA, 80 bp, synthetic construct
  source 1..80: mol_type = other DNA
cctcccccgggtaggcccccgtggggtccccccggggttgtcggagggaaggagtgattgtgttgtgggttggacggatt

SEQ ID NO: 83333 - DNA, 80 bp, synthetic construct
  source 1..80: mol_type = other DNA
gaaggggtgattgtgttgtgggttggacggattagggtgtgtatggtggtggattggtgatgctctctctggtgatttgt

SEQ ID NO: 83334 - DNA, 80 bp, synthetic construct
  source 1..80: mol_type = other DNA
agggtgtgtatggtgggggattggtgatgctctctctggtgatttgtggtgctgttggcgtggttatcggcttgagcttc

SEQ ID NO: 83335 - DNA, 80 bp, synthetic construct
  source 1..80: mol_type = other DNA
gtgggaagaggcatcttacagatggggcacctgttgctgacactcaaaagtagggagaggcagttgaggcacaggtagtg

SEQ ID NO: 83336 - DNA, 80 bp, synthetic construct
  source 1..80: mol_type = other DNA
aagggccagtctcattccggatgccacacaccttggaccacaattttgcaagagttgttggtttgaaaacaaaggtttag

SEQ ID NO: 83337 - DNA, 80 bp, synthetic construct
  source 1..80: mol_type = other DNA
gggctgctctctgtctttggatctttggcttgcttattccccatttgctgagcctaagttatgaagctctgtagaggaac

SEQ ID NO: 83338 - DNA, 80 bp, synthetic construct
  source 1..80: mol_type = other DNA
tctgtagaggaacgatcaaattgcctaggatccccggtgcgcatcaccaatcccccaccatacacaccctaatccgccct

SEQ ID NO: 83339 - DNA, 80 bp, synthetic construct
  source 1..80: mol_type = other DNA
actttcaggaattgagagtttaaacaccttgttagataatcgctctaatcattatgaggaaatcattacactgtgccatc

SEQ ID NO: 83340 - DNA, 80 bp, synthetic construct
  source 1..80: mol_type = other DNA
ggttctgtcatcttatagttgcagacttggcaagctttcccagacagtgatcctaacaaccaagcatggaagaggacata

SEQ ID NO: 83341 - DNA, 80 bp, synthetic construct
  source 1..80: mol_type = other DNA
tgatgcagtggttgttgaagatgacattgagcagctgatttatcaatttaaaagatcatcacccatactaaggtttttgt

SEQ ID NO: 83342 - DNA, 80 bp, synthetic construct
  source 1..80: mol_type = other DNA
ttctgcctgatgatttttataaagaattctgtgacaatgtctacaacagtcacaagatgagagaaaaatatttttacagc

SEQ ID NO: 83343 - DNA, 80 bp, synthetic construct
  source 1..80: mol_type = other DNA
aacaagaggttggcttcttttagccctgttttgcaagaccaagaccttgagttattcgtaagagaagttggtgatacatc

SEQ ID NO: 83344 - DNA, 80 bp, synthetic construct
  source 1..80: mol_type = other DNA
gttgaaaggcagaacatgtgaagagcttctcaaggaagaagaacaggtcgaagacatagaataactgcctgagcgtggct

SEQ ID NO: 83345 - DNA, 80 bp, synthetic construct
  source 1..80: mol_type = other DNA
tatgagagttgacaaaaattatttactcaatgagttcaacaaactatacactgatgatgcagtggttgttgaagatgaca

SEQ ID NO: 83346 - DNA, 80 bp, synthetic construct
  source 1..80: mol_type = other DNA
cagtaggtctctggcaccgaggatcctaggcattttgactgtcttataggattatcttatttaagatctagctgcttttc

SEQ ID NO: 83347 - DNA, 80 bp, synthetic construct
  source 1..80: mol_type = other DNA
tatattcagacattgagggagaagaagacaggaaaaatgttcaggtagtcaaagagcttcaaatgcagtgttggaggtca

SEQ ID NO: 83348 - DNA, 80 bp, synthetic construct
  source 1..80: mol_type = other DNA
atcaaatgaatcaaaggcacttacaaggatggctgggatcctgttttgttagtgttaatgatagattagtttccttggag

SEQ ID NO: 83349 - DNA, 80 bp, synthetic construct
  source 1..80: mol_type = other DNA
aagatgttgggataaacattaatcagtttggtatagatatgagtgttgttggccttgattgctatgattcaattatgaac

SEQ ID NO: 83350 - DNA, 80 bp, synthetic construct
  source 1..80: mol_type = other DNA
tatgatgtcactggggtgactcctacaattagttatcaaaaatcacaagaagagactttcccatataccatggaggtaat

SEQ ID NO: 83351 - DNA, 80 bp, synthetic construct
  source 1..80: mol_type = other DNA
tctcactcagtggcatcaggtttcaattgatctatcaaaaaacaggagaatgctctaagtgttatgctatcaataacgac

SEQ ID NO: 83352 - DNA, 80 bp, synthetic construct
  source 1..80: mol_type = other DNA
cccgagcaaacgcagtcaaaagtttctccagaacctcagatacttcattatggcttatgtgtcagattaccaccacgtgg

SEQ ID NO: 83353 - DNA, 80 bp, synthetic construct
  source 1..80: mol_type = other DNA
acctcatggataagtttaaggagaaactgatcactgagactgagtttcttctttataaactagtgaagactctggtaaat

SEQ ID NO: 83354 - DNA, 80 bp, synthetic construct
  source 1..80: mol_type = other DNA
aataaagcagggtgcatggcccctgggggaccagaatacaaaaaacctggagtttcgaggaaatacctttctctcctcac

SEQ ID NO: 83355 - DNA, 80 bp, synthetic construct
  source 1..80: mol_type = other DNA
agatcagacccatcaacatcagtaacctgttgctgagatcctaaaactaagttgctcattgcctgctggatcttgtattc

SEQ ID NO: 83356 - DNA, 80 bp, synthetic construct
  source 1..80: mol_type = other DNA
atagggaacctactagtttgggttcaatgagaggaggggatggccaaccatcagttggtgatttagatgaattaatctct

SEQ ID NO: 83357 - DNA, 80 bp, synthetic construct
  source 1..80: mol_type = other DNA
attgtggccatatgtcccagtgtccaattggagaactgattaaagctgtgacaacaagaacgtactttgaacaggagtat

SEQ ID NO: 83358 - DNA, 80 bp, synthetic construct
  source 1..80: mol_type = other DNA
ttccaatgcttcaaatctgtgcttctaattatgaatgccaataaacttatggggaaatactctcactacaaatcaagaaa

SEQ ID NO: 83359 - DNA, 80 bp, synthetic construct
  source 1..80: mol_type = other DNA
gccagtcaacttgtatccgtccggcaccacaaaacatagagatggggtcaagataccatattcatgaaggattttctcga

SEQ ID NO: 83360 - DNA, 80 bp, synthetic construct
  source 1..80: mol_type = other DNA
gtaacaagaggctagcttcctttagtcctgttgtgcaagaccaagaccttgaattgtttgtgagagaagttggtgagaca

SEQ ID NO: 83361 - DNA, 80 bp, synthetic construct
  source 1..80: mol_type = other DNA
gttgaatttaaaggctatgcattgtgcttcagcaggtcaaagaggagagtcatgatacagtctagtggtgggaaattgag

SEQ ID NO: 83362 - DNA, 80 bp, synthetic construct
  source 1..80: mol_type = other DNA
gctgaaaggcaggacatgtgaagaactacctgaagaagaagaacaggttgaggatattgagtagttgcttcagtgtggct

SEQ ID NO: 83363 - DNA, 80 bp, synthetic construct
  source 1..80: mol_type = other DNA
gcctcccccgggtggcccccggcggggggtccccccgggtggtgtcgtgtggaagggattggttgcggtctgtgttgtgt

SEQ ID NO: 83364 - DNA, 80 bp, synthetic construct
  source 1..80: mol_type = other DNA
gggaagggattggttgcggtctgtgttgggtggattagggtgtgtatggtggaggattggtggtgccttctttgatgatt

SEQ ID NO: 83365 - DNA, 80 bp, synthetic construct
  source 1..80: mol_type = other DNA
tgggctgctttccacctttgggtctttggcttgtctgttccccattgcactgagcttaagttgtgaagctctacagtaga

SEQ ID NO: 83366 - DNA, 80 bp, synthetic construct
  source 1..80: mol_type = other DNA
agcttaagttgtgaagctctacagtagaataaccaaattgcctaggatccccggtgcgcgagacctactgggaaacggcg

SEQ ID NO: 83367 - DNA, 80 bp, synthetic construct
  source 1..80: mol_type = other DNA
ctatggtcaccaatctggcaggccttcccagacggtaaccctcacaactgaccatggaagaggacatagcctatgtgaag

SEQ ID NO: 83368 - DNA, 80 bp, synthetic construct
  source 1..80: mol_type = other DNA
catgaaagttgataaaagctatctactcagtgagttcagtaaattatacactgatgatgcagtggttgctgaagatgaca

SEQ ID NO: 83369 - DNA, 80 bp, synthetic construct
  source 1..80: mol_type = other DNA
gggtgcacagcccctggggggccagaatataaaaagcctggagtctcgaggagattcctttcccttctcacatcttcttt

SEQ ID NO: 83370 - DNA, 80 bp, synthetic construct
  source 1..80: mol_type = other DNA
gggccagaatataaaaagcctggagtctcgaggagattcctttcccttctcacatcttctttcaacaatggttctttgtt

SEQ ID NO: 83371 - DNA, 80 bp, synthetic construct
  source 1..80: mol_type = other DNA
atcatataaatcaaggtcacttacaaggatggctggggtcttgttttgttagtgttaatgatagattggtttccttagag

SEQ ID NO: 83372 - DNA, 80 bp, synthetic construct
  source 1..80: mol_type = other DNA
ggattgaacggagacaacagattgagaattctaagtccacgacaccctctcagtatctgtcaaagaatcaaatcttaagc

SEQ ID NO: 83373 - DNA, 80 bp, synthetic construct
  source 1..80: mol_type = other DNA
tctcactaaatggcgtcaggtttcaattaatctatcaaaaaacaggagaatgctccaagtgttatgccatcaataataac

SEQ ID NO: 83374 - DNA, 80 bp, synthetic construct
  source 1..80: mol_type = other DNA
ttttaggatctcagcagcaggttgctgatgtcaatgggtctgatttggatgagattttattagaagggggtgcaagtata

SEQ ID NO: 83375 - DNA, 80 bp, synthetic construct
  source 1..80: mol_type = other DNA
gattaattgaagattatttcgaggcactgagtttgcagttgtcaggtagttgcctaaacaatgaaaaagagtttgagaat

SEQ ID NO: 83376 - DNA, 80 bp, synthetic construct
  source 1..80: mol_type = other DNA
aatgagttcatgaatgacacaaaccaattggggaaagtgacccctgttgagattgtcattgatgctgatagattgcaatt

SEQ ID NO: 83377 - DNA, 80 bp, synthetic construct
  source 1..80: mol_type = other DNA
cgagtaacgtttcctatggtcactgatccagcaggcccaaacagtgaccctcataattgaccatggaagaggacatatcc

SEQ ID NO: 83378 - DNA, 80 bp, synthetic construct
  source 1..80: mol_type = other DNA
ttgagttcaaaggctatgcactgtgcttcagcaggtcaaagaaaagggtcatgattcagtctagtggtggaaaattgagg

SEQ ID NO: 83379 - DNA, 80 bp, synthetic construct
  source 1..80: mol_type = other DNA
ctgaaaggcagaacatgtgaagaactacccgaaggagaaggagaggttgaggacattgaatagttgcctgagtgcggctg

SEQ ID NO: 83380 - DNA, 80 bp, synthetic construct
  source 1..80: mol_type = other DNA
catccagcttatcaacaaggcagtgaatgccttaattaatgatcagttgattatgaaaaaccatttgcgagacattatgg

SEQ ID NO: 83381 - DNA, 80 bp, synthetic construct
  source 1..80: mol_type = other DNA
ggatcccatattgcaattacagcaaatactggtatcttaaccacacagtcactggtagaacctcactacctaagtgttgg

SEQ ID NO: 83382 - DNA, 80 bp, synthetic construct
  source 1..80: mol_type = other DNA
tcaaaataccgacccatagacacattgtgggtaaaccgtgtcccaagcctcacaggctgaaccgcatgggcatttgctct

SEQ ID NO: 83383 - DNA, 80 bp, synthetic construct
  source 1..80: mol_type = other DNA
gggcccggcgcaccggggatcctaggcatttttggctgcgcaattcagatttctttctttttgacatggggcagattgtg

SEQ ID NO: 83384 - DNA, 80 bp, synthetic construct
  source 1..80: mol_type = other DNA
tgtggtttgtacaagcaacctggcgtccctgttaaatggaagagatagatctccagcagaggcccccgtgacccaccgcc

SEQ ID NO: 83385 - DNA, 80 bp, synthetic construct
  source 1..80: mol_type = other DNA
gcatgtgacacagatccttgtattgatcccacacagcattctcaaactttctggagtcagtcttactaagggcaatgtca

SEQ ID NO: 83386 - DNA, 80 bp, synthetic construct
  source 1..80: mol_type = other DNA
tattccgaggaagtgcctcaataacagcactggtcagaccaggttgtgcagcaaacaaatctgtgacatcaattccatga

SEQ ID NO: 83387 - DNA, 80 bp, synthetic construct
  source 1..80: mol_type = other DNA
aacaaacatcccaagagctctcttgaccttcaagatggactttaaaatgccatccattgattgaggtgaaactttgattg

SEQ ID NO: 83388 - DNA, 80 bp, synthetic construct
  source 1..80: mol_type = other DNA
accccatctctcccagcttgggtcccttgattgccacccgtcatccctatcatatttaggagtgccctcctctgatcaag

SEQ ID NO: 83389 - DNA, 80 bp, synthetic construct
  source 1..80: mol_type = other DNA
ctgctgtgaactcaggtttcccatgtagacacctgagctcaggggcctctctgttcttgtgactttagacttcagcttct

SEQ ID NO: 83390 - DNA, 80 bp, synthetic construct
  source 1..80: mol_type = other DNA
ctaaatcagctgctaaggtcaataagtcatctgagttcagggtcccaactctcagtacatttttctgttgtgttgatttc

SEQ ID NO: 83391 - DNA, 80 bp, synthetic construct
  source 1..80: mol_type = other DNA
cctggtttaggtccctgagtcgttttagatcaccatcatccctcctctgcttgcgcatcagccgttggacattgctgacc

SEQ ID NO: 83392 - DNA, 80 bp, synthetic construct
  source 1..80: mol_type = other DNA
tgttggaacagtagcccgataattctctcctcaaagactgtgtccataggaaagatttcacttctttagaagcactcatt

SEQ ID NO: 83393 - DNA, 80 bp, synthetic construct
  source 1..80: mol_type = other DNA
atagacccccttatagaggttggaggagcaggatctaccacacagtaggaagaaggtgaccaagccaatgagaccacatg

SEQ ID NO: 83394 - DNA, 80 bp, synthetic construct
  source 1..80: mol_type = other DNA
gctaagtcagtaagtgctgatcaaagctgttggaaatcactgatgtgattaatgcaaagcgcaatccaatagcctaggat

SEQ ID NO: 83395 - DNA, 80 bp, synthetic construct
  source 1..80: mol_type = other DNA
gatcaaagctgttggaaatcactgatgtgattaatgcaaagcgcaatccaatagcctaggatccactgtgcgcaacagag

SEQ ID NO: 83396 - DNA, 80 bp, synthetic construct
  source 1..80: mol_type = other DNA
acagtcatcattacataagagttggcaatgagacagggctggaactgaccttaaccaacacaagtttgcttgatcataag

SEQ ID NO: 83397 - DNA, 80 bp, synthetic construct
  source 1..80: mol_type = other DNA
gataggtggaaagttgagattatactcatgagtgcgtggtcgtaaagattcttcttgtgggcatccgacaggttacagaa

SEQ ID NO: 83398 - DNA, 80 bp, synthetic construct
  source 1..80: mol_type = other DNA
caggggatgcagccaggcactgcggcacaattgcaaatggcgtcctgcagactttcatgaggatggcatggtgtggaagc

SEQ ID NO: 83399 - DNA, 80 bp, synthetic construct
  source 1..80: mol_type = other DNA
agcagaaggttgttaggcacattcacatggacactgtcagactccgaggggaatgctacaccaggaggttactgcttaac

SEQ ID NO: 83400 - DNA, 80 bp, synthetic construct
  source 1..80: mol_type = other DNA
agactctcaccaccccatctctcccagcttgggtcccttgattgccacccgtcatccctatcatatttaggagtgccctc

SEQ ID NO: 83401 - DNA, 80 bp, synthetic construct
  source 1..80: mol_type = other DNA
agtgttaaagggtttgtacaacattgctacatgtggtctcattggcttggtcaccttcttcctactgtgtggtagatcct

SEQ ID NO: 83402 - DNA, 80 bp, synthetic construct
  source 1..80: mol_type = other DNA
ccatctcccatcggctaccttagtctcctctcacagagaaccagagatatctacattagcagaaggttgttaggcacatt

SEQ ID NO: 83403 - DNA, 80 bp, synthetic construct
  source 1..80: mol_type = other DNA
aatgcaaagcgcaatcctaggcatttttggttgcgcaattcaggtttctttctcaaaatggggcagatagtgacattctt

SEQ ID NO: 83404 - DNA, 80 bp, synthetic construct
  source 1..80: mol_type = other DNA
attggagggatttatttgagctaccactgtttggtttttgtggtttcccatctgcttctaagtccaccacagtgttttcc

SEQ ID NO: 83405 - DNA, 80 bp, synthetic construct
  source 1..80: mol_type = other DNA
aaactctcaccactccatccctcccagcctgggccccttgattgccacctgtcattcctatcatgtttaggagtgccctc

SEQ ID NO: 83406 - DNA, 80 bp, synthetic construct
  source 1..80: mol_type = other DNA
aatcttgttgaattaaaatcaacacaacagaaaagtgtgctaagggttggcaccttgaactcggatgatctgttgacttt

SEQ ID NO: 83407 - DNA, 80 bp, synthetic construct
  source 1..80: mol_type = other DNA
tattgagctgatagatgttgttcaaagctgtgagaaaccactaaggtgattaatgcaaagcgcaatccaatagcctagga

SEQ ID NO: 83408 - DNA, 80 bp, synthetic construct
  source 1..80: mol_type = other DNA
taaaaggcttgtacaacattgccacatgtggtctgattggcctagtcactttcctcctgctgtgtggaagatcctgctcc

SEQ ID NO: 83409 - DNA, 80 bp, synthetic construct
  source 1..80: mol_type = other DNA
attggagggatttgtttgagttgccactgttgggcccttgtgatttcctgtctgtctctaggtccaccacagtgttttcc

SEQ ID NO: 83410 - DNA, 80 bp, synthetic construct
  source 1..80: mol_type = other DNA
agactctcactactccatccctcccagcctgggccccctgattgccacctgtcatccctatcatattcagaagtgccctt

SEQ ID NO: 83411 - DNA, 80 bp, synthetic construct
  source 1..80: mol_type = other DNA
aagaaatcactaaagtgattaatgcaaagcgcaatccaatagcctaggatccactgtgcgagacctactgggaaacggcg

SEQ ID NO: 83412 - DNA, 80 bp, synthetic construct
  source 1..80: mol_type = other DNA
tcaaactcggcattgtaccaaactgattgttcaacaattctgcatttttcacatcccagaccctcaccaccccatctctc

SEQ ID NO: 83413 - DNA, 80 bp, synthetic construct
  source 1..80: mol_type = other DNA
ctccgacctatagtaaccaacaaactctctaccagaataaccatacatatgtctcagttggttcatcaaaatactaccaa

SEQ ID NO: 83414 - DNA, 80 bp, synthetic construct
  source 1..80: mol_type = other DNA
cgttttactggctctacaaggccggcgtgactccagagaccttcccaaccatctcacagttccttttcgaactgggaaag

SEQ ID NO: 83415 - DNA, 80 bp, synthetic construct
  source 1..80: mol_type = other DNA
catggacattgtagcctctgagcacctgctgcaccaatcccttgttggcaagcagtctccattccaaaatgcctacaacg

SEQ ID NO: 83416 - DNA, 80 bp, synthetic construct
  source 1..80: mol_type = other DNA
ctagcaccagctattgcttgaatcctaacaatgaggaaggggggcatggagtgaaaggctgggcctttgatgatggagat

SEQ ID NO: 83417 - DNA, 80 bp, synthetic construct
  source 1..80: mol_type = other DNA
gtgctcaggacttgtgggagacacacccaggagaaacgatagttctagcaccagctattgcttgaatcctaacaatgagg

SEQ ID NO: 83418 - DNA, 80 bp, synthetic construct
  source 1..80: mol_type = other DNA
cggagaagatctctcgacgcaggactcggcttgctgaagcgcgcacggcaagaggcgaggggcggcaaattttttgacta

SEQ ID NO: 83419 - DNA, 80 bp, synthetic construct
  source 1..80: mol_type = other DNA
cagtaatagtagcaatgttactactcacagtaatagtagcaatgaaatacaaaaatgctttttcaatgtcacagcaggca

SEQ ID NO: 83420 - DNA, 80 bp, synthetic construct
  source 1..80: mol_type = other DNA
tattcgtctcagggagcgaaagcaggtactgattcgaaatggaagattttgtgcgacaatgcttcaacccgatgattgtc

SEQ ID NO: 83421 - DNA, 80 bp, synthetic construct
  source 1..80: mol_type = other DNA
aaaatagttatggcagtgctactatttgttatccgtactgtccaaaaaagtaccttgtttctactaatacgagacgatat

SEQ ID NO: 83422 - DNA, 80 bp, synthetic construct
  source 1..80: mol_type = other DNA
tggattggagagagtggagaaggatagttgaagaacaaactattagtaatcttaaacttgcatatcagtatttaactagt

SEQ ID NO: 83423 - DNA, 80 bp, synthetic construct
  source 1..80: mol_type = other DNA
aatttacgcttgtagatcagcaaaagaattcgccctgttacaggatgatcttacagtattacgttatgctactgagatcg

SEQ ID NO: 83424 - DNA, 80 bp, synthetic construct
  source 1..80: mol_type = other DNA
aacgttatatacatagagtgtatagtataacgtatgcagatgatccgaattattttataggcattaaatttaagcatatt

SEQ ID NO: 83425 - DNA, 80 bp, synthetic construct
  source 1..80: mol_type = other DNA
gaatagaaactgttaagttaaaaattgattcaatatacttgagaaaaattagaggagacacagtgtttgatatgtctgag

SEQ ID NO: 83426 - DNA, 80 bp, synthetic construct
  source 1..80: mol_type = other DNA
gctattttttgaaaaggatatagttaaattaagggatgattccatactatacatcgacattagaactgaccgtgggaatg

SEQ ID NO: 83427 - DNA, 80 bp, synthetic construct
  source 1..80: mol_type = other DNA
tcgtgtcgcttaactctctacgatttagatttcggttatcagtagaagaaccaccattctccattgtgcgaacaagaata

SEQ ID NO: 83428 - DNA, 80 bp, synthetic construct
  source 1..80: mol_type = other DNA
tcagggttatatgggttacctgcagctgatccaaataatggaaacgaatactatgagattgctggaagattttcattgat

SEQ ID NO: 83429 - DNA, 80 bp, synthetic construct
  source 1..80: mol_type = other DNA
cttcttcagtatcaacactaacagattctttatctgatgcagcttcatcagtgacacggaactcttctatacgatctgtc

SEQ ID NO: 83430 - DNA, 80 bp, synthetic construct
  source 1..80: mol_type = other DNA
ggtacgtctatttcagcatggactgacgtatcatcgcagttgactgatatttctacatcaacgagtaccatcgctacgca

SEQ ID NO: 83431 - DNA, 80 bp, synthetic construct
  source 1..80: mol_type = other DNA
aactgctactataagtcgtagacttaggttaaaagagatagcaactcagactgaaggaatgaattttgatgacatatcag

SEQ ID NO: 83432 - DNA, 80 bp, synthetic construct
  source 1..80: mol_type = other DNA
cagcagtattaaaaataaaaattgatagatcactacaaatatcgcctaacactttaccagatatagttacggaagcttcc

SEQ ID NO: 83433 - DNA, 80 bp, synthetic construct
  source 1..80: mol_type = other DNA
ttgatttcaaaacacttaagaacttaaatgataattatggcattactcgagatcaagcatttaatttgttaagatctgat

SEQ ID NO: 83434 - DNA, 80 bp, synthetic construct
  source 1..80: mol_type = other DNA
ctgttgtcacctttggaaccaggtgtagttgtagaagggacgaacaatagcaatagatggatagctacgatattgattga

SEQ ID NO: 83435 - DNA, 80 bp, synthetic construct
  source 1..80: mol_type = other DNA
gccaaatgtcgcttctgaaactagaatttatactctatttggtgttcaagaacaaatatccatatccaacacctctttaa

SEQ ID NO: 83436 - DNA, 80 bp, synthetic construct
  source 1..80: mol_type = other DNA
ctaaatggaaatttgtagatttggttaaaacgacatcaactggtacttattcacaatatggaccgcttttatcagataca

SEQ ID NO: 83437 - DNA, 80 bp, synthetic construct
  source 1..80: mol_type = other DNA
aaattgtatggagcaatgaaatatgacggtcgtatttatacatacgaaggtgaaactcctaacgcagccacaaactacta

SEQ ID NO: 83438 - DNA, 80 bp, synthetic construct
  source 1..80: mol_type = other DNA
acgtagtgccagtatcgcttgcatcgagaacaatcatcagccagcacgctcaagcaaatgaagatatcattatttcacaa

SEQ ID NO: 83439 - DNA, 80 bp, synthetic construct
  source 1..80: mol_type = other DNA
atggcaacctttaaggatgcttgttttcattatagaaggattacaaaactaaacagggaattactgagaattggggcaaa

SEQ ID NO: 83440 - DNA, 80 bp, synthetic construct
  source 1..80: mol_type = other DNA
gccctgtacgcgcacatcaaaatgatactaaaaactgaagctctcccgtttactttcacacttaaccagttcagctctat

SEQ ID NO: 83441 - DNA, 80 bp, synthetic construct
  source 1..80: mol_type = other DNA
aattaagggaatcattaaccaatggtgtgatgtcgctgaattggatctcttaccgttatgcactgaacaaactgacaaat

SEQ ID NO: 83442 - DNA, 80 bp, synthetic construct
  source 1..80: mol_type = other DNA
acaaattggttaaactgaaagaagaaggtaaactgtctgaagagtatgagctcctaatctcggattctgaagacgacgac

SEQ ID NO: 83443 - DNA, 80 bp, synthetic construct
  source 1..80: mol_type = other DNA
ttgcagtgcattattgatctatataacctattatttccaatcagccctggtattataaatagatttaaaaaagcagttaa

SEQ ID NO: 83444 - DNA, 80 bp, synthetic construct
  source 1..80: mol_type = other DNA
acaaagaaaatgtagaaatgaaattgataaatcatggtataatcaattactacttccaattactctaaatgccgcagttt

SEQ ID NO: 83445 - DNA, 80 bp, synthetic construct
  source 1..80: mol_type = other DNA
ctcagtatggactccagtctcttcaaataaaattagaggatggtgcattgagtgttgtcaattgactgaattgacctttt

SEQ ID NO: 83446 - DNA, 80 bp, synthetic construct
  source 1..80: mol_type = other DNA
tattcgtctcagggagcgaaagcaggcaaaccatttgaatggatgtcaatccgactctacttttcctaaaggttccagcg

SEQ ID NO: 83447 - DNA, 80 bp, synthetic construct
  source 1..80: mol_type = other DNA
agaactcagacggcaaaaataatgaatttggcttgtccttcatgaaaaaatgccttgtttctactaatacgagacgatat

SEQ ID NO: 83448 - DNA, 80 bp, synthetic construct
  source 1..80: mol_type = other DNA
aagagtttctgattaagccctgtccgttcttaaaaaaacaaggtgcacctggaaaagaggaagattttcttgttagcaac

SEQ ID NO: 83449 - DNA, 80 bp, synthetic construct
  source 1..80: mol_type = other DNA
tatggaccctgagctccggacacttgcacaaagtctcattgatcaaaaggtcaaggagatatctaaccaggaaccattaa

SEQ ID NO: 83450 - DNA, 80 bp, synthetic construct
  source 1..80: mol_type = other DNA
tctttcaatgttaccacgaagatagcaaatatggtgaataatgaacgtgatgtatttgatgtagttgatatagttcatat

SEQ ID NO: 83451 - DNA, 80 bp, synthetic construct
  source 1..80: mol_type = other DNA
cccacttgtgccagaaaaggtagaagaggccactgtaggagagaacaaatgcttgttacaccccctaaaccaacatggaa

SEQ ID NO: 83452 - DNA, 80 bp, synthetic construct
  source 1..80: mol_type = other DNA
ttgatgtagtccaaatagatgataatgatactaatactatgatagggatacaatactacaaatgttactcctcgagcatt

SEQ ID NO: 83453 - DNA, 80 bp, synthetic construct
  source 1..80: mol_type = other DNA
ataggtaatttgcactacataatgatttataattataggtttaatgctgttttgattgatcaaatgatgctctgctgatt

SEQ ID NO: 83454 - DNA, 80 bp, synthetic construct
  source 1..80: mol_type = other DNA
gatcaattagttttgaatgtactttaggtagattaagaattaggttaagtataggttaattacagattatcaatagtatt

SEQ ID NO: 83455 - DNA, 80 bp, synthetic construct
  source 1..80: mol_type = other DNA
aggttgtaagtataatttagatttaagtgtaaggtaagcttatagatacttagattaagtataggtgtaggtttaagtca

SEQ ID NO: 83456 - DNA, 80 bp, synthetic construct
  source 1..80: mol_type = other DNA
taaccattggctccatttcattgggattggttgtattcatcgttctactgaatgctgtgagcatcatagtgacagtgttg

SEQ ID NO: 83457 - DNA, 80 bp, synthetic construct
  source 1..80: mol_type = other DNA
gtcctaggtgaaggtgggaacaatggagtctgtaacgaaacggtagtgagggaataccatgagacagttatgatagccaa

SEQ ID NO: 83458 - DNA, 80 bp, synthetic construct
  source 1..80: mol_type = other DNA
actatttttcgaaaaggatataggtaaattaaaagacaactctatattatatattgatattaggactgatcgaggtaatg

SEQ ID NO: 83459 - DNA, 80 bp, synthetic construct
  source 1..80: mol_type = other DNA
atacatggtaggttcagcaccttcatactggatatacgatgtaaagcaatactctgattttatattcgaaacatgggatc

SEQ ID NO: 83460 - DNA, 80 bp, synthetic construct
  source 1..80: mol_type = other DNA
tattgaaaaattatttaacgcaatgaatccagtacaagtggatggacagcaggtaattagctttcactggcaaatagata

SEQ ID NO: 83461 - DNA, 80 bp, synthetic construct
  source 1..80: mol_type = other DNA
ttgcgttatacatgcatattaaaatgatactgaaaactgaagctcttccattcacttttacattgagtcaattcacttct

SEQ ID NO: 83462 - DNA, 80 bp, synthetic construct
  source 1..80: mol_type = other DNA
ttaaactaattactaacgcagtttttgccatcacaagaccttctggactagagtagcgcctaggaagcaaaaactgtgac

SEQ ID NO: 83463 - DNA, 80 bp, synthetic construct
  source 1..80: mol_type = other DNA
ttacaatgtattattgatttgtataacttactattcccaattaatcccggtattattgctaagtttaagaagacagttaa

SEQ ID NO: 83464 - DNA, 80 bp, synthetic construct
  source 1..80: mol_type = other DNA
gcagaagaaatgtagaaatgaacttgaccaatcatggtataatcaactattacttccaatcactctaaatgctgcagtgt

SEQ ID NO: 83465 - DNA, 80 bp, synthetic construct
  source 1..80: mol_type = other DNA
agctaaacagagagttgctgaggattggagcgaactcagtatggaccccagtctcctcaaacaaaattaaagggtggtgc

SEQ ID NO: 83466 - DNA, 80 bp, synthetic construct
  source 1..80: mol_type = other DNA
aaggagtaaaattgagcaacatgggggtttatcaaatccttgcaatttatgctacagtagcaggctccctgtcactggca

SEQ ID NO: 83467 - DNA, 80 bp, synthetic construct
  source 1..80: mol_type = other DNA
attgggagattgcagcatcgccgggtggctccttggaaatccagaatgtgataggcttctaactgtgccagaatggtcat

SEQ ID NO: 83468 - DNA, 80 bp, synthetic construct
  source 1..80: mol_type = other DNA
caaggaatggtttgtgctacccaggcagtttcaatgattatgaagaattgaaacacctcctcagtagtgtaacacacttc

SEQ ID NO: 83469 - DNA, 80 bp, synthetic construct
  source 1..80: mol_type = other DNA
gagaaagtgaagattttgcccaaagataggtggacacagcatacaacaactggaggttcacgggcctgcgcagtatctgg

SEQ ID NO: 83470 - DNA, 80 bp, synthetic construct
  source 1..80: mol_type = other DNA
acaagtggggaacaaatgctgatcatttggggggtacatcaccccaatgatgaagctgaacaaaggacattgtatcagaa

SEQ ID NO: 83471 - DNA, 80 bp, synthetic construct
  source 1..80: mol_type = other DNA
tgtcgggacctatgtttcggtaggaacatcgacactgaacaaaagatcagttccagaaatagccacaagacctaaagtaa

SEQ ID NO: 83472 - DNA, 80 bp, synthetic construct
  source 1..80: mol_type = other DNA
gaggagaccagatatgcattggataccattccaacaattccacagaaaaggtcgacacaattctagagaggaatgtcact

SEQ ID NO: 83473 - DNA, 80 bp, synthetic construct
  source 1..80: mol_type = other DNA
cccaatgatgaagctgaacaaaggacattgtatcagaatgtcgggacctatgtttcggtaggaacatcgacactgaacaa

SEQ ID NO: 83474 - DNA, 80 bp, synthetic construct
  source 1..80: mol_type = other DNA
agtagtgtactaccaacaaaaatttctacaatggcgttcttactaatctacgtagttttggctgctgcagtggcatcaca

SEQ ID NO: 83475 - DNA, 80 bp, synthetic construct
  source 1..80: mol_type = other DNA
gtataagcttagcgaactggctgaggaattcattgaaatgaaggaagaggcatcagcattgaagaaagctattaacaact

SEQ ID NO: 83476 - DNA, 80 bp, synthetic construct
  source 1..80: mol_type = other DNA
taaaactgttgaatgtattactatcagcaattgccacattagtagtcgttatggaaacatacatattcaagtctttattc

SEQ ID NO: 83477 - DNA, 80 bp, synthetic construct
  source 1..80: mol_type = other DNA
aatttgttatatagatcatgttctatgtgcggtctaatacattataaaataggcttaagggtgaatttgttaactacaaa

SEQ ID NO: 83478 - DNA, 80 bp, synthetic construct
  source 1..80: mol_type = other DNA
cagatgcggtacatgcatatgtggatttaatgagcagcagtcatcaggttttgaatatgaaatcttcctaaaggacatgc

SEQ ID NO: 83479 - DNA, 80 bp, synthetic construct
  source 1..80: mol_type = other DNA
ataaacaaagagaatcatgcaaatacttcccgatgctcaatcattttagaaatgtcaaaatattgacagtattcttgcta

SEQ ID NO: 83480 - DNA, 80 bp, synthetic construct
  source 1..80: mol_type = other DNA
ttgactatgctaacagctagtgcgtccagtgaatgcctacagaaaccattaaagataaaactagaagatttacatgaatg

SEQ ID NO: 83481 - DNA, 80 bp, synthetic construct
  source 1..80: mol_type = other DNA
gacaaaaaatattttgataataagaatttagaagatctatttaagagaatagagtatgcacaagatgcccatagaatgat

SEQ ID NO: 83482 - DNA, 80 bp, synthetic construct
  source 1..80: mol_type = other DNA
acttttggaaagaatactttactccacagagtgcgagatgcatactatactaacaaatggcggtgcatataatattccct

SEQ ID NO: 83483 - DNA, 80 bp, synthetic construct
  source 1..80: mol_type = other DNA
ggcgaacatacttgaaaaaccacaatttaaacctatgcggtaaacatgttcataaaatggtttgtcaatgcataaatacg

SEQ ID NO: 83484 - DNA, 80 bp, synthetic construct
  source 1..80: mol_type = other DNA
catacacaatgcttgtccactggcattgattaccaagatgaaattaccaaattttaccaagcagatggcgattcttatag

SEQ ID NO: 83485 - DNA, 80 bp, synthetic construct
  source 1..80: mol_type = other DNA
attctaaattttgctattaaaatcatgagtgtgaaccagactcgaggcgtgcgctctgctagacatactatcatatccaa

SEQ ID NO: 83486 - DNA, 80 bp, synthetic construct
  source 1..80: mol_type = other DNA
tgatatacctatgtctgaaactttttccaacttcgaagtatcaaatatagatgttaagcaatgcacagatccattaactc

SEQ ID NO: 83487 - DNA, 80 bp, synthetic construct
  source 1..80: mol_type = other DNA
tgaaatgcttcaccaaaaggggggacgcgccacattccaaccacttattgtgtaaagagcaaaacaaatacaaagtcttt

SEQ ID NO: 83488 - DNA, 80 bp, synthetic construct
  source 1..80: mol_type = other DNA
gggacgcgccacattccaaccacttattgtgtaaagagcaaaacaaatacaaagtctttgaatggccggagatcgaaaca

SEQ ID NO: 83489 - DNA, 80 bp, synthetic construct
  source 1..80: mol_type = other DNA
gaatggccggagatcgaaacagttatgaaaaacaataaattatgtctgggagatactcattgcaatcttaaatttgctgc

SEQ ID NO: 83490 - DNA, 80 bp, synthetic construct
  source 1..80: mol_type = other DNA
aatagcatctgatgaagttataaaattgctaaattgtttcagtgatacatataagccaaatccaggagaaatggaggtcg

SEQ ID NO: 83491 - DNA, 80 bp, synthetic construct
  source 1..80: mol_type = other DNA
gtgcaaaaaaatgcaatgctgataaaataggtgaatgcattacattagagaataatccttggcctatagtctattgtgaa

SEQ ID NO: 83492 - DNA, 80 bp, synthetic construct
  source 1..80: mol_type = other DNA
acaaaatattattattcggatgcaaaggaacatgcaaaagatggaaatgtgaacagttattgtttaacaaataagtgcaa

SEQ ID NO: 83493 - DNA, 80 bp, synthetic construct
  source 1..80: mol_type = other DNA
tgaggacagatttcctataaatccaacttggttcaagtcatgtagctgggataggaatgttaaagaaactacaacaataa

SEQ ID NO: 83494 - DNA, 80 bp, synthetic construct
  source 1..80: mol_type = other DNA
aggaatttgtgcacaatgatattagtgcataccgtaaatcacttgaatctgaaataagtactgatttattaatacatcat

SEQ ID NO: 83495 - DNA, 80 bp, synthetic construct
  source 1..80: mol_type = other DNA
tataggccgacaaaaaatttgccccatataatgccagcatacaaatcactcactattcaaggtagtgaaacggtagatgg

SEQ ID NO: 83496 - DNA, 80 bp, synthetic construct
  source 1..80: mol_type = other DNA
tttacaaaacagctttattgaaggggagatgcctgccattagtggtctagcaaatgggtaccacctaaaatataagggca

SEQ ID NO: 83497 - DNA, 80 bp, synthetic construct
  source 1..80: mol_type = other DNA
ttgagttgtttgatattgtgatttttataagaaaggctgtatacaaagctaattattataagatatatacaactgggcca

SEQ ID NO: 83498 - DNA, 80 bp, synthetic construct
  source 1..80: mol_type = other DNA
agtgttgcaataaatatggagcataatgagcaatgcactggaagctgtccaaaaaagatacctgctaaggaaaattggtt

SEQ ID NO: 83499 - DNA, 80 bp, synthetic construct
  source 1..80: mol_type = other DNA
acacgggatgcctctatggatcatgtcaagatgttattagaccagaggtagatgtgtataagaaggctagtgcggagcag

SEQ ID NO: 83500 - DNA, 80 bp, synthetic construct
  source 1..80: mol_type = other DNA
agtttaatagaattatgcattacatctgctcatgaaaccttttgtaatgacttggatatactggaacccataatcggaga

SEQ ID NO: 83501 - DNA, 80 bp, synthetic construct
  source 1..80: mol_type = other DNA
cagcatttcaatcaacacaagtcaatcaattacccaacataatagcatttaagaagggccagatattcactggtgcaatt

SEQ ID NO: 83502 - DNA, 80 bp, synthetic construct
  source 1..80: mol_type = other DNA
aatgacctgggaaacacaggcagtcaatgtggctcgatacaattgattaataatactctgctgggagaaggtaatgtaaa

SEQ ID NO: 83503 - DNA, 80 bp, synthetic construct
  source 1..80: mol_type = other DNA
gtttgattatatatgccatgctatgaaacggaaagatgttattgtgcgaagatgctacaatgaccattttgctagctgca

SEQ ID NO: 83504 - DNA, 80 bp, synthetic construct
  source 1..80: mol_type = other DNA
acttattacagaaacgctctgatctagttggcacccttaatggaaaagaactccaggttagtatgtctgggcgatctatg

SEQ ID NO: 83505 - DNA, 80 bp, synthetic construct
  source 1..80: mol_type = other DNA
ggatcaatgaagttcaaagttgaactaggagatattagctataagctttataccgaaaacgcagatatatcaataagtgg

SEQ ID NO: 83506 - DNA, 80 bp, synthetic construct
  source 1..80: mol_type = other DNA
agaatgtggaggatgcatcaactgtgcagaggcaatatcatgtgctttagaaatagattcttcaaccgaagtgttatgca

SEQ ID NO: 83507 - DNA, 80 bp, synthetic construct
  source 1..80: mol_type = other DNA
agttagagtgtagctgtcagccatacattcaaaacatcctcattaagcctcaggtcaagaaatactcattcaaggccaca

SEQ ID NO: 83508 - DNA, 80 bp, synthetic construct
  source 1..80: mol_type = other DNA
tgctttgagaagcggaactcattagaggtcacagtatgtaaaaaacagcatactataccccttactataaaatcttacaa

SEQ ID NO: 83509 - DNA, 80 bp, synthetic construct
  source 1..80: mol_type = other DNA
tcaaaaaattgatttgtccagacttgacgagtcaaactatgtaagagaagaggatttgacgtgtaatacatggctatgca

SEQ ID NO: 83510 - DNA, 80 bp, synthetic construct
  source 1..80: mol_type = other DNA
aggatgatgcagaaattattttgtcatcgcaaaaaacaaatcattatgaaataatagggacaacaagtattagtggctgg

SEQ ID NO: 83511 - DNA, 80 bp, synthetic construct
  source 1..80: mol_type = other DNA
aagttgaaaaagaaggaataggtgttatgttctctggtttattcgctggctttggcaaatactggagtattgcaatttat

SEQ ID NO: 83512 - DNA, 80 bp, synthetic construct
  source 1..80: mol_type = other DNA
gctttgattgcattagtaattttcctcatactgatctatattctggtaccaatcttcaggttgatcaggaccttcttgat

SEQ ID NO: 83513 - DNA, 80 bp, synthetic construct
  source 1..80: mol_type = other DNA
caaaaatgaagtggagtataccacagagcaaaagatgagataactcaaatctttaactgttctgcattaaataaaataaa

SEQ ID NO: 83514 - DNA, 80 bp, synthetic construct
  source 1..80: mol_type = other DNA
tacatagcatatattcttctgccggttttttatccgataacatatattttaggttctatatactccagatttaaacagtg

SEQ ID NO: 83515 - DNA, 80 bp, synthetic construct
  source 1..80: mol_type = other DNA
tccattatccaatcaccagattggtgataggtgctttgccggagggaacttgataagagagttaaataaaactgtaaata

SEQ ID NO: 83516 - DNA, 80 bp, synthetic construct
  source 1..80: mol_type = other DNA
taaaacttgcatgttagctgctcacccattcacaagctgccctaaaaaatgtgtttgcggatctagattcaactgcactg

SEQ ID NO: 83517 - DNA, 80 bp, synthetic construct
  source 1..80: mol_type = other DNA
aggctttacgtgtccacagattgggaaaagattgccaaggttataaatcactgagtaaggctagacaaatgtgtaaatct

SEQ ID NO: 83518 - DNA, 80 bp, synthetic construct
  source 1..80: mol_type = other DNA
aagtcttggtccttcattattgcagtttttactggccttattcttatggagtttataacaccaataagcggcgaaaggat

SEQ ID NO: 83519 - DNA, 80 bp, synthetic construct
  source 1..80: mol_type = other DNA
attttgcggaaaattgaaatctctagctagatccagtgttaaaaaattagataggaaaatagaaccaatccagatcggaa

SEQ ID NO: 83520 - DNA, 80 bp, synthetic construct
  source 1..80: mol_type = other DNA
cagcaactgttttatgggaacagcaattcaaattagatacagatattataaaaagagaagatcgaatccacttaatgaaa

SEQ ID NO: 83521 - DNA, 80 bp, synthetic construct
  source 1..80: mol_type = other DNA
taaactttgaaaatgatgatatagttaggaggtgtaaagataaatatagtcaagttgtgagcaacttgtcccaggtgaat

SEQ ID NO: 83522 - DNA, 80 bp, synthetic construct
  source 1..80: mol_type = other DNA
gagttagacaagatgggaaactatttagagcatttctcagctaagatcaattcttgtagtgttgacatgtgggattttat

SEQ ID NO: 83523 - DNA, 80 bp, synthetic construct
  source 1..80: mol_type = other DNA
acaacataactaagacaaaatattggcagtgcatcaatgactattccactttaatgaagaatatgctggcggtttctcaa

SEQ ID NO: 83524 - DNA, 80 bp, synthetic construct
  source 1..80: mol_type = other DNA
tttattcaacctttaagacgacaactggattcatttcaatttcaaaagccttcagactggataaagaaagatgtcagcgt

SEQ ID NO: 83525 - DNA, 80 bp, synthetic construct
  source 1..80: mol_type = other DNA
ctaaacaaactgttaatttaaaagtcttaatatattctattgctaggaatttaaatctagatacttcaaggcacaacttt

SEQ ID NO: 83526 - DNA, 80 bp, synthetic construct
  source 1..80: mol_type = other DNA
gtaagaagccgagttgagaatgcaaataactttaataggtcgataacaacaatatcaacatttactagttcaaagtcatg

SEQ ID NO: 83527 - DNA, 80 bp, synthetic construct
  source 1..80: mol_type = other DNA
agttgactgttgccaatccagcatttttagatgaaattaccaatgaatatgaaataaagcattcgacttatgaagatctc

SEQ ID NO: 83528 - DNA, 80 bp, synthetic construct
  source 1..80: mol_type = other DNA
aaacaatgcatcccaaattacacagattatatgtctgtgaaagtgtttgataggctatatgaaaagattaccactaatga

SEQ ID NO: 83529 - DNA, 80 bp, synthetic construct
  source 1..80: mol_type = other DNA
gcccgccctcgcttgcatgggtgtctatcgcactgaaccactggataacacataccacatataacatgttgcctggccag

SEQ ID NO: 83530 - DNA, 80 bp, synthetic construct
  source 1..80: mol_type = other DNA
tttgaccaagttgtcacaaattgatatcttaaggcttaaaatgcttaggtacatatcgcttgatagttcagtgacatctg

SEQ ID NO: 83531 - DNA, 80 bp, synthetic construct
  source 1..80: mol_type = other DNA
atgatggtatgggtgaaacaagtgaaatgagatcccggtcgcttttaacgcctcgcaaattcacaacaagtggctcatta

SEQ ID NO: 83532 - DNA, 80 bp, synthetic construct
  source 1..80: mol_type = other DNA
aaaaattcaaagaatcattatcaatacagaacccttcacaacttttcatagaacaaatactgttttccaataagcctgta

SEQ ID NO: 83533 - DNA, 80 bp, synthetic construct
  source 1..80: mol_type = other DNA
attgattataccagtatacatgacaagatctttggactacaggatatgcctggcattgaagagctggatacaataatagg

SEQ ID NO: 83534 - DNA, 80 bp, synthetic construct
  source 1..80: mol_type = other DNA
ttcttagagcctatgtgaggggaccaggaaatgtgtcaaatgtagatatcgatgagatcgcacgggatctggcacattta

SEQ ID NO: 83535 - DNA, 80 bp, synthetic construct
  source 1..80: mol_type = other DNA
caaaactaagagtcaaattcttaggaattctcttgtggttaggtgacctgacccaaaatgatttagataagttcgatgcc

SEQ ID NO: 83536 - DNA, 80 bp, synthetic construct
  source 1..80: mol_type = other DNA
gataaatcagatgaaaagattatatggaacaattggcaagtttcaagagatatgaatactggaccaatagacttaatgat

SEQ ID NO: 83537 - DNA, 80 bp, synthetic construct
  source 1..80: mol_type = other DNA
gtggttactccagacaattgcgaatcaccggggaggatgataagctgatagctgcagaattacaagttactaggttatcg

SEQ ID NO: 83538 - DNA, 80 bp, synthetic construct
  source 1..80: mol_type = other DNA
gaggacctaatttataggcatggccaggcaatgctaaacaagccgcatggtttaaagcttgaaaaaatgcaacctgtggc

SEQ ID NO: 83539 - DNA, 80 bp, synthetic construct
  source 1..80: mol_type = other DNA
gcaatatcaaaattatatcaacaagggaggcctatattatctaaagtcaagaatttaaatatgcaaaattattcattatc

SEQ ID NO: 83540 - DNA, 80 bp, synthetic construct
  source 1..80: mol_type = other DNA
taggatacaagtgaatgttgatgaatatgccatcacaagaagagcacatttccagaagatgcctttttttgaaggcccgc

SEQ ID NO: 83541 - DNA, 80 bp, synthetic construct
  source 1..80: mol_type = other DNA
gatgaagtagtggtttcttatagtgccaaagatggcgtttccggtttgcctgagctttccaccgtcaggcaaccggaaga

SEQ ID NO: 83542 - DNA, 80 bp, synthetic construct
  source 1..80: mol_type = other DNA
ctccgtgcagaccaacaatgagctggctggcgccctacaccatctaaggacagccagaatgagatactatgtcaggtgtg

SEQ ID NO: 83543 - DNA, 80 bp, synthetic construct
  source 1..80: mol_type = other DNA
tgcaccttcagaggggatgtcacccatactacaaaaactcatacctaccaaatgaatttggctgctcaaaattggaacag

SEQ ID NO: 83544 - DNA, 80 bp, synthetic construct
  source 1..80: mol_type = other DNA
ccacgaagggaaatggctcaacccgtgcccacaaagctacagtgtacactgggagcgccgagttcactccaaaactgggt

SEQ ID NO: 83545 - DNA, 80 bp, synthetic construct
  source 1..80: mol_type = other DNA
agaatccaacttttcactgacacagacaacgatcttgaagctaaccaaaacacaaagttcaccccagtcggtgtcatcca

SEQ ID NO: 83546 - DNA, 80 bp, synthetic construct
  source 1..80: mol_type = other DNA
ggatggtgatacccaccaaaatgaaccccaacaatgggtactcccaagttactcaggtagaaataatcacaatgtgcacc

SEQ ID NO: 83547 - DNA, 80 bp, synthetic construct
  source 1..80: mol_type = other DNA
tcacagtggctcacaccggccaccatgatttgtttatcccccctaatggttatttcagatttgattcctgggtcagcccc

SEQ ID NO: 83548 - DNA, 80 bp, synthetic construct
  source 1..80: mol_type = other DNA
cactcgggggcactgccaggaagagctaatcttagggctgctgtccccgctcggggctcctctagagtatcttctaattc

SEQ ID NO: 83549 - DNA, 80 bp, synthetic construct
  source 1..80: mol_type = other DNA
actcccagactggcgttttcaatacgcgcaggcagcctctctttgctcacattcgtaggcgaggggagtcacgggcgtaa

SEQ ID NO: 83550 - DNA, 80 bp, synthetic construct
  source 1..80: mol_type = other DNA
aagtgtcaaatagtgtatagtggttgcacctacatgcttgagtctgatggcaagggcaatgtgaaagttgacaggatcca

SEQ ID NO: 83551 - DNA, 80 bp, synthetic construct
  source 1..80: mol_type = other DNA
cttcgggggcactgccaggaagaatcaaccccaggactcctatccccgcccggggctccccaagcatatcttccaatgtt

SEQ ID NO: 83552 - DNA, 80 bp, synthetic construct
  source 1..80: mol_type = other DNA
taaaaaactgctctttcaatattaccacaacattaagagagaaggtgaagacatacgcactttttgatagtcttgatgta

SEQ ID NO: 83553 - DNA, 80 bp, synthetic construct
  source 1..80: mol_type = other DNA
aaagtatccggagtactacaaagactgctgacactgagctttctacaagggactgctgacaccgagctttctacaaggga

SEQ ID NO: 83554 - DNA, 80 bp, synthetic construct
  source 1..80: mol_type = other DNA
cagcagaatcaaatagcagatcttcagcaatattgcaataaattagaaactgatctacaaaataagattagttcattggt

SEQ ID NO: 83555 - DNA, 80 bp, synthetic construct
  source 1..80: mol_type = other DNA
tactaatatactggaaaatttgcataacccaaattttaaaatacagattacccgtaattgcagcgctgtacttggagaat

SEQ ID NO: 83556 - DNA, 80 bp, synthetic construct
  source 1..80: mol_type = other DNA
ggaatgaagcatgtaagcttgtcaaagatgttggaacttacttcgaaattctgaaaacatcgcatgttgaattttatgat

SEQ ID NO: 83557 - DNA, 80 bp, synthetic construct
  source 1..80: mol_type = other DNA
caatttgcagttcaaattccaatttattattcttccaattcagatctagaaaaaagatgcatagaatttcattcgaaatg

SEQ ID NO: 83558 - DNA, 80 bp, synthetic construct
  source 1..80: mol_type = other DNA
tagaagctgatctaagtgcgaacgaattggattatgaaaataacaaattaactagggatctattcccaacagccgaagaa

SEQ ID NO: 83559 - DNA, 80 bp, synthetic construct
  source 1..80: mol_type = other DNA
cgcaccggggatcctaggcttattggattgcgctttcctccaggacaactaagtgttggacaccgacccacaggagaatg

SEQ ID NO: 83560 - DNA, 80 bp, synthetic construct
  source 1..80: mol_type = other DNA
atctcttaaagattccaacccacagacacatcaagggcggttcatgcccaaagccacatcgcttgaccaacaagggaatc

SEQ ID NO: 83561 - DNA, 80 bp, synthetic construct
  source 1..80: mol_type = other DNA
tgcagttgtggtgcatttaaagtgcccggtgtaaagactgtttggaagagacgctgagcaacagcgcctccctgactctc

SEQ ID NO: 83562 - DNA, 80 bp, synthetic construct
  source 1..80: mol_type = other DNA
ggcctgctgccccgggcactggtttaggtgagttggccacaggtctctcatttgtgagatcaattgttgtattttcccat

SEQ ID NO: 83563 - DNA, 80 bp, synthetic construct
  source 1..80: mol_type = other DNA
tagagctgacatttacaaacgattccatcattagtcacaatttttgcaacctaactagtgcctttaacaagaaaaccttt

SEQ ID NO: 83564 - DNA, 80 bp, synthetic construct
  source 1..80: mol_type = other DNA
gatcacacactcatgagtatagtttcaagcctacatcttagtatcagagggaactcaaattataaagcagtatcctgtga

SEQ ID NO: 83565 - DNA, 80 bp, synthetic construct
  source 1..80: mol_type = other DNA
tttcaacaatggcatcaccattcaatacaatttgacattctcagatgcacagaatgccataaaccagtgcaaaaccttca

SEQ ID NO: 83566 - DNA, 80 bp, synthetic construct
  source 1..80: mol_type = other DNA
agcaaaagcaggagtgaaaatgaatccaaatcagaagatagtagcaattggctccgcctccctaactattgcgacaatgt

SEQ ID NO: 83567 - DNA, 80 bp, synthetic construct
  source 1..80: mol_type = other DNA
ctccaaggacaattcaattaggctcgccgcagctggagatatttgggtgacaagagaaccttatgtgtcatgcggtcttg

SEQ ID NO: 83568 - DNA, 80 bp, synthetic construct
  source 1..80: mol_type = other DNA
gtcattgcggagaagtacggggtaattggttgcagggaaatttgaataagtgttcatctctttttggtgtagggatgtca

SEQ ID NO: 83569 - DNA, 80 bp, synthetic construct
  source 1..80: mol_type = other DNA
gggtttctgcttcaatcaaaggaaattggctacaaggtaacttaaataaatgttcttcattgtttggagctgcaatatca

SEQ ID NO: 83570 - DNA, 80 bp, synthetic construct
  source 1..80: mol_type = other DNA
aggtgtctgctgccataaagggaaattggcttcaaggtaacttaaacaagtgctcatcactatttggtgcagcagtctcc

SEQ ID NO: 83571 - DNA, 80 bp, synthetic construct
  source 1..80: mol_type = other DNA
gtcactgtggagaagttcggggcaactggttacagggaaatctgaacaaatgttcatctcttttcggtgtgggaatgtca

SEQ ID NO: 83572 - DNA, 80 bp, synthetic construct
  source 1..80: mol_type = other DNA
gcattctcagggatccctagttactcttcattgagtgtttttattgggagtcaggatgggccaattatttatagcccagg

SEQ ID NO: 83573 - DNA, 80 bp, synthetic construct
  source 1..80: mol_type = other DNA
cgacctgaataaaagggcattgagtgatcgggaagcattgcacaatcaattcagggaaaaatcgatgaattaaggagaca

SEQ ID NO: 83574 - DNA, 80 bp, synthetic construct
  source 1..80: mol_type = other DNA
aggacatgaggaacaccatcatggcatcaaaaaccatcggaacatctgaggaaaagctaaagaaaaagtcatctttttac

SEQ ID NO: 83575 - DNA, 80 bp, synthetic construct
  source 1..80: mol_type = other DNA
ctttttttgtaaaggactggtcagagagagtgagagaatttatggagaaagaatgcccctttgtaaaaccagagattaaa

SEQ ID NO: 83576 - DNA, 80 bp, synthetic construct
  source 1..80: mol_type = other DNA
gatgatttgattgaccttgcagcctcaggagacccaacaccaccagattccataaaatcaccacaagcaccatgggtctt

SEQ ID NO: 83577 - DNA, 80 bp, synthetic construct
  source 1..80: mol_type = other DNA
catgcaagcattacaactgctgcttgaagtagaacaagagataagagctttctcgtttcagcttatttaatgataaaaaa

SEQ ID NO: 83578 - DNA, 80 bp, synthetic construct
  source 1..80: mol_type = other DNA
tatgcaagccttacagctgctgtttgaagtggaacaggagataagaactttctcatttcagcttatttaatgataaaaaa

SEQ ID NO: 83579 - DNA, 80 bp, synthetic construct
  source 1..80: mol_type = other DNA
caatgggagcatgcaggagataaaaaattgctcttttaatgtaaccacattagtgagagataaacaggagaaagtgtctg

SEQ ID NO: 83580 - DNA, 80 bp, synthetic construct
  source 1..80: mol_type = other DNA
cacttttttatagactggatatagtaccccttgatgatgagaacagtagtacgagctctagtaatcctaggaactatagt

SEQ ID NO: 83581 - DNA, 80 bp, synthetic construct
  source 1..80: mol_type = other DNA
ggcggagatgttcgattacctggaaccagtggaactaaatactaccaagtatgttcttttcaatcatgaagtgaattggg

SEQ ID NO: 83582 - DNA, 80 bp, synthetic construct
  source 1..80: mol_type = other DNA
atgtaattaacgtgttagttcaaaatattggtaaagttccacaaatattaactttgaatgatattgttgtcattttacag

SEQ ID NO: 83583 - DNA, 80 bp, synthetic construct
  source 1..80: mol_type = other DNA
tcacgattgacaaattgagacgactatgtgtagagaaaaagactgttgagtatgactcaggtatatccgatgttgagtaa

SEQ ID NO: 83584 - DNA, 80 bp, synthetic construct
  source 1..80: mol_type = other DNA
tttcaactagatgtaggctattcacgcaacgtaaactgaaaattgtgtccaaattaattaggccaaattatgcgacatcg

SEQ ID NO: 83585 - DNA, 80 bp, synthetic construct
  source 1..80: mol_type = other DNA
aatcatagagctacggcgactgaggtacataattgcaaatggtgctcaattaataatagttatactgtgtggaatgactt

SEQ ID NO: 83586 - DNA, 80 bp, synthetic construct
  source 1..80: mol_type = other DNA
caggcaacctccagacattgaagataagagtgcacgaagggtacgaagaatttacaatggttggaaaaagggcaacagct

SEQ ID NO: 83587 - DNA, 80 bp, synthetic construct
  source 1..80: mol_type = other DNA
agatgaaggaacatctggagtggagtctgctgtattaagaggattcctcattttaggcaaagaagacaagagatatgggc

SEQ ID NO: 83588 - DNA, 80 bp, synthetic construct
  source 1..80: mol_type = other DNA
acgcccacttaagctgccatgtgggcctccctgttttcaacgatctaaatttcttttgatggatgctctgaaattaagca

SEQ ID NO: 83589 - DNA, 80 bp, synthetic construct
  source 1..80: mol_type = other DNA
acactctgttaaccttcttgagaatgtacataatggaaagctatgtaaactaggggggatagccccgttgcacctgggca

SEQ ID NO: 83590 - DNA, 80 bp, synthetic construct
  source 1..80: mol_type = other DNA
gaatgtacataatggaaagctatgtaaactaggggggatagccccgttgcacctgggcaaatgtaacattgccggatggc

SEQ ID NO: 83591 - DNA, 80 bp, synthetic construct
  source 1..80: mol_type = other DNA
ggtggtaggctctctttgtgtgcgaatggaccaggcgattgtggaaaagaacatcatactgaaagcgaacttcagtgtga

SEQ ID NO: 83592 - DNA, 80 bp, synthetic construct
  source 1..80: mol_type = other DNA
tcaaattggagataccgaatggaagaatactctatctcaattattctcgactatgggatggccaaacggaatcagtatta

SEQ ID NO: 83593 - DNA, 80 bp, synthetic construct
  source 1..80: mol_type = other DNA
caactcaaattggagataccgaatggaaaaatactctatctcaattattttcgactatgggatggcaaggcggatcaata

SEQ ID NO: 83594 - DNA, 80 bp, synthetic construct
  source 1..80: mol_type = other DNA
tccaaccgaagcaacaactcaaattgcagatatcgaatggaaaaatactctatctcaattatttttatctatacgatgca

SEQ ID NO: 83595 - DNA, 80 bp, synthetic construct
  source 1..80: mol_type = other DNA
ttcaaatcaacgatggctattggaaagactcattatctcaaatgtttcttaccaaaggatggccaagcgaaccagtatca

SEQ ID NO: 83596 - DNA, 80 bp, synthetic construct
  source 1..80: mol_type = other DNA
cagctcctccgatggaggaggacatgaaggaacaggagaatcaggaacagaaagggagcccaacagagctctatccattt

SEQ ID NO: 83597 - DNA, 80 bp, synthetic construct
  source 1..80: mol_type = other DNA
gcctccctcaaatccctctttgggacagaccaatagttatagcaagggtcgggggccagatatgtgaagttttactggat

SEQ ID NO: 83598 - DNA, 80 bp, synthetic construct
  source 1..80: mol_type = other DNA
cgagacatgcagtcactctggaacacaattgcagtgctctggtgtgtccataacagatataaaattgaagatacacagca

SEQ ID NO: 83599 - DNA, 80 bp, synthetic construct
  source 1..80: mol_type = other DNA
agtaggagagtcagagatagtagtaaccacatattggggattgatgccaggagaaagagatgaacagttgggacatgggg

SEQ ID NO: 83600 - DNA, 80 bp, synthetic construct
  source 1..80: mol_type = other DNA
ggcaatacaaaaattaaaggaaataatgggaagcagaaaacctgagggcaatactaaggaagacacaagtgtaaagcaga

SEQ ID NO: 83601 - DNA, 80 bp, synthetic construct
  source 1..80: mol_type = other DNA
ttcacctgttttacagaatcagctatcaggaaagccatcttagggcaaaaagtactgaccaggtgtgattacactgcagg

SEQ ID NO: 83602 - DNA, 80 bp, synthetic construct
  source 1..80: mol_type = other DNA
acatagcaaggtagggacactacaactgctagctctaacagtagtagtaaaagcaaaaagaagtaggcctcccctaccca

SEQ ID NO: 83603 - DNA, 80 bp, synthetic construct
  source 1..80: mol_type = other DNA
tggatccagtagatcctgaggtgcctccttggcaacaccctggaagtcgaccccaaaccccttgtaacaattgctattgc

SEQ ID NO: 83604 - DNA, 80 bp, synthetic construct
  source 1..80: mol_type = other DNA
aaaagctgcagctatcattgccatgtttgtttcacaagaaagggtttgggaatctcctatggcaggaagaagcgacgccg

SEQ ID NO: 83605 - DNA, 80 bp, synthetic construct
  source 1..80: mol_type = other DNA
accagctgctgcgcgccatccagatcataaagatcctgtaccaaagcagtaagtaacgctaatgcatcagagggacttgc

SEQ ID NO: 83606 - DNA, 80 bp, synthetic construct
  source 1..80: mol_type = other DNA
taacagtaatagtttttagtgctttgctgattataaatgtaattttttggctgtttttgcttagaaagtatttagaacaa

SEQ ID NO: 83607 - DNA, 80 bp, synthetic construct
  source 1..80: mol_type = other DNA
gcaccaacattattctgtgcttcagaagctaacctaacaagcactgagaagcataatgtttgggcatcacatgcctgtgt

SEQ ID NO: 83608 - DNA, 80 bp, synthetic construct
  source 1..80: mol_type = other DNA
aactggaaagggaacataaccaacggcacagaaatcagaggcacaacaaactcaagtgaaataaaaaggtgtgaatttaa

SEQ ID NO: 83609 - DNA, 80 bp, synthetic construct
  source 1..80: mol_type = other DNA
tgtaaccactgttgtcaaagacaaaaaggagaaaaaacaggctctattctatagaacagatttgatggaactgaagagta

SEQ ID NO: 83610 - DNA, 80 bp, synthetic construct
  source 1..80: mol_type = other DNA
acaataagtactcagctaatattaaatgggacactctctaaaggaaaaataagaattatgggaacaaatattacggacag

SEQ ID NO: 83611 - DNA, 80 bp, synthetic construct
  source 1..80: mol_type = other DNA
tggaaaaaatatcatagtgaccctaaattctaccataagcataacctgtgagagaccaacaatggatatacaagacatac

SEQ ID NO: 83612 - DNA, 80 bp, synthetic construct
  source 1..80: mol_type = other DNA
acataggaccaatggcatggtacagcacgtacatagagaggcaggcaaagggaaacagaacaaggctggcttattgcata

SEQ ID NO: 83613 - DNA, 80 bp, synthetic construct
  source 1..80: mol_type = other DNA
tataataccactgattggaaagaaatattaaaacaaacagctcaaagatatgtagaacttgtaaacaatacaaataatat

SEQ ID NO: 83614 - DNA, 80 bp, synthetic construct
  source 1..80: mol_type = other DNA
cgacataatattcgatcgcagcaatcctggtggagatccagagataacccatttacattttaactgtcatggagaattct

SEQ ID NO: 83615 - DNA, 80 bp, synthetic construct
  source 1..80: mol_type = other DNA
tttattgtatcacagatcaaatgtttaactataccttccactgtaacaaaaccaaatgtactgataacagtagctatatc

SEQ ID NO: 83616 - DNA, 80 bp, synthetic construct
  source 1..80: mol_type = other DNA
gacccaaataattatataccttgcaaactgaaacaggtggtaaggtcatggatgcggggagggtcgggaatctatgcacc

SEQ ID NO: 83617 - DNA, 80 bp, synthetic construct
  source 1..80: mol_type = other DNA
tcccatcaaaggtaatctaacatgtatatcaaacataactggaatgattctacaattagatagcccatggaacagaagtg

SEQ ID NO: 83618 - DNA, 80 bp, synthetic construct
  source 1..80: mol_type = other DNA
aaaatgcaaacgcaacatttagaccagaaggaggaaatatgaaagagatatggagagctgaattgttcaactacaaagta

SEQ ID NO: 83619 - DNA, 80 bp, synthetic construct
  source 1..80: mol_type = other DNA
gtggggatgtcaaggaaagacagtctgctacacatcagtaaaatggaataacacatggagaggaaacgaaagcatttggg

SEQ ID NO: 83620 - DNA, 80 bp, synthetic construct
  source 1..80: mol_type = other DNA
gcaacctaacatggcaggaatgggatcaggagataagcaacataagctccaccatatatgatgaaatacaaaaggcacaa

SEQ ID NO: 83621 - DNA, 80 bp, synthetic construct
  source 1..80: mol_type = other DNA
accacctcttgagcagcttaacatcagggatccagaaggtgatcagcaatctgggacttggactgagcatcctaggacag

SEQ ID NO: 83622 - DNA, 80 bp, synthetic construct
  source 1..80: mol_type = other DNA
aagataattagtgcctgcaggatttgtggagctttaacacaatactggctacaagaattgcaaaatagtgctacaagttt

SEQ ID NO: 83623 - DNA, 80 bp, synthetic construct
  source 1..80: mol_type = other DNA
actagatacagttgcagtggcagtagccaattggactgacagcatactcgcaggaatacaagcaataggaagaggaattc

SEQ ID NO: 83624 - DNA, 80 bp, synthetic construct
  source 1..80: mol_type = other DNA
tgcaggatgggcaagggtaagagaaagaatgagaaaaacttctcctgaacctgagcctgagccatgtgcacctggagtag

SEQ ID NO: 83625 - DNA, 80 bp, synthetic construct
  source 1..80: mol_type = other DNA
gccgttgccaccagggcagataagggaaccaacaggaagtgacattgctgggacaactagcaaccagatggagcaaatcc

SEQ ID NO: 83626 - DNA, 80 bp, synthetic construct
  source 1..80: mol_type = other DNA
ctcctgcatccagcgtgtaaccatggctttgaagatgaacataaggaaatattgaagtggcagtttgatagaactttagg

SEQ ID NO: 83627 - DNA, 80 bp, synthetic construct
  source 1..80: mol_type = other DNA
ggacttgaagtgaaagtgaaaccagggaagaaaacctccgacgcgaagggctcggcttagcggagtgcacccgctaagag

SEQ ID NO: 83628 - DNA, 80 bp, synthetic construct
  source 1..80: mol_type = other DNA
agatgggtgcgagtgcgtctgtgttgacaggaagcaaattggatgcatgggaacaaattaggttaaagccaggatctaaa

SEQ ID NO: 83629 - DNA, 80 bp, synthetic construct
  source 1..80: mol_type = other DNA
gactttcctgtgtgtacaaatgaattgtacagacccaacagacaatggtacaacaacagaaaaccctacaactatagaaa

SEQ ID NO: 83630 - DNA, 80 bp, synthetic construct
  source 1..80: mol_type = other DNA
accctgtaaaaaagtgtgagtttaatacaaccactgttgtcaaagacaaaaaggagaaaaaacaggctctattttattta

SEQ ID NO: 83631 - DNA, 80 bp, synthetic construct
  source 1..80: mol_type = other DNA
gtccaatggcctggtacagcatggcactagaggaagggaacaacaacacaagggcagcttattgtgaatataataacaca

SEQ ID NO: 83632 - DNA, 80 bp, synthetic construct
  source 1..80: mol_type = other DNA
gagtggaaagaaacattaaaacaaacagctgaaaggtatttagaacttgtaaacaatacagggaatattagcatgatatt

SEQ ID NO: 83633 - DNA, 80 bp, synthetic construct
  source 1..80: mol_type = other DNA
caatagaaccagcggtggagatgcagaggtgactcatttacattttaactgtcatggggaattcttttattgtaacacaa

SEQ ID NO: 83634 - DNA, 80 bp, synthetic construct
  source 1..80: mol_type = other DNA
gtaatatgtttaattatagctttgaatgtgacggaaccacctgtactattgttaaccagggtaacagtagccaaactaat

SEQ ID NO: 83635 - DNA, 80 bp, synthetic construct
  source 1..80: mol_type = other DNA
agtagcaataatatcataccttgcaggttaaaacaggtggtaaggtcatggatacagggagggtcgggactctatgcacc

SEQ ID NO: 83636 - DNA, 80 bp, synthetic construct
  source 1..80: mol_type = other DNA
tccagaaggtgatcgactacctgagacttggactgtggatcctaggacaaaagataattagtatctgcagaatttgtgca

SEQ ID NO: 83637 - DNA, 80 bp, synthetic construct
  source 1..80: mol_type = other DNA
gcgagaggaactcacagagggtgagtaattttgctggcggtggccagacctaggggaagggcgaagtctctaggggagga

SEQ ID NO: 83638 - DNA, 80 bp, synthetic construct
  source 1..80: mol_type = other DNA
cagggacttgaaagagaaagtgaaaccagggaagaaaacctccgacgcaacgggctcggcttagcggagtgcacctgcta

SEQ ID NO: 83639 - DNA, 80 bp, synthetic construct
  source 1..80: mol_type = other DNA
gcagcccagcaagatctgaaaggaggatacacagcagtattcatgcaaagagggcaaaacccaattagaaaagggcctat

SEQ ID NO: 83640 - DNA, 80 bp, synthetic construct
  source 1..80: mol_type = other DNA
atcagccccaccgatggaggaggtgatgaagggacaagagaatcagggacaaaagggggacacaacagaactctatcctt

SEQ ID NO: 83641 - DNA, 80 bp, synthetic construct
  source 1..80: mol_type = other DNA
cactagagctcctagaagagctaaaagcagaagcaatgcgacatttccctacatattggttacagtctttaggacaatac

SEQ ID NO: 83642 - DNA, 80 bp, synthetic construct
  source 1..80: mol_type = other DNA
atttatgataattatggggacacttgggaaggagttatggcaattataagactcttacaactactgctatttgcccattt

SEQ ID NO: 83643 - DNA, 80 bp, synthetic construct
  source 1..80: mol_type = other DNA
gcagaaccagtattgttctgtgcctcagatgctaacctaacgagcactgagcagcataatatttgggcatcacaagcctg

SEQ ID NO: 83644 - DNA, 80 bp, synthetic construct
  source 1..80: mol_type = other DNA
agcgattctacaaacagcagctcagagaaccctgtgaaaaagtgtgagtttaatgtaaccacagttctcaaagacaaaaa

SEQ ID NO: 83645 - DNA, 80 bp, synthetic construct
  source 1..80: mol_type = other DNA
ggagaaaaaacaggctctattctatgtatcagatttggttagagtgaataatagtaaaacaagtagcagtaacacaacat

SEQ ID NO: 83646 - DNA, 80 bp, synthetic construct
  source 1..80: mol_type = other DNA
agtactcagctaatattaaatggaacaatctcggaaggaaagataagaatgatagcaaaaaatatttcggtgggtagtag

SEQ ID NO: 83647 - DNA, 80 bp, synthetic construct
  source 1..80: mol_type = other DNA
aaatatcatagtgaccttaaatactactataaacatgacctgccagagaccaggacatcaagaaatacaagagataaaga

SEQ ID NO: 83648 - DNA, 80 bp, synthetic construct
  source 1..80: mol_type = other DNA
caggtccactggcctggtatagcatgtacctaaaggaaaacacaactgagtcaaggaaagcttattgtgaatataatgtc

SEQ ID NO: 83649 - DNA, 80 bp, synthetic construct
  source 1..80: mol_type = other DNA
aataattgggaagaggccttaagacagacagctgaaaggtatttagaattagtaaacaatacaggtgttataagcatgat

SEQ ID NO: 83650 - DNA, 80 bp, synthetic construct
  source 1..80: mol_type = other DNA
attcaatcacagtgctggaggagatccagaggtatcccagttgcattttaattgtcatggagagttcttttactgtgaca

SEQ ID NO: 83651 - DNA, 80 bp, synthetic construct
  source 1..80: mol_type = other DNA
caactcagatgtttaattatacctttaactgtactgacaccaggtgtgataatcaaagtaccaccagcagtaataatata

SEQ ID NO: 83652 - DNA, 80 bp, synthetic construct
  source 1..80: mol_type = other DNA
ccttgcaggttgaggcaggtagtaaggtcatggatgagaggaggatcgggactctatgcacctcccatccgaggtaactt

SEQ ID NO: 83653 - DNA, 80 bp, synthetic construct
  source 1..80: mol_type = other DNA
aacatgtggatcaaacataactggaatgattctacaaatggatcagccatggaacgggagccagagcaacacaaacagga

SEQ ID NO: 83654 - DNA, 80 bp, synthetic construct
  source 1..80: mol_type = other DNA
aaaccttttagtgtggcacctacaaaaattacaaggccagtcataggctttggcacccgcagagagaaaagagcagtggg

SEQ ID NO: 83655 - DNA, 80 bp, synthetic construct
  source 1..80: mol_type = other DNA
ctcatggggctgtcagggaaagctagtatgttacacatcagtaaaatggaaccggacagaatggaaaggaaatgagtcta

SEQ ID NO: 83656 - DNA, 80 bp, synthetic construct
  source 1..80: mol_type = other DNA
tttggggcaacctcacatggcagcaatgggatcaggagatagacaatgtaagcgccaccatatttgaggaaatactaaaa

SEQ ID NO: 83657 - DNA, 80 bp, synthetic construct
  source 1..80: mol_type = other DNA
ggggaatgaatccaaatcagagaaatatagcacttggctccgcttccctaactattgcgacaacatgtttactcactcca

SEQ ID NO: 83658 - DNA, 80 bp, synthetic construct
  source 1..80: mol_type = other DNA
ttagccatcttagcaaccactatgacactacatttcaagcagaacgagtacacaaacacctcgaaaaatcaagtagtgcc

SEQ ID NO: 83659 - DNA, 80 bp, synthetic construct
  source 1..80: mol_type = other DNA
gaatttccgatcgagatttcgggagaggagaaaatggaccaaatactagaattgcttatgatataatttgcaacattctc

SEQ ID NO: 83660 - DNA, 80 bp, synthetic construct
  source 1..80: mol_type = other DNA
aaagggacattccaaacagcaacgcagcaagcaatgatggatcaggtaagagaaagcgcgaatcctgggaatgacgacat

SEQ ID NO: 83661 - DNA, 80 bp, synthetic construct
  source 1..80: mol_type = other DNA
cgtagacctcatcttcctggtacggtctgcactcattctgagaggatcatcggctcatacatcttgtctgcctgcttgtg

SEQ ID NO: 83662 - DNA, 80 bp, synthetic construct
  source 1..80: mol_type = other DNA
tgggggttggcccccagttaattccaagtcccagataaatagccaattcacagttgccagtgaaaactgttttgggtatt

SEQ ID NO: 83663 - DNA, 80 bp, synthetic construct
  source 1..80: mol_type = other DNA
ctggttttttttttgttgaagccaaaaattccatcaccagggttttttttggggagttgataagaggaggaccccaggag

SEQ ID NO: 83664 - DNA, 80 bp, synthetic construct
  source 1..80: mol_type = other DNA
gaaccaatcataatagaaagggacatagtgcatgtgaatagcactaccatagagaaggaaatttgccctgaagtggcgga

SEQ ID NO: 83665 - DNA, 80 bp, synthetic construct
  source 1..80: mol_type = other DNA
cactcttagcaatgactattacactacacctcaatcagaatgaatgcagcaagccttcgaataaccaggtagtgccctgt

SEQ ID NO: 83666 - DNA, 80 bp, synthetic construct
  source 1..80: mol_type = other DNA
cgtgaattatatgctgaaatctttgactagaatgatggactttatcatttataaatttcttttcatcatagtcatcttgt

SEQ ID NO: 83667 - DNA, 80 bp, synthetic construct
  source 1..80: mol_type = other DNA
tcagttgacgggcttgtggcttctgcaccacaccttgagcgagttacaggtttcaaccagattgattcttttttttgtct

SEQ ID NO: 83668 - DNA, 80 bp, synthetic construct
  source 1..80: mol_type = other DNA
ggcaagaaaagtggcatccactctcacaggggatcaaagagtcgggctcataccaagaaacggtgtggaccattgggatg

SEQ ID NO: 83669 - DNA, 80 bp, synthetic construct
  source 1..80: mol_type = other DNA
ggtaaacctccaaaaccaagtgtgttggaagcagccaaacaaaccatcatcaatgtcctcgaacaaaccctggaccctcc

SEQ ID NO: 83670 - DNA, 80 bp, synthetic construct
  source 1..80: mol_type = other DNA
cgggagcttcaatcgccgcccccttaactggtcaaaacaatgtaatagacccctggattagattaaattttgtacaagcc

SEQ ID NO: 83671 - DNA, 80 bp, synthetic construct
  source 1..80: mol_type = other DNA
gaatgtataatggatatgcaggtggggtcgaggtgcaggtactgcttgctggaaatgcgtttacagcgggcaaactagta

SEQ ID NO: 83672 - DNA, 80 bp, synthetic construct
  source 1..80: mol_type = other DNA
cagtgctgaccctcaatgagctgaccaactcccgttttcctgtcccgattgatgccatgtacactagccccaatgacaca

SEQ ID NO: 83673 - DNA, 80 bp, synthetic construct
  source 1..80: mol_type = other DNA
attgtggtccaacctcaaaatgggagagcaaccattgacggcgaattgcttggcacaactcaactcatccccagtggtat

SEQ ID NO: 83674 - DNA, 80 bp, synthetic construct
  source 1..80: mol_type = other DNA
ctgctcatttagaggaagaattacagcacatctgcaagatgacagtcacttgtggagcgtccaagtcaccaatctgaatg

SEQ ID NO: 83675 - DNA, 80 bp, synthetic construct
  source 1..80: mol_type = other DNA
gcaccccttttgatccaacagatgatgtgcccgctccattgggtatgccagacttttctggacaaatatttggggtgatc

SEQ ID NO: 83676 - DNA, 80 bp, synthetic construct
  source 1..80: mol_type = other DNA
agccaaagggatacaggtagtaacaaccccgcaaacagatcccatgatgctgtggttccaacctacagtcccaaattcac

SEQ ID NO: 83677 - DNA, 80 bp, synthetic construct
  source 1..80: mol_type = other DNA
tcccaaactcggctcaatccaaattggaacgtgggataccaatgatctacaaaaccagcctgttaaattcacgcccgttg

SEQ ID NO: 83678 - DNA, 80 bp, synthetic construct
  source 1..80: mol_type = other DNA
gcctcaatgaaattggagatgacaaacatttcgaccaatgggtgttaccaaattattctggtgccctaggactcaacatg

SEQ ID NO: 83679 - DNA, 80 bp, synthetic construct
  source 1..80: mol_type = other DNA
cacctggctcctgctgtgtccccacttttccctggagagagattgcttttctttagatcatacatacccctaaaaggtgg

SEQ ID NO: 83680 - DNA, 80 bp, synthetic construct
  source 1..80: mol_type = other DNA
ccatggaaacccatacattgattgccttgtgccacaagagtggatacaacatttctatcaagaatcagccccagcacaat

SEQ ID NO: 83681 - DNA, 80 bp, synthetic construct
  source 1..80: mol_type = other DNA
cctcggtggctctgctgagatatgtgaacccagacacagggcgcaccctatttgaggccaaattgcataaggaaggattc

SEQ ID NO: 83682 - DNA, 80 bp, synthetic construct
  source 1..80: mol_type = other DNA
attactgttgctagcacagaaaacagacctgtagttgtccccccaaatggctatttcagatttgattcttgggtaaacca

SEQ ID NO: 83683 - DNA, 80 bp, synthetic construct
  source 1..80: mol_type = other DNA
gacttgccggtgacatcgtcaccaatagtgttggctcacttgtgaacgccggagccaatgctataaaccaaaaagttgat

SEQ ID NO: 83684 - DNA, 80 bp, synthetic construct
  source 1..80: mol_type = other DNA
atggaactagatactgggcccctggggcctcaaggaccaccagcttttctggtgggttcaccaacaccacccgtgccaga

SEQ ID NO: 83685 - DNA, 80 bp, synthetic construct
  source 1..80: mol_type = other DNA
acagttgaaccacccaaaagttccccccctgctcacaatactttagcttctgtccctaggtctagttctactgtttcatc

SEQ ID NO: 83686 - DNA, 80 bp, synthetic construct
  source 1..80: mol_type = other DNA
ttcttctactcgttcgacagtaattactagttcttccgctgccccttctactaggtcttctattactagaaattcacccc

SEQ ID NO: 83687 - DNA, 80 bp, synthetic construct
  source 1..80: mol_type = other DNA
gcaatacttctcaatctgtctcttccgtttcttctcgcactagtgattgggtacaaaatcaaaacagaatgctggagcca

SEQ ID NO: 83688 - DNA, 80 bp, synthetic construct
  source 1..80: mol_type = other DNA
tatctgaggggatctctgcaaacagcctttgtgtcaccgtcctccagtaaggcctctagtaatggcactgtctcaactgt

SEQ ID NO: 83689 - DNA, 80 bp, synthetic construct
  source 1..80: mol_type = other DNA
ggggggagtcacaagcttagtgaaaagactttgattttcctttttctttctttctttttattgaaaattttgtcttttaa

SEQ ID NO: 83690 - DNA, 80 bp, synthetic construct
  source 1..80: mol_type = other DNA
ggatcagtggccgcttcgttgcctgcaactctagttagtgagcttaccagcccacccagtcctgctgcacctaagccccc

SEQ ID NO: 83691 - DNA, 80 bp, synthetic construct
  source 1..80: mol_type = other DNA
atgagcgcgagcaaagaaattaaaagctttctgtggacccagagcctgcgtcgtgaactgagcggctattgcagcaacat

SEQ ID NO: 83692 - DNA, 80 bp, synthetic construct
  source 1..80: mol_type = other DNA
aaaagcacccagcagaaaagcgtgctgcgtgtgggcaccctgaccagcgatgatctgctggtgctggcggcggatctgga

SEQ ID NO: 83693 - DNA, 80 bp, synthetic construct
  source 1..80: mol_type = other DNA
aaaactgaaaagcaaagtgacccgtaccgaacgtccgctgagcgcgggcgtgtatatgggcaacctgagcagccagcagc

SEQ ID NO: 83694 - DNA, 80 bp, synthetic construct
  source 1..80: mol_type = other DNA
tggatcagcgtcgtgcgctgctgagcatgattggcatgagcggcggcaaccagggcgcgcgtaccggccgtgatggcgtg

SEQ ID NO: 83695 - DNA, 80 bp, synthetic construct
  source 1..80: mol_type = other DNA
gaccaaacagggccaggtggatctgaacgatgcggtgcaggcgctgaccgatctgggcctgatttataccgcgaaatatc

SEQ ID NO: 83696 - DNA, 80 bp, synthetic construct
  source 1..80: mol_type = other DNA
cgaacaccagcgatctggatcgtctgacccagagccatccgattctgaacatgattgataccaaaaaaagcagcctgaac

SEQ ID NO: 83697 - DNA, 80 bp, synthetic construct
  source 1..80: mol_type = other DNA
cattaaagtgagcccgcagaccatggatggcattctgaaaagcattctgaaagtgaaaaaagcgctgggcatgtttatta

SEQ ID NO: 83698 - DNA, 80 bp, synthetic construct
  source 1..80: mol_type = other DNA
ttctgaaaagcattctgaaagtgaaaaaagcgctgggcatgtttattagcgataccccgggcgaacgtaacccgtatgaa

SEQ ID NO: 83699 - DNA, 80 bp, synthetic construct
  source 1..80: mol_type = other DNA
atgcgtaaagaacgtcgtgatgataacgatctgaaacgtctgcgtgatctgaaccaggcggtgaacaacctggtggaact

SEQ ID NO: 83700 - DNA, 80 bp, synthetic construct
  source 1..80: mol_type = other DNA
tcaggttacctgcggtagcatgactcttaatggtctttggcttgacaacacagtctggtgcccacgacacgtaatgtgcc

SEQ ID NO: 83701 - DNA, 80 bp, synthetic construct
  source 1..80: mol_type = other DNA
gcttggttgctacataaggatggaggaatccctgatggatgttccctctacctccggcactcaagtttattcgcgcaaag

SEQ ID NO: 83702 - DNA, 80 bp, synthetic construct
  source 1..80: mol_type = other DNA
gtcttccaatcagggtaataaacaaattgttcattcttaccccattttacatcatccaggattttaacgaactatggctt

SEQ ID NO: 83703 - DNA, 80 bp, synthetic construct
  source 1..80: mol_type = other DNA
tagatccagtggcgggcgcagcgatagcagcaccccttactggtcagcaaaacataatagatccctggattatgaataat

SEQ ID NO: 83704 - DNA, 80 bp, synthetic construct
  source 1..80: mol_type = other DNA
tttgtgcaagcacctggtggtgagtttacagtgtcacctaggaactcccctggtgaagtacttctaaatttagaattagg

SEQ ID NO: 83705 - DNA, 80 bp, synthetic construct
  source 1..80: mol_type = other DNA
caggtgggtttgaggtgcaggtggtcctggctggaaatgcgtttacagcagggaaagtgatctttgcagctatacccccc

SEQ ID NO: 83706 - DNA, 80 bp, synthetic construct
  source 1..80: mol_type = other DNA
aatttcccaactgacaatttgagtgcagcgcagattacaatgtgtcctcatgtaattgtagatgtcaggcagttggaacc

SEQ ID NO: 83707 - DNA, 80 bp, synthetic construct
  source 1..80: mol_type = other DNA
aatcaacctcccgatgcctgatgtccgcaacaatttcttccattataatcaaggttctgattcgaggttacgcttaattg

SEQ ID NO: 83708 - DNA, 80 bp, synthetic construct
  source 1..80: mol_type = other DNA
caatgttgtacactccccttagggcaaataattctggggatgatgttttcactgtgtcatgtagggtgttgactaggccc

SEQ ID NO: 83709 - DNA, 80 bp, synthetic construct
  source 1..80: mol_type = other DNA
agtcctgacttctcattcaatttcctcgtcccgcccactgtggaatcaaagacaaaacctttcaccctccctattttgac

SEQ ID NO: 83710 - DNA, 80 bp, synthetic construct
  source 1..80: mol_type = other DNA
catctctgagatgtctaattctagatttccagtgccaattgactctctgcacaccagtccaactgataacattgttgtcc

SEQ ID NO: 83711 - DNA, 80 bp, synthetic construct
  source 1..80: mol_type = other DNA
agtgccaaaatgggcgcgtcacccttgatggcgagctaatgggcaccacccaactcttgccgagtcagatatgtgctttt

SEQ ID NO: 83712 - DNA, 80 bp, synthetic construct
  source 1..80: mol_type = other DNA
aggggtgtgctcaccagatcaacaagcagggccagtgatcaagctgacgcagcaacccctagactcttcaactactattg

SEQ ID NO: 83713 - DNA, 80 bp, synthetic construct
  source 1..80: mol_type = other DNA
gcacatacaactagacaacctaaatgggaccccgtatgaccctgcagaggacataccagctcctctggggacgccagact

SEQ ID NO: 83714 - DNA, 80 bp, synthetic construct
  source 1..80: mol_type = other DNA
ttcggggcaaagtctttggcgtagccagccagagaaaccctgacagcacaacaagggcacatgaggcaaaagtggataca

SEQ ID NO: 83715 - DNA, 80 bp, synthetic construct
  source 1..80: mol_type = other DNA
acatctggccgcttcaccccaaaattgggctccctagaaatatccactgaatctggtgactttgaccagaatcaaccaac

SEQ ID NO: 83716 - DNA, 80 bp, synthetic construct
  source 1..80: mol_type = other DNA
aagattcaccccagttggcattggagttgacaatgaggcagactttcaacaatggaccttacccgattattccggtcagt

SEQ ID NO: 83717 - DNA, 80 bp, synthetic construct
  source 1..80: mol_type = other DNA
tcacccacaacatgaatctggccccagctgtcgctcccaattttcccggtgaacagcttcttttcttccgctcacagttg

SEQ ID NO: 83718 - DNA, 80 bp, synthetic construct
  source 1..80: mol_type = other DNA
ccatcctctggcgggcggtccaatggcattctagactgcctggtcccccaggaatgggtccaacacttctaccaggaatc

SEQ ID NO: 83719 - DNA, 80 bp, synthetic construct
  source 1..80: mol_type = other DNA
cgcccctgcccaaacgcaggtggctctggtcaggtatgtcaaccctgatactggtagggtgttatttgaggctaagctgc

SEQ ID NO: 83720 - DNA, 80 bp, synthetic construct
  source 1..80: mol_type = other DNA
ataagctaggctacatgaccatagctaagagtggtgattctccaataactgtacccccaaatggatactttaggtttgaa

SEQ ID NO: 83721 - DNA, 80 bp, synthetic construct
  source 1..80: mol_type = other DNA
caggggctggtgctattaatcaaaaagttgattttgaaaataataaatatctacaaaatgcatcctttaatcatgataag

SEQ ID NO: 83722 - DNA, 80 bp, synthetic construct
  source 1..80: mol_type = other DNA
gagatgttaaatgcacaaattgaggcaactaagaggctacaggctgacatgattgctatcaaacaaggggttttgaccgc

SEQ ID NO: 83723 - DNA, 80 bp, synthetic construct
  source 1..80: mol_type = other DNA
tggcggtttctcccccactgatgcagcccgtggggctattaacgcccccataacaaaagttctggactggagtggaacca

SEQ ID NO: 83724 - DNA, 80 bp, synthetic construct
  source 1..80: mol_type = other DNA
ggtactgggcaccaaatgccacctccacaacttcaatgtcaggtggcttcacaggtcaagctgtgcatagagctacacca

SEQ ID NO: 83725 - DNA, 80 bp, synthetic construct
  source 1..80: mol_type = other DNA
aattttaaaaccaaccaagccccaaaatccacacccagcagtgggtcttcagtgaggtcaagctcaacccaactcaccaa

SEQ ID NO: 83726 - DNA, 80 bp, synthetic construct
  source 1..80: mol_type = other DNA
cttgagctcacactcatctgggtcttctcgatccagcggatccacgatggtcagctcgttaccatcttccagcaggacta

SEQ ID NO: 83727 - DNA, 80 bp, synthetic construct
  source 1..80: mol_type = other DNA
gagactgggttaaccaacagaattttaatttggaaccacacatgcctggatctcttaggacagcttttgttactccacca

SEQ ID NO: 83728 - DNA, 80 bp, synthetic construct
  source 1..80: mol_type = other DNA
tagaaggggggagtcaaatatttagtgaaaagattattcttaaatttggtttgtaattggatttaaattagaatctttta

SEQ ID NO: 83729 - DNA, 80 bp, synthetic construct
  source 1..80: mol_type = other DNA
gggagtcaaatatttagtgaaaagattattcttaaatttggtttgtaattggatttaaattagaatcttttaaaaaaaaa

SEQ ID NO: 83730 - DNA, 80 bp, synthetic construct
  source 1..80: mol_type = other DNA
gatctcacaattaaccaagatggaaataacaacactaatagctatactgctaatggtaactgcgagcaatgcagataaaa

SEQ ID NO: 83731 - DNA, 80 bp, synthetic construct
  source 1..80: mol_type = other DNA
tcttacttgaagttgagagtgagataaggacattttcttttcagcttatttagtactaaaaaacaccctttgtctctact

SEQ ID NO: 83732 - DNA, 80 bp, synthetic construct
  source 1..80: mol_type = other DNA
cacgcgctcgggctatgagaccttcagggttactgggggttggaccattgccaattctaagtcacaggtcaataggcaaa

SEQ ID NO: 83733 - DNA, 80 bp, synthetic construct
  source 1..80: mol_type = other DNA
atgaatgccacatcctcgcaaacaataatgcaattccctgtactaccataggaaaagagttttgtcctgaaatagtagag

SEQ ID NO: 83734 - DNA, 80 bp, synthetic construct
  source 1..80: mol_type = other DNA
cttttacactgagtagaggcttcagatcaggaatcatcgtttcaaatgcatcgatgggtgagtgtgacgcgaagtgccaa

SEQ ID NO: 83735 - DNA, 80 bp, synthetic construct
  source 1..80: mol_type = other DNA
tagcaatagtggtgctagtccccctactagtacccctagtaccactagtagaagggaggacggaggaatgacaaactgct

SEQ ID NO: 83736 - DNA, 80 bp, synthetic construct
  source 1..80: mol_type = other DNA
tagtagtagcccgaatgggactaatgtggtgggggaaggagaaatgaaaaactgctctttcaatgttaccacaagcatag

SEQ ID NO: 83737 - DNA, 80 bp, synthetic construct
  source 1..80: mol_type = other DNA
gaaacagggtgcacaaagaatatgctcttttttataaatctgatgtagtacaaatagagaataaaacaagctatacattg

SEQ ID NO: 83738 - DNA, 80 bp, synthetic construct
  source 1..80: mol_type = other DNA
tggtaaaaaaggcaaattcatatccaaagctcagcaaatcctatcttaacaataagaaagaagaggttcttgtgctatgg

SEQ ID NO: 83739 - DNA, 80 bp, synthetic construct
  source 1..80: mol_type = other DNA
caacatacagtaagagattcaagccagaaataggaacaagacccaaggtgagagatcaagcagggaggatgaattattac

SEQ ID NO: 83740 - DNA, 80 bp, synthetic construct
  source 1..80: mol_type = other DNA
cctggcaatgaccataacacattacttcaatcaaaatgagtgcagcaccccattgagcaatcaagtaatgccatgtgagc

SEQ ID NO: 83741 - DNA, 80 bp, synthetic construct
  source 1..80: mol_type = other DNA
tcgttggagacacaccaagaaacgatgacggctctagtaatagcaactgcaaggatcctaataatgaaagagggaaccca

SEQ ID NO: 83742 - DNA, 80 bp, synthetic construct
  source 1..80: mol_type = other DNA
aagaaaagagattctgcaacattatgaaaaaggcccctctcgacctaagggattgcaccatagaaggttggatactgggg

SEQ ID NO: 83743 - DNA, 80 bp, synthetic construct
  source 1..80: mol_type = other DNA
tcatccatcatcttgactataccacacgcctaccagttccgatatcagtcaaatgggtgaactccgctcctcaattatta

SEQ ID NO: 83744 - DNA, 80 bp, synthetic construct
  source 1..80: mol_type = other DNA
cctagaataacggactttattatttacaaatctctcctaattatagttatactatcaccactccttaatgcacaaaatta

SEQ ID NO: 83745 - DNA, 80 bp, synthetic construct
  source 1..80: mol_type = other DNA
agatttactgcagctttacacaatggactacctgatgatcgcctaaaaaattgcgtaattgatgccctcagaaatattta

SEQ ID NO: 83746 - DNA, 80 bp, synthetic construct
  source 1..80: mol_type = other DNA
cctgaggacctcgcggtggagttggtgccaatagtaatgggggggataggtttggtgttaggattcaccaaagagaagat

SEQ ID NO: 83747 - DNA, 80 bp, synthetic construct
  source 1..80: mol_type = other DNA
ttggagggcaacttaagggcgttaagaccatgcctgagctcaaacaagcactcaagaatatcttaatcaggaggtgtcaa

SEQ ID NO: 83748 - DNA, 80 bp, synthetic construct
  source 1..80: mol_type = other DNA
atagtgtacggtggtgtcacttacacgcttgagtctgatggtaagggatgcgtgaaggtagacagagtccagagtactac

SEQ ID NO: 83749 - DNA, 80 bp, synthetic construct
  source 1..80: mol_type = other DNA
tgtgcaaactaacaatgagttggctggtacccttcatcatctcaggtgtgccaggatcagatactatgtcaagtgcttcc

SEQ ID NO: 83750 - DNA, 80 bp, synthetic construct
  source 1..80: mol_type = other DNA
ggaagccctatattccatactccagattgcgggggctgcatttgtcacctcgcgcattgtcaagcgcatgaacatacagg

SEQ ID NO: 83751 - DNA, 80 bp, synthetic construct
  source 1..80: mol_type = other DNA
caagccacagttggagaacactgaagacactgccagcaaagacgggtgccttaagcctaaagatgacgaggagttcgtca

SEQ ID NO: 83752 - DNA, 80 bp, synthetic construct
  source 1..80: mol_type = other DNA
tttcatctgacgacattaaggctgagggtaagaaagggaagaacaagactggtcgtggtaagaagcatacagctttctca

SEQ ID NO: 83753 - DNA, 80 bp, synthetic construct
  source 1..80: mol_type = other DNA
aggacgcggtgctggaccttgaggcaattgaaaacaaccacatgacctctctactcaaggacaaggacagcctggcggtt

SEQ ID NO: 83754 - DNA, 80 bp, synthetic construct
  source 1..80: mol_type = other DNA
gaggtaagcaaccaagaccaaatgtgcttgaggccgccaaaagaaccatcattaatgtccttgaacaaacaatagaccca

SEQ ID NO: 83755 - DNA, 80 bp, synthetic construct
  source 1..80: mol_type = other DNA
gacgttcgctcaagcttgtgcatcccttgataaaaccacctccagtggccatccacaccacataaggaaaaatgactgct

SEQ ID NO: 83756 - DNA, 80 bp, synthetic construct
  source 1..80: mol_type = other DNA
ggaacggggactccttcacaggcaagttggcagatcaggcctcaaaagccaatttgatgtatgaagaggggaagaacatg

SEQ ID NO: 83757 - DNA, 80 bp, synthetic construct
  source 1..80: mol_type = other DNA
tttggggctcagacctagcaaccatgatccggtgtgctcgggcgtttgggggtctaatggaagaacttaaggcccactgt

SEQ ID NO: 83758 - DNA, 80 bp, synthetic construct
  source 1..80: mol_type = other DNA
aattttcctcagagccacacttggctcagaaagttgctgaggatctcctttccccaagtgtgatggatgtgggtgatttc

SEQ ID NO: 83759 - DNA, 80 bp, synthetic construct
  source 1..80: mol_type = other DNA
actgagggacctctgatcatttctgaagacctagatggcttgacctttctgcggagaaccgtgacccgtgacccagccgg

SEQ ID NO: 83760 - DNA, 80 bp, synthetic construct
  source 1..80: mol_type = other DNA
ttccccaggtgaagtattgctaaatttggaattaggtcctgaactgaatccattcttggcgcacctttcgagaatgtaca

SEQ ID NO: 83761 - DNA, 80 bp, synthetic construct
  source 1..80: mol_type = other DNA
atccctccgcatttccctcttgagaatttgagtcctggacaaattaccatgttccctcatgtaattattgatgttagaac

SEQ ID NO: 83762 - DNA, 80 bp, synthetic construct
  source 1..80: mol_type = other DNA
cattataatcagcaacccgagccccgtatgaggcttgtggctatgttgtatactcctcttagatctaatggctctggtga

SEQ ID NO: 83763 - DNA, 80 bp, synthetic construct
  source 1..80: mol_type = other DNA
tgtgatgatatccggcaaccccgggatagggaagactcatctcgccagggaattagccaagaaaatcgcaggcaccctca

SEQ ID NO: 83764 - DNA, 80 bp, synthetic construct
  source 1..80: mol_type = other DNA
agggtctgttgttctgggcacttgggaagaaagtgaccttgaccttaatcaacccacaagattcacacctgttggcttgt

SEQ ID NO: 83765 - DNA, 80 bp, synthetic construct
  source 1..80: mol_type = other DNA
ttaatacagaccacttcgatcagtgggttctacctaactattctggaagactgaccttgaatatgaatttggcaccctct

SEQ ID NO: 83766 - DNA, 80 bp, synthetic construct
  source 1..80: mol_type = other DNA
ttaggtacaccaatcctgatacgggtcgagttttgtttgaggctaaattacacaggcaaggattcatcacagtggcaaat

SEQ ID NO: 83767 - DNA, 80 bp, synthetic construct
  source 1..80: mol_type = other DNA
gacttgctggtgacatagtcaccaatggtattggatcacttgtgaatgctggagcaaacgcaataaaccaaaaagtggac

SEQ ID NO: 83768 - DNA, 80 bp, synthetic construct
  source 1..80: mol_type = other DNA
ttctttctccggtgggttcactagctcttcccatgctagaactcttgatttgcccaagaagacaacagctgcaccagccc

SEQ ID NO: 83769 - DNA, 80 bp, synthetic construct
  source 1..80: mol_type = other DNA
cgacgcctgtgtctagacccagttcttctgcttctacagtttccactcgctcaacaatcattagcggatcttctaacttt

SEQ ID NO: 83770 - DNA, 80 bp, synthetic construct
  source 1..80: mol_type = other DNA
ccttcctcgattaggagcacctctagtgtttcttcccaatctaccccctcttcctcccgggttagtgaatgggtacacaa

SEQ ID NO: 83771 - DNA, 80 bp, synthetic construct
  source 1..80: mol_type = other DNA
tcctcccgggttagtgaatgggtacacaatcaaaatagggcgctggagccttacatgaggggagcgctacaaacagctta

SEQ ID NO: 83772 - DNA, 80 bp, synthetic construct
  source 1..80: mol_type = other DNA
cactatttgtatataatgcaatgggccttgtcttcatatgtgtaaagaatggaaacatgcggtgcactatttgtatataa

SEQ ID NO: 83773 - DNA, 80 bp, synthetic construct
  source 1..80: mol_type = other DNA
actatgaaatgcagggccccgaggatatcgcggttgaagtcgtaccggtgatcctcggcggtataggcatggtacttgga

SEQ ID NO: 83774 - DNA, 80 bp, synthetic construct
  source 1..80: mol_type = other DNA
cccagggttccttcccccaatagggaaggaaaacatgaaaccactcctagagctccccccccgaacaagggaggaaaggc

SEQ ID NO: 83775 - DNA, 80 bp, synthetic construct
  source 1..80: mol_type = other DNA
cccagggttccttcccccaatagggagggaaaacatgaaaccactcctagagctccccccccgaacaagggaggaaaggc

SEQ ID NO: 83776 - DNA, 80 bp, synthetic construct
  source 1..80: mol_type = other DNA
ttcagttggcaccacagggaggctttgataagaacgggaacacccctcatgggaaaggtgtcatgaaaacgctaaccaca

SEQ ID NO: 83777 - DNA, 80 bp, synthetic construct
  source 1..80: mol_type = other DNA
cactcactcatcgcccgcgccacgggcctcctacacgaaagattggatgaattcgacctgcagggacccgagttgcccgt

SEQ ID NO: 83778 - DNA, 80 bp, synthetic construct
  source 1..80: mol_type = other DNA
tatgggcttatggaaaccataaaggtgggtaacaaattgaaaggcgtcaagactctagaacaactcaaggacgctctaaa

SEQ ID NO: 83779 - DNA, 80 bp, synthetic construct
  source 1..80: mol_type = other DNA
gtgtcaaaaaggttgtagaccacaagatccaaaccaacaacgagctcaattccgcactcaacaacctgcgcggcgccaga

SEQ ID NO: 83780 - DNA, 80 bp, synthetic construct
  source 1..80: mol_type = other DNA
taacatcccaccaataccacccccaccgcccaacggggaggacatagtcatcaaatataccaaacaggatgacgcggttg

SEQ ID NO: 83781 - DNA, 80 bp, synthetic construct
  source 1..80: mol_type = other DNA
gtgagatactatgttaaatgcgttcaagagatggtatattccctccttcaaattgctggcgcagccttcgtcacctcaag

SEQ ID NO: 83782 - DNA, 80 bp, synthetic construct
  source 1..80: mol_type = other DNA
aatgacacggaggttgaacgtcagcagcatttgggtcagaccagaaaagcaagtggaggccactgaggaacccccatccc

SEQ ID NO: 83783 - DNA, 80 bp, synthetic construct
  source 1..80: mol_type = other DNA
ccccaactgaggactggactataaccccagcaaatgcagtccaggaaggtaaaaagggcaagaacaagagcggcagaggc

SEQ ID NO: 83784 - DNA, 80 bp, synthetic construct
  source 1..80: mol_type = other DNA
aaataaaaatcagacagagggtctttcgtccgaccaggaaacaacgcaaggaagagagggcaactctaggactggtcaca

SEQ ID NO: 83785 - DNA, 80 bp, synthetic construct
  source 1..80: mol_type = other DNA
attacaatgagaaaatagactttgaagcgcctcccagcctttggtcccgaatagtcaacttcggatcaggttggggtttt

SEQ ID NO: 83786 - DNA, 80 bp, synthetic construct
  source 1..80: mol_type = other DNA
tgggtttcttccaacttgctcatcacatcaacacatgtcatccccccgaacatgactgaggcctttggtgtaccaataag

SEQ ID NO: 83787 - DNA, 80 bp, synthetic construct
  source 1..80: mol_type = other DNA
aaggggtgcccaccgtcgccacggttgatgttccccccacacacaacaccgcttacagtgtcccccccctggatcagagg

SEQ ID NO: 83788 - DNA, 80 bp, synthetic construct
  source 1..80: mol_type = other DNA
tggtcttacgctcaggcctgtgcctctctggacaaaacaacatccagtggccatccccaccatatgaaaaagaatgtcaa

SEQ ID NO: 83789 - DNA, 80 bp, synthetic construct
  source 1..80: mol_type = other DNA
gaggctcctatggggttcagatgtgggcacaatgatccgctgtgctagggcttttggaggcctcatggatgagatgaaag

SEQ ID NO: 83790 - DNA, 80 bp, synthetic construct
  source 1..80: mol_type = other DNA
agattctcagctgaacctgaattggcccaaattgtatctgaagatctcctagcccccagcgtggtggacgttggcgactt

SEQ ID NO: 83791 - DNA, 80 bp, synthetic construct
  source 1..80: mol_type = other DNA
tcccaacaagaccagacaagacagaggggccactcatagtcaaagagaaccttgatggcttgaccttcctgaggagggat

SEQ ID NO: 83792 - DNA, 80 bp, synthetic construct
  source 1..80: mol_type = other DNA
gtcgttgctgggggaggcagcattacacgggccagctttctacaagaaagtcagtaaattagttatcactgagctcaaag

SEQ ID NO: 83793 - DNA, 80 bp, synthetic construct
  source 1..80: mol_type = other DNA
ctttgcacgcatagagctcactcccctctctctatactggagaacagtctacactccaccttacctgatagccccagaaa

SEQ ID NO: 83794 - DNA, 80 bp, synthetic construct
  source 1..80: mol_type = other DNA
gtgccaccttactttccagtggaaaatcttagcccttcccaaataacaatgttcccgcatgtgattgtcgatgttagaac

SEQ ID NO: 83795 - DNA, 80 bp, synthetic construct
  source 1..80: mol_type = other DNA
cttagaacctgtattgctcccaatgcctgatgtcagaagcaccctctttcacttcaatcaaaaggatgaacctaagatga

SEQ ID NO: 83796 - DNA, 80 bp, synthetic construct
  source 1..80: mol_type = other DNA
gacttgttgccatgctttacacccctcttcgctccaatggctctggtgacgacgttttcactgtctcatgtaggatcctc

SEQ ID NO: 83797 - DNA, 80 bp, synthetic construct
  source 1..80: mol_type = other DNA
actaggccctcccctgaatttgatttcacatacttggtgccaccaacagtagaatcaaagaccaagccattcacactacc

SEQ ID NO: 83798 - DNA, 80 bp, synthetic construct
  source 1..80: mol_type = other DNA
ctgtgctgaccctgggagaactgtccaattctagattccctctctctattgatgaaatggtcaccagccctaatgagtcc

SEQ ID NO: 83799 - DNA, 80 bp, synthetic construct
  source 1..80: mol_type = other DNA
atagttgttcagccacagaatggcagggtcacactagatggggagctgttaggcacaacccaactgcaagcatgtaacat

SEQ ID NO: 83800 - DNA, 80 bp, synthetic construct
  source 1..80: mol_type = other DNA
ttgctccataagggggaaagtgacaggacaggtccctaatgaacaacacatgtggaacctggagattacaaacctaaatg

SEQ ID NO: 83801 - DNA, 80 bp, synthetic construct
  source 1..80: mol_type = other DNA
ccctaaggaaactccatggggagtcattcccatatacagcctttgacaacaattgctactccttctgctgctgggtcctg

SEQ ID NO: 83802 - DNA, 80 bp, synthetic construct
  source 1..80: mol_type = other DNA
tccaacatttctatcaggaatctgccccatctctgggggatgtggccttagtcaggtacgtcaacccagacaccgggcgc

SEQ ID NO: 83803 - DNA, 80 bp, synthetic construct
  source 1..80: mol_type = other DNA
gtcctttttgaggccaaactccacaaaggtgggttcctgaccgtgtcaagcactagcacagggcctgttgtggtcccagc

SEQ ID NO: 83804 - DNA, 80 bp, synthetic construct
  source 1..80: mol_type = other DNA
caatggctatttcagatttgattcctgggttaatcaattttactctcttgcccccatgggaactgggaatgggcgcagaa

SEQ ID NO: 83805 - DNA, 80 bp, synthetic construct
  source 1..80: mol_type = other DNA
aaacagggagtcctagctgctgggggtttctcaccaactgatgcagccagaggagctgtcaatgcacccatgacccaagc

SEQ ID NO: 83806 - DNA, 80 bp, synthetic construct
  source 1..80: mol_type = other DNA
actggattggagtggcactaggtactgggcccctggttcaatgaagaccaccagctattctggaaagtttgtgtccatga

SEQ ID NO: 83807 - DNA, 80 bp, synthetic construct
  source 1..80: mol_type = other DNA
gctcaacaggaaatttgtgtcaaggaccacgggtttctacaggccctaccaagagtggaacagaaaacctttgccaacca

SEQ ID NO: 83808 - DNA, 80 bp, synthetic construct
  source 1..80: mol_type = other DNA
atcctgttaggcaggttgagttcccgcagcccaaaaagagtgcggccataccatcaagcgccagctctgtgtcttctggt

SEQ ID NO: 83809 - DNA, 80 bp, synthetic construct
  source 1..80: mol_type = other DNA
aggaccaattttacaaattctactcaatcaactgtagttagcacttcctcaatgccaccttctaggggttcgtctgctcc

SEQ ID NO: 83810 - DNA, 80 bp, synthetic construct
  source 1..80: mol_type = other DNA
ttctactctgtcaagggccacaactagaacctccaattgggttgaggaacaaaacaggaatttggaaccctacatgaggg

SEQ ID NO: 83811 - DNA, 80 bp, synthetic construct
  source 1..80: mol_type = other DNA
gcgccctccaaacaacatttgtcacccccccttccagccgggcatctagcaatggtacagtctcaactgtaccaaaaggt

SEQ ID NO: 83812 - DNA, 80 bp, synthetic construct
  source 1..80: mol_type = other DNA
tggatgaaggaaagctcaagaaagtggccaatgtgcttctatgtggtctctctgggcttttcactaggcccatcaaggac

SEQ ID NO: 83813 - DNA, 80 bp, synthetic construct
  source 1..80: mol_type = other DNA
taaattctacatctagcctctttgccaacatgactgttggcctgaagagggccctgggggcgagaccaaaacaacccgcc

SEQ ID NO: 83814 - DNA, 80 bp, synthetic construct
  source 1..80: mol_type = other DNA
ctcatagggaagttgaggccactaaacatactaaacatcatcaccaattgcgactggaccttccccggagttgtggaggc

SEQ ID NO: 83815 - DNA, 80 bp, synthetic construct
  source 1..80: mol_type = other DNA
tctcatactgcttgcagagctctttggagttttctggacaccaccagacatttccaccttcatagcttcacttctgggtg

SEQ ID NO: 83816 - DNA, 80 bp, synthetic construct
  source 1..80: mol_type = other DNA
taactttagccccccagggcgggtttgacaagaatggtaacactccacacggtaagggtaccatgcggtccctgacccag

SEQ ID NO: 83817 - DNA, 80 bp, synthetic construct
  source 1..80: mol_type = other DNA
gggtccctgactgcaagagttgcgggccttgtccatgagaggagagatgagttccaactccaaggaaacgacctccaaac

SEQ ID NO: 83818 - DNA, 80 bp, synthetic construct
  source 1..80: mol_type = other DNA
cagctgcttccaagacctcgtctacactctcatacaggttgccggagcatcattcgttgtcaacagaatttccaaaaggt

SEQ ID NO: 83819 - DNA, 80 bp, synthetic construct
  source 1..80: mol_type = other DNA
actgtgcagtttgatgcaaagtcggaaactataatcgggctgccggacttgacaacggtgcaaaacgagcatgaaaacac

SEQ ID NO: 83820 - DNA, 80 bp, synthetic construct
  source 1..80: mol_type = other DNA
ttatcatctcagttcaggagggtctgccatcaggagtcccatgtacatcacaatggaactcaatagcacactggatccta

SEQ ID NO: 83821 - DNA, 80 bp, synthetic construct
  source 1..80: mol_type = other DNA
tggacaaggggacctaaccacgagaacccgtacgagagcatggtccctcattcccagcgagccacacagcttatggctct

SEQ ID NO: 83822 - DNA, 80 bp, synthetic construct
  source 1..80: mol_type = other DNA
ggtcccacctacagttgagtctaaaactaagaatttcacccttcccgttcttagagtctcagagatgacaaattcaaggt

SEQ ID NO: 83823 - DNA, 80 bp, synthetic construct
  source 1..80: mol_type = other DNA
ctacgggcctcgtcccagagatcaacaacgagaccctccctttggaaccagttgcgggtgcagcaatcgccgcgcctgtc

SEQ ID NO: 83824 - DNA, 80 bp, synthetic construct
  source 1..80: mol_type = other DNA
tgttagaacccttgaacccatcatgataccactccctgatgttaggaacaccttctttcattacaacaatcaacccgcca

SEQ ID NO: 83825 - DNA, 80 bp, synthetic construct
  source 1..80: mol_type = other DNA
gtgctttcaggggaagactaacagcagatgtagacggaagtcacgatgacagatggcacatgcagttgaccaacctcaat

SEQ ID NO: 83826 - DNA, 80 bp, synthetic construct
  source 1..80: mol_type = other DNA
tgccaaaattaggatcagtcaactttggtagtactagcaccgacttccaactacaacaacccaccaaattcacaccagtt

SEQ ID NO: 83827 - DNA, 80 bp, synthetic construct
  source 1..80: mol_type = other DNA
ggaatcaagattgaaagtggacacgaatttgatcagtgggccctacctagatactcaggtcatttgaccctcaatatgaa

SEQ ID NO: 83828 - DNA, 80 bp, synthetic construct
  source 1..80: mol_type = other DNA
tcagtgatggtgtcatcgattgcttgttgcctcaggagtggatacagcacttctatcaggagtctgctccatcccagtct

SEQ ID NO: 83829 - DNA, 80 bp, synthetic construct
  source 1..80: mol_type = other DNA
ctctcttcatcctcaggtagtatctacagcctttcaacacaaagtactgttttgactaaaccttcttctggttcttccgt

SEQ ID NO: 83830 - DNA, 80 bp, synthetic construct
  source 1..80: mol_type = other DNA
ggagcctcagcccttacatgagaggtgctctcaatatatctcatgtaacacctccatcaagtagggcttcgagttcggga

SEQ ID NO: 83831 - DNA, 80 bp, synthetic construct
  source 1..80: mol_type = other DNA
aagatgccgtgttggaccttgaggcaatagaaaacaaccacatgacagcactgctcaaagacaaagacagtctcgcaacc

SEQ ID NO: 83832 - DNA, 80 bp, synthetic construct
  source 1..80: mol_type = other DNA
gaattaggccagttgttgtcatgatgtctggtagaccaggtatagggaagacacacctggccagggaagtggcaaagaag

SEQ ID NO: 83833 - DNA, 80 bp, synthetic construct
  source 1..80: mol_type = other DNA
caaggcctcccacgcctgagctgattaaaaatatgcccccccccccgcctaacggtgaagacgagccaaccgttaggtac

SEQ ID NO: 83834 - DNA, 80 bp, synthetic construct
  source 1..80: mol_type = other DNA
ctctgatcgctagggcgtcgggcctcctacacgaaagaatggacgagttcgaactccagggcccagcaatcaccactttc

SEQ ID NO: 83835 - DNA, 80 bp, synthetic construct
  source 1..80: mol_type = other DNA
aacttcgaccgtaacaaaattgccgcgttcagacaattggctgcggaaaataaatatggaataatggacaccatgcggat

SEQ ID NO: 83836 - DNA, 80 bp, synthetic construct
  source 1..80: mol_type = other DNA
ctataatggctctacattcagtcttgagtctgatggcaaaggcaaggttttggtagagaagatcaaaagtgccactattc

SEQ ID NO: 83837 - DNA, 80 bp, synthetic construct
  source 1..80: mol_type = other DNA
aaaccagtaatgaactggctggggctctgcgccacctcaggagtgccagaataaggtattatgtgaaatgtgtgcaagaa

SEQ ID NO: 83838 - DNA, 80 bp, synthetic construct
  source 1..80: mol_type = other DNA
gctatctactctattcttcagattgctggtgccgcattcgtcaccacgcgcattgcacgccgcatgaacatacaagaact

SEQ ID NO: 83839 - DNA, 80 bp, synthetic construct
  source 1..80: mol_type = other DNA
ctgggcaaaaccaccaatagaccagggtgaatcagagcccaaagaagagaaccctaagttggaggacgatgaattcatca

SEQ ID NO: 83840 - DNA, 80 bp, synthetic construct
  source 1..80: mol_type = other DNA
gaagttacaaaaggggtctccggcctacctgagctcacgacagtcacacaaccagactcaaccaacacggggtttagtgt

SEQ ID NO: 83841 - DNA, 80 bp, synthetic construct
  source 1..80: mol_type = other DNA
agggctacgttgggactggtgactggttcagaaatcaggaagaggaaccctgatgattttaagcccaaaggaaagctgtg

SEQ ID NO: 83842 - DNA, 80 bp, synthetic construct
  source 1..80: mol_type = other DNA
gggtgtcaccaagcctgtttataacatcaactcacgtgatcccttctggtgtaacagaggtattcggcgtgcccgttaag

SEQ ID NO: 83843 - DNA, 80 bp, synthetic construct
  source 1..80: mol_type = other DNA
caagtccaaattcacaagtcaggcgaattttgccgtttcagatttccaaaaccaatcaggacagatgtgacaggaatgat

SEQ ID NO: 83844 - DNA, 80 bp, synthetic construct
  source 1..80: mol_type = other DNA
tagggacaactcccggagactgcggctgcccatatatttacaagagaggtaacgattacatcgttatcggagtccacaca

SEQ ID NO: 83845 - DNA, 80 bp, synthetic construct
  source 1..80: mol_type = other DNA
gcgaaggtggaaatgacaccgctttcgttatactggcgtgtggtgtacaccccccagtacctcatttcccctgacacgct

SEQ ID NO: 83846 - DNA, 80 bp, synthetic construct
  source 1..80: mol_type = other DNA
agaactgaacccttatctggcacatttagctaggatgtacaatggttatgcgggtggtatggaagtgcaagtgatgctcg

SEQ ID NO: 83847 - DNA, 80 bp, synthetic construct
  source 1..80: mol_type = other DNA
caggagactcgacggagaggcgtttccatataccgcatttgacaacaattgttacgccttttgctgctgggtgttagacc

SEQ ID NO: 83848 - DNA, 80 bp, synthetic construct
  source 1..80: mol_type = other DNA
atcaagcgccagctctgtgtcctctggtaggaccaatttgacaaattccacccaatcaactgttgtcagtacttcctcac

SEQ ID NO: 83849 - DNA, 80 bp, synthetic construct
  source 1..80: mol_type = other DNA
atgattccaagatcaagaaagtggcgaacatatttttatgctctttatccacactattcactaggcctattaaagacatt

SEQ ID NO: 83850 - DNA, 80 bp, synthetic construct
  source 1..80: mol_type = other DNA
ccttcatgggggttgtagagctgatcgtcctcatggcagaattgttcgatatattctggactccaccagatatctcgagc

SEQ ID NO: 83851 - DNA, 80 bp, synthetic construct
  source 1..80: mol_type = other DNA
tttattgcatcgctgttgccagattttcatcttcaaggcccagaggacttagctagggacctggtcccactcatactagg

SEQ ID NO: 83852 - DNA, 80 bp, synthetic construct
  source 1..80: mol_type = other DNA
atatggcacttgacctgctacgccggtcacaaacaccttccccagctcgacaagagagtccccccaaagatcagagagat

SEQ ID NO: 83853 - DNA, 80 bp, synthetic construct
  source 1..80: mol_type = other DNA
cagggggaaaagtcggtcttgtgccgcgagagtccatagaccactgggacggttatcatggtgaggacgttctgctctgg

SEQ ID NO: 83854 - DNA, 80 bp, synthetic construct
  source 1..80: mol_type = other DNA
ttcaaggggccacctacaattttgacgaggatagggtggccgctttcaccaacttagcacgcgccaatggcctggggctc

SEQ ID NO: 83855 - DNA, 80 bp, synthetic construct
  source 1..80: mol_type = other DNA
ttcaaggggccacctacaattttgacgaggatagggtggccgctttcaccaacttagcacgcgccaatggcctggtgctc

SEQ ID NO: 83856 - DNA, 80 bp, synthetic construct
  source 1..80: mol_type = other DNA
ataagcatggcaacattgggtaagaaattgaggggtgtcaaatcaatggaggggctgcgcaatgcactattgggctataa

SEQ ID NO: 83857 - DNA, 80 bp, synthetic construct
  source 1..80: mol_type = other DNA
gaaccgtttcagaggttaaaagggccatgaagtgggatgttgaaccagaacaccgggaaagtacagcaagagcctggtgc

SEQ ID NO: 83858 - DNA, 80 bp, synthetic construct
  source 1..80: mol_type = other DNA
agtgaggagggcaagaacaaaggtaagaccaagaagggtcgtgggcgaaagtctaatttcaatgccttctccagacgcgg

SEQ ID NO: 83859 - DNA, 80 bp, synthetic construct
  source 1..80: mol_type = other DNA
gagatggcggaataggtgaaactgaggcagaaatccgccatcgggtcttctataaatcaaaatctggtatgaggaaacaa

SEQ ID NO: 83860 - DNA, 80 bp, synthetic construct
  source 1..80: mol_type = other DNA
tggggtttctgggttagctcaacagtgttcatcaccacgacccatgtcataccacctggggccaaggaagtttttggtga

SEQ ID NO: 83861 - DNA, 80 bp, synthetic construct
  source 1..80: mol_type = other DNA
gcgcaacaatgagaagctgtttgatgctgggggagtcactccatcaactctacccagcacatttgaaagggctgaaacaa

SEQ ID NO: 83862 - DNA, 80 bp, synthetic construct
  source 1..80: mol_type = other DNA
tggcgaccgcaataagggccattatgcaggacacccaatattgagatacgggaatggcccttcactctcaactaaaacaa

SEQ ID NO: 83863 - DNA, 80 bp, synthetic construct
  source 1..80: mol_type = other DNA
gaagggggcccatcactacaacaagttctaagggaccagctaaaaccatttgctgaacctcgaggcagattacctgaggc

SEQ ID NO: 83864 - DNA, 80 bp, synthetic construct
  source 1..80: mol_type = other DNA
ctttggggagctgaccttggtactgtcatacgtgctgctagggcctttggaccattctgtgaggccataaagccacatgt

SEQ ID NO: 83865 - DNA, 80 bp, synthetic construct
  source 1..80: mol_type = other DNA
acaatgatgttggtgaccaacaagctgtatcatggtctgctaatgatggagtgaatattggcgttagtgatctgaccact

SEQ ID NO: 83866 - DNA, 80 bp, synthetic construct
  source 1..80: mol_type = other DNA
tgggtaccaaggtcgacttgaccgcaactccattgaaagacaactctggtggacccgcggacccaaccatgaagacccgt

SEQ ID NO: 83867 - DNA, 80 bp, synthetic construct
  source 1..80: mol_type = other DNA
gtccatggaccattttggaatatgtgccccctcccaccattggacgctcgcaacaatggtcctgccaaagagcctctcat

SEQ ID NO: 83868 - DNA, 80 bp, synthetic construct
  source 1..80: mol_type = other DNA
aggaagggggtctggagatctatatccctgggtggcaggccatgttccgctggatgcgattccatgacttaagtttgtgg

SEQ ID NO: 83869 - DNA, 80 bp, synthetic construct
  source 1..80: mol_type = other DNA
cagctgaacctttaccaataaaaccagtggccggggctgcgactgcggttgcaaccgccggtcaggtaaatatgattgac

SEQ ID NO: 83870 - DNA, 80 bp, synthetic construct
  source 1..80: mol_type = other DNA
atatgcaggtccgcataatgcttgctggtaatgccttttcagctggaaagattattgtgtgctgcataccgccgggtttt

SEQ ID NO: 83871 - DNA, 80 bp, synthetic construct
  source 1..80: mol_type = other DNA
tcttctcaatctatttctattgctcaagctacaatgttcccacatgtcatagctgatgttagagtgttagaacctattga

SEQ ID NO: 83872 - DNA, 80 bp, synthetic construct
  source 1..80: mol_type = other DNA
tgtacccttagatgatgttagaaatgtcctttttcataataatgataacccccaaacgatgagattgctttgcatgttgt

SEQ ID NO: 83873 - DNA, 80 bp, synthetic construct
  source 1..80: mol_type = other DNA
atacaccccttcggtctggtggtacatcttcaggtacagatccttttgtcattgctggtcgtgtcttgacctgccccaca

SEQ ID NO: 83874 - DNA, 80 bp, synthetic construct
  source 1..80: mol_type = other DNA
cctgattttagtttcttgttccttgtccctcctgatatcgagcaaagaactaagccattcagtgtacccaatatccctat

SEQ ID NO: 83875 - DNA, 80 bp, synthetic construct
  source 1..80: mol_type = other DNA
gaacctgatgtccaattcccgtgtttcaatgttgattgatggtatgatggtttcaaatgatcagaatcaagtcccccagt

SEQ ID NO: 83876 - DNA, 80 bp, synthetic construct
  source 1..80: mol_type = other DNA
ttcagaatggtcgagtcactttagatggacagctgcagggtaccaccacagtttcagctgcgtgtgtagcaaggatgagg

SEQ ID NO: 83877 - DNA, 80 bp, synthetic construct
  source 1..80: mol_type = other DNA
ggacgcatttttaataataatggcaattatggtgtgaacctgactgaactggatggcaatccttatcatgcctttgatag

SEQ ID NO: 83878 - DNA, 80 bp, synthetic construct
  source 1..80: mol_type = other DNA
cccggctcctttaggctttcctgactttgggaattgtgatttgcacatgacctttgttaaaattaaccccaatgagttgt

SEQ ID NO: 83879 - DNA, 80 bp, synthetic construct
  source 1..80: mol_type = other DNA
cctctggagacccttctggcaaagtggtcattcattcctacgatgccacttttgccccccatcttggtactgtcaaactg

SEQ ID NO: 83880 - DNA, 80 bp, synthetic construct
  source 1..80: mol_type = other DNA
gagaatgatgatgagctagctcggtttgtgggtaaggaggtagtactggagctgacgtgggtttccaacagagagggtgc

SEQ ID NO: 83881 - DNA, 80 bp, synthetic construct
  source 1..80: mol_type = other DNA
cacccttaatctatgggctgttccaaattatggttccagtttgacacaggcgtcacagcttgccccaccaatttaccccc

SEQ ID NO: 83882 - DNA, 80 bp, synthetic construct
  source 1..80: mol_type = other DNA
ctgggtttggtgaggctattgtgtatttcacctctacttttccaacagtcagcaacccaaaagtcccatgtacacttcct

SEQ ID NO: 83883 - DNA, 80 bp, synthetic construct
  source 1..80: mol_type = other DNA
caagaatttgtttcacattttgtcaatgaacaggcccccacacgcggcgatgccgctcttcttcattatgttgatcctga

SEQ ID NO: 83884 - DNA, 80 bp, synthetic construct
  source 1..80: mol_type = other DNA
cacacatcgtaatcttggagagtttaagatgtaccctgagggctacatgacatgtgtccctaatgctggtggtgggccac

SEQ ID NO: 83885 - DNA, 80 bp, synthetic construct
  source 1..80: mol_type = other DNA
ctgccggtgcggctaggaggcttggtcttaggagatcataatggcccaggctgtcttgggagccattgctgcgactgcag

SEQ ID NO: 83886 - DNA, 80 bp, synthetic construct
  source 1..80: mol_type = other DNA
aacaggatttaaatatgcagtccctatcctttcaacatgataaagaaatgttaggcttacaagtagatgcttctaatgct

SEQ ID NO: 83887 - DNA, 80 bp, synthetic construct
  source 1..80: mol_type = other DNA
ttattgcaaagaaatttggccacaagatataatttgctgagtgcagcaggcttgtcgtctgcagatgctgctagggtgat

SEQ ID NO: 83888 - DNA, 80 bp, synthetic construct
  source 1..80: mol_type = other DNA
agcaggtgctccaccaactaaagtagtggattggaatggagtcagaatatctgcccccacatcaagtgcaataaccctaa

SEQ ID NO: 83889 - DNA, 80 bp, synthetic construct
  source 1..80: mol_type = other DNA
aatctggcagttttatgtcagtgccagtcatgaattacaaaaccaacaagaatgtgacaggcatagacaacccaaattat

SEQ ID NO: 83890 - DNA, 80 bp, synthetic construct
  source 1..80: mol_type = other DNA
gcacccagtggctcatcaatggttagtcgcaccagccaatgggtggaatctcaaaattcattgcgctcgcttgatccttt

SEQ ID NO: 83891 - DNA, 80 bp, synthetic construct
  source 1..80: mol_type = other DNA
ccataggagcgcgttgcaaacaacgtgggttactcctccaggatccacatctgtgtcaacagtgtcaagcacttcaacaa

SEQ ID NO: 83892 - DNA, 80 bp, synthetic construct
  source 1..80: mol_type = other DNA
tacctaggtattttaatactgaaagacttccgttattcgcaaatctgcggaagtaagtttttgtaatataaagtgggcat

SEQ ID NO: 83893 - DNA, 80 bp, synthetic construct
  source 1..80: mol_type = other DNA
ccaatgaccgtcaacgcctcacctatgatcaacttaaagaattggagaatgaaccatggccatatgccgctgttactaac

SEQ ID NO: 83894 - DNA, 80 bp, synthetic construct
  source 1..80: mol_type = other DNA
tgtaatataaagtgggcattatattcagattggcttttgattataattaatttaatttggctgattagaaatttaatgtt

SEQ ID NO: 83895 - DNA, 80 bp, synthetic construct
  source 1..80: mol_type = other DNA
cggtttgcctactctgatgacgcattcctgctgctcttctaatggattgcctgatgacaggttaaaaaactgtgttattg

SEQ ID NO: 83896 - DNA, 80 bp, synthetic construct
  source 1..80: mol_type = other DNA
ttcaaagaaatctggacgaggttatttccagaattagactgcttttttgaatttgcccaccactctggacgacgcaaaca

SEQ ID NO: 83897 - DNA, 80 bp, synthetic construct
  source 1..80: mol_type = other DNA
attcattgaggagcagcaggcgattcactgctgctcttcataatggattacctgatgacaggttaaaaaactgtgttatt

SEQ ID NO: 83898 - DNA, 80 bp, synthetic construct
  source 1..80: mol_type = other DNA
ttattcaaggaaatctggacgaggttatttccagaattagactgtttttttgaatttgcccaccataggaacggacgcaa

SEQ ID NO: 83899 - DNA, 80 bp, synthetic construct
  source 1..80: mol_type = other DNA
gcgggaatacgcaaaattcatgcgattcactgctgcccttcataatggattacctgatgacaggttgaaaaactgtgtta

SEQ ID NO: 83900 - DNA, 80 bp, synthetic construct
  source 1..80: mol_type = other DNA
ttaaagaaatctggacaaggttatttccagaattggactgcttttttgaatttgcccaccactcaggacgacgcaatttt

SEQ ID NO: 83901 - DNA, 80 bp, synthetic construct
  source 1..80: mol_type = other DNA
cccgggtcatcgcaagtcaggcgattcactgctgctcttcataatggattgcctgatgacaggttaaagaactgtgttat

SEQ ID NO: 83902 - DNA, 80 bp, synthetic construct
  source 1..80: mol_type = other DNA
cgcggggcatcagcagttcaggcgattcactgctgcccttcataatggactacctgatgacaggttgaaaaactgtgtta

SEQ ID NO: 83903 - DNA, 80 bp, synthetic construct
  source 1..80: mol_type = other DNA
tttaaagaaatttggacaaagttatttccagaattggactgcttttttgaatttgcacaccatagggacgggacgcagca

SEQ ID NO: 83904 - DNA, 80 bp, synthetic construct
  source 1..80: mol_type = other DNA
ttccactggcactgttattattagcccatctaccagcgctactatacgaaaaatttaccctgcttttatgctgggttctt

SEQ ID NO: 83905 - DNA, 80 bp, synthetic construct
  source 1..80: mol_type = other DNA
tcatacccacttagtatgaaatccgatctcagtgttagttctgctggtccaatatcccagtttaattataaacagtcctt

SEQ ID NO: 83906 - DNA, 80 bp, synthetic construct
  source 1..80: mol_type = other DNA
ctatctaaggtgccgaaagtcctccgatccgagctgcaagttttcctcacccagagattgttcaacaccatgcaaagact

SEQ ID NO: 83907 - DNA, 80 bp, synthetic construct
  source 1..80: mol_type = other DNA
tcagatggaagggtctgttcaacccttactcaggaaacaacatagaagaggcacagactcttataagctgctgctacaat

SEQ ID NO: 83908 - DNA, 80 bp, synthetic construct
  source 1..80: mol_type = other DNA
gtctgctgccccgttccaactgcacaaagtaggagggaacatcagatggaagggtctgttcaacccttactcaggaaaca

SEQ ID NO: 83909 - DNA, 80 bp, synthetic construct
  source 1..80: mol_type = other DNA
agcctataataatagagaggaacacagtgcacctgaacagcactaccatagagaaggagatttgtcctaaagtggctgaa

SEQ ID NO: 83910 - DNA, 80 bp, synthetic construct
  source 1..80: mol_type = other DNA
agaggggccccaggagtgaaaggttgggcctttgacagtggaaatgatatttggatgggacgaacgatcaaagaggattc

SEQ ID NO: 83911 - DNA, 80 bp, synthetic construct
  source 1..80: mol_type = other DNA
atgaagagaattattgccttgagctgcattttctatctggccttttgtcagaaccttccagggaatgacagcagtacagc

SEQ ID NO: 83912 - DNA, 80 bp, synthetic construct
  source 1..80: mol_type = other DNA
actagagttcatcactgagggtttcacttggacaggagtaagccaaaatggaggaagcggtgcctgcaaaagagggccta

SEQ ID NO: 83913 - DNA, 80 bp, synthetic construct
  source 1..80: mol_type = other DNA
tcctgaatcttgggcaaaattgcccttccaaaactacatactggtgggacggactccaatcctccgatgacttcgccctc

SEQ ID NO: 83914 - DNA, 80 bp, synthetic construct
  source 1..80: mol_type = other DNA
aggagtgcctgattaatgatccctgggttttgcttaatgcgtcttggttcaactccttccttgtgcatgcactaaaatag

SEQ ID NO: 83915 - DNA, 80 bp, synthetic construct
  source 1..80: mol_type = other DNA
gcagaaagcaggtacagattcaaaatgagactttgtacgataatgcatcaaatggccagtatgagtcgatggaattcctt

SEQ ID NO: 83916 - DNA, 80 bp, synthetic construct
  source 1..80: mol_type = other DNA
tcgtcagtccgaaagaggcaatgaaacaattggaggaaaattcgagaatacaggaactaagcgcaagcttgccgaccaaa

SEQ ID NO: 83917 - DNA, 80 bp, synthetic construct
  source 1..80: mol_type = other DNA
gaaaagcaggggtcacaatgtacaaaatagtagtaatagttactctccttggagcagtgagagggcttgacaaaatatgc

SEQ ID NO: 83918 - DNA, 80 bp, synthetic construct
  source 1..80: mol_type = other DNA
ttgtttggtgcaatagcaggattcatagaaaacggttgggaaggaatggtagacggttggtatggattcagacaccagaa

SEQ ID NO: 83919 - DNA, 80 bp, synthetic construct
  source 1..80: mol_type = other DNA
gccaagctgctgactataagagcactcaagcagccattgaccaaatcacagggaaactgaacaggttaattgagaagacc

SEQ ID NO: 83920 - DNA, 80 bp, synthetic construct
  source 1..80: mol_type = other DNA
aatactgagtttgagtcaatagaatctgagttcagtaatattgagcaccaaattggcaatgtcatcaattggaccaagga

SEQ ID NO: 83921 - DNA, 80 bp, synthetic construct
  source 1..80: mol_type = other DNA
ttcaataaccgacatttggacttaccaagcagagctattagttgcaatggagaatcagcacacaattgacatggctgatt

SEQ ID NO: 83922 - DNA, 80 bp, synthetic construct
  source 1..80: mol_type = other DNA
cagagatgctaaacctgtatgacagagtaagaaagcagctcagacagaatgcagaagaagacgggaaggggtgttttgag

SEQ ID NO: 83923 - DNA, 80 bp, synthetic construct
  source 1..80: mol_type = other DNA
atatatcacacttgtgataattcatgcatggaaagtataaggaacaacacttatgatcattcacaatacagagaggaggc

SEQ ID NO: 83924 - DNA, 80 bp, synthetic construct
  source 1..80: mol_type = other DNA
tctcctgaataggttgaatatcaatccagtgaagttttcttcgggatacaaagacatcatactttggtttagcttcgggg

SEQ ID NO: 83925 - DNA, 80 bp, synthetic construct
  source 1..80: mol_type = other DNA
gacagtggagagcacaagcttgaataaattgtgtatgagagggagaagttacaaggatttaggcagatgccacccaatag

SEQ ID NO: 83926 - DNA, 80 bp, synthetic construct
  source 1..80: mol_type = other DNA
catcatgctttgttcttctagccgttgtactgggtcttgttttcttctgcttgaaaaatggaaacatgcaatgcacagtc

SEQ ID NO: 83927 - DNA, 80 bp, synthetic construct
  source 1..80: mol_type = other DNA
ttgttcttctagccgttgtactgggtcttgttttcttctgcttgaaaaatggaaacatgcaatgcacagtctgcatttag

SEQ ID NO: 83928 - DNA, 80 bp, synthetic construct
  source 1..80: mol_type = other DNA
gaatattgttagggacacctgtttgtgagctgcatttgactggagcctgggacactctcattgaacgggagaatgccatt

SEQ ID NO: 83929 - DNA, 80 bp, synthetic construct
  source 1..80: mol_type = other DNA
gcctattgttatccaggggcaaccataaatgaagaagcattgaggcagaaaataatggaaagtggaggtgtcagcaagat

SEQ ID NO: 83930 - DNA, 80 bp, synthetic construct
  source 1..80: mol_type = other DNA
aagtactggtttcacctatggatcttccatcaatccagctggagttactaaggcatgcttaagaaatggacaaagtagtt

SEQ ID NO: 83931 - DNA, 80 bp, synthetic construct
  source 1..80: mol_type = other DNA
tctatgcagaactcagatggctagtgtcaaagacacaaggacaaaatttccctcagacaacaaacacttaccggaacacg

SEQ ID NO: 83932 - DNA, 80 bp, synthetic construct
  source 1..80: mol_type = other DNA
gatacagcagaacatctcataatatggggaattcatcatccttctagcacacaagaaaagaataaactatacggggcaca

SEQ ID NO: 83933 - DNA, 80 bp, synthetic construct
  source 1..80: mol_type = other DNA
gtcactatacatctccgttgggagttctacatatcagaacagttttactccagttgttggggcaaggcctcaggtcaatg

SEQ ID NO: 83934 - DNA, 80 bp, synthetic construct
  source 1..80: mol_type = other DNA
gccaaagtggacggattgaatttcattggacgctagtgcaacctggtgacaacataaccttttctcacaatggaggtcta

SEQ ID NO: 83935 - DNA, 80 bp, synthetic construct
  source 1..80: mol_type = other DNA
ctaggacaccatgcagttgccaatggaaccactgtgaaaacccttacaaatgagcaggaggaagtgaccaacgctactga

SEQ ID NO: 83936 - DNA, 80 bp, synthetic construct
  source 1..80: mol_type = other DNA
atagcaccgagtagagttagcaaattaactgggagaggacttggaattcaatcagaagcatcagtagacaacaattgtga

SEQ ID NO: 83937 - DNA, 80 bp, synthetic construct
  source 1..80: mol_type = other DNA
atccaaatgcttttggagagggggctctataaatacaaagctcccttttcaaaatctgtcacccagaacagtaggtcaat

SEQ ID NO: 83938 - DNA, 80 bp, synthetic construct
  source 1..80: mol_type = other DNA
gccccaaatatgtaaataaaaggagtttactacttgcaacggggatgagaaacgttccagaagtaatgcaaggaaggggt

SEQ ID NO: 83939 - DNA, 80 bp, synthetic construct
  source 1..80: mol_type = other DNA
cgaacacaacagcactgagcaacaaagtgcttacagagtacaaggttcctggagagattttggtgcctgccaaagaaatg

SEQ ID NO: 83940 - DNA, 80 bp, synthetic construct
  source 1..80: mol_type = other DNA
ttgatctagcttcccagataatctctggcattgtagcagctgtttcagctatgatgtggatttcctactttgtgcagagt

SEQ ID NO: 83941 - DNA, 80 bp, synthetic construct
  source 1..80: mol_type = other DNA
cttcatactgtgctgcactggttgtggcacaaactgtatgggaaaacttaagtgtaatcgttgttgtgatagatacgagg

SEQ ID NO: 83942 - DNA, 80 bp, synthetic construct
  source 1..80: mol_type = other DNA
taattctacaaaagctttggccaaacaggacgcagctcagcgaatcgcttggttgctacataaggatggaggaatccctg

SEQ ID NO: 83943 - DNA, 80 bp, synthetic construct
  source 1..80: mol_type = other DNA
ctttatgaacttatgggaaaatttgcttggtggactgttttctgcaccaatgcaaatgcatcctcatctgaaggattcct

SEQ ID NO: 83944 - DNA, 80 bp, synthetic construct
  source 1..80: mol_type = other DNA
agcctcgctctggaaatcattgtcctgctggcaattcctatacttcttttgccacttatcacactcctgcaacagattgt

SEQ ID NO: 83945 - DNA, 80 bp, synthetic construct
  source 1..80: mol_type = other DNA
gtgagtgccccaagtatgtcaagtcagatagactggttttggcgaccggactaagaaatgtccctcagattgaatcgagg

SEQ ID NO: 83946 - DNA, 80 bp, synthetic construct
  source 1..80: mol_type = other DNA
tatggacttccagcggcaagaccgaataattcacaagaatattatgagatagctgggagattttcattaatatcactcgt

SEQ ID NO: 83947 - DNA, 80 bp, synthetic construct
  source 1..80: mol_type = other DNA
gaataagcagacaacaagcactaaatcttctaagatctgatccgcgagtattacgtgaatttattaatcaggataatcca

SEQ ID NO: 83948 - DNA, 80 bp, synthetic construct
  source 1..80: mol_type = other DNA
gtttttgtcactacactcactagtgattatacgattacagtctttgttactgtcaaccttgcaaaagtttgcacttatgc

SEQ ID NO: 83949 - DNA, 80 bp, synthetic construct
  source 1..80: mol_type = other DNA
aaattcgtaagtctctttgccactttaatgactttttctggtaatgtagatcttgatgcgttagctagtgatatttttga

SEQ ID NO: 83950 - DNA, 80 bp, synthetic construct
  source 1..80: mol_type = other DNA
tgtcctcagtaagtggaggcattcatccaacattcttctatctatctcacccttaaagaggtgagagcatgataaaagtt

SEQ ID NO: 83951 - DNA, 80 bp, synthetic construct
  source 1..80: mol_type = other DNA
cagccacacctggattctgtaattggcacctaaccaagaatatcaatgaaaatttccttaaacagtcagtattattctga

SEQ ID NO: 83952 - DNA, 80 bp, synthetic construct
  source 1..80: mol_type = other DNA
tgatcatctgtggttagatcctcaagcagctttttgatatacagattttccctatttttgtttctcacacacctgcttcc

SEQ ID NO: 83953 - DNA, 80 bp, synthetic construct
  source 1..80: mol_type = other DNA
tcattcaaattcaaccagttaacatctgctaactgattcagatcttcttcaagaccgaggaggtctcccaattgaagaat

SEQ ID NO: 83954 - DNA, 80 bp, synthetic construct
  source 1..80: mol_type = other DNA
ggcctcctttttatctctgttaaataggtctaagaaaaattcttcattaaattcaccatttttgagcttatgatgcagtt

SEQ ID NO: 83955 - DNA, 80 bp, synthetic construct
  source 1..80: mol_type = other DNA
attccaacaggacaaggacttcctccggatcacttacaaccaggtcactcagcctcctatcaaataaagtgatctgatca

SEQ ID NO: 83956 - DNA, 80 bp, synthetic construct
  source 1..80: mol_type = other DNA
gttagaataagctgtaaatgatgtagtccttttgtatttgtaagtttttctccatctcctttgtcattggccctcctacc

SEQ ID NO: 83957 - DNA, 80 bp, synthetic construct
  source 1..80: mol_type = other DNA
tcttctgtaccgtgctattgtggtgttgaccttttcttcgagacttttgaagaagcttgtctcttcttctccatcaaaac

SEQ ID NO: 83958 - DNA, 80 bp, synthetic construct
  source 1..80: mol_type = other DNA
atatttctgccaggttgtcttccgatctccctgtctcttctcccttggaaccgatgaccaatctagagactaacttggaa

SEQ ID NO: 83959 - DNA, 80 bp, synthetic construct
  source 1..80: mol_type = other DNA
actttatattcatagtctgagtggctcaacttatacttttgttttcttacgaaactctccgtaatttgactcacagcact

SEQ ID NO: 83960 - DNA, 80 bp, synthetic construct
  source 1..80: mol_type = other DNA
caacctcaatgtcggtgagacagtctttcaaatcaggacatgatctaatccatgaaatcatgatgtctatcatattgtat

SEQ ID NO: 83961 - DNA, 80 bp, synthetic construct
  source 1..80: mol_type = other DNA
tcaggctctgtatgttcttcagctgctctgtgctgggttggaaattgtaatcttcaaacttcgtataatacattatcggg

SEQ ID NO: 83962 - DNA, 80 bp, synthetic construct
  source 1..80: mol_type = other DNA
tgagctccaattttcataaagttctcaaattcagtgaatggtatgtggcattcttgctcaaggtgttcagacagtccgta

SEQ ID NO: 83963 - DNA, 80 bp, synthetic construct
  source 1..80: mol_type = other DNA
atgctcgaaactcagtcccaccactaacaggcatttttgaatttttgcaatgaactcactaatagatgccctaaacaatt

SEQ ID NO: 83964 - DNA, 80 bp, synthetic construct
  source 1..80: mol_type = other DNA
cctcaaaagacacctttctaaacacctttgacttttttctattcctcaaaagtctaatgaactcctctttagtgctgtga

SEQ ID NO: 83965 - DNA, 80 bp, synthetic construct
  source 1..80: mol_type = other DNA
tcacttcccctttcgtgcccatgggtctctgcagttatgaatctcatcaaaggacaggattcgactgcctccctgcttaa

SEQ ID NO: 83966 - DNA, 80 bp, synthetic construct
  source 1..80: mol_type = other DNA
tgttaagatatcatcactatcagcaaggttttcatagagctcagagaattccttgatcaagccttcagggtttactttct

SEQ ID NO: 83967 - DNA, 80 bp, synthetic construct
  source 1..80: mol_type = other DNA
tcctgctagaaagactttcatgtccttggtctccagcttcacaatgatattttggacaaggtttcttccttcaaaaaggg

SEQ ID NO: 83968 - DNA, 80 bp, synthetic construct
  source 1..80: mol_type = other DNA
aaactctttaactaatgatgcctattcacgatttttggggttgtttaacaagtataagtacttctctggtgctatggaaa

SEQ ID NO: 83969 - DNA, 80 bp, synthetic construct
  source 1..80: mol_type = other DNA
gcgttctcgttgtttttatttgcactcttccacttatatagagtgcacttatattagccgttttagtaagattagcctag

SEQ ID NO: 83970 - DNA, 80 bp, synthetic construct
  source 1..80: mol_type = other DNA
ggactgtgagcgctcttgtctacaataataaattgttagccaagaaggagctttcaggccagtgctttaaaatactctat

SEQ ID NO: 83971 - DNA, 80 bp, synthetic construct
  source 1..80: mol_type = other DNA
tactgattactatgacgttgtttatacttgcaaaagcgcagaattacggacttaatctaccaataacaggatcaatggat

SEQ ID NO: 83972 - DNA, 80 bp, synthetic construct
  source 1..80: mol_type = other DNA
gaataggttgtcaaacaacaaatgttgattcttttgaaatcatcactgaaaatgaaaaattagccatagtagatgtcgtc

SEQ ID NO: 83973 - DNA, 80 bp, synthetic construct
  source 1..80: mol_type = other DNA
ccaatcataattgagaagagcatcaactacagggactggtcaaaaccgcaatgtcgaatcacagggtttgctcctttttc

SEQ ID NO: 83974 - DNA, 80 bp, synthetic construct
  source 1..80: mol_type = other DNA
actcccctatatttaattacaataaggcaaccaaaaggctaacagtcctcgggaaggacgcaggtgcattgacagaagat

SEQ ID NO: 83975 - DNA, 80 bp, synthetic construct
  source 1..80: mol_type = other DNA
cagatacagtccactatccgaaagtctataaaacatattttgaaaaagttgaaaggttaaagaatgggacttttggccct

SEQ ID NO: 83976 - DNA, 80 bp, synthetic construct
  source 1..80: mol_type = other DNA
atggaaataatatcactgatgactgtactaatagtagtaacaacaagcaatgctgataaaatatgcattggccaccaatc

SEQ ID NO: 83977 - DNA, 80 bp, synthetic construct
  source 1..80: mol_type = other DNA
catgtcattacatatgtaaataacacatgggtgaaccgaacttatgtaaacgttagcaataccaaaattgttaatgtaca

SEQ ID NO: 83978 - DNA, 80 bp, synthetic construct
  source 1..80: mol_type = other DNA
agataggaaacatggtctcgttatggatcagccattcaattcagactggaggggaaaatcacactgagatgtgcaaccaa

SEQ ID NO: 83979 - DNA, 80 bp, synthetic construct
  source 1..80: mol_type = other DNA
aatatcaccacaagcataagaactgaggtgaaagactatgcactctttaataaacttgatgtagaaccaatgactaatga

SEQ ID NO: 83980 - DNA, 80 bp, synthetic construct
  source 1..80: mol_type = other DNA
taataccagtaataccagaccaagcagtaccaataataccagtaataccaactataccagctataggctgttgcattgta

SEQ ID NO: 83981 - DNA, 80 bp, synthetic construct
  source 1..80: mol_type = other DNA
acagaacgggttagggaattcatggagaaagaatgccctttcatcaaaccagaaataaaaccagggactccagcacagga

SEQ ID NO: 83982 - DNA, 80 bp, synthetic construct
  source 1..80: mol_type = other DNA
ctctttcaatatcaccacaggcatgaacaataggaggaaggaaaatgcaatgttttataatcttgatatagttcaactaa

SEQ ID NO: 83983 - DNA, 80 bp, synthetic construct
  source 1..80: mol_type = other DNA
agtaccagtaatagtaacattagtttggaaatggaagtaggagaaataaaaaactgctctttcaatgtcacaagaggagg

SEQ ID NO: 83984 - DNA, 80 bp, synthetic construct
  source 1..80: mol_type = other DNA
agacaagtatcagaaagaatatgcacttttttacaaacttgatttagtaacaaccaatgataaggataatacaagctata

SEQ ID NO: 83985 - DNA, 80 bp, synthetic construct
  source 1..80: mol_type = other DNA
gactaatagcaccagtagaccggtggaagaagaaatgaaaaattgctctttcaatagcaccacagccttaaaagataagg

SEQ ID NO: 83986 - DNA, 80 bp, synthetic construct
  source 1..80: mol_type = other DNA
accactagtaacatcactgataacataaaggaaacagaaataaaaaattgctctttcaatatcaccacaagcatgaacaa

SEQ ID NO: 83987 - DNA, 80 bp, synthetic construct
  source 1..80: mol_type = other DNA
gaaaaattgctctttcaatttcaccacaggcatgggtaggataaagaaacaaaacgcactttttaatgaccttgatataa

SEQ ID NO: 83988 - DNA, 80 bp, synthetic construct
  source 1..80: mol_type = other DNA
agaaatgaaaaattgctctttcaatatcaccacaaacatgaatattaagaggaaggaacatgcaattttttctaatctag

SEQ ID NO: 83989 - DNA, 80 bp, synthetic construct
  source 1..80: mol_type = other DNA
caatatcacctcaagtataaaagataaggtacagaaaggacatgcattttttaatacacttgatgtaacaccaatggaag

SEQ ID NO: 83990 - DNA, 80 bp, synthetic construct
  source 1..80: mol_type = other DNA
aggaagagaataataagtctaactgtactggtgttagtactactactgctgctagtcctagaaacagaaataagaactat

SEQ ID NO: 83991 - DNA, 80 bp, synthetic construct
  source 1..80: mol_type = other DNA
gctctttcaatgccacaagactagaagataggaggtataaggaaaatgcacttttttatagatttgatgtaaaaccatta

SEQ ID NO: 83992 - DNA, 80 bp, synthetic construct
  source 1..80: mol_type = other DNA
aggaacatccggagttttacagagactgggactgctgagattgctgacacagaagaatcctgagattgctgacacagaag

SEQ ID NO: 83993 - DNA, 80 bp, synthetic construct
  source 1..80: mol_type = other DNA
agatataggtatgaaaaattgctctttcaattataccacaggcatgaacaaagtgaaggagggatatgcagccttttata

SEQ ID NO: 83994 - DNA, 80 bp, synthetic construct
  source 1..80: mol_type = other DNA
agaaatggagggagaaataaaaaactgctctttcaacattaccacacaaatacaaaatagggtgcgaacagaatatgcac

SEQ ID NO: 83995 - DNA, 80 bp, synthetic construct
  source 1..80: mol_type = other DNA
tatttaatgcacttgatatagtaccaatagatgatgataaaaatgagaatacaaataatagtggtagaagctatatgtta

SEQ ID NO: 83996 - DNA, 80 bp, synthetic construct
  source 1..80: mol_type = other DNA
tatgaagggagaaatgaaaaactgctctttcaatatcactgaaagcataggaaataagaggcgaaaagaatatgcactgt

SEQ ID NO: 83997 - DNA, 80 bp, synthetic construct
  source 1..80: mol_type = other DNA
tctaaatgggactttccgctggggactttccagggaggtgtggccggggcgggactggggagtggcgagccctcagatgc

SEQ ID NO: 83998 - DNA, 80 bp, synthetic construct
  source 1..80: mol_type = other DNA
tagcaccactagtagtagcagagataaagaagaattcaaaaattgctctttcaatgccaccacagccttacaagataaga

SEQ ID NO: 83999 - DNA, 80 bp, synthetic construct
  source 1..80: mol_type = other DNA
atgaaaaactgctctttcaatgttactacaagaataggaaataagatgcaaaaagaatatgcacttttttataagcttga

SEQ ID NO: 84000 - DNA, 80 bp, synthetic construct
  source 1..80: mol_type = other DNA
gttcctgcaatgccagtttgagtaatagcactaattccaatagttccagcaatgccagtttgggttatatagagaaagag

SEQ ID NO: 84001 - DNA, 80 bp, synthetic construct
  source 1..80: mol_type = other DNA
ccagaaattacaatgatacaacaaggctgtttaatgactcagagctggttaataactcaacaaacaatgacactatcatc

SEQ ID NO: 84002 - DNA, 80 bp, synthetic construct
  source 1..80: mol_type = other DNA
ttacttaataaaatacaaaacagagcaaaagacagtggcaatgaaagcaaaggagatcagaaaaaattgtcagcacttaa

SEQ ID NO: 84003 - DNA, 80 bp, synthetic construct
  source 1..80: mol_type = other DNA
aaaaatggagcatcatgctccttggaatgttaataatctgtagtgctaaaaaacaattaaaagtcacagtctattataaa

SEQ ID NO: 84004 - DNA, 80 bp, synthetic construct
  source 1..80: mol_type = other DNA
aatgcagtctaacctttcggacatttataacccatgagcgttgctatcccggacgaataccgatgtaacaataaatccag

SEQ ID NO: 84005 - DNA, 80 bp, synthetic construct
  source 1..80: mol_type = other DNA
agcaattcaaaacgctagatgaatggacagatggtgaaaatccatataaaccaaaggaagagactgtttcctatgttgaa

SEQ ID NO: 84006 - DNA, 80 bp, synthetic construct
  source 1..80: mol_type = other DNA
tcttaagaatagaaaagggaaaaacagccaaatcagtagaaatgaataccctgccatcacactatgaggaatgctcctgt

SEQ ID NO: 84007 - DNA, 80 bp, synthetic construct
  source 1..80: mol_type = other DNA
tatcctgaaactagtgaaatcacatgtgtgtgcagggataactggcatggcgcgaatcgaccgtgggtgtctttcaacca

SEQ ID NO: 84008 - DNA, 80 bp, synthetic construct
  source 1..80: mol_type = other DNA
tttcatggtgaaacaccaagagctactactgatagttcgaatactgcggatttaaacaatatatcacttataattcattc

SEQ ID NO: 84009 - DNA, 80 bp, synthetic construct
  source 1..80: mol_type = other DNA
cataaaataaatttgacaactacaacatgtactattcgaaattgtaagaagttaggtccaagagagaatgtggctgtata

SEQ ID NO: 84010 - DNA, 80 bp, synthetic construct
  source 1..80: mol_type = other DNA
accgacgtcacaacatttgaagaggtagcatacgcggaaaaattagtaataactgacgtcgtggatggagtcaatcacaa

SEQ ID NO: 84011 - DNA, 80 bp, synthetic construct
  source 1..80: mol_type = other DNA
ctggctgcggctaactccgccttggcgaatgctgtggtggtgcggccgtttttatctcgtgtgcaaactgacattcttat

SEQ ID NO: 84012 - DNA, 80 bp, synthetic construct
  source 1..80: mol_type = other DNA
agagagatacccggagtattaccaagactgagactgctgacacaaagattgctgatacagaagaatctaagggactttcc

SEQ ID NO: 84013 - DNA, 80 bp, synthetic construct
  source 1..80: mol_type = other DNA
ttgctgacacagaagaatttaagggactttccactggggactttccagaaggcgggccagagggagggctgggagtggcg

SEQ ID NO: 84014 - DNA, 80 bp, synthetic construct
  source 1..80: mol_type = other DNA
tattaccaagactgagactgctgacacaaagattgctgatacagaagaatctaagggactttccactggggactttccag

SEQ ID NO: 84015 - DNA, 80 bp, synthetic construct
  source 1..80: mol_type = other DNA
aagattgctgatacagaagaatctaagggactttccactggggactttccagaaggcgggccagagggaggggctgggga

SEQ ID NO: 84016 - DNA, 80 bp, synthetic construct
  source 1..80: mol_type = other DNA
atacagaagaatctaagggactttccactggggactttccagaaggcgggccagagggaggggctggggagtggctgcct

SEQ ID NO: 84017 - DNA, 80 bp, synthetic construct
  source 1..80: mol_type = other DNA
gatgatagtgaatgctacaacccgtgcttttacgtggagctaattagaggaaggcctgaagaggcgaagtatgtatggtg

SEQ ID NO: 84018 - DNA, 80 bp, synthetic construct
  source 1..80: mol_type = other DNA
gatttgaaaactccaagctatttgctgttaaacaagagcctatgcaatgttgagggatgggtcgtggtagcaaaagacaa

SEQ ID NO: 84019 - DNA, 80 bp, synthetic construct
  source 1..80: mol_type = other DNA
cccaactacaaacgaacagcagaccctctatcaaaatactgatgcatatgtttcagttgggtcatcatcgtataaccgaa

SEQ ID NO: 84020 - DNA, 80 bp, synthetic construct
  source 1..80: mol_type = other DNA
atgaagaaaatagtgcttcttcttgcaatagtcagccttcttaaaagtgatcagatttgcatcggttaccatgcaaacaa

SEQ ID NO: 84021 - DNA, 80 bp, synthetic construct
  source 1..80: mol_type = other DNA
tagcactggcaatcatggtggctggtctatctttttggatgtgctccaatgggtcgttacaatgcagaatttgcatttaa

SEQ ID NO: 84022 - DNA, 80 bp, synthetic construct
  source 1..80: mol_type = other DNA
ccgatcataatagagaggaacacagtgcagttgaacagcactgtcatagagaaggaaatttgtactaaagtgacagaata

SEQ ID NO: 84023 - DNA, 80 bp, synthetic construct
  source 1..80: mol_type = other DNA
tgatctctgattatgatagattatttataatgtttaaagggctattgcagcaatgtaattatacgtgtacttatgaatga

SEQ ID NO: 84024 - DNA, 80 bp, synthetic construct
  source 1..80: mol_type = other DNA
aggatgcgctttaggaacaccggtgtgactgagctttaccaagccatgggacaaataataacattctttcaggaagttcc

SEQ ID NO: 84025 - DNA, 80 bp, synthetic construct
  source 1..80: mol_type = other DNA
aggatgcgcttttagagacacagggtgagtggggttcattaagccatggggcaaattatcacgttttttcaggaagtacc

SEQ ID NO: 84026 - DNA, 80 bp, synthetic construct
  source 1..80: mol_type = other DNA
gggttgacctctatggtatgccttcagcctctttgctgtatctcatgtacgctagaataatctctgggcatgtacctgaa

SEQ ID NO: 84027 - DNA, 80 bp, synthetic construct
  source 1..80: mol_type = other DNA
atcatcagcttctgtgaaagtgtgtccgctgaattcactatctttaggatttggttgccaaacaacgaatgtatatccat

SEQ ID NO: 84028 - DNA, 80 bp, synthetic construct
  source 1..80: mol_type = other DNA
tgtaatggtcagaaaaagacaatcctaacaaaaacattagttataggccagtgtatttatactattacaagcctcttttc

SEQ ID NO: 84029 - DNA, 80 bp, synthetic construct
  source 1..80: mol_type = other DNA
gctattcttctagtcctcaagttttttgcaaatatcctccatacaagcaatcaagagaaccgattcaaagccattctacg

SEQ ID NO: 84030 - DNA, 80 bp, synthetic construct
  source 1..80: mol_type = other DNA
cgggcgaaattaaaaaatcatcaaaagaagagtcgaaacagctacttgaaatactaaaaactaaagaagatcatcagaaa

SEQ ID NO: 84031 - DNA, 80 bp, synthetic construct
  source 1..80: mol_type = other DNA
atatggctgtggaaaataaaaactctagggatgctggcaaagtggtggatagcgaaaccgcgaacatttgcgatgcgatt

SEQ ID NO: 84032 - DNA, 80 bp, synthetic construct
  source 1..80: mol_type = other DNA
gagtgccggagtccatgagggaagaatatcgacagaaacagcagagtgctgtggatgttgacgatgatcattttgtcaac

SEQ ID NO: 84033 - DNA, 80 bp, synthetic construct
  source 1..80: mol_type = other DNA
atgcattgagccctttcttggatgttgaagacatcggggatttcctaacattcaacaatcttcttgcagattcgaggtat

SEQ ID NO: 84034 - DNA, 80 bp, synthetic construct
  source 1..80: mol_type = other DNA
tctcagccattcagcctaatccctagagaggggagggtagaatggggaggaacattccatgccatctcaggccggtccac

SEQ ID NO: 84035 - DNA, 80 bp, synthetic construct
  source 1..80: mol_type = other DNA
acccgaacatcattgggaaagaagacagagttcacagcagcatggagagggtccctgaaggagttataaacttctgtctt

SEQ ID NO: 84036 - DNA, 80 bp, synthetic construct
  source 1..80: mol_type = other DNA
ctgtgcctgggacaccatgcagtgacgaatgggacaatagtgaagaccattacagatgatcagattgaggtgactaatgc

SEQ ID NO: 84037 - DNA, 80 bp, synthetic construct
  source 1..80: mol_type = other DNA
caccgagctagttcaaaactcttcaacagggaaaatatgcaacaaccctcacaagattctcgatggaagagactgcacac

SEQ ID NO: 84038 - DNA, 80 bp, synthetic construct
  source 1..80: mol_type = other DNA
atggatatcatttatctgattcttctgtttacagtagtgagaggagaccaaatatgcattggataccactccaacaattc

SEQ ID NO: 84039 - DNA, 80 bp, synthetic construct
  source 1..80: mol_type = other DNA
tgtcactggcaatcatgatagctgggatctctttgtggatgtgctccaacgggtctctgcagtgcagagtctgcatatga

SEQ ID NO: 84040 - DNA, 80 bp, synthetic construct
  source 1..80: mol_type = other DNA
tatttgttaaagagggaaaaatagtacatatcagcccactatcaggaagtgctcagcacatcgaggaatgctcctgttac

SEQ ID NO: 84041 - DNA, 80 bp, synthetic construct
  source 1..80: mol_type = other DNA
actccccagtgttcaactataataaagcaaccaaaagactaaccattcttggaaaagatgcaggttcactagcagaggac

SEQ ID NO: 84042 - DNA, 80 bp, synthetic construct
  source 1..80: mol_type = other DNA
ccagatgagggaacagcaggagtggaatctgcagtactgagaggattcctaattctaggcagagaggacaaaaggtatgg

SEQ ID NO: 84043 - DNA, 80 bp, synthetic construct
  source 1..80: mol_type = other DNA
aattcatcagtgaaggcttcacttggacagaggtaactcagaatggacaaagcgctgcctgtaaaaggggccccgccaat

SEQ ID NO: 84044 - DNA, 80 bp, synthetic construct
  source 1..80: mol_type = other DNA
tatttaaacaataccatcatagaaagggaaccttgttctaaagtggtagaatacaggaattggtcgaaacctcaatgcca

SEQ ID NO: 84045 - DNA, 80 bp, synthetic construct
  source 1..80: mol_type = other DNA
ggaccccaggatgtgctctctgggaagacaggagaagaatcctgcccttaggatgaaatggatgctggcaatgaaatatc

SEQ ID NO: 84046 - DNA, 80 bp, synthetic construct
  source 1..80: mol_type = other DNA
attgaaggggggtggactgacgaggtagatgtgaggtatggttatcatcatcagaatgagcagggatctggctatgctgc

SEQ ID NO: 84047 - DNA, 80 bp, synthetic construct
  source 1..80: mol_type = other DNA
gggtggactgacgaggtagatgtgaggtatggttatcatcatcagaatgagcagggatctggctatgctgcagatcaaga

SEQ ID NO: 84048 - DNA, 80 bp, synthetic construct
  source 1..80: mol_type = other DNA
gatcaagaaagcacacaaaatgccattaacgggatcacaaccaaggtgaattctgtaattgagaaaatgaacactcaatt

SEQ ID NO: 84049 - DNA, 80 bp, synthetic construct
  source 1..80: mol_type = other DNA
caaaattaaggatggttacaggactaaggaacatcccatccattcaatccagaggtttgcgatatatctttgccggtttc

SEQ ID NO: 84050 - DNA, 80 bp, synthetic construct
  source 1..80: mol_type = other DNA
gcggcgagccagagcccagatctctagcaagttgggtccaaaatgaattcaacaaggcatgtgaattgaccgattcaagc

SEQ ID NO: 84051 - DNA, 80 bp, synthetic construct
  source 1..80: mol_type = other DNA
gaaaaactgctctttcaatgttacctcaatcacaagagataaggtacagaagcaatatgcacttttttatactctggata

SEQ ID NO: 84052 - DNA, 80 bp, synthetic construct
  source 1..80: mol_type = other DNA
agcagtttttctataaagcaagatattatagcattagctgattggtcagggtacagtggaagttttgtccaacatcctga

SEQ ID NO: 84053 - DNA, 80 bp, synthetic construct
  source 1..80: mol_type = other DNA
agttgatcaggggacaacccaaggagagcacaacctggactagtggaagcagcatttccttatgtggcgtagaaggtgaa

SEQ ID NO: 84054 - DNA, 80 bp, synthetic construct
  source 1..80: mol_type = other DNA
actacaagctggtcatggccagacggagctgatctgccattcactattgacaagtagtttgtccaaaaaaactccttgtt

SEQ ID NO: 84055 - DNA, 80 bp, synthetic construct
  source 1..80: mol_type = other DNA
gaagtgcaatcaaagcgtcattacatatgtaaacaacacatgggtgaaccaaacttatgtgaacatcagcaataacaaca

SEQ ID NO: 84056 - DNA, 80 bp, synthetic construct
  source 1..80: mol_type = other DNA
agtttgttattacaaatagggaatatagcctcgttatgggtgagccattcaattcagaccagagaaaaggaccaccttga

SEQ ID NO: 84057 - DNA, 80 bp, synthetic construct
  source 1..80: mol_type = other DNA
agcaaaagcaggggataattctatcaaccatgaagaccatcgttgctttgaactgcattcttcatcttgttttcgcacgg

SEQ ID NO: 84058 - DNA, 80 bp, synthetic construct
  source 1..80: mol_type = other DNA
ggcgcgatagcaggtttcatagaaaacggttgggaagggatggtagacggatggtacggtttcaggcatcaaaattctga

SEQ ID NO: 84059 - DNA, 80 bp, synthetic construct
  source 1..80: mol_type = other DNA
caagcagcggattttaaaagcacccaagcagcaatagatcaaatcaatggaaaactaaatagggtgatcgagaaaacgaa

SEQ ID NO: 84060 - DNA, 80 bp, synthetic construct
  source 1..80: mol_type = other DNA
caccaaattgagaaggaattctcagaagtggaagggagaattcaagacctcgagaaatacgttgaggacactaaaataga

SEQ ID NO: 84061 - DNA, 80 bp, synthetic construct
  source 1..80: mol_type = other DNA
aaaagtgtcgaggtgaaatcaggatataaagagtggattctgtggatctcctttgccatatcatgccttttgctttgtgt

SEQ ID NO: 84062 - DNA, 80 bp, synthetic construct
  source 1..80: mol_type = other DNA
taccgagctagtccagagtgcctcagcaggtaggatttgtaacaatcctcaccgaatccttgatggggaaaactgcacac

SEQ ID NO: 84063 - DNA, 80 bp, synthetic construct
  source 1..80: mol_type = other DNA
attgttacccttacgacgtgcaagattatgcgtccctcagatcactagttgcctcatcaggcaccctggagttcatcaat

SEQ ID NO: 84064 - DNA, 80 bp, synthetic construct
  source 1..80: mol_type = other DNA
attggaccggagttacacagaacgggggaagctatgcttgcaaaagagaatccagaaacagttttttcagtagactaaat

SEQ ID NO: 84065 - DNA, 80 bp, synthetic construct
  source 1..80: mol_type = other DNA
tggttgtatcaatcagacaacaaatatccagcgctgaacgtcactatgtcaaacaatggcaattttgacaaactatatat

SEQ ID NO: 84066 - DNA, 80 bp, synthetic construct
  source 1..80: mol_type = other DNA
ttggggagttcatcacccgagcacggacagagaacagaccaacctatatgttcgaacatcaggaagagtcacagtctcga

SEQ ID NO: 84067 - DNA, 80 bp, synthetic construct
  source 1..80: mol_type = other DNA
ccaagagaagccagcaaaatgtgattccaaatgtaggaccaggaccttggataaggggcctgtctagcagaataagtatc

SEQ ID NO: 84068 - DNA, 80 bp, synthetic construct
  source 1..80: mol_type = other DNA
tactggacaatagtaaaaccgagagatacattgttaattaccagtagtgggagtctagttgcccctcgggggtatttcaa

SEQ ID NO: 84069 - DNA, 80 bp, synthetic construct
  source 1..80: mol_type = other DNA
atagagaaaacacggcaacattgtgcctggggcatcatgcagtgccaaacggaacactagtgaaaacaataacggatgat

SEQ ID NO: 84070 - DNA, 80 bp, synthetic construct
  source 1..80: mol_type = other DNA
ggggcatgccccaggtatgtcaagcaaagttctctgaaattggcaacggggatgcggaatataccagagaaacaaaatag

SEQ ID NO: 84071 - DNA, 80 bp, synthetic construct
  source 1..80: mol_type = other DNA
aagtcattaacggttggtccacacctaactccaaatcgcagataaatagacaagtcatagtcgatagtgataataggtct

SEQ ID NO: 84072 - DNA, 80 bp, synthetic construct
  source 1..80: mol_type = other DNA
gctgcatgtctgtattactgggcacgatagaaatgcaaccgctagcttcatttataatgggaggcttgtagacagtatta

SEQ ID NO: 84073 - DNA, 80 bp, synthetic construct
  source 1..80: mol_type = other DNA
aaagggggtcacggagtaaagggctgggcctttgacgacggaaatgatgtgtggatgggaagaacaatcattgaggagtc

SEQ ID NO: 84074 - DNA, 80 bp, synthetic construct
  source 1..80: mol_type = other DNA
cctagtaaccactttaacatttcattttaagcaatatgagtgcagctctcccccagtcaatcaagtaatgcaatgtgaac

SEQ ID NO: 84075 - DNA, 80 bp, synthetic construct
  source 1..80: mol_type = other DNA
tgggcttttgacgacgaaaatgatgtgtggatgggaagaacaatcatcgaggaattacgctcaggttatgagacattcaa

SEQ ID NO: 84076 - DNA, 80 bp, synthetic construct
  source 1..80: mol_type = other DNA
ctcatggcctgatggagcagacatcaacctcatgccagtataagctttcgcaattttagaaaaaactccttgtttctact

SEQ ID NO: 84077 - DNA, 80 bp, synthetic construct
  source 1..80: mol_type = other DNA
gggacatttgggtgacgagagaaccttatgtatcatgtgataatagcaaatgttatcagtttgcactcgggcaggggact

SEQ ID NO: 84078 - DNA, 80 bp, synthetic construct
  source 1..80: mol_type = other DNA
tattactgggcacgataaaaacgcaaccgctagtttcatttataatgggaggcttgtagacagcattagttcttggtcca

SEQ ID NO: 84079 - DNA, 80 bp, synthetic construct
  source 1..80: mol_type = other DNA
tattggtaattactgtgacattacatttcaaacactatgactgcaactcctctccaaacaatcaagtgatgctgtgtgaa

SEQ ID NO: 84080 - DNA, 80 bp, synthetic construct
  source 1..80: mol_type = other DNA
gggaagcgatgagaacccgcgaggtccagtcagccgtgaacatattgaatggtgtagggaattcatcaaaggtaagtaca

SEQ ID NO: 84081 - DNA, 80 bp, synthetic construct
  source 1..80: mol_type = other DNA
gtcttctaaccgaggtcgaaacgtacgttctttctatcatcccgtcaggccccctcaaagccgagattgcgcagagactg

SEQ ID NO: 84082 - DNA, 80 bp, synthetic construct
  source 1..80: mol_type = other DNA
tacggtttgaaaagagggccttctacggaaggagtgcctgagtccatgagggaagaatatcaacaggaacagcagagtgc

SEQ ID NO: 84083 - DNA, 80 bp, synthetic construct
  source 1..80: mol_type = other DNA
tgagaatgccatcctttccatgaaactaaatgtttccttggcacacgtctcttatagcatggatcatagtaaatggggac

SEQ ID NO: 84084 - DNA, 80 bp, synthetic construct
  source 1..80: mol_type = other DNA
ctagcctttacaaaggggtttatgagcttcagactctggaactaaacatggaaacactcaatatgaccatgcccctttcc

SEQ ID NO: 84085 - DNA, 80 bp, synthetic construct
  source 1..80: mol_type = other DNA
caaccctttacaagggagtctatgagcttcaggctctagaattaaacatggagacactcaacatgaccatgcccctttcc

SEQ ID NO: 84086 - DNA, 80 bp, synthetic construct
  source 1..80: mol_type = other DNA
atcttacaacaactgctatttacccattttagaattggatgccatcatagtaggataggaattacaagaggaagaggaag

SEQ ID NO: 84087 - DNA, 80 bp, synthetic construct
  source 1..80: mol_type = other DNA
aagaaatggatccagtagaacctgagatgcccccttggcatcatcctggaagtcaaccccagactccttgtaataattgc

SEQ ID NO: 84088 - DNA, 80 bp, synthetic construct
  source 1..80: mol_type = other DNA
tattgcaaaagttgctgctatcattgctatgtttgtttcacaagaaagggtttggggatctcctatggcaggaagaagcg

SEQ ID NO: 84089 - DNA, 80 bp, synthetic construct
  source 1..80: mol_type = other DNA
acgacgaccaggcgctgctgcacgccgtccgaatagtaaagatcttgtaccagagcagtaagtaacgctgatgcatcata

SEQ ID NO: 84090 - DNA, 80 bp, synthetic construct
  source 1..80: mol_type = other DNA
ttagagcaaaggaaacaaagtagaagggaaagagaactaatagaaaggttgagaagattaagagaaactcaggatgacag

SEQ ID NO: 84091 - DNA, 80 bp, synthetic construct
  source 1..80: mol_type = other DNA
tttaaaaacgcaacaaactcaaacgtaacaacaaacataaccagaccagatgtgaaacagtgtgattttaatgtaaccac

SEQ ID NO: 84092 - DNA, 80 bp, synthetic construct
  source 1..80: mol_type = other DNA
agttctcaaggacaaaaaggagaaaaaacaggctctattctatgtatcagatttggataaattagataatagcacaagta

SEQ ID NO: 84093 - DNA, 80 bp, synthetic construct
  source 1..80: mol_type = other DNA
acagtgagtactcaactaatattaaatgggacactctctaaaggaaaaataagaattatgggggaaaatatcaagacaaa

SEQ ID NO: 84094 - DNA, 80 bp, synthetic construct
  source 1..80: mol_type = other DNA
ttcaaaaaatatcctagttaccctaaattctactataaacataacctgtgtgagaccagggaatcaggtaatacaaaaga

SEQ ID NO: 84095 - DNA, 80 bp, synthetic construct
  source 1..80: mol_type = other DNA
taaactcgggtcccatgagctggtacagcatggctattgcccaagaggcgcaaacaaacagctcaaggttcgcttattgt

SEQ ID NO: 84096 - DNA, 80 bp, synthetic construct
  source 1..80: mol_type = other DNA
gagtataatgccactgattgggaaaaggccttaaaacaaacagctgaaaggtacttagaacttgtaaaccatacaggtaa

SEQ ID NO: 84097 - DNA, 80 bp, synthetic construct
  source 1..80: mol_type = other DNA
tgttaccataatattccagaatagcagtattggtggggatccagagacttactattcacattttaactgttatggagagt

SEQ ID NO: 84098 - DNA, 80 bp, synthetic construct
  source 1..80: mol_type = other DNA
tcttctattgtaacacatctaagatgtttaattataactttacatgtagtggaaccaactgtaagattaaccaaagtact

SEQ ID NO: 84099 - DNA, 80 bp, synthetic construct
  source 1..80: mol_type = other DNA
cctagccaagatactcctcaaaataagagttggataccttgcaagataaaacaggtagtaagggcatggatggggggaga

SEQ ID NO: 84100 - DNA, 80 bp, synthetic construct
  source 1..80: mol_type = other DNA
aacaggtagtaagggcatggatggggggagagtcgggactctatgcacctcccatccaaggttatctaagatgtgagtca

SEQ ID NO: 84101 - DNA, 80 bp, synthetic construct
  source 1..80: mol_type = other DNA
gtcgggactctatgcacctcccatccaaggtcatctaagatgtgagtcaaacataactggaatgattctacaattggata

SEQ ID NO: 84102 - DNA, 80 bp, synthetic construct
  source 1..80: mol_type = other DNA
gaccatggaatgcaagcgataccaatgtcacatttagaccaatagggggagaaatgagagacatatggagaactgaattg

SEQ ID NO: 84103 - DNA, 80 bp, synthetic construct
  source 1..80: mol_type = other DNA
ttcaactacaaaccagtaagaataaaaccctttagtgtggcacccacaaaaattgccaggccagtcataggcactggcgc

SEQ ID NO: 84104 - DNA, 80 bp, synthetic construct
  source 1..80: mol_type = other DNA
gccttagaaaccttactacagactcagcagctcctaaacctatggggttgtaggggaaggacagtctgctacacatcagt

SEQ ID NO: 84105 - DNA, 80 bp, synthetic construct
  source 1..80: mol_type = other DNA
aaaatggaacacaacatggggacatatcagtaacataacagacatgacagaaatttgggataaaatgacatggcaacagt

SEQ ID NO: 84106 - DNA, 80 bp, synthetic construct
  source 1..80: mol_type = other DNA
gggatcaggcaatagacaacgtaagctctgttatatatgatgaaatacaaagagcacaagttcagcaggaacaaaatgag

SEQ ID NO: 84107 - DNA, 80 bp, synthetic construct
  source 1..80: mol_type = other DNA
gatatcaacccctctcatttcagacccccacccgtcaccagccgggagcagaagcgccaggaggaacagaagaaggaggt

SEQ ID NO: 84108 - DNA, 80 bp, synthetic construct
  source 1..80: mol_type = other DNA
tcctaggacagaagacaattgatgcttgcagactttgtgcagctgtagtacaatactggctacaagaattgcagaagagt

SEQ ID NO: 84109 - DNA, 80 bp, synthetic construct
  source 1..80: mol_type = other DNA
gctacaaacctcttagataccattgcagtagcagttgccaattggactgacggcataatattaggggtacaaagattagg

SEQ ID NO: 84110 - DNA, 80 bp, synthetic construct
  source 1..80: mol_type = other DNA
aagaggaattcttaacatcccaaggagaattagacagggcctagaacgaggtttattgtaacatgggaaacgcattgaga

SEQ ID NO: 84111 - DNA, 80 bp, synthetic construct
  source 1..80: mol_type = other DNA
aagagcccatttccaggatgggcaacaataagagaaaggataagaagagcttcccctgagcctgaaccatgtgcacctgg

SEQ ID NO: 84112 - DNA, 80 bp, synthetic construct
  source 1..80: mol_type = other DNA
ctcctacatccagcttgcagccatggctttggagatgcacacggagagatcctgaaatggcagtttgatagatcactggg

SEQ ID NO: 84113 - DNA, 80 bp, synthetic construct
  source 1..80: mol_type = other DNA
ccagagcagtaagtaacgctaatgcatcatagggatctgataacattaataattgttagtgctttgctacttatagctgt

SEQ ID NO: 84114 - DNA, 80 bp, synthetic construct
  source 1..80: mol_type = other DNA
attgctatggatgtttattcttaaacaatgcttagagcaaaagaagcaaaataaaagggaaagagaactaattgaaaggt

SEQ ID NO: 84115 - DNA, 80 bp, synthetic construct
  source 1..80: mol_type = other DNA
ataaagaactgtacagcagacacaaccagctcagggaataatacaacaaccatacccagcccagtgaattgtacgagtgt

SEQ ID NO: 84116 - DNA, 80 bp, synthetic construct
  source 1..80: mol_type = other DNA
aacaaacagctcagagataaaacaatgtgactttaatgtaaccacagttctcaatgacaaaaaggagaaaaaacaggcgc

SEQ ID NO: 84117 - DNA, 80 bp, synthetic construct
  source 1..80: mol_type = other DNA
acagtgagtacccatttaatattaaatgggacaatctctgaaggaaaaataagaattatggggaaaaatatctcagcaag

SEQ ID NO: 84118 - DNA, 80 bp, synthetic construct
  source 1..80: mol_type = other DNA
tgcagaaaatatcatagtgaccctaaattctactataaacataacctgcgtgagaccagggaatcagtcagtgcaagaga

SEQ ID NO: 84119 - DNA, 80 bp, synthetic construct
  source 1..80: mol_type = other DNA
taaaaataggtccaatggcttggtacagcattggtcttgcctcaaaggagccactctcaacaaggttagctttttgtcag

SEQ ID NO: 84120 - DNA, 80 bp, synthetic construct
  source 1..80: mol_type = other DNA
tataatatcactgattggaaagaagccttaaaacaaacagctgaaaggtacttagaacttgtaggcaataagaatgagat

SEQ ID NO: 84121 - DNA, 80 bp, synthetic construct
  source 1..80: mol_type = other DNA
taacataacattcactaacagctctagtggtggagatttagagacaacccatttacattttaactgttatggagagttct

SEQ ID NO: 84122 - DNA, 80 bp, synthetic construct
  source 1..80: mol_type = other DNA
tctattgtaacacatctgggatgtttaactatagctttctatgtaacagaaccaactgtagcccaaatactactagccaa

SEQ ID NO: 84123 - DNA, 80 bp, synthetic construct
  source 1..80: mol_type = other DNA
aataacacgataccttgcaggataaaacaggtagtaaggtcatggatggggggagagtcgggactctatgcacctcccat

SEQ ID NO: 84124 - DNA, 80 bp, synthetic construct
  source 1..80: mol_type = other DNA
ggggagagtcgggactctatgcacctcccatcaaaggtgagctaagatgtgagtcaaacataactggaatgattctccaa

SEQ ID NO: 84125 - DNA, 80 bp, synthetic construct
  source 1..80: mol_type = other DNA
caaaggtgagctaagatgtgagtcaaacataactggaatgattctccaactggatgcaccatggaatgcaagcaatgcca

SEQ ID NO: 84126 - DNA, 80 bp, synthetic construct
  source 1..80: mol_type = other DNA
catttagaccagtagggggagaaatgagagacatatggagaactgagttgttcaaatacaaagtagttagggtaaaacct

SEQ ID NO: 84127 - DNA, 80 bp, synthetic construct
  source 1..80: mol_type = other DNA
tttagtgtggcgcccacacaaattgcaaggccagtcataggcactggcacccatagagaaaaaagagcagtgggactggg

SEQ ID NO: 84128 - DNA, 80 bp, synthetic construct
  source 1..80: mol_type = other DNA
atggggttgtagaggaaggatagtctgctacacatcagtaaaatggaacgatacatggagaagagtaaataacacagagg

SEQ ID NO: 84129 - DNA, 80 bp, synthetic construct
  source 1..80: mol_type = other DNA
aaatttgggatagactgacctggcaacagtgggatcaggagatagacaacataagctctgttatatatgatgaaatacaa

SEQ ID NO: 84130 - DNA, 80 bp, synthetic construct
  source 1..80: mol_type = other DNA
tacttaatctagtgagaaacatgaggcagggatatcaacgcctctcatgtcagaccgccacccgtcaccagccggaagca

SEQ ID NO: 84131 - DNA, 80 bp, synthetic construct
  source 1..80: mol_type = other DNA
gaagcgccaggaggaatagaagaaggaggtggaggagaaggcaggcccagatggatacccttgccgcaaggattcttgcc

SEQ ID NO: 84132 - DNA, 80 bp, synthetic construct
  source 1..80: mol_type = other DNA
tgatcagacatctgggacttggactgtggatcctaggacagaagacaattaatgcttgcagactttgtgcagctgtgata

SEQ ID NO: 84133 - DNA, 80 bp, synthetic construct
  source 1..80: mol_type = other DNA
caatactggctacaggaattgcagaagagtgctacaaacctagtagataccattgcagtggcggttgccaattggactga

SEQ ID NO: 84134 - DNA, 80 bp, synthetic construct
  source 1..80: mol_type = other DNA
cggtataatattagggatacaaaggttaggaagaggaattcgtaacatcccaaggagagttagacagggcctagaacgaa

SEQ ID NO: 84135 - DNA, 80 bp, synthetic construct
  source 1..80: mol_type = other DNA
gtttattgtaacatgggaaacgcattgagaaaaaatccatttccaggatgggcaacaataagagaaagaatgagaagaac

SEQ ID NO: 84136 - DNA, 80 bp, synthetic construct
  source 1..80: mol_type = other DNA
ttcccctgagcctgaactatgtgcacctggagtaggacaaatctccagggaattagcagctagaggagggataccaagtt

SEQ ID NO: 84137 - DNA, 80 bp, synthetic construct
  source 1..80: mol_type = other DNA
cctttactcctcaaaacaatgcagcccttgcattcctagaaagtcaccaagatgaagaagtaggtttcccagtaagacct

SEQ ID NO: 84138 - DNA, 80 bp, synthetic construct
  source 1..80: mol_type = other DNA
cgtactccggaaatagcattgatgagctacaaactttgatcagctgctgcgacaatgggtacctcaaaaacaaagaagaa

SEQ ID NO: 84139 - DNA, 80 bp, synthetic construct
  source 1..80: mol_type = other DNA
cgtattctgaaaaaacagccggcgccggtgcgtgcgctgaccattcatccgctgcgtcgttatgaaagcagcatttatga

SEQ ID NO: 84140 - DNA, 80 bp, synthetic construct
  source 1..80: mol_type = other DNA
gcaaagatctggaaccgctgaaaagcgtgagcgtggaaggcagccatccgatgtgcaaaatttggaacaaagtgtgcacc

SEQ ID NO: 84141 - DNA, 80 bp, synthetic construct
  source 1..80: mol_type = other DNA
aacgcgagcattgaaaaaattgaacgtatgcatgatgatccggtgctggaactggaatatgcgatgagcggcagcaccga

SEQ ID NO: 84142 - DNA, 80 bp, synthetic construct
  source 1..80: mol_type = other DNA
acgtagcgtggaacgtaacaaatatcatcgtaccgtgctgaccctgagcccggaagaacgtgaatatgcggcggtgctgg

SEQ ID NO: 84143 - DNA, 80 bp, synthetic construct
  source 1..80: mol_type = other DNA
gcgtgtgcggcaaacgtaacgcgaacctgggcgcggtgaaagaagcgcgtgtgcgtagcaaaaaaggctttagcattggc

SEQ ID NO: 84144 - DNA, 80 bp, synthetic construct
  source 1..80: mol_type = other DNA
cataacaccgaacgtgtggaagaatttctgagcgatagctgcgtggaagatctgattccgaccgaaggcctgtataaccc

SEQ ID NO: 84145 - DNA, 80 bp, synthetic construct
  source 1..80: mol_type = other DNA
gctgagcgaagataaaagcctgcgtctgctggcgatgggcctgcatcagccgaccctgattcatatggatgatgaaaccc

SEQ ID NO: 84146 - DNA, 80 bp, synthetic construct
  source 1..80: mol_type = other DNA
cggaaaccctggattgccatctgaaatttctgagcagcccgattggcagctggctgcagatggtgagcattgtgggcgcg

SEQ ID NO: 84147 - DNA, 80 bp, synthetic construct
  source 1..80: mol_type = other DNA
gaactgagcgcgagcgtgaaacagcatgtgaaaccgaaccagtttattgtgaaacgtctgctggatagcgcgatttttct

SEQ ID NO: 84148 - DNA, 80 bp, synthetic construct
  source 1..80: mol_type = other DNA
gccagagcggcagcaccattcagccgtttgaaagcgtgccggcgcagaacctgaccctgtttaaacatgattttaccttt

SEQ ID NO: 84149 - DNA, 80 bp, synthetic construct
  source 1..80: mol_type = other DNA
gctgattaaaccgaccaccagcaaaggccatatttttgtgagcctggcggtgaacaaaaaatttctgcatggcgaactga

SEQ ID NO: 84150 - DNA, 80 bp, synthetic construct
  source 1..80: mol_type = other DNA
gcaaaagcagcgtgtttaaacagagcattgatgcgggcgatctgctggtgaccgattttgtgagctttaaactgagcaaa

SEQ ID NO: 84151 - DNA, 80 bp, synthetic construct
  source 1..80: mol_type = other DNA
attaccaacctgtgcaaagcgctgtgcgtgctggaagcggcgagctgcttttgggcggaaacctatggctttgaaccgtg

SEQ ID NO: 84152 - DNA, 80 bp, synthetic construct
  source 1..80: mol_type = other DNA
gaaatttgtggatcaggcgagcgcggtgaaatttctggatgcgtggtttatgattaaactgagcctgctgaccatgctgg

SEQ ID NO: 84153 - DNA, 80 bp, synthetic construct
  source 1..80: mol_type = other DNA
aagataaagcgaccaccgaagaactgcagaccatgcagcgttatgtgattatggaaggctttgtgagcctgccggaaatt

SEQ ID NO: 84154 - DNA, 80 bp, synthetic construct
  source 1..80: mol_type = other DNA
ccgaaaccgcataaaatgctgagcaaaattccgaaagtgctgcgtagcgaactgcaggtgtttctgacccatcgtctgtt

SEQ ID NO: 84155 - DNA, 80 bp, synthetic construct
  source 1..80: mol_type = other DNA
tagcaccatgcagcgtattagcgcgaccccgtttcagctgcataaagtgggcggcaacattcgttggaaaggcctgttta

SEQ ID NO: 84156 - DNA, 80 bp, synthetic construct
  source 1..80: mol_type = other DNA
acccgtatagcggcaacagcattgatgaactgcagaccctgattagctgctgctataacggctattttaaaaacaaagaa

SEQ ID NO: 84157 - DNA, 80 bp, synthetic construct
  source 1..80: mol_type = other DNA
gaagataccgaaccgagcgcgctgagcgcgatgtataaaaaaattattgaactggaacatctgcgtccgccgaccgatac

SEQ ID NO: 84158 - DNA, 80 bp, synthetic construct
  source 1..80: mol_type = other DNA
ctatctgggctatgaagatccgattgatccgaaaatgcatgaatttagccgtagctatctgaaactgctgtgcaaccatg

SEQ ID NO: 84159 - DNA, 80 bp, synthetic construct
  source 1..80: mol_type = other DNA
cgaaaaccaaactgcgtaaacagtatggccgtggcgtgatgaaccagattgaaaacagcattgtgcgtgaagtgcagagc

SEQ ID NO: 84160 - DNA, 80 bp, synthetic construct
  source 1..80: mol_type = other DNA
attaccctggaacgtctggcgaccctgaaagcgaccagcaactttgatagcagctggtatacctttaaagatgtgaaaga

SEQ ID NO: 84161 - DNA, 80 bp, synthetic construct
  source 1..80: mol_type = other DNA
aaaactatacccgtgataaactgctggtgaaaatgacccagtttgcgcatcgtggcaaaaccctggcgattgaagtgttt

SEQ ID NO: 84162 - DNA, 80 bp, synthetic construct
  source 1..80: mol_type = other DNA
gaagaatgcatgagccgtattgaagaaaaaggctgcatggaaatttgcctgtttaaaaaacagcagcatggcggcctgcg

SEQ ID NO: 84163 - DNA, 80 bp, synthetic construct
  source 1..80: mol_type = other DNA
tgaaatttatgtgatgggcgcggatgaacgtattgtgcagagcgtgattgaagcgattgcgcgtgcgattggccgttttt

SEQ ID NO: 84164 - DNA, 80 bp, synthetic construct
  source 1..80: mol_type = other DNA
ttgatagcgataccctgtgcaacccgagcaacaaaattcgtattccggaaacccatggccagcgtgcgaaacgtcgttgc

SEQ ID NO: 84165 - DNA, 80 bp, synthetic construct
  source 1..80: mol_type = other DNA
tggaaaaccgtgcggatgatagcgattttcagagcccggatatgattattgaaaccgaaaccggccatgtgtatgtggtg

SEQ ID NO: 84166 - DNA, 80 bp, synthetic construct
  source 1..80: mol_type = other DNA
ggccgtagcgtgtggacctgcgcgaccagcgatgatgcgcgtaaatggaaccagggccattatgtgaccaaatttgcgct

SEQ ID NO: 84167 - DNA, 80 bp, synthetic construct
  source 1..80: mol_type = other DNA
cgaatttaccccgcaggaatggtggccgctgattattcgtggctgcagcatgtttaccaacaaatttatgatgatgaacc

SEQ ID NO: 84168 - DNA, 80 bp, synthetic construct
  source 1..80: mol_type = other DNA
tggattttctgcgtattattgatagccataaagaactgcagattgaagatgaatttgtgagcaaactgtttaaagcgtat

SEQ ID NO: 84169 - DNA, 80 bp, synthetic construct
  source 1..80: mol_type = other DNA
catggcgaaagcgtggaaccgtggattagccagggctgcacctatctgaaaaccagcaccggcatgatgcagggcattct

SEQ ID NO: 84170 - DNA, 80 bp, synthetic construct
  source 1..80: mol_type = other DNA
gcattttaccagcagcctgctgcatagcctgcatcaggaatttgtgaaaaccaccgcgattcagctgtttaccctgaaac

SEQ ID NO: 84171 - DNA, 80 bp, synthetic construct
  source 1..80: mol_type = other DNA
tgggcagcgatgcgagcagcaaagtggtgtgcgatatgatgcagggcagcgatgatagcagcatgattattagctttccg

SEQ ID NO: 84172 - DNA, 80 bp, synthetic construct
  source 1..80: mol_type = other DNA
gcggataacgaaaaaattaaaatgcgttataaactggtggcggcgatgtgctttcgtattaaaaaaagcctgggcattta

SEQ ID NO: 84173 - DNA, 80 bp, synthetic construct
  source 1..80: mol_type = other DNA
tattggcatttatccgagcgaaaaaagcaccccgaacaccgattttgtgatggaatataacagcgaatttttttttcata

SEQ ID NO: 84174 - DNA, 80 bp, synthetic construct
  source 1..80: mol_type = other DNA
gccagcatgtgcgtccgaccattcgttggattgcggcgagctgcagcctgccggaagtggaaaccctggtggcgcgtcag

SEQ ID NO: 84175 - DNA, 80 bp, synthetic construct
  source 1..80: mol_type = other DNA
gaagaagcggcgaacctgctgaccgcgattaccgaaggcggcggcagctttagcctggcggcgatgattcagcattgcca

SEQ ID NO: 84176 - DNA, 80 bp, synthetic construct
  source 1..80: mol_type = other DNA
gaatttaccaccaccatgggcgatgcgaacagcgcggatctggcggcgcgtaacaaaattgcgaaatatgaaattgcgtg

SEQ ID NO: 84177 - DNA, 80 bp, synthetic construct
  source 1..80: mol_type = other DNA
gtgcagcattcattatatgctgatgggcctgggcgtgagcgcgctgtttagcgaatttagcaaagcgattagcaaatggc

SEQ ID NO: 84178 - DNA, 80 bp, synthetic construct
  source 1..80: mol_type = other DNA
tggatccgggcctgggcttttttctgtttgataacccgtatagcgcgggcctgagcggctttaaatataacctgtatcgt

SEQ ID NO: 84179 - DNA, 80 bp, synthetic construct
  source 1..80: mol_type = other DNA
gcgattatgaacagcagcctgaaaagcatttatagcttttttatgaaacgtgtgaaaggcggcagccagcgtaccgatgg

SEQ ID NO: 84180 - DNA, 80 bp, synthetic construct
  source 1..80: mol_type = other DNA
cattattagcgaaagctgcagcgtgagcccgggcggcgcgattgtgatgagcagcaccctgcgttggggcagcgtggaaa

SEQ ID NO: 84181 - DNA, 80 bp, synthetic construct
  source 1..80: mol_type = other DNA
aatttaaacgtctgcgtaaccgtctgaacattccggaaacctggaaagaaatgattaacgaaagcccggaagtgctgtat

SEQ ID NO: 84182 - DNA, 80 bp, synthetic construct
  source 1..80: mol_type = other DNA
cgtgcgccgcagaccggcaccgaaattatgctgcgtattgcggaaaaagtgcatagcccgggcgtggtgagcagcctgag

SEQ ID NO: 84183 - DNA, 80 bp, synthetic construct
  source 1..80: mol_type = other DNA
caccggcaacgcggtgtgcaaagtgatggcgagcagcgtgtattttctgagcgcgtgcatttttgaagatgcgggcagcc

SEQ ID NO: 84184 - DNA, 80 bp, synthetic construct
  source 1..80: mol_type = other DNA
aggaatataaagtggtgaacaacgataaatatagcctgatgcagaaaattattgcgtttgatcagattggctgcaacgat

SEQ ID NO: 84185 - DNA, 80 bp, synthetic construct
  source 1..80: mol_type = other DNA
gaaattagccaggaagatctgctgtttctgtttccgaacctggcggaatttgaagcgtttgatagcattatttatgataa

SEQ ID NO: 84186 - DNA, 80 bp, synthetic construct
  source 1..80: mol_type = other DNA
aggccgttttaacgtgattccgcgtgcgagccagcgtgaagcgacccagacccgtattgtggtgtttgaacatcatagca

SEQ ID NO: 84187 - DNA, 80 bp, synthetic construct
  source 1..80: mol_type = other DNA
cctgaaccgtagcgcgattaaaccgattagcctgtatattattgcggtgcattttaacggcgtgattagcaacctggatc

SEQ ID NO: 84188 - DNA, 80 bp, synthetic construct
  source 1..80: mol_type = other DNA
gcgcgcgtgtggcgccggaaaaactggtgagcgataaatggtttggcacccgtaaaagcaaaattggcagcccgggcttt

SEQ ID NO: 84189 - DNA, 80 bp, synthetic construct
  source 1..80: mol_type = other DNA
cgtcaggaatgggatcgtctgaaagcgattgtgcgttggctgcgtgataccccggaagaaaccctggatagcagcccgtt

SEQ ID NO: 84190 - DNA, 80 bp, synthetic construct
  source 1..80: mol_type = other DNA
tagcaaccatattcagattcgtaacttttttgcgcgtatggaaggccgtccgcgtgtgattaaagtgaccggcgcgccgg

SEQ ID NO: 84191 - DNA, 80 bp, synthetic construct
  source 1..80: mol_type = other DNA
tgaaaaaacgtagcggcatgagcaaaattgcgatggcgattcgtgataacttttgcaaaaccggctttctgcagggcctg

SEQ ID NO: 84192 - DNA, 80 bp, synthetic construct
  source 1..80: mol_type = other DNA
gaagatgaagtgggccatagccgtgcgatgcaggtggaaaaaattaaacattatctgtttagcgtgctgatgggcccgta

SEQ ID NO: 84193 - DNA, 80 bp, synthetic construct
  source 1..80: mol_type = other DNA
tagcgaagaagcgaaactggaatatgtggtgaaaattctgaaagaagaaccgcaggtgattctgaactataacgataaac

SEQ ID NO: 84194 - DNA, 80 bp, synthetic construct
  source 1..80: mol_type = other DNA
gtagccgtgcgaacattattagcctgctgcagcgttttattaaaagcgaaattggcattgcgaccctgattgaagatatg

SEQ ID NO: 84195 - DNA, 80 bp, synthetic construct
  source 1..80: mol_type = other DNA
aaagcgggcgtgtttggcgcgtttgtgaaagcgcagcagtttagccagagcagcgtgaacaacaaatattatggccgtgg

SEQ ID NO: 84196 - DNA, 80 bp, synthetic construct
  source 1..80: mol_type = other DNA
catttggaaaggcgtgatggatggctatcaggtgcagattgatattgatggcaaagaaggcatgccgagccatctgagcg

SEQ ID NO: 84197 - DNA, 80 bp, synthetic construct
  source 1..80: mol_type = other DNA
gcattaccattagcaactgcagcaaaccgtggattctgacccagagcctgaaagcgtggtgcgaagatatgcaggtgtat

SEQ ID NO: 84198 - DNA, 80 bp, synthetic construct
  source 1..80: mol_type = other DNA
tgagcgatgaagaagtgaacgaaattgtgtttcgttttcgtctggcgcgtgatatttttgaagaactgcgtgaaattaac

SEQ ID NO: 84199 - DNA, 80 bp, synthetic construct
  source 1..80: mol_type = other DNA
aacaacatggatgtgagcaaagcgaacccgaaagcgaactattggatgtatggctttaaaatgtatggcagcagctatcc

SEQ ID NO: 84200 - DNA, 80 bp, synthetic construct
  source 1..80: mol_type = other DNA
gtatggctgcccgatttatctggtgcgtcatgatattaccaacctgggcctgctgcatgatgatgatattgatattaaag

SEQ ID NO: 84201 - DNA, 80 bp, synthetic construct
  source 1..80: mol_type = other DNA
tgcgtcgtaacaccattaacctgtttgtgcgtagcaaagataaacgtccgcgtgatctgcatattctgagctataccccg

SEQ ID NO: 84202 - DNA, 80 bp, synthetic construct
  source 1..80: mol_type = other DNA
agcgatagcgatattagcagcgtgagcagcaaacatattatggaagatgaatattttgtgtataaaggcgcgtttagcgt

SEQ ID NO: 84203 - DNA, 80 bp, synthetic construct
  source 1..80: mol_type = other DNA
ggaaccgacccgtagctggatgctgtgccagccgctgccgtggagctttgtgcgtccggtgctgcaggtggcgaccggca

SEQ ID NO: 84204 - DNA, 80 bp, synthetic construct
  source 1..80: mol_type = other DNA
gccgtcgtagcccgcgtcagctggatctggaacgtctgcgtgaaattattcgtctgtgcaccgaaagcagcattcgtaac

SEQ ID NO: 84205 - DNA, 80 bp, synthetic construct
  source 1..80: mol_type = other DNA
aaagtgggcaccgtgtatggccagaaccgtccggaaaaatttattgaagcggaaccgattgatatgagcgaaatgtttga

SEQ ID NO: 84206 - DNA, 80 bp, synthetic construct
  source 1..80: mol_type = other DNA
tatgatgctggatgaaggcatggatgatgcgtttgaagaactggcggattatctgaccgtggaagaagatccggattata

SEQ ID NO: 84207 - DNA, 80 bp, synthetic construct
  source 1..80: mol_type = other DNA
tgaccgtgctggcgcatccgctgatggatgattttgtgacccgtctggtgggcaaaatgggccgtccgcagattcgtcgt

SEQ ID NO: 84208 - DNA, 80 bp, synthetic construct
  source 1..80: mol_type = other DNA
ccggcgctgtttgatagcgatgaaaccattagccgtctggaacgtgaagtgaacagcgtgatgagcgcgattcagattga

SEQ ID NO: 84209 - DNA, 80 bp, synthetic construct
  source 1..80: mol_type = other DNA
ctgctggaaaaaaacgtgaccacccgtgatctgcgtgaactgagcgaactgctgtttatggcgctggatcgtgatccgag

SEQ ID NO: 84210 - DNA, 80 bp, synthetic construct
  source 1..80: mol_type = other DNA
atcgtgatccgagccagattcgtgaagaactgattctgggcgatagcccgaccgaagtgccggatgatctgctgggctaa

SEQ ID NO: 84211 - DNA, 80 bp, synthetic construct
  source 1..80: mol_type = other DNA
ttgggataccaccgaaaaaaaatttccgagctttcgtcgtgaactgtttgaaaactttcgtagcaaagaagtggatgatg

SEQ ID NO: 84212 - DNA, 80 bp, synthetic construct
  source 1..80: mol_type = other DNA
aatatattagcaaaattattaaacgttgcaccgatgaagcgctgcgtggcattgaacgtgatagcctgtataccgaagat

SEQ ID NO: 84213 - DNA, 80 bp, synthetic construct
  source 1..80: mol_type = other DNA
taccccgattccggcgtatgtgattaaacatagcagcgatggcgtgaccattgatattgcgaccagcgaactggcggatg

SEQ ID NO: 84214 - DNA, 80 bp, synthetic construct
  source 1..80: mol_type = other DNA
attaccaacaaagaacgttttgaactgaacagcaaacgtgcggcgagcgatattaaaaacaaaatggcggaaatgatgag

SEQ ID NO: 84215 - DNA, 80 bp, synthetic construct
  source 1..80: mol_type = other DNA
ctatgaatttctgcgtgataccgaagatcataaaagcaccgtgcagtttccgccgtgggtgacccgtaccggcccggcgg

SEQ ID NO: 84216 - DNA, 80 bp, synthetic construct
  source 1..80: mol_type = other DNA
gcaccggggatcctaggctttttggattgcgctttccgacagatcaacttggtgttggactctgtcctgttttaggatgg

SEQ ID NO: 84217 - DNA, 80 bp, synthetic construct
  source 1..80: mol_type = other DNA
aggtgacagtgaattctttggtatccgatcagctcctaatgaggaaccacttgagggatttgatgggggtgccatattgc

SEQ ID NO: 84218 - DNA, 80 bp, synthetic construct
  source 1..80: mol_type = other DNA
aactattcaaggttttggtacctggagcatacaaagactggtgaaaccagtgtacctaaatgctggcttgttaccaatgg

SEQ ID NO: 84219 - DNA, 80 bp, synthetic construct
  source 1..80: mol_type = other DNA
taatcacgagcatcaaggctgtgtacaactttgccacctgcgggatattagcattgatcagttttcttcttttggctggt

SEQ ID NO: 84220 - DNA, 80 bp, synthetic construct
  source 1..80: mol_type = other DNA
gctgccccaggaactggcttgggtgaattgatcagaggcttatcgcttgtaagatcaattgtggtgttctcccatgctct

SEQ ID NO: 84221 - DNA, 80 bp, synthetic construct
  source 1..80: mol_type = other DNA
aggtcctgcggcctgtatggtcttgatgggcctgatatttacaaagggatttatcaattcaagtcggtggaatttgacat

SEQ ID NO: 84222 - DNA, 80 bp, synthetic construct
  source 1..80: mol_type = other DNA
cctccgctttcaacaagaaaacatttgaccacacactcatgagcatagtctcaagtttgcatcttagtattagaggaaac

SEQ ID NO: 84223 - DNA, 80 bp, synthetic construct
  source 1..80: mol_type = other DNA
actttaactctggcatcacaatccagtacaatttgtcattctcagatgcacaaagtgctctaagccaatgcaaaaccttc

SEQ ID NO: 84224 - DNA, 80 bp, synthetic construct
  source 1..80: mol_type = other DNA
agaggcagagtcttggatatgttcagaactgcttttggagggaagtacatgagaagtggttggggttggacaggctcaga

SEQ ID NO: 84225 - DNA, 80 bp, synthetic construct
  source 1..80: mol_type = other DNA
aatcgagacatgtacaatacgcaactgcaagaagctgggaccaagagaaaatgttgcagtaattcaggtaggtggcgcga

SEQ ID NO: 84226 - DNA, 80 bp, synthetic construct
  source 1..80: mol_type = other DNA
cccacctcactcaacttaccagttgattattggatgttgattgcacctactagagagggaaaagttgctgaaggtacgaa

SEQ ID NO: 84227 - DNA, 80 bp, synthetic construct
  source 1..80: mol_type = other DNA
caaggaatattgtaccagtgaacattacatctaggcagattaaagacataagagcccagatgaatgaagacatagtgata

SEQ ID NO: 84228 - DNA, 80 bp, synthetic construct
  source 1..80: mol_type = other DNA
caaacacctagaagaattagacagagcttcaaaaggtctttgctataagcatgggtggcaagtggtcaaaacgcagcttc

SEQ ID NO: 84229 - DNA, 80 bp, synthetic construct
  source 1..80: mol_type = other DNA
ggggaatggcccaaggttatggaaagaataagacaaaccccagtaggacgagaccctccagcagcagaaggagcagcaga

SEQ ID NO: 84230 - DNA, 80 bp, synthetic construct
  source 1..80: mol_type = other DNA
tccttcggtacagtggagccattaaacttgacccaaagaatcccaactacaataagtggttggagcttcttgagcaaaat

SEQ ID NO: 84231 - DNA, 80 bp, synthetic construct
  source 1..80: mol_type = other DNA
ggtccaatgattgatgttaacactgattagtgtcactcaaagtaacaagatcgcggcaatcgtttgtgtttggcaacccc

SEQ ID NO: 84232 - DNA, 80 bp, synthetic construct
  source 1..80: mol_type = other DNA
cctgtatgacaattggaatggctaacttaatattacaaattggaaacataacctcaatatggattagccactcaattcaa

SEQ ID NO: 84233 - DNA, 80 bp, synthetic construct
  source 1..80: mol_type = other DNA
aagaccttgcttctgggttgaactaatcagagggcgacccaaagagaacacaatctggactagcgggagcagcatatcct

SEQ ID NO: 84234 - DNA, 80 bp, synthetic construct
  source 1..80: mol_type = other DNA
aaaattatgttaacaaattatctgaccaattattaatatcaaaaaacgtaattgtatccaaaggtatagctataacagaa

SEQ ID NO: 84235 - DNA, 80 bp, synthetic construct
  source 1..80: mol_type = other DNA
tgacgcaggtacgtacgttgggtcaagaatatattcgcaggataagtataaaatattagaatcttacgtatataatttat

SEQ ID NO: 84236 - DNA, 80 bp, synthetic construct
  source 1..80: mol_type = other DNA
ggatcctaggcaatttggttgttctcttttgggttttgtgtgctgaactcctccagatgggaaacaagcaagtcaaaacc

SEQ ID NO: 84237 - DNA, 80 bp, synthetic construct
  source 1..80: mol_type = other DNA
cactttgagacaggttctcgtaggaggcacataaaaacaagaggtaagaggtaattaaagacaatttaataagatagcct

SEQ ID NO: 84238 - DNA, 80 bp, synthetic construct
  source 1..80: mol_type = other DNA
ggggatcctaggcaatttggttattctttttgaggttttgtgtgctatactcttccaaatgggaaacaagcaagccaaaa

SEQ ID NO: 84239 - DNA, 80 bp, synthetic construct
  source 1..80: mol_type = other DNA
tgaggcctcgtaagaagcacagaagacacaagatgaaattaaagacaatttaattagatagccttaatgcctaggatcca

SEQ ID NO: 84240 - DNA, 80 bp, synthetic construct
  source 1..80: mol_type = other DNA
cgcaccggggatcctaggcaatttggttgttcttggttgttcttctcttttttgaggccttgtgcgctgaactcctccaa

SEQ ID NO: 84241 - DNA, 80 bp, synthetic construct
  source 1..80: mol_type = other DNA
atagtccgagagccagcctgatcccagatgctacacatctagggccacagttctgtaagagctgctggttcgaaaacaag

SEQ ID NO: 84242 - DNA, 80 bp, synthetic construct
  source 1..80: mol_type = other DNA
ccggggatcctaggcaatttggttgttcttttttggtggccttgtgcgctgagcttctccaaatgggaaacaagcaagcc

SEQ ID NO: 84243 - DNA, 80 bp, synthetic construct
  source 1..80: mol_type = other DNA
ttagtacaggacaaattcttgtaaaggcatagaagaaacaaaaggcaatcaaagacaatcaaattggatagccttaatgc

SEQ ID NO: 84244 - DNA, 80 bp, synthetic construct
  source 1..80: mol_type = other DNA
ttgtaaaggcatagaagaaacaaaaggcaatcaaagacaatcaaattggatagccttaatgcctaggatcctcggtgcgc

SEQ ID NO: 84245 - DNA, 80 bp, synthetic construct
  source 1..80: mol_type = other DNA
gcgctttgcttttatcactttggcagatagtctcagttctttgttgtgtgcattcaacactataatctggcaatgagtgc

SEQ ID NO: 84246 - DNA, 80 bp, synthetic construct
  source 1..80: mol_type = other DNA
gggatcctaggcaatttggttgttctttctgaggttttgtgcgctgaacttctctaaatgggaaacaagcaagccaaagc

SEQ ID NO: 84247 - DNA, 80 bp, synthetic construct
  source 1..80: mol_type = other DNA
tgtcaataaggtccttatggtgataatctgacacataagccattacaaagtacctaagattttggagaagcttttgagaa

SEQ ID NO: 84248 - DNA, 80 bp, synthetic construct
  source 1..80: mol_type = other DNA
cactttaagacaaggtcccgtaggaggcacagaagtaacaagaggtaattaaagacaattaaattagatagccttaatgc

SEQ ID NO: 84249 - DNA, 80 bp, synthetic construct
  source 1..80: mol_type = other DNA
tccagccctgatgtttaacggaactcgccaatactgaacaccataggagtttgtcagtaactcaaccccttgggtgctag

SEQ ID NO: 84250 - DNA, 80 bp, synthetic construct
  source 1..80: mol_type = other DNA
agattagagactggatggacttaatgtacaaattctctttatttggccctcgaacacatttgctacctaatgttctacac

SEQ ID NO: 84251 - DNA, 80 bp, synthetic construct
  source 1..80: mol_type = other DNA
ccgccgggggcccccccgggggagccagctctctccagagatctactcgatctcctcaatgtgctcttccttttcagcca

SEQ ID NO: 84252 - DNA, 80 bp, synthetic construct
  source 1..80: mol_type = other DNA
ggaacaacttcgtccagatcattcactgatggctggctatcatcaaaaggacttgagcccagtttggcaggttccctata

SEQ ID NO: 84253 - DNA, 80 bp, synthetic construct
  source 1..80: mol_type = other DNA
tttgactttgttcagaaatgatctccagcactgcatctggcactcaccggtagtttgacttcctctttcccagttcccct

SEQ ID NO: 84254 - DNA, 80 bp, synthetic construct
  source 1..80: mol_type = other DNA
tagctacatttgcatacagaaacctcagtatcggtgatgccctcttgaattgataaatcaaactttcaacattgtctttt

SEQ ID NO: 84255 - DNA, 80 bp, synthetic construct
  source 1..80: mol_type = other DNA
gtggtcactttatcagcatacaaatcattgaactcattgagtaattgactcttctcgacctttaggaactgactctctat

SEQ ID NO: 84256 - DNA, 80 bp, synthetic construct
  source 1..80: mol_type = other DNA
tgcttgactgcagatgaggtgatcacagctctcaaataagtggttaactgaggtggcagcttactgtggaatagggtttc

SEQ ID NO: 84257 - DNA, 80 bp, synthetic construct
  source 1..80: mol_type = other DNA
gtcttctgtggtttcccatctgattccaaatcaacaacagtgttttcccaggcccttcctattattgaagtccttgatgc

SEQ ID NO: 84258 - DNA, 80 bp, synthetic construct
  source 1..80: mol_type = other DNA
attggattgcgctttgcattaatcatttcagcagattgtctcaactctctgctgtgagtatacaatacaacaacttggca

SEQ ID NO: 84259 - DNA, 80 bp, synthetic construct
  source 1..80: mol_type = other DNA
gcaccggggatcctaggcaatttagttgttcttcttttggaaccttgcaccctggtacccagcagatggggaacaagcaa

SEQ ID NO: 84260 - DNA, 80 bp, synthetic construct
  source 1..80: mol_type = other DNA
gcaccaccagccagagcaggggataacatcaaacccccaccctacagtccctgagcccccaccaaccccaccactcctcc

SEQ ID NO: 84261 - DNA, 80 bp, synthetic construct
  source 1..80: mol_type = other DNA
ctaagtcattcactgatggctggctatcatcattggggctcaagcctggtttaacaggttccctgtactgatcaacaatt

SEQ ID NO: 84262 - DNA, 80 bp, synthetic construct
  source 1..80: mol_type = other DNA
ttgagtaaggatggatgcacaagtgttagaggaccaaattacaagaggcctggtgtctcaaagaaattcttatccctcct

SEQ ID NO: 84263 - DNA, 80 bp, synthetic construct
  source 1..80: mol_type = other DNA
atcaattggtattcagcaccattcaatgagaactcttgacaatatgcttctttacatctgaccacctgatatcttgcagg

SEQ ID NO: 84264 - DNA, 80 bp, synthetic construct
  source 1..80: mol_type = other DNA
ttgtagggataactccagaaacatcgaagctcatgatcaagtcataactgttagaacaaatcactcccatgtcaacttta

SEQ ID NO: 84265 - DNA, 80 bp, synthetic construct
  source 1..80: mol_type = other DNA
tttggtttctgcttgagcactgagaaggctgcatgaccccagacttttcggcctgttgcctccgctcaacccacttctct

SEQ ID NO: 84266 - DNA, 80 bp, synthetic construct
  source 1..80: mol_type = other DNA
ttaggaatgatctccagcattgcacctggcattccccggtggtttgattcccctttttactaccctcctcatcaatttta

SEQ ID NO: 84267 - DNA, 80 bp, synthetic construct
  source 1..80: mol_type = other DNA
tgtagttatcttatcagtgtacagattattaaactcactgagtaattgactcttctctacccttaagaactgactttcta

SEQ ID NO: 84268 - DNA, 80 bp, synthetic construct
  source 1..80: mol_type = other DNA
tgtctgactgcaagtgagccagtctcagccttcggagtgtatggtcagctgaggtggcaacccactgtgggatgcggtct

SEQ ID NO: 84269 - DNA, 80 bp, synthetic construct
  source 1..80: mol_type = other DNA
tataaaacaagtataaatgatgaatgacaaataacgatcaacaattaaagacaattaaagtagatagcctaaatgcctag

SEQ ID NO: 84270 - DNA, 80 bp, synthetic construct
  source 1..80: mol_type = other DNA
taaatgatgaatgacaaataacgatcaacaattaaagacaattaaagtagatagcctaaatgcctaggatcctcggtgcg

SEQ ID NO: 84271 - DNA, 80 bp, synthetic construct
  source 1..80: mol_type = other DNA
agactcttaccactccatctctcccagtacgagtcccttgaatgccaccactcattcctatcatattcaggagagcccgt

SEQ ID NO: 84272 - DNA, 80 bp, synthetic construct
  source 1..80: mol_type = other DNA
ttggattgcgctttgctcttgtcattttagcagacagtttcagctctccgctgtctacatacaacacgacaacctggcaa

SEQ ID NO: 84273 - DNA, 80 bp, synthetic construct
  source 1..80: mol_type = other DNA
caggggatcctaggcaatttggttgttctttttgagggcttttgtgtcaaactccaccagatggggaacaagcaagccaa

SEQ ID NO: 84274 - DNA, 80 bp, synthetic construct
  source 1..80: mol_type = other DNA
tggtcactgataccaaggggatcgaactgttgacaaattccatcggtgttcaatactggcgagttccgttaggtcttaga

SEQ ID NO: 84275 - DNA, 80 bp, synthetic construct
  source 1..80: mol_type = other DNA
ccgccgggggcccccccgggggagccgaccacttctgaaaaactactcaatgtcctcaacgtgcctgtcctcctcagtca

SEQ ID NO: 84276 - DNA, 80 bp, synthetic construct
  source 1..80: mol_type = other DNA
tttaactttgtttaggaatgatctccagcattgcgcctgacattctccagtagattgatttcctttaccaccatttcctt

SEQ ID NO: 84277 - DNA, 80 bp, synthetic construct
  source 1..80: mol_type = other DNA
cgccaacattcgcatacagaaacctcaatattggtgatgctctcatgaattgataagtcagatgttcaacatcatctttc

SEQ ID NO: 84278 - DNA, 80 bp, synthetic construct
  source 1..80: mol_type = other DNA
acagccaccttatcagcgtataagttgttgaactcattaagtaactgattcttatcaacttttagaaactgaccttctat

SEQ ID NO: 84279 - DNA, 80 bp, synthetic construct
  source 1..80: mol_type = other DNA
tgtttaactacaagtgcagtgatcgaaactcttggagtgtgtggttagctggagtggcagttcgctatgggataaagtcc

SEQ ID NO: 84280 - DNA, 80 bp, synthetic construct
  source 1..80: mol_type = other DNA
ccataagaggcacaagaagcacagtcagtcaaataaagacaattgaattggatatccttaatgcctaggatcctcggtgc

SEQ ID NO: 84281 - DNA, 80 bp, synthetic construct
  source 1..80: mol_type = other DNA
cggggatcctaggcaatttggttgttctttcttgaggccttgtgtgctgaactcctccaaatgggaaataagcaagccaa

SEQ ID NO: 84282 - DNA, 80 bp, synthetic construct
  source 1..80: mol_type = other DNA
gcagctaccttatcagtgtacaaattattaagttcattgagtaatcggctcttatcgacctttaaaaactgaccttctat

SEQ ID NO: 84283 - DNA, 80 bp, synthetic construct
  source 1..80: mol_type = other DNA
tccactataagacaaaatcttgtaaaaggcacagaagaaacagaaggcaattaaagacaattaaaatagataaccttaat

SEQ ID NO: 84284 - DNA, 80 bp, synthetic construct
  source 1..80: mol_type = other DNA
aaatcttgtaaaaggcacagaagaaacagaaggcaattaaagacaattaaaatagataaccttaatgcctaggatcctcg

SEQ ID NO: 84285 - DNA, 80 bp, synthetic construct
  source 1..80: mol_type = other DNA
gttttctgtagcttcccatctgattccagatcaacgacagtgttttcccaggcccttcctgttattgaggttcttgatgc

SEQ ID NO: 84286 - DNA, 80 bp, synthetic construct
  source 1..80: mol_type = other DNA
aaactctcaccactccatctctcccagcccgagccccttgattaccaccactcattcctatcatactcagaagagctcgt

SEQ ID NO: 84287 - DNA, 80 bp, synthetic construct
  source 1..80: mol_type = other DNA
gcgcaccggggatcctaggcaatttggttattctttctgtggccttgtgcactgtactcctcctctaaatgggaaacaag

SEQ ID NO: 84288 - DNA, 80 bp, synthetic construct
  source 1..80: mol_type = other DNA
tcctaggcaatttggttgttctttttgggagcttttgctataaagaccactaaatggggaacaagcaagccaaaactcca

SEQ ID NO: 84289 - DNA, 80 bp, synthetic construct
  source 1..80: mol_type = other DNA
ttagttttgcagaccctgaaggtagtaacgcaacagcatcgaggaaatcttccaacgaatcaaatttggaatcaaccaag

SEQ ID NO: 84290 - DNA, 80 bp, synthetic construct
  source 1..80: mol_type = other DNA
gatctttgtgataaaaatctgacacataagccattatgaaatacctaaggttttggaggagtttctgagaacgcttgcta

SEQ ID NO: 84291 - DNA, 80 bp, synthetic construct
  source 1..80: mol_type = other DNA
attgtagggatagccccagagacatcaaaatccattatcaagtcataaccattagggcaaaccacctccatatcaatctt

SEQ ID NO: 84292 - DNA, 80 bp, synthetic construct
  source 1..80: mol_type = other DNA
tctgatttttatcgagacattgggaggactgcatgatcttggacctttcaacctgctgccttcgctcaacccatttcttt

SEQ ID NO: 84293 - DNA, 80 bp, synthetic construct
  source 1..80: mol_type = other DNA
tgtttggctgtgggtgcagtaaccgagactctcggagtatgtggtcagctggggcagcggctcactgtaggatggagtct

SEQ ID NO: 84294 - DNA, 80 bp, synthetic construct
  source 1..80: mol_type = other DNA
ggagtcttatagggggcacaagaggcacgaaagacaacaaagacaatcaaaatagatagccttaatgcctaggatcctcg

SEQ ID NO: 84295 - DNA, 80 bp, synthetic construct
  source 1..80: mol_type = other DNA
aggggtcacatgccctagttgatttgtgtcagttaaaaactcattgataatctcggtgtcaacataccatgctgatttgc

SEQ ID NO: 84296 - DNA, 80 bp, synthetic construct
  source 1..80: mol_type = other DNA
tcagatgggggttcaacacccaacagctcacaaagatttcttagtgaagagaggtgctcactggacaaatagtttgttgt

SEQ ID NO: 84297 - DNA, 80 bp, synthetic construct
  source 1..80: mol_type = other DNA
gcaagatatcatgatcaaagtcctcaaccatgtggttggataattcagctttaatcaacctaatgtaaaacttgtttgat

SEQ ID NO: 84298 - DNA, 80 bp, synthetic construct
  source 1..80: mol_type = other DNA
gggggaccccccgccgggggcccccccggaggagccaaccgtctctaggaaactactcaatgtcctcgatgcattcatcc

SEQ ID NO: 84299 - DNA, 80 bp, synthetic construct
  source 1..80: mol_type = other DNA
ttgtttcattaggtcatgtttacttgcaaggagaattagtgcatcaaaaattaatagaagtttcctccttgtgttcaata

SEQ ID NO: 84300 - DNA, 80 bp, synthetic construct
  source 1..80: mol_type = other DNA
tttcactttatttagaaatgatctccagcattgcacctgacattctccagtagctcgggtttccccttcctcattcccct

SEQ ID NO: 84301 - DNA, 80 bp, synthetic construct
  source 1..80: mol_type = other DNA
agatcccgtaggaggctcagaagacacaagaggtaattaaagacaattatataagatagccttaatgcctaggatcctcg

SEQ ID NO: 84302 - DNA, 80 bp, synthetic construct
  source 1..80: mol_type = other DNA
ttttggttttgtacgcagaactccaccaaatgggaaacaagcaagccaaaaccccggaagcaaaagacagtccaagagcc

SEQ ID NO: 84303 - DNA, 80 bp, synthetic construct
  source 1..80: mol_type = other DNA
tccacattcccacaaacctcccctatgcacaaccagaggggctggttcagtgcaaggacccaccaatacaaagtcatact

SEQ ID NO: 84304 - DNA, 80 bp, synthetic construct
  source 1..80: mol_type = other DNA
aaactctcaccactccatctctcccgacttgagccccctgattgccaccactcattcctatcatattcaggagagctcgt

SEQ ID NO: 84305 - DNA, 80 bp, synthetic construct
  source 1..80: mol_type = other DNA
gccggggatcctaggcaatttggttgttcttttcggagaccttgtgttaaactcccccaaaatggggaacaagcaagcca

SEQ ID NO: 84306 - DNA, 80 bp, synthetic construct
  source 1..80: mol_type = other DNA
ttttactttatttaggaatgatctccagcattgcacctgacattctccagtaattaggctttcctttctctcaccctcct

SEQ ID NO: 84307 - DNA, 80 bp, synthetic construct
  source 1..80: mol_type = other DNA
gaatgtcagaacccttgggacatgtggtccgctagagtagcagtttattataagataaggttctgcaaaaggcacaaaag

SEQ ID NO: 84308 - DNA, 80 bp, synthetic construct
  source 1..80: mol_type = other DNA
gcggtgggtcacggtggccccaacaggggtctcatctcttccattttacaggcacaccgggctgtttatagagtccgcag

SEQ ID NO: 84309 - DNA, 80 bp, synthetic construct
  source 1..80: mol_type = other DNA
cggggatcctaggcaatttgattgttcttccttcttgaagctttttgcgctgaactcctccaaatgggaaacaagcaaac

SEQ ID NO: 84310 - DNA, 80 bp, synthetic construct
  source 1..80: mol_type = other DNA
gttcatgtgtcctgctgtgagacaatctcagttcagatgataacacaatgtaatgttcctctcttttccattttactatg

SEQ ID NO: 84311 - DNA, 80 bp, synthetic construct
  source 1..80: mol_type = other DNA
cactatgggataaggtcctgtaggaggcacaggggacacaagaggtaaataaagacaattaaaatagatagccttaatgc

SEQ ID NO: 84312 - DNA, 80 bp, synthetic construct
  source 1..80: mol_type = other DNA
ccggggatcctaggcaatttggttgttcttctttttaggtcatttttgccaaactccaccagatgggaaacaagcaagtc

SEQ ID NO: 84313 - DNA, 80 bp, synthetic construct
  source 1..80: mol_type = other DNA
cgtgtgttctagtatgagacaacctcaattcagaagatagcacaatataatgttcctctcttttccatttcactatgtgt

SEQ ID NO: 84314 - DNA, 80 bp, synthetic construct
  source 1..80: mol_type = other DNA
gaagactgtatggatttaatatatagattctctttatttggcccccgaacacatttgctacccagtgttctacacagacc

SEQ ID NO: 84315 - DNA, 80 bp, synthetic construct
  source 1..80: mol_type = other DNA
acctccgaggaactactcaatgtcctcaacatactcatctttctcagttaactcctcacatgttctgccttttagcctta

SEQ ID NO: 84316 - DNA, 80 bp, synthetic construct
  source 1..80: mol_type = other DNA
ttgagcaaggaagggtgcacaggtgccgaagggcccaactacaaaaagcctggtgtctcaaagaagttcttatctcttct

SEQ ID NO: 84317 - DNA, 80 bp, synthetic construct
  source 1..80: mol_type = other DNA
gattgcaccatcactttcttctttgatttgctgtagcagagagcataacctttaaattccacccaattgtccactgcctc

SEQ ID NO: 84318 - DNA, 80 bp, synthetic construct
  source 1..80: mol_type = other DNA
aattgtgggggtaactccagaaacatcaaagtccataatcaagtcataaccattaggatgaaccacctccatatcaatcc

SEQ ID NO: 84319 - DNA, 80 bp, synthetic construct
  source 1..80: mol_type = other DNA
cataatggtccacactaatcccaagatcctttaaagtggtagtagccttcaagatggttttctgaaatatagaattaaga

SEQ ID NO: 84320 - DNA, 80 bp, synthetic construct
  source 1..80: mol_type = other DNA
ttaggaatgatctccagcactgcatctgacattctccagtattttgattccctctattaccagtcctttcaccaatatct

SEQ ID NO: 84321 - DNA, 80 bp, synthetic construct
  source 1..80: mol_type = other DNA
tgtcgacgtataaatcgttgaactccttaagcagctgacctctctcaacctttaagaattgaccttctatctctcccttt

SEQ ID NO: 84322 - DNA, 80 bp, synthetic construct
  source 1..80: mol_type = other DNA
tgcttgactgtgggtgtggtggtcagggttcttgaagtgtgtgatcaactggagcaacagttcactataagacagggttc

SEQ ID NO: 84323 - DNA, 80 bp, synthetic construct
  source 1..80: mol_type = other DNA
ggttccataagagaaacaaaggacacaaccaattaattaaagacaattagaatagatagccttaatgcctaggatcctcg

SEQ ID NO: 84324 - DNA, 80 bp, synthetic construct
  source 1..80: mol_type = other DNA
aagacctcagaggcaagggacagcccaagggccagtctgattccggacgctacagacctaggaccacagttctgtaagag

SEQ ID NO: 84325 - DNA, 80 bp, synthetic construct
  source 1..80: mol_type = other DNA
taagagtcataagctgagaataggtaagcccggcagtaaaccctgttgactgtagggatttgttggagttgttgctccca

SEQ ID NO: 84326 - DNA, 80 bp, synthetic construct
  source 1..80: mol_type = other DNA
cttgaccaatacaagcatcatcgagcataggttttgtaacttatctgatgcccacaaaaagaacctctatgatcatgctc

SEQ ID NO: 84327 - DNA, 80 bp, synthetic construct
  source 1..80: mol_type = other DNA
cgcaccggggatcctaggcaatttggttgttctattctttgagacattgtgcgctgaactcctccaaatggggagcaagc

SEQ ID NO: 84328 - DNA, 80 bp, synthetic construct
  source 1..80: mol_type = other DNA
cagataatttttatgaagaattctgtaacgctgtctatgagaataataagctaaaggagaagtatttttactgtggacat

SEQ ID NO: 84329 - DNA, 80 bp, synthetic construct
  source 1..80: mol_type = other DNA
ttttaccttattcaggaatgatctccagcattgcacctgacattctccagtggtttggttttccccttttccattactct

SEQ ID NO: 84330 - DNA, 80 bp, synthetic construct
  source 1..80: mol_type = other DNA
cgattgactatagagcagagtcctgtaagaggcacagaagacacaagaggcaattaaagacaattaaaatagatagcctt

SEQ ID NO: 84331 - DNA, 80 bp, synthetic construct
  source 1..80: mol_type = other DNA
ctttaaggcattgtgtgctgaattctcccagatggggaacaagcaaaccaaagccccagaggtaaaggacagtccgagag

SEQ ID NO: 84332 - DNA, 80 bp, synthetic construct
  source 1..80: mol_type = other DNA
aaggcggggggtccccccccggggggagccaaccatctccgaaagactactcaatgtcctcgatgtgttcatccctcgca

SEQ ID NO: 84333 - DNA, 80 bp, synthetic construct
  source 1..80: mol_type = other DNA
tttgtatcaactttgtcagtgtacaaattattaaattcattaagcaaccggcccttatcgacttttaaaaactgaccttc

SEQ ID NO: 84334 - DNA, 80 bp, synthetic construct
  source 1..80: mol_type = other DNA
gcattccaagtgtcctatttcaaaatgggacaaatagtgacattcttccaggaagtgcctcatgtaattgaagaggtgat

SEQ ID NO: 84335 - DNA, 80 bp, synthetic construct
  source 1..80: mol_type = other DNA
ttttcaacggtctctctcagttggtcaaaataaatgcttgcacccccatcaagcaaaatttcgtctaggtcagccttgtc

SEQ ID NO: 84336 - DNA, 80 bp, synthetic construct
  source 1..80: mol_type = other DNA
ctgagcaaaaatgggtgtacaagcgccgagggtcccaactacaagagtcctggtgtctcaaaaaagttcttgtccctcct

SEQ ID NO: 84337 - DNA, 80 bp, synthetic construct
  source 1..80: mol_type = other DNA
aaacctttttgcattgtggatcatatcatccagttcttcttccgttgctgtgtctgcaggattaatgcttacgtggccaa

SEQ ID NO: 84338 - DNA, 80 bp, synthetic construct
  source 1..80: mol_type = other DNA
acaagatcaagcccattaatgcccttattagcctatagagcaagaactcaacatcagtaattaaatcttctctaactttg

SEQ ID NO: 84339 - DNA, 80 bp, synthetic construct
  source 1..80: mol_type = other DNA
ggatgggctaggattaagatcaagatcatctttgttaaaaacttaatgttgtttagttgttctttcagctcgttgcaatc

SEQ ID NO: 84340 - DNA, 80 bp, synthetic construct
  source 1..80: mol_type = other DNA
gcagagggcataacctttgaactccacccagctgtccactgcctcaagaaccgcacttaggacctctgcactattcggtg

SEQ ID NO: 84341 - DNA, 80 bp, synthetic construct
  source 1..80: mol_type = other DNA
tctgatttttactcaaacattggggagactgtatagttctaagtctctcaacctgttgcctccgttcaacccactttttt

SEQ ID NO: 84342 - DNA, 80 bp, synthetic construct
  source 1..80: mol_type = other DNA
tttcactttgtttagaaatgacctccaacattgcacttgacattctccagctgcttgatcaccccctctgccatttcctt

SEQ ID NO: 84343 - DNA, 80 bp, synthetic construct
  source 1..80: mol_type = other DNA
cgctaatgtctgcatacaaaaatctcaatattggtgatgccctcttaaactggtgaatcaaatgctcgacattgtcttct

SEQ ID NO: 84344 - DNA, 80 bp, synthetic construct
  source 1..80: mol_type = other DNA
actagaacaacagttcaatacacaagagatacttaaagacaattaattagatagccttaatgcctaggatcctcggtgcg

SEQ ID NO: 84345 - DNA, 80 bp, synthetic construct
  source 1..80: mol_type = other DNA
actgtagggatttgttggagttgttgcccccagctttctgtggtttcccgtctgattccaaatcaacgacagtgttttcc

SEQ ID NO: 84346 - DNA, 80 bp, synthetic construct
  source 1..80: mol_type = other DNA
aggaacttttattggtgtcaatcatgttcaggatggggtggctctgagttagcctgtctaagtcggaggtgttagggtac

SEQ ID NO: 84347 - DNA, 80 bp, synthetic construct
  source 1..80: mol_type = other DNA
cgcacagtggatcctaggctattggattgcgctttgctttgttcattctagtaggtagcatcagctccctgctgtgtata

SEQ ID NO: 84348 - DNA, 80 bp, synthetic construct
  source 1..80: mol_type = other DNA
ctgtttgattttaacaaacaggctatccaaagactgagagctgaagcacaaatgagtattcaattaatcaacaaagcagt

SEQ ID NO: 84349 - DNA, 80 bp, synthetic construct
  source 1..80: mol_type = other DNA
aaattaaggattgaacggatttaatatataggttttccttatttggtccccggacacatttgctacccaatgttctacac

SEQ ID NO: 84350 - DNA, 80 bp, synthetic construct
  source 1..80: mol_type = other DNA
cactataggacaaaatcctgtaaaaggcacagaagaaacaaaaggcaattaaagacaattaaattggatagccttaatgc

SEQ ID NO: 84351 - DNA, 80 bp, synthetic construct
  source 1..80: mol_type = other DNA
ccggggatcctaggcaatttggttgttcatttcttttgaggcctcatttaggtctttcttagaccctctgtgctgaactc

SEQ ID NO: 84352 - DNA, 80 bp, synthetic construct
  source 1..80: mol_type = other DNA
gtacagccttctcaaagaatgaataatatgattcaacccaaccctgtcttctaacaactttgatgcagttggcttcagcg

SEQ ID NO: 84353 - DNA, 80 bp, synthetic construct
  source 1..80: mol_type = other DNA
tctattgcagtcgatagagagatgcacatatagtcccataataagggtctaaagtaactaactatactttcactcttatt

SEQ ID NO: 84354 - DNA, 80 bp, synthetic construct
  source 1..80: mol_type = other DNA
tgatcactggcacccaagggatcgaattgttgacaaattccattggtgttcaatattggcgagttcctttagacctcaga

SEQ ID NO: 84355 - DNA, 80 bp, synthetic construct
  source 1..80: mol_type = other DNA
ccgccgggggcccccccgggggagccaatcacttccaaaaactactcaatgtcctcaacatgttcgtccctctcagtcaa

SEQ ID NO: 84356 - DNA, 80 bp, synthetic construct
  source 1..80: mol_type = other DNA
aggccatcttctcacttgatcatatttactcgcaaggagaatcaatgcatcaaaaattaataaaagtttcctccttgtgt

SEQ ID NO: 84357 - DNA, 80 bp, synthetic construct
  source 1..80: mol_type = other DNA
cactatgggacagggtcccataggagatgcaagagacacagctggttaattaaagacaattaaattggatatccttaatg

SEQ ID NO: 84358 - DNA, 80 bp, synthetic construct
  source 1..80: mol_type = other DNA
cataggagatgcaagagacacagctggttaattaaagacaattaaattggatatccttaatgcctaggatcctcggtgcg

SEQ ID NO: 84359 - DNA, 80 bp, synthetic construct
  source 1..80: mol_type = other DNA
cactaaagggcaaggtcccgtaggaggcaaaggaaacacaagaggcaattaaagacaataaaagacaataaaattagata

SEQ ID NO: 84360 - DNA, 80 bp, synthetic construct
  source 1..80: mol_type = other DNA
accagatggggaacaaacaagccaaagctccagaagcaaggaacagtccgagggccagtctgatcccagacgccacacac

SEQ ID NO: 84361 - DNA, 80 bp, synthetic construct
  source 1..80: mol_type = other DNA
ggcacccaagggatcgaattgttgacaaattctattggtgttcaatattggcgagttcctttagacctcagaaataaaag

SEQ ID NO: 84362 - DNA, 80 bp, synthetic construct
  source 1..80: mol_type = other DNA
agtgatcaaagactgtatagacttgatatacagattctctttatttggcccccgaacacatttactacccaaagttctgc

SEQ ID NO: 84363 - DNA, 80 bp, synthetic construct
  source 1..80: mol_type = other DNA
ccgccgggggccccccgggggagccagccacctccaagattactcaatgtcctcaacaagttcgtcgccctcagtcaact

SEQ ID NO: 84364 - DNA, 80 bp, synthetic construct
  source 1..80: mol_type = other DNA
ctgctacagcaaatcaagggggaaggtgatggtacaatcaagtagtggtaagttaagactgaaaggcagaacatgcgaag

SEQ ID NO: 84365 - DNA, 80 bp, synthetic construct
  source 1..80: mol_type = other DNA
attgtgggggtcactccagatacatcgaagtccataatcaagttataagcgtcggggcagatcacttccatatcaatctt

SEQ ID NO: 84366 - DNA, 80 bp, synthetic construct
  source 1..80: mol_type = other DNA
tttgattcttgcttggacattggaaagactgcatagttctagacctctcaacctgctgtctccgctcaacccatttcttt

SEQ ID NO: 84367 - DNA, 80 bp, synthetic construct
  source 1..80: mol_type = other DNA
ctcttaaaggcctttttttcacttgatcatgtttacttgcgaggagaatcaatgcatcaaaaattagtaaaagtttcctc

SEQ ID NO: 84368 - DNA, 80 bp, synthetic construct
  source 1..80: mol_type = other DNA
acttcactttgtttaggaatgacctccagcattgcatctggcattctccaatagtcaaattttcttcatcatcattccct

SEQ ID NO: 84369 - DNA, 80 bp, synthetic construct
  source 1..80: mol_type = other DNA
ttgctaatatttgcatacaaaaatctcagtattggtgatgctctcttgaattgatgaatcaagtgttcaacactgtcttt

SEQ ID NO: 84370 - DNA, 80 bp, synthetic construct
  source 1..80: mol_type = other DNA
tcctccatgtttggctgcaagtgtggtaatcgaaactcttggaatatgtggtcagctagagtaacggctcactatgggac

SEQ ID NO: 84371 - DNA, 80 bp, synthetic construct
  source 1..80: mol_type = other DNA
caagtgtcctttttgacatgggacaaatagtgacatttttccaagaagtgcctcatgtgatagaggaggtgatgaacatt

SEQ ID NO: 84372 - DNA, 80 bp, synthetic construct
  source 1..80: mol_type = other DNA
gagagtcatgagttgagaataagtgagcccagcagtgaaccctgctgactggagggatttgttggaattgttgcccccag

SEQ ID NO: 84373 - DNA, 80 bp, synthetic construct
  source 1..80: mol_type = other DNA
ctttctgtggttttccatctgattccaggtcaacgacagtgttttcccaggctcttcctgttattgaagttcttgatgca

SEQ ID NO: 84374 - DNA, 80 bp, synthetic construct
  source 1..80: mol_type = other DNA
aaactctcaccactccatctcccccagcctgagcccctcgactgccaccagtcattcctatcatatttagaagagctcgt

SEQ ID NO: 84375 - DNA, 80 bp, synthetic construct
  source 1..80: mol_type = other DNA
aaggactttatctcctttgaggcactcattgtcaagttgttgtgtactgttcaaatagcagaaaattgaaactatctgct

SEQ ID NO: 84376 - DNA, 80 bp, synthetic construct
  source 1..80: mol_type = other DNA
tgctagagcaacagttcaccacaggccagggtcccgtggggggcacaagggatacaagaggcaattaaagacaattaaat

SEQ ID NO: 84377 - DNA, 80 bp, synthetic construct
  source 1..80: mol_type = other DNA
caccacaggccagggtcccgtggggggcacaagggatacaagaggcaattaaagacaattaaattagatagccttaatgc

SEQ ID NO: 84378 - DNA, 80 bp, synthetic construct
  source 1..80: mol_type = other DNA
caattcaagtgtccttctaaacatggggcaaatagtgacttttttccaggaagtgcctcatgtgatagaggaggtgatga

SEQ ID NO: 84379 - DNA, 80 bp, synthetic construct
  source 1..80: mol_type = other DNA
aggagcttttgctggtgtctaccatatttagaatggggtggctctgagtcagcctgtctaagtctgaagtgttagggtat

SEQ ID NO: 84380 - DNA, 80 bp, synthetic construct
  source 1..80: mol_type = other DNA
aaattctcaccactccatctttcccggtccgagccccttgattgccactgctcattcctatcatgtttaagagagcccgt

SEQ ID NO: 84381 - DNA, 80 bp, synthetic construct
  source 1..80: mol_type = other DNA
aggcactcattgtcaggttgttatgttggatacacgcagcaaagagtcgagactttccgctgaatgacaagagcaaagcg

SEQ ID NO: 84382 - DNA, 80 bp, synthetic construct
  source 1..80: mol_type = other DNA
ctattcaagtgtcctatttaaaatgggacaaatagtgacattcttccaggaagtgccccatgttatagaagaggtgatga

SEQ ID NO: 84383 - DNA, 80 bp, synthetic construct
  source 1..80: mol_type = other DNA
gggatcctaggcaattcagctggacttcagtggtgaggctatttcagcaaatccctgaatcaaagtacccagtcggaatg

SEQ ID NO: 84384 - DNA, 80 bp, synthetic construct
  source 1..80: mol_type = other DNA
ggggatcctaggcaatttagctggacttcagtggtaaagcccattttagtgaatccctgaatcaaagtgcccagccaaaa

SEQ ID NO: 84385 - DNA, 80 bp, synthetic construct
  source 1..80: mol_type = other DNA
aaagcaagtctccaacagtcagacagaacacatgggctcacagacccagaatatagtgcctgtacatcattcactacaaa

SEQ ID NO: 84386 - DNA, 80 bp, synthetic construct
  source 1..80: mol_type = other DNA
ttcaccacattgattaacaagccctgtcatgttgagatggatagaaaaagtctctttaaagctagcatcctgactcttga

SEQ ID NO: 84387 - DNA, 80 bp, synthetic construct
  source 1..80: mol_type = other DNA
ttttatacctaattgtctggtaaaactgaacagagtccactggcattgtacttaacaaatcaaagaaatcttcaagggag

SEQ ID NO: 84388 - DNA, 80 bp, synthetic construct
  source 1..80: mol_type = other DNA
tctaacctcaattcctctgtcaggcctgaggcaataagctggttcaaatttatctgggctggttctatgtcaaagtctat

SEQ ID NO: 84389 - DNA, 80 bp, synthetic construct
  source 1..80: mol_type = other DNA
ccatgcatagcccatcatcaaatcaaatttaaacataggtctctctatccctttgtaaatagccttttcaatgaatgagg

SEQ ID NO: 84390 - DNA, 80 bp, synthetic construct
  source 1..80: mol_type = other DNA
agaagggacctagtcgctgtagaccttcaccctctggtattgaggttttatgagggaaccaagtgaaagacccaagtgtc

SEQ ID NO: 84391 - DNA, 80 bp, synthetic construct
  source 1..80: mol_type = other DNA
ccccagttctgtaagagttgctggtttgagaacagagggctggtggagtgcaacaaccactacctgtgtctcaactgtct

SEQ ID NO: 84392 - DNA, 80 bp, synthetic construct
  source 1..80: mol_type = other DNA
cctccctcttccacttgacaatgtgtgaaacaagtgagagtgcctcgcaattcacatctagggcaacacaaagatcaagg

SEQ ID NO: 84393 - DNA, 80 bp, synthetic construct
  source 1..80: mol_type = other DNA
tctttgtagaagctaaatcactcataaatggcagtatgtgcttctcaaatagagacggatacaaacgtcttaaagaatga

SEQ ID NO: 84394 - DNA, 80 bp, synthetic construct
  source 1..80: mol_type = other DNA
atgatgtggctcatgccaaccctgtcctctagcagtttcgaaacagtgggtcttaaggggaagtaatcacagggattgtg

SEQ ID NO: 84395 - DNA, 80 bp, synthetic construct
  source 1..80: mol_type = other DNA
tttaaaaaagtccaagatctgagcttgttttggttccccgagtacccatgccccaagttctatagctgtagatagtgtta

SEQ ID NO: 84396 - DNA, 80 bp, synthetic construct
  source 1..80: mol_type = other DNA
tgcacatataatcccatagaagaggtcttaaataagtgacaacagtatcacctccatctttgacttctggtgagactttc

SEQ ID NO: 84397 - DNA, 80 bp, synthetic construct
  source 1..80: mol_type = other DNA
catatctggattccattgtcccccatcactacttcaacaccttgagtctccagcagctgagtttgtatggatctaatgta

SEQ ID NO: 84398 - DNA, 80 bp, synthetic construct
  source 1..80: mol_type = other DNA
aagattctccttgttaggccctctgacgcacttgctacctagtgttctgcacaaccctacaaacccagatgctatagaac

SEQ ID NO: 84399 - DNA, 80 bp, synthetic construct
  source 1..80: mol_type = other DNA
tttggaaagccgatttatttattgcttcagacagcagcttctgagctcctctagtgaatgtcgatgacaacctattttgc

SEQ ID NO: 84400 - DNA, 80 bp, synthetic construct
  source 1..80: mol_type = other DNA
aaggtctttactattgtagggaccttttcatcttccagattcacagcaccagaataaattatcttctgccgcaacaccat

SEQ ID NO: 84401 - DNA, 80 bp, synthetic construct
  source 1..80: mol_type = other DNA
tctaagcgggtgatgggtggctaagttcaaccaatgataccccaaatcagaatcagacaaaggttcaatgcctagaagtt

SEQ ID NO: 84402 - DNA, 80 bp, synthetic construct
  source 1..80: mol_type = other DNA
taaacaaattttgtaatgatgttatgtgttcacctgataggtagttggtggtgaattcctcatgaagctcaccagttttt

SEQ ID NO: 84403 - DNA, 80 bp, synthetic construct
  source 1..80: mol_type = other DNA
aatttattaaacaatatcctaagcattgacctcatccttttgcatgcatcagggattagcctctcaatttgcctcattat

SEQ ID NO: 84404 - DNA, 80 bp, synthetic construct
  source 1..80: mol_type = other DNA
tctgcaaaatgcctcttcccaccaggctaaaggcagcaacacagccgagcgcaccctcaaccgaggcgacccagaacaca

SEQ ID NO: 84405 - DNA, 80 bp, synthetic construct
  source 1..80: mol_type = other DNA
gatcaataggatacttggcataacataacaaacttaaagtcctcttctgaatttgattacacagatcaactgggacacca

SEQ ID NO: 84406 - DNA, 80 bp, synthetic construct
  source 1..80: mol_type = other DNA
ttggccacagattgatcaattatggtatcaattgtttctgccaattgatggggttctttgcactttatgttatgtaaagc

SEQ ID NO: 84407 - DNA, 80 bp, synthetic construct
  source 1..80: mol_type = other DNA
cgcagcaacaaattttgttagcagaggtacctcgtcaccccaaacatagaaccttgatttgaactctgcaacaaatctgc

SEQ ID NO: 84408 - DNA, 80 bp, synthetic construct
  source 1..80: mol_type = other DNA
tttggactcacaaatttatttagctgatcactcatgtagtagtggaattccaacaatgttttgaattcctctgtatctct

SEQ ID NO: 84409 - DNA, 80 bp, synthetic construct
  source 1..80: mol_type = other DNA
tgagagtaactctgttaagttctgatcaaacaacgatatctgatcgtcactggacgtgtaagcatcgatctgtcctccag

SEQ ID NO: 84410 - DNA, 80 bp, synthetic construct
  source 1..80: mol_type = other DNA
acacacacctcaccgcaaaatttataaatctttcagaaatcaacgcataaaagtctgaagtgttgtgcagaataccctgt

SEQ ID NO: 84411 - DNA, 80 bp, synthetic construct
  source 1..80: mol_type = other DNA
cccatatcaaggatcgaactaatgtgtgaggggactgtgccaatttgaaagttggaattgaaaaagtcttcagtcactga

SEQ ID NO: 84412 - DNA, 80 bp, synthetic construct
  source 1..80: mol_type = other DNA
tcaaccgaggcgacccagaacacaatacctccaccatacaccccgtgatcccaggaacaacactcccatctccatcaccc

SEQ ID NO: 84413 - DNA, 80 bp, synthetic construct
  source 1..80: mol_type = other DNA
caaccattttgtgcatatgccacgttaataatgttgataggtaatctttgccttttaaatcagcttgtaaatcatcagaa

SEQ ID NO: 84414 - DNA, 80 bp, synthetic construct
  source 1..80: mol_type = other DNA
agtaagattagattttgaattattgttagaaacaagaaaggacacatcatagggccccacttactgtgatccatactata

SEQ ID NO: 84415 - DNA, 80 bp, synthetic construct
  source 1..80: mol_type = other DNA
atacctccaccatacaccccgtgatcccaggaacaacactcccatctccatcacccaccccccacccccggagggaccac

SEQ ID NO: 84416 - DNA, 80 bp, synthetic construct
  source 1..80: mol_type = other DNA
ttagacagctgcccgctaactgtgatgtaagcgcttcaaagtaatcttcaatgagccttgtgaacatctttgtcctcaaa

SEQ ID NO: 84417 - DNA, 80 bp, synthetic construct
  source 1..80: mol_type = other DNA
tctccgatgtacaactctctattgcctcccacttgttctttgtaagacaaagaaaattttagtctgccagtgtcagggcc

SEQ ID NO: 84418 - DNA, 80 bp, synthetic construct
  source 1..80: mol_type = other DNA
agttgaattataagattgaggtgattcctgactgtaaaaacacaggtttttcaacattgctgtagtacagttagttaggg

SEQ ID NO: 84419 - DNA, 80 bp, synthetic construct
  source 1..80: mol_type = other DNA
ataaggccttgctaagtgcttcagaattactctcacgttcacttattctgacatcctcagctaatcttcctgtatcaaat

SEQ ID NO: 84420 - DNA, 80 bp, synthetic construct
  source 1..80: mol_type = other DNA
aaagcactggaaatattcctggtccaaaaaagttctggtcactactgcctttgtcaactcactaataggacatgagttca

SEQ ID NO: 84421 - DNA, 80 bp, synthetic construct
  source 1..80: mol_type = other DNA
ttggccctacataaaagtatttacttctcaaagcagcatcattgtagatattctcacaaattttgatatattgatcctca

SEQ ID NO: 84422 - DNA, 80 bp, synthetic construct
  source 1..80: mol_type = other DNA
gacaggatctctcgatcaaagtcttctatcatatggtttgaaagttcactttttatcaaccttattaaaagtttttcttc

SEQ ID NO: 84423 - DNA, 80 bp, synthetic construct
  source 1..80: mol_type = other DNA
caccaccttgtcaagatcagatattgagggtgcattgcagtctacctgctgctgtctttctggttgctccctatactgac

SEQ ID NO: 84424 - DNA, 80 bp, synthetic construct
  source 1..80: mol_type = other DNA
tgacaatattgtcaacagtacacctcagttggtcgaagtattctgatgctcctccatccagcagtatctcatctagatca

SEQ ID NO: 84425 - DNA, 80 bp, synthetic construct
  source 1..80: mol_type = other DNA
gcattgttggtgtcaccactccctcctttggaccccagaacaagattactcattgcttgctgtatcttgtaatcataatc

SEQ ID NO: 84426 - DNA, 80 bp, synthetic construct
  source 1..80: mol_type = other DNA
ctgtttattaagcaagaatttgcccttacgtgcaaacacctcagtcaactgtgtgacagctaaagctgtgagcttattga

SEQ ID NO: 84427 - DNA, 80 bp, synthetic construct
  source 1..80: mol_type = other DNA
gggcaggcagcccaactctactcaatgtcttcaatacacctctctggcccaaacaactctgaacatgttcttcccttcag

SEQ ID NO: 84428 - DNA, 80 bp, synthetic construct
  source 1..80: mol_type = other DNA
agtcataatccagaatgcgagacccatctgtatatttattcacaacaacactcttattgctggctaagtccaaagctgtt

SEQ ID NO: 84429 - DNA, 80 bp, synthetic construct
  source 1..80: mol_type = other DNA
gcacagccacttgtgataagagggtctcgcagtgtcctctttacttccttttctttaaataatgagccattattaaaact

SEQ ID NO: 84430 - DNA, 80 bp, synthetic construct
  source 1..80: mol_type = other DNA
agacacaaggagtgagataaattttttagaaacaccaggctttttatacctaattttttctgcatctgcacaacattctt

SEQ ID NO: 84431 - DNA, 80 bp, synthetic construct
  source 1..80: mol_type = other DNA
tgtccaaattctaatttgggttcaaggaatttttcaaagcatttgatctgatcagtcagtctgtcaggtgtttcttttgt

SEQ ID NO: 84432 - DNA, 80 bp, synthetic construct
  source 1..80: mol_type = other DNA
aatgaagtggcacatataagagacatttaaaacaaacttgaacctattggtcatcatactgacaacttcttcagacagaa

SEQ ID NO: 84433 - DNA, 80 bp, synthetic construct
  source 1..80: mol_type = other DNA
ttatttttaataagtgacgaacaagtctgtagagcagatattcaacttctgtgatcagatcctccctaattttctcaatc

SEQ ID NO: 84434 - DNA, 80 bp, synthetic construct
  source 1..80: mol_type = other DNA
aaatccttatgataaaaatcggatacaaaggccatcacaaaatacctaatgttttgtaaaaatttttgacaccttttact

SEQ ID NO: 84435 - DNA, 80 bp, synthetic construct
  source 1..80: mol_type = other DNA
aggatgtgtcagtatcaagactaaaatcattttggttaacaatttaatagtgatcaattgttcagacaactctgtgcatt

SEQ ID NO: 84436 - DNA, 80 bp, synthetic construct
  source 1..80: mol_type = other DNA
cttctatccagctgaccataacatcgactactttctgtaatacatcgctggagaaaactgagggaaagaaccgtttagga

SEQ ID NO: 84437 - DNA, 80 bp, synthetic construct
  source 1..80: mol_type = other DNA
tcagcataaaaggaacaaacctctccaactatattgttgttaatagcataacactttgagcattcacctgtcttttgata

SEQ ID NO: 84438 - DNA, 80 bp, synthetic construct
  source 1..80: mol_type = other DNA
ataatagtttgaatcccatcctattgatgaagaactcttggcaataggcttctttgcacctcacaacctgatatctagag

SEQ ID NO: 84439 - DNA, 80 bp, synthetic construct
  source 1..80: mol_type = other DNA
ggtccaaattcattttgcctcagtttcactgtggaagacgtcttcattgagttgatcaaagccaagcttaatgatgatag

SEQ ID NO: 84440 - DNA, 80 bp, synthetic construct
  source 1..80: mol_type = other DNA
tttctaagtctgttgcatctagaatgtcaatgacgccaagagtgtaagggaacatgtcttcctgagttttctggtaactt

SEQ ID NO: 84441 - DNA, 80 bp, synthetic construct
  source 1..80: mol_type = other DNA
atagtgggtgtgataccggaaatctcaatgtccatgatggcatcataaacatcacaatcaaaaatcttaaaatcaattcc

SEQ ID NO: 84442 - DNA, 80 bp, synthetic construct
  source 1..80: mol_type = other DNA
ataagagttagtttctatgccaacctccctcaaagcattagtggctcgagttagtactctgttgatgattgcaaggagct

SEQ ID NO: 84443 - DNA, 80 bp, synthetic construct
  source 1..80: mol_type = other DNA
cacaattccgttcttctttgggtgataggacacctgcatttctgtccctagttctcttcctactgtctatccaccgtttt

SEQ ID NO: 84444 - DNA, 80 bp, synthetic construct
  source 1..80: mol_type = other DNA
agggcatagcctttgaaatcaatccattctccaagagattcaagaagttcactcagtatatcagcataatccaaaggtct

SEQ ID NO: 84445 - DNA, 80 bp, synthetic construct
  source 1..80: mol_type = other DNA
aaatctctttttgttgattccaatgaaactaatctatcgttaacactcacaaaacaggagcccagccaaccagcaaggag

SEQ ID NO: 84446 - DNA, 80 bp, synthetic construct
  source 1..80: mol_type = other DNA
cccgtcaccatgctttatgcggtccaaccggctagcaagaagaatgagaacatcaaaaacaaggagaagtttcctcctgg

SEQ ID NO: 84447 - DNA, 80 bp, synthetic construct
  source 1..80: mol_type = other DNA
tgttaaggatccttagagactttatcttattcagaaaagatctccaacattgcatctgttcactttgagagtcagcagcc

SEQ ID NO: 84448 - DNA, 80 bp, synthetic construct
  source 1..80: mol_type = other DNA
ctttcttcaccagaattcaagtctgcatacaagaacttaagaactggggaggctcttcgaaactggaatgttaactgttc

SEQ ID NO: 84449 - DNA, 80 bp, synthetic construct
  source 1..80: mol_type = other DNA
aatgctgtcatcacaggcatctattttatcactatatagctttttgaaatcctctaataacttcaccttatcagtcttaa

SEQ ID NO: 84450 - DNA, 80 bp, synthetic construct
  source 1..80: mol_type = other DNA
cgaattgattttctatgtccccttgccttagcttgttcctgaagatttgatactcctcctcaattaaactcttgacttca

SEQ ID NO: 84451 - DNA, 80 bp, synthetic construct
  source 1..80: mol_type = other DNA
tgggaggtgagcttgttattaatgccctgatgacaactagaaattatctcctcaaagtgttttgcacgcttatcagttag

SEQ ID NO: 84452 - DNA, 80 bp, synthetic construct
  source 1..80: mol_type = other DNA
aacattaatgctttcgattcctgagagcctaccagacgttaaggctaaagactcacaaagtcttgagtactcagactctt

SEQ ID NO: 84453 - DNA, 80 bp, synthetic construct
  source 1..80: mol_type = other DNA
caaacaatgcattactttcttgtgaatattttaacagggtgaataaggtgtccctgagcttgtcatttacccaatcaggt

SEQ ID NO: 84454 - DNA, 80 bp, synthetic construct
  source 1..80: mol_type = other DNA
atttgttcattgtaaaatgttgtcctgccgtctatgagagggatgagattgatgccaacagactccaaatcattctttaa

SEQ ID NO: 84455 - DNA, 80 bp, synthetic construct
  source 1..80: mol_type = other DNA
ctgttttgttaagattgagacaatgtccacacccgtccattgaattctttgtttcaatctatcagacatcattgatttca

SEQ ID NO: 84456 - DNA, 80 bp, synthetic construct
  source 1..80: mol_type = other DNA
ttgttctagtttcttgtgatcttctaaatacttctgttcaaaattggcgggggatgatctaacaaagcactcaagtaaga

SEQ ID NO: 84457 - DNA, 80 bp, synthetic construct
  source 1..80: mol_type = other DNA
agccgtcaggcaccacaaagcataaagctggagtgagaatcccatgatcactcagaatggattcaaccgttttgtcttca

SEQ ID NO: 84458 - DNA, 80 bp, synthetic construct
  source 1..80: mol_type = other DNA
gtgttatgttcacacccattagccttacaagagtcaatctcaatacagagagacaatagcttcaatccctccatgagtaa

SEQ ID NO: 84459 - DNA, 80 bp, synthetic construct
  source 1..80: mol_type = other DNA
cattctaggttcagtttggaccagaaaagctaacttctgtcttgatagcttctcattatctgcaaggtattttgagataa

SEQ ID NO: 84460 - DNA, 80 bp, synthetic construct
  source 1..80: mol_type = other DNA
gatctttagcattggcaatgtcttcctccatcgccgattatggcacctgtgctgggtttgggcctgtgcctgtgtggctt

SEQ ID NO: 84461 - DNA, 80 bp, synthetic construct
  source 1..80: mol_type = other DNA
gcaggtcagctggtggtgccccacaaaaactcccacagaaatgagagacaatatgcctaggatcctcggtgccccacaaa

SEQ ID NO: 84462 - DNA, 80 bp, synthetic construct
  source 1..80: mol_type = other DNA
ccccacaaaaactcccacagaaatgagagacaatatgcctaggatcctcggtgccccacaaaaactcccacagaaatgag

SEQ ID NO: 84463 - DNA, 80 bp, synthetic construct
  source 1..80: mol_type = other DNA
atgcaccaactaaaagatgtggggaaccatcaccaatctcccttacaaacatttctaaatcttgatcttgaatagatggt

SEQ ID NO: 84464 - DNA, 80 bp, synthetic construct
  source 1..80: mol_type = other DNA
tgggcaacaagcaggccaaatcgacaaaagttgatgaacatcaaagagctcatctagtgccagatgcatctcatctaggc

SEQ ID NO: 84465 - DNA, 80 bp, synthetic construct
  source 1..80: mol_type = other DNA
gaaaatgtggctaccctcctatcagattcccacagtgctcccctacatacaaccaatggcactggttcgttgtcaggacc

SEQ ID NO: 84466 - DNA, 80 bp, synthetic construct
  source 1..80: mol_type = other DNA
gaccttggtgaagtcaaactcactgaactgcagtttatctggattgataatcagcttcatgggtataacatcccctaact

SEQ ID NO: 84467 - DNA, 80 bp, synthetic construct
  source 1..80: mol_type = other DNA
gctgtgtatcctttaagaactcatttaccacatctgattcaacaaaccaggctgacctacctttgaaagttggacccgac

SEQ ID NO: 84468 - DNA, 80 bp, synthetic construct
  source 1..80: mol_type = other DNA
aatgacttgtgggtcaactagtggtgtcccacaaaagttcctacagaaatgagagacaatatgcctaggatcctcggtgc

SEQ ID NO: 84469 - DNA, 80 bp, synthetic construct
  source 1..80: mol_type = other DNA
tatggtttgtaaatcagctggtggtgccccacgaaagctttcacagaaatgagagacaataagcctaggatcctcggtgc

SEQ ID NO: 84470 - DNA, 80 bp, synthetic construct
  source 1..80: mol_type = other DNA
cccccgccggaggcccccccggggggcgggcggctcggctctactcgatgtcctcaacatgcctctcctgcccaaacagt

SEQ ID NO: 84471 - DNA, 80 bp, synthetic construct
  source 1..80: mol_type = other DNA
tcggctctactcgatgtcctcaacatgcctctcctgcccaaacagttccgaacatgtcctcccctttagtcttaggctac

SEQ ID NO: 84472 - DNA, 80 bp, synthetic construct
  source 1..80: mol_type = other DNA
tgctgggcttaaacttgtgtttgtgtggctcgtagatcagtcaatggtgccccaaaaaaagcctccacagaaatgagaga

SEQ ID NO: 84473 - DNA, 80 bp, synthetic construct
  source 1..80: mol_type = other DNA
gcgcaccggggatcctaggcatttaggattgcgcttttagaattctttgtgtgagtgggcttcattaagccatgaggcaa

SEQ ID NO: 84474 - DNA, 80 bp, synthetic construct
  source 1..80: mol_type = other DNA
tactaagttaaaatgggcaatagacaggctaagtcgacaaaagtcgatgaacatcaaagagctcatctagtgccagatgc

SEQ ID NO: 84475 - DNA, 80 bp, synthetic construct
  source 1..80: mol_type = other DNA
tatggcttgtgggtcggctggtgatgtcctagagaaactactacagaaatgagagacaatatgcctaggatcctcggtgc

SEQ ID NO: 84476 - DNA, 80 bp, synthetic construct
  source 1..80: mol_type = other DNA
ccggggatcctaggcaattcagttggactttagttgtagggctccttttagtgaatccctgaatcaaagcacccagtaaa

SEQ ID NO: 84477 - DNA, 80 bp, synthetic construct
  source 1..80: mol_type = other DNA
tttatctcataagcatctttctccacctgatcaagatcccaactcacagacacatcgtagggaaaccctgtcctaagccg

SEQ ID NO: 84478 - DNA, 80 bp, synthetic construct
  source 1..80: mol_type = other DNA
aagtatcctgaaatttactagttgaagtgtttcacccagtaaatcaataataggcgcaatccagtagcctaggatccact

SEQ ID NO: 84479 - DNA, 80 bp, synthetic construct
  source 1..80: mol_type = other DNA
tcttccaagaggtgcctcatgtcatagaggaggtcatgaacatcgtcctaatcgccctcagtctcctggcgatgctgaaa

SEQ ID NO: 84480 - DNA, 80 bp, synthetic construct
  source 1..80: mol_type = other DNA
cccccgccgggggcccccccggggggagcaaccgcacaatccaatcttactcaatatccacaatatgcttctctggttcg

SEQ ID NO: 84481 - DNA, 80 bp, synthetic construct
  source 1..80: mol_type = other DNA
gggagcaaccgcacaatccaatcttactcaatatccacaatatgcttctctggttcgaacaattctgaacacgttctccc

SEQ ID NO: 84482 - DNA, 80 bp, synthetic construct
  source 1..80: mol_type = other DNA
attggcaatgccttcctccattgttaattgcaatgcttggatcgaattggggcttatgcttatttgatgtgcacgtcagt

SEQ ID NO: 84483 - DNA, 80 bp, synthetic construct
  source 1..80: mol_type = other DNA
ttatttgatgtgcacgtcagttagtgacactccaagtaaaattctacagagatgagagtcaatatgcctaggatcctcgg

SEQ ID NO: 84484 - DNA, 80 bp, synthetic construct
  source 1..80: mol_type = other DNA
cgatgttaattggaactcactggttgaaaatgttatccagtaaatcaacagtagtaagcgcaatctaaaagcctaggatc

SEQ ID NO: 84485 - DNA, 80 bp, synthetic construct
  source 1..80: mol_type = other DNA
attggaactcactggttgaaaatgttatccagtaaatcaacagtagtaagcgcaatctaaaagcctaggatccactgtgc

SEQ ID NO: 84486 - DNA, 80 bp, synthetic construct
  source 1..80: mol_type = other DNA
cggggatcctaggcattttggaacgcgcattcctagagtcattgaagagtgcctcacactcagacatgggacaaatagtg

SEQ ID NO: 84487 - DNA, 80 bp, synthetic construct
  source 1..80: mol_type = other DNA
gaggtcctgaagaccatgtccctgggtaacacagctcttaagatcctggcatcaagcccacccactacagctgcgtcaaa

SEQ ID NO: 84488 - DNA, 80 bp, synthetic construct
  source 1..80: mol_type = other DNA
caccaattttatatcttttcttccttgtgattctaagagtttcttaatgtcttccgacccttgacaggtgatgaccatgt

SEQ ID NO: 84489 - DNA, 80 bp, synthetic construct
  source 1..80: mol_type = other DNA
tgacatcccaaactctcactatgccatctctcccggtgcttgccccttgtctatcactagtcataccaatcatgttcaac

SEQ ID NO: 84490 - DNA, 80 bp, synthetic construct
  source 1..80: mol_type = other DNA
atggcttgtgagtcagttagtagtgcccctcagaagctcccacagaaatgagagacaatatgcctaggatcctcggtgcg

SEQ ID NO: 84491 - DNA, 80 bp, synthetic construct
  source 1..80: mol_type = other DNA
aggcaattcagctgaacttcagtagtggggctcatcttagtgaatccctgaatcaaagtgcctagtcaaaatgggcaaca

SEQ ID NO: 84492 - DNA, 80 bp, synthetic construct
  source 1..80: mol_type = other DNA
cccgccgggggcccccccggggggcgggcaacccagctctattcaatgtcttcaacacacctctccggcccaaacaactc

SEQ ID NO: 84493 - DNA, 80 bp, synthetic construct
  source 1..80: mol_type = other DNA
ttcaatgtcttcaacacacctctccggcccaaacaactctgaacatgtccttcccttcagtcttaggctgcctccacttg

SEQ ID NO: 84494 - DNA, 80 bp, synthetic construct
  source 1..80: mol_type = other DNA
gcgccggggatcctaggcatttaggattgcgcttttagagatctttgtgtgagtgggctttatcaaaccatgggacaaat

SEQ ID NO: 84495 - DNA, 80 bp, synthetic construct
  source 1..80: mol_type = other DNA
atggcttgtaggtcggttgttgatgccccacagaagctcctgcagaaatgagagacaatatgcctaggatcctcggtgcg

SEQ ID NO: 84496 - DNA, 80 bp, synthetic construct
  source 1..80: mol_type = other DNA
ttagggttcactggttcactggttgaaagtattactcagtgagtcaatgaaaagcgcaatccaatagcctaggatccact

SEQ ID NO: 84497 - DNA, 80 bp, synthetic construct
  source 1..80: mol_type = other DNA
gtatggcttgtgaatcggctggtggtgcctcacaggagatcctaaagaaatgagagacaatatgcctaggatcctcggtg

SEQ ID NO: 84498 - DNA, 80 bp, synthetic construct
  source 1..80: mol_type = other DNA
gcaattcagctggacttcagtggtaagacttattttggtgaacccctgaatcaaagtgctcagctaaaatgggcaacaga

SEQ ID NO: 84499 - DNA, 80 bp, synthetic construct
  source 1..80: mol_type = other DNA
tcacaattttgttcttctttaagtgatagggcacctgcacccctgcccttaggtatcttcccgcgtcggtgtctcccccg

SEQ ID NO: 84500 - DNA, 80 bp, synthetic construct
  source 1..80: mol_type = other DNA
ctggatcctgctgtccatccaccgttttagatccttttttgttgattccaatgaaactaatctatcgttgacactcacaa

SEQ ID NO: 84501 - DNA, 80 bp, synthetic construct
  source 1..80: mol_type = other DNA
tgtggcgtgtgggccagctggcagtaccccacaaaagctcttacagaaatgagagacaatatgcctaggatcctcggcgc

SEQ ID NO: 84502 - DNA, 80 bp, synthetic construct
  source 1..80: mol_type = other DNA
accggggatcctaggcaatttaactgcacttcagtggtaaagctcattctagtgaattcctgagttaaagtgtgtggtca

SEQ ID NO: 84503 - DNA, 80 bp, synthetic construct
  source 1..80: mol_type = other DNA
gtggcttgtaaatcagctagtggtgctccacaaaaaactcctacagaaatgagagacaatacgcctaggatcctcggcgc

SEQ ID NO: 84504 - DNA, 80 bp, synthetic construct
  source 1..80: mol_type = other DNA
aaatgggcaatagacaagccaaatcggcaaaagtcgatgaacatcaaagagctcatctggtgccagatgcgtcccattta

SEQ ID NO: 84505 - DNA, 80 bp, synthetic construct
  source 1..80: mol_type = other DNA
tgtgacatgttaagattgtttgactttaacaaacaagctataaggaggctgaagacagaggcacaggcgaatatccaact

SEQ ID NO: 84506 - DNA, 80 bp, synthetic construct
  source 1..80: mol_type = other DNA
ctggacttcagtggtaagactcatcttagtgaatccccgaatcaaagtgctagtcaaaatgggcaacagacaggccaaat

SEQ ID NO: 84507 - DNA, 80 bp, synthetic construct
  source 1..80: mol_type = other DNA
cttttatctcattagcatcttcctccacctgattaaaatcccaacccacagacatgtcatagggaaaccttgccctaaac

SEQ ID NO: 84508 - DNA, 80 bp, synthetic construct
  source 1..80: mol_type = other DNA
gagttctacgagattgttaacagcctggttcaggtctctgagacgtttcaaatcactatcatctcttttttgtttgcgca

SEQ ID NO: 84509 - DNA, 80 bp, synthetic construct
  source 1..80: mol_type = other DNA
aggcaattcagctggactttagtggtaaggctcattttggtgaatctctgaatcaaagtgtctagtcaaaatgggtaaca

SEQ ID NO: 84510 - DNA, 80 bp, synthetic construct
  source 1..80: mol_type = other DNA
acttaagggttttttggttgaaagtattgctcagtgagtcactgaaaggcgcaatccaatagcctaggatccactgtgcg

SEQ ID NO: 84511 - DNA, 80 bp, synthetic construct
  source 1..80: mol_type = other DNA
gctgtacttctgtggcaaggctcatcttagtgaatccctgaatcaaagtgcctggtcaaaatgggcaacagacaggccaa

SEQ ID NO: 84512 - DNA, 80 bp, synthetic construct
  source 1..80: mol_type = other DNA
gccaactgtggcacctgtgttggttttgggtttgtgtcaatatgacttgtaggtcagctggtaatgccccacaaaagctc

SEQ ID NO: 84513 - DNA, 80 bp, synthetic construct
  source 1..80: mol_type = other DNA
caatttagttggacttcagtggtgaggcttattttagtgaattcctgaatcaaagtgcccagttaaaatgggcaacagac

SEQ ID NO: 84514 - DNA, 80 bp, synthetic construct
  source 1..80: mol_type = other DNA
atgggaaacaaacaagccaaggtcccagaatcaaaagacagcccgagagccagcctaatcccagatgccacacatttagg

SEQ ID NO: 84515 - DNA, 80 bp, synthetic construct
  source 1..80: mol_type = other DNA
gccgcaattctgtaagagttgctggttcgaaaacaagggcctggttgagtgcaacaaccactatctgtgtctcaactgcc

SEQ ID NO: 84516 - DNA, 80 bp, synthetic construct
  source 1..80: mol_type = other DNA
acatgggcatatgttcctgtggactctacaaacagcccggtgtgcctgtgagatggaaaagatgagacccttgtcagggc

SEQ ID NO: 84517 - DNA, 80 bp, synthetic construct
  source 1..80: mol_type = other DNA
ctctggtcaagttgctgtgagctcaggttacccatgtagacacctgcactcaatggcctttctgtcctagtcacctttga

SEQ ID NO: 84518 - DNA, 80 bp, synthetic construct
  source 1..80: mol_type = other DNA
attccacccagttgtccactgcctcaagaaccgcacccaagatcccctcacaactcggcgctgcagtcctcaacgtggag

SEQ ID NO: 84519 - DNA, 80 bp, synthetic construct
  source 1..80: mol_type = other DNA
gatgaagtgtccccaacctctctcacaaatacctcaagatcctggtcttgtataacaggtgtgaaagatgccaatttctt

SEQ ID NO: 84520 - DNA, 80 bp, synthetic construct
  source 1..80: mol_type = other DNA
cgcaccggggatcctaggcatttaggattgcgcttttagagattcactactagttaggaattcctaaatcatggggcaga

SEQ ID NO: 84521 - DNA, 80 bp, synthetic construct
  source 1..80: mol_type = other DNA
gatgcttcagaaagaatacattgaaagacaagggaaaacgcccttgggactagtggacattttcatctttagcacaagct

SEQ ID NO: 84522 - DNA, 80 bp, synthetic construct
  source 1..80: mol_type = other DNA
tttatctgatcagcattttcttgcatttaattaaaatccctacacatcgacacatcgttgggaaaccctgtcccaaaccc

SEQ ID NO: 84523 - DNA, 80 bp, synthetic construct
  source 1..80: mol_type = other DNA
atcttgaagggcttgtataacatcgctacatgtgggattattggattggttgcctttttattcttgtgtggcaagtcttg

SEQ ID NO: 84524 - DNA, 80 bp, synthetic construct
  source 1..80: mol_type = other DNA
tgctggtcctgaagaccatgtctctgggaagtactgccctcagtgttgtgatgttcaaactaccagtagtagctgcatca

SEQ ID NO: 84525 - DNA, 80 bp, synthetic construct
  source 1..80: mol_type = other DNA
ggagtagtcgttgagaagaaaaagaggggtggaaaagaggaaatcaccccacattgcgctttactggactgcatcatgtt

SEQ ID NO: 84526 - DNA, 80 bp, synthetic construct
  source 1..80: mol_type = other DNA
atcaatttgatgtctcttctcccttgagactccaacagctttttgatgtcatctgacccctggcaggtcaacaccatatt

SEQ ID NO: 84527 - DNA, 80 bp, synthetic construct
  source 1..80: mol_type = other DNA
gcggggaagtgcctctatgacagcacttgtcagcccgggttgtgtggaaaaaagatctgtaacatctatcccatgtgagt

SEQ ID NO: 84528 - DNA, 80 bp, synthetic construct
  source 1..80: mol_type = other DNA
catcctgtttgaattgcttaaggtcagtaggttctctaaaaaagtgtatgtaacaaccagagcttggttgaaacaaagca

SEQ ID NO: 84529 - DNA, 80 bp, synthetic construct
  source 1..80: mol_type = other DNA
tagtgtcatcagttgagaataggtcaacccagcatttagacctgcagcctgcaagcttttattggaaccagcgctattta

SEQ ID NO: 84530 - DNA, 80 bp, synthetic construct
  source 1..80: mol_type = other DNA
tgcatcaagaacatcaattactgggagagcttgggaaaacactcttgttgatttggaatctgacaacaaaccaccgaaac

SEQ ID NO: 84531 - DNA, 80 bp, synthetic construct
  source 1..80: mol_type = other DNA
ttccctaacccttaaagggggatatgagctgcaaaccttagaattaaatatggagaccctaaacatgaccatgcccttat

SEQ ID NO: 84532 - DNA, 80 bp, synthetic construct
  source 1..80: mol_type = other DNA
aatgaacattcccagtgatcttttgaccttcagaatagatttcaaaataccgtccattgtttgtggtgacacttttattg

SEQ ID NO: 84533 - DNA, 80 bp, synthetic construct
  source 1..80: mol_type = other DNA
ccgaactcttcagatctagacatgctcactcagagtcaccctatactaggaatggttgacacaaaaaagagttccctgaa

SEQ ID NO: 84534 - DNA, 80 bp, synthetic construct
  source 1..80: mol_type = other DNA
acgccaaggtgaggcttggcatggttccaaattggttattgagtaattctgcattttttacgtcccaaaccctgacgaca

SEQ ID NO: 84535 - DNA, 80 bp, synthetic construct
  source 1..80: mol_type = other DNA
ccatccccacctgtcctatttccttgaggtccacctgacatcccaatcatgctcaagagagccctcctttgatcaagctg

SEQ ID NO: 84536 - DNA, 80 bp, synthetic construct
  source 1..80: mol_type = other DNA
ttgtgagcttaaattccccatgtaaacacctgagctcaaaggcctttctgtccttatgactttggacttgagtttttcca

SEQ ID NO: 84537 - DNA, 80 bp, synthetic construct
  source 1..80: mol_type = other DNA
ggtccgctgccaaagttattagatcatctgaactcaaggtgccgacccttaagacattcttctgttgagttgacttcagt

SEQ ID NO: 84538 - DNA, 80 bp, synthetic construct
  source 1..80: mol_type = other DNA
tcaacaagattgttgacagcttgattcagatccctcagtcgctttaggtctgcatcatctctcttctgcttgcgcatcag

SEQ ID NO: 84539 - DNA, 80 bp, synthetic construct
  source 1..80: mol_type = other DNA
cctctgcacattgctgacctcagaaaagtcaaggccatgcaggagagcctgagcatctttgacaacttgcaactttatgt

SEQ ID NO: 84540 - DNA, 80 bp, synthetic construct
  source 1..80: mol_type = other DNA
tagaacagtaaccagatagttcccttcgtaaggactgagtccaaaggaatgatttgatttccttggagttgctcattgct

SEQ ID NO: 84541 - DNA, 80 bp, synthetic construct
  source 1..80: mol_type = other DNA
gatgtgcttggagcaacctaaaggtggagtgacaagtggttctgtaagagtcactttactctgcacaattatcacaaagc

SEQ ID NO: 84542 - DNA, 80 bp, synthetic construct
  source 1..80: mol_type = other DNA
gacaagtggttctgtaagagtcactttactctgcacaattatcacaaagcgcaatccaatcgcctaggatccactgtgcg

SEQ ID NO: 84543 - DNA, 80 bp, synthetic construct
  source 1..80: mol_type = other DNA
tggggatgcggccgaacactgtgggacagttgccaacggagtgttgcaaacatttatgagaatggcctggtgtggaagat

SEQ ID NO: 84544 - DNA, 80 bp, synthetic construct
  source 1..80: mol_type = other DNA
acattgcattagactcaggaaagggaaactgggactgtataatgaccagctaccagtacctgataattcaaaatacaaca

SEQ ID NO: 84545 - DNA, 80 bp, synthetic construct
  source 1..80: mol_type = other DNA
ttattacattctttcaagaagtgccacatgtaatagaggaagtcatgaacattgtgctaattgcgctttctctattggca

SEQ ID NO: 84546 - DNA, 80 bp, synthetic construct
  source 1..80: mol_type = other DNA
taagtaggaggctcttggggaccttcacctggacattgtcagattctgagggcaatgaaacaccaggtggttattgttta

SEQ ID NO: 84547 - DNA, 80 bp, synthetic construct
  source 1..80: mol_type = other DNA
gggtcacggtggcgttcatttacagaacgactttaggggtgctggtcctgaagaccatgtctctgggaagtactgccctc

SEQ ID NO: 84548 - DNA, 80 bp, synthetic construct
  source 1..80: mol_type = other DNA
cctacttatatatatatctcttgtcctttgtgacaaaaggccaaggtacccgataggagacggtcttgagaattggcagt

SEQ ID NO: 84549 - DNA, 80 bp, synthetic construct
  source 1..80: mol_type = other DNA
aagggtatcagcagaatggattcattcatacccaactcccgaagaactgactttatctctgtgcccgacaaatgttcacc

SEQ ID NO: 84550 - DNA, 80 bp, synthetic construct
  source 1..80: mol_type = other DNA
aagactcaaattctcattgctttttccttttacaggctctgctagaacccagacacctaactcaaaagaattactcagtg

SEQ ID NO: 84551 - DNA, 80 bp, synthetic construct
  source 1..80: mol_type = other DNA
ggttctgaatctatgtaggagaaggctaccgagtacatcatcaactttgtcataaccttcaagttctgccaaaaaaactt

SEQ ID NO: 84552 - DNA, 80 bp, synthetic construct
  source 1..80: mol_type = other DNA
actcaagcaggatgagaatctcctctggatcactatcgactaactcacttagttttctgtcaaacaaagtgatttgatca

SEQ ID NO: 84553 - DNA, 80 bp, synthetic construct
  source 1..80: mol_type = other DNA
aaacattttggagatggtgtagtccctttgcacctttaagtccttctctgttttctccctcattgaccctctggcctctt

SEQ ID NO: 84554 - DNA, 80 bp, synthetic construct
  source 1..80: mol_type = other DNA
ttatactgtgttattgtggtgttgacctttgtctctaggttcttaaagaagcttgtttcttcctctccttcgaagcacag

SEQ ID NO: 84555 - DNA, 80 bp, synthetic construct
  source 1..80: mol_type = other DNA
aatcgttggatcatcttctgatttccctgcttccatccccttagaaccgatgactagcttagagaccaacttcgacacct

SEQ ID NO: 84556 - DNA, 80 bp, synthetic construct
  source 1..80: mol_type = other DNA
agacagtcctaattaagaacctgagcaatttgtacaccactttctcagcaggtgtgattaaatcttcctttaatttgtcc

SEQ ID NO: 84557 - DNA, 80 bp, synthetic construct
  source 1..80: mol_type = other DNA
aatcttcttaggctttgtacatccctcaattgctctatgctgggctgaaaattgtagtcctcaaactttgtgtagtgcat

SEQ ID NO: 84558 - DNA, 80 bp, synthetic construct
  source 1..80: mol_type = other DNA
tacaggatgagttccaaccttcatgaaattctcaaactcaacaaatgacacttgacattctcgaacaaggtgttcagaca

SEQ ID NO: 84559 - DNA, 80 bp, synthetic construct
  source 1..80: mol_type = other DNA
atccataatggttaaagctgagccccactactgacaagcatctttgaatttttgcaatgaactcacttgtagacactttg

SEQ ID NO: 84560 - DNA, 80 bp, synthetic construct
  source 1..80: mol_type = other DNA
aacaattcttcaagaggcacttttctgtatgcttttgactttcttctgttcttcaaaagtctaataaattcttctttagt

SEQ ID NO: 84561 - DNA, 80 bp, synthetic construct
  source 1..80: mol_type = other DNA
gctgtagaaactcacaagtctatcatttacactactataacagcaacccacccagtacttgtcaatttttgaccctttgg

SEQ ID NO: 84562 - DNA, 80 bp, synthetic construct
  source 1..80: mol_type = other DNA
attttgactgcttgattaatgaagaaaggcataagacatctaaatttagcaactgcctccttctagtgtttaacaatttc

SEQ ID NO: 84563 - DNA, 80 bp, synthetic construct
  source 1..80: mol_type = other DNA
gctgtgatgaacctcatcaaggggcaagactcaactgcctccttgcttaatgtcaagatgtcatcattgccagtgagagt

SEQ ID NO: 84564 - DNA, 80 bp, synthetic construct
  source 1..80: mol_type = other DNA
ctcgtaaagctcagagaatcctttaatcaagtccccagggttgatcctttgaaaatttcttttaagtttcccattttcca

SEQ ID NO: 84565 - DNA, 80 bp, synthetic construct
  source 1..80: mol_type = other DNA
atatcccctttgtattagtaagcatgtagtcccacaaatccttcaaagatttaaatgcccctgggtttattagaccttgt

SEQ ID NO: 84566 - DNA, 80 bp, synthetic construct
  source 1..80: mol_type = other DNA
ttgatcaacatagctgcgttacacacaacatcccctattcgataagagaaccagccaaagccaaactgcaaatcattcct

SEQ ID NO: 84567 - DNA, 80 bp, synthetic construct
  source 1..80: mol_type = other DNA
tccagccatatttgtcccacactttgtcttcatattcccttgaggcttctttggtcatctcaacatcaataagtttaatg

SEQ ID NO: 84568 - DNA, 80 bp, synthetic construct
  source 1..80: mol_type = other DNA
gaataaaaacacagattctttaaggcagcactcatacactttgttaatgagagagccttgctcaaagattcagaattgct

SEQ ID NO: 84569 - DNA, 80 bp, synthetic construct
  source 1..80: mol_type = other DNA
gcctggtgataactctgcaaagtttagaaggtttacccaagcattacacgatggtttaagagatgataaattgaagaaat

SEQ ID NO: 84570 - DNA, 80 bp, synthetic construct
  source 1..80: mol_type = other DNA
aacgcatgtgctttaaggcaaccatggaagcaagcagaagagccctattcatccgaagcatcatcaataccacttttgta

SEQ ID NO: 84571 - DNA, 80 bp, synthetic construct
  source 1..80: mol_type = other DNA
gagctcagtggagcacagaggcaacaagatcttggtcacaggcaggtctgaatcaattatgaaactagaggaaaggacag

SEQ ID NO: 84572 - DNA, 80 bp, synthetic construct
  source 1..80: mol_type = other DNA
atgtgctttagggcaactgtagaagcaagcagaagagccctgctcatccgaagcattataaacaccacttttgtggtatg

SEQ ID NO: 84573 - DNA, 80 bp, synthetic construct
  source 1..80: mol_type = other DNA
agctggagctcagtggagcacagaggcagcaagattttggtcaccggcaggtctgaatcaattatgaaactggaggaaag

SEQ ID NO: 84574 - DNA, 80 bp, synthetic construct
  source 1..80: mol_type = other DNA
tttatttgtcttcacgaccaaaagcaggggagtgggtatgctgcagacaaagaatccactcaaaaggcaatagatggggt

SEQ ID NO: 84575 - DNA, 80 bp, synthetic construct
  source 1..80: mol_type = other DNA
agacttattcgtaagagtctggacttataatggtgaactcctggttataatggaaaatgagagaactctagacttccatg

SEQ ID NO: 84576 - DNA, 80 bp, synthetic construct
  source 1..80: mol_type = other DNA
attagaggattattgggagctatacttattcgtcttcaggagcaaaagcaggggatggtagatggttggtatgggtacca

SEQ ID NO: 84577 - DNA, 80 bp, synthetic construct
  source 1..80: mol_type = other DNA
tcatagcaatgagcagggaagcgggtacgctgcagacaaagaatccactcaaaaggctatagatggagtcaccaataagg

SEQ ID NO: 84578 - DNA, 80 bp, synthetic construct
  source 1..80: mol_type = other DNA
ttgggaacatgatctcaatatgggttaatcattcaattcacacagggaatcaacaccaagctgagccaatcagaaatact

SEQ ID NO: 84579 - DNA, 80 bp, synthetic construct
  source 1..80: mol_type = other DNA
acgagcggagagcaaatgctaataatttggggagtgcaccatcctattgatgaggcagaacaaagagcattgtaccagga

SEQ ID NO: 84580 - DNA, 80 bp, synthetic construct
  source 1..80: mol_type = other DNA
atgaatacaaatcaaagaataatagctattgggactgtttgtctaacagttggaataactagtctattgttacagatagg

SEQ ID NO: 84581 - DNA, 80 bp, synthetic construct
  source 1..80: mol_type = other DNA
ttacttatgtaaataacacatgggtgaaccgaacttatgtgaacattagcaataccaacattgctaatgcacagaacgtg

SEQ ID NO: 84582 - DNA, 80 bp, synthetic construct
  source 1..80: mol_type = other DNA
aaacatagtatcattatggattagccattcgattcaagtcggagggaaaaaccacactgagatgtgcaaacaaaatgtca

SEQ ID NO: 84583 - DNA, 80 bp, synthetic construct
  source 1..80: mol_type = other DNA
gggatatagagagaccagagaaggatcatttcatgaacaatacagaagcattgtgtgatgctgagggtttcgcacccttt

SEQ ID NO: 84584 - DNA, 80 bp, synthetic construct
  source 1..80: mol_type = other DNA
cagtgaaataaaaaattgtactttcaaagcagccacacaagtaaaagataaaaaacggaatgtatctgcactgttttata

SEQ ID NO: 84585 - DNA, 80 bp, synthetic construct
  source 1..80: mol_type = other DNA
aatagtgacttttggactgcagtcattgctgttgaaccacacgtcaatccagtagatagacaatataatgtatttggtga

SEQ ID NO: 84586 - DNA, 80 bp, synthetic construct
  source 1..80: mol_type = other DNA
gaagagattacacctggtagatatagaacagcaatctgtggactataccctgcacagattaaagctagacagatgatcag

SEQ ID NO: 84587 - DNA, 80 bp, synthetic construct
  source 1..80: mol_type = other DNA
ttccagatacagcagcagtaagtctccatgggggccctgcaacaaacagggattacctacggcagcgccaatttgaattt

SEQ ID NO: 84588 - DNA, 80 bp, synthetic construct
  source 1..80: mol_type = other DNA
tattcgtctcagggagcaaaagcaggggaaaatgattgcaatcattgtaatagcgatattggcagcagccggaaggtcag

SEQ ID NO: 84589 - DNA, 80 bp, synthetic construct
  source 1..80: mol_type = other DNA
acccgatcgtgacttcctgtgacatgaagaatgagggatcttatttcttcggagacaatgcaccagacactacaaattga

SEQ ID NO: 84590 - DNA, 80 bp, synthetic construct
  source 1..80: mol_type = other DNA
atggagacaatatcactaatgaccatgctactgatagcggcagcaagcaatgcagacaaaatctgcattggtcaccaatc

SEQ ID NO: 84591 - DNA, 80 bp, synthetic construct
  source 1..80: mol_type = other DNA
aatttgtacaataaaatgaagagggcggtgggtttccatgcggtggaagatggaaaaggatgttttgagctattccccaa

SEQ ID NO: 84592 - DNA, 80 bp, synthetic construct
  source 1..80: mol_type = other DNA
acaaaccgtatgaaatttttgatcatgaatttagcgagggtggaaatagactcaacatgatcaatagtaagattgatgat

SEQ ID NO: 84593 - DNA, 80 bp, synthetic construct
  source 1..80: mol_type = other DNA
aagtgatggcccgtgcatggagacaatttggaacggggccttcaaccgaaggaagtatcaagaggggtcaaaattagaaa

SEQ ID NO: 84594 - DNA, 80 bp, synthetic construct
  source 1..80: mol_type = other DNA
gctctaacaagtctggactcaagaaccgactcaacaactagtgtggcacctcaacaaataaataggatcttcaaaccatt

SEQ ID NO: 84595 - DNA, 80 bp, synthetic construct
  source 1..80: mol_type = other DNA
caaaagtaaacaatttatataataaaattaagaggggggtggggttcaaagcggtggaagaagggaaaagatgttttgag

SEQ ID NO: 84596 - DNA, 80 bp, synthetic construct
  source 1..80: mol_type = other DNA
caaagcgtgggaagaagggaaaagatgttttgagctgttccccaaatgtgatgacccatgcatggggacaatttgggacg

SEQ ID NO: 84597 - DNA, 80 bp, synthetic construct
  source 1..80: mol_type = other DNA
ctgttccccaaatgtgatgacccatgcatggggacaatttgggacggggcctacaaccgaagggagtttcaagaggtgtc

SEQ ID NO: 84598 - DNA, 80 bp, synthetic construct
  source 1..80: mol_type = other DNA
gggcctacaaccgaagggagtttcaagaggggtcaaaatttgaaaggcagaaaatagagggaggcaaactggaatttgaa

SEQ ID NO: 84599 - DNA, 80 bp, synthetic construct
  source 1..80: mol_type = other DNA
caaaatttgaaaggcagaaaatagagggtggcaaactggaatttgaagggacttacaaaatcctccccctttatttgact

SEQ ID NO: 84600 - DNA, 80 bp, synthetic construct
  source 1..80: mol_type = other DNA
aacccctgctcctttgacggccaaatctatggcaccccttcttgtgaactattgttgaaaggaaaaaaatggtcctatat

SEQ ID NO: 84601 - DNA, 80 bp, synthetic construct
  source 1..80: mol_type = other DNA
aaaaaatctaaaaaagttaaggtcattttttatttctgctaggtcttatcaaaaaatccaaattttcccagccacaatct

SEQ ID NO: 84602 - DNA, 80 bp, synthetic construct
  source 1..80: mol_type = other DNA
tccaaaaccgccaatacacaaataatcagggaaaaaacattcttttcttgtggggtataattccccccccccccgaccct

SEQ ID NO: 84603 - DNA, 80 bp, synthetic construct
  source 1..80: mol_type = other DNA
ttttttttcccacaaaatggctccacacggaacatattggaatcctgtgtgcaacaagcttggaacaaccccttttttta

SEQ ID NO: 84604 - DNA, 80 bp, synthetic construct
  source 1..80: mol_type = other DNA
tacgcaaagagatctgtacacaaaaaccgacacaacaacgagtgtggcaacaaaaaaaataaatagggtcttcaaaccat

SEQ ID NO: 84605 - DNA, 80 bp, synthetic construct
  source 1..80: mol_type = other DNA
aaaattagaaagaccgaaaatagagggggtcaagctgggatttgaaggaactttcaaaattctccccctttatttgactg

SEQ ID NO: 84606 - DNA, 80 bp, synthetic construct
  source 1..80: mol_type = other DNA
ctgtacccccaaagtgatgacccatgcatggggacaattcgggacggggccttcaaccgaaggaagtatccagaggagtc

SEQ ID NO: 84607 - DNA, 80 bp, synthetic construct
  source 1..80: mol_type = other DNA
accaaccgtatgaaatccttgatcatgaattcaatgaggtagaaaatagactttacatgatcaataataagattgaagat

SEQ ID NO: 84608 - DNA, 80 bp, synthetic construct
  source 1..80: mol_type = other DNA
tgctgtgttcaacaagcttggaacaaccgcttattttaaacccctgctctttttccccccaaatctatggcaccccttct

SEQ ID NO: 84609 - DNA, 80 bp, synthetic construct
  source 1..80: mol_type = other DNA
ttgatgagcctgacgcaaaagttaacaatttatattataaagtaaagaggggggtggggttccattcggtaggagaaggt

SEQ ID NO: 84610 - DNA, 80 bp, synthetic construct
  source 1..80: mol_type = other DNA
caaaagttaacaatttatattataaagtaaagaggggggtggggttccattcggtgtgagaagggaaaaggtgttttgaa

SEQ ID NO: 84611 - DNA, 80 bp, synthetic construct
  source 1..80: mol_type = other DNA
cttttccccaaatgtgatgacccatgcatggagactattcggaaaggggccttccaccgaagggaggttcaagggtggtc

SEQ ID NO: 84612 - DNA, 80 bp, synthetic construct
  source 1..80: mol_type = other DNA
atgtgatgacccatgcatggagactattcggaaaggggccttccaccgaagggaggttcaagggtggtctaaattagaaa

SEQ ID NO: 84613 - DNA, 80 bp, synthetic construct
  source 1..80: mol_type = other DNA
taaattagaaagacagaaaattgaaggggtcaaagtgggatttgaaggagcttacaaaatcctccccctttatttgtctg

SEQ ID NO: 84614 - DNA, 80 bp, synthetic construct
  source 1..80: mol_type = other DNA
tgggatttgaaggagcttacaaaatcctccccctttatttgtctgtcgcctcaaattttgttattgcaaaggggtttgct

SEQ ID NO: 84615 - DNA, 80 bp, synthetic construct
  source 1..80: mol_type = other DNA
ttaaccacctaaaaaagctaaggtccctttttagttctgctaggtcttatcaaaaaatccaaattttcccagtcccaatc

SEQ ID NO: 84616 - DNA, 80 bp, synthetic construct
  source 1..80: mol_type = other DNA
gaattttaacccacataaaaaagctaaggtcactttttagttctgctaggtcttatcaaaaaatccaaattttcccagtc

SEQ ID NO: 84617 - DNA, 80 bp, synthetic construct
  source 1..80: mol_type = other DNA
tcgatgagcatgacgcaaaagttaaccatttatataataaagtaaagagggtggtgggtttccatgcggtgggagatggt

SEQ ID NO: 84618 - DNA, 80 bp, synthetic construct
  source 1..80: mol_type = other DNA
ccatttatataataaagtaaagaggggggtgggtttccatgcggtgggagatgggaaaggatgttttgatttgttccacc

SEQ ID NO: 84619 - DNA, 80 bp, synthetic construct
  source 1..80: mol_type = other DNA
aaaatttgaaaggccgaaaattggggggggcgaggtgaggtttggagggactttcaaaatcctcgccctttttttggctg

SEQ ID NO: 84620 - DNA, 80 bp, synthetic construct
  source 1..80: mol_type = other DNA
gggcgaggtgtggtttggagggactttcaaaatcctccccctttttttggctgttgcctcatttcttgtgattgcaatgg

SEQ ID NO: 84621 - DNA, 80 bp, synthetic construct
  source 1..80: mol_type = other DNA
tggggtttggagggactttcaaaatcctccccctttttttggctgttgcctcatttcttgtgattgcaatggggtttgct

SEQ ID NO: 84622 - DNA, 80 bp, synthetic construct
  source 1..80: mol_type = other DNA
attttcccccacctagaaaagctagggtcactttttagttctgttaggtcttttcaaagaatccagattttcccagtccc

SEQ ID NO: 84623 - DNA, 80 bp, synthetic construct
  source 1..80: mol_type = other DNA
aatttatataataaagtaaagagggcgttgggtttccaaactgtggaagatgggaaaagatgttttgagctataccccaa

SEQ ID NO: 84624 - DNA, 80 bp, synthetic construct
  source 1..80: mol_type = other DNA
aagtgatgacccatgcatggggacaattcgggacggggccttccaccgaaggaagtatccagagtggtcaaaaatagaaa

SEQ ID NO: 84625 - DNA, 80 bp, synthetic construct
  source 1..80: mol_type = other DNA
gacagaaaatagagggggtcaagctggaatttgaaggaacttacaaaatcctccccctttatttggctgttgcctcattt

SEQ ID NO: 84626 - DNA, 80 bp, synthetic construct
  source 1..80: mol_type = other DNA
tcaaagctgtgggagatgggaaaggatgttttgagctattccccaaatgtgatgacccatgcatggtggcaattcgggac

SEQ ID NO: 84627 - DNA, 80 bp, synthetic construct
  source 1..80: mol_type = other DNA
aaaaattgaaagacagaaaatagagggggtcaaggtggaatctgaaggaacttacaaaatcctcccccattatttgactg

SEQ ID NO: 84628 - DNA, 80 bp, synthetic construct
  source 1..80: mol_type = other DNA
aggtggaatctgaaggaacttacaaaatcctcccccattatttgactgtttcctcattttttgtcagcccaatggggttt

SEQ ID NO: 84629 - DNA, 80 bp, synthetic construct
  source 1..80: mol_type = other DNA
ccgttttttttcccacaaaaaaaagctaaaatcactttttatttctgctaggtcttatcaaaaaatccaaattttcccaa

SEQ ID NO: 84630 - DNA, 80 bp, synthetic construct
  source 1..80: mol_type = other DNA
tcagatttgatcaccgtcgctaatcaatcaacaaactccacaaaaactgtaaacacacaaacagaaaacaatgcccctgt

SEQ ID NO: 84631 - DNA, 80 bp, synthetic construct
  source 1..80: mol_type = other DNA
gggtcaaaattagaaagacagaaaattgaggggggcaagctggaatttgaaggaacttacaaaattttccccctttattt

SEQ ID NO: 84632 - DNA, 80 bp, synthetic construct
  source 1..80: mol_type = other DNA
ttttcttcccacaaaactgctccacacagagcatattgggatgctgtgtgcaacgagcttggaaaaccctcttattttaa

SEQ ID NO: 84633 - DNA, 80 bp, synthetic construct
  source 1..80: mol_type = other DNA
caatcaccaaactccacagaaactgtgaacaccctaacagaaaacaatgccccggtgacaaatccaaaaaaactgcccca

SEQ ID NO: 84634 - DNA, 80 bp, synthetic construct
  source 1..80: mol_type = other DNA
ttggcaaaaagaaccaaccgtatggaatttttggtcctgaatttagggagggtggaaatagactttacatgatccataat

SEQ ID NO: 84635 - DNA, 80 bp, synthetic construct
  source 1..80: mol_type = other DNA
aagattgatgatcaaattcccgatatatgggcatataaagccgaaattgtagtttttcttgaaaacccaaaaaccctcga

SEQ ID NO: 84636 - DNA, 80 bp, synthetic construct
  source 1..80: mol_type = other DNA
acgcaaaagttaaccatttatataataaagttaagaggggggtgggtttccatgcggtgggagatggtgaaagatgtttt

SEQ ID NO: 84637 - DNA, 80 bp, synthetic construct
  source 1..80: mol_type = other DNA
gagctattccccaaaagtgatggcccatgcctggaggccattcggaacgggaccttccacctaagggagtatccagaggg

SEQ ID NO: 84638 - DNA, 80 bp, synthetic construct
  source 1..80: mol_type = other DNA
gtccaaatttgaaaggccgaaaattgagggaggccaactgggatttgaaggaactttccaaattctccccccttatttta

SEQ ID NO: 84639 - DNA, 80 bp, synthetic construct
  source 1..80: mol_type = other DNA
tgggatttgaaggaactttccaaattctccccccttattttactgtttcctccttttttgtgattgcaaaggggtttgct

SEQ ID NO: 84640 - DNA, 80 bp, synthetic construct
  source 1..80: mol_type = other DNA
aaaattagaaaaacagaaaatagagggggtcaaactggaatttgaaggaacttacaaaatcccccccctttatttttctg

SEQ ID NO: 84641 - DNA, 80 bp, synthetic construct
  source 1..80: mol_type = other DNA
aatttatataataaagtgaagagggcattgggtttcaaagcggtgggagatggaaaaagatgttttgagctattccccaa

SEQ ID NO: 84642 - DNA, 80 bp, synthetic construct
  source 1..80: mol_type = other DNA
gaatctggaggaactaaggtctttctttagctctgctaattcttatcaaagaatccagatctttccagacacaatttgga

SEQ ID NO: 84643 - DNA, 80 bp, synthetic construct
  source 1..80: mol_type = other DNA
aactcaggacaattttttcggttttcatttcctatcggagaatccaattcttcccaaacacaacggggattgtgtcatac

SEQ ID NO: 84644 - DNA, 80 bp, synthetic construct
  source 1..80: mol_type = other DNA
attggaacaagcatatcatgttcagattcattctacaggggtttgagatggctgactcaaaaaagggggttttccccggt

SEQ ID NO: 84645 - DNA, 80 bp, synthetic construct
  source 1..80: mol_type = other DNA
tgcccaaacaactttgtacatccaacccaacacatcaccaagagtgccaccagaggacttaataaggaccttcaaaccag

SEQ ID NO: 84646 - DNA, 80 bp, synthetic construct
  source 1..80: mol_type = other DNA
tgatagggccacggcccgtgttcaatggtcagcaggggaagattgattattatttgtcagtattaaaacccggtcaaaca

SEQ ID NO: 84647 - DNA, 80 bp, synthetic construct
  source 1..80: mol_type = other DNA
caatcaacaaactccacagaaacggttgacactctaacagaaaccaatgttcctgggacacatgccaaaaaattgctcca

SEQ ID NO: 84648 - DNA, 80 bp, synthetic construct
  source 1..80: mol_type = other DNA
ttgaaggaacttacaaaatcctccccctttatttgactgttgcctcattttttgtgcttgcgatggggtttgctgccttc

SEQ ID NO: 84649 - DNA, 80 bp, synthetic construct
  source 1..80: mol_type = other DNA
cccattttgaagggaaaagaatggacctccgggtttaaaaaatcttccggtggaaacggaacgggttaccctggaaatgt

SEQ ID NO: 84650 - DNA, 80 bp, synthetic construct
  source 1..80: mol_type = other DNA
aaaaaacctaaagaaacccaggccaatttttacttcagccagtccctatcaaaaaatccaattcttcccaaacccaactg

SEQ ID NO: 84651 - DNA, 80 bp, synthetic construct
  source 1..80: mol_type = other DNA
acgggaccaggcatatcttgttcaaattctttctacaggataatgaaagggctgactcaaaaaagcgggttttaccctgc

SEQ ID NO: 84652 - DNA, 80 bp, synthetic construct
  source 1..80: mol_type = other DNA
tgcccaaacacctttgtacataaaaaacgacacaccaccacccgtgacaccaaaggaattgaataggaccttcaacccat

SEQ ID NO: 84653 - DNA, 80 bp, synthetic construct
  source 1..80: mol_type = other DNA
aattcgtacaataaagtgaagagggatatgggttccaatgcggtggaagatgggaaaggatgtttcgagctataccacaa

SEQ ID NO: 84654 - DNA, 80 bp, synthetic construct
  source 1..80: mol_type = other DNA
gcgtcaaaattagatggggagaaaatagagggggtcaagctggaatcagaaggaacttacaaaatcctccccatttattc

SEQ ID NO: 84655 - DNA, 80 bp, synthetic construct
  source 1..80: mol_type = other DNA
acagcttgccgctacacatctgcggcatctcctcgttctaaacacgtgcactatcgaaggactactctatggtaaccccc

SEQ ID NO: 84656 - DNA, 80 bp, synthetic construct
  source 1..80: mol_type = other DNA
cttgtgaccttcaattgggaggaagagaaatgtcctacataattcaaagaccctcagctgtaaacggaacttgttaccct

SEQ ID NO: 84657 - DNA, 80 bp, synthetic construct
  source 1..80: mol_type = other DNA
gcagacaaaatctgcattgttcaccaatcaacaaactccacagaaactgttgacactctaacagaaaccaatgttcctgt

SEQ ID NO: 84658 - DNA, 80 bp, synthetic construct
  source 1..80: mol_type = other DNA
acccaggagttggtatggctgcagatagggatttaactcaaaaggcagttgataaaataacatttaaggtgaataatata

SEQ ID NO: 84659 - DNA, 80 bp, synthetic construct
  source 1..80: mol_type = other DNA
actgctgtgtgcaacaagcctgggacatccactcattctaaacacatgcactattgaaggactaatctatggcaaccctt

SEQ ID NO: 84660 - DNA, 80 bp, synthetic construct
  source 1..80: mol_type = other DNA
ccaaaacaagaagtatgggcctataaagcagaattgttagttctgcttgaaaatcagaaaaccctcgatgagcatgatgc

SEQ ID NO: 84661 - DNA, 80 bp, synthetic construct
  source 1..80: mol_type = other DNA
agaagggggtaaactggaatttgaaggaacttacaaaatcctccccctttatttgactgtcgcctccttttttgttcttg

SEQ ID NO: 84662 - DNA, 80 bp, synthetic construct
  source 1..80: mol_type = other DNA
tccccctttatttgactgtcgcctccttttttgttcttgcgatggggtttgctgccttcctgttttgggccatgtccaat

SEQ ID NO: 84663 - DNA, 80 bp, synthetic construct
  source 1..80: mol_type = other DNA
tgttggagggaaaaggatggtcccccttattcaaaaaaccatcagctgtaaacggaacgtgttaccctggaaatgtaaaa

SEQ ID NO: 84664 - DNA, 80 bp, synthetic construct
  source 1..80: mol_type = other DNA
tccaaaacgctcaatatacaaataacagggggaaaaacatccttttcgtgtggggtatacatcacccacccacctattct

SEQ ID NO: 84665 - DNA, 80 bp, synthetic construct
  source 1..80: mol_type = other DNA
ggcccgttgtcaatggtcagcaggggaggattgattattattggtcagtactaaaacccggccaaacattacgagaaaga

SEQ ID NO: 84666 - DNA, 80 bp, synthetic construct
  source 1..80: mol_type = other DNA
gtcatttgtttagtgcaatgtcagactgataaaggtggattaaacagtacattgccattccacaatatcagtaaatatgc

SEQ ID NO: 84667 - DNA, 80 bp, synthetic construct
  source 1..80: mol_type = other DNA
atggtagcagcatcaataataactatacttctagcccccttaggcggtagttcggagaaggcttgcattggctatcaatc

SEQ ID NO: 84668 - DNA, 80 bp, synthetic construct
  source 1..80: mol_type = other DNA
ttcaatgtccccggtgtctgtaaacacgctacccgaaaacaatgttcctgtgacacatgctaaagaattgcttcacacag

SEQ ID NO: 84669 - DNA, 80 bp, synthetic construct
  source 1..80: mol_type = other DNA
atggagacagtatcactagctactagtgtactggatgtgagggtgagcaatgcagataaaatctgcatcggttatcaatc

SEQ ID NO: 84670 - DNA, 80 bp, synthetic construct
  source 1..80: mol_type = other DNA
atggagacagcatcactaataactatactactagcaataacaggaagcaatggcgataaaatctgcattggctaccaatc

SEQ ID NO: 84671 - DNA, 80 bp, synthetic construct
  source 1..80: mol_type = other DNA
aaatacgccagcttctcaagggtgtcacccttgacaagttgcgtgattatttagctgactatgacgtagcagtcactgcc

SEQ ID NO: 84672 - DNA, 80 bp, synthetic construct
  source 1..80: mol_type = other DNA
tattactgtgtcaccactaaggctaagtccgttcaacaagatcttgacgttattttgcctggtgagttttccaagaagca

SEQ ID NO: 84673 - DNA, 80 bp, synthetic construct
  source 1..80: mol_type = other DNA
atttacgtaactgcacctttatgtacacttataacattaccgaagatgagattttagagtggtttggcattacacaaact

SEQ ID NO: 84674 - DNA, 80 bp, synthetic construct
  source 1..80: mol_type = other DNA
gaaggtggtggctggcttgttgctagtggctcaactgttgccatgactgagcaattacagatgggctttggtattacagt

SEQ ID NO: 84675 - DNA, 80 bp, synthetic construct
  source 1..80: mol_type = other DNA
cacacaaactgcaattaatggaatcagcaataaagtgaactcagtgattgaaaaaatgaatgttcaatttacttcagtag

SEQ ID NO: 84676 - DNA, 80 bp, synthetic construct
  source 1..80: mol_type = other DNA
attttattaaccatgaagactgtcattgctctgtgctacattctcagtgtggtccttggccaagaccttctaggaaatgg

SEQ ID NO: 84677 - DNA, 80 bp, synthetic construct
  source 1..80: mol_type = other DNA
agttcttcagtgagaatttcaattggactggggtcacccagaatggaggaagtaactcttgcaaaagaggacccaatagc

SEQ ID NO: 84678 - DNA, 80 bp, synthetic construct
  source 1..80: mol_type = other DNA
gaatatagttccagttgcgttatcgtctagatcggtgacttatcaacgtgctcaagttaatgaagatatcattgtatcaa

SEQ ID NO: 84679 - DNA, 80 bp, synthetic construct
  source 1..80: mol_type = other DNA
atcattccaattaatgcgtccaccaaacatgacgccagccgtaaatgcattatttccgcaagcacaaccttttcaacatc

SEQ ID NO: 84680 - DNA, 80 bp, synthetic construct
  source 1..80: mol_type = other DNA
atcagatctaacaaatagtatatcagatgcggcatcttcagtcagtaggtcagcttcagttaagtcaattggcagcaacg

SEQ ID NO: 84681 - DNA, 80 bp, synthetic construct
  source 1..80: mol_type = other DNA
agcgtacaaagcacacgccgagaatacgttcttgacggacagacagtacaattacaagtatcaaatgactcaagcacact

SEQ ID NO: 84682 - DNA, 80 bp, synthetic construct
  source 1..80: mol_type = other DNA
aaaattgcgttaaaaacatctagatgttcttacaaagttattaaatattgcattgtgaccatatttaacacactgctgaa

SEQ ID NO: 84683 - DNA, 80 bp, synthetic construct
  source 1..80: mol_type = other DNA
agattaacggtacagaagactgacgaaatagatatgtcgaaggagatcaatcagaaaaacatacggacgctagatgaatg

SEQ ID NO: 84684 - DNA, 80 bp, synthetic construct
  source 1..80: mol_type = other DNA
attctggatggcccgtatcagccgaccacctttaccccgccgaccgattattggattctgattaacagcaacaccaacgg

SEQ ID NO: 84685 - DNA, 80 bp, synthetic construct
  source 1..80: mol_type = other DNA
gtcagtataacgtgtttggcgaaaacaaacagtttaacgtgcgtaacgatagcgataaatggaaatttctggaaatgttt

SEQ ID NO: 84686 - DNA, 80 bp, synthetic construct
  source 1..80: mol_type = other DNA
cgtggcagcagccagaacgatttttataaccgtcgtaccctgaccagcgataccaaactggtgggcgtgctgaaatatgg

SEQ ID NO: 84687 - DNA, 80 bp, synthetic construct
  source 1..80: mol_type = other DNA
cggccgtatttggacctttcatggcgaaaccccgcgtgcgaccaccgatagcagcaacaccgcgaacctgaacggcatta

SEQ ID NO: 84688 - DNA, 80 bp, synthetic construct
  source 1..80: mol_type = other DNA
gcattaccattcatagcgaattttatattattccgcgtagccaggaaagcaaatgcaacgaatatattaacaacggcctg

SEQ ID NO: 84689 - DNA, 80 bp, synthetic construct
  source 1..80: mol_type = other DNA
aatgcaacgaatatattaacaacggcctgccgccgattcagaacacccgtaacgtggtgccgctgagcctgagcagccgt

SEQ ID NO: 84690 - DNA, 80 bp, synthetic construct
  source 1..80: mol_type = other DNA
cgtggtgtatgaaagcaccaacaacagcgatttttggaccgcggtgattgcggtggaaccgcatgtgaacccggtggatc

SEQ ID NO: 84691 - DNA, 80 bp, synthetic construct
  source 1..80: mol_type = other DNA
gtcagtataccatttttggcgaaagcaaacagtttaacgtgagcaacgatagcaacaaatggaaatttctggaaatgttt

SEQ ID NO: 84692 - DNA, 80 bp, synthetic construct
  source 1..80: mol_type = other DNA
cgtagcagcagccagaacgaattttataaccgtcgtaccctgaccagcgatacccgttttgtgggcattctgaaatatgg

SEQ ID NO: 84693 - DNA, 80 bp, synthetic construct
  source 1..80: mol_type = other DNA
gtgctggatggcccgtatcagccgaccacctttaaaccgccgaacgattattggctgctgattagcagcaacaccgatgg

SEQ ID NO: 84694 - DNA, 80 bp, synthetic construct
  source 1..80: mol_type = other DNA
gtcagtatgtgctgtttggcgaaaacaaacagtttaacgtggaaaacagcagcgataaatggaaattttttgaaatgttt

SEQ ID NO: 84695 - DNA, 80 bp, synthetic construct
  source 1..80: mol_type = other DNA
aaaggcagcagccagagcgattttagcaaccgtcgtaccctgaccagcaacaacaaactggtgggcatgctgaaatatgg

SEQ ID NO: 84696 - DNA, 80 bp, synthetic construct
  source 1..80: mol_type = other DNA
cggcaaagtgtggacctttcatggcgaaaccccgcgtgcgaccaccgatagcagcaacaccgcggatctgaacaacatta

SEQ ID NO: 84697 - DNA, 80 bp, synthetic construct
  source 1..80: mol_type = other DNA
gtgctggatggcccgtatcagccgaccagctttaacccgccggtgggctattggatgctgctgagcccgaccgcggcgtg

SEQ ID NO: 84698 - DNA, 80 bp, synthetic construct
  source 1..80: mol_type = other DNA
gtacctataccatttttggcgtgcaggaacagattaccgtggaaaacaccagccagacccagtggcgttttgtggatgtg

SEQ ID NO: 84699 - DNA, 80 bp, synthetic construct
  source 1..80: mol_type = other DNA
agcaaaaccacccagaacggcagctatagccagtatggcccgctgctgagcaccccgaaactgtatgcggtgatgaaata

SEQ ID NO: 84700 - DNA, 80 bp, synthetic construct
  source 1..80: mol_type = other DNA
ttatagcgcgaccaactatgatagcgtgaacatgaccaccttttgcgatttttatattattccgcgtagcgaagaaagca

SEQ ID NO: 84701 - DNA, 80 bp, synthetic construct
  source 1..80: mol_type = other DNA
gcaaatgcaccgaatatattaacaacggcctgccgccgattcagaacacccgtaacattgtgccgctggcgctgagcgcg

SEQ ID NO: 84702 - DNA, 80 bp, synthetic construct
  source 1..80: mol_type = other DNA
cgtggtggtggaaggcaccaacaacaccgatcgttggctggcgaccattctgattgaaccgaacgtgagcagccagcagc

SEQ ID NO: 84703 - DNA, 80 bp, synthetic construct
  source 1..80: mol_type = other DNA
tcttttggttttggtgttggattgtagtcgtttttctttgtggcttatatgtcttgatttagcattgttagaggaagcca

SEQ ID NO: 84704 - DNA, 80 bp, synthetic construct
  source 1..80: mol_type = other DNA
tatgcattccaaattgaacattccaaacagactgtgagttaaacttaaaataaaaaacaaataaaaacaataaaaaacaa

SEQ ID NO: 84705 - DNA, 80 bp, synthetic construct
  source 1..80: mol_type = other DNA
tatgcattccaaattgaacattcctaacagactgtgagttaaacttagaataaaaaataaagaaaacaacaaaaaaacaa

SEQ ID NO: 84706 - DNA, 80 bp, synthetic construct
  source 1..80: mol_type = other DNA
ggctgattgaggaaatacgacatagattgaaaattacagaaaacagcttcgaacagataacgtttatgcaagccttacaa

SEQ ID NO: 84707 - DNA, 80 bp, synthetic construct
  source 1..80: mol_type = other DNA
gagaaggggtaaaggggaagtttgacaatcacctagcaattcagcaagtaggccgagaaatgcatccagaatactacaag

SEQ ID NO: 84708 - DNA, 80 bp, synthetic construct
  source 1..80: mol_type = other DNA
gaatggtgacattggaagaaatggtgagaaatggtgaccatagccttttacaagggaatttccgctggggactttccagg

SEQ ID NO: 84709 - DNA, 80 bp, synthetic construct
  source 1..80: mol_type = other DNA
cgtgaaccgtattatggccattatttggggcaatctgtggggccttctgctgatccagttccttctcctgcgacccctaa

SEQ ID NO: 84710 - DNA, 80 bp, synthetic construct
  source 1..80: mol_type = other DNA
ttaggattttactggggattttggaaatttttgaacccgggggggggaaacccttaaaaaatgcctggaatttcctgccg

SEQ ID NO: 84711 - DNA, 80 bp, synthetic construct
  source 1..80: mol_type = other DNA
gggaaacccttaaaaaatgcctggaatttcctgccgtatttggttccggaacttaatcagggtgctaatgaggttttcaa

SEQ ID NO: 84712 - DNA, 80 bp, synthetic construct
  source 1..80: mol_type = other DNA
tatttggttccggaacttaatcagggtgctaatgaggttttcaattgccccgttaatgccaccggtgaaagcaccggtag

SEQ ID NO: 84713 - DNA, 80 bp, synthetic construct
  source 1..80: mol_type = other DNA
gggtatagaaacctttcaaagaacctttaaaagtatttttcaaattctttcccaaattaccccgggacaaacgggcgcca

SEQ ID NO: 84714 - DNA, 80 bp, synthetic construct
  source 1..80: mol_type = other DNA
aaaagggttgggtataaaatggggcaaaagtgggtaaatagtagggggcttgggtggcggaaagaaagggaaaaaatgaa

SEQ ID NO: 84715 - DNA, 80 bp, synthetic construct
  source 1..80: mol_type = other DNA
aaaaccggacccaccgccagagggggggggaccaccttttggggcccgggaaaaccagggacccttcccaattaccattc

SEQ ID NO: 84716 - DNA, 80 bp, synthetic construct
  source 1..80: mol_type = other DNA
tttggggcccgggaaaaccagggacccttcccaattaccattccgccagttaccaatcctgttggtcccgggctggaaac

SEQ ID NO: 84717 - DNA, 80 bp, synthetic construct
  source 1..80: mol_type = other DNA
tgatagatgtgtggatggagcattgtgcacttctttctaaactacatttagtacgactagagaacactacattcatctat

SEQ ID NO: 84718 - DNA, 80 bp, synthetic construct
  source 1..80: mol_type = other DNA
atgcagacaagtcgtcactcctcgaaacgtacaaaaggttgtccaaggtattccatagaaccgattccactacaatattc

SEQ ID NO: 84719 - DNA, 80 bp, synthetic construct
  source 1..80: mol_type = other DNA
tgccccggcaggttctgccattctaattcgtaaaaatgatatggttcatggtaccgggacatgtactcatgtccccccag

SEQ ID NO: 84720 - DNA, 80 bp, synthetic construct
  source 1..80: mol_type = other DNA
tacaatgttcgaacggaatcaggccagttgtatcgagtcaacatccctcgcatgacatatcaggagcagcggtgctaact

SEQ ID NO: 84721 - DNA, 80 bp, synthetic construct
  source 1..80: mol_type = other DNA
ctgtcccatgcattagcatcccaattactacaatggggcagaaactagaacaagcaatggacgtgcgtcccattgcagga

SEQ ID NO: 84722 - DNA, 80 bp, synthetic construct
  source 1..80: mol_type = other DNA
agagacagagacagtcgctcagcgaatggattattagcaattatcaatgtcgacatgcggatcctgagcctgtgcatctt

SEQ ID NO: 84723 - DNA, 80 bp, synthetic construct
  source 1..80: mol_type = other DNA
cctctaccgcagagacttactcttaatcgtaatgatgactgtggaacttctgggacgcagggggtgggaaaccctcatct

SEQ ID NO: 84724 - DNA, 80 bp, synthetic construct
  source 1..80: mol_type = other DNA
actgcttgaatctcaatctgtatctgagtcagaatctgaagcataaggctattagtattattaatgttacagccacagcc

SEQ ID NO: 84725 - DNA, 80 bp, synthetic construct
  source 1..80: mol_type = other DNA
gtagccgtagcagcagatacggttatagatacagtaccagcagcaggtagaggtatcctcctcatacttagacgaataag

SEQ ID NO: 84726 - DNA, 80 bp, synthetic construct
  source 1..80: mol_type = other DNA
ccttgcctgtgcctggacaaacattgactctgttcccattccctattgtgcccgtgccgcatttggtattgcaattcgaa

SEQ ID NO: 84727 - DNA, 80 bp, synthetic construct
  source 1..80: mol_type = other DNA
aatgtaaagattttgatgtaaatggaccatgtccatgtgtcaatgcagcacaatggacacctggacttaaactaaaagtg

SEQ ID NO: 84728 - DNA, 80 bp, synthetic construct
  source 1..80: mol_type = other DNA
tcaatcccactgttgttgattgtcattctatctgaaggagacatagacattgcatctgacactatctccgacaatgctaa

SEQ ID NO: 84729 - DNA, 80 bp, synthetic construct
  source 1..80: mol_type = other DNA
gagcagagacaactgaagtatcgacagctcctaggaatctgctgttgctctggaaaaatccattacgcccctgcagcacc

SEQ ID NO: 84730 - DNA, 80 bp, synthetic construct
  source 1..80: mol_type = other DNA
ttggaatactagttggagtaatagatctagagatcacattttgcataataaaacctgtaggcagtgggaaaaagaaattg

SEQ ID NO: 84731 - DNA, 80 bp, synthetic construct
  source 1..80: mol_type = other DNA
caatgttcttctggtccacagggctactagaacatgagatggtggtaaaacaacagaaacgatacaacaaaactgagatc

SEQ ID NO: 84732 - DNA, 80 bp, synthetic construct
  source 1..80: mol_type = other DNA
ttcagacctggaggaggagatatgagggacattggtgatgagagtgcaggagaattggcaaaacttgtggaaagggggca

SEQ ID NO: 84733 - DNA, 80 bp, synthetic construct
  source 1..80: mol_type = other DNA
tttcgaggtggtcttccggatactgttcgtcttcaattgcctacgcttgagagacttaatcttaatcatattgaggatgg

SEQ ID NO: 84734 - DNA, 80 bp, synthetic construct
  source 1..80: mol_type = other DNA
tggtgcttctcggccgcggggggtgggaaatcttcaagtattggtcccgtgtcctgcaatttaggattcaggaactaaag

SEQ ID NO: 84735 - DNA, 80 bp, synthetic construct
  source 1..80: mol_type = other DNA
cttcaagtattggtcccgtgtcctgcaatttaggattcaggaactaaagaatagtggttttatcttgttcccttccaccc

SEQ ID NO: 84736 - DNA, 80 bp, synthetic construct
  source 1..80: mol_type = other DNA
aatagtggttttatcttgttcccttccacccccataacagtggaggaggaaacgaatgggattacagaaccatttcgaag

SEQ ID NO: 84737 - DNA, 80 bp, synthetic construct
  source 1..80: mol_type = other DNA
cccttgtaaccccattgtaatcataccaataagaaaaaaacagggatcagaaaggtaaaatgggtggcaaatggtcaaac

SEQ ID NO: 84738 - DNA, 80 bp, synthetic construct
  source 1..80: mol_type = other DNA
aatagtgtgaagcaatggctaaggctaagggaaagaaggagacgaattgatccaaaaaggagacaaattgagccagcagc

SEQ ID NO: 84739 - DNA, 80 bp, synthetic construct
  source 1..80: mol_type = other DNA
gtcaccctagaactccttggactaattgcaatgggaaaaagtgttgcttccttggccacgtttgtttcccaacaaaaggt

SEQ ID NO: 84740 - DNA, 80 bp, synthetic construct
  source 1..80: mol_type = other DNA
tctagaaatgaccacccatatctttgttttgggaggagaattctgctattgcaaaccatcacttctgtttactggcacat

SEQ ID NO: 84741 - DNA, 80 bp, synthetic construct
  source 1..80: mol_type = other DNA
acaagagtaacattaatatttcaaatatcacccaatcctcacaatccgatgaaaggtatattttaattctggcttgtatg

SEQ ID NO: 84742 - DNA, 80 bp, synthetic construct
  source 1..80: mol_type = other DNA
atcaggaaggaacctagtactaacaacactcagctttaatggtaagagagaatttttctattgcaatacatcaagactgt

SEQ ID NO: 84743 - DNA, 80 bp, synthetic construct
  source 1..80: mol_type = other DNA
ttaatacgacatcattgttatgtactatgtgtactgcagggtctaatagtactaatagtacttcagatgaacccatcatc

SEQ ID NO: 84744 - DNA, 80 bp, synthetic construct
  source 1..80: mol_type = other DNA
agtcttattattaatgatgatgatagcaacatgaattgctgctctttcatcaccaccgcagtaaatagagataagaagaa

SEQ ID NO: 84745 - DNA, 80 bp, synthetic construct
  source 1..80: mol_type = other DNA
ggatgatgctgctctttattatcgtcttgttgtagtacctgatgatgaggagaagaagaacaactgcagtgagtgtagat

SEQ ID NO: 84746 - DNA, 80 bp, synthetic construct
  source 1..80: mol_type = other DNA
aaactttccatcctcctcaggagaggaccaaacaattacaaaacgttccttttgtagaggagaacaattcttttattgta

SEQ ID NO: 84747 - DNA, 80 bp, synthetic construct
  source 1..80: mol_type = other DNA
atacctcaatactttctaatacaacatactcttataatagtacctctaatactacttgctcgactaataatactacaact

SEQ ID NO: 84748 - DNA, 80 bp, synthetic construct
  source 1..80: mol_type = other DNA
tcaacctttaccctccaatgcagaagaatacatattataatcatgtgccttgaaccaggactagcaatagatgcctctcc

SEQ ID NO: 84749 - DNA, 80 bp, synthetic construct
  source 1..80: mol_type = other DNA
cactgccggagaaataatcagtaaatccaataccactgacctactattgacacgtgcaggaggatcgaatagaacagaga

SEQ ID NO: 84750 - DNA, 80 bp, synthetic construct
  source 1..80: mol_type = other DNA
taattttttgggaaccctggtccagtatgggggtcggaaattaaaaaagagtgttattagtttgtttaataccccaccaa

SEQ ID NO: 84751 - DNA, 80 bp, synthetic construct
  source 1..80: mol_type = other DNA
tattagtagcggaagaaacagatagattcatgaaattattccaaagatttgggagagctttttccaacatccctggaaga

SEQ ID NO: 84752 - DNA, 80 bp, synthetic construct
  source 1..80: mol_type = other DNA
ttaagccagggcttggaagcagctttccaataaaatggggaacccatggtcaaaagccagtttcagaggaggccttacgt

SEQ ID NO: 84753 - DNA, 80 bp, synthetic construct
  source 1..80: mol_type = other DNA
taagagaaagattaagccaaattgttccaccaccagaggaagtgggggcaggtttccaagacttggacaaccaggggcca

SEQ ID NO: 84754 - DNA, 80 bp, synthetic construct
  source 1..80: mol_type = other DNA
ttggcatttcctggggaggacttgcggaccctgtgcttttcaagctaccgcggatggagagatttattcttgatggaggg

SEQ ID NO: 84755 - DNA, 80 bp, synthetic construct
  source 1..80: mol_type = other DNA
cggatggagagatttattcttgatggaggggagaggggggaaatttggggaacggagggggtggaaagttattaggtttt

SEQ ID NO: 84756 - DNA, 80 bp, synthetic construct
  source 1..80: mol_type = other DNA
tgggaacccttgtccagtatgggagtttggagttaaaaaggagtgttattattttgtttaataccccaccaatagtagta

SEQ ID NO: 84757 - DNA, 80 bp, synthetic construct
  source 1..80: mol_type = other DNA
gtgaaagaaccagataggtttatgaaattattccaaagagttggaagagttatttccaacatccttagagaattaagcca

SEQ ID NO: 84758 - DNA, 80 bp, synthetic construct
  source 1..80: mol_type = other DNA
gggtttggaaatagttttccaataaaatgggaagctcttggtcaaaatgtattccagtgggatgccttgttgtaagagaa

SEQ ID NO: 84759 - DNA, 80 bp, synthetic construct
  source 1..80: mol_type = other DNA
aggataagccaaataatcccaccaccagagggagtgggagcagcttttggagatttagccaaccaggggccacttccaag

SEQ ID NO: 84760 - DNA, 80 bp, synthetic construct
  source 1..80: mol_type = other DNA
tgaatcaaaagctactctattttgtgcatcatatgcttcagatgctgagccatatgagcctaatgactgggctacacgtg

SEQ ID NO: 84761 - DNA, 80 bp, synthetic construct
  source 1..80: mol_type = other DNA
cctgtgtgcccactgagcccaacccaccccgactggcactagtgaacgtgagagatgaatctgacatgtgtaacatgggc

SEQ ID NO: 84762 - DNA, 80 bp, synthetic construct
  source 1..80: mol_type = other DNA
atgaaggatcagatgcatcagatgcttctcgatgtatgggatctatgccaacagccccgagtaacgtgtagcaaaaacca

SEQ ID NO: 84763 - DNA, 80 bp, synthetic construct
  source 1..80: mol_type = other DNA
tgtgagaaagtcgagtaacttgatgtgtgctacttataccaatagtcgtagatggaggatgatactagagattaataata

SEQ ID NO: 84764 - DNA, 80 bp, synthetic construct
  source 1..80: mol_type = other DNA
gtacttgtactgccaacgcagccatcaaagataagactaagaaagtacatgcactaccttatatatttgatgtaatgtcg

SEQ ID NO: 84765 - DNA, 80 bp, synthetic construct
  source 1..80: mol_type = other DNA
gaggggacgcagtaattcgaacgcgcagtaggagttttagagatgacatcttatactgtagttcgatacagctggctgat

SEQ ID NO: 84766 - DNA, 80 bp, synthetic construct
  source 1..80: mol_type = other DNA
attagtagcactaacagcaacaatgtctcttatactgatagcagccgtcgcatctacgactgcagactcaaacatattct

SEQ ID NO: 84767 - DNA, 80 bp, synthetic construct
  source 1..80: mol_type = other DNA
aatcatgctgcaggcgggtggtagagtgtggcatgcgcctagcaacagcaaaatacaccttgcatttaaagcatcagagg

SEQ ID NO: 84768 - DNA, 80 bp, synthetic construct
  source 1..80: mol_type = other DNA
atgtatgtcgactatcgcggggagatggtgatgacacagctggcaacaatgacgcagaagtcatccgacgaggaggaggt

SEQ ID NO: 84769 - DNA, 80 bp, synthetic construct
  source 1..80: mol_type = other DNA
attatcagcaacagttggagagatgaattatataaatatgtggtagtagaaattccaccagtaggagcagccaccaccaa

SEQ ID NO: 84770 - DNA, 80 bp, synthetic construct
  source 1..80: mol_type = other DNA
ttagaattaggaccttttatagaacccctaatcataccattatttgtgggaaccttaccatatataaaatatagaaaatt

SEQ ID NO: 84771 - DNA, 80 bp, synthetic construct
  source 1..80: mol_type = other DNA
gttaaaacaaaaaaaaataaacgggttaattgaaaaaattagggaaaaaccaaaaaatatgggcaatgaaagggagggag

SEQ ID NO: 84772 - DNA, 80 bp, synthetic construct
  source 1..80: mol_type = other DNA
tgtactgatttgaaaaatagtactttcactagcaccagcagtaatgatacctcaatggtaacggagagtgaggaaatgaa

SEQ ID NO: 84773 - DNA, 80 bp, synthetic construct
  source 1..80: mol_type = other DNA
gtgcctagctccgcaaccgcgaaaatggaaagatactacttgcaatggcgacttggatttggacaaatggcaaaatctgt

SEQ ID NO: 84774 - DNA, 80 bp, synthetic construct
  source 1..80: mol_type = other DNA
gtgtggactatagtaactatagaatctaggaaattactaaggcaaaaaacagtacatcggttacttaagagaatagcaaa

SEQ ID NO: 84775 - DNA, 80 bp, synthetic construct
  source 1..80: mol_type = other DNA
atccttatcgttatagtaacagtagaagataaagtttattcttgcactttcacctcaacatcatcagaaaaggagaagat

SEQ ID NO: 84776 - DNA, 80 bp, synthetic construct
  source 1..80: mol_type = other DNA
caccaaaatggtgtttataaatggagcaataataaatgataataagaataggagctcagagatgacggataaacttgata

SEQ ID NO: 84777 - DNA, 80 bp, synthetic construct
  source 1..80: mol_type = other DNA
atgtacatgttgttgttaatatacttgatataaacttaataggttatgatagtactttttataggtttacttctggctac

SEQ ID NO: 84778 - DNA, 80 bp, synthetic construct
  source 1..80: mol_type = other DNA
tcagcaaaaataaaggcctggtcctgggagtcctttgatcctgttcctatcctttattgtactccagtaggttttgctat

SEQ ID NO: 84779 - DNA, 80 bp, synthetic construct
  source 1..80: mol_type = other DNA
ctactgcaaccccctgcaactgtttaataataagactcatactaatggtactaatggcgctattgtacttctacggataa

SEQ ID NO: 84780 - DNA, 80 bp, synthetic construct
  source 1..80: mol_type = other DNA
ttaagataatgaaaatgatgaacctgggaggaggagcagcacaggctccgcctgctcctcgaagtagtatatgtgttatt

SEQ ID NO: 84781 - DNA, 80 bp, synthetic construct
  source 1..80: mol_type = other DNA
tcagtttcaagaataacactgatactagtgggtggtgatgatgataataataataataaccgccagagcttcggacgagc

SEQ ID NO: 84782 - DNA, 80 bp, synthetic construct
  source 1..80: mol_type = other DNA
gggaggatggatgaggtacgattatggatatgaagtattacaatatgaactagtacgaatagtaccaccaccaacaacaa

SEQ ID NO: 84783 - DNA, 80 bp, synthetic construct
  source 1..80: mol_type = other DNA
caaccatggtggagatgagaaaaagagaaaaaggaaaaagagcagtggtaataagagttttgatcatcggaggaatagga

SEQ ID NO: 84784 - DNA, 80 bp, synthetic construct
  source 1..80: mol_type = other DNA
acagcagcggcaccattatcgctgacggcgatggcccagcagatattgtcatggatattgagacagcggaggctgctgct

SEQ ID NO: 84785 - DNA, 80 bp, synthetic construct
  source 1..80: mol_type = other DNA
gatgagtattaagttgatggagcatcagcagcagctcacctgctgggccatcaaacacatcgggtcaagaatcctggctt

SEQ ID NO: 84786 - DNA, 80 bp, synthetic construct
  source 1..80: mol_type = other DNA
ggaaaagataccttcacgatcaacagtggctagatcttgaaggctgctctggcaacatcatctgcaccagtgatgtccct

SEQ ID NO: 84787 - DNA, 80 bp, synthetic construct
  source 1..80: mol_type = other DNA
gtccctaccctaataggtaatataacagatgaagtaaaaaactgttctttcaatatgacctcagcactatcagaaaagaa

SEQ ID NO: 84788 - DNA, 80 bp, synthetic construct
  source 1..80: mol_type = other DNA
gaaggtccaagcgctttttgatgcgtttgatttagttccaattggaaatggaatggaaaggtataagaattggaaaacta

SEQ ID NO: 84789 - DNA, 80 bp, synthetic construct
  source 1..80: mol_type = other DNA
gccaggattcgaacgggctcagaaaggattttgctataagatttttatctttttttcaaaaagtattaaagggggatttt

SEQ ID NO: 84790 - DNA, 80 bp, synthetic construct
  source 1..80: mol_type = other DNA
gagaaaaaaaaataaaattatgtggaagagacaaagactaggactacaagcacctgcccctcctagcccaagaacgagaa

SEQ ID NO: 84791 - DNA, 80 bp, synthetic construct
  source 1..80: mol_type = other DNA
ggtgtagcactaccagtacaggattactattagatggagatggtacgaatactaataatgagaccttcacgccgggacga

SEQ ID NO: 84792 - DNA, 80 bp, synthetic construct
  source 1..80: mol_type = other DNA
ggagatataaatatgaattgcagaagtgaactagatctatataaattagtagtaattgaacttgtaccagtaggagccac

SEQ ID NO: 84793 - DNA, 80 bp, synthetic construct
  source 1..80: mol_type = other DNA
cccctcccgatcaagagtggtgctgatgcaaaaaaaagcagttgcaatgggagcttcgctcgttttcttcttatcagcag

SEQ ID NO: 84794 - DNA, 80 bp, synthetic construct
  source 1..80: mol_type = other DNA
cagcaggaagtaatgacgcggcgtcgacgacactgacggtgcaggtcaggccattattgtctggtacagtgctactgcag

SEQ ID NO: 84795 - DNA, 80 bp, synthetic construct
  source 1..80: mol_type = other DNA
cagcatctgctgatgcccatagaggcgcagcatcatctgctgcagctgacactcaggggcaggcagcagctccagtccag

SEQ ID NO: 84796 - DNA, 80 bp, synthetic construct
  source 1..80: mol_type = other DNA
agtcctaggtctggaacgacaactaatagcgtaccagcagcacctgaggaatatggagggctggctgctggcacaggcca

SEQ ID NO: 84797 - DNA, 80 bp, synthetic construct
  source 1..80: mol_type = other DNA
tctgcagccagccaccagtaccggggacactggcaacctggggtagtaaatactacgaatcgaaatgggaggggaaggca

SEQ ID NO: 84798 - DNA, 80 bp, synthetic construct
  source 1..80: mol_type = other DNA
tggaccatggactgggactgggcgaatggggaaattacaatcttatcacccactgcaacgcgagaatatgatatacagct

SEQ ID NO: 84799 - DNA, 80 bp, synthetic construct
  source 1..80: mol_type = other DNA
ataatcttgctacactccacaggtgggggggggaggggaacgcagagccttgtagttggaggggagttcttgttcttctg

SEQ ID NO: 84800 - DNA, 80 bp, synthetic construct
  source 1..80: mol_type = other DNA
ttgtagttggaggggagttcttgttcttctgcaccacaacaccacccacttgcaccggcagtagtagtactggcaacagc

SEQ ID NO: 84801 - DNA, 80 bp, synthetic construct
  source 1..80: mol_type = other DNA
caccacaacaccacccacttgcaccggcagtagtagtactggcaacagcaacggcaacagggacaacaatagcactagca

SEQ ID NO: 84802 - DNA, 80 bp, synthetic construct
  source 1..80: mol_type = other DNA
gcgaaaaataaatataattataaatatgaggagaagagtaggactatcaatatctgctcctcctagacgaggaacaagga

SEQ ID NO: 84803 - DNA, 80 bp, synthetic construct
  source 1..80: mol_type = other DNA
ggtgtacttctattattacagtactactattaacaggaggtgggagtactactaatactaatgatgacatcttgcctgca

SEQ ID NO: 84804 - DNA, 80 bp, synthetic construct
  source 1..80: mol_type = other DNA
ggaggagaaaagatgaactactgtagaagagaacaatatatatataaagtagtaataatagcagcattagtagcagcacc

SEQ ID NO: 84805 - DNA, 80 bp, synthetic construct
  source 1..80: mol_type = other DNA
ccccccctcctcaagaagagtagtgctgagaaaaaaaagagcagcagtagtagtagcagtcgtctttgtcgtcttaagag

SEQ ID NO: 84806 - DNA, 80 bp, synthetic construct
  source 1..80: mol_type = other DNA
cagcaggaagcagtatgatcgcgtcgtcgataatgatgatgacagtagacgcataccagtgtttgtctggtatagtgcaa

SEQ ID NO: 84807 - DNA, 80 bp, synthetic construct
  source 1..80: mol_type = other DNA
gcgcgtctccgggagcaaaagcagggtcaagatgaatccaaatcagaagattctatgcacttcagccactgctatcataa

SEQ ID NO: 84808 - DNA, 80 bp, synthetic construct
  source 1..80: mol_type = other DNA
gatggggctaacacttggctagggaggacaataagcacagcctcgaggtctggatacgagatgttaaaagtgccaaatgc

SEQ ID NO: 84809 - DNA, 80 bp, synthetic construct
  source 1..80: mol_type = other DNA
cctaggattgaacataggactgcatctaaaaccgagctgcaattgctcacactcacaacctgaaacaaccaacacaagcc

SEQ ID NO: 84810 - DNA, 80 bp, synthetic construct
  source 1..80: mol_type = other DNA
ggggactgctatcgagcgtgtttttatgtggagttgatacgtgggagacccaaggaggataaagtgtggtggaccagcaa

SEQ ID NO: 84811 - DNA, 80 bp, synthetic construct
  source 1..80: mol_type = other DNA
actggcctgatggggctaaaatagagtacttcctctaagatgaagaaaaagacccttgtttctactaataggagacgcgc

SEQ ID NO: 84812 - DNA, 80 bp, synthetic construct
  source 1..80: mol_type = other DNA
aaacaactattataatgaaacaaacatcaccaacatccaaatggaagagagaacaagcaggaatttcaataacttaacta

SEQ ID NO: 84813 - DNA, 80 bp, synthetic construct
  source 1..80: mol_type = other DNA
tactataaattcatggcacatatatgggaaagacaatgcagtaagaattggagagagctcggatgttttagtcacaagag

SEQ ID NO: 84814 - DNA, 80 bp, synthetic construct
  source 1..80: mol_type = other DNA
ttcatgcgacccagatgaatgcaggttctatgctctcagccaaggaacaacaatcagagggaaacactcaaacggaacaa

SEQ ID NO: 84815 - DNA, 80 bp, synthetic construct
  source 1..80: mol_type = other DNA
gtcccagtatcgcgccctgataagctggccactatcatcaccgcccacagtgtacaacagcagggtggaatgcattgggt

SEQ ID NO: 84816 - DNA, 80 bp, synthetic construct
  source 1..80: mol_type = other DNA
aagaggggaaaatattgaaatgggagtctctgactggaactgctaagcatattgaagaatgctcatgttacggggaacga

SEQ ID NO: 84817 - DNA, 80 bp, synthetic construct
  source 1..80: mol_type = other DNA
acaggaattacctgcacatgcagggacaattggcagggctcaaatagaccagtggttcagatagatccagtagcaatgac

SEQ ID NO: 84818 - DNA, 80 bp, synthetic construct
  source 1..80: mol_type = other DNA
gtcccataatggggcatatggggtaaaagggttttcatttaaatacggcaatggtgtttggatcgggagaaccaaaagcc

SEQ ID NO: 84819 - DNA, 80 bp, synthetic construct
  source 1..80: mol_type = other DNA
attcttgactgtaaaaacacaagttttttaacattgctgtggtgcaattagttagggacaaggctttgctaagtgcttca

SEQ ID NO: 84820 - DNA, 80 bp, synthetic construct
  source 1..80: mol_type = other DNA
gtcctctaacggggcatatggggtaaaagggttctcatttaaatatggcaatggtgtctggatcgtgaggaccaaaagca

SEQ ID NO: 84821 - DNA, 80 bp, synthetic construct
  source 1..80: mol_type = other DNA
aagaggtttctaaccagaacatccgttggggactttccagggaggtgtggcctgggcggggttggggagtggctaaccct

SEQ ID NO: 84822 - DNA, 80 bp, synthetic construct
  source 1..80: mol_type = other DNA
gatctgaatttaaaataaatgactggcgacaaagaagaaagttaatagaagaagaaacgataaaatggttcgaaatttct

SEQ ID NO: 84823 - DNA, 80 bp, synthetic construct
  source 1..80: mol_type = other DNA
tagaaaataaaccagtagaagcaatcttattgaaaatgacagctatggatggagagatacctgatggatattttgtacat

SEQ ID NO: 84824 - DNA, 80 bp, synthetic construct
  source 1..80: mol_type = other DNA
tatttactcattgataaacatatcattaaacgacaaaaaataaaagttactaaatccttaatgtataatgccataaatac

SEQ ID NO: 84825 - DNA, 80 bp, synthetic construct
  source 1..80: mol_type = other DNA
gataacgtatttatttcaggtaaatattcattaagaggcaaaactgaaggagtattagctttatactgcttatcgaatac

SEQ ID NO: 84826 - DNA, 80 bp, synthetic construct
  source 1..80: mol_type = other DNA
gattttaaaacaaattcagattatacttttctaccatcagattttacatgctcattaaacacaatcttgacttcatatag

SEQ ID NO: 84827 - DNA, 80 bp, synthetic construct
  source 1..80: mol_type = other DNA
caaatcaagtagctacaacaatcatattacatctggatggtataaacgtaaatgaagtcaataaagcatttgaattattg

SEQ ID NO: 84828 - DNA, 80 bp, synthetic construct
  source 1..80: mol_type = other DNA
gactggtcaatttaaagtcaaatcagatatatataaagaacatacagatagtgaaatacggaatgcaattgaatcagcct

SEQ ID NO: 84829 - DNA, 80 bp, synthetic construct
  source 1..80: mol_type = other DNA
atagtatattttcatgagtatacatattacaaaaataatgaatttattgtgagtgatgaattctggttatataccaatat

SEQ ID NO: 84830 - DNA, 80 bp, synthetic construct
  source 1..80: mol_type = other DNA
gatattttatataaatatatctatgaaaaagattcgattatgaatggtactgactataaaaaattatatgacaataattc

SEQ ID NO: 84831 - DNA, 80 bp, synthetic construct
  source 1..80: mol_type = other DNA
atggagaaaataacgcttcttctttcaatagtcagtcttgtaaaaagcgatcagatttgcattggttaccatgcaaacaa

SEQ ID NO: 84832 - DNA, 80 bp, synthetic construct
  source 1..80: mol_type = other DNA
acaataccaaccaagaagatcttttgatactgtggggaatccaccatcctaaatatgaagcagagcagacaatgtcatat

SEQ ID NO: 84833 - DNA, 80 bp, synthetic construct
  source 1..80: mol_type = other DNA
atatctggtcttacaatgcggaacttcttattgccctagagaatcagcacacaattgatttgaccgattcagagatgaac

SEQ ID NO: 84834 - DNA, 80 bp, synthetic construct
  source 1..80: mol_type = other DNA
caattattcgaaaagaccaggaggcaactgagagaaaatgctgaggatatgggcaatggttgtttcaagatataccacaa

SEQ ID NO: 84835 - DNA, 80 bp, synthetic construct
  source 1..80: mol_type = other DNA
ggatcctgtggatttcctttgccatatcatgctttttgctttgtgttgttttgctggggttcattgtgtgggcctgccag

SEQ ID NO: 84836 - DNA, 80 bp, synthetic construct
  source 1..80: mol_type = other DNA
atatatggttttacaatggggagcttattattgctatagagaatctgcatacaattgatttgaccgattcagaaatgaac

SEQ ID NO: 84837 - DNA, 80 bp, synthetic construct
  source 1..80: mol_type = other DNA
aaagagcaaccgccagtattagaaataacacctatgatcacagaaaatacagggaagaggcaatgcaaaatagagaatgg

SEQ ID NO: 84838 - DNA, 80 bp, synthetic construct
  source 1..80: mol_type = other DNA
gtcacaacagggtggtggtttggtttagctttggggcgtcaaggttcataaccctggccagcgtaatgggccacgtgttc

SEQ ID NO: 84839 - DNA, 80 bp, synthetic construct
  source 1..80: mol_type = other DNA
ttggggcgtcaaggttcataaccctggccagcgtaatgggccacgtgttcataagtgtaaagaatgtaaacatgcggtgc

SEQ ID NO: 84840 - DNA, 80 bp, synthetic construct
  source 1..80: mol_type = other DNA
tcaaacttctagccactgtaatgggccatgtaatcagatgtgttaagaatggtaacatgcaatgcactatttgtatataa

SEQ ID NO: 84841 - DNA, 80 bp, synthetic construct
  source 1..80: mol_type = other DNA
actgctatcacaataggcgcaatcgcagtactcattggaatagcaaacctaggattgaacataggactgcatctaaaacc

SEQ ID NO: 84842 - DNA, 80 bp, synthetic construct
  source 1..80: mol_type = other DNA
ggaagacccaaggaggataaagtgtggtggaccagcaatagtatagtatcgatgtgttccagtacagaattcctgggaca

SEQ ID NO: 84843 - DNA, 80 bp, synthetic construct
  source 1..80: mol_type = other DNA
ttattcatgcagataatggctatcatttatctaatccttctgtttgcagcagtgagaggagatcagatatgcattggata

SEQ ID NO: 84844 - DNA, 80 bp, synthetic construct
  source 1..80: mol_type = other DNA
ctcgagacatccttgagaagacccacaatgggaaattgtgcaaactgaagggaatccctccgcttgaattgggagattgt

SEQ ID NO: 84845 - DNA, 80 bp, synthetic construct
  source 1..80: mol_type = other DNA
tgtcactggcaatcatgatagctgggatctcgttctggatgtgctctaatggttctctgcaatgcaggatctgcatatga

SEQ ID NO: 84846 - DNA, 80 bp, synthetic construct
  source 1..80: mol_type = other DNA
gccacaaaggaagatatatggttttacaatgcggaacttcttgttgccctagagaaccagcacacaattgatttgaatga

SEQ ID NO: 84847 - DNA, 80 bp, synthetic construct
  source 1..80: mol_type = other DNA
tatcatgctttttgctttgtgttgttttggtggggttcattatctgggcctgccagagaggcaacattagatgcaacatt

SEQ ID NO: 84848 - DNA, 80 bp, synthetic construct
  source 1..80: mol_type = other DNA
atgagaaagaccctcagattgaaaaggatttctatgaggttgaagggaggattcggggccccgagaagtcagttgtagac

SEQ ID NO: 84849 - DNA, 80 bp, synthetic construct
  source 1..80: mol_type = other DNA
acccaaagatttatatttggtttaataatgagcaagtcatcgtcgccctagagaatcagcatacaattgagttgatagat

SEQ ID NO: 84850 - DNA, 80 bp, synthetic construct
  source 1..80: mol_type = other DNA
tcagaaatgaacaaattgttggaaaaaaccagaaggcaattgagagaaaatgctgaagacatgggaaatggttgtttcaa

SEQ ID NO: 84851 - DNA, 80 bp, synthetic construct
  source 1..80: mol_type = other DNA
tacacaacactggagacacagcaattttctttttttggggtggagcatacccccctgccacaactgaacaagaaatcctg

SEQ ID NO: 84852 - DNA, 80 bp, synthetic construct
  source 1..80: mol_type = other DNA
tgtgattttggtgatcgagaggtacgaatgggaacagagagcactaattttgccaggagtccagaaattgcggaaagacc

SEQ ID NO: 84853 - DNA, 80 bp, synthetic construct
  source 1..80: mol_type = other DNA
atgattgcaatcattataatagcgatattggcagacaccggaaaatcagacaagatctgcattgggtatcatgcaaacaa

SEQ ID NO: 84854 - DNA, 80 bp, synthetic construct
  source 1..80: mol_type = other DNA
tggggctattgcagggttcatcgaaggagggtggactggaatgatagatggatggtatggctaccaccatgagaattctc

SEQ ID NO: 84855 - DNA, 80 bp, synthetic construct
  source 1..80: mol_type = other DNA
taggctcagggtctgcggcagacaaagagagcactcaaaaggctgtagtcgggatcacaaataaggtcaattatatcata

SEQ ID NO: 84856 - DNA, 80 bp, synthetic construct
  source 1..80: mol_type = other DNA
aacaaaatgaacacccagttggaggctgtcgaccacgaattttcgaatttggaaaggagaattgacaatttaaacaaaag

SEQ ID NO: 84857 - DNA, 80 bp, synthetic construct
  source 1..80: mol_type = other DNA
aatggaagatggatttttagatgtttggacatacaatggtgaattattagttctccttgaaaacgaaagaacactggaca

SEQ ID NO: 84858 - DNA, 80 bp, synthetic construct
  source 1..80: mol_type = other DNA
tgcatgatgagaatgtgaaaattgtgtatgaaaaagtcaggtcacaacttcgagacaatgctaatgacctaggaaatcga

SEQ ID NO: 84859 - DNA, 80 bp, synthetic construct
  source 1..80: mol_type = other DNA
tgctttgaattttggcataagtgtgacaatgaatgcatagagtctgtcaagaatggcacttataactatcccaaatatcg

SEQ ID NO: 84860 - DNA, 80 bp, synthetic construct
  source 1..80: mol_type = other DNA
aagtgaaagcagattaaacagacaaacaatagaatcgcagaagctggaaaatcttggtgtctatcaaattctttctattt

SEQ ID NO: 84861 - DNA, 80 bp, synthetic construct
  source 1..80: mol_type = other DNA
aagaaaggttctgcaaaatcttgaaaaaagcccctctcgacttgaaagactgcagtatagaaggttggatattggggaat

SEQ ID NO: 84862 - DNA, 80 bp, synthetic construct
  source 1..80: mol_type = other DNA
atagtacggtatcgagcagtctagttttggtagggctgatcttggcaatgggtctttggaggtgttcaaattgttcaacg

SEQ ID NO: 84863 - DNA, 80 bp, synthetic construct
  source 1..80: mol_type = other DNA
tagttttggtagggctgatcttggcaatgggtctttggaggtgttcaaattgttcaacgcaaccgaggatatgtatataa

SEQ ID NO: 84864 - DNA, 80 bp, synthetic construct
  source 1..80: mol_type = other DNA
ccacgatgcgacctgttacttggtgaccaaagctggtcatatatagtggaaagacctacagctcaaaatgggatctgcta

SEQ ID NO: 84865 - DNA, 80 bp, synthetic construct
  source 1..80: mol_type = other DNA
cccaggagtgctaaatgaggttgaagaactaaaggcacttattggatcaagagaaagagtagaaaggtttgagatgtttc

SEQ ID NO: 84866 - DNA, 80 bp, synthetic construct
  source 1..80: mol_type = other DNA
ccaaaagtacatggacaggagtagacaccaatagtggggtaacaagtgcttgcccatatgctagtggttcgtctttctac

SEQ ID NO: 84867 - DNA, 80 bp, synthetic construct
  source 1..80: mol_type = other DNA
agaaacttggtgtggataacaaaaactgaatcagcagcgtacccaacaatcaggggaacttacaataacactggaagaca

SEQ ID NO: 84868 - DNA, 80 bp, synthetic construct
  source 1..80: mol_type = other DNA
gccaattctatatttctggggtgtgcatcatcctccgaacaccaatgtgcaaaacagtttgtatggttccggtgagcgat

SEQ ID NO: 84869 - DNA, 80 bp, synthetic construct
  source 1..80: mol_type = other DNA
atgttagagtgggaactgaaaggatgagtttttcaaagagcccagaaattgcggaaagacctactgtaaacggacaaaga

SEQ ID NO: 84870 - DNA, 80 bp, synthetic construct
  source 1..80: mol_type = other DNA
ggtagaattgattactactggtctgttttagagcctggggaaaccttgaatatagaatctaatggaaatctgatcgctcc

SEQ ID NO: 84871 - DNA, 80 bp, synthetic construct
  source 1..80: mol_type = other DNA
ttcaacaacacaggtggacacaatacttgaaaagaatgtaaccgtcacgcactcagttgagttgctggaaaatcaaaagg

SEQ ID NO: 84872 - DNA, 80 bp, synthetic construct
  source 1..80: mol_type = other DNA
ttggtatgcatacagattcgtcagcaccaatagaaaaggagccgtcttcaagtccaacttaccgatcgaaaactgtgatg

SEQ ID NO: 84873 - DNA, 80 bp, synthetic construct
  source 1..80: mol_type = other DNA
ccacctgccaaactattgcatgtgtgttaagaacaaataagacattccagaatgttatccctcactggataggagaatgc

SEQ ID NO: 84874 - DNA, 80 bp, synthetic construct
  source 1..80: mol_type = other DNA
cccaagtatgtgaaaagtgaaagtctgagacttgcaactggactaaggaatgttccacaagtagagactataggactctt

SEQ ID NO: 84875 - DNA, 80 bp, synthetic construct
  source 1..80: mol_type = other DNA
tccctctgaatccccgatgcgacctgttacttggtgaccaaagctggccatatatagggaaaagacctacagctcaaaat

SEQ ID NO: 84876 - DNA, 80 bp, synthetic construct
  source 1..80: mol_type = other DNA
cccttagataaaaggacaggagtatatttaaacaatgggataacaattgtttgtttttatgctagtggttcgtctttctt

SEQ ID NO: 84877 - DNA, 80 bp, synthetic construct
  source 1..80: mol_type = other DNA
gaacttgataatgggaaaaaaaacaactgtgaaaacgattttcacggtaatcttccttcctactaataacactggaagac

SEQ ID NO: 84878 - DNA, 80 bp, synthetic construct
  source 1..80: mol_type = other DNA
tcttcaaaaataaaacacaagtgctagtctccaatagtggggtaacaagtgcttgcccatatgctagtggttcgtctttc

SEQ ID NO: 84879 - DNA, 80 bp, synthetic construct
  source 1..80: mol_type = other DNA
tacagaaacttggggtggataacaaaaactgaatcagccgcctccccaagaatcaggggaacttacaataacactaaaag

SEQ ID NO: 84880 - DNA, 80 bp, synthetic construct
  source 1..80: mol_type = other DNA
agatataacaattggctctgtctccctaaccattgcaataatatgtttcctcatgcaaattgccatcttagcaacgacta

SEQ ID NO: 84881 - DNA, 80 bp, synthetic construct
  source 1..80: mol_type = other DNA
ttcacgcacagctcatgagacctttagggtggtcaatggttggaccatggctaattcaaagtcacagataaataggcaag

SEQ ID NO: 84882 - DNA, 80 bp, synthetic construct
  source 1..80: mol_type = other DNA
gggtattattcataagagaagggaaaattataaatactatcccatcgtcaggaagtgctcagcacgttgaagaatccttt

SEQ ID NO: 84883 - DNA, 80 bp, synthetic construct
  source 1..80: mol_type = other DNA
gcttatctttggtatcctgaagctagaagagtttgccgagacaattggaagggctccaataggcccattatatatataaa

SEQ ID NO: 84884 - DNA, 80 bp, synthetic construct
  source 1..80: mol_type = other DNA
taaaaaaatatctctatcttctgtcataccagatggacatgctttatataacagcattgacatattacggtcttctctta

SEQ ID NO: 84885 - DNA, 80 bp, synthetic construct
  source 1..80: mol_type = other DNA
tgatgttgctttaactagaattgaatcacaacaaatggatgtgctatgatcctccaaaatctgtgtctgatcgcaacaga

SEQ ID NO: 84886 - DNA, 80 bp, synthetic construct
  source 1..80: mol_type = other DNA
aatgtaaagtttgcccatgtgattattgcggaatacggcataaatgtgaaaattgcttaaattcagattgtttcatgaat

SEQ ID NO: 84887 - DNA, 80 bp, synthetic construct
  source 1..80: mol_type = other DNA
aatttaattctcatagatggataacttttgatgaagagccaagtcagatggtattgtttgaatattggattatgtataag

SEQ ID NO: 84888 - DNA, 80 bp, synthetic construct
  source 1..80: mol_type = other DNA
taagtagattcaattatagttataaagtacaattgaaaattcttaatatgaataaaaatcggagatttcatattaatgag

SEQ ID NO: 84889 - DNA, 80 bp, synthetic construct
  source 1..80: mol_type = other DNA
aagcattatcagtaccaattacttctcaatacctaaaatttaaatttaacaataagatttacattatgtttgggaccttt

SEQ ID NO: 84890 - DNA, 80 bp, synthetic construct
  source 1..80: mol_type = other DNA
aaattcaaccatggatacagctgaaaagtttaaagatagggtatatccaatcattaaatgttgatagatgtgcaaaattg

SEQ ID NO: 84891 - DNA, 80 bp, synthetic construct
  source 1..80: mol_type = other DNA
catcatgcattactgaaattaatgcacgtagaccaatttctgagtgtgattatttaatcgaagcatgcctatgtaacgag

SEQ ID NO: 84892 - DNA, 80 bp, synthetic construct
  source 1..80: mol_type = other DNA
ggaaattttcagctgtgatggggagagacaaaatacctgtgactaaaagtttagctatgaaatatttttgtaaaaacatt

SEQ ID NO: 84893 - DNA, 80 bp, synthetic construct
  source 1..80: mol_type = other DNA
ttgatagaaaattaccatgtgtgaatgtaaacatatggagaagagagatagaatataaaacaaatggagtctgtcttaat

SEQ ID NO: 84894 - DNA, 80 bp, synthetic construct
  source 1..80: mol_type = other DNA
tattttattatggtcattcaaagtgtcatgtcgtttcagagtgcccaagatggaatcaacaattaagaatattacatgcg

SEQ ID NO: 84895 - DNA, 80 bp, synthetic construct
  source 1..80: mol_type = other DNA
tctaaatataatatttagacggcaatttatgaatgaagttgttgaatggtttgaaaactttactcaattaacgggaatgc

SEQ ID NO: 84896 - DNA, 80 bp, synthetic construct
  source 1..80: mol_type = other DNA
caaaccatgttgtgtgctaaagtggaaaaagatcagaggagtaattattatgatactatactgtatggtgttgcaccacc

SEQ ID NO: 84897 - DNA, 80 bp, synthetic construct
  source 1..80: mol_type = other DNA
ctgaagtagctaatctattagcagatgtattgactatggtgtctatgccaaccgaaaaatttcaatttgacatagtcaaa

SEQ ID NO: 84898 - DNA, 80 bp, synthetic construct
  source 1..80: mol_type = other DNA
aattaggcatcttgaaaatttgcttcacagaataaaagatgccaatgacattttgaatgtaaatgtgaaattaagagtaa

SEQ ID NO: 84899 - DNA, 80 bp, synthetic construct
  source 1..80: mol_type = other DNA
atttagtaaatgaaacggaaactacgccattaacagagagtaatgatattgtatatcaggattcatattttacgattaca

SEQ ID NO: 84900 - DNA, 80 bp, synthetic construct
  source 1..80: mol_type = other DNA
attccaatcataaattacttccattaatggctgatgaatataaaattacaattaacacaaaaactgatattccagatcgt

SEQ ID NO: 84901 - DNA, 80 bp, synthetic construct
  source 1..80: mol_type = other DNA
ttatattagatataattttaataaatttgcagcaatatctcatggcaaacggcattggaggcttgttcttcattctcagt

SEQ ID NO: 84902 - DNA, 80 bp, synthetic construct
  source 1..80: mol_type = other DNA
ttagatagaaaaattaagtcagataaaaaacatggtagacaattctcttatgatgatggagatatggcttttgtacatcc

SEQ ID NO: 84903 - DNA, 80 bp, synthetic construct
  source 1..80: mol_type = other DNA
acgtgcattggtcaattatgtggtggtactacatttgaagttgctaaaacatcattatacagcataaaaccctcaaaaac

SEQ ID NO: 84904 - DNA, 80 bp, synthetic construct
  source 1..80: mol_type = other DNA
cggctacaaataaaattgaaagtgatttaatttctatggttggaagttaagaatgtagtgagtgaaggttacaagcaata

SEQ ID NO: 84905 - DNA, 80 bp, synthetic construct
  source 1..80: mol_type = other DNA
ttaatttctatggttggaagttaagaatgtagtgagtgaaggttacaagcaataggaattgcagctgtgcatatgtggct

SEQ ID NO: 84906 - DNA, 80 bp, synthetic construct
  source 1..80: mol_type = other DNA
atgtataatagatgcatttgaaaaagggaaagacatcaccattgatttagacgctatgaatggtgaagttaaattggacg

SEQ ID NO: 84907 - DNA, 80 bp, synthetic construct
  source 1..80: mol_type = other DNA
ttcatataactcaactgccgcttttgtttcgacaattttaggtacacccattaaaatgtataacgaatttggacaacctt

SEQ ID NO: 84908 - DNA, 80 bp, synthetic construct
  source 1..80: mol_type = other DNA
ggctttaaaaattgcgacaatgtctgattttggaattaatcttgatgccatttgcgacaatgttaaaaaaagtcaaacag

SEQ ID NO: 84909 - DNA, 80 bp, synthetic construct
  source 1..80: mol_type = other DNA
acagtcagactcatgttcgaatgatttagcaatgaaacattctattatgacagaggcagtagtatgcgatgaatctgcgc

SEQ ID NO: 84910 - DNA, 80 bp, synthetic construct
  source 1..80: mol_type = other DNA
agatgccattcaggagaaagatgaaactgttccgcaaatagatcatcgtattatgaagtggatgttggactctcacgatg

SEQ ID NO: 84911 - DNA, 80 bp, synthetic construct
  source 1..80: mol_type = other DNA
gaatggaggaataaattttacaaaggctaaaagtaagttgaaagaaacagaaaatgatattactgaaatgaaatcaaaga

SEQ ID NO: 84912 - DNA, 80 bp, synthetic construct
  source 1..80: mol_type = other DNA
ttaattcaaacataggagcatttaatccaattaatcaacatgtaaaaacagaaacagtatcggatatattcgaagatgaa

SEQ ID NO: 84913 - DNA, 80 bp, synthetic construct
  source 1..80: mol_type = other DNA
agtaaaatgaaaaacgtattaattgatatgatcaatgaaatgtagtcgagtacttgcccgtactgcatcaggtgactgaa

SEQ ID NO: 84914 - DNA, 80 bp, synthetic construct
  source 1..80: mol_type = other DNA
aaatgtagtcgagtacttgcccgtactgcatcaggtgactgaaatcagcattgaggggatccccaacccgatctgtggct

SEQ ID NO: 84915 - DNA, 80 bp, synthetic construct
  source 1..80: mol_type = other DNA
ttctcaattatcaaatcggagttcacgaagaatggattttgttgatgatgaagagttaagcacttattttaactcaaaag

SEQ ID NO: 84916 - DNA, 80 bp, synthetic construct
  source 1..80: mol_type = other DNA
agtgttatgttctccactgatacaaacaatgactttgaaactggccaaaacacgagattcaccccagtcggtgtcgtcca

SEQ ID NO: 84917 - DNA, 80 bp, synthetic construct
  source 1..80: mol_type = other DNA
ggacggtagcaccacccaccaaaatgaaccccaacaatgggttctcccaagctacttaggtagagacagtcacaatgtgc

SEQ ID NO: 84918 - DNA, 80 bp, synthetic construct
  source 1..80: mol_type = other DNA
aaaagtcaaagcgtgaattcccaggccagcctgacatgtggaagaacgccttcagttctgatttctcacacatgaaacta

SEQ ID NO: 84919 - DNA, 80 bp, synthetic construct
  source 1..80: mol_type = other DNA
acattggccccacagggtggcttcgacaagaacgggaacaccccacacggcaaaggcgtcatgaagtctctcaccactgg

SEQ ID NO: 84920 - DNA, 80 bp, synthetic construct
  source 1..80: mol_type = other DNA
gatggagaaatctaccattatggtctgtatgtggatcgaggccttgtactgggtgtacacaaaccgccagctgccatcag

SEQ ID NO: 84921 - DNA, 80 bp, synthetic construct
  source 1..80: mol_type = other DNA
ggggttcggacttggcgactatggtccggtgtgctcgagcattcggaggcttaatggatgaactcaaagcacattgtgtc

SEQ ID NO: 84922 - DNA, 80 bp, synthetic construct
  source 1..80: mol_type = other DNA
tagggatcaaaataggagtttgtcacctttcatgaggggggcccacaatatatcgtttgtcaccccaccatctagcagat

SEQ ID NO: 84923 - DNA, 80 bp, synthetic construct
  source 1..80: mol_type = other DNA
tgcaccttcagaggggatgtcactcatattgcaggttctcacaactacacaatgaatttggccactcaaaattggaacag

SEQ ID NO: 84924 - DNA, 80 bp, synthetic construct
  source 1..80: mol_type = other DNA
agaatggtgaaactgcccacaggaatgaaccccaacagtgggtgctcccaagttactcaggcagaaatactcccaatgtg

SEQ ID NO: 84925 - DNA, 80 bp, synthetic construct
  source 1..80: mol_type = other DNA
catttggcccccgctgtagcccccacttttccgggtgaacaacttctcttcttcagatccactatgcccggatgcagcgg

SEQ ID NO: 84926 - DNA, 80 bp, synthetic construct
  source 1..80: mol_type = other DNA
agcgaggggagtcacgggcgtaatgtgaaaagacaaaattgattatctttcttttctttagagtcttgaaaaaaaaaaaa

SEQ ID NO: 84927 - DNA, 80 bp, synthetic construct
  source 1..80: mol_type = other DNA
taatctgtcaaaatgagaaaaatagtgctttttctgtcaatagtcagtcttgttaatagtgacaagatctgcattggtta

SEQ ID NO: 84928 - DNA, 80 bp, synthetic construct
  source 1..80: mol_type = other DNA
attcaaacgtcaagaacctttatgacaaggttcggttacagcttaaggataatgcaaaggagctgggtaatggttgtttt

SEQ ID NO: 84929 - DNA, 80 bp, synthetic construct
  source 1..80: mol_type = other DNA
ttcaccacaaatgtaataatgagtgtatggaaagtgtaaagaatggaacatataattaccctcattattcggaggaggca

SEQ ID NO: 84930 - DNA, 80 bp, synthetic construct
  source 1..80: mol_type = other DNA
agataagtggggtcaaattggaatcaattggaacttaccaaatactatcaatttattcaacagcagcgagttccctagta

SEQ ID NO: 84931 - DNA, 80 bp, synthetic construct
  source 1..80: mol_type = other DNA
agaacaacccagcaaatggcctatgctacccgggagatttccaagattatgaagagcttaaacatctcttaagcagtaca

SEQ ID NO: 84932 - DNA, 80 bp, synthetic construct
  source 1..80: mol_type = other DNA
acccattttggaaaaatacaaatattccccaggaattcttggccccaacatgacacgtcaggagtaacagctgcatgtcc

SEQ ID NO: 84933 - DNA, 80 bp, synthetic construct
  source 1..80: mol_type = other DNA
atttagtggaaggtcctcttttttcagaaatatggtgtggcttactaaaaagaacaatgaatatttaacaataaagagat

SEQ ID NO: 84934 - DNA, 80 bp, synthetic construct
  source 1..80: mol_type = other DNA
catacaaaaatactaatcaggaagatcttttgataatgtggggaatccaccatcccaatcatgatgaagaacaagtgaga

SEQ ID NO: 84935 - DNA, 80 bp, synthetic construct
  source 1..80: mol_type = other DNA
ctctataaaaaccccagaacttacatttctgttgggacatcaacactgaaccagaggttatccccaataatagctgaaag

SEQ ID NO: 84936 - DNA, 80 bp, synthetic construct
  source 1..80: mol_type = other DNA
aaagcggcagaatgagtttctattggacaattttgaagccaagtgataccattaattttgagactaatggaaattttatc

SEQ ID NO: 84937 - DNA, 80 bp, synthetic construct
  source 1..80: mol_type = other DNA
aaaggggactcagcaattataaggagtgaattggaatatggtaattgcaacactaggtgccaaactccaatgggagcatt

SEQ ID NO: 84938 - DNA, 80 bp, synthetic construct
  source 1..80: mol_type = other DNA
gaactccagcatgcctttccaaaacattcaccctatcaccattggggagtgcccaaaatacgtgaaatcaaataggttag

SEQ ID NO: 84939 - DNA, 80 bp, synthetic construct
  source 1..80: mol_type = other DNA
tccttgccactggtctcagaaacattcctcagatagagacaagggggctgtttggggcaattgcagggtttatagaagga

SEQ ID NO: 84940 - DNA, 80 bp, synthetic construct
  source 1..80: mol_type = other DNA
acactctgtcaatctccttgaggacagtcacaatgggaaactgtgtagactgaagggaataaccccactacaattgggga

SEQ ID NO: 84941 - DNA, 80 bp, synthetic construct
  source 1..80: mol_type = other DNA
aagaacaatatggaggaccaaatgtatgatcaattcctcaagaggattcagtcagctaaaacagccactgtagcaaagga

SEQ ID NO: 84942 - DNA, 80 bp, synthetic construct
  source 1..80: mol_type = other DNA
atgctattcctgctcatactagcctttttagggttctcaacaagcaaccctattgcaactaggtgtttccatgggggcca

SEQ ID NO: 84943 - DNA, 80 bp, synthetic construct
  source 1..80: mol_type = other DNA
aggcgtctgtcaccctggatagaacctgtgagcatgttaaggttacttgtggaaagaaatctctgcaattccatgcatgt

SEQ ID NO: 84944 - DNA, 80 bp, synthetic construct
  source 1..80: mol_type = other DNA
aaacattttcaaatgaaggtaggatacaaagattccattctggggaattcattcagaatagcatgttgtcaactttgtca

SEQ ID NO: 84945 - DNA, 80 bp, synthetic construct
  source 1..80: mol_type = other DNA
gtcaactttgtcatgttacgttaggattcattatgtggccatgccaaaaaggcaacattaggtgcaacatttgcatttga

SEQ ID NO: 84946 - DNA, 80 bp, synthetic construct
  source 1..80: mol_type = other DNA
acatcaacataagtaatacaaatttaattgcagaacaggttgtaaatccagtagcactagcaggtaattcctctctctgt

SEQ ID NO: 84947 - DNA, 80 bp, synthetic construct
  source 1..80: mol_type = other DNA
agcaaaagcaggggaatttcacaaccactcaagatggagacagtatcactaataactatactactagtaataacagtaag

SEQ ID NO: 84948 - DNA, 80 bp, synthetic construct
  source 1..80: mol_type = other DNA
agctaagatcactttttagttctgctaggtcttatcaaaggatccagattttcccagacacaatctggaatgtgtcttac

SEQ ID NO: 84949 - DNA, 80 bp, synthetic construct
  source 1..80: mol_type = other DNA
gaagaaataaataggaccttcaaaccattgataggtttgcaggggagaattgattattattggtcggtattgaaaccggg

SEQ ID NO: 84950 - DNA, 80 bp, synthetic construct
  source 1..80: mol_type = other DNA
agctgcacagtgcaatgtcagacagaaaaaggtggcttaaacacaacattgccattccaaaacgtaagcaaatatgcatt

SEQ ID NO: 84951 - DNA, 80 bp, synthetic construct
  source 1..80: mol_type = other DNA
agcatgtggtgtgtatctggataagttgaaatcagtaggtaaagcattcaaaattgtctctttgagatatacaagaaagg

SEQ ID NO: 84952 - DNA, 80 bp, synthetic construct
  source 1..80: mol_type = other DNA
atcctgatagctcccttagagaccacattaatgttattgtagggcgtgatctctcttttcaggatttaagtgagacacct

SEQ ID NO: 84953 - DNA, 80 bp, synthetic construct
  source 1..80: mol_type = other DNA
tttaaaagatttacacaatccttatatgatggtttacgtgatgagaagttaaagaactgtgttgttgatgccttaagaaa

SEQ ID NO: 84954 - DNA, 80 bp, synthetic construct
  source 1..80: mol_type = other DNA
gcatactgcaaaatgccactttgagaaagattatgagtatgaaaatagctgggcatttgtcaagatataccgcctaattt

SEQ ID NO: 84955 - DNA, 80 bp, synthetic construct
  source 1..80: mol_type = other DNA
atgggatcagcaacaaagtaaactcagtaattgaaaaaatgaacattcaatttacttcagtaggcaaggaattcaataat

SEQ ID NO: 84956 - DNA, 80 bp, synthetic construct
  source 1..80: mol_type = other DNA
atggaagcaaaactgtttgtattattctgtgcagccactgcactaaaggctgacaccatttgtgtaggttaccatgctaa

SEQ ID NO: 84957 - DNA, 80 bp, synthetic construct
  source 1..80: mol_type = other DNA
atgaaagcaaaactgtttgtattattctgtacattcaatgcactgaaagctgacaccatttgtataggctaccatgctaa

SEQ ID NO: 84958 - DNA, 80 bp, synthetic construct
  source 1..80: mol_type = other DNA
atgggatcagcaacaaagtgaactcaataattgagaagatgaacattcaatttacctcagtgggcaaggagttcaatgac

SEQ ID NO: 84959 - DNA, 80 bp, synthetic construct
  source 1..80: mol_type = other DNA
gaaaggagtttaatgatctggagaaaaggattgagaatttgaataagaaggtcgatgatgggtttttggatgtgtggaca

SEQ ID NO: 84960 - DNA, 80 bp, synthetic construct
  source 1..80: mol_type = other DNA
ccttggtcttgttggtctccctgggggcaatcagcttctggatgtgttctaatgggtcgttgcaatgcagagtgtgcatt

SEQ ID NO: 84961 - DNA, 80 bp, synthetic construct
  source 1..80: mol_type = other DNA
atgaaagcaaaactgcttgtattatcctgtgtgttcactgcactaaaagctgacaccctttgtgtgggctaccatgctaa

SEQ ID NO: 84962 - DNA, 80 bp, synthetic construct
  source 1..80: mol_type = other DNA
ctccgaatgacagtgatcaacaagccctttatcagaataatcatacatacatctcagttggatcatcaagatactatcag

SEQ ID NO: 84963 - DNA, 80 bp, synthetic construct
  source 1..80: mol_type = other DNA
tggcatgctgctaacgacagagtcgtggtcttacataatagagacttcaaattcaaaaaatggagcatgctaccctggaa

SEQ ID NO: 84964 - DNA, 80 bp, synthetic construct
  source 1..80: mol_type = other DNA
tcaatgaaattggcgggcaattcttctctctgtcctgttagtgggtgggctatacacagcaaagataatagtgtaagaat

SEQ ID NO: 84965 - DNA, 80 bp, synthetic construct
  source 1..80: mol_type = other DNA
aattacgaaaacaacacttgggtgaatcagacatatgttaacatcagcaacaacaattttgtggctgaaaaggcattaaa

SEQ ID NO: 84966 - DNA, 80 bp, synthetic construct
  source 1..80: mol_type = other DNA
ttcagtgaaattagcaggcaattctcctctctgccctgttagtggttgggcgatacacagtaaagataacagtgtaagaa

SEQ ID NO: 84967 - DNA, 80 bp, synthetic construct
  source 1..80: mol_type = other DNA
tgcgagtgagatttcgtctcagggggcaaagcaggggaatttcacaaccactcaaaatggaggcagcatcactgataatt

SEQ ID NO: 84968 - DNA, 80 bp, synthetic construct
  source 1..80: mol_type = other DNA
tcggggccatagcaggattcatagagggaggttggtcaggactagttgctggttggtatggattccagcattcaaatgac

SEQ ID NO: 84969 - DNA, 80 bp, synthetic construct
  source 1..80: mol_type = other DNA
aaggggttggtatggcagcagatagagactcaacccaaaaggcaattgataaaataacatctaaagtgaataacatagtc

SEQ ID NO: 84970 - DNA, 80 bp, synthetic construct
  source 1..80: mol_type = other DNA
atcaaatccaagatatatgggcatataatgcagaattgttagttctgcttgaaaaccagaaaacactcgatgagcatgat

SEQ ID NO: 84971 - DNA, 80 bp, synthetic construct
  source 1..80: mol_type = other DNA
agagggggtcaagctggaatctgaaggaacttacaaaatcctcaccatttattcgactgtcgcctcatctcttgtgattg

SEQ ID NO: 84972 - DNA, 80 bp, synthetic construct
  source 1..80: mol_type = other DNA
acatttgtatataattggcaaaaacacccttgtttctactaatacgagacgatataatctctagaggtccccgtaccagt

SEQ ID NO: 84973 - DNA, 80 bp, synthetic construct
  source 1..80: mol_type = other DNA
tgctgtgtgcaacaggcttgggacaacctcttattctagacacttgtaccattgaaggactaatctatggcaatccttct

SEQ ID NO: 84974 - DNA, 80 bp, synthetic construct
  source 1..80: mol_type = other DNA
tattgttgggaggaagagaatggtcctatatcgtcgagagaccatcagctgttaacggattgtgctatcccgggagtgta

SEQ ID NO: 84975 - DNA, 80 bp, synthetic construct
  source 1..80: mol_type = other DNA
agtgggacaagcaaagcatgttcagattcattctacagaagcatgagatggttgactcaaaaggacaacgcttaccctat

SEQ ID NO: 84976 - DNA, 80 bp, synthetic construct
  source 1..80: mol_type = other DNA
ccaagacgcccaatacacaaataatcaagaaaagaacattcttttcatgtggggcataaatcacccacccactgatactg

SEQ ID NO: 84977 - DNA, 80 bp, synthetic construct
  source 1..80: mol_type = other DNA
ggcctcttgtcaacggtttgatgggaagaattaattattattggtcggtattaaaaccgggtcaaacactgcgaataaaa

SEQ ID NO: 84978 - DNA, 80 bp, synthetic construct
  source 1..80: mol_type = other DNA
aaaaggtagctgcacagtgcaatgtcagacagagaagggtggcctaaacacaacattgccattccaaaatgtgagtaagt

SEQ ID NO: 84979 - DNA, 80 bp, synthetic construct
  source 1..80: mol_type = other DNA
ctcaaaatacattggcataaagagtctcaaacttgcagttggtctgaggaatgtgccttctagatctagtagaggactat

SEQ ID NO: 84980 - DNA, 80 bp, synthetic construct
  source 1..80: mol_type = other DNA
tttggacaccttcacaaactcatattccttttgtgaaagcgttccaaatctggacagatttgtgttccagatggctggtg

SEQ ID NO: 84981 - DNA, 80 bp, synthetic construct
  source 1..80: mol_type = other DNA
tgattctcaacagaggtggtgatgaaaacccacgcggcccagtcagccgtgaacacgtggagtggtgtagggaatttgag

SEQ ID NO: 84982 - DNA, 80 bp, synthetic construct
  source 1..80: mol_type = other DNA
gaaacctagtcttcaacacagtcatacatgagaaaataacatacaataacactgtgataaacaacataacaacaacgata

SEQ ID NO: 84983 - DNA, 80 bp, synthetic construct
  source 1..80: mol_type = other DNA
tgaaaatggggccttctacggaaggggtacctgagtctatgagggaagagtaccggcaggaacagcagagtgctgtggat

SEQ ID NO: 84984 - DNA, 80 bp, synthetic construct
  source 1..80: mol_type = other DNA
cgcggtgtagcgtccgcggcgcaccggggatcctaggcgtaactttcacgcctataagttgagattttaaaacttgaacc

SEQ ID NO: 84985 - DNA, 80 bp, synthetic construct
  source 1..80: mol_type = other DNA
caaagttacactcgcaagaattctttctgcaggattcaatctcgaccaggcatgataggagcttgaagccctctgttaag

SEQ ID NO: 84986 - DNA, 80 bp, synthetic construct
  source 1..80: mol_type = other DNA
cggtgatttgggcaaagatgcgcacagtggatcctaggcatttttgtcttagtcttctgcaaaacctgaaccatggctct

SEQ ID NO: 84987 - DNA, 80 bp, synthetic construct
  source 1..80: mol_type = other DNA
cggggcgcaccggggatcctaggcgcaactttcacgcctataaagtgagatttttaattaagcctgtctgcaaacatggg

SEQ ID NO: 84988 - DNA, 80 bp, synthetic construct
  source 1..80: mol_type = other DNA
caattcaaaatctaaatcaaacccatccagttccttagagactcaaaaaggaacgccaatggtcacagaattcaggagga

SEQ ID NO: 84989 - DNA, 80 bp, synthetic construct
  source 1..80: mol_type = other DNA
cccggggttcccccacggggggtcaggtctgaccctgtgcagtctacctatggtggtggtgctgttggctccactggtac

SEQ ID NO: 84990 - DNA, 80 bp, synthetic construct
  source 1..80: mol_type = other DNA
aaaaaatattttcatagaatataaagatgtaatagataacgctactctattatccattttatcttattcctacgacaaat

SEQ ID NO: 84991 - DNA, 80 bp, synthetic construct
  source 1..80: mol_type = other DNA
agctttaataaaaactgtattatctagaatcgctaataagtatgcttttacgacaaagattataagagtagatggagacg

SEQ ID NO: 84992 - DNA, 80 bp, synthetic construct
  source 1..80: mol_type = other DNA
ataattatgcagtgttacaattcaatacagaagtaactaaacaaatggtacaagatgtctcaaatgatgtacgtgacatc

SEQ ID NO: 84993 - DNA, 80 bp, synthetic construct
  source 1..80: mol_type = other DNA
gttattagtttctaaaaacacgatagtttcacgaggtattgctacaactgagaaggcgaaattaaactcatatgctccaa

SEQ ID NO: 84994 - DNA, 80 bp, synthetic construct
  source 1..80: mol_type = other DNA
tctcgcttgaaaaacgtcgtgctcaaatatcagcactgatgacaatgttgcaaaaaccagtaacatttaagtcaaataaa

SEQ ID NO: 84995 - DNA, 80 bp, synthetic construct
  source 1..80: mol_type = other DNA
ataaccattaatgatatactacatgatataaaacctttcttcgtaataagcgaagcgcatttgccaatacaatatcagaa

SEQ ID NO: 84996 - DNA, 80 bp, synthetic construct
  source 1..80: mol_type = other DNA
tacaggtgataaatctaaaatttataaacgtagactggatttatttactatagtagcatccaccgttaataagtatggtg

SEQ ID NO: 84997 - DNA, 80 bp, synthetic construct
  source 1..80: mol_type = other DNA
gtgttagtatcaactgaagctcagattcagaaaatgtcacaggatctacaacttgaagctttaacgattcaatcagaaac

SEQ ID NO: 84998 - DNA, 80 bp, synthetic construct
  source 1..80: mol_type = other DNA
attgaaaaagcttgaagacatacgtcctgagcaggcaaaaaagcaaactaaattatttagaatattcgaacctaaacagc

SEQ ID NO: 84999 - DNA, 80 bp, synthetic construct
  source 1..80: mol_type = other DNA
aaagtaataatattcttaataacgatgacaaaattaataaaaatgatactaaatcatcgctttctgataaagtactatca

SEQ ID NO: 85000 - DNA, 80 bp, synthetic construct
  source 1..80: mol_type = other DNA
tcgaatctttatgggatacgatcacgacttcaaattatatattagccaggtcggttgttccagatttgaaagagaataaa

SEQ ID NO: 85001 - DNA, 80 bp, synthetic construct
  source 1..80: mol_type = other DNA
ttgttttttggcaaagacgtaaatagattaaaagatgattcaatactatatattgatatcagaactgacagaaaggatat

SEQ ID NO: 85002 - DNA, 80 bp, synthetic construct
  source 1..80: mol_type = other DNA
ggattggagggaatggagaaaaatagtggaagaacaaacacttactaatttagatattgcatataagtacttagcaagtg

SEQ ID NO: 85003 - DNA, 80 bp, synthetic construct
  source 1..80: mol_type = other DNA
aactacagaaatacgatctgaattttatctactattagataaatgggacgttactaatattaagcgttttataccaaaag

SEQ ID NO: 85004 - DNA, 80 bp, synthetic construct
  source 1..80: mol_type = other DNA
gagtactatatgcatttataaatacagtaataactgaaaatgtgtttatccaatctccattcaaattaagaccattaaat

SEQ ID NO: 85005 - DNA, 80 bp, synthetic construct
  source 1..80: mol_type = other DNA
cagcgtagttcattaattacagtcaggattaacaatacgtttaaagatgaaccaaaagttggttttaagaacatatatga

SEQ ID NO: 85006 - DNA, 80 bp, synthetic construct
  source 1..80: mol_type = other DNA
aaacactattattacttcatatgatggttgtttaggtgtgttcggactatcaatttcactagcctcgaaaccaactggaa

SEQ ID NO: 85007 - DNA, 80 bp, synthetic construct
  source 1..80: mol_type = other DNA
ttactgttcataacgttctatatctgaactatagtattaaaacgttaaatatacttaataaatcgggtatcgcagcaatt

SEQ ID NO: 85008 - DNA, 80 bp, synthetic construct
  source 1..80: mol_type = other DNA
ccaatcacaccggaatatctaggagatctcaccaaattagattttctgaatcagctacatcatattcaggttacatcttt

SEQ ID NO: 85009 - DNA, 80 bp, synthetic construct
  source 1..80: mol_type = other DNA
tgagataatgcgaaaagcaaagcaagatttattcaaaatggaaatatcgacaagttatacgtatatgctatctgatggaa

SEQ ID NO: 85010 - DNA, 80 bp, synthetic construct
  source 1..80: mol_type = other DNA
atgctgctacagatgacgatataattattgaatacatttattctgatttactaaatttccaaaattttatgcttaagaaa

SEQ ID NO: 85011 - DNA, 80 bp, synthetic construct
  source 1..80: mol_type = other DNA
tttcctgaactttccagaaataaagcagtattctaatggtccatatctagtcaaagacacaatcaagttgaaacaagagc

SEQ ID NO: 85012 - DNA, 80 bp, synthetic construct
  source 1..80: mol_type = other DNA
tatctgtcaggcatcttgaaaatttggtgattagaaaagagaaccatcaagacgtactcttccattcaaaagatctcatg

SEQ ID NO: 85013 - DNA, 80 bp, synthetic construct
  source 1..80: mol_type = other DNA
gaggacaaacctatatcagatacgtatgtcaaagaattggtttcagagcttcgatggcaatataacaaatttgctgcaat

SEQ ID NO: 85014 - DNA, 80 bp, synthetic construct
  source 1..80: mol_type = other DNA
aaaacaataataagcataatattggaagtgattttaatctgctggaccagagaataatatggcaaaactggtatgcgttt

SEQ ID NO: 85015 - DNA, 80 bp, synthetic construct
  source 1..80: mol_type = other DNA
acatcatctatgaagcaaggaaatacgttggaagtgtgcaagaagctgttattccaaaagatgaagcaagacaaaaatca

SEQ ID NO: 85016 - DNA, 80 bp, synthetic construct
  source 1..80: mol_type = other DNA
caatatcaatatctactaaaccgaaaaagagaaaatccaaacaagaaagtaagagtagaaaatactatcttgatttaata

SEQ ID NO: 85017 - DNA, 80 bp, synthetic construct
  source 1..80: mol_type = other DNA
gtgatgagccaaaaatgagatcactggcgagttggattcagaatgaattcaacaaggcatgtgaactaacggattcaagc

SEQ ID NO: 85018 - DNA, 80 bp, synthetic construct
  source 1..80: mol_type = other DNA
atgcaggaccctgctggcaaagtctgtattcaatagcctgtatgcatctccacaacttgagggattttcagctgaatcaa

SEQ ID NO: 85019 - DNA, 80 bp, synthetic construct
  source 1..80: mol_type = other DNA
aatatggggaagacccgagaattgaaacaaacaaatttgctgcaatatgtacacacctagaagtctgtttcattgatgaa

SEQ ID NO: 85020 - DNA, 80 bp, synthetic construct
  source 1..80: mol_type = other DNA
gatccgagctatgagggggagggaataccgctatatgatgcaataaagtgcatgaagacattttttggatggaaagagcc

SEQ ID NO: 85021 - DNA, 80 bp, synthetic construct
  source 1..80: mol_type = other DNA
atggaatcagcaacaaagtgaactcagtaattgaaaaaatgaacattcaatttacttcagtgggcaaggagtttggtgat

SEQ ID NO: 85022 - DNA, 80 bp, synthetic construct
  source 1..80: mol_type = other DNA
gaaactcccctgtatttaactacaataagataaccaaaagactaacggtcctcgggaaggacgcaggtgcattaacagaa

SEQ ID NO: 85023 - DNA, 80 bp, synthetic construct
  source 1..80: mol_type = other DNA
tgcccaagcaaaaggtgacaagtaccctttgcatcaaaatggaccaggcagtaatgggtaaaaccattacattgaaagca

SEQ ID NO: 85024 - DNA, 80 bp, synthetic construct
  source 1..80: mol_type = other DNA
ggaatcaaagttaaacagggaaaaaattgatggagtagaattgaaatcaatgggcgtctaccagattctagcgatctatt

SEQ ID NO: 85025 - DNA, 80 bp, synthetic construct
  source 1..80: mol_type = other DNA
ttgtaatatggggtgtccatcacccgtctaacatagagaaccagagagccatctaccgtaaagaaactgcttacgtttct

SEQ ID NO: 85026 - DNA, 80 bp, synthetic construct
  source 1..80: mol_type = other DNA
ttcacgaaaacaacacttgggtaaatcaaacatatatcaacatcagcaacaacaattttgttgctgaacatacactagct

SEQ ID NO: 85027 - DNA, 80 bp, synthetic construct
  source 1..80: mol_type = other DNA
tcagtgaaattagcgggcagtgcttctctctgcactgttagtgggtgggctatatacagtaaagataacagtgtaagaat

SEQ ID NO: 85028 - DNA, 80 bp, synthetic construct
  source 1..80: mol_type = other DNA
cataatttcaatatggattagccattcagttcaaattaagaaccaaaaccagaccgaaacatgcaatcaaagcattatca

SEQ ID NO: 85029 - DNA, 80 bp, synthetic construct
  source 1..80: mol_type = other DNA
agaaaggaacacaacgaagataatgcacttagctaacatcaccatagagaaagaaacatgctccaaaacagtggagtaca

SEQ ID NO: 85030 - DNA, 80 bp, synthetic construct
  source 1..80: mol_type = other DNA
ctggacatgataaaaatgcaactgcaagtttcatatacgatggtagactcgtagacagcattagctcatggtctaaaaat

SEQ ID NO: 85031 - DNA, 80 bp, synthetic construct
  source 1..80: mol_type = other DNA
agtctaaacaggataaaaattaatggtgtgaaattggaatcaatgggagtttatcagattctggcgatctactcaactgt

SEQ ID NO: 85032 - DNA, 80 bp, synthetic construct
  source 1..80: mol_type = other DNA
aaaggggtaacagtatcatgctcccataatgggaaaagcagtttttacaggaatctgctgtggctgacgggaaaaggtgg

SEQ ID NO: 85033 - DNA, 80 bp, synthetic construct
  source 1..80: mol_type = other DNA
tgaacaaaggggtaactaaatcatgctcccataggggagaaagcagtttttacagaaatttgatatggttgacggagaaa

SEQ ID NO: 85034 - DNA, 80 bp, synthetic construct
  source 1..80: mol_type = other DNA
cgtatcaaatgctccgatggatgaatgttacgcgaaatgtcaaacacctctgggggcaataaacagtagccttcctttcc

SEQ ID NO: 85035 - DNA, 80 bp, synthetic construct
  source 1..80: mol_type = other DNA
atcaacaagggaatatcctcctttctcctgaggaggtcagcgaaacacagggaacagagaagttgacaataacatactca

SEQ ID NO: 85036 - DNA, 80 bp, synthetic construct
  source 1..80: mol_type = other DNA
ggacggctggaatagaatccgcagtactgagaggattcctaatcctagggaaggaaaacaaaagatatgggccagtattg

SEQ ID NO: 85037 - DNA, 80 bp, synthetic construct
  source 1..80: mol_type = other DNA
agggaaacaccacgctccctcagattacctggtggacctccctgttatcaaaggtcaaaattcctactgatggatgcctt

SEQ ID NO: 85038 - DNA, 80 bp, synthetic construct
  source 1..80: mol_type = other DNA
aaaattaagcatcgaggatccaagtcatgaaggggaggggataccattacatgatgcaatcaaatgcatgaagacgtttt

SEQ ID NO: 85039 - DNA, 80 bp, synthetic construct
  source 1..80: mol_type = other DNA
atggaggcaaaactgtttgtgctattttgtacttttactgcgttgaaagctgatactatctgtgtaggctatcatgctaa

SEQ ID NO: 85040 - DNA, 80 bp, synthetic construct
  source 1..80: mol_type = other DNA
cactcaaatcgcaattgacaggataagtaacaaagtaaactcaataattgacaaaatgaacatccaattcacttcagtgg
